United States Patent Application Publication US 2006/0134663 A1 - sequence listing, part 81

SEQ ID NO: 222622 - DNA, 1000 bp, Homo Sapiens
catgttcgagacgcctgagaaagtgtttgtggtgatggagaagctgcatggggacatgttggagatgatcctgtccagtgagaagggccggctgcctgagcgcctcaccaagttcctcatcacccagatcctggtggctttgagacaccttcacttcaagaacattgtccactgtgacttgaaaccagaaaacgtgttgctggcatcagcagacccatttcctcaggtgaagctgtgtgactttggctttgctcgcatcatcggcgagaagtcgttccgccgctcagtggtgggcacgccggcctacctggcacccgaggtgctgctcaaccagggctacaaccgctcgctggacatgtggtcagtgggcgtgatcatgtacgtcagcctcagcggcaccttccctttcaacgaggatgaggacatcaatgaccagatccagaacgccgccttcatgtacccggccagcccctggagccacatctcagctggagccattgacctcatcaacaacctgctgcaggtgaagatgcgcaaacgctacagcgtggacaaatctctcagccacccctggttacaggagtaccagacgtggctggacctccgagagctggaggggaagatgggagagcgatacatcacgcatgagagtgacgacgcgcgctgggagcagtttgcagcagagcatccgctgcctgggtctgggctgcccacggacagggatctcggtggggcctgtccaccacaggaccacgacatgcaggggctggcggagcgcatcagtgttctctgaggtcctgtgccctcgtccagctgctgccctccacagcggttcttcacaggatcccagcaatgaactgttctagggaaagtggcttcctgcccaaactggatgggacacgtggggagtggggtggggggagctatttccaaggcccctccctgtttccccagcaattaaaacggactcatctctggccccatggccttgatctcagca

SEQ ID NO: 222623 - DNA, 1000 bp, Homo Sapiens
ggttgtgcagagcagtactgtgaggtaggcaccgtgactcggctgcctgtgcagaaggtggaggtggcaggcggatggccagggagccatgagaagactcttcctgggcacggcgtggggactggacagaaaaccactgcaagccccaaggagccagctgaagcctcccaatccccagggcactgcagagtctgggcagaggtgggcgcataggtacaagtgctgctttgtcagcctcactccctgcagctctcagctccctgttccctgagacctggcctcaaagggctgacccagccatacgtagatcctggggtctttctaggactgtgcctccctgcttgacctatgctccaggaccctgccctcaacccttgtcagctccctaagtcttcctgtttcccagtctcagattgagtgggtgctctcattggcctctctagctaggccgtctccctggtcagcttccttgagcctgggccactcctccctggccttcttacctctgccaagagcctccagatgtgcctgcagcctagtccctgcccaagcttctcccccagccaccctctgcccctgtggtagagcccactataggcccaggcgccttacgtgcttctcccctggacctatgtgcatccctcacctgccagttatgtggctgccaagccccacaggctgtcatggtggctcttgccacacttcccttcctgagctgacctgacctcactgccacctcttgcattgggatcctgagggctggcccctgctcactgatgggccctcccaggcccgtcaagccctggtgaaggagcttagcttgtcttcttggcaattcacaatgcctcactccacaccctaaaactggagcgtcccctatggtctcctgctgtggcttgggtgccgggcgtctcccgcctccaggatctcctctcacctgcccccattaaagctctgccactcaaaaaaaaaaaaaaaaaaaaaaaaaaaaaaaaaaaac

SEQ ID NO: 222624 - DNA, 1000 bp, Homo Sapiens
ttattaccgtacatatttctcttgttttatgtaagcggatgtatatcctcttgttttatacaagccagttcccacttatgagggtacttttttggttttgctggcttaatattgtgtattggtcaatgaggccatttttacatttattacgttacagagttcatggaggttcacctttgtgactgattggtgataaaagatagccaagtgtcttacaagcagcctctgagtcaagtgttctaattttggaacaaagcaggttttactgcttttccagacacaaggctgctaaaccaattaagaaaataattaatttctttcaagcaactaaaaaatatatggtaatttaaaggtgtctgcttatttggttgaacaatttaattgggaaagtttgtcatcatttgaaaaaggaaatataaaaggaacaaccatatagccaacctgtggtctggcagaaacaacgtctctagcaatagtaccaaagtaagtaatggagtcttttttttggcaggtctgcagtaaaagataacattttcttttcttagtcctcctgctctcaacccccatattttgcctttgaatacgtgggttttagtatatatagcccaaaatggtaactgtctccagaacagcaaccacattgaattcttgtgacttaggaaagcttcttatagttgctgacattaattgcaagaaataactatatactactttgagaagtaaacatgtcaaaaaaaacaaagttcagatatgggacaaaatttaaaaattcagtaacatttataaacagaattgaatgaaaagagttacagaccaacttaaacatcaattcgtgtcagtaaactgacttttgggggtaatgatcattgttttgtatctcaaaagtattgagtttagaaatcagttatatgatactacctttgtatgtctgtcttttcccgtgtatttttaaataactggtgatctataatttaataaaatttttcgttggtgtaatatt

SEQ ID NO: 222625 - DNA, 1000 bp, Homo Sapiens
tctccaagaggacccggaagtaatcacataggaaatgataaggaagaccaggaggagctcttcgtagtccagaaaggtagaagtgggagttgtttacttaattttactgtcataccatgctattacctacactcctgtgtgcagtgggcattcagtaaatgtgtgttgaaggactgggacgtacgtggaggctgctggacctggtcagagactgatgtgccttagcggcaatggttagagcttttcagtgcatcccacctccctgtcgcccccatgctcggcttcctcacattcaggagcctgacttggatcagacttggggctgcacagtggagcaggtgggttcccgtgtcattagtaataaggagagggttgggggtgggcagggctccagaaagtcagcagtgtgcctgggcacccaccccatcctctacctgccacacctcagagggttcctacagctgcacacaagcagttgagagttgatgaccaggcccatagggctcccacagctggttcccaggccagtgagtgctgtgagaatacagtagcacaagtccttgttctctgaagagtgggaaggagaggagtgagtgaagtagcctgtcccctgcaggtcctctgcgatggcattgtctcggttcccgcagtgctgcagtgtggaagggagtgccccatcctcattacagatgacacactggagtgtggaggggtcgatgacttgtgcagggtcatatggtacctaaggggcagatctcagacttaaacacaattgatgtctaacccctagacagtctttttagtgccctctgctctcagtcttgttgccctagtatcaagcaatcttagacaaacatcctgaattcttacaaacttacctctaaactctgaggataaagttgccagtccttttaatggtcagcctaatcattctgtcagcctaatcgggtaattgctttttttaataaatacacataaaaaccaaaaaaaaaaaaaaaaa

SEQ ID NO: 222626 - DNA, 1000 bp, Homo Sapiens
cagctgtgaccagcgacagctctcagggtgtgatgagccacaaccccaccatagcactaagaggaaacctaaatgtcctgaagacagaacttcagaagaaaactacctgacacacagtgacacagccagaattcagcaagcatttcctatgcacagggagatagcagtggattttggtttggaatcaagacgtgatcagagttccagcgtggcagaagaacaaattggcccatattgcccagagaagagcttttcagagaaaggtacagacaagaagctagaaagagtggaaggagcagcagtcttgcaaggaagcagggcagagacacagcccatggcccctcactgccctgctggaagggctgatggagctccccgcagcgtggttcctgcctgggtgacagaggctcctgtggccactttagaagtgcggtttactcctcatgccgagatggaccttgggcagctcagttcacaagatgttgatcaggcgtcatttaaatattttcagtcagcagaggaagcaaagcgtgccattgaggctgtgctgtcagcggatcctcggtctgtgtaccgccggaagctttgccaggaccgccttttctactttactgtagacatagcgcatgtcacttgctggtttggtgatggctttgcagaggtgctgaggatcaagccggcttctgagcctgttcatatgactggccctgtggggtccttggtgtctctagggtcttaaggagcctccctcatgtctttaaggtagcatcattgatctttggatgtggcttttggattttctgaacaagctaatgttgtgtcgagaagcaacactttgtgatctcatggctttgattgatttgggctgttcaaaatgtttatttgaaaaacgtatacattaataaacttagcagagagatataaaatacagagaaatcaccaaatgctttttgatctgttgatattaaagaatcaaaaggtgaaaaaaaaaaaaaaaaaa

SEQ ID NO: 222627 - DNA, 1000 bp, Homo Sapiens
tctggtgttcatcgtggctgaaggggactccctggtgtgctacaatcccttgctagacagcttcacccggctttgccttcctgaggcctggagctctgccccatccctctggaagattgccagctgtaacgggagcatctatgtcttccgggaccgatataaaaagggggatgccaacacctacaagcttgaccctgccacttcagccataactgtcacaagaggtattaaggtgctgcttaccaatttgcagtttgtgttggcctaaggctgtggggaggggaggagaactgctcactccttttccctccccatacaaactcaaagtcccctgggccccaattcagagttatgttttttttggcacatactagaaaggcagtgcctcagcccttccctgaatccatggaggtgttctgtttggggctttttagactgctgctgctcagctggttgcttgaactgacagtaggccagcctgttctctgccattccctagtcatcctgtgcctcaccacagcttgcttagagcaagccttttctcagaccttaggcacagcctctcctctttacctgatcaatgttaaatgtaagcacccctgatcccaggacataaggaaagatgcccaattgtacttttgttctatagcctgtgaaatggctagttgatcatttttccacaaagaattaggtgttaagagttttccttcaggctttacttaggagaatggactaagctgaaggtgtacttcaccagcaagagtcaactctagaattcaggatgttccttctattgttttcttagccatctgtcaggaaatgtaactttggttttatttttggcttattccaaggggtaagccagaaaatagaaatgattatttctgattaatagcagaaactttttcaatctcaaatatataaggtgtctgctcttttaaaagctctaagctaagtcaagagctaggaactgttgatacaaataaaagtttttgaaggg

SEQ ID NO: 222628 - DNA, 1000 bp, Homo Sapiens; identical to SEQ ID NO: 117403

SEQ ID NO: 222629 - DNA, 1000 bp, Homo Sapiens
tgtggccatccttaatgggatgatcttctcaaaggactgcaaagaattgaagcgttgtgtctgtgagagaagggcaggaatggtgaagccagagagcctccatgtcccccctgaaacattaggcgaaggtgactgattcgccctctgcaactacaaatagcagagtgagccaggcggtgccaaagcaagggctagttgagacattgggaaatggaacataatcaggaaagactatctctctgactagtacaaaatgggttctcgtgtttcctgttcaggatcaccagcatttctgagcttgggtttatgcacgtatttaacagtcacaagaagtcttatttacatgccaccaaccaacctcagaaacccataatgtcatctgccttcttggcttagagataacttttagctctctttcttctcaatgtctaatatcacctccctgttttcatgtcttccttacacttggtggaataagaaactttttgaagtagaggaaatacattgaggtaacatccttttctctgacagtcaagtagtccatcagaaattggcagtcacttcccagattgtaccagcaaatacacaaggaattctttttgtttgtttcagttcatactagtcccttcccaatccatcagtaaagaccccatctgccttgtccatgccgtttcccaacagggatgtcacttgatatgagaatctcaaatctcaatgccttataagcattccttcctgtgtccattaagactctgataattgtctcccctccataggaatttctcccaggaaagaaatatatccccatctccgtttcatatcagaactaccgtccccgatattcccttcagagagattaaagaccagaaaaaagtgagcctcttcatctgcacctgtaatagtttcagttcctattttcttccattgacccatatttatacctttcaggtactgaagatttaataataataaatgtaaatactgtgaaaaaaaaaaaaaa

SEQ ID NO: 222630 - DNA, 1000 bp, Homo Sapiens
gagacagaaattcagtgacgaaggtgcgttgtaggggtattgatgtgccccaggtagtgccagcagagtagggaaaactgcatttgcataaaaactactcttgacatgattgttcattttacaaaaaaattccattaattaccaagccctcacccagcccatgtgtgataggatttatgtaggaagaaacttgattttcaaataattttttaaatgtatctcttgcctaaaggactatatacatctaataaagtaacactgtgtcatcttctggagttatcaaaaattgtatacaatcaagacaacacaagaattattttatttttgagtgcaaatacaggtactgttggagttgatgggcaccatgctttctcatgaagtagcatttccctaccatcaagccattgttttgtgccattcaggagaggaaaaaaaggaatttatgctgtacatttcagttcagtgtatgaccaaaagcaatatgtttataagaagatgtttgacatactaattattttatatcatttaaaccatactgtagcaacataatatatggagctaatttgtagaattatttttacgatttccaaacaaatgtactgtactgttatataatttattgtgaggaccttctcatggaagccattaggaaaacaaactagaggtaaatatcacattaatctgtattatcaatttctcatagacactgtgctaatgtgaattttaaatgacctgcatcaagtcttctgatctcagataactcagtacagatagcaattagtcagctgatttgattacaatggagtaaccgacaatatatttatttataaagcacatattcataataacgagaagaattcagaaaaccacttaagcaagacccttctgaaataaaaaatgttgctttttaaatagtttgtcctaaggtgtttaaaacatgtcaaccttatgtaaggaaaaatttcctggtccaaataaagttgaagtttaagaaaaattg

SEQ ID NO: 222631 - DNA, 1000 bp, Homo Sapiens; identical to SEQ ID NO: 117406

SEQ ID NO: 222632 - DNA, 1000 bp, Homo Sapiens
taagagattataactccattttacaggttctgaatgctcagagtctatattaaggcttataaagtttttcctgtgatcagtaagtgacacatttaagcagacattcttttcaagttcatgacttagattcctttacaaatttagttctcaatctttaaaaaccacatttcattatgttggttaattattataaattttaagcactcatttctgcaatcaggtttctcagaattttttttttttaaacagaagagacattcctttttccttgttacatccaaggggggcacaggggtgggtggaaaggaatgtctaaaaatgaaatcccttgatatagagggacctagacggacaggatatgctaaaataatttcaaattctagcacaattttagagtagaataagtcatttttttagactaataaaattaatggctgtcatgttcactctgaaaaaaatctaaatgactgaaatgtacagaaataaaaattagcaaacaattattctagggatattttcagattttacttcatttcttgaaatgcgtgtgccatatgcaattgcatttcttgtgccaagaaactaatagaacttatttcactttacctttttttaaaatgtgaatttagttattatagttcaattttatggccttacagatggcttttattttgtttgcagctgacactgcagttcctttcatgcaaaataccataaactgtttgatgaaaatcatgcccctaatggaaactctctagtttttccatataactatcctactgtacatgtttaaacatattttatttttgctccaatggcttaatgtgaaaagctcctgcagataagtggacctgtcatgtggttaatcttgtttaagccaattcattaactgtgtactgatactgatgctatgttttttttaaatggattttattccaggtgaactttttttttataataatgttcgtctaaaataaaaactacataatgaaaatgaaaa

SEQ ID NO: 222633 - DNA, 1000 bp, Homo Sapiens
cccacatcagagggatgaatggcaggtctgtcccgccagctgtgtgctctctcccacccgaagaaagcagcagagactcagacggcggagcctggaggagcccacgcagtctgttcccggcacccggtgcgtgtgaagggacttgagggcagcgagatggaatcagcaagagaaaacatcgaccttcaacctggaagctccgaccccaggagccagcccatcaacctgaaccattacgccaccaagaagagcgtggcggagagcatgctggacgtggccctgttcatgtccaacgccatgcggctgaaggcggtgctggagcagggaccatcctctcactactacaccaccctggtcaccctcatcagcctctctctgctcctgcaggtggtcatcggtgtcctgctcgtggtcattgcacggctgaacctgaatgaggtagaaaagcagtggcgactcaaccagctcaacaacgcagccaccatcttggtcttcttcactgtggtcatcaatgttttcattacagccttcggggcacataaaacagggttcctggctgccagggcctcaaggaatcctctctgaatgcagcctgggacccaggttctgggcctggaacttctgcctccttcctccgtgatctgccaggctcgtgggcactttccacagcccaggagagcttctgaaaggacagtatagctgcccttgctccctacccacagcacctgagttaaaaagtgatttttatgttattggtctaagggacttccatcttggtctgaagtcctgagctcagacgcaggtactgccagccataccttcctggtagcatctgctggacctaagtaaggcatgtctgtctaaggccaagtctgcccggcttaaggatgctggttctgactctaccccactgcttccttctgctccaggcctcaattttcccttcttgtaaaatggaatctatatctataaaggtttcttcaaatccaaaaaaaaaaaa

SEQ ID NO: 222634 - DNA, 1000 bp, Homo Sapiens; identical to SEQ ID NO: 117409

SEQ ID NO: 222635 - DNA, 1000 bp, Homo Sapiens
attccattttttggtctttttgtcttttttttctttttttttgagacagggtcttgctctccttgttcaggctggagtacagtggcacaatcacagctcactgcagccttgacctcctaggctcaagctatcctccaacctcagcctgccaagtagctgtcaccatagctgttcatcaccatgcctagctcatttaaaaaaaaatttttttagagatggggtctcactatgtttcctcatctggtcttaaacttctaggctcaagcatctacctgcctcagcctccagaagtgctgggattacaaatgtgagccaccacatctggccccattattttatttttggtttgtattatttttatttggccccattattttaaataggaaaaacagtatgttttcagtccattaaaaaatcctaaccaaatttaatttgaattcaacttaatttaagccacctaaatgacctctatcagggatttctgaataatgtaaaacactcaaaagccagttaacagttaattaccagatatgtttgtgcatgcagtgattttgaaaaatataatacatgaattatgctttccttctatgctttaaggaacagatactatagtgacaataaatgtaatacattagtacataatggacgcaaatgacagataaaaacagctttaaataatttgaacttgttaattagaatgttgttgaatgagggctgatggtcagaaattaatgatggtgagaagaggttaatggtgttcagtgagtgaaggtgagttagaataatatattggagcagcaatcaatcaatgcctacagttcttctatgattccaagcatctggtgcacagaactcaagacctcaaaattgggttactgtatacaaagctgttcatagaaaaacaaatgttaccaagaaatacttaccttttctatatgcagtgttatctcttgtcttctaatacattatcttttttggtttcaaaaaaaaaaaaaaaaaa

SEQ ID NO: 222636 - DNA, 1000 bp, Homo Sapiens
ggacccagctgcgggacaccattgtgcactttggggagagggggacgttggggcagcctctgaactgggaagcggcgaccgaggctgccagcagagcagacaccatcctgtgtctagggtccagcctgaaggttctaaagaagtacccacgcctctggtgcatgaccaagccccctagccggcggccgaagctttacatcgtgaacctgcagtggaccccgaaggatgactgggctgccctgaagctacatgggaagtgtgatgacgtcatgcggctcctcatggccgagctgggcttggagatccccgcctatagcaggtggcaggatcccattttctcactggcgactcccctgcgtgctggtgaagaaggcagccacagtcggaagtcgctgtgcagaagcagagaggaggccccgcctggggaccggggtgcaccgcttagctcggcccccatcctagggggctggtttggcaggggctgcacaaaacgcacaaaaaggaagaaagtgacgtaatcacgtgctcgatgaagaacagttggcactttgcagatggccagtgtcacggtgaaggctgggttgcccccacgggtctagggagaacgaactctttggggatgacattttcaccgtgacatttttagccatttgtccttgaggaagccccttgcactgctgcggttgtaccctgatacggcctggccatcgaggacacctgcccatccggcctctgtgtcaagaggtggcagccgcacctttctgtgagaacggaactcgggttatttcagccccggcctgcagagtggaagcgcccagcggcctttcctcgctcaccaggccagtctcagggcctcaccgtatttctactactacttaatgaaaaagtgtgaactttatagaatcctctctgtactggatgtgcggcagaggggtggctccgagcctcggctctatgcagacctttttatttctattaaacgtttctgcactggcaaaaa

SEQ ID NO: 222637 - DNA, 1000 bp, Homo Sapiens; identical to SEQ ID NO: 117412

SEQ ID NO: 222638 - DNA, 1000 bp, Homo Sapiens
tcaagtcccgctgacgtctgagctttgatgcttaagaagggtgaggcagggagcggacttcttattttcaaccttcagtaaaacaaggtgttgctttgtatatcaaaagctccaaccatgtcttttccccttcagcctgtgggtggcacgagcaaggactgacatccgcacagggaggattgtctgtttggctgacacagcagcagcctttcccacccagccactttcttcacagggattaggaggctcagtccccaacggctggcaagactcagggtcctcagtggacatggtgtgggtgacatcagaagggtgccacatcagtcccctccccaacctcagtgactgacagaggatccggatctcagagcctgagaccaggtttattggggcctggcctgtcctctaagtcaagtttaggaaaacaaggataagattctgtcataggcatagagagttgcacataaaaaataccgaagaaaacccaaaattcaatcaacaattctgtcttattgaagagttgctaggattcagagtaaaactcaaaggattcagtttgagcctagaatgatggttagacttgtagtcactgggcttttgttttgctttatggaaatcattgaaggtctggatccctttctctgaatggagagattgagagggatgtcgggcagttcccattagatttagtggccttcatgttattcagaattgttttggtgatacctcacccctgtaatcccagcactttgggtgggtgaggcaggcggatcacttgaagccaggacttcaagaccagcttggccaacatggtgaaacctcatctctactaaaaatacaaaaattagccaagtgtgatggcacatacctgtaatcccagctacttggaattggaaatcgcctgaacccaggaggcggaggttgcagggagggagactgcaccactgcacttcagcctgggtgacagagggagactctgtcttaaaaaaaaaaaaaaaaa

SEQ ID NO: 222639 - DNA, 1000 bp, Homo Sapiens
caatgcagcccgggcaacagagctagactgtctcaaaagaacaaaaaaaaaaaaacacaaaaaaactcagtcagcttcttaaccaattgcttccgtgtcatccagggccccattctgtgcagattgagtgtgggcaccacacaggtggttgctgcttcagtgcttcctgctctttttccttgggcctgcttctgggttccatagggaaacagtaagaaagaaagacacatccttaccataaatgcatatggtccacctacaaatagaaaaatatttaaatgatctgcctttatacaaagtgatattctctacctttgataatttacctgcttaaatgtttttatctgcactgcaaagtactgtatccaaagtaaaatttcctcatccaatatctttcaaactgttttgttaactaatgccatatatttgtaagtatctgcacacttgatacagcaacgttagatggttttgatggtaaaccctaaaggaggactccaagagtgtgtatttatttatagttttatcagagatgacaattatttgaatgccaattatatggattcctttcattttttgctggaggatgggagaagaaaccaaagtttatagaccttcacattgagaaagcttcagttttgaacttcagctatcagattcaaaaacaacagaaagaaccaagacattcttaagatgcctgtactttcagctgggtataaattcatgagttcaaagattgaaacctgaccaatttgctttatttcatggaagaagtgatctacaaaggtgtttgtgccatttggaaaacagcgtgcatgtgttcaagccttagattggcgatgtcgtattttcctcacgtgtggcaatgccaaaggctttactttacctgtgagtacacactatatgaattatttccaacgtacatttaatcaataagggtcacaaattcccaaatcaatctctggaataaatagagaggtaattaaattgctggagccaacta

SEQ ID NO: 222640 - DNA, 1000 bp, Homo Sapiens
tcgtttccgaactgcctctccccaaagaatgtgaggcattgtcaccttgttacagctatgtgaagcagagctgtcacaacttttcctgtctacaggcaggaaaaccaggatggagaagggcaacttgcttattaagatcacccagcaagttaggagtgatcagaaccagtgaagtttccatttttcatccattgctgccctgtgtgtgaacaaatgtgactccatatttattacacagcaaggactgctgtgtgtgggtgtgttcctcagaccatctctactctttttggttaggacactaggttcttcccagcatatgagtgagaatattggtggtattttgggctcctctactgcacaagggccagtccccaagtctactctgattgattgtcatgggcacccacacagatcaggacaccctttgaatttttgtttgacatgaactatttaggtgttccaaaaccttgggatctcaatgtgcaaactccttggactccagacccctgtctggttggcactcccagcagtgtgtggtttcatcaggaaatccttgcagcaggggtttagatggttccttcaggaggtgggaagcctccatagcattgaaggccagcctgcatctcgcggtgtgtgtccacttctcccctcactttcccctcacccatccctttaaagtgattggctgtgaggagcacagagggtggcaattccatctgttatgggctcagaagacatagccgccatgttgatttcacattaaactgtgtaaaatgtggaaaagactcagcatgttggtcaaacaataaactgtcctaattctcaaaaaaaaaaaaaaaaaaaaaaaaaaaaaaaaaaaaaaaaaaaaaaaaaaaaaaaaaaaaaaaaaaaaaaaaaaaaaaaaaaaaaaaaaaaaaaaaaaaaaaaaaaaaaaaaaaaaaaaaaaaaaaaaaaaaaaaaaaaaaaaaaaaaaaaaaaaaaaaaaaaaaaaaaaaaaaaa

SEQ ID NO: 222641 - DNA, 1000 bp, Homo Sapiens
gtgcgcctgaagctgtggttccctcgattcatgaacgtcaaccccttcccagtgccccgggacctgccccaggaccctgtggagctggccatgtttggcctgcggcacatggagcctgaccttagtgccagggtcaccatctaccaggttcctttgcccaaagactcaacaggtgcagcagatcccccccagccccacatcgtaggaatccagagtcccgatcagcaggccgccctggcccgccacaatccagcccggcctgtctttgttgagggccccttctccctgtggctccgcaacaagtgtgtgtattaccacatcctcagagctgacttgctgcccccggaggagagggaagtggaagagacgccggaggagtggaacctctactacccgatgcagctggacctggagtatgtgaggagtggctgggacaactacgagtttgacatcaatgaagtggaggaaggccctgtcttcgccatgtgcatggcgggtgctcatgaccaggcgacgatggctaagtggatccagggcctgcaggagaccaacccaaccctggcccagatccccgtggtcttccgcctcgccgggtccacccgggagctccagacatcctctgcagggctggaggagccgcccctgcccgaggaccaccaggaagaagacgacaacctgcagcgacagcagcagggccagagctagtctgagccggcgcgagggcacgggctgtggcccgaggaggcggtggactgaaggcatgagatgccctttgagtgtacagcaaatcaatgttttcctgcttggggctctcttccctcatctctagcagtatggcatcccctccccaggatctcgggctgccagcgatgggcaggcgagacccctccagaatctgcaggcgcctctggttctccgaattcaaataaaaaggggcgggagcgctgttggttgtgcgcaaaaaaaaaaaaaaaaaaaaaaaaaaaaaaaaaaaaaaaaa

SEQ ID NO: 222642 - DNA, 1000 bp, Homo Sapiens
tactgggactcgacatttttctggggattgaaatctttagtccttggagctgtcacatagcaggggcaacctcacactgaaacaaaggaagtgatgtcccattattatccaccctgagccaccataatatgctgtttacatttattttcttcagcctgtgcaaaacaaagcaatggaaaaggaaactaaaaaatatacatactagtaccattatcttcttttgcctaaaattactaatgcaccacgtcagtctgcttccttcaggcatcattctcaattcatcaggacttgtattagcaggttctggctagagagactatctcctgtcatcacgatcaattaatgttttctggtgatcacatcaggccctatctaagaagctcatggtatacaagggtcacccaaatagctgagtgcagtccttgctcatatttccttcatcttaaccccgcaaacaagaattaagatgatcccaataaaagaaaaattgctcaggaaactgaacctttttctgaaccaagcactgtcagcaaatctcaggtattagagcaactatggttgattgaaaagtgtctcaaaatctgggccaagaatgattgctaggtccataagctaatttgtctggccttgccatttacgtaagccaaagaaagtcactcatgagtaaactatagaaaacgttcagacccatcctgttagtatgtcaaatcaactaagactggcagggtattaactccattccaggtgacatggataaagagccccattattttcacagtgccagcctctacctaaggaaaccctagaccttggaaccagtttcctggtagggaactgctgacagtttcaatgctgacagttggagccaatgcctcatagtgtaaactgaaagaaaaatagttgctttttaaaatgtcagcaagaaggcctgcctcatcttaacaaagcaaaaaaaaatgctttaattcaaattaaaaatcatgatactaaaaaaaaaaaa

SEQ ID NO: 222643 - DNA, 1000 bp, Homo Sapiens
cactgagccaaatcagagatcttaaacattcagtcagtcatcaaacattattgagcacctaactatatgacaggcacttttttagagactgcggcttatcctcatcatagcaacctcggtatctttaagttctccacataacagtcaggattctactgaagaagcttttgaagtttgtggtaatcgtctgatcatataaaccacccatttcagagtagtgtttaagtactgtgaccaacactccacttgtctcttaactcagctttcaagacattccttaaccatcagagcagaggaggaaagactcactacctcagaaaaatctcaaagaatagtccaatttcctgcttgccaaagcataatctgccttttggtgcattacttggtcaattcagggttgaggagactgttggggggcatttataatgtatgaaagttaaggaagggggtgaggatgtgggttgggacaggtagtacctaaagaggagcgaagggatttatacaacatttttatcatgttacaaaacagtatcatgaatggcctcctttttagttcaactgtttctttaaaatgcatttactgattaaaaataagaactgaccaatagctccaagtgtcacacaccagaacattaagcctaagtcctcaattcataagttatcattctagacaagtttctttacaatggaatactttctatggaatcattataattctgttgtgtggaactatcaagctaagagtcactaaactttcttgaaaaggttgtgtgaaatatgacagctttctaaattaatttgtatagtcatttaaaattttttcttctctggcaactgtccaactggaatccagatttaaggtgataaaagctctaagtttcttgcagtctttttctcagcttagttccagagagaaaaaagctaattttcctaaggacacagcaagaatattcattaaggatattttctaaaacccacacttgagaaaaccacccaatga

SEQ ID NO: 222644 - DNA, 1000 bp, Homo Sapiens
tcaggcttaatctaagtgttaacttttttttctggtgcttttttggattgatgactgtctcactttgactatacccatgttttgcatgcaatgactcatgcatggttttcttaactagctaatattaacaatttattccatataaaaatggaattttgcaacatcctttaataaggtgagggaagcatgaacctcagacttctggcactattacatagtaagcacatgaagtagtttgataataaatagcagttctagtacttcacatttcacccgtgtgtgcaatgcctttttctggggggtggggggtgagggaaaacctggtagtgaatgtgtagttggggaataaagaaaagcactaaatcctgccctttttgtgtggtttccttttgatacaactaggttattcataatgtatacctagaaaagtgaaattgaaaataccaaaagatgtatcatttttatttgaatccatcatgcagtgtacatttcagataatttccttcagtctccagataggagtgtatccaaacatctaattttatgtgcactgtgtatcttatatgaatgttttattttttataccacatgcaaaaatgtccatatgcactatttaaatgttttaaataatatattccttctttataatgctaaatctatatgagtaccatatttttataagtcagtggtctgactggtttcattttagaattaacagctgcttcaatatgttattcaatgttaatgtttggctgtgagtagaatatgtaaaagtggcatggcagcacttatgctctgtgacagtattgtgtgtcatagttgagcagtagctggtagaattaggcagttggtgatagttttactttggtacaaataaaaactgtatatctatatacaaataatatatagatatatatgtccaccagtataatggcattgctgtgtctggcacttcattgtacagacttttataataaaagaacttgaaagttctaaaaaa

SEQ ID NO: 222645 - DNA, 1000 bp, Homo Sapiens; identical to SEQ ID NO: 117420

SEQ ID NO: 222646 - DNA, 1000 bp, Homo Sapiens; identical to SEQ ID NO: 117421

SEQ ID NO: 222647 - DNA, 1000 bp, Homo Sapiens; identical to SEQ ID NO: 117423

SEQ ID NO: 222648 - DNA, 1000 bp, Homo Sapiens; identical to SEQ ID NO: 117424

SEQ ID NO: 222649 - DNA, 1000 bp, Homo Sapiens
acaaattttcaacaatcattgtagaaactaagggggagaaagtaatctcagttgttttagaaacgaaaaagttaagcattgtttacttgaagtgggcagggaagcagcactgagtaaagttcaattgagtggttacagtctagggcagtggttcccaactctccgatcagaatcatctgggaagcattttcaaacagcaaagtactttgaaaaccattattaaatagaattatgcatgaattactgtttcagatcctttaatgtggtagttggtaataataagatgaaattcctctgttgttagtaaaattatgaaattgaagttctgcagcatgtcaggccaggattattagggagattcctcgaaactagtgtgtgtttattaaaaggagaaaggataacaatagaatgttctaaaaccagaagtccaagtgcgtgtctacttatgggaccaataaataaagaacagacatttgatttgaggtgaggtaaaagcctgaaacatggaatggcattctgttttgatggattttcatttcttcgcacttctgagacggcaaagccaaccacttagaagccttccacatctttgtcacctgcctggctcctgctctctgatgtacctctgggtagtgagatggaaatggtgcctgcagaagttggggagaaggatacttttgcacagcctccatgatgtctttattgcaaatatggatgacaagggtctctgttacaggggcctcagagcaccttcgtttctcctctagaccagggacaggtgtagagataaggactggcaaccagagcctcagcatccaaagatggactgaagtgggatggctgacaggcacataacttacgggaaagggaatttcatacatacgatttttgttttgtgggtaggagggcttatcatcaacactgattttataatctgacaataaatgtctttcattaaagagtttacctaaatgaaaaaaaaaaaaaaaaaaaaaaaaaa

SEQ ID NO: 222650 - DNA, 1000 bp, Homo Sapiens
gtcacagcttagctgggcacagtggctcatgccgataatcccagcaattcagaaagctgaggcaggaggattacttgaggccagactgggcaatatagcaagaccccatctctaaaaaattaggcatggtggtgcatgcctgtattcccagctactcaggaggttgaggtgggaggatcacttgagcccagaagttcaaggctgcaatgagccatgattacaccacggcactacaaccttggtggcacagtgagaacctgactcttaaaaaaaaaaaaaaaaaaaaaaaaaaaaagataactagaacttctagaacatcttgtttacagttagccagaaactatacaagtggtttaacatgcattatcttactcaatccatacaaaagtcttatggaggtgttagcactctttctactgatgaagaactgaggtacttcataaaaccacttacccaaggtgtcttgagtctggtacaactggcattcaaatctaggtcagtctgcccccagagccactacccttacccctcactgaatctgcctttatattgttgagcccatgaccccaaactgctctttccaatttgaacttccagggattttattgtgaacttacatagcaacattaaaatgaagttgaattgtttttaatggcaacgccgtctgtctcctctagcttaccgcttctcacctttcaaccccatctgtggcctttgtccaggcccacagcttagccatggcttccctcctgcatccctgccgtgggttgctggcctcacacttgcagcagctggacagtgattttagaaggccaccagtccccatagctatgtgacaatgagaagcaaacttttttgtgacagattgtattggcataggcatgatagatggggattggtacgttttgaatcagcatttgcaaaaaaattgtcttgaattttaaaataaacaacaaagatttgttcattgagtgcaaaaaaaaaaaaaaaaaaaaaaaaa

SEQ ID NO: 222651 - DNA, 1000 bp, Homo Sapiens; identical to SEQ ID NO: 117427

SEQ ID NO: 222652 - DNA, 1000 bp, Homo Sapiens
agaagtacatattgaggttttaatggtggtgatagtgagttttgtggcaccagctgttttttattttaaactttctgagcatccggcaaggtacaggttttgatgttcaagttttattgggataagatcttttgatcccaaggtcaggtggatggaatttttggatttatatttgttccttgagtcttcagggcagtgtctccatgagggttttcctgttgaggggcaccacatacaatagtgtgaagtaggtatgaggggcagtcattgtattctatagtttttttatgtagtctacatttctcagatgtatccccattcggttttattctcagaactgttactagactcatgacttggaggccaaaccttaaatccagagatagcagcctcgatagggaccttaaaaggattcacaaaaacttttgccacacttggtgcctaggccctgttcctaataaccccttctagggccgtttatccaacatttagatgccttcttttccctccctaatttgtagccagtccaacctttcattccttggaggatttagttttgggataaaattttggtccttgggcacagagacattcactattaatgaagtaacccttgggcatgactccaatcccagaattgctcactgagcgctatgccaccgaagcgttgacctgaacatattagtgcaatccagtccagattggacctttgatcctatgtggaagggctgttttttaagaaaaaatttttggtaaacagtattgtgtaaaattgctttttgtataccaatatatgcatgttttgtgcatgagtagtacttgtgttgatactcctgttgatgttaaattactatataatataaacagtatgtgtttttatatatcattgtgtaaatttaatataacatatgcagtaataaaccatttgttttactgctgttaagtttgttatttgggtataaaaccagatgtttacacctgtaaaaaaaaaaaaaaaaaa

SEQ ID NO: 222653 - DNA, 1000 bp, Homo Sapiens
acataaatttgggaaattctggactaagacttaagtctcgttaatcaaatctctttatagttaggcttctgtacattatgtatctccagtagcaatgttgccatattatttatttcccaaacttagtggacaatggagtcatttctacctagagtaccagtaaacatctcccagtgtgctatagtagaaaatgtctactcctcactgctgacatgttaaacttactcttggtttagagcatgtgtagaaacacctaaggtagctctatgctaaataatgaagagtagcacaagaatgaatgtatttgctgatacgttgctcacattctcaagcaaaaattcaactgcattaaccgatctgagagttttcctttaacctggactgtgtttctcaagcacattttttctttgttcactgcccaaggactagaactgtatttttaaggttgttttcccctaaaaggacctttagtaagcaaatttattattaaatgtgcacatcttattcacccaagggaataaaagctacttcgtaatgttgttactaaattttatcttgaaaataaataacagtgtttgaggacagaagaaactaggactgttgttgagataaaatctgttttcagcctgactgctttagtcactggacgagcatcagctactgcggtgtcagatcacttctcgagtagaggtctgcctagtgagtgagcaggagaacatcatcttaatagcctttggctcacccagagtcagggagagatgaaaataataggtcagaatgcaagtgacttaatcacagtcttcctagaattatctgtttatgttgcatgaatgcataagaaaaaaattctgtcatgttcccaaggtagaattgtaataagcatgtgccagtgtgaaagctggaaggaaaaaagctattctctaacaggagaacataaagattcatttctctcccaccctcaactccaccaaagtaaatcctttcgatagtaaaagtttaa

SEQ ID NO: 222654 - DNA, 1000 bp, Homo Sapiens
cactgatattctggttagcagggccaggacaaggggaaggaaaatgaggtcaacaaaaaaatcaaatttttaggaaaagataagatgaatgttactgatttttccttttggctgaggctgcaatatggcctggcaaggcactgttactgatcttgtctttaacattttgatattttgttcatcataatttttgcatttatttttttaaatattgcattaaaatatcatttagcttgattatcgagttttttggtttgaggttttttgttgcttcttttttcttttctttctttccccctcttttttttggatgtccccttaaattttgtgcccaaggcaggtacctcactcatctcatccttggctcagccctgctggttagtatttagtatttattttagtaagatatttgtgtctgtatgatggtcagagttgaactgatctggcttgtcatttttcagtaataaaaaaagttactgaatttaattgttgaatatgatgcatatctcattcattacgatttatcagaaaccaaagatttaaattgcctagatttgtggttctttctcttcctaagttcccagcgactgctttcaaatactattttctaaatttcaccaaaggagcaaagaggataaaacaacgctccataaaggcctcttgggatgtcagaaatctaaaatctaaaagaaaacagacacagagcaagacaataacatcacaagctaaaagccagagaaatttaaaattaccaacatccttgttggagtaagacagtaaatatcagccttgcagcaagacagctctgagcagctgtgggcaaagaggtaaaccagtgggggtgcaaggagactgtctgcagcttagggcagaaatggggggatccaacttgtgaaatgcttcatgttttacaaaccaaaaagtcgggtagcaacaaacttattgtatgtcaaatcaataaatgttactttcaatatccaaaaaaaaaaaaaaaaaaaaa

SEQ ID NO: 222655 - DNA, 1000 bp, Homo Sapiens
gtctcgcccattggaatgttcttgtttccgaacatctatctgggatgaaaccctctataaggcttggtccagcatagtttatcagctgattcccaatgttcagcagctggaaatgaacctaaggaattttgctgaaattatcgaagctgatgaagtacttctttttgagagagctacttttctggtaatttctcactatcagtgtaaagagcagcgtgatgcccatagatttgagaaaataagcaacattattaagcagttcaagctgagctgcagcaagctggctgcctctttccagagtatggaagtcaggaactctaacttcgctgctttcattgacatctttacatccaacacttatgtgatggttgtgatgtctgatccgtccattccttctgcagctactctgatcaacatccgcaatgccaggaaacactttgaaaagctggaaagagtggatggaccaaagcagtgtcttctcatgcgctaaacattgatgaatattgtttcacacaaaaattaaaagtttcctaattaatgttgtattcatatatgtaggctctgaaatgttgtgatgcttattgcttctgtatttcttctctactccctagtcttaatgtttaaccttgaatgctattaacttaaatagccattgaggagttagaagatgaattgttcatgaagtcggtgttacataaaagtaggtgatatgtaagttttctgataacaaggttctaatagtgtttaaatgtactggtaacctggttccaatagttgtgtttgcccaagcctttctcggcatcatcttgtattccttatcagatagtaagtaacctgtaagtttggagtattactgttttctcagcatgcattaaaaatattccttaacttcaattgtaaataaacttttggtgttagggaaaaaaaaaaaaaaaaaaaaaaaaaaaaaaaaaaaaaaaaaaaaaaaaaaaaaaaaaaaaaaaaaaaaaaaaaaaaaaaa

SEQ ID NO: 222656 - DNA, 1000 bp, Homo Sapiens
tgggcaagcctgttccggtgatgtagacaataattaacacagaggactttcccccacacccagatcacaaacagcctacagccagaacttctgagcatcctctcggggcagaccctccccgtcctcgtggagcttagcaggcagctgggcatggaggtgctggggctggggcagatgcctaatttcgcacaatgcatgcccacctgttgatctaaggggccgcgatggtcagggccacggccaagggccacgggaacttggagagggagcttggagaactcactgtgggctagggtggtcagaggaagccagcagggaagatctgggggacagaggaaggcctcctgagggaggggcaggagagcagtgaggagctgctgtgtgacctgggagtgattttgacatgggggtgccaggtgccatcatctctttacctggggccttaattccttgcatagtctctcttgtcaagtcagaacagccaggtagagcccttgtccaaacctgggctgaatgacagtgatgagagggggcttggccttcttaggtgacaatgtcccccatatctgtatgtcaccaggatggcagagagccagggcagagagagactggacttgggatcagcaggccaggcaggtcttgtcctggtcctggccacatgtctttgctgtgggacctcagacaaaaccctgcacctctttgagccttggctgccttggtgcagcagggtcatctgtagggccaccccacagctctttccttcccctcctctctccagggagccggggctgtgagaggatcatctggggcaggccctccacttccaagcaagcagatgggggtgggcacctgaggcccaataatatttggaccaagtgggaaacaagaacactcggaggggcgggaatcagaagagcctggaaaaagacctagcccaacttcccttgtgggaaactgaggcccagcttggggaaggccaggaccatgcagggagaaaaag

SEQ ID NO: 222657 - DNA, 1000 bp, Homo Sapiens
ccgaaattctgcccttcattcaatctagaaattatcccaagctgtatattgatggtccttttggaagtccatttgaggaatcactgaactatgaggtcagcctctgcgtggctggaggcattggagtaactccatttgcatcaatactcaacaccctgttggatgactggaaaccatacaagcttagaagactatactttatttgggtatgcagagatatccagtccttccgttggtttgcagatttactctgtatgttgcataacaagttttggcaagagaacagacctgactatgtcaacatccagctgtacctcagtcaaacagatgggatacagaagataattggagaaaaatatcatgcactgaattcaagactgtttataggacgtcctcggtggaaacttttgtttgatgaaatagcaaaatataacagaggaaaaacagttggtgttttctgttgtggacccaattcactatccaagactcttcataaactgagtaaccagaacaactcatatgggacaagatttgaatacaataaagagtctttcagctgaaaacttttgccatgaagcaggactctaaagaaggaatgagtgcaatttctaagactttgaaactcagcggaatcaatcagctgtgttatgccaaagaatagtaaggttttcttatttatgattatttaaaatggaaatgtgagaatgtggcaagatgaccgtcacattacatgtttaatctggaaaccaaagagaccctgaagaatatttgatgtgatgattcacttttcagttctcaaattaaaagaaaactgttagatgcacactgttgattttcatggtggattcaagaactccctagtgaggagctgaacttgctcaatctaaggctgattgtcgtgttcctctttaaattgtttttggttgaacaaatgcaagattgaacaaaattaaaaattcattgaagctgaaaaaaaaaaaaaaaaaaaaaaaaaaaaaaa

SEQ ID NO: 222658 - DNA, 1000 bp, Homo Sapiens; identical to SEQ ID NO: 117433

SEQ ID NO: 222659 - DNA, 1000 bp, Homo Sapiens
gggtgcaagttacattgcaatgttctaaaccttttgaagtgttcttagcaaaagcctttctttctgggtgtttttgtcgaatgagtctatgaagactcaatgcatccatcttgggctgatcatgccacagatctcattccagctatagtactgccaagaagtgaagtttatcattgaattttacctgtgttgctctcttttaaagtaatgactttgagatgcatgctttgtatcatattgaaaagtatgttttattttccttaaagttgtaatattgtgtgtgaaactgtacatattttaaatgatgtagctttggcaggttttatttggttgatatgattttatattaaaagagaaggctgctttcatatagcatagcccctgaaggtgggaatactccctgtttgtacaacgctgcttatagtttgtgattggggtgggcgaatgtcttcctctgaaattctttggaaccccccacccctgtcctcccctgaaactcccctgtgcacacccctctgttctgactgcagagatcaaggccctgaaggagcaggatcttgggcaagtgttttaggggacgctgagaacatacctgaccctgggggcgatgtggaggcaggcccacctcctcggggcaactttgcgtttccttggagggaagggaggtgggtaggagaggagcttgggaggatgaggaggagcggtcccgcctcacacattgtctatttttaccattaaccgagcgccacatgtttatgaacttcaggatagaaatttagcctccttgtgaaaacgttttgttttactgccctaagaaaatacacatctctaggcttgtctgaccagaaagccagcaaagtcttttgcatcgggtgtggcccttttgtattttatttcccatatttaaataagccttccttaaaccctagccccagtcctgagagctttgagggtagccgaaaccccttatctaataaagtctaactctgtgagaaccaca

SEQ ID NO: 222660 - DNA, 1000 bp, Homo Sapiens; identical to SEQ ID NO: 117435

SEQ ID NO: 222661 - DNA, 1000 bp, Homo Sapiens
atgcccaactttgtgtgtgtggggacgggggagtcagggccccccaagtcccacaatagccccaatgtttgcctatccacctcccccaagcccctttacctatgctgctgctaacgctgctgctgctgctgctgctgcttaaaggctcatgcttggagtggggactggtcggtgcccagaaagtctcttctgccactgacgcccccatcagggattgggccttctttcccccttcctttctgtgtctcctgcctcatcggcctgccatgacctgcagccaagcccagccccgtggggaaggggagaaagtgggggatggctaagaaagctgggagatagggaacagaagagggtagtgggtgggctaggggggctgccttatttaaagtggttgtttatgattcttatactaatttatacaaagatattaaggccctgttcattaagaaattgttcccttcccctgtgttcaatgtttgtaaagattgttctgtgtaaatatgtctttataataaacagttaaaagctgacagttcgcccttactcttggaggtcatgttcaggaggggcattcctttcccctgggggtcatgggtgtccccatgcccacatattgcacgtgcagggaggtaagtgcctgcatcccaaatcggttctaggtcaactggcctcaaactgatttgccatgagctcacaaaatgaatccctatgcttaatgaccaggtcacataaaatccagcccacttacaggttttctggcatctgtttgggtgtcctaatttttttggcagtgtcatttgaagaatttttttaaagcagtttatttaagaacatactgattaaatgcaggatcgctactaaaaattgttttgtatccttggtgggtgtcttctgctattttatctacttttgaacactttcaggactttttagccagtttgcctttcttgaaaaatgttatgttttcagcaataaatacatttgataatgaaaaaaaaaa

SEQ ID NO: 222662 - DNA, 1000 bp, Homo Sapiens
agaggggtcaatcctcatgatccctgtgtgttaagcatatgctttgcaggtgctcacactacacttacaacttgcttcttgagctatgtctctactccaggctctgttttgtgtatttatctgccatttgcatcatggtttttaaaatttattattattattattattgttgggacaggtgccatttaaattgcctccatgctccccatttgcacctagctggatcaagttgggaggctgagcaaactcatattccagttagttggagtttttaaaggctctgtttgcctggagaagcaaggaggttagaatgtaatttttttaagcgtttgcactatttagagtcctaagcccctcatgttcagctgtgctgtgtttctactgaccaagcaggagagccagcagcacttccagcatttgggaatggaagagatttcttctgtagtggataattacagcctcatagcccctgtgcagccttcgtcatgggactcagtgactcatggatatagcatcagccatggcaggaatgcacaggactgtggcatttgcagcatcaaatcaccctagtgccatgtttggttatgagattgtaaattattcgctcccccgtcctcccctcccctcattttcagtggcaatagaggacccttgttgtacttcttgtttaatttgcatattatgtgtaaaatgctttcgttgaaagaaaactgaagacactgaatgtgtatgtctgtgtgggtgctctgtccctgtggttgtcatagccagtcagacttgatcactgacaccccgtacaacatattgcataggtaagatcctcgatctggtgttctctgcgtggctgttagggactgtatatcttgtaaaagaacacttgtcacatgcttgatcagttacagcaatagctgaagaaacatttcctcaaatgtattattttaacaggaatcatgttctaatttcccatcctttaattttaataaaagctgaactgtgtgaa

SEQ ID NO: 222663 - DNA, 1000 bp, Homo Sapiens
cgagttcagctggatacgattcagggtgaactaaatgcacctactcagttcaagggccgactaaatgaattgatgtctcaaatcaggatgcagaatcattttggagcagtcagatctgaagaaaggtattacatagatgcagatctgttacgagaaatcaagcagcatttgaaacaacaacaggaaggccttagccatttgattagcatcattaaagacgatctagaagatataaagctggtcgaacatggattgaatgaaaccatccacatcagaggtggtgtctttagttgacagttcacaaacttgtgtaaaggtttgtgaaatgcatcttcttactgcatcagaccttccttaagaatgaaaccgaccacatggagggaaaaagaaaacaattctttcttggattggttttttgagaagtttactgacaaattactgttcatcaaatctgaaatagtcacctcacagctcttcaaagaaaacctttgaaagatttatatctaaaagctgtatttactttaaaagaagtgcataattaccaaaattgtatgtactattgtacatttttacaacagcattttcttaaacataatctgtgtttaatgattattgtccattgagcctgtactctgctttccataccaagtaaatatgaaataatctactttgcacataacagaacaaactataattacttggctgttggagatttgtacttgagtataaatgtacaccagtttttgtatttgtgaactcatctgtgggaggagtaaagaaaatccaaaagcatttaatgttttgtttttgttctataaagatatgaaaatgtatttttatattattttacttatttggaatttacagagcacacctaagcaattaggatataacaaaactacttaaccatttttgcaaccattttgttttttaagcctttttatttctaaaaagatgaaaacttataaataaattcttaatttgtaattacttttaaaaa

SEQ ID NO: 222664 - DNA, 1000 bp, Homo Sapiens
gtgcacatctacatcacccagctggctgagaagttcgacctcaggaccactatgctgtacatctgtgagcggcacttccagaaggttctgaaccggagtctattcacaggcctgcgctccatcacccactttggccgtcccccctttgagcccttcttcaactccctgcaggaggtccacccccaggtccggaagatcggggtgtttagctgtggcccccctggcatgaccaagaatgtggaaaaggcctgtcagctcatcaacaggcaggaccggactcacttctcccaccattatgagaacttctaggcccctgcccgggggttctgcccactgcccagttgagcagaggtttgagcccacacctcacctctgttcttcctatttctggctgcctcagccttctctgatttcccacctcccaaccttgttccaggtggccatagtcagtcaccatgtgtgggctcagggacccccaggaccaggatgtgtctcagcctggagaaatggtgggggggcagtgtctagggactagagtgagaagtaggggagctactgatttggggcaaagtgaaacctctgcttccagacttcagaaacaaatctcagaagacaagctgacctgacaagtactatgtgtgtgcatgtctgtatgtgtgttggggcggtgagtgtaaggatgcagtgggagcatggatgctggcatcttagaaccctccctactcccatacctcctcctcttctgggctccccactgtcagacgggctggcaaatgccttgcaggaggtagaggctggacccatggcaagccatttacagaaacccactcggcaccccagtctaacaccacaactaatttcacccaaggttttaagcacgttctttcatcagaccctggcccaatacctatgtatgcaatgctcctcagccctcttctccctgctccagtagtctcccttccaaataaatcacttttctgccttaaaaaaaaaaaaaaaa

SEQ ID NO: 222665 - DNA, 1000 bp, Homo Sapiens
agcctacccttagatttttggaaggatcgatcttatttaactatgtgtggaacaacccagtaatatcagactcgaattactatttcattctatttcaaatgcttataaagctactattgtagattatagtgttaatgcaaagtttacagacttttgatatggaaaaccagataaaacaatgttacaaaaggcaaatataaagagtatgttttctttttagtgctttggaaaaatttcacttaaactcttattactgtatagattaagccctataatgctatttatattccaggggaacgaaaatctgaatttgttttatgatttaaagcatctggtttgcatattgtattgtaatactgatacagtttggctgtgtccccaccaaattgaattgtgttaatagttcccataatccctacgtgttgtgggagggacccagtgggcagtaatttaatcatggtggtggttaccctcatgctgttcttgtgatggtgagttctcatgagatctgatgggtgtttttttttgttttgttttttgttttttgagatggagttttgctcttgttgcccagactggagtgcaatggcacacgatctcggctcaccgcaacctctgcctcctgggttcaagcgattctcctgcctcagcatctcgagtagctgggattacaggcatgcaccaccacgcccagctaattttgtatttttagtagagacggggtttctccatgttggttaggctggcctcaaactcccgacctcaggtgatccgcccgcctgggcctcccaaagtgctgggattacaggcgtgagccactgctcctggcccaagatctgatggttttgtaagggaattttccccctttgcttggcacttcttcctgctgccatgtgaagaaggatgtgtttgcttccccttccaccatgattgtaagtttcatgaggcctccccagcctgtgggactgtgagtcaattaaacgtgtttactttataaatt

SEQ ID NO: 222666 - DNA, 1000 bp, Homo Sapiens
aattccaaaatacccaacaaatccccctggacagttgccttctccaccacatgttccatcctactggcatccctctcgacgaattcagggctctcttagagatccagagtttcagcacaatgtgggaaaagcaaggatgaacaatttgcagttacctcaacatgaagcctttaatgatgaagatgaggacagattgtctgagatttctgctcgctctgcagcttctagtctccgggcttttcaaactctggcacgagctaagaaaaggaaggagaatttctggggtaaaacataaacctagctgagttgcctttatctaaggaaacattggcataatttttctttattgcttactgtgttaaaattttttgagtgaagtttttcctaacgttttctactttgaaatatttaatttccaatagaacagtttacttggaaattgttaacataggcttatacaaatttaacttttaaagaattctttttacatctatcccagagtacaaagacctagattattgaattcttcacatgtaactttcgtaataggtgtcatggatagattttcacctatccagagagtattctaaaaaaataaacaaagtgaagtaaaagttaagatcccagtgtgaagtatatattcccctaagatttgatatatgtatctttataattgatgatgttgtaaaatgaatttgttgttcctttaacctttgctgtagtgtttctttttattttagttccttctatacatgtttgcagtgttaagataattgtactttgaaaacaccagctgtatatatttttcttatttatgtaacaaagtttgctgaaagatatgtatatttttgatctttgagtgtattctatttgtgtaaggactttggcttacatttgaataatgtctagattttgaaaaattacctgtataatggagaattaaaactttgtagacattttgaaataaaaatggatcaagtgcggaaaaaaaaaaaaaaaa

SEQ ID NO: 222667 - DNA, 1000 bp, Homo Sapiens
ttgtttttcatagacccacttggcccaaaacctttctatattgcctgtagatgatcggcctgctggtgtggtagtaatctgatcacagatattcttaaatcagcagtgtggaatggtattagtcaaacatggtgccagtgtcttttacaaaaacagatggcatagtgtcagatgtaccttactctctgctactgtacagctttaggatttgtcatcacctcccggaaggtgtaaaaccccaggcttcctcttcttgtagtccatctcccagacttgtgactatggcttttcattcttcaattcatgacgagtgccaaacttgattttctctaggcacagctttctccctctgtgcctcctgcttcctttctctctcctgcctctcctctgctccccatcccactttctcatctgcctccttttctcacttctgtcagtctgtaagctttgataacctgcttaatactccaaagtgtgagttcctctgatctcttgattccttagttctaatctcacgttttgtttttaagagatggagtctctcactctgtggcccaggctggagtgcagtggcatgatcatagctcattgcatccttgaaatcctgggctcaggtgatcctcccgcctgagcctcctgagtatctgggactacagatgcgtgccaccaagcctggctaattttgtctcatgtcttctaaaaattattttgtgaagccccttcacaaaaaaccttaagggaaatctgatggtgctcaggaatctaactctccctaaaccatcctctttaactgcttctaaaatatctctgttggcctttcttagcctttttctgtttccattcagtgctccaagcgctttttgtttctaagttgagtgcttggggtttgacaggtagtgacgtgtagtttgacactgttaacttgttaaatacagtgaaaagtttgtgagtgaagaatgctgagaagattgtaatgctttgtacaaataaaagtcttgtt

SEQ ID NO: 222668 - DNA, 1000 bp, Homo Sapiens
gtccggacagggaaggtgctggggtccctggccgccccggcccctgtggaggggtgcacagagaaagggggctcgtgccaagctcgaggggcctcctgaggaagccggccgctcctgtgagggaggccgggcccgggcacctgagggcttctccctctggacactgcgggccaggtgtacatagagcagcgcggcacagtggcctcacctcccgtcgggcactggcgggagcaaggtcgggggcaggcgctgcccagctggccgcacacggacattccaaagacctccagagaccaccccacccccacattcctttgaccagccttgtgagggcatcgatgctgccccgggctacctggctgctctgggcagggtgtgcgggccgggcccggctgggggagggcagctctgggcacgccgcacccacgccccccacctgggggaaacaggcggttcctgcccggttcttcctaaacgctctcgtctttttgtgtgtcttggtgactttagaaacaaacacagtggactcagtggctactggtattgtctcttcccacactgaactctggggaattgagtgcagggcacagcccggctcagcctgcccgctggtgggagcccctgggaagctgcggcgctcctttatctgatgtggtttagtaaaagcctcccacacacctccccgtggcctgggacgtggctggtagtgtttgtgtgggaagcagctcaagacgcggaccgcgtgacattaaggagagcgcaagggcggaccgggccctgtgtagagacccttccgcgccggcgttcccgctccgctaaagatttcaaatccaggggattccatgctcaatggatgaatgtagacacaaaacagcaacacttgtatgaagatgtaaagtgctgaacatatttttttcctgtttcctttccttttttttaaaaaatctgaattgtgccctgtactgcagttacttgtttgaataaaagttttatttattgc

SEQ ID NO: 222669 - DNA, 1000 bp, Homo Sapiens
cccacggagagtaactgtgaggtgccgcggcccagcacagccccccagcgtgtccctgttgcctccccatccgcccacaacatcagcagcagtggtggagccccagaccgaactaacttcccccggggtgtgtccagccgaagcaccttccatgctgggcagctccgacaggtgcgggaccagcagaatttgccctacggtgtgaccccagcctctccctctggccacagccagggccggcggggggcctctgggagcatcttcagcaagttcacctccaagtttgtacgcaggaacctgaatgaacctgaaagcaaagaccgagtggagacgctcagacctcacgtggtgggcagtggcggcaacgacaaagaaaaggaagaatttcgggaggccaagccccgctccctccgcttcacgtggagtatgaagaccacgagctccatggagcccaacgagatgatgcgggagatccgcaaggtgctggacgcgaacagctgccagagcgagctgcatgagaagtacatgctgctgtgcatgcacggcacgccgggccacgaggacttcgtgcagtgggagatggaggtgtgcaaactgccgcggctctctctcaacggggttcgatttaagcggatatcgggcacctccatggccttcaaaaacattgcctccaaaatagccaacgagctgaagctttaacaggctgccaggagcgggggcggcgggggcgggccagctggacgggctgccggccgtgcgccgccccacctgggcgagactgcagcgatggattggtgtgtctccctgctggcacttctcccctccctggcccttctcagttttctcccacattcacccctgcccagagattcccccttctcctctcccctactggaggcaaaggaaggggagggtggatgggggggcagggctccccctcggtactgcggttgcacagagtatttcgcctaaaccaagaaattttttattaccaaaaaga

SEQ ID NO: 222670 - DNA, 1000 bp, Homo Sapiens
gattgggtattttgctaaattaccaagcaaagcagacaatctttttcttgaaattacctccattcttactttgttagcatacgctgaccttagtgtccagatatgtcactattactcatttttcttgacagttcaaatggatttttgtgcatatatagtcaattgaaaagattttatcaggaattacattctcttgagttaattaatattgaatagcaaaatgcatttaaatatgcactgttcacctgcagagtaaacaatctcagaagtatcaactaggacgtaaatagcagttccttatataaagtaccaggttttttccccattctctggaaatgtttgtcctcccttaattttgcctcaacacaagaaaataagttttatgtccatttttgttccctaatttattgcttctaaaaatgcattatgttttacaaagatatctaaggatccaagcaaactactttaagcaaatatttgtaaaattaaaaacggaggaccgctcaccaaatgtttgaaatgttgctttttttttttgagacagggtcttgttttgtcacccaggctggagtgcagtggggcaatcttggctccctgcaacctctgcttcctgggttcaggtgattgtcagtaccttacctcagcctcctgagtagctggaactgcagatgtgcgccaccatgcccggctaatttttgtattataagtagacacagggtttcataatgttccccaggctggtctccaactcctggcctcaagcaattcgcccccctcggcctccaaagtgctggaattataggcatgagctgccgtgcctggactatcagcagcaaatgttttgctgttacggtgtactgttcgtatttagacaagaagaacaaaatttatttatgtattgacattttcaaagaaagtaaatgcaatttactttgaaaaaaaaaaaaaaaaaaaaaaaaaaaaaaaaaaaaaaaaaaaaaaaaaaaaaaaaaaaaaaaaa

SEQ ID NO: 222671 - DNA, 1000 bp, Homo Sapiens; identical to SEQ ID NO: 117441

SEQ ID NO: 222672 - DNA, 1000 bp, Homo Sapiens
catgcccttcttttacctcaagtgttgtaaaattcgctactgcaatttagaggggccacctatcaactcatcagtgttcaaagaatatgctgggagcatgggtgagagctgtggtgggctgtggctggccatcctcctgctgctggcctccattgcagccggcctcagcctgtcttgagccacgggactgccacagactgagccttccggagcatggactcgctccagaccgttgtcacctgttgcattaaacttgttttctgttgattacctcttggtttgacttcccagggtcttgggatgggagagtggggatcaggtgcagttggctcttaaccctcaagggttctttaactcacattcagaggaagtccagatctcctgagtagtgattttggtgacaagtttttctctttgaaatcaaaccttgtaactcatttattgctgatggccactcttttccttgactcccctctgcctctgagggcttcagtattgatggggagggaggcctaagtaccactcatggagagtatgtgctgagatgcttccgacctttcaggtgacgcaggaacactgggggagtctgaatgattggggtgaagacatccctggagtgaaggactcctcagcatggggggcagtggggcacacgttagggctgcccccattccagtggtggaggcgctgtggatggctgcttttcctcaacctttcctaccagattccaggaggcagaagataactaattgtgttgaagaaacttagacttcacccaccagctggcacaggtgcacagattcataaattcccacacgtgtgtgttcaacatctgaaacttaggccaagtagagagcatcagggtaaatggcgttcatttctctgttaagatgcagccatccatggggagctgagaaatcagactcaaagttccaccaaaaacaaatacaaggggacttcaaaagttcacgaaaaaattgaattaaaagataaaaattaa

SEQ ID NO: 222673 - DNA, 1000 bp, Homo Sapiens
tttttgaattaaagaaatgctacatgttccggttgcagagtatattcataagatgtctcaccttgttcatttcacatagtggtttattagatattggaacctaaagaattctgtccacttgtattagcttaatccagcagatgatattgtgcagttactgtttgtgtctttgatattgctgtgtccctcagattttagtagtttgacaagcaagaacacatatccaaatggaattttaccctgagaaattatcattttaaagggcatagcacagcaatctgcaacaatatgtaaagttgatattgactacaataaaaatccagtcttaattccagatttactgaaaatgtcagatcattttgtattaatctattttcatctttgtgtgaagccagttatagaatgtttgacaataaattgtgctgtacacgtaaatgtccttaccaactaaatgatgtaaaactttcttaaagtaattttagtgttcatttatttataacttctaccatgtgatttccagactattggaagtgatttactgtatcttgtgatatatgggttttaacaaattctagtcttcacgctgagagagcactacttgagagagcagttgaaagtttcaaaaactttggttcaatctgaagaaaggaagcttgaactgtttgttcttggtgccttgcagagagactcacagcaactctccattatagctttcacacggtttggatgtgcagcacatccaaggcaaccacagctgtggtagagcttggtaaaagactgaagatacattggtgctttgatgaaaaggtcagttggctggtccctctctcaaaaagcttattaagcctgaaaagccaactttgtaacatatttaaaactgctattttcgcttatttctggaatgtaaaaaaaaaaaatgtataaaaagaattagtgtatgcttcctgaataaaaaggagccaaagttgaaaaaaaaaaaaaaaaaaaaaaaaaaaaaaaa

SEQ ID NO: 222674 - DNA, 1000 bp, Homo Sapiens
tgatgatgccagggaggctgttaaacatggcttgaatgggatcttggtgtcgaatcatggggctcgacaactcgatggggtgccagccactattgatgttctgccagaaattgtggaggctgtggaagggaaggtggaagtcttcctggacgggggtgtgcggaaaggcactgatgttctgaaagctctggctcttggcgccaaggctgtgtttgtggggagaccaatcgtttggggcttagctttccagggggagaaaggtgttcaagatgtcctcgagatactaaaggaagaattccggttggccatggctctgagtgggtgccagaatgtgaaagtcatcgacaagacattggtgaggaaaaatcctttggccgtttccaagatctgacagtgcacaatattttcccatctgtattattttttttcagcatgtattacttgacaaagagacactgtgcagagggtgaccacagtctgtaattccccacttcaatacaaagggtgtcgttcttttccaacaaaatagcaatcccttttatttcattgcttttgacttttcaatgggtgtcctaggaaccttttagaaagaaatggactttcatcctggaaatatattaactgttaaaaagaaaacattgaaaatgtgtttagacaacgtcatcccctggcaggctaaagtgctgtatcctttagtaaaattggaggtagcaaacactaaggtgaaaagataatgatctcattgtttattaacctgtattctgtttacatgtctttaaaacagtggttcttaaattgtaagctcaggttcaaagtgttggtaatgcctgattcacaactttgagaaggtagcactggagagaattggaatgggtggcggtaattggtgatacttctttgaatgtagatttccaatcacatctttagtgtctgaatatatccaaatgttttaggatgtatgttacttcttagagagaaataaagcatttttgggaagaat

SEQ ID NO: 222675 - DNA, 1000 bp, Homo Sapiens; identical to SEQ ID NO: 117446

SEQ ID NO: 222676 - DNA, 1000 bp, Homo Sapiens
gaaacccttctccctgtgccttagagcaggtgtgtacatctctcactacctttctcatgggtgctgttagattttggcacccgttttctcagcattcagcccagggaatgtggttttcacttcttcgtcagataagaccaacatgaaggggtatgttgagaaacatcctgaggcaaggtgggaggtgggatggggcaggactttcccttccaagcacatgcatggcaggtggggaaaggggggcttgcacccctgctggaaagaaaaggtttgtgtatatttctgatgcaaatgtcatactcactgctctgtaaaggcagctggcagctttttgggaaaagaacgtgctcgtctgttctctggcatcaagtttcttgcagctgctctgagggagagacagtgagctgcaagactgcctccccataacaacaggcaactcagagaagagtcattttatgttgttcctatggaatctggaatgagtgcagagctcctacccacacatgactgccccgccatttcatcctaggcattctgtgaaggagattggttagtccaaacttgctaacatacgaaaattcacttggaacatgatgagagatttcttattgaggccaagagatgtttcctgtcccagaggaaccattaggagtcgcttttagggtattcagctttgttcatgaaataaggcatctctgagaaagtggccccagggagagaatggaggactgggaggagaagcattaactgagctccaagggtgtgtgggcagagagcttgctatgtgaactcactccttaagaaaatggaagagaaaaagagagtgctagttaaaaaatcgggatgttttagtttggatttagggttttgatacttatgttgaaatactaatgtttctgatcaataaaatcaaactcttaatataccgagtaatgaaaccatagtgtgattgcctcagaataaattgagaagtccaaaaaaaaaaaaaaaaaaaaaaaaa

SEQ ID NO: 222677 - DNA, 1000 bp, Homo Sapiens
atgctgtctgtggcaaaccacacctgctggagggttccctctctgccttcctgccgtccctcaacctggcccccaggctgtctgtgcccaacccctggatccgctcctacacactggcaggaaaagaggagtgggaggtcaatcccctttactgtgacacagtgaaacagatctacccgtacaacaacagccagcggctcctcaatgtcatcgacatggccatcttcgacttcttgatagggaatatggaccggcaccattatgagatgttcaccaagttcggggatgatgggttccttattcaccttgacaacgccagagggttcggacgacactcccatgatgaaatctccatcctctcgcctctctcccagtgctgcatgataaaaaagaaaacacttttgcacctgcagctgctggcccaagctgactacagactcagcgatgtgatgcgagaatcactgctggaagaccagctcagccctgtcctcactgaaccccacctccttgccctggatcgaaggctccaaaccatcctaaggacagtggaggggtgcatagtggcccatggacagcagagtgtcatagtcgacggcccagtggaacagtcggccccagactctggccaggctaacttgacaagctaagggctggcagagtccagtttcagaaaatacgcctggagccagagcagtcgactcgagtgccgaccctgcgtcctcactcccacctgttactgctgggagtcaagtcagctaggaaggaagcaggacattttctcaaacagcaagtggggcccatggaactgaatctttactccttggtgcaccgcttctgtcgtgcgttgccttgctccgtttttcccaaaaagcactggcttcatcaaggccaccgacgatttcctgagtgcactgggaaatttgggtataggtcaggcttggcagccttgatcccaggagagtactaatggtaacaagtcaaataaaaggacatcaagtgg

SEQ ID NO: 222678 - DNA, 1000 bp, Homo Sapiens; identical to SEQ ID NO: 117448

SEQ ID NO: 222679 - DNA, 1000 bp, Homo Sapiens
gaaggttatgttaaaatctgggcatttagtgacagatcaaatgcatacttgaactaagattggcttcagcttagcagtctttcatggtggaagtgacacatctggttgaaaataatttgtgtattttcagtaaccatgtatggcttccttctttatgtatgtgtgtgacttgttttaattggtaagttataagccagacatagattttagctctttaataaaaacttcaggggcacgtatgtcccagtacaagtgtactgactatcaagttttaactcagatgcaagctttggctctttcataaaaagtttttatgcatatgtgtctccatacaagtggctcattaaaataagaactttgtaaactgacttaaaatcagatattttttcaagagttagggaaagttgaagtgttttactgttttgtctcttgagccctttctctggggaaaaaatacatatccatctatctatctatatataaactgtgtatacattcttactgtttgaacaactattgcctttaattaaatgtttcatttttctccagagtccccaaagccacatggcattattatagtcatttttgagatgcctgtagagaatgaaagtattgactccgttagagggaaaatgggtttctctgggtgaattccaacgaagcatacctaggggtaacagtgaacctacctgggtttgttttgttttggtaaggatttatgtagtgtctggctgtaagcaagaatgagtggattataaacttgaagatttctctgttaaagtcacaaaaatgatcgacaaacaatatttttgtgatgtttatttaaacgttgtattttataacatacttcaaggaagagtatcgaagtaagttgctttataaattaagactaaattcgtatggatgcagaattcaattaataaaatttgagcctgttacgtaaattgaatattaataaaattgaaaatttctgaaaaaaaaaagaaaaaaaaaaaaaaaa

SEQ ID NO: 222680 - DNA, 1000 bp, Homo Sapiens; identical to SEQ ID NO: 117449

SEQ ID NO: 222681 - DNA, 1000 bp, Homo Sapiens; identical to SEQ ID NO: 117451

SEQ ID NO: 222682 - DNA, 1000 bp, Homo Sapiens
gaccacacccaaggtgggggctgtggccatgtgtggccgtgatgtcgatgatactcgttttccctgatccgtggtgttgcagtccgttgtcaccagccttgtttctagtgtgtatatatgtcgcccccgtgatgcatatatacacaggtattaaatatatcgctctatataatattatatatgtgtgtggtatccaaggaatcacttttatgagggctaaagataaagaatttggccagaaaatgcagccatccttgtgtgattaggagggtttcaggggccactggactatttgcaaggtgacagggactggagccatggctcagaggtgattcgggcagccagggacaggagccaccctccccaggcccaactctgctagcttcccagaccacccccatcgagtgcggagagagtgggagtgctcagggaaagaaggtgatttgtatttgtctccccgctgaaaagaacaggattcaagtccagagttttcatcttcagcctgtgatctgtccagggacccttgggatctggggcttcctggcctggccagagctggagcccccacagggtaaggaagagagagtgggaggcagagtgtgatggggaggagggacaggaagacccttttaatgatgagggtaactatttcagttgtgagccttctagggccccaggctgggaggctcagaggactgaatctgggacctgtgttccccccggcaggcagggacaagatggcatggcaagcatgggggcggggtgggtggggagggatgctgcatttctcagctgggcagtaatcaatttaatggtcctttaaaatgtctgtgtattaaaaatttaagaataccacactttaatattaaatattcataaggtctagtatcttgataataatgtagatgttttaataacaatttttgtccttcttaaaataaaatgaaagaaacttgcttcccttagcctttgttctagaaaataaacttgtgcactttga

SEQ ID NO: 222683 - DNA, 1000 bp, Homo Sapiens; identical to SEQ ID NO: 117453

SEQ ID NO: 222684 - DNA, 1000 bp, Homo Sapiens; identical to SEQ ID NO: 117454

SEQ ID NO: 222685 - DNA, 1000 bp, Homo Sapiens
acattaccaagagtcgatcactgatttaaaatttttaatttctatagttaagatttactgcataatatagaatataaagttaagttaacatactaacatttctcctttggaggaagttttaatctacttcaggatgcatattattatcaagatactttcatatacaggatagcctaattttatttgtttaaatatgcttaatatgccccagattgcaaatgcatccagtcagtaatatcactgtctgtatgtggaggacatgttcccatggatcatatgtgaagatgtcaataagcttgcattaagccacctgctttgtaagtggattgattaataaataacttatatttctattgtctttgtgtttcataattagtttttataaaaacagtttacattaaacatcttggaattcaacaatagtgatctcactcaaattgacatttgcataatttgacatttatattcattcagttatgactacttgcccttttcttcatattagtaaatgttacactgtagtagttgtcaatgttaacaggcttcaacatagtatgtgtgcagatggacgatggatttaaagagcataccttatgattaaaccgaggttatagaaggtcaggggagagtgaaggagtcagtgacctatgtctgccatcttactggggaaaagagcaagtagcctgtcttcctttaagtaagtagcctgtaatggatgtactactttgccactggaataccccgggtctgtgccaagggactgaagaagtgtaagatggggagaactgtatgtcatggagtcctcttgacgttcccccagatacaagtaaagcacaggtggatttctctatttttgaatactacatcagatttagatgcacgactacctgttgacttgttttataattgctactgatttttttaatgtaggcaaagctttgttactttgaaatttatttaataaaagtatttgtgacataaaaaaaaaaaaaaaaaaaaa

SEQ ID NO: 222686 - DNA, 1000 bp, Homo Sapiens
gaggtaccagagatttttacaaagaaatcagaagctggacatgcctccagtccagactctgaggtgacatcactttgtcagaaggaaaaagcagagttggctccggtaaacactgaaggtgcccttcttgataatggcagtgtcgtaccaaactgtgacatcagcaatgggggcagccagaagctctttcctgcagacaccagtccttcaacggccactaaaattcatagccctatacctgacatgagcaaatttgcaactggaatcacgccatttgaatttgagaatatggcagaatctactggaatgtacctcaggataagaagcttgttaaagaactcaccccgaaaccagcagaaaaacaaaaaggcctctgaataatggcttgacttagcactgagagctatttaataactttgttccgttaattagtactaattaagtggatagatagaatggttttcctgtttgtccctcccatgtttaaaaatctatccaaggttcatgttccaaagtcaagcctattttaaagaaagactgagctcactagttcagtatattttattctcactgacaaaacttggggggagatgtgaatatgacctggtttagagagggtttgttaaggtttatactatttttggattgtgactatccgtcgagagtgatggtttttatctgtcttttgtacattgttttccctttctacattttgctaattatcctgtatataagtttaatatatcactttttaaaagaaaaaattctaccattttaaattcatgtttcaactcctacaaccaaatgagaaaaatcagggatgagcagctttatcccatttggggtatttttgtaagtgatttacatgtgtcaattttagtaatacttttacttttttgtaacttcatccttcatatatgcttgctatacaggtatgttcatctttgtgtacagaggtttaataaattagttttcatatacataatctaaaaaaaaaaaa

SEQ ID NO: 222687 - DNA, 1000 bp, Homo Sapiens
ggtttcttgcaagcatgcttgtgaaaatgtgttctcggagtgtgtatgccaagagtgcacccatggtaccaatcatgaatctttgtttcaggttcagtattatgtagttgttcgttggttatacaagttcttggtccctccagaaccaccccggccccctgcccgttcttgaaatgtaggcatcatgcatgtcaaacatgagatgtgtggactgtggcacttgcctgggtcacacacggaggcatcctacccttttctggggaaagacactgcctgggctgaccccggtggcggccccagcacctcagcctgcacagtgtcccccaggttccgaagaagatgctccagcaacacagcctgggccccagctcgcgggacccgaccccccgtgggctcccgtgttttgtaggagacttgccagagccgggcacattgagctgtgcaacgccgtgggctgcgtcctttggtcctgtccccgcagccctggcagggggcatgcggtcgggcaggggctggagggaggcgggggctgcccttgggccacccctcctagtttgggaggagcagatttttgcaataccaagtatagcctatggcagaaaaaatgtctgtaaatatgtttttaaaggtggattttgtttaaaaaatcttaatgaatgagtctgttgtgtgtcatgccagtgagggacgtcagacttggctcagctcggggagccttagccgcccatgcactggggacgctccgctgccgtgccgcctgcactcctcagggcagcctcccccggctctacgggggccgcgtggtgccatccccagggggcatgaccagatgcgtcccaagatgttgatttttactgtgttttataaaatagagtgtagtttacagaaaaagactttaaaagtgatctacatgaggaactgtagatgatgtatttttttcatcttttttgttaactgatttgcaataaaaatgatactgatggtgaaaaaaaaaaaaaaa

SEQ ID NO: 222688 - DNA, 1000 bp, Homo Sapiens
accgtctgcttcgcggtctgggtggcgcggtgcaggagctgacggcgctgagcgtgggttgcatccagacctaccgcgatgctgtggactccttaggtgaagccgtggacatgagcatcaagggcatgtacaccctgctggcgcgctgcgaggagctggagcgggctctgcagccggttcgggggctggcgcgccaagtccgggatatccgacgtactctggaggtgttggaggccctgtgcaagtgaccaggaggacaggagaggccggtcctggccagggcagggcccagcaggaccctaaggactcttcagggagtcctggtgggaagtgcccactgaggggaggcctgtgtgttggaggctcttccagatgcgttcagctggcccgtgcccactcgctgggccttaggctggtgtatgtggggaagttctaacggctctcctggtgggaagggatgttgctctgcttgtattcagttggccatctgtagctaccctgttcttcccaactctcctccctagctagagcaccagccctgggaacacggggctttaggtctgcttgaaaggtgaggacgtgactcccacatgtaatcaggagaaagggacagaggaagccccagcccccactgtggctatcctgatccagtggccacatctcaggtgccaggggctgtgggagcttgtgccgtccttggccaaacaccccgcaggcaaagatgcacccctgctgatggagagccttctgcttctgccctctggccctctaccataccacttccccagccagaaccggcgtgcagctaggaggaatgggttgcacggcggagggggtgaggtgggaggcgtctcactgctctcagggttcaggtagaatgttgctggttttgaggctcacctgttgtggagtgttctaatcagttttggctttctgagtttttgtggaattaaagtgctgctgctgcgaaggctgaggctgaaaaaaaaaaaaaaaaaaa

SEQ ID NO: 222689 - DNA, 1000 bp, Homo Sapiens
aagtgtggtataagaaaagaaccactgaattaaattcacctagtgttgcaaatgagtacttatctctaagttttcttttaccataaaaagagagcaagtgtgatatgttgaatagaaagagaaacatactatttacagctgcctttttttttttttttttcgctatcaatcacaggtatacaagtacttgcctttactcctgcatgtagaagactcttatgagcgagataatgcagagaaggcctttcatataaatttatacagctctgagctgttcttcttctagggtgccttttcattaagaggtaggcagtattattattaaagtacttaggatacattggggcagctaggacatattcagtatcattcttgctccatttccaaattattcatttctaaattagcatgtagaagttcactaaataatcatctagtggcctggcagaaatagtgaatttccctaagtgccttttttttgttgtttttttgttttgttttttaaacaagcagtaggtggtgctttggtcataagggaagatatagtctatttctaggactattccatattttccatgtggctggatactaactatttgccagcctccttttctaaattgtgagacattcttggaggaacagttctaactaaaatctattatgactccccaagttttaaaatagctaaatttagtaagggaaaaaatagtttatgttttagaagactgaacttagcaaactaacctgaattttgtgctttgtgaaattttatatcgaaatgagctttcccattttcacccacatgtaatttacaaaatagttcattacaattatctgtacattttgatattgaggaaaaacaaggcttaaaaaccattatccagtttgcttggcgtagacctgtttaaaaaataataaaccgttcatttctcaggatgtggtcatagaataaagttatgctcaaatgttcaaatatttaaagaaaaaaaaaaaaaaaaaa

SEQ ID NO: 222690 - DNA, 1000 bp, Homo Sapiens; identical to SEQ ID NO: 117459

SEQ ID NO: 222691 - DNA, 1000 bp, Homo Sapiens
atataattgcagctagaaccctacagtggggaatgaggaattttaaacacacatttgattacagccaccaaaaaaatagacgtaaaaataaaggcatttggctggtccaagatgtaattatcaatcagtcagcacctgtgattcttttacttatttttttgtggttttttttttttaaacaaattttagcccaattttcttgagtcattctctctctgcagcagcagaggaagggcctgtacctccctaccaatgacttggtgtccttattttctaccccaagagcagggatattagctgtgtccaaatgggttctgaattctacagactcatcaacatgaggcaaggaatcattgaaaaccacctgtgtctcctttgggagaatgacatatctttagtatttacgtagcttattcttctatatctacatatgcaaagctttccttaacagtaaagggtacatatgcatagtgggaggagatcagacctttacaagtgaaggaaagcaacttcagaaatgaattattttctttgctttattatttttaccaagacagagaagtattgtattgagagataatctattttcataatcaatatgtgcctaaattatatttaaatcatttcactctgtactatattttcaggaattacagaatgtggtattcattcacttaaaggtacctctgtagaaataacctaaaactgcagaaggatctgaaagatctaaacatggtgtgcttagaaactgcagattttagatctaatgtatactgcattaataaatgatataaagtgtttgttgaaaaggagtttcttctcttccttttgaaaatcatcactttctgtattttgcttacatttcttcaatatgtgttgacaaccagccctgtggttctgggtagcaaaggaaatacagtataacttaatttgttatggattagtctttttgaaagtaccattaaagtaaatttatttctttaaaaaaaaaaaaaaaaaa

SEQ ID NO: 222692 - DNA, 1000 bp, Homo Sapiens
gtgtgggatgaggttcgatacagcgtatttattgcttgtcatgtaaattaaaaaccttgtatttaactcttttcaatccttttagataaaattgttctttgcaagaatgattggtgcttattttttcaaaaatttgctgtgaacaacgtgatgacaacaagcaacatttatctaatgaactacagctatcttaatttggttcttcaagttttctgttgcacttgtaaaatgctacaaggaatattaaaaaaatctattcactttaacttataatagtttatgaaataaaaacatgagtcacagcttttgttctgtggtaacctataaaaaaagtttgtctttgagattcaatgtaaagaactgaaaacaatgtatatgttgtaaatatttgtgtgttgtgagaaatttttgtcataagaaattaaaagaacttaccaggaaggtttttaagtttagaaatattcatgccaataaaataggaaattataaatatatagttttaagcactgcatcagtgggagttcttggcttatgttagtttatgttagtttattatgaaaacatcaaagatttttttgactatattatcagttaaacaaaaaggagtcagatttaatttgttttttgaagcactttgagaaattaattttaattaacttaatgagcaaatttttattactactttatgttcaataccaggttcttttcatttctctggattattttgcaaatcattggacagagaatttgggaatataaatctgtaacaggtgtttgacaccagtaggtctctttatttctgggaaatgtgtacctgtactttctgatatacagtgttcctaagtaaaaatcaattcaggggatttgtatagtgtctataggaaagtagcccatgtcttgaaatatgaaaaggaatctgaaggtcatgaaaagtccagtggagaaaatctcaatgcttactgttactactaattgattcctactagtttccaggtttggg

SEQ ID NO: 222693 - DNA, 1000 bp, Homo Sapiens
ccggcttctgggcacaccctcctggggcccaggcgggcacctgcgtctcccagtatgccaactggctggtggtgctgctcctcgtcatcttcctgctcgtggccaacatcctgctggtcaacttgctcattgccatgttcagttacacattcggcaaagtacagggcaacagcgatctctactggaaggcgcagcgttaccgcctcatccgggaattccactctcggcccgcgctggccccgccctttatcgtcatctcccacttgcgcctcctgctcaggcaattgtgcaggcgaccccggagcccccagccgtcctccccggccctcgagcatttccgggtttacctttctaaggaagccgagcggaagctgctaacgtgggaatcggtgcataaggagaactttctgctggcacgcgctagggacaagcgggagagcgactccgagcgtctgaagcgcacgtcccagaaggtggacttggcactgaaacagctgggacacatccgcgagtacgaacagcgcctgaaagtgctggagcgggaggtccagcagtgtagccgcgtcctggggtgggtggccgaggccctgagccgctctgccttgctgcccccaggtgggccgccaccccctgacctgcctgggtccaaagactgagccctgctggcggacttcaaggagaagcccccacaggggattttgctcctagagtaaggctcatctgggcctcggcccccgcacctggtggccttgtccttgaggtgagccccatgtccatctgggccactgtcaggaccacctttgggagtgtcatccttacaaaccacagcatgcccggctcctcccagaaccagtcccagcctgggaggatcaaggcctggatcccgggccgttatccatctggaggctgcagggtccttggggtaacagggaccacagacccctcaccactcacagattcctcacactggggaaataaagccatttcagaggaaaaaaaa

SEQ ID NO: 222694 - DNA, 1000 bp, Homo Sapiens; identical to SEQ ID NO: 117460

SEQ ID NO: 222695 - DNA, 1000 bp, Homo Sapiens
tctgtccacatttggggcctatccttacttgtttgaaaaaatatgtttgctttttttggtttttgttttgttttgtttttgagacggagtctcgctttgtttcccaggctggagtgcagtggcacgatctcggctcactgcaacctctgcctcctgggttcaggcaattctcccacctcagcctcctgagtagctgggattacaggcacatgccaccatgctcagctaatttttgtatttttagtagaaatggggattcaccatgttggtcaggctattctcgaactcctgacctcgtgatccacccaccttggcctcccaaagtgctgggattacaggcatgagccaccacgcctggccaaaaaaatatgttttaaatgtcccatttcaccattgccaggcaggcattcttccttcagggagaggatggtgagaattaattggttctttgcactgttctcctcatgtggcgatttcactttcatgacagcctttctttaaaggctcaggatgtcacggagaatctatctaatcccactgtattaagaggggaaaccgggccaagcgcagtggctcacacctctaatcccagcactttgggaggctgaggtaggtggatcacccaaggtcaggagtttgagaccagcctggccaaatggtgaaaccccatctctacgaaaaatacaaaatttagccgggcatggtagcaggcgcttgtaatcccagctacttgggaggctgaggctggagaatcgcttgaacccaggaggtgaaggttgcagtgaccggagatgacgccattgcactccagcctgggtgagaagagcgaaactccgtctcaaaaaaaaaataaaaatgaagaggggaaaccagaataaattatcttttggaaaggacaatttcttgtttggccatttgtgtacaaggttggtaacattagaggctgtgagcttgtgttacatggtaataaagccaatgaagagaaaaaaaaaaaaaaaaa

SEQ ID NO: 222696 - DNA, 1000 bp, Homo Sapiens
cttgagagtgacccgggatgccagtgtgctcaaagccttccagaaaactgacgactgcagtaacgaggtggtccctgtggatgccactccggaatggttgagtttaataagtatcatggagaaggatattgtcaatctgtacagacactcaaactccagtggccactgttctgtggaaggagaaactgcagaagataaggaaatccagaggataaatgagcatccctacagaaagtgctcagactcagctctgagtgaccacgagtccagggtgccagactcgggtatcccgagggactcagaccagctctcctgcctatctggggaaactgatgtgatggtgactgccgaaacagcagaagccagccaaacatttggggaaggagatcaaggggaaggctgcagcaccacctgtgctcaaaataatgtgttaccccagacagttcagaagagagaggcaaaagagagcatcctggctgacgttagaaaagagtctgtctttatttcaggtgatcaggaagtaaggtgtgcagctctttcaactcagacgacctctgatcatgatggaaaagacaactatcactggaattatcttcttagttgggagcccaaattccaacctcttgcctcagtatttaatgatattgcaaaactaaaggatgaacatttgcatatgcctggcattccaaaagagaagaaatcttttgtttttccaccccctttgataacagcagtagcccagcctgggattaaagcagtcccaccaagaatgccggcagtaaacctggggcaggtgcctccgaaacacccacgctctcccatcccctaccatcttggttctctgccagaaggcatgactcccaatttttctccatctctttccctattgacgatgcagcctcctgccttgtctccactgttgagagaaggagaattattaggaacacacatcagtggtacatgccatgaacttaaagcagaagatgaagttcaaatatga

SEQ ID NO: 222697 - DNA, 1000 bp, Homo Sapiens
aattacataatgactatagaaacacaacagtcaccaaattaaactagacttactattttagtgagttaaaaattacatactaaaagtttattggtaggtaataaatgcttttgagtaaatagtggaaaatgtctcatgttgaggctatggttttgtaggaacaagtacccttattttcagagcatcatgtacttaagtataatggtcttggtaaagatagttcatataagttgtatctagacaactgtatcgtctaaattgtaaacaattatctagtaccaattttccctttttatttttcagcatcaagagaaaaccaatcagcttcatcaaaacagaagaaaaaggctaagtcccagcaatacaaaggacataagaaaagtgggtcaccacgtggtgttcacatacattttctaattgttaactaattggagtcacagtattcttggacagaaaatgatatatcttgtgagaactgatgattgtgcattatgtattatgcttaaaggtgcagtatgccataaaaggcaaacccttgcaataatgagaaacactgatattttactaacaggagaaatgattaccacagtatttaaagtatacgtggtaaagaatagagtctgtgaatgattcttgaaataatatgtaaaacctactgaaagttaatcctttttaaaaactttatttaaaaagaaaaattagcagccaggtgcagtggctcacgcctgtaatcccagcactttaggaggccgaggctggcagatcacaaggtcaggagatcgagaccatcctggctaacacggtgaaaccctgtctccaccaaaaatacaaaaaatctgccgggcgtggtggcacacgcctgaagtcccagctactcaggaggctgaggcaagagaatcacttgaacccaggaggcagaggttgcagtgggccaagatcacgccactacattccagctgggcaacacagcaagactctgtctcaaaaaaaaaaaaaaaaa

SEQ ID NO: 222698 - DNA, 1000 bp, Homo Sapiens
gggaatttcctcttcctaataagcctgggagtgctatgggagactggggtctatttcacccctgcagtctcgaccataagagatggctacacccaggggggccagttcagagacccactcccaggtgtgcattctctttctcaaggatgttccttgctgagaaaaagaattcagtgatatttctcccatttgcttgtgaaagaagagaaatgtggctttgttccacctggctcaccggcggtcagaatttaaggttatctctcttgtttcctaaacattgctgttatcctgttcttttttcaaggtgcccagatttcatattgctcaaacacacatgctgtataatttgtgcagttaatgcaattattacagggtcctgaggtaatatacatcctcctcagctgacaggattgagagattaaagtaaagacaggcataggaaatcacaagggtattgactggggaagtgataagtgtccatgaaatctttacaatttatgtttagagattgcagtaaggacaggcataagaaattataaaagtattaatttggggaactaataaatgtccatgaaacctccacaatccatgtttttctgccatggcttcagccagtccccccgtttggggtccctgacttcctgcaacaatgtcctgcaggaaaagttttttctttatatccagtttttacatgatgaattatttcccaatatttcatagtttatgaggctgaattcctcttgaatttattaaatgcttccttcacatcctctgtgatgatcatgtttatttactgataaaactcaatacctagaactgcacctagctcatgatggtacctaataaatacttcaatgaaatgatgtggtgatgcatgcctatagttttagctacttgggagggtggcctgagcccaggggttctagaccagcttaggcaacatagcaagaccccatctcaaaaaaaaaagcatcagcaaaaacaaaaaaaaaaaaaaaaa

SEQ ID NO: 222699 - DNA, 1000 bp, Homo Sapiens
gattggtttggcacccctaaacattcctcgctatgaatttggaatatgcgttttagaccaaaaagtatatgttataggtggtattgcaactaatgtgcgtcctggcgtcactatcagaaaacatgaaaattcagtggaatgctggaatcctgatacaaatacttggacttctctagagagaatgaatgaaagccgaagtactcttggagtagtagtacttgcaggagaactttatgccttaggtggttatgatggacaatcttatttacaatctgtagagaagtacattcccaaaataagaaaatggcaacctgtggcaccaatgacgacaacaagaagttgttttgctgcagcggtattggatggaatgatatatgccattggtgggtatggtcctgcccacatgaacagtgtggagcgttatgatccaagtaaggactcctgggagatggttgcatccatggcagataaaaggattcactttggcgtgggtgtcatgctaggctttatttttgtggtgggtggacataatggagtctcacatttgtccagcattgaaagatacgatcctcatcaaaatcagtggactgtgtgtagaccaatgaaagaacctagaacaggagttggtgctgctgtaatcgataactacctttatgtcgtcggtggtcactcagggtcttcctatctgaatacagtgcagaaatatgatcctatctcagatacgtggctggattcagctggcatgatatactgtcgctgcaactttgggttaactgcactttgacaaatgtgaactctcggaaatagtatggtggtgaaacttgtactgcatgaacatccggatggcccagttttctgaaacccacaagctgcattgctttctttttaacttgaagtagcatgaaggctcaaaagttttgttgggtacttttaattgagaagtagttttggttgctcttgattacacagtaaatcaataatcaaaaagaaaaaaaaaaaa

SEQ ID NO: 222700 - DNA, 1000 bp, Homo Sapiens
taggggccacggattcggctgtgccctgtgccctgctgctggagctggcccaagcacttgacctggagctgagcagggccaaaaaacaggcagccccggtgaccctgcaactgctcttcttggatggtgaagaggcgctgaaggagtggggacccaaggactccctttacggttcccggcacctggcccagctcatggagtctatacctcacagccccggccccaccaggatccaggctattgagctctttatgcttcttgatctcctgggagcccccaatcccaccttctacagccacttccctcgcacggtccgctggttccatcggctgaggagcattgagaagcgtctgcaccgtttgaacctgctgcagtctcatccccaggaagtgatgtacttccaacccggggagccctctggctctgtggaagacgaccacatccccttcctccgcagaggggtacccgtgctccatctcatctccacgcccttccctgctgtctggcacacccctgcggacaccgaggtcaatctccacccacccacggtacacaacttgtgccgcattctcgctgtgttcctggctgaatacctggggctctagcgtgcttggccaatgactgtggagaggactgtgagagagaaggtcccagcgggggccagtgaagctcaggcaggatctgcctagggtgtgctggtttgtccttttcatacctttgtctcctaattgtgctacaattggaagaccttctttcttttgattgtctcaagctgccacccttcaaggacagggaagagaccactgtgggatgacagccagaggaataagaacttgctccctccccagaggtaaacacttggtccaaaggtttgcagagaccactgcactccagcctgggcaacagagcgagactccatctcaataaataaataaataaataaatattttttaaaaagaaaaaaaaagaaaaaaaaaaaaaaaaaaaaaaaaaaaaaaaa

SEQ ID NO: 222701 - DNA, 1000 bp, Homo Sapiens
tccctgttgtacgctgcatcatcccgctggccctgtgccctggagggtgggcggctcatggtgccacagcccctggcagggacggccggcccgcccccgtgactgactgacagatgcagggatggccgaggcagccctcgctccagctgaacgcctccattgctgcttgttctggagacccccgcccccgcaccttccagacttagcagaagaacaaactgaagaacagacccagccagagaagcagggattccagaagctgcccattaagggagaaggagaggatccggtcggcagcagccctgagcagaaagctggaggggggactgtcgcggggtttttctgttgtggtttattttattaaattttttccttttttctattcatttcgatggacgcaatcttaagccaccctggccttgctcctgggaggtgagcgtgcacaggtgtgtgcaggtcaggaggtgccgtccaggtgtgcggcgagccgctgcgcacagatgtcaggatttccgtttgggtctagtttagaacctgtccttaaacctaggggttgctgtcaggatttgctttcagactttttttttttgtaattccctttagagtctacaaaaatgtttttaaaaggatcaggtctgcttttagtttcatttttgtttctttcccgtcccactctttaaaaactggttccgtgaggaaaggcagaagccgttccgtgtctcttgcaggctgggccggcttcatgccagtgcgagggcgtcccgtgcccacgtacatacgtatgtctccatgagttctgggctccactggttccaattgagctccagccctggttttcctacccatgcagttagggactttaatttaattttttttttgtagggccaccgccttcaaacacaactgctacaacattctaataaaggctcatttaacccccagaaaaaaaaaaaaaaaaaaaaaaaaaaaaaaaaaaaaaaaaaaaaaaaaaaaaaaaaaa

SEQ ID NO: 222702 - DNA, 1000 bp, Homo Sapiens
agacggccaagcagcaccagcgtgcctttgggtgataaggggttggacacgagttgccgctggttgtccaaatcaacaaccaggtcgtccagctcctgctgaagcctgttcttggtcttttccagtttatcatacgcggccgccttctcctcgtactgctgggtgaggttctcgatctccttctggaacctcttcttcccctcttccagagcttccacggtgctggcaaagtcctgcagcttcttcttcgagtcggagagctacaaggacagcgtccagggtagggtgagagggggaccatgaatggcccctgtccctggccccacagactctgagaagcgaagaccatgtctcctcgttggagaaacccaatagcaggggaagctggggggtcaagcaccatcgcaccaacactccaccgcgatctgcctgcgggggatctcagcgcagagaagttgagaggacccatgaaggaagcaaggacacggggcaggcacctggatgttgagagtggagatgtggcgctccaggttctgcttggcctccatctcctcgtccagctggtcttgcaggctgttccgctcctcctccagctggcgcagcttcgtagacacgttgagcttctgccgggtttcttcttgaagcagctcctgcaaaagggatgcaaagaggtcccagggacctgccccgaggaaggccaccccccaggtcccctggatgatgtggcaggacactcacctgggtgtcctggagctgggaactgagggacgccacgtccttggccagcttaatggccttcccctcggcctcgttaagcatccctgtgacgctctcaacttcattctaagggtgccaagagactggttagtcaaagcctctagaaggggatcctcgttgaaaggagccctttttactcaaaacacatgggctagtacttgaggtgttcactgattgagaaaatacccgtgaggtatgggactctgaaaaaaaaaaaaaaaaa

SEQ ID NO: 222703 - DNA, 1000 bp, Homo Sapiens
tcatagatgttctgccacacaaagaacttggggtgtaaggataaggcaaaagctccaatcccatttttcagttctcctaggatgcacccctcagggagcctggccagagttccgaggctcgtgagcgtcagctgttgctttattttccatcaaagccctctgagaagtgagacctcagcaattccgggagccacatagagacagacttggcaagggaccccctggttctgagccagtagctgccatctggaaattcctcttttagcctctccttagaggtgaatgtgaatgaagcctcccaggcacccgctgaatttctgaggccttgcttaaagctcagaagtggtttaggcatttggaaaatctggttcacatcataaagaacttgatttgaaatgttttctatagaaacaagtgctaagtgtaccgtattatacttgatgttggtcatttctcagtcctatttctcagttctattattttagaacctagtcagttctttaagattataactggtcctacattaaaataatgcttctcgatgtcagattttacctgtttgctgctgagaacatctctgcctaatttaccaaagccagaccttcagttcaacatgcttccttagcttttcatagttgtctgacatttccatgaaaacaaaggaaccaactttgttttaaccaaactttgtttggttacagttttcaggggagcgtttcttccatgacacacagcaacatcccaaagaaataaacaagtgtgacaaaaaaaaaaaaaaacaaacctaaatgctactgttccaaagagcaacttgatggttttttttaatactgagtgcaaaaggtcacccaaattcctatgatgaaattttaaattaatgggcacctttcaacatcatttgcttccttatctacagttgattcagaaatctgcattttttattcttttatatgacttttaagtaaaagatttatatggatttgaaaaaaaaaaaaaaaaa

SEQ ID NO: 222704 - DNA, 1000 bp, Homo Sapiens
atgaagaaatcacgcagccttttggttaaatggcagtcaaaattttcctcagtgtatttagtgtgttcagtgatgatatcactggttcccaactagatgcttgttggccacgggaagggaaatgacttgttctaattctaggttcacagaggtatgagaagcctgaactgaagaccattttcaagagggacggtatttatgaatcagggttaggctccatatttaaagatagagccagtttttttttttaaatagaacccaaattgtgtaaaaatgttaattgggttttttaaacattgttttatcaagtcactgttaagtagaagaaagccatggtaaactgatacataacctaaattataaaagcagaaacctaactcactcgtcaagggaagttaccttttgaggaaagttaaagtacttttttccctatctgtatctatagcaacaacccagaacttacaaacttctccaaagattttattgattgttatatcaaatcagaatgtaaacatgaactcttgcatatatttaaaattgtgttggaacatttgaacatgaatgctgtttgtggtacttaagaaattaattcagttggattatcattatgtgatactggcagattgcagtgcaaccttatgccaataaaatgtaatttaacagccccagatattgttgaatattcaacaataacaagaaaagcttttcatctaagttttatgctttaattttttttctttttttttctttttcttttgtttccttggtactaattttaatttttatttggaagggagcagtataaagcttatttgtatttagtagtgtatctcatagatacagacaaggcaagagatgataagctgtttaaatagtgtttaatattgattgggggtggggagaaagaaaaagtgtattacttaaagatactatatacgttttgtatatcattaaatctttaaaagaaatgaaataaatttattgtttacagaaaaaaaaa

SEQ ID NO: 222705 - DNA, 1000 bp, Homo Sapiens; identical to SEQ ID NO: 117468

SEQ ID NO: 222706 - DNA, 1000 bp, Homo Sapiens
aacagggcccataaccagtgggcagctttaggagggatggggatctgtttcagatctaggcataacctgtaaatcacaggtgtccaaacttttggcttccctgggccacatttgaagaagaattttcttgggccacataaaatacactaacgatagctgatgagctaaaaaaaaaaaaaaaagtctgtgtataatttttgtgatatctgccaccacagataagcaaaaaagtccttgcattcaaagggttggagattgctgctttgagtgctgggtacctgtggggaacctactactccctgggccttagtctcccaaatccaccatgcatctgcccctctgagggtgtcttcactttgtctctggcatctagcatggtgcctggtgcatagtgagcatgcaataaatatttggcaggtgagtggatggatagatggataggtgaatgtaggtggacaggtgactgggtggatgttgtggtctctggagaagcactgccattcagcctcctgctccagctgttcacatgcagaaatgctctcttcacaggcagagaagcctgtggctaaagtttccacatcccattaactcagtgcttttgtctttttcatgacatggcacatagagaaaatatttttttctagcacacaagagcaacctgaaaggctgctcctggctaggggactctgtcccgggggaccgtgtcctcccccatgtcctgcctaggccctcagaggaccaggggatcatgtctccaggtaacccgactgtagcccctgctggctgagctccagcctgtgcccactgataatagcagggacggcctttctcttagagcagctgataagtttccctacctgatggccccctctgacataaactgcacacctggggtgatggcttaaagccagaaagagctgagggagttaagagggccaaccttagggcacgtgggcattattaaaggtcttaaaagcattaaaaaaaaaaaaaaaaaaaa

SEQ ID NO: 222707 - DNA, 1000 bp, Homo Sapiens; identical to SEQ ID NO: 117469

SEQ ID NO: 222708 - DNA, 1000 bp, Homo Sapiens
aaattagccgggtgtagtggtgggcacctgtagtcctagctactcgagaggctgaggcaggagaatggcgtgaacccgggaggtggagcttgcagtgagcggagatcgcgccactgcactccagcctgggcgacagggcaagactctgtctcaaaaaaaaaaaaaaaaaaaaagacggatccttttttttggtgcaaatgggtgacttagtgcattgattcagatttttaaaatttcttgatgtggtttgtaataatcaaatattgacaagaaccttaggtctcgaaagacttttataagtctagatgacgtttgccttaggggtaaagtaaaagaacaattggcaccttaagtttctatacccaaggttatctgtgaaatgagatctcctgatatttgattgctttctcagtatggagtcatatgttgataacagtactgaagatgcataagaaatgcccaagtcactcagaggacaactacccatattccagactctgagctgtttcctttttaaaaatcatatagacaattagctgtttgaagtgagtattaaatatttcagaagtgtgaatttcatgtatttgagctcctctagttgctgttggtttttcttctgctgccaacctgtgactcacaaatgactaggatctcttgttctttaattttagggtcttgttccaggactcaaatcagtaacttggtgattacaaggtgctgaatgtgttggtaaccatatcgcaatacacctcaaggaaaaggttcagatttttatttttaaaatattttcatttttttcttgaattttatatccgtttgttcactcgtacatgcctagcctacagaaggggatatatattatgaaatggtcatttttctgaagagaatattttgcttgaaatgcaaaggactgaaagagatttgtaggttgttgattttgttacttcatactggaacttttaaaaagatttcatcaaataaagttttgttttctactttt

SEQ ID NO: 222709 - DNA, 1000 bp, Homo Sapiens
ctcttttaacagcagcaggaacaagagaaatgactaaccatactaaaagactggtaacagcagcagcagccagacaggcctcaccttaaggacttgggctgccagagcaaattcagcagagcttatttggcctcccattcacacagctcagttctgtgcccacatcacctttggggaagaaatcagcattctaatcagggacactacttcaggagtcctccacagcgagtccgtcatctgtcactttatgtagatcagggttctagacttcttccctgaggttctcagaagcagctctcaggatgaacgtattgtcctcttcccctcttcttgcaaagtgcacagctaatctaatgttgtctctcggttgcacctgacattctctccccagtaaggtgttggcaagctcagcatctgggttccactctcacactgtctggcagctctgtgtctgagaagttctacattgaccaggcccccttgttgcctggagtatgacgtaatcagaaaatagacgtataaatgtgcacatgcgtatgtatttgcttgtgaaattaaagtcacctcttgcctctgctttcctgatcattcgttagagaaatggatcaggcatttttttaaattattattctttctctaaactatttgcattgtgttcaaaaacccattttagaagtttgaacagcaagcttttcctgattttaaaaacacaaagttgctttcaatgaaatattttgtgatttttttaaagtccccaaatgtgtacttagccttctgttattccttattctttaagcagtgttggcttccattgaccatatgaaggccaccaattaaatggttgtgttaatccaacatgtaaaaaactttttggcagggcacagtggctcacgcctgtaatcccaaagtgctggaatttacaggtaggaccaccacacttggtccacttacttataataaacattgatttggtcgttaaaaaaaaaaaaaaaaaaaaaaa

SEQ ID NO: 222710 - DNA, 1000 bp, Homo Sapiens; identical to SEQ ID NO: 117471

SEQ ID NO: 222711 - DNA, 1000 bp, Homo Sapiens
aatcaaagttgacgtcaaacatcttactacaaaaattcagtgacattcattataacattcttccaagtgaattgcctgactttgatgtcaaaatgtatttgaaagtaatttgcatatatctttaattatttctgtggagtttgtgatttttttatcagaaataattttaatgtgtgtatacttaaaaacttgacacgggttgtacagaaactggtatttttggtgctgatacaagagaaatgtatttttaaatatcccacatcctggatctttgttgggtatttagtatattgacatatatttttataaggtgaggtaactcagaacttaatttaaaagtcttaaatattctgatacaattcagctgtcttctctaccttaccatagccagttgctttcattttaaaccagagcaagtaacatattagtgacttgaatcttcataagttaaagtaaaaaacagcaaaaaacctagatctttgtcttttagaacacagaccattttcaggaaagcagttagctaagtgtttaattcatgaatattgtatactgcatcccctaccacaatttacacaatcctgtggatagtcctacctcaccctggtcaacctacatgatccttaagctaatggcgaatcacgatgaccttgtagacatgcacacaactatacctttgtccaacagatcataatatatctgctatccaactggttttacctgcctaatcctactgatttgggcactgcttgtatagtctctcaagttcacaggaaatgttgattttctaaggtcctcatttttacagagtatacaggcaaagtgacaggggaaaaggaattagtctaagagtaaggggatgattattatattgaggctaaaaccacaaagtggctcaggctttaaaaaaaaaacactgtggataatgacaaaaagcataagtaaaaatatttgagaaaaataaagtacaagttttgaacaacaaaaaaaaaaaaaaaaaaaa

SEQ ID NO: 222712 - DNA, 1000 bp, Homo Sapiens
agtccctcatcagatcgagactctatttcccccgtcagtctgggggcttcacaagggcaggagagccctccatcactgacttccagatcagggaccctgccaagtagggactgtcttctcagccagccatttattagtctaatattccttcactaaattccaactctatgtctggacctgtgttaggcacttcagataccacacgagtaagacaagggccctgcaggggtggtcctttggtggaaagctggtcttaagggttgggcttgggaataggcagggtcagattccagggcatggctctggactcagctggtttatacctatatgaccattacagttgtctacagatcacatccattctggctggtcaacatgcatgctgtactggctgttaaataaaaatattctgaatgtcactccttttgagggacagcacagccttccctaggcattctcctatattccccagccaaattgtagagtcagatgcacccacatttgcctgtgtccttgatttagcaggaaggaaaggaatagtcggggttgatggatgcccacttctcttctctttctcttggtcaactcaggagccttttagtctgagggaatggagaggcaaagaaagaagggagagtaatagaattgggagggcagagacttaagggttctgcttcccagccctagaaattctatcattgctcagccccaatgagaaagcagatacacctaagccatcatcaaccactaacatctcaacttgccagttgctgggtgctgggccctggcaggaatgggccaagccaagcaggggagactagagagcaccaatggccaacacagctgcctggctggggaggctgtgctgtttcccctggagacctgactggtctgtggttcccacaggaacagggttgtcttttgagcccccagtgtctggtttcattcatctcagacttgttatttcactcatctctaataaaggattggggggtcagtt

SEQ ID NO: 222713 - DNA, 1000 bp, Homo Sapiens
ttcacgtggagtgacgcacgcctgcaccgaggcctggtgaccctgctgactggtgaaattgttgacgccttcagccttgagttccggacgctgtacgcggcctcctgcccgctcccacctgcgcccccccagaaaccctcggtcataggtggcctgcagcggggccgcagcctgcaccgcgtgtcccgccgccgctccgtggcccccgcgtcgcctccgccgcctgacggcccgctggcccaccgcctggccgcctgccgcgtctcccctgctaccccggggccggcactcagtgacattctaaggagtgtgcagcgcgcccggacccccagcggccccccggcccggcccagccgctccatgtgggacctaagccgcctgtcccagctgtctggctccagtgatggggacaacgagctcaagaaatcctggggctccaaggacactccagccaaggctctgatgaggcagcggggcactggaggaggcccctggggggaagtggactcccgatctccgtggggcggtgccctgcccctgccccccgcccaccgcctccgctatctgtccccagcccgaaggcggttcggtggggatgctacattcaaacttcaagagcccagaggcatcaggccgtcagactgggccccccgggcaggacttggggggcaaccctgaacaggagcccaagccaaatctgctggcccacccaaggagcagtgccggacaactgtcggctcagagccctctgcctcaatgccctgccttggacaaggcttctggcctcggcgtctgtcaagcagaagggatgtttgtcacttgttctgcaacttgggctgggagtggtggctcatgcctgtaatccctgcactttgggaggctaaggtgggagggttgcttaaggcgaggagttggagaccagcctgggcaacatagtgagaccccatctctacaattaaaaaaacaaattagttgggaataaaaaaaaaaaaaaaaaaaa

SEQ ID NO: 222714 - DNA, 1000 bp, Homo Sapiens
tactgctttgttgactttgggaaatggtgccactcaaaagcaacttcctaacttgaggaataactcctttgtagtttactttctggtactggttggtgccttgtattgggatacagctatattcttagctcaaatgtcctctttttgagagcaaagtagttatccaatggtgagacgagaccctgacgctcatagaggccattccttcctgggtgtcggaccagggctctgtgtcagggaaaaccttctgggtggactttgtaagaatccagtttccaaggttagattcacatccttaatcttgcagagactagaatttcacagctcgctttggaacatattccaattcaaccagttaaaatcagaggaccaagtcgtgggggaggggggcggtgttgaggagaggtatttttaaagatctggcaacttttcaggattatttgtggagaactctaaggttaagatcaggaaataaaagactgtgtgtgtgtgtgtgtgtgcgtgtgtgtgttcaagtgcctaaatcttgtttacctatcactttaaaaaaataattgaagtgtaagctaaataaaatgcttggagttttgcctgggctagtgagagttggtgcaaattcttgtgtgtgtttgcataggaaggtgagatgaccatctactaaagaggaagtagctaaatacagatctgtgggtgtttttaaaaaaactcaacctatctggtgttttattttaatggataaaaatgtaatttttctaaggtagcaacttatttccaaattaatatagatgaaaaatagataccaattagactaaattgaaagctttttgttctatatttgcatagcctttgaaatatttcttagtgcctaggaggtctggggattcctctttcgtggtggtcactaaccttacttgatgcagataaaatcacttgtcaatgcaaaatgtgttagaacttgataaagctttgagtttgagaaataaaggtatatttaaaattt

SEQ ID NO: 222715 - DNA, 1000 bp, Homo Sapiens
tggggggccaaaccgctggcaggccctgatcagaaagaggctgagagtcagacggtaccagcattagaagagctattggaggaagctgcagccctcaacctttccatcatgttcgacttgcgccgacccccacagaaccacacatactatgacacttttgtgatccagacattggagactgtgctgaatgcaagggtgccccaagccatggtcttttggctaccagatgaagatcgggctaatgtccaacgacgggcacctggaatgcgccagatatatggacgtcagggaggcaacagaacggagaggccccagtttcttaacctcccctatcaagatctgccactattggatatcaaggcattgcataaggataatgtctcggtgaacctatttgtagtgaacaagccctggctcttctctctgctttggtgtgcaggggtggattcggtcaccaccaacgactgccagctgctgcagcagatgcgttaccctatctggcttattacccctcaaacctacctaatcatatgggtcattaccaattgtgtttccaccatgctgcttttgtggaccttcctcctccaaaggagatttgttaagaagagagggaaaactggcttagaaacagcagtgctgctgacaaggatcaacaatttcatgatggagtgaatgccctgccctgcttccccacccaagccagtctacattgcccaaacagcaagggttggagagtggcttaagtggaatgcttcaggggtggtgggttgcaagtggggggagctttgccaacaggaggttttgaaccatgagggccctctgcccaggtgatgggcattccctaagctgctatggaatctgctccctttggggttttgacctgagatgtttgggaagagagtgagtaatgagaagtttctcctcaaatgaaactagaacagaggaagtaaaagggagattgctcggaaaaaaaaaaaaaaaaaaaaaaaaaaaaaaaaaa

SEQ ID NO: 222716 - DNA, 1000 bp, Homo Sapiens
taaagaggagacagctgtctagagtggaatgcaggggcatgccatcaaataacagcaaaattcctccgcagtactgcagcaggcgtcgtctattcaggtcaacactgcactccagcctgggcgacagagtgagactctgtctcaaaaaaagaaaaaagaaaaacgacttggggaggccgtacccgtggaccagggttgctgccccaactgctgccactcaccagaacaattggagtacttgggcagaaactgagagtcctgccctgggagggaagctggattctacccctctaaatgggctgccatgtggctctgtgccttctcaaacttctcttctggaaccactcccaagcctccaccacagcttcctggttaacttcaagttgagcactcctgacccaataagagtggctaggagtcttggcccagagtccttcagaggcaagtctggtaggtcacacagaggaccaagcccagcagtactatgtgtgtagtgctgcagcagggcctgaggagaaggtgctgctgggcagctgtggcctctcttcagccagacccccagagcattgtagtcagcagtaacaccatcaaaacaggtatctagccttcctgggcctctgtagtgaatgtacaaattctaatgtgattttcaaaattagtctagcccgcaagtacaaaaccatgcttagaagaaagaacaaagggaccgggcacagtggctcacgcctgtaatcccagcactttgggaggccgaggtgggcggatcacctgaggtcagagttccagaccagcctggccaacatagtgaaaccccgcctctactaaaaatacaaaaattgcccaggcatggtgatgcgcacccataatccagctacttgggaggctgaagcaggagaattgcctgaacctgggaggcagaggttgcagtaagccaagattgcgccactgcactccagcctgggcaacagagtgagactctgcttcaaaaaaaaaaaaaaaa

SEQ ID NO: 222717 - DNA, 1000 bp, Homo Sapiens
cccttcaggctgagtgtgaagcgtctcagaggcatttcagaacctgagcttttgggggtttttaactgaagttggttgttttatctttcttgttttataattcctattgcaacctcgtgcactgctcgagacacaagtgctgctgtagttagcgcttagtgacacgcgggcctttggtgggtgagcgggactgtgtgtgagtgtgtgcgcgtatgtgcgcacatatgtgtatgtgtggagtatgtgtgtttgcttctccgtggatgaaatagaaactcctcattgtgtgaccaggaatggttaaatcatctttacaaaatgtgtgctttaactgtttacaagtaaaacctaaagttgcaggaaacattttttatttcgtaaagaggtaccaactgtcgctgatgtgatatgtcagaactgaagagtaaatctacttgtttaaatgacttgacagtggtagtgctccatttaataacagtaataagtaataaagtgtttttatttgttaaccagtttaagtggatcctgtggtaacttaaactgttgttctcatcccttatatggggcatttttctttaacaaagaatggtttcagtgaaacaatctagcagagaattaatgtcagaacctttttaaataatagtctgattgatacagtttgtacttatttcatcaagcttttctaagcttaaatattgcatagcttcgagctgtatggactatattatgaaagaatatgtaaagagaacatacagtaatgcacagtccttaatttgtgtataatggaaagttatttacaatataacactgtaaataagaaagcaaagtttatgggaaaattcaatattatctttgtttttgtttaaatatatttttaagataaaggcacaaaaataaaagaagcgtattactgggtatagtatgtgactcctcttctcagactaataaattatcttttgaatccttggaaaaaaaaaaaaaaaaaaaaaaaaaaaaaaaa

SEQ ID NO: 222718 - DNA, 1000 bp, Homo Sapiens
tacttattttactttctagacctaggctagatgttttaagctacagctctagttcattgtgatatttataatttgaaagctatgagaatagatgtgtgggtgaagccatagaacatatttgcttgaaattcttgagcagggatcttataaagggccagaaataagatgtgtggttcacatagatagtgagcgtaacatctgtattaaacataggagagaagtttataaagggcattggcaataaactctttgttgcagctgttttccaagcagtgtaaatactttttcctgtgattatgtatagccttggaatggcaccttttaactaacccatatgtgtttggtttcaatggttttttatattcagatgtatatatggtgctcactttaggatcagcagtgttgaccatttatgctgcatagctgtattatagccttattagttgtgtggttgacccttggggtatacaaatgtcagtctgagtggtgtcttactcctttgtttataagtgaatgattgtgcatgttttgtatgtcatagtatgtcgtcacataaaagggagggagcgaaaaaccattacattaagataatattggaccaaactacttacttgctctaaacagttacttgtaccccttaacctgtcttcaaaagttgcatatagttacagtagtgtataaattaaatattgtggaaaaacagtcttgtatttttctgtatgtgtgtatatatatataattatgtacttctggcaattctatctgtatttaaagatgtgacaatcttgacaccaattttaagaatagctgtgagaccgaattaaagataatccctaccaagtgaaaattgatgtgtgttaagagggtacagaattatcaactgatttggtcagttgcttccaatgctggttgatttccctcattgtgtaaacattgacaggtatgtgacaaatgggaaaaaaaatccaaataataaagtgacatattggtgttcagcaat

SEQ ID NO: 222719 - DNA, 1000 bp, Homo Sapiens
actagagggaagccatccccacctggcacctcagcggcttggcagtgacatggcagtgggagggctctgaggttcccaccctgacaatggtcaggctgcccgtgctcccactccaacactaaaagcggctcccttaggggctgagcgtgggtgctcagtgttcacgctatatcccttgggcaatgtggggttggatggggcccccacttccattcccatggaaggaggccaggtccccagccacctcccactcagccatgcacgcacttgctgggctggcctcctgggaaacacaggtgactcgaatgaactctgcattttcaacgtgccttctactgcttcaggacctgggggtccccctgaccctcactggcttgcccccagccctgggcctggccccacctgtcctggagcccagagcccctggcctggagctgcctctctggggtgggtctcaggccccacccctccctcttttgagttcagtgccttgctcagcccctcccctgtatctcagcgtcttgagacctctgacagagcgacgatgtagggtctcccggggcccaaggtggtctcagggtcaggggtgggatttgcagggaactcggggagcccacgggctgcgccacctctgccctggcagctgaagcctgggagagtccctgcgtggtgtaattggcctcagcccgctttctctgtgccgtcgcacctcagtgtttctcatagcttgtccccacgtgtcactttccatccacgggaaaaacaaatgccccttctccatctatcattgcgacttcctcccaggaggcctctcaggttgggtagagcaggggcctgcagtggtcaggccaagagcaaggaagacctggctgccccactgtggctgaaaactcaaaacatctggaactacccttctccaattacgttccctcttgcttaaagacaaagctaattaaatcatcctgccacccgaggctccaaaccaaaaaaaaaaaaaaaa

SEQ ID NO: 222720 - DNA, 1000 bp, Homo Sapiens
ctgacaggatatgatgggatcatccatgctgagctggttgtgattgatgatgaggaggaggaggatgaaggagaagcagagaaaccgtcctaccaccccatagctccccatagtcaggtgtaccagccagccaaaccaacaccacttcctagaaaaagatcagaagctagtcctcatgaaaacacaaatcataaatccccccacaaaaattccatatctctgaaagagcaagaagaaagcttaggcagccctgtccaccattccccatttgatgctcagacaactggagatgggactgaggatccatccttaacagctttaaggatgagaatggcaaagctgggaaaaaaggtgatctaagagttgtaccacctatataaacatcctttgaagaagaaactaagaagcatttgcaaatttctcttctggatatttggtttattttttctgaagtccaaaaaattatcattacagtgtaccatattaagccatgtgaataagtagtagtcattatttgtgaaaaattcccaaaaagctggggaaaacaaatgtgtaacttttccagttacttgacacgattcagtgggggaaaaccagcattttttattctattgataccaaagcatttctaataagagcttgttaaatttaagaataaagttatttaaaatattctgagtatagtatattaactggcattgtaatttggatgatacaaagattgaaagatcataggaaagcattgcccttcatcacagaagtattcaactctgacaaataaatatgtcatcctgaattaataatgccttaataaaagtacatcctcctgctaactatcacttcagttggtttggtagagactccaaacccttgcacatatccaaaaggtgcatcccgccaatgatccccagattcggggtctgagtttggatagtccggccagcgcacagatcataacccgcacattcatctccttacttatcaccccttcttccattca

SEQ ID NO: 222721 - DNA, 1000 bp, Homo Sapiens
tggccttggaagactatcaaggttcagcaaaggcatttcagcgctgtgtgactctagaacccgataatgctgaagcttggaacaatttgtcaacttcctatatccgattaaaacaaaaagtaaaagcttttagaactttacaagaagctctcaagtgtaactatgaacactggcagatttgggaaaactacatcctcaccagcactgacgttggggaattttcagaagccattaaagcttatcaccggctcttggacttacgtgacaaatacaaagatgttcaggtccttaaaattctagtcagggcagtgattgatgggatgactgatcgaagtggagatgttgcaactggcctcaaaggaaagctgcaggagttatttggcagagtgacttcaagagtgacaaatgatggagaaatctggaggctgtatgcccacgtatatggaaatgggcagagtgaaaagcctgatgaaaatgaaaaggcattccagtgcctctcaaaggcatacaagtgtgacacccagtccaattgttgggagaaagatattacatcatttaaggaagttgttcaaagagccttaggacttgcacatgtggccataaaatgcagtaaaaacaaatccagttcccaagaagctgtacaaatgctttcttctgttcgactcaatttacggggcttgttatctaaagcaaagcaactttttacagatgtggcaactggagaaatgtccagggaattagctgatgacataacagctatggacaccttagtgacagagctccaagacctaagcaaccagtttcgaaatcagtattgattctgctggaagcagattctggaaaaggtgctttcacctgctgttaaaagatacatctgtatatctgaaatgcaagatattgatttttaaaataaatttgttttatgacttaaaaaaaaaaaaaaaaaaaaaaaaaaaaaaaaaaaaaaaaaaaaaaaaaaaaaaaaaaaaaaaaaaaaaaa

SEQ ID NO: 222722 - DNA, 1000 bp, Homo Sapiens
tgagcaggcttggtacacacaaattggcctgagcataagaagaaaaagtatcaactaaggatttaatgttttacgtttcatgaagaaactagactttttacataaaactgctatagatggccataagtggtccagggagcaacagatttgtagtatgagcaaatataaaatgaagcatcataacttgagcatttattgaaataaattgtgtggtccaattgaatctgctctcattgatgtgctggtttatgtaggagatactgtgtatttctacaactctttggcaaaaacaaaaacattttcttcttctctctcttaacttcacaatactatacgttgtgtagtcatataaatttgcagggaaccacaaacccaatgtataaaattaggctctatttaacagaactactactgtggtcagctaattaaagttacattcttaaccatgatgtcatccttatttagattcctgaacattcccacctcatttcacctcttcaccgtgttcctgccataccctttttggttcctctaattcaccatactggtgcctgcctcccacatttgcccttggtcttctctctttctagaatactctgcactcaactttcctcatggctggctccttgtcatcattcagctccaccttccccggtccctcagagacacattctctgaccagcttactattttatttcctcatagcacaaaattatctatctgttcatgtatttgttttcttgtttattttcttcttttccctctttagtatgtaggtcccatgagattaaggcaagggttggcagattatagcctgcagggcgaatctggcctgccacctgttttgtatggcccacaagctaagaatggtttttgccttattaaattgtttttaaaaaatcaaaaggagaataatattttatagcatgtgaaaattatataaaattcaaattttggtgtctgttaataaagttttattggaacacaaaaaaaaaaaaaa

SEQ ID NO: 222723 - DNA, 1000 bp, Homo Sapiens; identical to SEQ ID NO: 117479

SEQ ID NO: 222724 - DNA, 1000 bp, Homo Sapiens; identical to SEQ ID NO: 117480

SEQ ID NO: 222725 - DNA, 1000 bp, Homo Sapiens; identical to SEQ ID NO: 117481

SEQ ID NO: 222726 - DNA, 1000 bp, Homo Sapiens
catatttcgctgcaattttccaaacgtggaaattgtcaccattgcagaggcagaattttatcggcaggtttctgcaagtctcttgttctcttgctccaaagacctggaagccttcaaccctgaaagtaaggagctgttagatctggtggaattcacgaacgaaattcagactctgctgggctcctctgtagagtggctccaccccagtgatctggcctcagacaactactggtgagcaagctggacccaccatgtacagtgtgttatagtgttaatccttgtgcatatgtgtcataatacaactatttctgtaaagaaaggacactattacatatgaaaatatctcttctttatataagagaaattactccagtcagaaggacttagaaacatgtttttttccttttaaacttttaagtcagtttttatgaagttgttataatgtttctttacttttcaatgcacacatgctttgggatacgtttgtttttacttggaacatttgtttcttttcttttttaaggagaaaaaaaaatgagtaaaaggagctccacactttgacttaatttcatacaaagctctgatgacaggccatgactgtagagtggtcagaactgtgtggttggtttgagggagcgaattcggggaaggcacttggtgatataactttgttttgtttacagagtacctgctcgggccaggtaaatgctattggatgtaatccagtagtgtgtaatataaattcaaaccatatccacacacaacaactaattgtatgaaacttttatatcctaatttaaaagctgtgaaattagttttcacgcatcaaaccggattgtttatatgtttaaacattttatgctcttatttaaagaagactttgagctatttttttctgtaccctgtaaaatattgaaaactaacataatatgttgaggttgcttggaaatgtacataaaactaaaattttctgaatcgtgaaaaaaaaaaaaaaaaaaaa

SEQ ID NO: 222727 - DNA, 1000 bp, Homo Sapiens; identical to SEQ ID NO: 117482

SEQ ID NO: 222728 - DNA, 1000 bp, Homo Sapiens
acaatttattaatcaattgacttagaaaatagggggagaaatcattcattggagcttctttctttagaaaagactttggttataagccttttgacttttctagatgtgaaaccatgaaagggcagacctccttcagagtgactcaagaggtctccctttcttggagggagttggtacagtcagcctttgggaagaatccactgtgaacaaagcttaacacatggggcttcatcgctcatagaatatgttattttcaaagaagttcaagaattttcaagttgagcctttgaaaatcccataaattggttttagctaaacacttactagtagtgtctttaaattatttaatcaaccttgtcttttcaaggaaattaccacttaaagagatagttggtaaataaacatctatgccttttctcagaaatgatttgctgaactatgtccatattttacagcttagataatagtttatatggaaactattatacatctgctattgtgcaatgattgttaaattatactgaagtagctctagaaagacacatgtatacaaggcactattgtacacactttgctgaatattttgtcagttgtatttacaaagaaaggtactttcttaagagcatatatgttattaatatttgatatgattttaaagtcagaatagtacagattgctgagtattatactttaggctagattaattaaaattgaatactgaaagagattttttgagttgcaaaaagtttataaatgcaaagcaaaaagaaaacatttattttctgagtctgcaggagaaacaaactaaacattatagttttatagctgctatcttgttaaccaaacaggttgttcataatattaaaaatcttacgtagttgtgttaaactgaaccagttcattataccttatgcattaaattaaatatgttataaggtggctttacttgtctttataaaaataaatatatctactaaacatgaaaaaaaaaaaaaaaaaa

SEQ ID NO: 222729 - DNA, 1000 bp, Homo Sapiens
tggacagtgcccaggtacatgctttcaggaatcctcaactttgaagactggccacatcaggccagctgtgggccttcgctttgaggtggggcctggagcagctgttcattcccccctggcctcacaaaatggcttcctacatttattgcttcatggctgtgacctcgagctgctcacttcagtgctcagtggcctggggcccttcttggaggatgaggagatcccggtggtagtccccatgcagattgagcttctgaactccagcatcaccctaaaggatgatatcccccccatctatccaacatctccaggccccatccccatcactctggccatggaacatgttgtgctgaagaggagtgatgatggtgtgttccacataggcgctgctgctcaggacaaaccatcagctgaagtacttaaaagtgagaagagacagcccccaaaagaacaggtgtttttggtgcccacaggagaggtttttgaacagcagacatagcaataacaacattctgagacacagaggtgccagtgatggactggatcagcttgaaagaagcacaaagactccgtgatcacaatagtcaaagactggctttggaacacagtaccaagtaattcacagaaaaagtttttggctgcaggattaagtaatgatgagtcttccctttcaactgttgttaaatctgagacatcctgactctcgagctgggaagatgaaagaaactctattatatatttggcctactttccaggcttgggcaaaactcgctctgttgcccaggctggatcatagctcactgaagcctcaagtgatcctcttgtgtcagcctgccaggtagctagatctgcaggcgtgacccactccactaggccctttttctggtttcttgagttaggtgcttatttgcaatatcttctggctgttaataaaaatatgtaaggctatatatttttctttaaataaagctttggccaaatcccaaaaaaaaaaaaaaaa

SEQ ID NO: 222730 - DNA, 1000 bp, Homo Sapiens
agtgccagcccctgccatcccaaagctattgttaagccccccaggcgtcctccacccacgcccactagcctgccatgtccacagttccttgggctgctgaggggctagtgcagtggtcctgacctctcttatcaggagcacacttctttgctggttgctccttttgagcatatgcgtgtgattatttggaacagttagacttgccacgttgggtcagttttagaaattgtttctagctagagggactggtgtccttccaagtctagcatttggggtatggaaaattgttgtggtgtgtggtagggtttttgttttcttttttgagtttttttttccccctttagtctcctggctttttcctttcccttcccttctccactggccagcttgggcctcatcctcatgtcatccttctaggaaggcgcctgccccatcttgtctgccggcagcatgcatccaaggccagagctcaggcctgcagactgggctggtgcctcctccgcttcagggtatgggagttggtgaaggggctttcaaaaaataataaggaaaaaaaggtaaagtctttggtagcttctatccactcagatcctggaaggcagcaaggttttgtggatctagattcattaggaatgtcttcttgtcagccaggccaggacccgggcttgccaagagcagaggccctcccagcaaccaggataccaccactttgggggctttgtgtacagaggtccgggtctgagacctcataggctgcagaaatctggggcagccaccatcaagaagcccctctcaggggccagaactcctttgccagcgtggatttctcaagtcgggactgcataattaaagcagttgcagttttattttttttacagcttttttcccaaaaatgatttgtagttgtgtgtgcagcacttcgccctgatatgtgtgctctacaataaaaaccaaatctaatatattttgaaaaaaaaaaaaaaaaaaaaaaaaaaaaaaa

SEQ ID NO: 222731 - DNA, 1000 bp, Homo Sapiens
tcatgacggcagccatgcctcccagaggccacatcctgcccagctgctgagcaaggcagatgacctaatcacctcacgacagcaatacagcagtgatcactcacactcctcaccccatggaagccattatgatagtgagcatgtgccgtctccctacagtgaccatatcacctctccccacacaacatcgtactctggtgataatatggcagctccagtgtgcttccggggttaccacagaccagcttcagtggcatggggccttctgctgaactaatggcctccacctctcccaagcagcaactccctcagttcagcgcagcctttggccaccagctgagttctcacagtggcattcctaaggacctgcagcccagccacagctctatagcccctcctacaggcttcacagtaacaggtgccacagctacaagtaccaataatgcatcttctccctttccctcccctaactgagggtgtctgtgtgtttgcaggcaggtggggaacccagtgttttctatctttgtttcctctttagcacccctctccccttttcctaaagaagatataacagatggggatcagaggggcaccccccttcccagttcaatgagtggccctgcagtggacctcgctacagtgttcacatgtgctccttagcactggtgctcattccctcctggcaggcccactccgccccagtggtttccttagtggttcagcacagtgactggataggattgatttttagcagcaagtcctagaagtggaagatacctcagaataccagtgccctttactatttcctagtattcagatcagtgctttccattctgttgccaggtttttacataggtggttctagatagaatgatcttattaattgagttcctgtataagagacagcaaatggtgtgtggcaggtcaagattctgacctagcaccaactgctaaacaccacagtgaggccaggattccattcgtaattgtgatcatgttt

SEQ ID NO: 222732 - DNA, 1000 bp, Homo Sapiens
cctccagagaacttcttttaatgcttctttcaaggcatgtctactggcaactaattctcttaattttggtttgtcagagagtcttttacttctactttatttctttgcagggataatgttatgtagtttataattctagttgatgaatttttttctctctgtactttatttaatttattattattattttttgagacagagtcttgctctgttgcctagggtggaacgcagtggtgtgatctcagttcactgcaacctctgcctcctaagttcaaacgattcttgtacctcagcctgctgagtagctggtatacaggcacatcgccgccacacccagctcatttttgtattagtggagacagggcttcaccatgttgcccaggctggtctcgaattcttgatctcaagtgatctactcgcctcagcttctcaaattgctgggattactccccgtgcccggccactctctgtactttaaacatttcgctatactctcttcttggctcgtgtagtatctgagaaataggatataattctttttttgctcctcagtagataaggcgtatttttccctatctggtttctttcaatactttttctttgtttgatttttctgtaggttgaatatgatatgcctaggtgtagttttcttttctttttttttttttttttggcatttattctattcagtattctatgagcttcctggataaattctcagttattattgtctgaatatttcttctgttcctttctctcttctgaaattcttattatacatgttaacaccttttacagttgtctcacaggtcttggatatttcattctatcaaaacagctgcatttttgagttctgtttgctaatattttatttgagaatgtttgcattaggtttgaaataagattaaatggttgttggttgttttgttaaaaaaaaaaaaaaaaaaaaaaaaaaaaaaaaaaaaaaaaaaaaaaaaaaagaaaaaaaaaaaaaaaaaaa

SEQ ID NO: 222733 - DNA, 1000 bp, Homo Sapiens
actgcgtggtggaggaatgcggcgcgctcttcagcaccttggacggggccatcaagcacgcaaacttccacttccggacagagggaggagcagcaaaaggaaacacagaggctgcctttccggcctcggccgccgagaccaaacctcccatggccccctcgtcccctccggtccctcctgtcaccacggccacggtgtcctctctggaggggcccgctcccagcccggcctccgtgccctccacccccaccctgctcgcctggaagcagctggcttccaccataccccagatgcctcagatcccagcgtcagtgcctcacctgcccgcctcgcccttggcaacgacttctctagagaacgccaagccccaggtcaaacccggattcctccagttccaggagaagtgagtccctcgatgagccgggagtcccgcgttcccctcgcgtctcgggagtaggtgctagcaagggcgctaggaggccctgttcctcactgcggatggtgctgctgtccccagcctctctggggcatggccatcgggtgatgtccttctagccaaagatgctgctgctcctacctcactgcctgtcccagagcaggccagcccgcgtgggccgatggtggcggcagtggctactgctcctgcagggcatgtggtgatcctgccagggccaggtggggtggactgggcgtggtggtcctcagaggacaactcccagcctgacaaggagggctgcgtctccctccgagcctccgtattggcctcctctgtggctcacacccatggctgaatctctacagggcacgtgaagtcacgggtaggggccaggcccctccaggccgtcactggcctgcacagtggtctgagctcttgggtggaagggaccctcctcactggatggtggtggctccttgcagggagaacggtgactttgtattgtcatgtgtgcggcttcctgttctcaataaaagtaataaattggaaaaaaaaaaaaaaaaa

SEQ ID NO: 222734 - DNA, 1000 bp, Homo Sapiens
gaattcctacttaacatggagttgctttataacccttgtcatgtattattaaccctggttaattctaaggaggatgtaacatttgttttagtatcatcttaaaaggtgattattgtaattgatcttgtagtttcccagtatcacctacccgttggtataattagcctgggccatattcactgccagtaaatatttttacatttttatttaagatttttgtaaggtgttgtgtacatttgtaatggtgataaccacaatgtgttcatacatttgttctaaatgttttgcttatgatttatcctgctaactttcattttcttatagcaagcagttttttcaaaaatgaatttttatttaatgtggttcagtattataataacaaagcatttttgtagaactggttttttttctcatttatttttgtattccatacaatgtgaccaattgacttgaatatgactagccagtttctatgtttttgttagatataaaattaaatcgaattttgttgaatactgttctttggcatttaaaaaataagaccttcttatcttgggccacatgtcaaaagaaaaaggaaacaaaaatatattaaaaataagacttttcattacccatgataggacttttgtgatatggctaatctcagtacacatttcaacttaaaacctttttatttacagcaccataattttaaaatttacttgcaatcttggtaagactaaacttgcagtgtttttctaaaagggaatttgataggtaaacttgatttaataaaaattaaatatcatttttgtttacaccaaaattatcagaagtaggttgattagtcattataacacttaccatatgattctattaagaagtcaattcagtagcatgtatatcaatttatatagataggtagatagcttttggatgattgaggcatgcttatattatgaaaaaaattgctaataaagataaatactacatgttcagaataaaagttacatttttc

SEQ ID NO: 222735 - DNA, 1000 bp, Homo Sapiens
cgatcttatttttcacaattcaggaaaatcaatacattggaaagtgtggatgtccactgctttggccacttactgtatgaaatgacttatggacgaccgccagactcggtgcctgtggactccttccctcctgccccgtccatggctgtggtggccgtgttggagtctacgctgtcttgtgaagcctgtaaaaatggcatgcctaccatctcccggctcttacagatgccattattcagcgatgttttactaaccacttctgaaaaaccacagtttaagatccctacaaagttaaaagaggcattgagaattgccaaagaatgtatagagaagagactaattgaggaacagaaacagattcaccagcatcgaagactgacaagagctcagtcccaccatggatctgaggaggaaagaaaaaaaagaaagattttagctcgaaagaagtcaaaacgatctgctcttgaaaatagtgaagagcattcagcgaagtacagcaactccaataattcagcaggatctggggccagctcacctctcacgtccccgtcatcgccaactccaccctctacatcagggatatctgcattacctccacctcctccacctccaccaccaccagcagctcccttgcctcctgcgagcaccgaggcacctgcccagctctcgtctcaggctgtgaatggcatgagccgaggggccttgctcagctccatccagaatttccaaaaaggaactttgaggaaagccaaaacctgtgatcacagtgctccgaagatcggctgaagcttcctgtttacacttggagggaaaagttcttttttattcctactcacccctaccccccaaactaccctcttcctgggaaagtaattgctgagccagtacagccacaaacagtactattttgcagatgctcatgtaagcagcttttcgagagaaataattctttaagcagaataaagttaggctggcatgcaaaaaaaaaaaaaaaaaaaaa

SEQ ID NO: 222736 - DNA, 1000 bp, Homo Sapiens
gtgtaaattgtgttattatgtatatgggtaaagatgtacaaatatatgtcctctttgtagcagatatgattttatatttataatgtgcatcaacatgtgaaagcaatctaggtcactagcacagaggaagttgccaggaaggtggcttcagcacctccaggttggttctgggtgtcctgctgtgaggggtagaacgggaggctgctgaagtgagtagctgagcagctggagccatcccaagcatcagtgtctcagagtcctcctcgcccctttcttcaccccgccccccaacccccagactttcctggagcatctgccctttgctcctagcagcctccccaggaagggactgcagaggcgggcaagccctctctatgtgtttttatccccaccttccccggaatctggggagggcttttgtttttacgttttcaagttcagcattgtattcggacagaagctgtgactgaagactcagtgccaaggaaaggggcttcttgtgtgtccctcgggtttggggctcttctcagagagcagcactccatatcccttactgtcaccttcactccccacacagctcatgagatgtgtgacccctgtttgagttttggtatttggtagtggagggtggggggatgggggccagcagctgtcatcctcctgggaagccgagcagtgtccctggtgggtaacaccctcaagtctctttgccagtgaggccccaccacatcggtgtgagttaggtttctcatctggagctgtttctcaggcattcttcccaaccctcttccttttccccttcggtgtgcctcagtggtctccttcatagagtgagagggcttgagaccctccctcaaccggactaattaaagaaagacacttgtgttcccaagtggtggttttatttttttagtttttatgtttgtatgggaaattgtggataaagtgaaaagaattgtaaataaatggtgtatttcctcctccaaaaaaaaaaaaaaaa

SEQ ID NO: 222737 - DNA, 1000 bp, Homo Sapiens
ggaggtttttcattggcggttctctggaactggaggacctctcctatgtacggataccaggatccttcaagggggaacgcctgagccgctttggactccgcacagagaccacaggcactgtcaccttccgcttgcactgtctgcagcagtccagggccttcatggaatcgagctcccttcagaaaaggatgcggagtgtgttggaccgtctggaagggttcagccagcagagttccattcacaatgtgctagaggccttccgtcgagcccggcgccgcatgcaggaggcccgggaaagcctcccgcaggacctagtgagcccctctggaaccctggtctcctagctcacagcagccctggcccacagtgcaagaggacaagatgggggatatctgaggccagtgctctcctgcctcttcgtctttctgattagagaccacgttggtctgctgagaaccagaaaagctgggaaattcccggctggcccctctgcctagccttctgcagggtcttctccctaccctgtggaaataaagccagagaccctgtggccccccctttatatttgcagccactgtcagatgggcatcacagcaaggcaggctttttgatctgaagctgtttggggtgaccccatagtgagtctggccttgactcacttttctggcttgtactcacagtagcaggggatctgctgttctccaccctttaaaaatggagcctttcatcttccaagaccaaagaaggaaggaaggtggacggtgagagggtcttaaatccccagcctgtgagtctcagcctctttccagggaagcctcattctactgcttggggcttgctgaggttgagatatgagttatttctgagtaagtgaaggctgaaggcagtgctgagtcctttctgctagctgggtggtatcttttactgtgtttttttgtttgtttgtttttttgttttttgttacataaaccccttttattttggaaaaaaaaaaaaaaaa

SEQ ID NO: 222738 - DNA, 1000 bp, Homo Sapiens; identical to SEQ ID NO: 117486

SEQ ID NO: 222739 - DNA, 1000 bp, Homo Sapiens
aaccagtaccagttccagttcaagtgtttaaaacttttgacaagtggtagtcctactgtttacactcacagttaatgttcatacctagttttataagctgttctgtaacatagtgtagcaaaaaaaaaagttcaagtcatgttatacaggtgtgtcaaaaggtatcttggtcattaagtattgtgcagtgcattatttattatccctaggagagatgaaatttgagaggtgatcatgtctttttaaggaaacttacataatgctctgctttttttttttctcttggtaccattggtattataataaagagcaatttgtaactgagtggcactaatggaagaaagtgctgctcaaaggaagtatgaagttatatatttaattttttaattttaatttttaatttttttgctgtgaaggtcaagctgaaatttaccatacatatcatacttgctcatttgtttccctttttgactgtatgggggttcccacactcgtgcatacacacacatccatacactctgacaatctccacgctagtgtgaacgcctctgtcccgaggcgcagcaataataaggcagctgttgaatgtgaagggtccctttggaaaattaacctactgggagggttcttgccagacagaactacagttccattgtctcgtggtcttgtaatgcactggtaaaaacaaaataaatagatgaataaataaagagtgagagaagagagaatcaggtaccttttttaaattaaaggactttgttactttagccacaaagctaaaacagcattacctcagctctaaactagccttgaagtttacagacatgactttgtaaatgtattgtttttctttgttgtgatgtccttttatttttttctttgaaaactgctatcatgtaagataaaatgtaaattgctgccaactgtagtaatgatgcttttaataaaagtgacccatgatatgcagagatgtaaaaaaaaaaaaaaaaaaaaaaaaaaa

SEQ ID NO: 222740 - DNA, 1000 bp, Homo Sapiens
attacacatttaaatactgcactcaccaaggttaaagtgggtaatcataagctcctttttatcaatgaagtttgaagtttttctatttttcactttgccaaaaatgttttacactcacaaagatattctcacttagtcaactcctgtcaaaatgaaggtgaactggcatggcccgatcactgtccataagggagaaagtggctcattcctggtagaagtatgggtggttatcatttcaaaattattgtgattctcacctccctccccacctcagtgttttgtctgtccgcgcccaagaaagataagcaagtatttcctgctggatgggggttggcaggaagctgttaaagatttatgccagagccttgcaggatggagcacctctgggacaactaagagccaaggcccaccaaggagttttccacccgtctctcatggtcacagcgctagtcattcatttttgagaagttgcttcttttacatcagaaaaccagtcaatcatatggagacttcttttgtgatgaaaaagggctttagaagttaaatacatgcatgcacatgaaaacatgcacaaccacagcctcaatcttgtatttagtttggggaaagagaagagaatttcctgtggattattttttcctcaagtgcacctctctggttaacccaaactctgcaagaaagcactgtgactaaaacatacataacgcctgcataaatattccatggtttcagttaaatttcagtttttagcctttacacatgaggtcaaaggagtgacgaaaatacaaagcaaggaaaaaatgaaatatctggtttttgctgaatgcttaatttattttttactgtgccactccaatatttatcaaatccaaatagcatgaatgcttctctgtagtaatactaattttgtgccttttgtctgctttcttaagaccagttgttcacactttgtagatattagacaaatatatttcgattgaatacaaaaaaaaaaaaaaaa

SEQ ID NO: 222741 - DNA, 1000 bp, Homo Sapiens
ctcgggggagaagtttatcgattaccgcctcagaaagaggagacacagtcctgccctaacagtttagaagataacaacttgcaattagaaaaatcagtttctatacacacaccagtagtcagtctctctcctcacaaaaatctgcccgtggatatgcagctgaagaaggaaaagaaatgtgtgaaactcataggagttcccgctgacgctgaggccttaagtgaaagaagtggaaacacccctaactctcccaggttagctgctgaatcaaagcttcaaacagaagttaaagaaggaaaagaaacttcaagcaaattggaaaaagaaacttgtaagaaatcacaccctattctatatgtgtcttctaaatctactccagagacccagtgccctcaacagtaaagacttttctttaataagagtacggtgccacttgcctcaaaagttactatggtgcttaagattgtcttgatctgacatatatcaccttctgggttatttactcattgtgccaggacctggcattttcatgtgcctttgaccaagtgttcagaatttgcttgactctaacctggagagcttcttaagtgatgccccttcatggagcttctatgacagtgaataaactattaattgaaggaaaatgttataattaatgtatctatttgctgcattgtatatggattaaatgataaaaaacaagtaatctaccctcagagccatgtatttgagaatgcttcaatcatattttcctatgtacttttttttataaacttagttttagactatgttgtaaaaatgggaaggttgtaaactatgttgtaaaaataggaaatgtggcttaaaatatatacattatattgtttcaggattttgtcagtgtttaaagaaccaatgttcatctttgtatttatatacatgatttaaattttgtctaaaattttaaataaaactgcagtgatttatccgtaaaaaaaaaaaaaaaaaaaaaaaaaaaaaa

SEQ ID NO: 222742 - DNA, 1000 bp, Homo Sapiens
tcatgagagagctggattttgcagcctgcgtggaagagaggttggatggtgtcatcccactggctcgcgggggcgtcgtgaggcagtactggagcagcagcttcctggtggatctcctggctgtggctgcccccgtggtccccacggttctgtgggcattcagtactcagagagggggaacggatcctgtgtataacatcggggccttgctcaggggctgttgcgtggttgccctgcattcgctccgccgcaccgccttccgtatcaaaacctaaatagaagttgttgttaccgtgtgccaatgtgtcccatgtgggttgtgccaggtagagaaacaggaagtcaatcatctgtgacagtctctattctgtcgttttgctccttggtatttgatttgcactatatttagttgaagcctgttcactgtttaaaaccggaggtatcttcaaaggcatggagacctggttccagtaaatgtcccaccagtggggtatagaaagcatgctcatgaccctgccgtgtcgtctgaggtacccgttcttatcctagtggttcaggaagagaaaacgcagtttgcactttcaagacagcttctctaaggctggcatgttatctccttgctttgctttttgccgttttaaaatgtgtaattgttccagcattccaatggtcttgtgcatagcaggggactgtaaccaaaaataaacatgtatttgtgtaattggtttgaagaagtcttgaatagctctttactgtcttacttggggttgataagatttgagtgtttgcaattttttactaaatgtagctccaaagtcttaaatggcttgtttgttcttaaactgttaattgatgaaactgtgcataagtttacaatgtactaacttattttgcttattatatatagtgttttattggaaattgtaaccacacacttcagcatgatgaaaataaagattagtgtttccatttaaataaatgttttatcctcccacaaaaa

SEQ ID NO: 222743 - DNA, 1000 bp, Homo Sapiens
taccttctgagtatatttgtgaaagcacatatttgggaactctggtagcttgagttgggaatgggaaggttcttttttacagaagtacttccccagggacttctgtgtgtcacagtcacctctgatgcctttatcttgatgttgcattgggaatctcagccatcagcccaagtgcttgttttattccaaggcagggtaatccccgtcaacttactctaacctttgctgaaaactaatcttgattcattctactctgaaaatccaaaggtgcttctgagagataagagggaaggggtagaaggaaaggtgccccttgaaatgggaattgagcctgttagaattaaaagcttatctcacctctgctggggacagtatttgcaccaccaacccctctcctcacctgctttgagcgataatctttatcagatattctaaacttaaagggattccctttaaaccaactcaagctgatctttcctatctagcctgctgtttggctgtactcatgggctttggtaatatctcctaaaaatgaggttttggtaatttttcctatgcattgggcaactgtgatcgtgaccactgtgctgtcttgctccagccactgccctggcctcagcatatcagggcagcctgtgctggctgcaatactgtggtgcttgggccactgcctgagaggagccaggtttgtgtgtgtctgcatgtgtgtgtgtgtgtgtttgtacagattcaagcaatggatgcaaggaacatgctgtatgtaatagaagaaagaagtccacgttttcggcagaagtagtgagtcagtgtggaagagaggtgagggtgtgctttactttttgataaagagaaagatgtttactcataaacccttcaaaaggtattaacaaatgtttaccaaacctattgctttattttaaaaacataatttgtgttttctatttgtaagatctgacatttcgaggccaataaaaacttctcagaaaaaaaaaaaaaaaaa

SEQ ID NO: 222744 - DNA, 1000 bp, Homo Sapiens
agcatggcgcagccagccacgcgcgccatcgtcttcagcggctgcggccgggtcaccaccaaaaccgtcacgtgcgccgagatcctcaagcgccgcctggcgggcctgcaccaggtcacgcggctgcgctaccggagcgtacgcgaggtgtggcagagcctcccgcctgggcccacgcagggtcagacgcctggcgagccggccgctagtctcagcgtacttaagaacgtgcccggcctcgccatcctactttccaaggacgcgctggatccgcgacagcccggctaccagcccccgaatccccatcctggtccctcgtccccgccagccgcgccagcgtccaagaggagcctaggggaacccgcagctggagaaggctccgcgaagcgatcgcaacccgagccaggggttgcggacgaggatcagacggcctgaaactccggactgtgggccacctagtccggcaggatcttccgccagcgcctccaccttcagatgtacctccagcctttcactcctcggtcctccggagcccacaacctggacacagctcctcaagacaggtagcatggaccttaaggcgacaagagaggggccccaggagtggcaggagaggatccccgaccaccctagggaaacttcgtgcgataattgctgcttatgcccgtgttgcgtgaagacacggaacttcaccttttctgggaccttctttgggggagaatggtggacagtgggattctggaaacttgtttgggacccccaagggttaaagccacccagcattcacgaagagcacctgaagtatggaagctgactttctagttttctttcccctgcttcagaggagcatctctgagggttctagctcttttaacacctcttttccccctgctggcccagagggagacccaggactgaactctccaggcctcctcccctgagccctgcagctggctggagtcttgtttccaataaaacaagcacaaaaaaaaaaaaaaaa

SEQ ID NO: 222745 - DNA, 1000 bp, Homo Sapiens
caaactgtacttagtctctcaaggacgattccccttggtgaacctgaccgatatgctgagcgttgctgtgcagcaccgtgagaaagaggtgttggcctggatgattctgcacagcttataccaggcacggattgtgagccatgccaatacgggcgttttgaagagaatggagtggctcttggaactgatgggttatattagaaatgttgcttaccagtcaacatcctttcacaatacggctcttgacgaggctttggacttcttcttgctgatatttgcaaccgcagtggttgcatgggctgaccacactgcccctctcctcctcggcctcagtgccagttggttgccatggcatcaggagaatggcccggctgggccagtaccaagcttccttggcaggagtccaatgcacagggtcactctgcaggaggttctcactctccttcccaatagcatggctctgctgctgcagaaagagccatggaaggaacagacccagaagttcattgactggctattcagcatcatggaaagccctaaagaagccctctcagcacagtccagggatcttttgaaagccaccctgctgtccttgagagttctcccagagtttaagaagaaagctgtatggaccagagcatatggttggtgaacagttttgcagtaaccagcagcattctcagctggatgaggaaaaccatataagtggaagaagtttttcagaattcatgcctggtattgctgagacatgatgcagagagttaagggtcatgaaaagatggccacatcactgacagcttgacacatgcctcctaagagaggagtgcattgctttagtacccgggccagttgagactgaaacaggaacttggattttctttatttggcttgagttcaatgtggagattttctttgtgaaagcttgaagatattatcttctccctgctaaattccagtaaaataatgttgtcaattttgaaaaaaaaaaaaaaaaaaaaaa

SEQ ID NO: 222746 - DNA, 1000 bp, Homo Sapiens
caccacgcggtgccaggcccagtgtcccccaggccgtctgtccactccatgccacctttctcagcatcaggacggggttgccctgtgttcaccacgagtgtggctgctggatcagggcagccggggaggtggccaggccagtggccaggccctgtggagacaatccctcaggactagggacagggctgtgccggcctgggccagggcccacggacccgcagctcagggcgcctgcccacgtcgtctgccggcggtgcgccgcgggcgtccctcgcgtctcttcactgcacattgcaatgcatttgcgattcccatttctctgctaggagccagcctgggtggcgctgctcccagagccgtgggtcccagaccttgcgttccttttgttcctgtccgtttatcaggacacgggccccacctgtcacgtgcccgaggccacccaagcccagcctgcggggcgttcccactgcctggatgccggcttgagttctgcgcacgcaggattcagtgtggggacggcccctgccggataggcctagccctggcccaggtggtgagcggtttgcagtgtccgttctcatccacctgatgggcccagataaaggcccccgctgtccagcctccctggacggccctcgcggtccctgcagcccaagatgggactcagaccctgtgccccagagctcccctgccgcagaatggggccccagccggccccgaccgggtccaggagcactgctcgcctgtacatactgttgccctagcccacctggtgccgtgggagccacccccaggtgctgggggcacagcccctccccactccggccacgcccccacccaccccgcgtgtttctgccctgtgactcctggaacctgcgtcctccccaaagccatgggaggggtgtcctcctcagaccatgcccccagatgatttttttaaataaagaaacaaatgcacctgcaaaaaaaaaaaaaaaaaaaaaaaaaaaaaaaaaaaaaa

SEQ ID NO: 222747 - DNA, 1000 bp, Homo Sapiens
aattggcacaagaactatgccatcgcctgtgagcggatgctgcgtcttcaggcaagagatgcagatcctgaagtgctgttatcggaaaccatcagacatttccgtctgtactctcagaaagcaccgaatgacccacagcaagctgatattttaggtgctctaaagcacctaagaaaagaactgcaaagtctgagaaataggaaaaatgtctgagacagcaaaatatgaaaaacctgctcatcgttcagcttccaaaattctgaagtctggaagtttttccttcaagaaaagaaactgcataaaaaatttaaaactaagtcatctcccagatataagtatcatggtccagcagtactgtttaatggggtattcagtgactaaggtctgctatttatgcaaaattctgtttatcccgtgttaccaaattaccatttcagtgagaagcttttgaaaagtcttctgacttccagtctttcaccagatgactgcactggattagattctagaagagaatgaaccattttcatataactaaatattggtcatgaactgtgtaagggccatgcttattgggatcagttttaaagttaaattcttttgatattaataccagaccaaagacattttctgtttcctggaaaaaaaaaatgaatcatgttaggctttaggtgagagtacattttttacaaagtagctatagttgttacatagtcttacacttcaagctaaacaccaaatgggtgatattttgaaaaaagtttgtgttttactgtcttagatcgttcttggaaatcactaaaaaaaaaaaaagttaatttgatgtttgcttatttcagttgcagaaactggcgagtaaaaaagattttgcatttacttaattaattttatatttatgttttatttctatttggactcagagatctagacccaataattagtaggctcctgctgccaaaatgcaaaggggaaaaaaaggcagggattgggggggatggggaag

SEQ ID NO: 222748 - DNA, 1000 bp, Homo Sapiens
gcttgtgccagatgctacgagaacagctggagtcgccccagggaaggttgctccatgctgcccagtcttcccgggaaatttgtgaggcctttggccttggtgccttctatgaggagaccacacaggagctggatgcccagcaggccaggctctcagccaagacttcagagcagacaggggagccagctgaagatacctctggtgtcattaagatggctgtcaagtttgaccggagagcatacccagcccagatcacccctaagatgtgcctactagagtggtgccggagggagaagttggcacagcctgtgtatgaaacggttcaacgccctctagatcgcctgttctcctctattgtcaccgttgctgaacaaaagtatcagtctaccttgtgggacaagtccaagaaactggcggagcaggctgcagccatcgtctgtctgcggagccagggcctccctgagggtcggctgggtgaggagagcccttccttgcacaagcgaaagagggaggctcctgaccaagaccctgggggccccagagctcaggagctagcacaacctggggatctgtgcaagaagccctttgtggccttgggaagtggtgaagaaagccccctggaaggctggtgactactcttcctgccttagtcacccctccatgggcctggtgctaaggtggctgtggatgccacagcatgaaccagatgccgttgaacagtttgctggtcttgcctggcagaagttagatgtcctggcaggggccatcagcctagagcatggaccaggggccgcccaggggtggatcctggcccctttggtggatctgagtgacagggtcaagttctctttgaaaacaggagcttttcaggtggtaactccccaacctgacattggtactgtgcaataaagacaccccctaccctcaaaaaaaaaaaaaaaaaaaaaaaaaaaaaaaaaaaaaaaaaaaaaaaaaaaaaaaaaaaaaaaaaaaaaaaaaa

SEQ ID NO: 222749 - DNA, 1000 bp, Homo Sapiens
ctacctcaccaagactctctattcaacgctgcctgctctcctggatagtaaccctttcacagctggtgcagagctgccggggcctggcgcggagctgggggccatgcctccaggattgagacctaccctgggcgtgttccaggcagccttggagctgaccagccagtgcgagctgcaccctgacctcgtgtctcagacttttggctacttgttcttcttctccaacgcatcccttctcaactcgctgatggaacgaggtcaaggccggcctttctatcaatggtcccgagctgttcaaatccgaaccaacctggacctcgtcttggactggctacagggagctgggctgggcgacattgccactgagttcttccggaaactctccatggctgtgaacctgctctgtgtgccccgcacttccctgctcaaggcttcatggagcagcctaagaaccgaccaccccaccttgacccccgcccagctgcaccatctgctcagccactatcagctgggccctggccgcgggccgccagccgcgtgggaccctccccctgcagagcgggaggctgtggacacaggggacatcttcgaaagcttctcctcgcacccgcccctcatcctccccctggggagctcgcgcctgcgcctcactggtccagtgacggacgatgccttgcaccgtgaactccgtaggctccgccgcctcctctgggatcttgagcagcaggagctgccagccaattatcgccatgggcctcccgtggccacgtctccttgagaaccaataccaaacgagcgcgcgaaccttgaaatgtcacgggcttctacggacaggagcccgcctgagcgcaaagctttctgggagttgtagttcttatcccgcgtggaatgttgggagattgagttttcgggaagtagcggatgggacggtgggagcatgggcttaggatgtgaatgccagggagcaataaaggtatccgtggtatcggcaaaaaaaaaa

SEQ ID NO: 222750 - DNA, 1000 bp, Homo Sapiens
cagggcagccccagcaccctggcattgcgggaggtgctctgctgcacagctgttccatcaggccctattggcctctgttagacattgactcagggagccggagcgccaagtggaggttgtacctttcagccctttggggtgttaaaagtgtcaagggctgggtttgcctctgatgagtacaatcagttccagaagactgggtaagtctcttgctagcaggtggacattctggtattttagactgactgaacgaaacccagaggctggttccagagctctgtccctgagaacacatccctgtggaaaatacttgagtttgtaattttttttcccccttctgggagtggaggtctcaggctcaatccggaaccatgtacgtacagttttgcttattatttgatgtgacatgaactcaaaatcctgcatttttagattccttttagttctaattgaggcctcactagatgctcttcagttctgtgtattttgaggctgggtggagaagtatatgattctgctgttgattctttcagtcttccccccttctccttttatcaatcattccagagttattttctattagtcaaacttttttgtagaaccttctttcccttaccctggcaaattgcttctttacttgctggtttccttacgtttggggcacatgttgtaagaaactgattggaaggggaaatgtgcagctctccactggaaaggaactctccacccctcccatcctgataaaacaaacaaggtttacatttacaactaaaaggattcagatgcaattttcaactattctgaaaccagcaggacacacctgactttaatagttttagctgaaattgtagatgttttgcttcagtttaacttatgagaaaagattatctgacggattttgtgttgacttcccctttagtggtttattttgtctttttctgcccatctgtctactaataaaatgtgaaataaaatacctgtattgctacttccccatgaa

SEQ ID NO: 222751 - DNA, 1000 bp, Homo Sapiens
tatcagaaagctgctgaagaggtggaagcaaagttcaagcgatatgagtctcatccagtctgtgctgatctgcaggccaaaattcttcagtgttaccgtgagaacacccaccagaccctcaaatgctccgctctggccacccagtatatgcactgtgtcaatcatgccaaacagagcatgcttgagaagggaggataaaaactttcagaatgagcaaaacaccatcaacgttaattccagagatggaacattttttttcctagtgagaaaacaacccatttgaagagaagaccactaatgagaagaccactaaagagagacatcaagaatggattcagcagaatcatttcacgttttgaacagcagcagtttgaagggccaaagccttgatcagggatcagtcattaaaggacactcttgagtattagtaaaccctcttatgatgattaaaagagaagggcagccctctccaccttttggtactttctattcaacttgcactgaccataaaatgtttctcttctgaacaagccccatcatttggtgaacctccaccctaacaaagtaggatggggttgggggctaaattaattggagtggggcgaggagagagccagaaaacatagatccgagggcagcagtgctgggtggagagagccagaaaacagatctggaggcagcagtgctggatggaattgtctaggctgtggcatgttggttttgtctttcttttctcctttgattatgtaagagctatttcattataacttattatggtgattatacaggcaagaagacaaaaaggagagaaaatgtacctcttctactggaataatgtttatgattacaagtgagataaggtatttttatcaatatgaaggcaaccttggctgataaaacctctatagtgaatactcacatctttacttcactcactatcaataataaatatattttctgacaaagactggcaaaaaaaaaaaaaaaaaaaaaaaaaaaa

SEQ ID NO: 222752 - DNA, 1000 bp, Homo Sapiens
gctggaggtgcaccaagccctgtgcagagagcccgcccgcttccacctgtcggaggacctggctgggagccggaggcccaggcacagagagagaccaggggcacggaagccacccggcctgcagaaagcgtcagcaccggccgcacccaggcaggtccctgtggctgtggctgtgtctgagggcgctgcccctcagattccggccagggccttccgtgtggtgtgtgacaacatgctgcaggggctggcacggagcctccgctgtctcggtgtggatgcacgcatgctgggcaatggtgaagaccaccgcagggcggccgaggttgccaggcaggaggggaggatcattctgacgtcggggcagccattccacaagctccgggcccaggtcggggctgggcgctgcctctcggtcgactgctccctgaaggcccagcagcaggccaaggctgtgctcaagcatttcaacgtgcgtgtcacccacgcagacatcttcagccgctgccaggcctgtaactgtgaccagtacctaaaggtctccagggacatgatgaagcagctcatgtggctcagcagtcaccaggaggggcccaggagctgaggtgacgaggccacccagagccaggcggtgcaggagccaggcccagccccagacgcagcccctgagggctgcacctatgaccgcccctgccgctggctgcagatggctgacctgcgggcggagacaccggacatgctggccgacggcacccggctgcagctggcaggggtcccggtgggtgtgctgaggacacctgggctgcggtgcttctactgctgcacgggctgtggaaaggtcttctgggacggctcccacctgggtcgtgttgccacccacttccgagacatgctggagagcgcccccagcccctgcgagccgagcccagcccccagcccggccagcagtcccttctgaggacagccagacaataaacatggaaagtgcccgactgctgggccc

SEQ ID NO: 222753 - DNA, 1000 bp, Homo Sapiens; identical to SEQ ID NO: 117492

SEQ ID NO: 222754 - DNA, 718 bp, Homo Sapiens; identical to SEQ ID NO: 117493

SEQ ID NO: 222755 - DNA, 1000 bp, Homo Sapiens
tgatgcccagtccgtcttggatgccagggagttgggcatggaggagcgtccatactccagccgcctgaagaagattggagagcttctagaccaggcatcggtgaccagggaggaagtggtgtctgagctagggaatggcattgctgcctttgagtcggtacccaccgccatctactgcttcctacgctgcatggagccagaccctgagatcccttctgccttcaatagcctccaaaggactctcatttattccatctcacttggtggggacacagacaccattgccaccatggctggggccattgctggtgcctactatgggatggatcaggtgccagagagctggcagcaaagctgtgaaggctacgaggagacagacatcctggcccaaagcctgcaccgtgtcttccagaagagttgatgagggctacagctgttggggctctgccaggtcccctgggaccaactacagctccaatcagaaaccctgcgcttccttgagtgtggcttcccacttttcctgcattgtggagctgactgagtacaccggtgaggctggggtctctgcaggggaggtcactggaacagcgagcaagggactggtgcctcgctggtgctgggtctctggtttgctgcagagccgtaggacactcctggctcctcagtaggacagacagacgcaggcgggtttattttggaggggtacttgtggcattttcctgtattgtcttggacatgggatgtggggaggtggaaatgatgagcagtagcatcatttctccctgttgggttttagccagtttgccagcaagcgcatcctagcagggtccccgagcagcaggttgtgtggatgaagggacaggcacttgcatccagctgatctaggtcacacctggctcttggctgccatgtggcttattaacagcttccagtggaagtcgcaataaacagtttttggtaaatctcaaaaaaaaaaaaaaaaaaaaaaaaaaaaaaaaaa

SEQ ID NO: 222756 - DNA, 1000 bp, Homo Sapiens
cgatactattgagcaactcagagaggcaattttagtgtctaggaaaaaacttgggaatccaatgacaccaactgaaaagaaacagtggaaccatgtttgtgagcagtttcaagaaaacatcagaaaattaaacaagcgaattaatgattttaatttaattgttcccatcctgaccaggcaaaaagtccattttgatgctcagaaagaaattgtcagagcccagaaaatatacgagacccttataaaaacaaaagaagtcacagatagaaacccaaataaccttgatcaaggagaaggagagaaaacacctgaaatcaagaaaggttttttaaactggatgaatctgtggaaatttattaaaatacgatcattttgatgtttactatcataaatcattcttagttccactgacactttacatggaaaatgagatttattgctataatacaagaatttaagaattgtgccattgtacttatcacaaaactaatcacatagccaatgatgtgtgagtgagaaacctatcaggtttgtcctgaggatatagcaagaaaagaaaataactgaaactcctttttttttgagacggcgtctcgctctgtcacccaggctggagtgcaatggcacaatctaggctcactgcaacctctgcttcccaggttcaagtgattatcctgcctcagactcccgaatagctgggattataggcacacaccaccatacccggctatttttgtattttgttttctttttttttgagacagagtctcactccagcctgggtgacagagcaagactccgtcttaaaaaaaaaaaaaaagtgggaattagacgtaagaggcttaactgcattacagcaacatagatgaacaaaaccattttccatattggtcaatgagaaggtaaggttaccagaaaatgtcagtaaatttttaatttcagcacagtgcactttatgtttgtaaatgttgtctatgttaataaagttactataatgatt

SEQ ID NO: 222757 - DNA, 1000 bp, Homo Sapiens
ttggctctgccttacacttgggctgcaaaggagcaagaacaataagaccctagagaagcccgatcttggattcctcagtcctcaggtgtttgtgtacgtggtccacgctgcagtgctgctgctgtttggaggtctgtgcatgcatgttcaggttctcaccaggtttttgggctcctccactcctattatgtactggtttccagctcacttgcttcaggatcaagagccgctgttgagatccttaaagactgtgccttggaagcctcttgcagaggactccccaccaggacaaaaggtccccagaaatcctatcatgggacttttgtatcactggaaaacctgttctccagtcacacgatacattctaggctacttcctgacttactggctcctgggactactcctacattgcaacttcctgccttggacatgacctggactctccagggacaggttggaagccaacttaacccaggggtctgaaagtaaaaatacacattggaactgcctctgctgccctgggatcattactgtgtccattataatctttctctttctctttgaaagctggtcaggaatgggagaagtgtcagacactagagagccccttctggtcctggctagggcaaattttagacaactattttctctgtaagtgaagattgtcgtattccaagtctaaaatacacctggatctgtctagtcaatcaacatagcagagacagtcttaaacctaccattgacctgtgtgtaaatttaaatgtcaatttattgaagtgtaaatttcatcaaaggcattagctgacaggctggtaacagtccacacaagatggtataggcctgaacagtgtagtggcagtaataaagtgggaccattttttccaaatgcgacattgtttctgatgtttttttttatgatttgtgcatgtatttttatatgaaaaaaacttacaaagatatgcaaattaaacttctttcagttataaaaaaaaaaaaaaaa

SEQ ID NO: 222758 - DNA, 1000 bp, Homo Sapiens
cattcagctttgtatgcttactttctgccagctcttcacaaaggtagaagttgagtttatgccagttcaagtaccaaatgatgaagaaaaaaatgatcctgtcctttttgccaataaagtccggaatttaatggcagaagctctgggaataccagtaacagatcatacctatgaagactgcagattgatgatttcagcaggacagctaacattgcctatggaagctgggctggtggaatttactaaaattagccgaaaattgaaattagattgggatggtgttcgtaagcatttggatgaatatgcatctattgcgagttcctcaaaaggaggaagaattggaattgaagaattcgccaagtatttaaagttgcctgtttcagatgtcttgagacaactttttgcactctttgacaggaaccatgatggcagcattgacttccgagagtatgtgattggcctggctgtcttgtgcaacccttccaacacagaggagatcatccaggtggcatttaagctgtttgacgttgatgaggatggctacataacggaggaagagttctccaccattctacaggcttcccttggagtgcctgaccttgatgtttctggtctcttcaaggaaatagcccaaggggactcaatttcctatgaggaatttaaaagttttgccttaaagcatccagaatatgctaagatatttacaacatacctagacctccagacgtgccatgtgttttcattaccaaaagaagtccagacaaccccctccaccgccagtaataaagtcagccctgaaaagcatgaagagagtacctcagacaaaaaagatgactgaaagcagtatttccaataaggaaaacacagtagcttttgcttgaaattgtaaaggcacttattgataatacttttaatgtgttggtaatgatgtttaaaattgaaagatttttaaaataaaaatgatagattttcttactaaaaaaaaaaaaaaaaaaaaaaa

SEQ ID NO: 222759 - DNA, 1000 bp, Homo Sapiens
atctagatgtaaaagaaaatggtgaagtaaaaccttattctattgaaatgagtagagaggagctgcagaatctaatacagtccttggaagcagcgaataaggtggtcctgcagttgaaataactggaaatgatgaataccagtcctatcagattttattgctccaacttatatggcagagtgaatactgcgtgttcagaaaccttgtgatgtcttgactgttgcaccaggctgagaaagcagcaatattgatattataaagataaaaatttatcaacattccttaacaggaaattacatggttgagaggaaatgcataaaatgaaagatgaaaaatctatagtagcagtttatattttcatgattgttttgcctcatttattaaatatttgagaaatctttggagatacatagttttattgaaagctaaaaataggttctaaagtaatgtaaaaatataaagcacaaatatacttgaatattgcttaaagaattgtgtgaatagcaacatatattatggatatatactttgtgatatttttaaaaaataattttttcaaagaatgtataagctgcatatataactcaggagattccatgtctttctcatatttcagaggaaagattataaaatataaaatttcttagagaacacctctttgtcagagataaacaagaacaaatactctaaacttatgtgaacagttttgagtttatgaattctagaaactaaaatcaagaatacagaaaaatgaaaataacattttacttctgcgcttctatgtttgggaaacattgctctgataaaaaatagctgtcattatgcagtgtgtatattcaaatatgagataagactatgtacacatccacttttgttaataaactcaatattgaatacttttggatgttaaattcattggaaaaacaaaccatttgtaacctcagttaactttaacaacaagcattctgatcaaaaaaaaaaaaaaaaaaaaaaaaaaaaa

SEQ ID NO: 222760 - DNA, 1000 bp, Homo Sapiens
ctacagattattatcaagtagtagtattttatgactagagatcacaggcacaagttgaaacaaactaacatgacaagaaagctatagaaaaaataaacattgaactcagttcttcaaggtttcatcaccaacataaggaatgaagttggaaccacaggcagatctgaaaaagaaccaaatagagctcctaaaaatgagaaatatttattgaaataagaaaaaagccctcagacatgttgaatattttattagactcagctgaagagacaagtgaactaaactataagctggatctaaagaaattacccagtgagcagtgaggagaaacaaggagctagaaaacattggaaagttaagagagttcgagggaagaattataaagactaggagtcctagaaagagaaaatttagagaataaaggagaggcagtacttgaaagataacacaattttacaaatttgttggaaaaacatgaattcataaattcaggaagcacaatatataccaaacatatatttaaataaaatccaggcctagactcaaggtattgtaaatgacaagataccaaatacaagattttaaaagcaaccatggggagaaaaagatcagtgaaagcaagacagtcaaatacttagtaggcttcctaacagcaacaatgtacccaaaagagggtagaattctgagaaaaactattagcttagaatttgcaacaagcgaaactgaaacaaacagatgctcagatgaaaaacagatgttatcctcagcacaacttcagtaaagagactacaaaaggatgatcttcaagaagggaaatgattctaaaaggattatctgaaattgaaaaactagtaagcaaataaatgataaacataagtaaatttaaactgttgtttgtataaaacaattataatgaagtgtttataagaaattgtaaacaaatgtaaaactaaataaacattgttatgcaacaaaaaaaaaaaaaaaaaaaaaaaaaaaaaaa

SEQ ID NO: 222761 - DNA, 1000 bp, Homo Sapiens
ttatccagagacagcaatgagtgtaataatggtaaccgctacctccctatgaataatagggagaagaaccacttacaagagcaaaagctagaaactgtggcacaacggaaagaggactgataagctgaagatggcttcaccaaaccaggaagagggaaaaacttttacttttctgattttaggcccaagctagaggaggatataaatgcttaccctagatttctccaggattttggtgggatgtcctattgtgtccatcttttccccttccctgcctgtttctgggacttcagattcagtggtctgtttctggagaagttctggtcaaagatgaatggcagtaagactaggtcctagtctcaaattgaagatatagcaccaatagtttatttatctcctctgggagcctagtaaggcagtagctgtcagaaattgggtatcatcacataaggtcctatagaaaagctctagctttggtttttctgagcatttataatgatactcattatcaaagacttatatgataaacctatgaggttgtggggacagctgtggcctcctgaggtttttttttgtttttttttttctctatgaagtggtatctacctcttcttcactccttccaacttacctacccctggattttgtaccaccacctctagctttggcctgacaatcagataggtagatgttttcagaaaagtaaggtagtattggttattttaatttttattttttattttatacacttcaaaaaaactatcgatggcctttgtactgggggattcaagtgaatcagaaaagtactgggcagatttttcctgcctctcaaccagtgcattgtttgtaaaatagaagatgtggcacagttcattcactccctattgcccacaccatgaaagggtgggaatcagtgtaatgaacttgagtacgaaagggactcaagagactgtgtgtgtgtgtgtgtgtgtgtgtgtgtgtgtgtgtgtgtgtgtgaatg

SEQ ID NO: 222762 - DNA, 1000 bp, Homo Sapiens
gcagtttcaccgtgttagccaagatggtctcgatctcctgacctcgtgatctgccctcctcagcctcccaggtgctgggattataggcgtgagccaccgcgcgcaccccatttaattattttttatgttataaaatttaatatggaaagtgagaatttgaaccttcaccatccaccactctattcaggtaaaacaatgaatgagccaccttagcaggagcagatttttcccagaagctgctgcctcttcctgaggcagaaaattggattactaaggctcaaaactaaaagagatgtcagcattgttggatagaaatgtcacctatatgggatttgcctgttttaataactttgtaaggaattcttgctcttctaggggtgcctggcgcaaccgtgggcaagttactgctcctctttaaacctcgtggtggttattgaaacagatttattagaaggagagggtaggtgcagagctggagagccatgggtgaggcagcttgtgacctgcctagcagccgctgaccacctctccaacagaagcctagtcctgttcagagcagcactgtcactgcaagtccagccccctttgccaggggctccattccacccctttcctgcagggaggggtgccatgagtcttgcttttggctcatacaggagagagggaaggctgccaggcactgcttgtatccctgctgataagaggagggagtcactccaggaataagacaaaaggagaggaggaggccatcacctctggcctcttccatcgtacacttcctgtctctggtttaatcatgatgcatggagctacaacagccatcttaggtccccgaggtgcccagcatcacgtaaaacatcgatatgctaagaagaacaaaaagagcccaatctctgatgttattgagctcctgcatgaactctggacctgcctgcctcagacttctgtgaaagaataaaatttctttttgcctaaaaaaaaaaaaaaaaaaaaaaaaaaa

SEQ ID NO: 222763 - DNA, 1000 bp, Homo Sapiens; identical to SEQ ID NO: 117499

SEQ ID NO: 222764 - DNA, 1000 bp, Homo Sapiens
agagcctctgcagcccttcccacagcttgcaaggaccaagggaggccagcaggtggacagggggcctcagcctgccctgaagtcccgccagtcagtggttaccctccagggcagtgccgtggtggccaaccggacccaggccttccaggagcaggagcaggggcaggggcaggggcagggagagccctgcatttcctctacgcccaggtcccggaaggtggtgagacaggccagcgtgcatgacagtggagaggagggcgaggcctgagccctcacacatgcccacgctcccctgacactgaagaggatccacaactccttggagaaacaccctcacgtctgttgccgcacacattcctctcagctccgccccatacccgtcactacagcctcacctcccacccctgtcactacggcctcacctcccacccctgtcactacagcctcacctcctacagccttaagtcccaggcccatgtctgcctgtccaagggctcaagactttctaactgggatgtggtagagggactgaaggtacctttgggggcaacagcaccctagtttcattctcaactctagccctgcacactcacctgtggcacggaatgaaaacagagcttcccgtgcaaaaagggtcacgcctcccacccccgccccctccctgcacctcctgtcctctcccagttcattcctggaaccagccaggccaggcaaccagtggcccccaaaggcaggcaggatcctcaggccccagccgcgggaggctggaagggctggcagatcgcttccctcatccacctccaccggtccaggtctttgctgctgtccccagacctcctgtgacaccacgccagatcacagggcaccaggccagagatagtcttctttttgtcctttctggcctctggctagtcagtttttcatagccttacagtatctggctttgtactgagaaataaaacacattttcatatttggttaaaaaaaaaaaaaaaaaaaa

SEQ ID NO: 222765 - DNA, 1000 bp, Homo Sapiens
acagagatgcaaccaatagacagaaaccagaggtaatggccacttcatccacatgaggagatgtcagtatctcaacctctcttgccctttcaatcctagcacccactagatatttttagtacagaaaaacaaaactggaaaacacattgtttggtcttgtgtttctttacagaggtacctgagggaggagagacataaatcccttcatccctaagactgaactatgtaactagcagcctctggcttgttttctactccctgtccctcaggataaaatgttgatattgctcattttcctcatttccaacattgttttaaaacaagtacttcttttacaggcttgaaaaatctcaaataaacgctaagaaaagggagtaggaagaacaaggagttgagcccttgaaagatgacagtggtcttcttgccttcatgcttggccctctctcctcaaaagggcaatgttggtacaaaattccatctcagccactttcgaggagttatcttcattagctatatccatcctttaatccaacacacacctgcaatgattactgtgcaactattttgcttaattttttatttgaaaaaatgtatttaaaagtccaacaactttttaatataaattacgactctcaaacccattcccatcactttattagtgatggtagcatacatattagagaaggtagctaaaggcaagagagcaccaaaggaaaaagactgtccaaagaacaggtattagaatgaggccgaagatcacggtgaccagagatttctaggagtctctaacctttccaccctatcctgttaaccctttagatctctagtataacactcaggctactgaggtattttagagcaacaagctgggttactttcagagcaaccagcttgactggaactgagagtaaattgggaatgtatgaccaatcttagaccctgaaaaatggcagaaaatacatggaaatttgaaaaaaaaaaaaaaaaaaaaaaaaaaaaa

SEQ ID NO: 222766 - DNA, 1000 bp, Homo Sapiens; identical to SEQ ID NO: 117500

SEQ ID NO: 222767 - DNA, 785 bp, Homo Sapiens; identical to SEQ ID NO: 57446

SEQ ID NO: 222768 - DNA, 1000 bp, Homo Sapiens
aaagacagagtaagaagactcccgagggcgatgccagtccctccactccagaggagaacgaaaccacgacaaccagcgccttcaccatccaggagtactttgccaagcggatggcagcactgaagaacaagccccaggttccagttccagggtctgacatttctgtgacgcaggtagaacgtaaaagggggaagaaaagaaataaagaggccacaggtaaagatgtggaaagttacctccagcctaaggccaagaggcacacggagggaaagcccgagagggccgaggcccaggagcgagtggccaagaagaagagcgcgccagcagaagagcagctcagaggcccctgctgggaccagagttccaaggcctctgctcaggatgcaggggaccatgtgcagccgcctgagggccgggacttcaccctgaagcccaaaaagaggagagggaagaaaaagctgcaaaaaccagtagagatagcagaggacgctacactagaagaaacgctagtgaaaaagaagaagaagaaagattccaaatgaatccttcccagccggggccttccgaccactcagctgtcagggcactgcgggggcagacacctctggcctgaagtcacagcagagttcaccccagagcgcctgggcgcatcttgtggcatgcccatgggctgccgagtcctgccctctcgccacatttcccccaagttacattcccaggaggacctttttaatgttctcaatcgtggctctcagacacaaataaatttttttgtaaactctgagcccttcagcaagagagtttaattataatcattacaaatacatgcattcatgtaagtgtgcacacgtgtgtgtgcatgtgcgcatctgtgtgtgtgtgtgtgtgtcactatctccgtttgctctcggttcccttcaataacaatgaatggtgctttcttctgaaagactcagcctaattaaaggatttagaggcaaaaaaaaaaaaaaaaaaaaaa

SEQ ID NO: 222769 - DNA, 1000 bp, Homo Sapiens; identical to SEQ ID NO: 118685

SEQ ID NO: 222770 - DNA, 1000 bp, Homo Sapiens
agcacaaagtgttggcatcgcccggcgcccgggacagtcctgggcacagcctcggctctgggtccctccgcctcccagcgacggacgccaaagggtcccgggccgcctgaggctcctccccaccacagccatctcgtttatcggaccaggagcaggcatccatgagacctcagagcttcagatcgaggccttggggggtccgggcccccccaggaaacacggtgaggccccagcgcctgcagccaaagctggcacgatctatggggcaggtgccgctctgcctagaaaagccaggggctctgctgccgtgccctccagagcccacagcgggcaggactcctccagcaccaccacacccagtggcccgagacccctctgagaacagtgaggctggtcctcgtgccgttccagccggtgcccggccagtggggaggacacagcctaggaaccagctgcctgagaccagggtgcctctgggctgtcctcccgcgtggcggagaccccaagcacgcagccacccatttccggagctgcaggatagagcttcctcttgatctctgtttttaagcagaaattcattgtgcagaaaagtcctccagagctctgtggccccgctcggatccgctggacccccatgcctggctgatccctgcccacgtggggcaggcccacatctaacccccacaagtcactgcctcactgcacctgccaaggctgccctggcgctgagtcctggggtccctcccggagttcctgggagaaaggcgccgtcgtggccgcctcccgcacgccaggcccgggctccaccgtgggtctcagacgccctgcggcaccggcaccgtctgctttagcatgggacccccatctgaggggtggcctggccttcggggtccccacgctcctttgcgaagtccactgtgggtgccatcatggtctccgggacctgggccagcgggaacgtgggggcactgggtgtgctgatataaagtcggcattactc

SEQ ID NO: 222771 - DNA, 1000 bp, Homo Sapiens; identical to SEQ ID NO: 117509

SEQ ID NO: 222772 - DNA, 1000 bp, Homo Sapiens; identical to SEQ ID NO: 117510

SEQ ID NO: 222773 - DNA, 1000 bp, Homo Sapiens
caattggcatgggaatgattcctcttgaagttgtttctgaaactgctttgaattttcagacaaaaggttacaataaagttagcccattttttgtccctaagattctggtcaatatggcagcaggccaggtcagcattcgatataaactcaagggcccaaatcatgcagtatccacagcctgtaccacaggagctcatgctgtgggagactcatttagatttatagcccatggtgatgctgatgtgatggtggctggaggtacagattcttgtattagccctttatctcttgctgggttttccagagcccgggctctgagcacaaactcagatcccaagttggcatgtcgaccatttcatccaaagagagatggttttgtaatgggagaaggtgcagctgtgctggtgctggaagaatatgaacatgctgttcaaagaagagcccggatctatgcagaagttttgggctatggactctcaggtgatgctggtcacataactgcccctgatcctgaaggagaaggtgccttaaggtgtatggctgctgctttaaaagatgcaggtgtgcagcctgaggagatatcctatatcaatgcacatgctacttccacaccattgggagatgctgctgaaaacaaagctatcaaacatctcttcaaagaccatgcatatgcccttgcagtttcctcaactaagggagcaacaggacatctgctgggagctgcaggggcagtcgaggcagcttttaccacattagcttgttattatcaaaaactaccacctactttaaacctggattgttcggaaccagaatttgatctcaactatgttccactaaaggcacaggaatggaaaactgagaaaagatttattggcctcaccaattcctttggttttggtggtactaatgcaacactttgtattgctggactgtagaacatataatttgtaattaaatactgatttttaaatgctaaaaaaaaaaaaaaaaaaaaaaaaaa

SEQ ID NO: 222774 - DNA, 1000 bp, Homo Sapiens; identical to SEQ ID NO: 117513

SEQ ID NO: 222775 - DNA, 1000 bp, Homo Sapiens
cttgtctggggctgccactcctgcccccactgtgcgcccagggacaccgccagtgcccactcagcccacacctgcagagacgagactggagccggctgccacccccaggaagccctacacgtgcgagcagtgtggccgcggcttcgactggaagtcagtgttcgtcatccaccaccggacacacacgagtgggccaggtgtgcagtccccggggctagccaccggggaaagcacagagaagccaccacaaggggaggtggcctttccgcaccacccccgacgctcactcacgggcccccggagttacccgtgtgaggagtgcgggtgcagcttcagctggaagtcgcagctggtcatccaccgcaagagccacacaggccagcggcgtcacttctgcagtgactgtggccgcgccttcgactggaagtcgcagctggtcatccaccgcaagggccaccggccggaggttccatgagcagccagacagcacagtccctcggggcctcggtgttctcggggcctggatacagcctctggggcaccagcagaagactctggaggcagcaggggatgccagagtgaacaaggggtcccaagccagttccctgcccctggtctggtctcccccaaaagacctgggtgcaaggaaaaggagctgctctctctcttcttgcccctgcctcctagagggaggtctgggttcccttctatggctgaccagtgcctgtggggtgactgccaagcaccaggctccctccctccctgtgacatggcctgggctgacaacactccctctcctgggacctccttgcctcaggtgggtgttcaaaaactgtgcctccccactcgtctgtgcagaggctgggcctgaggtctcagtgtggagagcagcagaagacccaggaaagcacagttggcttccgtttctcctgctccctgtgtgtgttagaattttaacataaattccactttcataataaaaaaaaaaaaaaaaaaaaaa

SEQ ID NO: 222776 - DNA, 1000 bp, Homo Sapiens
tggtctgtcagcctgtcttctaacacctcaaagatcttgtgccctgtgctgtccctcccttgtaattatgaaaagttctttggtttctggggtgaactctacccatgtataatgaggaattctctcataaccttttttgtcttgtctgtcatctctgttcatcccctcctataacctctaggtaaaaagaaaagaaaaaaagaaatttcgagatattttcaacattgttagagtttgggctaaaatgagcaaggagaaaaaaaccaccaagaacatttcctggggcatgttccagttttgaggggtgatatatctgccagatagggggtatctgacccagtcttcttttcagctggtctctggggggagctgagaactcgcttgctacctcacatccttttccccagactttttatctcctatgcatccctttgctttctatagctggtgtttcttccccaaaatggcgttcccatgcttacctttctcacattctagacaatgatggacaaagacgcatgcaagactcagacccggggaatggtgtggtgctaatctcaacacctgacattcacagcaagcatggcccagcccaaccgcatgtctatctcaaaccgcagaaaggctttaatactggaaaaaaagaattcaagactacaggcagctcccctctgtaccccaactcatttaaaataggaggaatcactttttgccttacttaacgcttttttctgagcacagggatgggcacctgcaccccagaaggtgtgagctgtctctctgccaggagctaaggttcattaggggattggatggtttatcacttctttctttctgagtttacttttagtaacttttattgatggctacctttcatgtccctgtctaaagagactttctctttcatacgtcttaaatctcatcaatgaaatccagtgaaacagcaccatttcttagtatcattaaataactagaaagtatcaaaaaaaaaaaaaaaaaa

SEQ ID NO: 222777 - DNA, 1000 bp, Homo Sapiens
gcccagacactgccaaaaaactggagaagaacttctcatgtaatgtaaacacagacatcaaagatgctgtggtagtgcctgtaccacaaacaggtgcaaattcactgccatctgcagagggtggcccccctgaagttgtatcagtctgatggaacctgttgggagtttcttcaccgaagaatatctttctagccctcagccactacaaatgacagaagtgatcttgaattatttactcccttcagctcctcctttctcctactgacacatttttcctgactttgttcaaagaggaaaggagaaaaacaaacagaccaaatgcccaggagcccatgaagtaatagcgtaaagtaaagtatgatatggaaatgtgaagtttgcaagagaatgatttccaagacaattaagaactactggggcaatgaatgcttttaggcagtaatcaaagattaaatggacccatgatactcttcttcacagtaacaggggaaaagttcaagaatacagacttgaattgcgatgtgtattacttctagggccttgtaatgttaactgtctcatctggaaataactaacatatttggttttaagcctgaaattgtctgcattatccctaagtcacattggaagtgaacttggaggatgcatattttgatatgctttgacagctaacagatttgtatggtttagtggagtctggttattttgacagatgcatgttttttttaaatagatgcaatatacatttgaagacattgatatttggaattaattatgtttgtttaagtcacgcaaaagattttcagaaaatgttcggatataattagctctgttaaatacccacagaactgttatcaggtcttatatttattttcatctggttcctctaatacagtgctgtccaatagaaacacaacagccacaaatgcaggccacagatgcaaatatttaacttcccagtagccctattttaaaaagtaaaaataaatgtttgtttgtt

SEQ ID NO: 222778 - DNA, 1000 bp, Homo Sapiens
gcaactactgctacattttttaaaatgccacaagaaaagagccctggatacagctagagagcaggacttcaccctccaggagctgactgggtgttgctgaagcaaatgttggactttgtgttagatagtcttgcatatcttaatcgacattcccagtcctttcaccaccagaaccaactcctctttcaaacacagcagtggattctttctctcagaagatcatgttgtgggaatcttttttttaaatagtgaaatattgaggcagcaattttttacaaaaaggtcatcctctgctctatttgttaccttgttattgctgtctcaacatttactacagctccatttacagaactgttgcttttttgcagttgtctttgttcttgaaaaaccagtaactgcttctgcataccttttgtgtagagcttttaatatcatttgaggaagttccaaatttgtagccagttccaaacaaatttaaatattgagttgagacctgtatggaattgtgttcgcaggagataaggcttgcctttgagcctactcttgattcatgcagagtgccaataagataaatcaaccaagttttggggcctcaaaagagacaccagcaactgggccttgagaacttccatttttttgcagattgtctgcagaaactcagacagctcatcagcagcagcagctgtattgtattttacctcatcttcagagtttatgttctactgaaagaggacgtgtgtatacacacacacacacacacacacacacagattggtataatggagaagatggtttaggtgtacagcaaatttaaaatagtcagtggattgtgtcttactacttcatgtcccagtgtaagcctttatgtcctaagcaggactttattgttagtattataggctaataacctgcagcagaaattcatactctattataataatggcttcttggggccatgctttggggaagtaaaatgtctttttgacatgcctttataaaa

SEQ ID NO: 222779 - DNA, 1000 bp, Homo Sapiens
ccctccaccttccaggcttactcaaagaattctttctgcccctccctgtgtcccgggacctgtttcatatcgcttctgtggtcgtgaccccatggtcttgtaattgtgaacttctttgctgccccttcgaagctggggagtgcttgttgcagatgcatccaagaggggtaattgcgtatcaacagtggatttgctggttgtttctacagggttctgaagcatgcaacatagaacagatacctttaaatttaggggcgctaaggaaagcaggaaccagtaatcctcttctgtggtgggatgggagggtgggggagaggggtggaatggagaggaaacaggctattgttggccagccctgggtggaggtgggtgcaagcaggacagatagtgcctgggggtgggggcggagggttcgcctctaggaaggggctagaagggatgaggaaatagttcatagcttcgtgcaggtgatccctattctgcgtgtatgtgtttgcacatgagtgtttgtagaccatagaccattaaaaaatacggaattcaaaagttacaaaaagggtattcttggaaaagaaagttgtttttttttagtcttgctgtgttgcccaggctggacctgaactcctgggcttgagcaagtcttcccctcagcctctggagtagctgggcctacagtgtgtgctgccacacccagctaatacagtctttctactcccgctctctattccccagtttcttgcccagaggcaacccttgccagtctgtttatccctccagatacagtctctgatagtaaacttttctttctcttacacaaatgatagtagtcacatacactacacacactgtgccacgtttaaaaagaaaaaaaacaattctcggctgggcgcggtggcgcatgcctgtaatcccagcactttgggaggccaaggtgggtgaatcacctgaagtcaggagttcgagatcagcatggccaacatggtgaagccccatctctact

SEQ ID NO: 222780 - DNA, 1000 bp, Homo Sapiens
ttaattttaaatgtgattccgaatctcctttcagtcctcgagaagggccaatgagcatttttcagcagtcacagccagtgtgagtgctgctctttccacctgccttgcaaattctgtttcccaggggaatgtgtctactgcctggtggttcaaaggttggaaggcagtgcagaggtgggggctgattctgctgggacaggtcttccagaggcagcctccccccactgcctgtccccgtccccaccaggctgcccttgggatggaccttttcattcttttctttatattctagacagtctctgttgtctcattgtgttgctgtcccatttttcaggtgagggtaccggggtaggggagtggcctgcccagggtcacactatgagaggcccccacctgctgcctttggacgcagccccctgctgctgcatccaccacccttcttacagatcagcgcgcacatggggtccttctgctgtctctggggcgagtcttggagccccctggggggctctgttggtgctgatttggacccgtttctctttttaaactgcacatcataacagggcttcatgtcgagcatgattttaatcataaatgcacttctgaggtgcaaggattgagctcagagctgctctgttgtggcaaaacccaaagtgctgtgatgtgtggctgtgacaagcctggagcgggtcctgtgagcgccgcctctgtctcctgcttcctcactgaacgcctgctgaatgtgccgctgactcagctgtgctgctttcagccctcctgtgaggggcggtcccagtgcacagatgtttttcaagttcctcagtttgtactgaaattagggattcatcagggcaggaagcaggcaggcctctcagaagggagaggaggcctccaaatctattgagtccccacagtttgctcaagcccaggcaaatttctgtgattaaaatgaattcatcagttcctccaaaaaaaaaaaaaaaaaaaaaaaaaaaaaaaa

SEQ ID NO: 222781 - DNA, 1000 bp, Homo Sapiens
aaatttaaacactggcagatgggaaaaagtggcctggaaatgattcagcaggagaaattacgacaactacgagactgcattattgggaaaaggccagaagaagaaaatgtctataataaactcaccattgtgcaccatccaggtggtaaggaaactgcccacaatgaaaataagttttataatgtacacttcagcaataagcttcctgctcgaccccaagttgaaaaggaatttggtttctgttgcaagaaagatcattaaagaaggttattataatgaaactcacgaatctacggacattttgctttcagggtgaagcaagcttgaatttggattgcctgctctctttaaagcgaattcatactatgacagcagaaacaaaacttcagatttcagaatttgttattggcaaaatttattctcattatacctgcttcatatgggtatattactattaaaacagaataccatagagtaattgcattatttgaaaattctctcattttacaatgcacttcaccaatgaaacagctaatttccattttgaaaattaaaagaaaacagcacagagaagttaaatgcggtgtagcaaagttatggggtctgcttgagggcactaacctcaacagattattcctcctctccttagaataaccatgaaaatacaaatttacttagcacatttttgctttttaagtagctggttcattttctgaatttctcacattcagagttccagtcattattgttacatcatgtttgcagaaaccttgtcttatttagtgtctatttgcatataaccctgaaaacattattatttgaaaacttttctatatctcaaattaatatacattttcataacctacctttgtattaagacttgcaattttatcaatctattatttcttagaaacaatttactagcttagaatagaaagcaatgttatcgtcatataattttcatgtacaaatgccacaaataaattgaatgtttaaagct

SEQ ID NO: 222782 - DNA, 1000 bp, Homo Sapiens; identical to SEQ ID NO: 117523

SEQ ID NO: 222783 - DNA, 1000 bp, Homo Sapiens
gtctctgcttgaggaccagaggaaaatggttgttggacctgacttgttaatggctactgctttactaaggagatgtgcaatgctgaagttagaaacaaggttaatagccaggcatggtggctcatgcctgtaatcccagcactttgggaggctgaggcgggcggatcacctgaggttgggagttcgagaccagcctgaccaacacggagaaaccctatctctactaaaaatacaaaagtagccgggcgtggtgatgcgtgcctgtaatcccagctacccaggaaggctgaggcggcagaatcacttgaacccggaggcggaggttgcggtaagccgagatcacctccagcctggacactctgtctcgaaaaaaagaaaagaaacacggttaataacatataaatatgtatgcattgagacatgctacctaggacttaagctgatgaagcttggctcctagtgattggtggcctattatgataaataggacaaatcatttatgtgtgagtttctttgtaataaaatgtatcaatatgttatagatgaggtagaaagttatatttatattcaatatttacttcttaaggctagcggaatatccttcctggttctttaatgggtagtctatagtatattatactacaataacattgtatcataagataaagtagtaaaccagtctacattttcccatttctgtctcatcaaaaactgaagttagctgggtgtggtggctcatgcctgtaatcccagcactttgggggccaaggagggtggatcacttgagatcaggagttcaagaccagcctggccaacatggtgaaaccttgtctctactaaaaatacaaaaattagccaggcgtggtggtgcacacctgtagtcccagctactcgggaggctgagacaggagatttgcttgaacccgggaggcggaggttgcagtgagccaagattgtgccactgcactccagcctgggtgacagagcaagactccatctc

SEQ ID NO: 222784 - DNA, 1000 bp, Homo Sapiens
aagctgcaggagtcctggagggggcccttgggccacatgttgtcactaacctttatctctatccaatcaaatcctgtgctgcatttgaggtgaccaggtggcctgtaggaaaccaagggctgctatatgaccggagctggatggttgtgaatcacaatggtgtttgcctgagtcagaagcaggaaccccggctctgcctgatccagcccttcatcgacttgcggcaaaggatcatggtcatcaaagccaaagggatggagcctatagaggtgcctcttgaggaaaatagtgaacggactcagattcgccaaagcagggtctgtgctgacagagtaagtacttatgattgtggagaaaaaatttcaagctggttgtcaacattttttggccgtccttgtaatttgatcaaacaaagttcaaactctcaaaggaatgcaaagaagaaacatggaaaagatcaacttcctggtacaatggccaccctttctctggtgaatgaggcacagtatctgctgatcaacacatccagtattttggaacttcaccggcaactaaacaccagtgatgagaatggaaaggaggaattattctcactgaaggatctcagcttgcgttttcgtgccaatattattatcaatggaaaaagggcttttgaagaagagaaatgggatgagatttcaattggctctttgcgtttccaggttttggggccttgtcacagatgccagatgatttgcatcgaccagcaaactgggcaacgaaaccagcatgttttccaaaaactttctgagagtcgtgaaacaaaggtgaactttggcatgtacctgatgcatgcatcattggatttatcctccccatgtttcctgtctgtaggatctcaggtgctccctgtgttgaaagagaatgtggaaggtcatgatttacctgcatctgagaaacaccaggatgttacctcctaaaaaaaatttttagcatacattaaagtttctcttttacagtg

SEQ ID NO: 222785 - DNA, 1000 bp, Homo Sapiens
attccaaactacaaaatataccagtgaaaaggaagagggcacaccctggaatgaggactgtggtaaagagaaacctgaggaaatccaggaccctgcagctctgaccagtgacgctgagcagcccagcgggttcacgttctctttttttgattcagacactaaagacataaaggaagagacctacagagttgaaacagtgaaacctggaaagattgtctggcaggaagaccctcgtttacaagacagcagttcagaagaggaagatgttactgaagaaacagatcacagaaactccagtcctggagaagcatcattacttgagaaagagaccactagatttttctttttctctaagaatgatgaacgacttcaaggttctgacttattctggagaggagtaggaagtaatatgagcaggaactcttgggaggccagaacaaccaacctgcgtatggattgtcgaaagaaacataaagacgcaaaaaggaaaatgaaaccaaaataataaatgtcagctggttttgatactgaatgtgaacaaggctcacctaaggaaactgacccagaaaacagttttagctgacaaagaagaaatttcagagtgaaggaattttaaaaatctggctgacggaatatcattctggttgccatctttttctgtggaactcctctgcatttcttcctaagtaattacttcaaaaattaaattcaacttcttataaaggaagaacaagatagtccttgaaaatactttttgtatataatctctttgccctctatcctgagtaactaatggacatcttctcatgcaaggtttacatgaagccttttttaataaatgagtcaaagcacttgtattttccagcctaggctttgtgtgaattataggctatttgaaattttatttctgattatgtcaaatacaccttccattttgtcatttttgtttaaactgataaattacaagtcaacattgagttttaaaaaaaaaaaaaaaaaa

SEQ ID NO: 222786 - DNA, 1000 bp, Homo Sapiens
caaaactaataatagactagtgaaacctactcctcacatgggtaagagttgcagtgggcaggtgaccctcctccctgcccccatcctttgcttcctcaagctccctgccaacctctggatacatcaatgggaaggaaaccagggaagcatagacctatagtacaacaggggtgtagtgaccactggacctgatgaagcgaatctgcctgaaatttaatacgcctttttatttcccttctgtgttaaatcaaatgatctgttctgcactgagccaagcaagttacttttaaaactggtggcaccactcatttgggacttggagactgcttttatccagaacctgttaagagaacaggggatttaaatacaaaggaatatgaaggtggtgtgccttaaagacagtctaaaattaggttttagtttgttacattattttgaaatattaaacatgaaaatgttaaatcaggatgtgtgagttttaagatgttgaacactgtcctacatcagtgaggagggaggcaataaagtaatttcagagtaaaacagattgaggatgaaaccaagacagaagtgatgatttggctttttatgatttttgctgtggaaatggcagtcgtgtgacttttcacttgcagtttaaatgaaagggtgaagagaagcctacctgccctaatggctcagggctatatccacctcccggataaccctggcccttgggactccatcatctccttgaagtagcactgagaatccaagaagaggctccgctgctttttgcacatgttactgagttacatctcaggaagatttttaagcacgaggaaggaaaatacaggcctggccaagcagggtccccttttcggtatcatctttgttcctaataagcaatcaagggggtgggtgtgttggctggtaaaggaactactaagattcagaagcttgtagtcttcattattttgttttacaggttaaaataaaccacttgactgggaaaaaaaaa

SEQ ID NO: 222787 - DNA, 1000 bp, Homo Sapiens
tgtgcaataatatgatttgcagggcatttctgtttgtgacaaaagtttttaataatagttttaatcattcctttgaaagtagtgatgtcataattgtactaatccacataagtaccacagagaagggtttgaactgtgctattttgttcaaatgttgactctccgggggcactggctcattccaagactgttcttgtgcaactctcagaataccttatttgagcatacctgttttgaaaggcattttctttttagagttaggtgtagtgcttaagggttaatttattttcatgttatgccagtaatatagtgttgtatgcctattgagtgattgtggcaagaaaagctacagcttctttgcgtttaactttttcaaaccacagaccagaactggttgcatgttactttaggagttgtgggttggtaagctcccaggtacttcccgaggctatggtgtgagagcccccgtcctgccctctggggctccacaggcccctggcaaggccgatggctcaggatgatggggcacagcccgcctttgaacaatcatgcttcagaaatctgcctgaccctagctgctgctgctgctcactttattcttgtatggctttggtaggcatacttggagaacatatcccacattaggaattgatttaagcctgagagtttgagggctttaatcctttaaaacttggagaagctggctgggcgcggtggctcacgcctgtaatcccagcactttgagagaccgaggcgggcggatcacgaggtcaggagatcgagaccatcctggctaacacggtgaaaccccatctctactaaaaatacaaaaaattagctgggcgtggtggcaggcgcctgtggtcccagctactcgggaggctgaggcaggagaatagtgtgaacccaggaggcggagcttgcagtgagccaagatagtgccactgcacttcagcctgggtgacagagtgagactctgtctcaaaaaaaaaaaaaaaaa

SEQ ID NO: 222788 - DNA, 1000 bp, Homo Sapiens; identical to SEQ ID NO: 117526

SEQ ID NO: 222789 - DNA, 1000 bp, Homo Sapiens; identical to SEQ ID NO: 117527

SEQ ID NO: 222790 - DNA, 1000 bp, Homo Sapiens
gcaaaactgaacagttctgttttcccagaaggctctggcgagggggacagtgccagctcccagagttggaccagtgttctcgaagccatcacactgatgcacacgagcctgctgagattccacatgaaagtgagtgtttacccgctggcccctctgcgagaggcactctcacaggctttaaagttgtatccaggcaaccaggttctttggaggtcctatgtacagattcagaataagtcccacagtgccagcaaaaccaggagattttttgacacaatcaccaggtctgccaaacccttggagccttggttgtttgcaattgaagctgagaaactgaggaagagactggtggaaactgtccagaggttagacggtagagagatccacgccacaattcctgagaccggcttaatgcatcggatccaagccctgtttgaaaatgccatgcgcagcgacagtggcagccagtgccccttgctgtggaggatgtatttgaactttctggtttccttaggaaataaagaaagaagcaaaggtgtattctacaaagcacttcagaattgcccttgggcaaaggtgttgtacctggacgccgtggagtatttccccgatgagatgcaggagatcctggacctgatgactgagaaggagctccgggtgcgcctgccgctggaggagctggagctgctgctggaggattagagagcagcgggaaaacgggctgtgcctgcgaggccaagttgcccaccctgcggagctaggaggcgcgagcagagaacgtgtgtgttaggagaactcggcttttgaaatgttctttctcgatagtaataatgtgggctgccagcctctcacatcttgcacactttttgggtgtgtaaatgacacaaaagttatttacatattatatatgtgaatatgtgtatatatgtacatagccagagagtcatgccacgtggtcattaaaccgatgatgattgaggcgtgaaaaaaaaaaaaaaaa

SEQ ID NO: 222791 - DNA, 1000 bp, Homo Sapiens; identical to SEQ ID NO: 222778

SEQ ID NO: 222792 - DNA, 1000 bp, Homo Sapiens
ttaaagcaattaacatagagatgtatcaaaagttgcagggttctgaagatggcttgaaagaaaaaaatgaaataattgcccgactagaagaaaaaaccaataaaattactgcagccatgaggcagctggaacaaagattgcagcaagcagagaaggcgcaaatggaagctgaagatgaggatgagaaatatctacaagaatgtctcagtaaatctgatagtctgcagaaacaaatctcccaaaaggagaaacagctggtgcaactggaaactgacttgaagattgagaaggaatggaggcagactttgcaggaagatcttcaaaaggagaaagatgccttatctcatcttagaaatgagactcaacaaatcattagtcttaaaaaagagttccttaacctccaggatgaaaatcagcagttgaaaaaaatatatcatgaacaagagcaagctcttcaagaactcggcaacaagcttagcgaatcaaaacttaaaattgaagacataaaagaagccaacaaagcattgcagggactggtttggctgaaagacaaagaagcaacacattgtaaactttgtgaaaaggaattctcactctctaagagaaagcaccactgtagaaattgtggggaaattttctgtaatgcctgctctgacaacgaactacctttgccttcttcaccaaaaccagtacgggtttgtgattcctgtcatgcactgctcattcagagatgctcatctaacttgccctgagactccagaactaaatccttatgtatgaaattacctacaatgaatgttatgatgttgtatacaaagacatggcagctactgcatcttcatgtgtcacaaactctacatctgcttctcctgtggctctgccatcagctccaatatcaatatgaactcgtattggatttagtggtgagaagaactaaataaaaggaaacacttatttacttttctattgagaatattaaagtaaattaccacataccttg

SEQ ID NO: 222793 - DNA, 1000 bp, Homo Sapiens
ggtgattgctgtgtttgagaatacatcagatgagcttttggagctctttgagaacttctgtgacctttttcgtaatgctaccctgcacagtgaagttcagtttccctgctcagcttctagcaacaattttgcaaggcagatccagcgccggttcaaagacactattataaatgccaagtatggagggcacacagaggcagtacgccggctgctgggtcagctccccatcagtgctcagtcttacagcggtagcccctatctggatttgtctctcttcagttatgatgacaagtgggtatctgtcatggagcggcccaagacttgtggagatcacccaatcaggttctatgcccgggactcgggcctgctcaagtttgagatccaggcggggttattgggccgccccatcaaccacacagtgcgacgccttgttgccttcacctttcacccttttgagcctttcgctatttctgtgcagaggactaatgctgagtatgttgtcaacttccatatgcgacactgctgcacgtaggtgcctcaccagagccagattatctggtcttccaagactttgccactcacttatctcagtggactccaaagcaaaagctcccgactactagctctgttagttccagcctgctatacctcagatgggagagagccagagagaggagtgagggtggctcaacctaatggaatttttaaattgtatacaatactgctactgattgttataatatcctcttgcgttttccctgtgggaatgcccagcattaattaagtccatttcatttttgctttactttgcatttgattgctgtgaagatgaaagcattagacttttatccccttcatgtcacttcttcggcattatggtttgcatctgaaagcagttaaatcttgtttactgatgagaatgacatacatcctttccatttagctcataagcacggctatctttttaagagaaaaataaagccatggtattttcatactt

SEQ ID NO: 222794 - DNA, 1000 bp, Homo Sapiens
ttaaaaaagttgccgggggtggtggctcatgcctgtaatcccagcactttgggaggctgagggaggtagatcacctgaggtcagaagttcgagaccagccttaccaatatggtgaagccccatctctactaaaaatacaaaaattagccctgcatggtggcaggtgcctgtagtcccaggtactcgggaggctgagacaggagaatcgcttgaacctgggaggcggaggttgcagtgagccaagatctcgccactgcactccagcttgggcaatagcaagactccatctcaaaataaaataaaataaaacttagagcaaagtttaaaactgagtattcatattaagtgttttattttccatattagagatgggaagggaaccttatgtgtattttattttgttttcaaccatcaataaagttttctctagaatattgttttgaacatccttgtaaaagatttgcgagttaaactattttatttactgtctgtgagagcattgggagtaggaaacgatggactccaaagtacaagggagaatacccattttcattcagctatctggagtaaaatatcaagtacttccttcaactaatcttgtctcattcactcaccttttgatatcgaaggcagaaattgcgtttacaacactgaagaccaaagctttttaattagtaaacaagcggaacatagataatggacaatgctggccactgccattctgtgttcagaaagactatgagacctgaacatatggccaagaggaaagaagagtgacgttgtctaagatgtaatgagtgctctctgagagaatcactcaattcctattggagtgcaatccttacttgagaactttattactcttgttctgtgtagttttttttttttgtcacttccccatcagaaaagcatattctttttgatagagggtcagtgttataaataattgtcttttgaaataaaatcaaatattcatgcattgaaaaaaaaaaaaaaaaaa

SEQ ID NO: 222795 - DNA, 1000 bp, Homo Sapiens
agtaaatatttatcaataaaaataaacattttgtttttctaatatcttaacatatcctcccctttaggaggaagaacgtgcaaaacgtgaggagctagagcgaatactggaagagaataaccgaaaaattgcagaagcacaagccaaactggccgaagaacagttgagaattgttgaagaacaaagaaagattcatgaggaaaggatgaaactagaacaagaacgacaacgtcaacaaaaagaagaacaaaaaattatcctgggcaaggggaagtccaggccaaaactgtccttctcattaaaaacccaggattaaattgcaaactctgaactttttacaaagaaaaatggaaaaactttgtatggtagcttcatgttgaagtggttttttgtttttgtttttgtttttttaatttgtaaaatctggaaagttagcttgttctaataggggctatgctctgcaattccctttttttttttttttttccttccactaagtcaaatccttatcagatcattgttgtattctaaggagtgacgtatttttcacctgtttggattctatattagtggtctgaggaagagcagatcacattgtaaaactatggatggtctgataaggcttttactgaccccactgacttcagagttatactctgtttgctacatcataatgctggttttgctgactttttgtttttttatatatttataaaaaaagaaaaagttggtgattgcattgggaaattcccagggtattactggacctatgtggtgtattgttaaaccagtgtccttgtgatactgttgctcttgatgttcctgatacaggtaaggaaacagttggtcaactctgatacaaagtatatatacagttcagtattgtctctgttcattttgtttttatttcattgacaaaatcaaaccagcattccccattgtgtaaataaatgattttgctgaataaagtaaagtcttaaattcaaaaaaaaaaaaaaaa

SEQ ID NO: 222796 - DNA, 1000 bp, Homo Sapiens
ccttgcttaccttactagtatgactattatcttgacttctggtaatttatgttcactattccatttgtgaagtgtactttcattctaaagcctcagtataaggcatcctaacttacaagagtaactttccatggacatttaacatccttccaattttattcacatataatgggaaattttgaattgccagtttgaagactgttctcctaaagtgttcaacctgcacttcttacaaccaaggtagtttgtatcattttcaaaagtacacattattagggtctagttgcccctggtccttagcttgctcagctgcaaaataagcgtgctaaattaaattgtcttaaggtttttccacttcattttgtgactttgtgtggttcgaatttctcagtattttaaccagtgtgttgatgttaaagtcaaaggccgcagtatgtctatattcttgctgtactcattggtagtttcagtatatgtaatgtgagtttaaatagtgaaattgtatctcatattaacatttcaaatgctcatattgaaaatggaaaatagtaaacacaggaattgattttattctggttgtctataatacttcattttaaatgtaaatggccactctgcatttgcaaggcccggtggttgacatctgtgtggtttgttagatgagacaaaatgaccattaaatgagtttatagattattctgtatcaagataaatctgattccagttaagctataaacttgtgggattttcttgtagccctatagttctgtgacttcatttgctatacgctttaaatgtgttgagcagcctatgaacctaaagacatactgcagtttgttcataaatgtattcagtcttttattctttataattgtgtgtaaatgttaactaaacagtggattcctctcgtgttacagttttgagtgaattattaaagaagttaaaatgcaataaaaaaaaaaaaaaaaaaaaaaaaaaaaaaaaaaaaaaaaaaaaaaaa

SEQ ID NO: 222797 - DNA, 1000 bp, Homo Sapiens
ccagctacgaggaagtgatgaacacaaactactcagaagcaaggggagaggagcagaacccgaggttgagcatctctctcccgtcctatgagtcactgacggggctcgacgagaccacccccacatccaccagggctgacgtggaggccagccctgggaacccccctgacaggcagaactctaagttggccaaacgactgaaaccgctgaaagttcgaaggattaaatctgaaaagcttcacctcaaagactttaggatcaacctcccagacaaaaacgtccctcctccctcgatagagcctttgactcctccaccgcagtatgatgaagtccaggagaaggcccccgacacccggccgcccgactgaatggccccacttgagccacgctccctcctgtctctcacacctttcacccccaagactctaacaaagccacatgagccacagttgagaagcggaggggccagctgtgcatggagccatttggatggcggcgggcgggggggattctctgtatcaggagtgactttgttgccccacacagcctcctgctgcaggtgctttggaaagagatgctgccttggagctggtgaatctgtggaccacattcaagggtgtggcacaggcatcttcccatccttttcactccgaatcgctggcgacacattctcctttccagctaggaaagggttcctcgcggctggtttagattgtggttgtttgttttgcttctactaagactgttttgtttcaaaaaggaaacaaattttgtgtttgctgtctacgctggagtcctgaactgtgggtagaaaacacgacctggctttgtagaaaggacacagggctgttttatgaactaagcggtgaggctcaggtggcggctctcacagagcccctgatgctgttgttctttgagggcttaaggcctgatgaacgtaggcacgtgatgcgtaatagtcttcaatggtacacttaactagtctcttctgtgtaacagc

SEQ ID NO: 222798 - DNA, 1000 bp, Homo Sapiens
tgagattagtctgtgtccacaagcagaggccccctcgatgggagggagtggcaggcaggagaaggtggcgctgccaggtgcccgggtctattggaggcgccccatctcagacttcctaacacagcctgtgtggaaggcagaacaaagaatgcatgcccagtcagaaatctgttctattctgctccaggaaaatcggaaacctgtgagtcagagtcagagaaacttacccaagcaacgtaattcctgttttcatgggtcctgtagatgtttgagtcaggaaggtaaggcggggagtgactgaataaactctgccttttaaattgagcatctgggccgggcatggtggctcacgcctgtaatcccagcactctgggaggtcgaggtgggtgggtcacctgaggttgggagttcgagaccagcccgaccaacatggtgaaaccccgtctctactaaaaatacagaaaattagctgggcatggtggtgtgtgcctgtaattccagctactcgggaggctgaggcaggaagaatcacttgaacccaggaggcggaggttgcagtgtgccaagatcataccactgcactccagccctggtgacagaggagaccccgtctcaaaaattgattgatcaattcagcatctgagggctgcaagtacagaaggaatctattctcagcagggcatagggcacgcactggcttaacagtttagtatataaggctcaaatagtctatacctgaactgctataagcaaggtcgatagggaagtggatagattgcttcagcaaagtgaactgtgagatctccaggacagagggagaaagatctgatccaaatgagaacagattggttattgcaggtatcacagcctaaagaaattatctttttgcaaaagaaatattaaatgatttagcagtctccacgtgtgttaatgtttcaaacgtgtatcataatgtgtataattgtgtaacaaaattgtctacaataaatcttttggtatt

SEQ ID NO: 222799 - DNA, 1000 bp, Homo Sapiens
aaggcgatattggtgatgaaagtcttaggaaaaatgcataattttgctataaaatgtacttatttggaatactattttatatagaggtaagagaacactgctggggaatatgctttttatggttgctgttgccatatttactgaaggtttatacctaaatgtaactttagctttatggaactatatagtaatcccaaatcaagttattttgaatatttttatgctgtcatgcttgaatgttttagatgtaacctttgacatatttagaactctcctcctatacaatgtttattctcagatatagaggttatgtcattttataaagacttcattgataagatggcttttattcatactaatcctcccaatgttaccccttccatcttccaagaagaaaaaaaatgcctgaatattcagaatagatatttctgatttgaaaattctaaagaattaaactggaaaagtatttcatttacttagtgctctgaatttacttttacagttttctgcagtcagtatcattaaaatggttaagtttacatttgaactgaaaatatgtataaaatctagcaattcacaaaaatgccctagaaatatagattttaatcaccattacataatgacaaaccttgttaaatgcttccacttccagtggcaaatgccactagggaaagtaagttgcactcatgtaagtatcaaactatataaaaggaggccttgtgcatttcaagtttgcaaagtacctgtgtacttaaaatatgtgtggagacctactgtacagtagttttgcccctttaattggggcacattcatcttaaatcttatagtatttatccacccaaaccccagactgagatactgctcccaggggcctaggtagctgccagtccgtgattttaattgctgtcttgaagttaacaagtgttataatgaaataatctacctgatgctaaataaaggctttagaatgttccccaaaaaaaaaaaaaaaaaaaaaaaa

SEQ ID NO: 222800 - DNA, 1000 bp, Homo Sapiens
aactgacagtgtgaagataaggagagtggaaccaggagctcagagtcctgacagcagcttcagaggaagctcgtttaattttattgtgctcatctcaggaacaaaagcattttttagttaaataatttaacatcaaaacaacatgcaaccaaaaacttctgacatttatagttgatacttgcctatagaaatgtttggtggctggtgtcaaaggtccttaaagcatttgctgccaagttagtggaaggctcacttttgttaagatgactgtaattctccttgttaccgacgagagatcattggaagctgccttctaacactttgtgtagctctgtggagttggattttcttaaggtttaaaaagaatcacagcttcggaacttttaactgaaaatgagagacagaagccacaggggaagcaaagcaaataggattttcaatataaatatcagtgtggaaaaataacctattctgttgaatttagtgttcatgcacttgagaacaacattatttccatttactccgaaaatccttctgtgggggtttgagaaagtgaatgttgcagacatgttctgttgtgttgcactttatcctgtgtttatgtgtatgtgtttttagattaattcaagttgtgtgctatatttcttgtataatttacaaagttacacaaaatataaagagcagtaaacttgtctgaaagtttttggcaaaggaaggtaacttcaatgtaatagcttcctttaagagtacaggaaaatgcattctgtaatgaagtggggcccatgtaattgtttatattttcagttttaagcaggtatagtgcaggcttgttaggaatgtgtggaagggaagattggaagtgatttttcctcttttaaaagtaaacaaaattcttcaaatatgccctagttaactatttcagcataccatttttacttggttaacagtgtacattttgataacctatcaggaatgaataaagtatttttatttaaaggtg

SEQ ID NO: 222801 - DNA, 1000 bp, Homo Sapiens
catcgattcagcatacccatcaactggcagcattctagaaaatgagcaaagatcaaatttaatgaataatatccttcgaataatttctgatttacagcagtcttgtgaatatgatattcccatgttgcctcatgtccaaaaatatctcaactctgttcagtatatagaagaactacaaaaatttgtggaagacgataattacaagtaggttggatcttcaaaagtggtttgtataactttgtcctgtcctccacctttctatccctatgtatttaaacatctaaatcctacatggtatcatacaaaggactaatccagtggtttacagcagtaaaggtactaacatgtattacttcttaatcacttgttatgattgagccaatatacaaatacctcatctgttctttttaatattttatctctgtttgtagagagctaacgtttgatagttctaatttaaatttcttcctttcccccatattcaatcattgaatccttatagaatttgtcttttaatagacagaaaaattaatgaaactttttaaaatagaaaaattactcttctttaatgctaagtattgacacatcgttgtttgtttttcattgtttttgcggattgagagacttggtccatcttgtctcaggagaagaaacctttctccaatgtagcagaattatcctcttccctgtattatagcaagttctttattaaagatttttgaggccgggcacagtgactcacgcctgtaaccccagcactttgggaggccgaggcgggtggatcacttgaggtcaggagctcaagaccagcctgaccaatatagtgaaacactgtctgtactaaaaatacagaattagccgggcatggtgcatgcctgtaatcccagctgcttgggaggctgaggcaggagaatcacttgaacacaggaggcagaggttgcagtgagccgagagtgcaccattgcactccagcctgggcaaaaagagcaaaactccgtct

SEQ ID NO: 222802 - DNA, 1000 bp, Homo Sapiens
ttcaggagtaggatccagaaaactatatttaaaagttctctaggttcttgatatactatgtaggttgtggtctgaggaccactacatggggatcatttggaaacttgttagaaatgtagactcaggttccattccagacctgctgaattggaacaagatccccagatggtgcctacgcacagtaaaatttgagcagcactgccctagcatgattctagtgtgcagtcaatgttgaggaccactgtcttagaggattgcgtaaaagcaaatgacgtgtatataaatttagattgtaatattctctgagtataaactcattaggtgcaagctgagctcaccctccatgttttctgtgttcctggttaaagtaagttacctttgatgaaaaccacaggttcatctttgacttcaaatcagatttgttgctattgaagctaattggatcccagctcagctttgtggcttggattcacaccatataaaatcttcaacagacattcattcctttgttcagaacacacaaccttctaacgtgaacctccaattttctaaattcattctttttctacttcacctgaaaccacagatccatggcacttagtttctctgtaacagcagctctaccatggtgtccagaaattttagcccctactatcaagaacaaaacatccttgtacatgtttatacatctttttgagtaggagttttccaccagttgcagggattccctgagtctagagtaatgccacaatgctgctcccttttactcctttctaagcatttctgtcagggagaagacttagattcagttgttcactttaacattttccttagatactctcttagaaaagttgtattctgcgcacttctgttatgaagggagtaagggattgctgagatttgttaagttaccaaactagtcttgatagatgtataattattacatatccaccatcacttcatttagctgggcaacaagggcaaaactctgtctcaaggg

SEQ ID NO: 222803 - DNA, 1000 bp, Homo Sapiens
tggggttcagaatccagagaccaaaccctgacccacctccttcctttcctccagcccacactggtctgtccccatgccttcccagggcttcttcatgtcagatgcacccaagtccttagcccagctgtgccacctgcaggagttcgctcttgcgtttcttcccctccccaagaagggagggggctacttcaggcccttctgtgtgttgcctggcaggataccttgtccaaccagctacccacctcaactcccctgtagtttaggacacaaaacagctaccagcggtacagagcggtgatcaaagccgagtacttacaactctggtaagcctagcttctccgcctcagcccttctgcttctggaagagctatcctgggggtgaacttgaaactctcatcaggcttctgcaaaagctcttcttcctgaagacagacccagcctttgtgctctcaccctccactctggtaaagctgcacctctgggggaatgaggggctgcaggaatctctggagagcctggtgcttcacgatgctgctctggtgattcttgtacctaatctggtgtgctcaccaatgagtgaaagggatcgtgggtcagggacaccgagagagtgaggtcacttccacttcaaaccttcagtgagggggtgggatggagagaatgctgaatcttttttttgacgggatggggtttttctctttgtaattatttctttagtttaattaaccttttggttgtttgtgcaatattatatattttaaattataatgcatctccccagagtattttgtagctgggaaaagaaaaaaggaaaaaaagaaaaaaagattctaacagctgttagttttataattaaaaaagaaagaaaaaaaaaaaaaaaaaaaaaaaaaaaaaaaaaaaaaaaaaaaaaaaaaaaaaaaaaaaaaaaaaaaaaaaaaaaaaaaaaaaaaaaaaaaaaaaaaaaaaaaaaaaaaaaaaaaaaaaaaaaaaaaaaaaaaaa

SEQ ID NO: 222804 - DNA, 1000 bp, Homo Sapiens
actgattacttgaggtgtgccttgtataactgaatttatggtgctatttaaacaatttttttctaacgtgaaaaggataaaacataaaaaactcttgagaactataaagtgaacacctatatgcctacccctacctagattctatacttaacatcttttttactgtaatatctctattataataaatcttggtttttcacttaactggtgtaattggtgccaataaactactttttttgtagtgctatttaattttgattaaatttagatagccacgtgtctagcggctaccgtttggacagtatagctctagagcatggcttggtaacctgtttgccatggagcactagatggtccttttcactcctcaaaatgcatgcccattgccttcaggtttgccatggaaagtcaaatgatttccacttcattatgcaagtacgctatcatcttcaggtcttttgtatgtaaaatgtttctgttccagttgtagaccttgatgattgtgcagtatgaaatcgtattgtaattttcttgcatttagatgtcaacctcagaaacaggaacaatcgtcttttgaacttccagtaggcccacagttgttggttgttcctcaaaacaggttgtggctcctgttgaataagatgatccattaaaaactgaacaaggttgaggagaaatagtgcttacgttgaaaaatctttaagtctttgtccccgttctctaacttccttacgttttcgtttatttagctccatccccactatctactagaatttctcatatttaaaccaagatgggagactaggtcattaggaaaatattaccgtctacaattttcttatactttgatctgtcttttatttgattgtaagttgctgatggacagtgatcattagaaactgaattttgtataatactagttttatatgaaactagatatttattgcgctcaggttatgttccttttacctccttccttaataaagagaccacttgaaat

SEQ ID NO: 222805 - DNA, 1000 bp, Homo Sapiens; identical to SEQ ID NO: 117539

SEQ ID NO: 222806 - DNA, 1000 bp, Homo Sapiens
tgcctcagaacaggcgcatgacccatttagcacagaagtttttccccaaggctaaggatgaggctgcttcgccagtgaagggataggtgaacggcgtcctttgaagcaggatcagacccagccagcagagatggagagtgactctgttggcagaaggcaggcgaggataagctaacgatgctgctgtggcctctatgcactcagcaagagcgggacgcctgtgctgggccgggcaccagggatggtgctgagtcgggcagaggcctcctttcaaggagttcacagtgaacaagatgagaagggctgggccctggagggtcaagagccccaattatgtacaagacactttgggaggaaagaagactaccttttccccctgccattggtatagctggtgccccaaaacttccacctccctccctggccacctctaaaatgactggtataggtgctgccccaccccttagctcccctatcctgggctaggaggccacaggggctgtcctctagaattcttccttccctcccccacaccattcattcaattcatgaaacaaatctttgccaagagcagtttatgtgccaggaacatcattctgtccttgcaacctggaacaagaccagctaccagcctagcttcatccgctacttgcaccaaccagtcccgggttagatcccaaatgctagaagccagggatgcccaactctgggtggccccagtcagaacctctgggatctcagtgaagctggcctggcctctgctcctgctctcaaggggctgcttttcaaccaagagccttgtgagcctggtctgagccttgcacagccactgagtattttttttgccttagccagtgtacctcctacctcagtctatgtgagaggaagagaatgtgtgtgcctgtgggtctctacaagtgacagatgtgttgttttcaacagtattattaggttatgaataaagcctcatgaaatcctcaaaaaaaaaaaaaaaaaaaag

SEQ ID NO: 222807 - DNA, 1000 bp, Homo Sapiens
atattatcttggaaggctcttgttaatatgttacacttaatattctccacagttacctttagagagaatttatgagaagttagtttctgatgcagaggtttttaggctgtgatttcatcaaaagtccttttagcattctacctcaaagggacacttagtatgcctaaaatttattcacttagttttcctttttttatttgaaaaaatacatgacatgtaatctttttttcttgaattctttctcagattttaaagtactatattaaagaaaaaaattaatgtctaaagcctagcattcttgcagaaccctatactaacatgtaatggggagagggtggggcagatgagtagagaaacagattcaagcctcaagcttccaaagcatttttataaatggaaaatccttaaattatgaaacagcttgatatagtgtcctttttttaaaattcagaactttttttattgataatggagattgctgtttgagtttttaaacttaatctagaacagaggagtattaaaagtaatgctgtgctgcattatttaagactatcagcaaattatttgatagattgttcttacaacttgtattctgattacagaaccatcatgagtgtggaataaatactggattaaatcctttatcctgggtcttggcttttcccccatttgttaaatttttttagcatatttatattgtggaaattgatgaaacgtcagtagagtcacactttgtgtacagggatgtcttagtgcccagatgacaagtgaattttggagaaatgcatagactgggattgggcatgtggtaatcaataatctttattagaatacttgataatggcagttccctttgtcagtggttgttacatgtgtcatttgattactttgttccatgtcaaagacgtttattgggataccttttacttggacaatatgttagcattttttaaaatttggacttgaaattctttaagataattcacccaattctttttag

SEQ ID NO: 222808 - DNA, 1000 bp, Homo Sapiens
tacagttatcatttatgatagtgattggaacccccagtcggatcttcaggcccaggatagatgtcatagaattggtcagacaaagccagttgttgtttatcgccttgttacagcaaatactatcgatcagaaaattgtggaaagagcagctgctaaaaggaaactggaaaagttgatcatccataaaaatcatttcaaaggtggtcagtctggattaaatctgtctaagaatttcttagatcctaaggaattaatggaattattaaaatctagagattatgaaagggaaataaaaggatcaagagagaaggtcattagtgataaagatctagagttgttgttagatcgaagtgatcttattgatcaaatgaatgcttcaggaccaattaaagagaagatggggatattcaagatattagaaaattctgaagattccagtcctgaatgtttgttttaaagtggagctcaagaatagcttttaaaagttcttatttacatctagtgatttccctgtattgggtttgaaatactgattgtccacttcaccttttttattatatcagttgacatgtaactagtaccatgcgtacttaaatagatggtaattttctgagccttaccaagaacaaagaagtatccatattaagtttagattttcagttaatttttgagactgagtagtattcttggatacaggctgatgtgtacttaaccacttccagatttatacagtcttcctgtggaagtttagtaaatgtctttttccctcctttcttctagtaatgcagttcatgggctttaggtacttcagttatgaagtaggcttttcatggggagagattgggattatgctctctgttgtttaagaaactgtttgattttagagtctatttctatgagatagtttaccaaataaatgttccttataagatgaaaaaaaaaaaaaaaaaaaaaaaaaaaaaaaaaaaaaaaaaaaaaaaaaaaaaaaaaaaaaaaaaaa

SEQ ID NO: 222809 - DNA, 1000 bp, Homo Sapiens
gcaccacagacgtgaaatggcatctgtcatctttagcgccaccttatgtcaagggagttgatgaaagtggagatgtttttagagctacctatgcagcattcagatgttctcctatttctggtctgctggaaagccatgggatccaaaaagtctccatcacatttttgcccagaggtaggggggattatgcccagttttgggatgttgaatgtcaccctcttaaggagcctcacatgaaacacacgttgagattccaactctctggacaaagcatcgaagcagaaaatgagcctgaaaacgcatgcctttccacggattccctcattaaaatagatcatttagttaagccccgaagacaagctgtgtcagaggcttctgctcgcatacctgagcagcttgatgtgactgctcgtggagtttatgccccagaggatgtgtacaggttccggccgactagtgtgggggaatcacggacacttaaagtcaatctgcgaaataattcttttattacacactcactgaagtttttgagtcccagagagccattctatgtcaaacattccaagtactctttgagagcccagcattacatcaacatgcccgtgcagttcaaaccgaagtccgcaggcaaatttgaagctttgcttgtcattcaaacagatgaaggcaagagtattgctattcgactaattggtgaagctcttggaaaaaattaactagaatacatttttgtgtaaagtaaattacataagttgtattttgttaactttatctttctacactacaattatgcttttgtatatatattttgtatgatggatatctataattgtagattttgtttttacaagctaatactgaagactcgactgaaatattatgtatctagcccatagtattgtacttaacttttacaggtgagaagagagttctgtgtttgcattgattatgatattctgaataaatatggaatatattttaatgtggtatatccagaaaa

SEQ ID NO: 222810 - DNA, 1000 bp, Homo Sapiens
caagaaacagccccagcctgcaacccccccaccctgggagcagcactcccaccctggccagtcgagggatcttagggctatcccgacagagtcatgctcgagccctgagtgaccccaccacgcctctgtgacctggagaagatccagaacttgcgtgcagcttctcctctcagcacactttgggctgggatggcagtggggcataatggagccctgggcgatcgctgaatttcttccctctgcttcctggacacagaggaggtctaacgaccagagtattgccctgccaccactatctctagtctccctagcttggtgccttctcctgcaggagtcagagcagccacattgcttgccttcataccctggaggtggggaagttatccctcttccggtgctttcccatcctgggccactgtatccaggacatcactcccatgccagccctccctggcagcccatgttctcctcttttctcaccccctgactttccctgagaagaatcatctctgccaggtcaactggagtccctggtgactccattctgaggtgtcacaagcaatgaagctatgcaaacaataggagggtgtgacaggggaaccgtagactttatatatgtaattactgttattataatactattgttatattaaatgtatttactcacactttgcctctaaggagctagagtagtcctctggattaaggtgataaataacttgagcactttccctcaaccagcccttaactagaacacagaaaataaaaccaagactggaaggtcccctctacccctcccaggcccagagctagctgactgtgtatgagcctgggagaatgtgtctcctccacagtggctcccagaggttccacacactctctgaagctccttctcccacactgcacctactccttgaggctgaactggtcacagacaaactgggatccagcacagtccagcagttctcaaaatgaggtcctcaggccacagtgcgtgaga

SEQ ID NO: 222811 - DNA, 1000 bp, Homo Sapiens
aatctttgggcctctgaagagaccaatagtggagttctctttagaagatcgaagaaaacttaaaatgaaggaattaaggatccagcgcagcttgcaaaaaatgagatccaagcctgcaactggtgagcctcagaaggggcaaccagagcctgcaaaagaccagcaacagaaggcagctcaacaccacacagaggaacaaagcaaggtgcccccagagcagaagagaaaggcgggctctacctcatggaccgggttccagaccaaggctgaagtggagcaggtggagctgcctgatggaaagaagagaagaaaggtcctggcgctcccctcacaccgaggccccaaaatcaggttgcgggacaaaggcaaagtgaagcccgtccatcccaaaaagccaaagccacagataaaccagtggaagcaggagaagcagcaattatcgtccgagcaggtatctaggaaaaaagctaagggaaataagacggaaacccgcttcaaccagctggtcgaacaatataagcggaaattattgggaccttctaaaggagcacctcttgcaaagaggagcaaatggtttgatagttgatgatggcagcaggctgggtaagaagctgggttgtgtactttctggtgacactcctgggctcctccccatcccccgtgtctctcactgagggaaagaaaatccccaagggcactgccactgtgctcggaggtgccctggactgtgtacatctgaactttggtccatcctttgatgtgtggttcgttagccacaaagagaaatatctgaaagtcaacatgatgcttcttgcatattatccagattattgtatgaagttgtgtctataattattaccaattttttattctttatttctcaaatggaaacacctgaaaaagcattctggagtgctgaatttttaagatgtatattttgttaagcatattctctaaatgagatattgtgtggctttttagtaacaacgtcatttctaat

SEQ ID NO: 222812 - DNA, 1000 bp, Homo Sapiens
aaagattgcaaacaacagtacacaccttacaggtcatcatagatggtctcagccagcctgaaagctttgactttcgaacagattttgataaacctgatttcaagagaagcatagtatgcctggaagatctgcagattgggacagttcttacaggcaaagttgagaatgccactctctttggaatttttgtggatataggagtggggaaatctgggctgattcccatacgaaatgtaacagaagcaaaactttcaaaaacaaagaagagaagaagccttggactgggccccggagaaagagtggaagtccaagtactcaacattgacatcccccgatctaggattactctggacctcattcgggtgttatgagtatcccacgaaggccagacgctgattttattttctcatttccacagattgacaaggataagtcagttgtttgtaaactctaggtagcagatgagaaataattcacttaatatcagaaatattttccaaacactttcctttattttttcttctgaataaatagaaaaccaacagtttgatttccttttcccttaaaggaaacaactaatacacattcttatatggctttatgtagtaatagttttctgactaaaattttgttttttattttttgtaatttatctttaactccttttgcattttgtataacagattgcttaacttctacttgccaacatctgccttgctggacttgtatgggattgtctccttgatttgaattgtaccgtctttgttgacacagtagggctgggcagtgtttaatccttccattttatagatttttttttaatcaggccttttggactttattcataattttgcaataatctcttttcccttgtcatgcaagccaaaaatataccagtaaaacagattctgacgtgtttgtagttatcaaatgaatggctcgaaacacttctcaaaaggatatacgtattgaccccaacaataaatgtttgtggctagtg

SEQ ID NO: 222813 - DNA, 1000 bp, Homo Sapiens
gcccggggcccacgagccgtccttaccaggcaacccactgaaggacggtctcgtgatggtggcttgcgtctcggggaaatggaacgtgactgtttaatcggttatggagccagtatgcttttgctagagagactaatgatttcaagtgatgcctttgaggttgatgtctgtgggcagtgtggacttctggggtattctggctggtgccattactgcaagtcatcctgccacgtgtcttccctccgtattccgtatgcctgcaagctgctcttccaggaactacagtctatgaacatcatccccaggttaaaactgtccaagtacaatgaatgaggatggaaaaaatgattattaaagagaacaagtgatacatccaatgcaacggaaagcagaagggatttaggactacgtctcctcctgtgaagaattcccttgcgtattctctctctaaaacaaccaaaaaaaaatggagaggctttttatatactctaagactggctaaacaaccttgatcattgagcctcgagccatgggagagatgctgaccatgtggactgcaaggctgcttgattcacagatggatgtgacctaaaggataaataagctattacttatgtgctgatctcttgacattcactcattagaagaccttactccttcaagcaaatgtttggggtcaaatttaccatatcttctggctaaccatattcaagattcttctgaaacttggaggatgtaaagaatccatttgatttggtcagcctggcttttgtcgtggtggctggctcggataaattttcccaacaattaaatcttgcctttacacacccaaactttgtaattttagtcttggtgaaatataatgaatttgttcctaccttgtcaagcaagaatgtcgtcttctcctatggactcaattgctattattttaaacctgcatgattgtaccatgcaatactattcgttaaatatctgaatctagaaaaaaaaaaaaaaaaaa

SEQ ID NO: 222814 - DNA, 1000 bp, Homo Sapiens; identical to SEQ ID NO: 117546

SEQ ID NO: 222815 - DNA, 1000 bp, Homo Sapiens; identical to SEQ ID NO: 117547

SEQ ID NO: 222816 - DNA, 1000 bp, Homo Sapiens
gtgaagcacttcagcaccgaggatggcatattccagggtcagagacactgcccgggcggggagggcatgttccgtggcctcgcccaggccgacggcaccctcatcacatgtgtggattctgggattctcagagtctggcatgacaaggacaaggacacatcctctgacccactcctggaactgagagtgggccctggggtgtgtaggatgcgccaagacccagcacacccccatgtggttgccacaggtgggaaagagaatgctttgaagatatgggacctgcagggctctgaggaacctgtgttcagggccaagaacgtgcggaatgactggctggacttgcgggttcccatctgggaccaggacatacagtttctcccaggatcacagaagcttgtcacctgcacagggtaccaccaggtccgtgtttatgatccagcatccccccagcgccggccagtcctagagaccacctatggagagtactcactaacagccatgaccctcactccgggaggcaactcagtgattgtgggaaacactcatgggcagctggcagaaattgaccttcggcaagggcgtctactgggctgtctgaaggggctggcaggcagtgtgcgtgggttgcagtgccacccttcaaagcctctactagcctcctgtggcttggacagagtcttgaggatacacgggacccagaatccacggggtctggagcataaggtttatctcaagtctcaattgaactgcctcctcttgtcaggcagggacaactgggaggatgagccccaagagcctcaagaacccaacaaggtgcccctagaagacacagagacagatgaactttgggcatccttggaggcagctgccaagcggaagctctcgggtttggagcagccccaaggagctctccaaacgagacggagaaagaagaagcggcctgggtccaccagcccctgacgcccctgtgcccactttgtaaataaactgctgaacaccc

SEQ ID NO: 222817 - DNA, 1000 bp, Homo Sapiens
ctgcctccaccaccgctacccagagaacctctgcatctggcatttctgctctctatgcttgagaccgggaggtttaggctcagataagtgagctctgggccatgagagggtaggtccagaaggtggggggaactgtacagatcagcagagcaggacagttggcagcagtgacctcagtagggaacatgtccgtctaccctctcgcactcatgacacctccccctaccagccctcctcttcctcctcctcctcctcctgtgggaggtggtcagtgggacttagggatctttcacctgctgtgcccagtagttctgaagtctgcttgtggagcagtgttttatgtttatccctgtttactgaagaccaaatactggtttggagacaacttccatgtcttgctcttctacctccctagttagtggaaatttggataagggaactgtagggcccagattctggaggttttatgtcattggccacagaataactgtctctaagctatccatggtccagtggtccctgccaagtctgtagacttcagagagcacttctctcttatggggttcatgggaacaggggtgggtgtgacttgcttggtggcctcattccatgtgtgcctgtgcctggggcatggactttgttaagcagagtcagcagtgaggtcctcattctccagccagcctctctgccctggagaatcatgtgctatgttctaagaatttgagaactagagtcctcatccccaggcttgaaggcacatggctttctcatgtagggctctctgtggtatttgttattattttgcaacaagaccattttagtaaaacagtcctgttcaagttgtattcttttaagttcttttattctcctttccctgagatttttgtatatattgttctgagtaatggtatctttgagctgattgttctaatcagagctggtacctactttcaataaattctggttttgtgttttcttttgtaaaaaaaaaaaaaaaaaa

SEQ ID NO: 222818 - DNA, 1000 bp, Homo Sapiens; identical to SEQ ID NO: 117550

SEQ ID NO: 222819 - DNA, 743 bp, Homo Sapiens
gatgtcacctggagcgagtagcgcgcggcgtggaacgcgagtcgcgaccccggctcccggcagtggcgcgcactagccctcgcgccgcacgggacacgagggctgggcgggcagcgggatgaggctaaaggttggatttcaaggcgggggctgcttccggaaagacgcgctgtgtttggaaggtggagtgagcgcccggtgggcgagggcacctcattctgcacccctgcgcccgcctcgggaactgcacgcggcacccccacccgcgactcccacgcagacagtagtgcggcctgcagggttcccccggcggacgaggctaatggttcgctccgccccgcccacacagaggccgcccactggctccggctgcgtttcaggactctggaggaagggacttggccttcgccctcagacgctcttaagggtaggcggcgttgtcctcagttctgccccagcactcagacccagactgggtccctgcctccgccctccgccctcggactagtctcttggaagccggcctgtctccgccttcagacctagggagaggtcttaacctctgttctcagactctggaaaaggcttctcaacggcttggcctgacctcagctcctcgcattccctccacatctcaagacaccaacccagggatgcaggacagacacacagacactcagtgagggtcaaatatctttaaataaagtgccaggaacaataaatactgtacaggaagagagtgc

SEQ ID NO: 222820 - DNA, 1000 bp, Homo Sapiens
gtgaaatgaagactatatatatggaatggaggtgacagaaagaaagaaattctttgtttgagggagacttcccctttctggattgtatttgtagagtgttacgagtgtatcatgtgattatgctttaccggtataagagattctgttgtgattatttgaatagttttatattaataaaagaagacaaaattttttaaatgttagaaaaagcagatctgtcattgcaaagtaacaaaaattttaagcttttaaaaatgtagatttttcatatttttaaaatttgaatctatttgagctttagttcagcagaattaaatttttacttgacattatcattaaaattgctaggtatggagaacaattcctattttattttgaacactgagaagagtaaacttttcctaaaacactttatattataaatgaaaataaattgctagtttatattttagatataaacatcatattttttattaatacctacatcaaatggaaaatatctgaaattttttttccatagcaggtattttctactagaagtagttttactacttttcatttagaacagagtatgagtcttaatctgaagtctttttcatgcccttgttttaaaaaaactactttttttggcctcaaaaaaatcaagggtgtaatttttaataaattgttaatcctatgttttgtaattttcattttaggagcttgacttatttttttctctctcataaaaacacatttgttttaattgtaggagaaattttctcagcattttgcatgttctttctaatctttgttggtctgaatatattggtagtaattactgtaattattcaacaaaaagcatatccgttcaaaaatttttccactatgtcttttttctagtggctactgttttagttttctagttgaatatctctgacaagctttcgtatggttttgttatatcttcatctacatgtaatgtgttattaattttattaaatgaaaactaatcaccttc

SEQ ID NO: 222821 - DNA, 1000 bp, Homo Sapiens
acaaatccattttccagttcgacaaataaagagaagaaaaaacagaagaactttatgatgatgcggtatagccagaatgtccggtcaaaaaataagcgttccttccgagaaaaacagttggcactacgagatgcacttttgaaaaagagaaaaagaatgaagtaacttcctggcaagttttccattcctagaagaatgctaagtttgtgtccttgctctgaaaattggtaaatcaagcatgtttgtttacattaaaaagtccagacacactgtattgtgaaaactgctgaacatgtggcagcaattttgtgtttttattttggagacggctaatggtaggaatgttaatgtaaatagtggtggtaatgtaaaatcatttcatttatcattcatgcaaaaaaaagtatgtattgagtgcctattcattgtcactgtagatgcaaaacgaatgagctgtaaccccttcactcaaggcattgacagcttagctgtgagggtggacacacatatgtgtatttacagtgcagtgtaaatagttctgtagtagaggttaactccatatttctgtgaggtcactgaggccttatggactaactctgtgaggataggagttatatattcttataagacaaaacaaaacaggacaatgttacaagagtaagaggttcttacttgtacataggctttcctgctgaaaacaggcccctgctgtacagattttgggtacataatttagctcttttagtcagtccaagagatttaagtgaccccccccccccccgtgttttttttgtttttgtttttgttttgaatgccatgtaaaggctttttggttaagacctcacttttaaaactgccttaagtataaatagtacctttggaatatatttagttcatcatttgagctgccttcatactggtttcctcagccttccttcagcctgtaatattttcagcccactgtttaccttgtctcaataaaaggtttctaatgccaaat

SEQ ID NO: 222822 - DNA, 1000 bp, Homo Sapiens
tatggagcatttgaagtcactgaggacacagagaaactcatcactgctatatatgcagattatgcccggagtttgaagaacctcggttttaagcagggagcagttctctttgcttcaaaagccggagcagctggcaaagacttattgaatgagcttgagtcccccaaggaagaacccattgaagagtgacagcttaataaatgccagggaatctgacctggaaggcagatgggagggggctggtctggctgtggccaccgtcacagtccaggatgaagaggagtacagggtcctgtgagctgtttgaccactgttctaagactatgtgtgcccaaaagcacataagcatctatgttgagagtaagtttgtatcctgcgttggtctcagaaagaacgtgaatgcttaagattttgaaagtacataatattttatactttgggagagagctttaagagtccctggaaatactttttaatttttttaacttaaaattcaagagactgaatcacttttctcattgattaaatgtaaagattattgagaaacctatagtaaatgaaatttgtgagatgttttctcaaatatatgctgtgcctgtacttatatacagtctttcaagagagatacaaacaaggcagaaacatttaaactagtattaaaggtagtttaccaaagcattttttgttttcttaccttgaaaacacagaaccgttaattccttggtttaagcagttgctaagttttgtaattttaggctcagaggaccataggaggttttaagatttatgtttagtccgataggtgaggtctttgatattttgaattttaactccttttatgatacatcacagtaacctcatttttgaagtctttctttgtactttaatgttctctctgttctaatagttgaagtatgagatgtaactattataaactgttgctgaaaacataaatgtctgtaacttacaaacatgataaataaattaaaaattccatcca

SEQ ID NO: 222823 - DNA, 1000 bp, Homo Sapiens
cccatgctttgtctccctcctgctgctattgcccggtgaatgggatggtagagagggagaaatgttcattgcacagagaatgtcaggccactttggggacttggcaaacgaagcttgcactgagtggtggtgtgtttggcaatattactgtgccaaaaatcaccttgtctaattttatggatatgtatggcaaacttattacccttcttgcaagctgcacattaaggtacttgtaagtgtttatgcttttgtgtgtaactgtttgccttttctaactgcttttcttgttactgaaaatataattctactagttttatcacattaagaggctctccatgcacaaaatgcattgatgtagccgtaaagtaacagcatttgtacattttctatctcctgatggcagtggtgcctttgtcaccttttggaaggtttgcattttgtttctgctttcaagcgcaaatagtagcttgctttcagcttcacaaaaatctcctcaaatgtaaaagatacaaaatggcgtgttatcatccaggcttagttggagtatttgcatttttatttttatcaaaacaaatataattggtggggactggccagtaataatgtgtggcgtctttaagccaagagtaatttttaaattaaaaatgaaaattttaagaggtagcccattaaacaagctactgagttggagaattaggggatgactgtggtggtttgtcgctaaggaggcaacagtagggtccaggcggcggggcacgtagagcagttagcatgatccatggttattccttactcatgaacagtgtcggcgcacctcattatctgtgcatttgtttttcctgggcagtcctgtcagccagttaatccaccagctcttaggaagtaaatacagatttttttctttccttttttttttttttaaagattttatactacatcttgttaaagtcctatgaatgtgtgtgtgtgtgtgctattaaaactgctttttctcagtttg

SEQ ID NO: 222824 - DNA, 1000 bp, Homo Sapiens; identical to SEQ ID NO: 117553

SEQ ID NO: 222825 - DNA, 1000 bp, Homo Sapiens
cccacctcagcctcctaaagtgccaaaattataggcgtgagccactgcacccggcccctatttgaagacgtcttttgtaaaagctagcttctagaacctgagaaaagctcttttctcagaggagatactccttttgatatgttaatgattaagagtggttgcccaggcctagtttcagtggcagaataggattggaattaaaaagcagaactcatctggcttcagcagattgccaccaagaggatacaggtggtcaggtcctggctggctttgtctttgggcctgggcaggcttaggatttgactttctttgaagtacctgatgctgattgattccactaatagtaggaagcaagagacttaactatgagggacgttatgtgaatcttaagtcttaccagtccttgcattagtacattaaatttggatgttttggaagcaaattcatacgatcgtgagtgatttctccaaagaaaaaaagccttgtccagcctgaccaacatggtgaaaccccatctctactaaaaatacaaaaattaactgggtgcagtggtgcgcatgcctgtagtcccagctacttgggaggctgaggcaggagaattgcttgaaccctgggaggcagaggttgcagtgagtcgagatcgcgccactgcactccagcctcggtgacagagcaagactccatctcaaaaaaaacaaacaaacaaaaaaaaaccctgatgccattcccagtccccgttgtaggacatcacatttataaatccaggctttagtcttctgggctccaccagtctctgccccaccatattcctttgtcactacctctaagtttttttccccacttgaggatttggagttaaacgaactcaaaatgtcttgtcattgtatgtattcttgcccctgctttgaaaacagggccatgggaactctgtttatgccctgttttaatgtttctgttttatgttttactgttaatatgaaaataaagaatttgctatgta

SEQ ID NO: 222826 - DNA, 1000 bp, Homo Sapiens; identical to SEQ ID NO: 117554

SEQ ID NO: 222827 - DNA, 1000 bp, Homo Sapiens
tcccacaccagctgggttgcacactgttgatatggaagggagtaggaattagtgaaaggggagtctagttggtttacctataaagttcagatgagaatacgtgtccagtttgaattttcttatcactgtgtacacacgcttcccaaagcttttctttaattctgactctgcttctgtcaagagggttgtcattaatacatctagggtaccctcccatgtcatgaagttacctagtcaggttcccgtgggtcacttgctactcctaagggaagtttcttctgcctaagaagttacaccatgctttgctatttcttttcttgctggagcctcaccttaatttcatcctctgtgacagtgaagatatcatccacaaggtccctgataataggccaggtgttcaagccaatgctggatttgacaccatctgctatggtttctggaggataaagattgggcatcagtttccccttcagcttggactggtagcagtcatctgcatttgagggttcagcagcatataccttcacactaggtttcagagcctgggaagaggaatattaagacatcttaacaacaaaccacaacattgcctgcatgtctaaaagaaaatatgggcctggtgtggtggctcacacctgtaatcccaacactttgggagcccgaggcgggtggatcagctgaggtcaggagttcaagaccagcctggccaacctggtgaaatgcagtgtcaactaaaaataggaaaatcagccaggcgtggtggcagacccctgtaatcccagctactcaagaggctgaggtaggagaatcacttgaacttgggaggggtaggttgcagtgagctgagatcacaccaaaatggggtggggcgcagtggctcacgcctgtaatcccagcactttgggaggccgaggtgggcggatcacgaggtagggagatcaagaccatcctggctaacacggtgaaaccccgtctctactaaaaatacaaaaaaaaaaaa

SEQ ID NO: 222828 - DNA, 1000 bp, Homo Sapiens; identical to SEQ ID NO: 117556

SEQ ID NO: 222829 - DNA, 1000 bp, Homo Sapiens
ctgtattcagagatggtttcgagcaagattacaagaaaagagatttattcagaaatatcatagcatcaaaaagattgagcatgaaggtcaagaatgtctgagccagcgaaatagggctgcatcagtaatacagaaagcagtgcgccattttctcctccgtaaaaagcaggaaaaattcactagtggaatcattaaaattcaggcattatggagaggctattcttggaggaagaaaaatgattgtacaaaaattaaagctatacgactaagtcttcaagttgttaatagggagattcgagaagaaaacaaactctacaaaagaactgcacttgcacttcattaccttttgacatataagcacctttctgccattcttgaggccttaaaacacctagaggtagttactagattgtctccactttgttgtgagaacatggcccagagtggagcaatttctaaaatatttgttttgatccgaagttgtaatcgcagtattccttgtatggaagtcatcagatatgctgtgcaagtcttgcttaatgtatctaagtatgagaaaactacttcagcagtttatgatgtagaaaattgtatagatatactattggagcttttgcagatataccgagaaaagcctggtaataaagttgcagacaaaggcggaagcatttttacaaaaacttgttgtttgttggctattttactgaagacaacaaatagagcctctgatgtacgaagtaggtccaaagttgttgaccgtatttacagtctctacaaacttacagctcataaacataaaatgaatactgaaagaatactttacaagcaaaagaagaattcttctataagcattccttttatcccagaaacacctgtaaggaccagaatagtttcaagacttaagccagattgggttttgagaagagataacatggaagaaatcacaaatcccctgcaagctattcaaatggtgatggatacgcttggcattccttattag

SEQ ID NO: 222830 - DNA, 1000 bp, Homo Sapiens; identical to SEQ ID NO: 117557

SEQ ID NO: 222831 - DNA, 1000 bp, Homo Sapiens
gtgcctaactattgggataatccaatggttgtgtgcagagagaacagcgacacaagagtcttccagcttttaccaccttgtgaattctatgtatttattattccctttgaaatggaaggggacacaacagagatacccgggggtcttccatctgtatatcagaaagcactgggtcaaagagaacagaagatacagatctggcagaaaactgtgaaggaggctcatttgacaaaggatcaaaggaagcagttccaggtactggtagagaacaagttttatgaatggttgattaatacaggacatcgccaacagctggacagccttgtaccccctgcagcaggctccaaacaagcagctggataaggatcttacatgcagacactgggccctggaaatacaaggataaatggaggatggtgctcatcttgaaacttgaaactaaattgggaaggtgctattgctgcttaagagacattgggacttttctgtcttttttttttttttttttttgaggcagagtcttgttctgtcgcccaggctggcgtgcagtggcgcgatctcggctcactgcaagctctgcctcccgggttcacgccattctcctgcctcagcctcctgagtagctgggactacaggcgcccgccaccacgcccggccaattttttttgtatttttagtagagacggggtttcaccgtgttagtcaggatggtctcgatctcctgacctcgtgatccgcccatctcggcctcccaaagtgctgggattacaggcgtgagccaccgtgcccagccttctgttctatttaagaactttgatttccattccattttcatttattactgtttaggccgaattttcgctaaacttctgactttcatataaacatattgcttatagaacatcagaagactcatctttgtgatgcccaaatgaaaaagttggtgaaggtagtaccattgtatgtatgttaatattaaagcaactgagtgtagatttgc

SEQ ID NO: 222832 - DNA, 1000 bp, Homo Sapiens
ctcatgtaagcattacattttgaagactgaatatacttcacagcagatcaaacacatttatggcatgcactgacctcttcttggagcccagaactttatagagttgcctaccagggttactgtaatggaatttatgatcttaagaaattactagttgtattatttatcctatgattcattcattcaataagcttttactgcataaactttacatccagcactgtagttaagtacccaaaattgaatagaaataatggcttttgaaaattgcacaaagcaggccaggcacggtggctcacgcctgtaatcccagcactttgggaggccgaggcaggcggatcacgaggtcaagagatccagaccatcctggctaacacggtgaaaccccgtctctaataaaaatacaaaaattagctggacatggtggcacgtgcctgtaatcccagctactcaggaggctgaggcaggagaatcgcgtgaacccgggcccggtggaggctgcagtgagacgagatcgcgccactgcactccagcctggcgacagagcgagacaccgtctcaaaaaaaaaaaaaaagaaaattgtgcaaagcataggtaaatatttttctttattaagcttctcactgagaagccctctttattttggtaaatgtcactctgtttgttaggagatgtctgcttttccatgaaatgaaatagtggctaaagccctgaaagaggcaagactacaatgggctgaaacagttggtatagcaaccccagagaagtgcttcattttctttttatagtagaagcaggtccatgtcttttgtggtttcctgcacatctttggagtagttatgacttctcagtttttccccccttaaactgcattgcctattcttttttcctgacatgctatcaggtatcagtgtgttgaatacataatgcttgtgtatcagacttacgttactgtcatcaccattaaaagaattgcagccttgtgccccatgaccttca

SEQ ID NO: 222833 - DNA, 1000 bp, Homo Sapiens; identical to SEQ ID NO: 117558

SEQ ID NO: 222834 - DNA, 1000 bp, Homo Sapiens
agaatacgtgcatggctggcacagtggcttacgcctgtaatcccagcactttgggaggctgaggctggcgtatcacctgaggttgggagttcaagaccagcctgaccaacatggagaaaccccgtctctactaaaaatacaaaattagtcgggcgtagtggtgcatgcctgtaatcccagttactcgagaggctgaggcaggaaaatcgcttgaacccgggaggcagaggttacagtgagccaagatcgcgccatcgcactccagcctgggcaacaagagcaaaactccatctcaaaaaaaaaaaagaatatgtgcagctctggctattctttaatcatgtctttctgaaatgtgtatttgagattagaaattgaggttgagaggaactcaggagattttttttttaaatcatatgacagtataagccatcagtactaaatggacagctcccagtatactgtggactgtgataaactgaatgtatgttttttaatggtttattgctgcaggttttttgtgtatttgatttttagtttttaacttatttttcaataggtaataattgcacatggttcaaagctaaaaggtatgaagtattatgtagggatacgtccctcccattctgtcccacagccaccacctctctcctcagccagcaatgacatcagcgtcgacttgcctttcccggggttgtgcagagttagatatgcacatacatgtggtataagcacatgtacagaggagtacacatagcatataaacatgtctgtagcacatatatattctttcccctcttttaaaacaaatggtagcaaaccaaccacacactgttctgtatcttgctctgtttgcttgatacatcttgtaagtggctcctaattactatgtaaagattgaccttatttaaatttttttatgttgaaatcatcaatattcccatcattatggtgtgttctttgattgacaaatcagctctcaataaaccacttataagaatgt

SEQ ID NO: 222835 - DNA, 1000 bp, Homo Sapiens; identical to SEQ ID NO: 117561

SEQ ID NO: 222836 - DNA, 1000 bp, Homo Sapiens
aaagcggccctggttgaatctggcaattctttttgccaagatccctagcagaagatttagccatgtccttcccctcacttgtgtgagtggccccttctgaatctctccagcagccagaggcacgtgagaagcagaaagagctggtaaataaagccttgggcaagcgacttcttagatcagaactcaccaaatggaagcctagcagctgctccataaacctagccccattcttcatatcaattttgtataaatatatagaaacacacacacagcctcagacttacaaactgattatactctaaaagtttgtatgtcagttagctaaaacttcagaatacatttctccctataaagagttataaatgatggtttagttctcaggcagctacaaatgcctatttattccctaatgtacctgaacactagtaccatagaactgaaccaccatctgtatcagcgcatggggagtgtgcattctgaggtctaacccggggtgccaggaacacacacatcctccatcccagcatagagaatggggactccctgagtaatgggagttctttcatggcctctgcttggggtgggggagtcagcagcacccatttgtacatataggtcattcatacatcacattttaaattggggactgtgtgtgctggtgtgtgtgtgagttctacgtttctaccatatgtgatcagtttaatagtaactttatttatttaaaaaaaagaaacacaattagttactgttaaactgataaagggtgtttatttttacttttagaattggtcctatgaagaagtagaaagtgagtcatgcactagacagtgggcctagctcatcagtggctaaagttgaaaaggggttggtttcctgtatatatatgtatgtatatacacacgtacatacattcatatatatacatatatacataatgtgcttaaccactgccttttaaaactttaaattaaataaaacattggggttgattcaatttggc

SEQ ID NO: 222837 - DNA, 1000 bp, Homo Sapiens; identical to SEQ ID NO: 117562

SEQ ID NO: 222838 - DNA, 1000 bp, Homo Sapiens
tcagtctcaacatcgatccagccgtgaaggccgtcatgggcatcttcagcctggtgacggggaagagccctctgtttgcagctcatggaggaagcagcagggaaaacctggcgctgcaaaatgtgcaggctcgaatacggatggtcctcgcctatctgtttgctcagttgagcctctggtctcggggtgtccacggtgggctcctcgtgctgggatccgccaacgtggatgagagtctcctgggctacctgaccaagtacgactgctccagtgcggacatcaaccccataggcgggatcagcaagacggacctcagggccttcgtccagttctgcatccagcgcttccagcttcctgccctgcagagcatcctgttggcgccggccaccgcagagctggagcccttggctgatggacaggtgtcccagaccgacgaggaagatatggggatgacatatgcggagctctcggtctatgggaaactcaggaaggtggccaagatggggccctacagcatgttctgcaaactcctcggcatgtggagacacatctgcaccccgagacaggtcgctgacaaagtgaagcggtttttctccaagtactccatgaacagacacaagatgaccacgctcacacccgcgtaccacgccgagaactacagccctgaggacaacaggtttgatctgcgaccatttctgtacaacacaagctggccttggcagtttcggtgcatagaaaatcaggtgctacagctcgagagggcagagccacagtccctggacggcgtggactgaggccggttccttcctggaggcctcctgtcctcggggaccccagcacctcatcatcagcattgctggagccaagggtaggagccctacactaggagcccaggatgggacggcgcatcagccgagagggagggaacttttcagtcaaattcctcaaaaagaggctggaataaagcctgggcttaaaaaaaaaaaaaaaaaaaaaaaaa

SEQ ID NO: 222839 - DNA, 1000 bp, Homo Sapiens
cagtgttattgtgaaagaatctctgacagaagaagatgtgttaaactgtcaaaaaacaatatacaacttagttgatatggaaagaaaaaatgatcctctacctatttccacagttggtacaagaggaaagggccctaaaagagatgaacaataccgtatcatgtggaatgaattagaaacccttgtcagagcccatatcaacaactcagagaaacatcaaagagtcttggaatgtctgatggcatgcaggagcaaacccccagaagaggaagaacgaaagaaacgaggaagaaagagggaagacaaagaggacaagtcagagaaagcagtgaaagattatgaacaggaaaagtcttggcaagactcagagagattaaaaggaatcttagagcgtggaaaagaagaattggctgaagctgagattataaaagattcgcctgattccccagaacctccaaacaaaaaaccccttgttgaaatggatgaaactccacaagtggaaaaatcaaaagggccagtgtcgttattatccttgtggagtaatagaatcaatactgccaattccagaaaacatcaggaatttgctggacgtttgaactctgttaataacagagctgaactatatcaacatcttaaagaggaaaatgggatggagacaacagaaaatggaaaagccagccggcagtgaagagtgacttgaagaactaaatttagcatattgcaaaaatattttgtgcggaattcgatataagtacttttacagcaggatggtatagttatgttgcctggactggtttttacatttttaaaatatttcagctgtcatttttgtactaattataaaattggcacataattcaaaaatatacatttgagatgatttgtcctcccaaattatacaagtttattttatggtataaagtgttctctctggaaatgtttttaaaaaaattcttaggcttctctttgcgaaataaaactattgaaatatttgaaatgc

SEQ ID NO: 222840 - DNA, 1000 bp, Homo Sapiens
gcatgggtctggggaagaggagcagctttgcctggaaggggcctcctaggagggggagcggtggtttctagctcaggctttaggatcagagagcagcagattcaaatcctgacggttttggtaaagtcaattcaatctctccaagactccgtttacttgatctgcgaagtggggataatggtatcacgtcgcagggttgtcaggcggagctggtaggggagctgccccccagagcagcatggatgccccgcgaagggacatggagttgctcagcaacagcctggctgcctacgcgcacatccgcgccaaccccgagagctttggcctctacttcgtgctgggcgtctgcttcggcctgctgctcaccctctgcctgctcgtcatcagcatctcgtgggcgccccgcccgcggccccggggcccggctcagcgccgggacccccgcagcagcaccctggagcccgaggacgacgacgaggacgaggaggacacggtgactcggctgggccccgacgacacgctgccgggccccgagctgtccgcagagccggacgggcccctcaacgtcaacgtcttcacgtcggcggaggagctggagcgggcgcagcggctggaggagcgcgaacggatcctgcgggagatctggcgcaccgggcagccggacctgctgggcacaggcacgctggggcccagccccacggccacgggcaccctgggccgcatgcactattactgatgggccctggctcccgccgcaaggcgctcggggtaccggacctgtacatgagctcagagctaccccacaccttcggactgcctcggcccccacagctcccaggtgctactgggcgtggaccgccaccccctgagaggctcccttccccagtcctgccagaagaccccgggggcggggagggggcagcatgcagggtccccactccctctctggggtcgatgaagaggtgaagtgaccaaatgaaagaaagctgcattctcagtg

SEQ ID NO: 222841 - DNA, 1000 bp, Homo Sapiens
cccatccaaggataactggacatttgaggaaagcttccaaattgagacagagatcagagcaaaaagaacaaagtcctggaggaagcagacaatgaagggagcagaagaaaacttcagtagaatcaaaatatccttatataaaagaactttttatggaatcagtgagacataagcaggatgctattaaagtaaaaacaggagcttttagaaataagatagcagaaatgaaagatataatggaagcattgaaaggtacagttgaggaaatctagaaagtaaataatataataaagagatgagtggagacaaataaaactagagtattcatccagggtctaacatctaacaaatagtggctttagaaatatataccagagaaaagtgaagagaagacagtatctaaggagtaatataagaaatatttccaaaactaaaggaatttctatataaaaagtttctttttcagaacactggggaaaaagagacaattttaaaatgttgcagggaggagaaaaattaggttccatgcaaagaaataggaatcagatggtattgagattttcagtagcaacaactgaataccacaatacagtgaagtagtgtcttccaaaagctgatggaaaattattttaaacacaaaatcctatatttagccaaacagtcaatcaagtgtaaggctaaataaaggcatttttcagtcatacctcgaaaaactgcctgtgtagggatatttcccctgcttccccactcaggcagctgctgggaatgtattccaccaaatgacgaagcaaaccaagaacaaagaagtgaaggatctagaaaatgggctccaacacgggaaggaagcaaagggagatcccacgcatcagccacacagtaggtcttgtgggcattcagtctagcccagaccgggagggtgaaagtctccaaggaaagaggtgtctcggaagaaatcaattactttcaatgtttgaacattaaatagcaaatgacaaagcaa

SEQ ID NO: 222842 - DNA, 1000 bp, Homo Sapiens
gagacaggaaaataaacataagacctttttaccggtgaaaggtaacacagaaaaatcaaacatgctggagtttaaattatgtccagatatcttactaaagaatacaaactctgtggaagaacggaaggatgtaaagcctcatcctaggaaggagcaagcccctctgcaagtttcaggaataaaaagtacaaaagaagactggttaaaatttgttgctacaaagaaaaggacacagaaagacagccaagagagagataatgttaattcaagactctcgaagagaagcttcagtgcagatggatttgagatgctacaaaacccagtaaaagattcaaaagaaatgtttcaaacctacaaacagatgtacctggagaagagaagcagaagccttggtagcagtcctgtaaaataattacaagatgtggttttgtaattgccactgggaaatttctttccttttctgttcaaaatatttcgctgaaactaatgagaaatgccatgataaagatttctcagagtttggttcccactttcattgtatttcattgaaagtgcttaattaaaatggcttgagaactttgggtagccatgtgtaagaaatggatggtattcaccggggaaacaaggtatttgaatttctactttattgaaccagatttaccattattttaaaaggaatgcttatacaaatcaatttgaaattctacccatcttgagggaggaccgttcctcagttaaggacttgtttatttaaatgggactgtaaatatgttttggtttctaagctatattagcaaaatttatttttcaaaaatgcccactgtgatgtgaatgtcaaaatatattcttaagtgttttataactaattgtaaactttttttcagaagtcttattttatacttgtgaaactgaacacaattttgggacaacgtttaaacattacttttcatacttgaaataaacatttattttttaaaaaactaaaaaaaaaaaaaaaaaa

SEQ ID NO: 222843 - DNA, 1000 bp, Homo Sapiens
actcaaaggagtttttccctctttcttacggttcaaaggtgaccctggtggtggccagagcagtaatgcttgtttgatgctcttcatggctcatctgcttctcggaacccacccgttgagtttgtgggtaaccagcaggcaggccaaagactggtgcttttcatttcatcctttagagggatgaaacagttatttccgtctgatgagcattcggtagaatttttgaagtgagattttatgaagtcaaaggggactttacacagatctcgacctgctttgaaacctagaggtggccctttgatttgtgcgtgtccttgccctctggacaacttaatatttcaagtaatcgaataccaacttccctgccagcccacctgccttctgccccgcttgtgtaacagtcctgttttgttgagttgctgctattgcactgccagtgcagcccacaccaaatcacaacccaagatactcagataggaagactccttcctctcccagtactttaccaaaggaacccccccgcccaggacccacatggggccacgtgttggcagtggaatcagcctgtgcaggctggggatctcaggctgatcagtaggggccagctttggagccagccaagctgaatcccacactccaggtctgtgctcaagagaccagatggtgtatttccaaatgggcctctctggtatgggcaataggcaagctcctggggtctggttatgtggaagattcttagtggatgttccgcctggttagctggttctcttcagagaatataaagtgaatgcctttaggggtagctctgaaagagaaacccaacaacttcattcctagccatgaaagtagcacgatcatattgtactgtattgttattgtaaaatgattatttgccatgtcatgagtaggtagatgttttgccacaaatatgaatgtgtttgttgtttcctgactttaagcaatgaagattgagacaataaatagcactcagagaatgaag

SEQ ID NO: 222844 - DNA, 1000 bp, Homo Sapiens
tgaatcaaatgcaaatgttacctgttaaagatattacagagaaattttattgattacaaaatatgtaagaaaattatcagctacagttttaaagtttaaaatgctctgattgtttctcagaaaaggttacctttgtattaattgttgtatgacatttagtaatgtcctaaaagtcttttgtgagaggtatttaaagtgctttgagacctgattcatgccccccaaagggtggtattaaaagaggaaaaaggacatagtagtggtagtaaagaaaaaaaggagatctaacaaaaacacttgaatattttttattttcaaaactaaacacataaaatgcttttattttgccatatcctacaggaaggaagacatgcttttgccctttcttctgctttgtatatgaccttgatcttttaccttttgttctgttcttctgtgtgcattttatggaaagaaagttgggtctgagattatattgtaattttatactttctatagacagaaaggttttcagagaaaaagaaatggttaaatatcttccagatgttgctgccttatcgaaatgcttctagaactgtctgtataagtcgtatttcagacagtactaaatacttatattttatttttgaggcatgtaattttaaaactgcagtaggttaaaattctattaaacaaatatagaaaatattttgtttataattggcctggtgtggtggcccacgcctgtaatcccagcactttgggaggccgaggtaggtggatcgcctgaggtcagaagttcaagaccagcctggccaacatggtgaatccccgtctctattaaaaatacaaaaattagctgggtgtggtggcgtgtgcctgtaatcccagctacttgggaggctgaggcaggagaaccgcttaaacctgggaggtggaggttgcagtgacccgagatcgagatcacaccactgcactcagcctgggtgacagagcaagactccgtctccaaaaaaaaaaa

SEQ ID NO: 222845 - DNA, 1000 bp, Homo Sapiens; identical to SEQ ID NO: 117566

SEQ ID NO: 222846 - DNA, 1000 bp, Homo Sapiens
agcacgcgttcagagtcaaaatggcatagtactgtcatggagtgtcctggaggtggatcgaagctgtgccactgttgatagctaccatctctatgcttaccatgaggaacccagtgccactgtgccctcacaatggaaaaagattggggaagtcaaggcacttcccttgcccatggcatgtactctcacccagtttgtatctggtagcaaatactactttgcagtacgagccaaggatatttatggacgttttgggcctttctgtgatcctcagtcaacagatgtgatctcttctacccagagcagttaaaccttggagcctttatattttcctcttttaaaatttccaccttttggtcttgtttttaatcttgtgcatgataccccatgtaaaatccaccttgtgcaagatttcttggacagatgtgtgtatacactacatttgtttataaccagaagcaaaataaactcagcccacaaagctagaatcttttcctggacagtttaggctttggggtttggaaatgtaaatgtgtaccttgctttagttttgaggctggggaatatgtgtgggtgtttatgtgtgtttttccttatgtaggtgttattgcattggagtctcccattttcattctcaaatttacctcttaaagtacgaagtaagtagatcaaaggatttgagatgtgtaactggcatgattctgcttttgaaggatctatagtatcattttagttaagtgggtcaaacagaatcaaaacaaaacccaaagaaataaataaaaaacaaaatggctaaatagtttaaaataggttaattcgaacacaggaaaggatctatttgttgtttcttttgtctggtctcctgagttgttaattaggtgaaaaaagatctgcaatggccccctccctttcctaatctggcttttacatttattttgtgccttaaagattaactacaaagataaacatggccaaaaataaataaataaatatggccata

SEQ ID NO: 222847 - DNA, 1000 bp, Homo Sapiens; identical to SEQ ID NO: 117567

SEQ ID NO: 222848 - DNA, 1000 bp, Homo Sapiens
aacttcaaccaccgacttatcaatgcagccgcctgtgtattgcaattggccgttaccttaagcactgagccacccgggtttagttcagccatttcaagaagtatatttaacgtcggtagttctgctttattaaaatgcagcagaggtactcttctgtcccttccgtttatagttctctgagagagttctattttttggttttgttttgtgttttcttttgcattttgtatcttgtatttatccctgaacatgttttgtaccttttttttttttttttttaagaaaaggaattcttttgtgtatatatagatacttgcatgatatactgtagtcaatgttcggttcctcaaaaggtcttgctgctgtcaggtgttatgcactccatccatcataactgtatgaaacacatttcatatgtaaataaacgtgggacatttggcccttgtgcttctgtgagagaattattgatggtgggtctctgacatctttgtgaagtttgggaagtaattaattgcagcgacaagctacagggtgttgcagaattcttcccactcagaagaatggcatattcgttctcattagtaatcagctattttgtcactttcttgttgactccatcagtacatgggtacaatccgagggtgtgaatttcagcttgaaattccattgctgttccttgttttgtttgtattgctctaagttgtattcataatagcactttcatatgtttctgcatttgaaccttgcaataagcctgtgtggtaggccacataggtccgaataacctagttttacagttgagggagctgagctcagattcagttctttgccgaagccctcatagctggtaagtggctttgcatattagaacccaaatattttgctctctaaatctaatgctcgctctatgtggttatgtacatattgacaaatattcatttattcaacaaataaaaagtatgtacaaaacaaaaaaaaaaaaaaaaaaaaaaaaaaaaaa

SEQ ID NO: 222849 - DNA, 1000 bp, Homo Sapiens
atcaccacctccagactatcctggagaattttttaaagatgttcgacaaggactgataggcgttggcctgataaatgtagaagatcgctcgggaattcttactctcgataaagattataacaacataggaaaattcttaaatagaattttaggcatggaggtgcatcagcagaatgcgttatttcagtattttgcggacacacttactgcagttgttcaaaatgccaaaaaaaatggaagatatgatatgggaatcttagatcttggttctggagatgaaaaagtgcggaaaagtgatgttaaaaagtttctgactccaggatattcaacctctggccacgtagaattatacacaattagtgtagagaggggaatgtcatgggaggaagctaccaagatttgggctgagctgacaggaccagacgatggcttttacttgtcattgcaaataaggaacaacaagaaaactgccatcttagttaaagaagtgaatcctaaaaagaaacttttcttagtttatcgaccaaatactgggaagcagctcaaattagaaatttatgctgatctaaaaaagaaatataagaaggtcgtctcagatgatgccctgatgcactggttagatcagtataattcatctgcagatacttgtactcatgcttattggcgcggcaattgcaaaaaagcaagcttggggctagtttgtgaaataggtcttcgttgccgtacatattatgtattatgtggttcagtgctgagtgtctggacaaaagttgagggtgttctagcatctgtcagtggcacaaacgtgaagatgcagatcgtgcggctaagaacggaagatgggcaacggattgtaggtttgatcattccggcaaattgtgtgtctcctcttgtaaatctcctatcaacttcagaccagtctcaacagcttgcggtccaacagaaacagctatggcaacagcatcaccctcagagcatcaccaacttgagcaacgcatga

SEQ ID NO: 222850 - DNA, 1000 bp, Homo Sapiens
gcactgcagaatgcaggaaatggctgagcaggagtcgtactttgggagaactagaatctctgaacacagtactgtctgctttgcttgcagtatgtaattctgctggtgaagctttggatacaggaaaacaaactgcaattatcgaagttgtgagtcagctttgggcttttttaaacattaaacaggtagcagatcaaccttatgttcaacagacattcagccttttacttccactgttgggatttttcattcaaactctagatcctaaactgatacttcaggcagtaactttgcagacctcgctacttaaattagagcttcctgactatgttcgtttggcaatgttggattttgtatcttctttaggaaaactttttatacctgaagctatccaggacagaattctgcccaacctgtcctgtatgtttgccttactgctagctgacaggagttggctgctagaacaacataccttggaggcgtttactcagttcgctgagggaacaaatcatgaagagatagttccacagtgtctcagttctgaagaaactaagaacaaagttgtatcctttctggagaagactgggtttgtagatgaaactgaagctgccaaagtggaacgtgtgaaacaggaaaaaggtattttctgggaaccctttgctaatgtgactgtagaagaagcaaagaggtcatctttacagccttatgcaaaaagagctcgtcaggagttcccctgggaagaagagtacaggtcagcgctgcatacaatagcaggggctttggaagcaactgagtcactactccaaaagggtcctgctccagcctggctttcaatggaaatggaggcgctccaagaaaggatggataagctaaaacgttacatacatactctagggtgaaacttatcactaggcagaactgggtttgatgctttgtcaactgaaaatacttatgtctgtacattttctaacagatataaaacaaattttgtaaagttgaa

SEQ ID NO: 222851 - DNA, 1000 bp, Homo Sapiens
ccaaaacctgtcaggtccgccagtaccacatcaaacctctttcactccatcaaagaactcactttattgatcatgacagacccatgaatacactgaccctaacaggccagttcagttttgctgaagttcactcctgggtggttttttgtctgcctgaagttccagaaaaacctccagcaggagaatgtgtgacattttactttcagaacacctttctagatacacaacttgaaagtacctacagaaaaggagagggagtttttaaatctgacaacatttctactatctccatcctaaaagatgtgctttctaaagaagctacaaaaaggaaaattaacctcaacatatcatacgagataaatgaagtatcagtcaaacacactttaaagctaatccacccaaagctggagtaccagttgcttttggctaagaaagtgcagttaattgatgctttaaaagaattacagattcatgagggaaatacgaactttctgataccagaatatcactgtattctagaagaggcagatcacctacaggaagaatacaaaaagcaacctgcacatcttgaaagactctatggttagtggaccattctagaataccttgccatatttcttttcaactggctatttcccaaggatcatgtaagagaagctgggcagaaagataaaaagattacatcagtcatgattcatgaaccagtcatgaatcagttgacaacaaatttattgcacagaatatttctgtattttgtcaagctacttttaatatttaattcttttacttgataaaatgcaagtatattaagaaataagtatactgtgatgaattaatctatatatatgaacaaacctggtataaaatgaatgtaatctatgaacctttagagcttagactgtatttcacacaaataattgtcatgttttgttgctattgtgaattataaaaatgcagcatttaaaatttttaaggcaaaatttaataaaggatatacagt

SEQ ID NO: 222852 - DNA, 1000 bp, Homo Sapiens
gcccagagcaggtaagttcaccttcctggccttactttcctgatgtgtaatacggaattacttcacagtagcatgacagtataagacaccagcagtagatacaactatgatgacattccatgagttggtatttttagttctaactgctaaatttgttctctttacgggacagatttctaataaagtgcttggtcttaaaatacatggttggacagaggtgccctatcccttaactatgagcaggtgctaccttttgggatatttattttaaattttaatactttggtactcaattgtcagtgttccatggtgtgtatttttatttttgggattagtgggggtctaaagggagaagaatagtctctaattactacctcttaacctaaagcaattattttgttcctggagcaagttaaatctttgttggaaggagctttggccatatattttttagcatgcattgtttctgtgccctgaaagtacctgaaaggttttaagcacagactcaggaaaatgtgccagtagaacaggccatctccaggaaattggctctatttgggtcctgaccttcccttcctcccaagttagcaggcttgttcttttgcaaggaatacacatcttgccttttttttttttttttttttttgccatgttttccttttcttggtcatgtataagcaataaagctgttttttgttcttcatctttcttaaccccaaattttcttctatgccttaggcttcgatggttcttccaacccccttaatatggcttagggtggtttttcaaaacctacaatcccccatttgcactactggccatggaacatttatttctagtgttcctgccaatcagagatctctatattaaattctaaaatgggattaaaagaagagttggagaattcacacttattgagtaactgatgtcatacaacctggaatttctgaattccaaataaataaatttcactctttgaaaaaaaaaaaaaaaaacaaca

SEQ ID NO: 222853 - DNA, 1000 bp, Homo Sapiens; identical to SEQ ID NO: 117570

SEQ ID NO: 222854 - DNA, 1000 bp, Homo Sapiens; identical to SEQ ID NO: 117572

SEQ ID NO: 222855 - DNA, 1000 bp, Homo Sapiens
gctgcccttccaagcccggctttgggccaggaaaggcttccccaggtggctcttctaccaggcttttcctttgatgccgcctggatttccgcacctgcctgtctcctctcccagagcacagtatttgggagactttgactatttattcagactcctggctatgtattgcacattggcaagtgctctggggatgaggcatgggtataggaagggagaaaggagttggagacaagatcctcttcattttccaagatcaaagtcagcctcttctccccatgcttctaggaactgcctggttttcgagcaggtcctggctgagcgggctctgagttctgtactggaattgagtgtaaagatgggaagagaactgggctgactccaggacctccaggatgaggcagaggcatgatgcttcctgctcacctgggccaccctctctccaggacttgtcagctggtggttcagccccttctccaaccccttcataagcttgggccactgcctgggacccagcagacactgcccaggactctagtgcactcactcttgtctgccccctaccttccctcctggaaccacactacttgaatcaccattactttgcctcgctggcagagttgggtcaagtgccctctccttgaccttgagatgaaggtcaagagcacagggaccaggccttggttaggctgagctcccagcaggacaccgcctgcagaaaggacctgccctgataatgtcccttccccagattctcaagcagatgcccaagggaggtccccacagagccagagtgcctgaggcttcctgcttgagaacctgccccctggatcttggacacttacagattgagctgtatgaattcagcgggtctcactccagagggtcagaacgtttgctttagttttttcatctgttttgttccttgagtcagtgctgttgatgacgagttgtcttgaataaatcatgtgttctttgcaatgggcaaaaaaaaaaaaaaaaa

SEQ ID NO: 222856 - DNA, 1000 bp, Homo Sapiens
caagagtccagccaaccctcttcagccaggcctctgtgacctgctagggtgcaggaggcttccagaagcagttgttgtaattaggacccaagcactgggaggggctgttggctagaccccttgtcagacttggcatctatctcagttaggatcctgctgcagaaaacaagagccacttgtagctggtttaattagacaaggatttactacctggcccctggtggcttgcaaaattgttggaagagctggagaagcagactctgctgaatttccaggaactcccagcgccagattcatcatgtctgttgtgaccaggaaagctgcccccatctgcaggaagccactatgccagaaagctgctgactgcagaactaggctccctctgccacggtccgtgccagccaatagatgtcctgaggcctgcccctctcccacttcactcagttcccaaatctaaatttttacaagagattctgtttgggggaacttaagtcagatccagaaccttggctgcaagggagtctgggaaatgtcatctccctagaaggaagttagggtgggtggagcaagccccacctgcgtttttctgccacagcatccaatcgtgaagaactcgggagagggtggagtccacatctagggttgtcctgccccttggctctatccctgcccagaggtgggaactggaggagtgggctgcaagactgagcctaaatgtctccccggccttgacttttctttctagtcctggggcctagattctgcacttggggtctctgacacaacacaccatcccaaagtagccggaagagctaaacacagggggttcttaaaatggctgcccccgccacccgggcctcccttgggcaaaaggaattgtcagccctaccccaacccttcaactaccagaatctgggccaccccagcagtatttttatttaaaatgttgcccattttatgagttatgatcaatttgtattaaattaaagttacagatgtc

SEQ ID NO: 222857 - DNA, 1000 bp, Homo Sapiens
tggacgcgctgggctgggaggaacggcagctggcgctggtgaaaggcctcctggcggggaatgtcttcgactggggggccaaagccgtgtctgctgtccttgaatccgacccctactttgggtttgaagaagcaaagaggaagttacaagaaagaccctggctcgtggattcctacagcgagtggcttcagagattaaaggggccccctcataaatgtgccttaattttcgcagataacagtggaatagacatcattttgggagtcttcccctttgtcagggagctactccttagagggacagaggtcatcctggcgtgcaactcaggccccgccctgaacgacgtgacccacagcgagtccctcatcgtggcagagcgtattgcgggcatggaccctgtcgtgcactctgcgctccaggaagagaggctgctgctggtgcagacgggctccagctccccgtgcctcgacctcagccgcctggataaggggctggccgcactggtgcgggagcgtggcgcggatctggtggtcatcgagggcatgggccgtgctgtccacacaaactaccacgcagccctgcgctgcgagagcctcaagctggccgtcatcaagaacgcgtggctggccgagcggctgggcggccggctcttcagcgtcatcttcaagtacgaggtcccagccgagtgaggcgctgcagctgccggactcttctgcttgtcacttgtcaggaatgtgtttttaccaccacagggaaactgcgttcaaatcaacgtatttatatggtactgctgtgacgcggcacatacaccccagccgcacagatgcgtgtgacccagaggcgagacgcagctttgtcctgggagacgttcatattggaatctatttaactgctaaagaaccttttatatatatatatatataaatagagagatctatacaggtatgtctgacgggacgcagcaccgtgggcacgcaccaaatagagtttttaaaagagg

SEQ ID NO: 222858 - DNA, 1000 bp, Homo Sapiens; identical to SEQ ID NO: 117576

SEQ ID NO: 222859 - DNA, 1000 bp, Homo Sapiens
ttggcataaccactgcctcccagggaacacaaggcctttgccattggtcgcaggaacccatctcttagagctatggggccattcttagtccacgatcattccaactggtgggatgacatccggacatcctcttccagggactggggcaaactcaggccccacacctctggacagctcaaatccagtccccttcctgctccccagtcctggcagtgccgtggatggcggcaggaagtctcacatcatagaggacccctcctcctctcccagttctcaacttctccatgcctggaatccacgggtgaagagagtcggtagatctcataagaaagaatccagtctgacttccctctggagaatgactatggacagaaggccaccatcctccacagagcaccctgtcctgagtaggggttgtgctcattaccccaggccagtggtagcttcctcaggagcctggccacttccaaaggtagcactgaagtcgtgcaaatacatagtcaggtagattcagaccttgtccacaccttcctgggcaacccccaccatgaacctgtcagcctctttcccatagctaatagacatttcccaggccttgaggggccccaccctgtctctttcatcaaacctgatggtccaggctgggcatccctctcctcctccatccccagacatcaccaggtctaatgtttacaaacggtgccagcccggctctgaagccaagggccgtcccgtgccacggtgctgtgagtattcctccgttagctttccccataaggttgggagtatctgcttttgtgtctgagatgggcccctcttttcagaggccgcagggtgggtgatggagaaggctgagaacctttcagaccctctgtgtgggctgggctggtcagaatcagggtgtacctccccgacaccttctttttcagtgatgttttctcttctccctgcctttcctctgcctcctcccctgccagccctagcgtgactacccagagac

SEQ ID NO: 222860 - DNA, 1000 bp, Homo Sapiens; identical to SEQ ID NO: 117582

SEQ ID NO: 222861 - DNA, 1000 bp, Homo Sapiens; identical to SEQ ID NO: 117583

SEQ ID NO: 222862 - DNA, 1000 bp, Homo Sapiens
ctaggagcagattgtaatgctgccgagtccggtcggtgaccacgcgttgtccctcggctttcagccatggggttgagttggccattaaaagaaacagagacttctctctgccatggcccttctttattccagggacttagaaacttgcctgagatggtggacgcagtaatgagggcaccgcgcagctcagttagagacggagaaagggaagaggctgggatggtctctgctgctcttgcctctagttcatggagatgtgtctctgttcaggccaagatacagccagccaggcctgtcgtctgggacccaggaggcctctgatgaccaagggctttcacatcctaagtcatttggaaggaggccttgagaacaaagtcacctttgtcactcccagtgaactgaatgaggaacatgctgtctcctgtcttggcctcccctttcatgagatactggggagaagagaacattcctcctggcttagttgtagcagacccagacctgtgcccagctttggtcccccttcccaacttctgaagcacgtgctgcagagccaccttggtctgagcacctgaggaccagcccctcctccctcagtgcgggtcatctcttgggggattttcttaaagtgaagaaagggggtggggaaccatattgcccctccctcccccatcaaacttccttcatttaacttgctataaaatgagtcatataaagaaactctatatgggtgaggtatatcccacttctgtgaaaacattacaaatcaaaccgcttctctcagtttatttaagatgcttttgttgcgagcggagctctagagtgaagcctcctgtgtgtgtgtgagataataacaccttgtaactcattacagctgggcactatttacataaaccagagctgagccaggcaggaatttgctgattaatttatttttaatggagtgaagtataccatgcaccaaaataaactttactgtgtgtacctaaaaaaaaaaaaaaaa

SEQ ID NO: 222863 - DNA, 1000 bp, Homo Sapiens
atccagtactttggaaagaaaaacaaagcaaaaccagatactagatgaggagtttcaaaactctcctcctgctagtgtgtgtttgaatgatatacagcacccctccaagaagacaacaaacgatataactcaactatccagcaaagtaaacatatcacctacaatcagttcagaatctaaattatttagtccagcacataaaaaaccgaaaacagcccactactcatcaccagagcttaaaagctgcaaccctggatattctaacagtgaacttcaaattaatatgacagatggccctcgtaccttaaatcctgacagccctcgctgcagtaaacacaaccgcctctgcatcctccgagttgtgaggaaggatggggaaaacaagggcaggcagttttatgcctgtcctctacctagagaagcacaatgtggattttttgaatgggcagatttgtccttcccattctgcaaccatggcaagcgttccaccatgaaaacagtattgaagattggacctaacaatggaaagaatttttttgtgtgtcctcttgggaaggaaaaacaatgcaattttttccagtgggcagaaaatgggccaggaataaaaattattcctggatgctaatatctgtagattctctggcatttagtctcttcaaactgtgtataatgtttggtcctcctctgtttcatagaaaagtcatagaatatctatgatacattgaaaagttactgcaatatttgagaactgttctttttttttcttgtgtgtgccatctttccattgttggctacgtcttttcttttgccttgatgaacgttctatgtatttcatcggatatacagcatattccatttaggatgtgtatttaatgcatttagtaatgacgataaagtgtttttagtatgcttttagtctcttgtaactggggagaagcagtgttttttttttaggaaaggattatgcgacacaataaaataagatattctgtctgtagtg

SEQ ID NO: 222864 - DNA, 1000 bp, Homo Sapiens
aacttgttaagtcacattccagattaggagaaaatgggcaataatcatctctgttttgcccccattctactacccaccactgcccaccccacccccacatcacacactcttcgatgctttcccacagcccctgctccgctcctctccgtaagaaactcacttcactgtttttcacttttcacttctggcttttttgtggcccaaggccaatataggattaatatctgtgttccagcttcagccagaacgatatgtctgtccatctttctcctttcttccagcacacacagctaagagataagaaggctgcaaggattggggataaggagtatattttcaagccaagaaccagtagaaaacagaaataatggtgctcccaaatattcagtaccttgggcaatccaggaagggtttaaagagacctgttgctgcatagaactctccctgccctaccccttaactccaccttagtgccagggccgagggctggtctgcatgctggaagaggttgagagttttggaattgattccatgctaaatgtcagttaccagtttggattgatgaaagtgatttttctgctttacctttttcctgtcagaaaggttttcctctgtgctacccttaacttagggatgaacagactataactaggaaaggaggaaaggtatcagggatttttaagtccgtttagagagcaaaccatattgtgcctcttcatcttgacccaggctcttatagataggtcctaaacattgctgttcactagattatcttaacaaataatactcagctaaatatttgcatttaggaatactcctaaaacagatattgccaactagatacactgcctcaatcttgaccagacaagagaacagttaagttctctcagttgggtagtaacttgaataccagtctatttatcagttggtttcaacacagaggtttcaagtggaaagccattcatcttaaaagctgaacagaaaaaaaaaaaaaaaaaaa

SEQ ID NO: 222865 - DNA, 1000 bp, Homo Sapiens
aagagtaagggatattaaatgtatccgtaaacaaggtgatgtgatctttcatgtgttagtatattcgaataatatacatatgagaggtatgcctgtccagtaaagagattgatttgtttgtatggctctggaataactcattcgtttatgaacacatctcatgtattacttgacacagtacctttggtatgtctgcttttctttcaatcctcattatctttagccctcagctggccagtacttattgctaaagaaagggagatcaatggagttgcctaccagcacccattctcttttagttcagctggctaatagtattggaatacattgggaaaagagtgggttaaagtcctaggtggggttctctttgttgcctaccaggagaaagcagtaggcttcctttctaagatacggactcagctggtctattttaccctgtgacatttaaatatacttttgaataagctactatcctgaggctgagggttttgctgccacttttcctgtgtttccacttctgcttccaaagattttcctcttagttgtttgaaataatactttgccagacaggaagtctttagactgcccacattcatgaagaagatgatgtgtggctggatcagtaggagaagctgagtgcaaatgccatgtgggctagagtatgggaaggttgaaaattccaagtaactgggagagtgggcaagtcctcagctgaacaatcttggatgtagtctagcagcaacccacctacaatggcgttatgtttggagttatgaggggaagtgaaagataagaattacctacagctttgtactcagataatttatatccaaaatttgtgttttaaatttcatactccagaactttcatgtttatgagtattagccttttaagttatgggaggtgatatacttagtccattgatgttgtcacttgtcatctaaacttatgagaccttgtcttagagaatctaaaatatattgtcatatgttttctgtgc

SEQ ID NO: 222866 - DNA, 1000 bp, Homo Sapiens; identical to SEQ ID NO: 117590

SEQ ID NO: 222867 - DNA, 1000 bp, Homo Sapiens; identical to SEQ ID NO: 117594

SEQ ID NO: 222868 - DNA, 1000 bp, Homo Sapiens; identical to SEQ ID NO: 117597

SEQ ID NO: 222869 - DNA, 1000 bp, Homo Sapiens; identical to SEQ ID NO: 117598

SEQ ID NO: 222870 - DNA, 1000 bp, Homo Sapiens
acgtgctctgactttgtcacccaattcacccagaaccatggtgggagagaacagacttggcgttggagcagactggaagaatgggggtgggagggtggaggggcttctcctttgtgaggaatgactcatgtcttctttaacgacaaacttaaccctaagggctacttctgagactgaaaaatcagctttctatttacatgaaacactttgggggtcatgggagtgcacagcattagacagtatttggttcaccctgtaaagtagccaagaaaagatgagaaaaatcaagataggcctggcacactagacatttgcctccaaaagaaataacctacagtcttaagatgtatcataaaaatgttctgccaaggatctaaattaccttgggtttcgcatatgtctatgaaattctgtgataatttttttcaatacattgattcactggcgtctgttttcattttatacttttaataactcatcactggtggtactttatcttgaaaagtaatattttttatattttaacattggacagtgttagccagttgtaatgatgtatcagaagtaaagaaaaacccattaaagttatagctaatagatgctgttgggggttaaattaatagtaaaataatccaatatagcacttttgatgatttttatataaaagtcaactgtacatttcattcagaataataaatacttattgctgctaaaacttcttaaatggttgtttctgctatagttatttctattgcagttccaaattgccatcttcccttgtctcatttgcaagttctcaattgtatttctctcaaatggacaggttccttctttactggaggatttttgtttttatcatattggtttttcattacttctgaatagtcttaattacgtttactaaattctaaaggatttctgtgctattataattaggaaatcaacgtctttggtcaggaactttataatgtgctattaaatgtatattacatttttgtgg

SEQ ID NO: 222871 - DNA, 1000 bp, Homo Sapiens
cagacaatccatttcatggcattgtttccaagtgttttgagcctcatctctacgtgtatatcgaatcccaagacaagaacctcggagagctgatagatcggtttgtggctgatttcaaagcccaggggccacctaagcccaacactgatgaagggggtgccgtgctccccagctgcgccgacctctttgtctactacaagaagtgcatggtgcaatgctctcagctcagtactggggagcccatgatcgccctgaccaccattttccagaagtacctccgagaatatgcctggaaaatcctctctggcaacctgcccaaaaccacaaccagcagtggaggactgactatcagcagcctcctcaaggaaaaggagggctcagaagtagccaagttcactctggaggagctctgcctcatctgtaacatcctgagcacggcagagtactgtctggccaccacccagcagctagaagaaaaactcaaagaaaaagtggatgtaagtctgattgaacgaatcaatctgactggagagatggacacgttcagcaccgtcatctccagcagtattcagctgctggttcaggatctggatgctgcctgtgatcctgccctgactgccatgagcaagatgcagtggcagaacgtggagcacgttggtgaccagagcccctacgtcacctctgtcattctgcacatcaagcagaacgtccccatcatccgtgacaacctggcttccacacgcaagtacttcactcagttctgcgttaaatttgcaaactccttcattcccaaattcatcacccacctcttcaagtgcaagccaattagcatggtgggagcagaacaggtgagatggacgtagtatcaggcatttgcctggcagcttttgttgtagatcaagcacatattcttctagtccagatctacttggcaggaataaaattgatgatgtcccctgtttggggacagtataatgactcaaaaaaaaaaaaaaaaaaa

SEQ ID NO: 222872 - DNA, 1000 bp, Homo Sapiens
acggcctcatctgtgaggggcagccagtgacgtcacggctggctgtcatctgtggaacgtcttcttgtcacatggggatcagcaaagacccgatttttgtaccaggcgtctgggggccttatttctcagccatggtacctgggttctggctgaatgaaggtggtcagagcgttactggaaaattgatagaccacatggtacaaggccatgctgcttttccagaactacaagtaaaggccacagccagatgccagagtatatatgcatatttgaacagtcacctggatctgattaagaaggctcagcctgtgggtttccttactgttgatttacatgtttggccagatttccatggcaaccggtctcccttagcagatctgacactaaagggcatggtcaccggattgaaactgtctcaggaccttgatgatcttgccattctctacctggccacagttcaagccattgctttggggactcgcttcattatagaagccatggaggcagcagggcactcaatcagtactcttttcctatgtggaggcctcagcaagaatcccctttttgtgcaaatgcatgcggacattactggcatgcctgtggtcctgtcgcaagaggtggagtccgttcttgtgggtgctgctgttctgggtgcctgtgcctcaggggatttcgcttctgtacaggaagcaatggcaaaaatgagcaaagttgggaaagttgtgttcccgagactacaggataaaaaatactatgataagaaataccaagtattcctgaagctggttgaacaccagaaggagtatttggcgatcatgaatgatgactgaacagggcttgcaggtgctgatgccagaagcttctgtgccattgcattaaagacttctgtcatttgatccatgttcaagacccttgaggtattgtttcatcatttctgtattgtctttcaataaagaaaacaaacatgtgcaaccaaaaaaaaaaaaaaaaaaaaaaaaaa

SEQ ID NO: 222873 - DNA, 1000 bp, Homo Sapiens; identical to SEQ ID NO: 117603

SEQ ID NO: 222874 - DNA, 1000 bp, Homo Sapiens
tctgctttaatgagaagggtcctgttcatgccatgcctgtggttgactcaggaaacaggcagggggatacccatggctccgatggagatggggatggggagattgtggacgaggatgcagcggtggcggaggcccttgcagctttagaagctgctactgcaggagaagatttggatgagactgattaggggaggggatttgcacagggaggtaagctggtgtcatgctgagcatgcagatgcatttgctccctggatgcatagcaggtgattctgccagcatgcaccagtgcagccttaccagttgtttacatccagcatctgttctgattgtcagcatctgtcccatgctgcttgtcacatatctggagtttcactctgtgtagatgagctgtcattcaggacactaggagaaaaatctgagtgggtcattgtgcccatatccacagaaaatgcagaagttgaacagcttgcttgacaaccctcaaacatctttgagcacctggtacagatgtttatgagaatactctaagatctcaacccttgatcccaaaggcacacaatcacagagcattccttttgactgtaaactgtttaccttgcttttgagagccaaacattgtacccaacctggaaaaagtaactaccccaattaaagtgcctcatgtgtccccagagcatggcttaacttcagggacaatcacccagggaactaataactaaccagttgttcaacagcgggttaagctcagcagttttcacagtagagcagaagtccccaggaaacaaagggttagtcattagctgagatgttgattttaaaacaccttgaccttaacttttttacattattacttttaaatctcctttgggattggggaggctggccaaaataagtcttaaaactgcttatgtcatatttggattttaagttcatgacattcggaacagcaaagccatatatgcaatgtttttatgccattaaatgtctgattccaatt

SEQ ID NO: 222875 - DNA, 1000 bp, Homo Sapiens
caaacggaaaatcaacatgagtggctacatcctgttcagcagtgagatgagggctgtgattaaggcccaacacccagactactctttcggggagctcagccgcctggtggggacagaatggagaaatcttgagacagccaagaaagcagaatatgaaggcatgatgggtggctatccgccaggccttccacctttgcagggcccagttgatggccttgttagcatgggcagcatgcagccacttcaccctggggggcctccaccccaccatcttccgccaggtgtgcctggcctcccgggcatcccaccaccgggtgtgatgaaccaaggagtggcccctatggtagggactccagcaccgggtggaagtccatatggacaacaggtgggagttttggggcctccaaggcagcaggcaccacctccatatcccggcccacatccagctggaccccctgtcatacagcagccaacaacacccatgtttgtagctcccccgccaaagacccagcggcttcttcactcagaggcctacctgaaatacattgaaggactcagtgcggagtccaacagcattagcaagtgggatcagacactggcagctcgaagacgcgacgtccatttgtcgaaagaacaggagagccgcctaccctctcactggctgaaaagcaaaggggcccacaccaccatggcagatgccctctggcgccttcgagatttgatgctccgggacaccctcaacattcgccaagcatacaacctagaaaatgtttaatcacatcattacgtttcttttatatagaagcataaagagttgtggatcagtagccattttagttactgggggtggggggaaggaacaaaggaggataatttttattgcattttactgtacatcacaaggccatttttatatacggacacttttaataagctatttcaatttgtttgttatattaagttgactttatcaaatacacaaagatttttttgcataaaa

SEQ ID NO: 222876 - DNA, 1000 bp, Homo Sapiens
cccggggtggtttcctcgcctggcccccgagtccccacgggctggcgggtggaatcccaggtctccagggggtccctgtgcagctccatctcacttctctactgcctcccagccccacggtttcaggcattcagatgtgagctcatcaacattgaacccaaagtcggtggtatatgactcaccctccttccaagtctcctgcgcgcgtgtttttaaaataaactcacccgaaacgtccgtaacacacggacctccaggagcagtgagaggtggcttagaagcccctggtttggggtgggtggaggaggagggcacgtgtctgcctcccctggggtgccctccttcccccatcccaagctgctgaggggaggccctggtcatgcctcagttcctgccttcatctgctttccggaggaaaaaccatatcaactcctagaaacgctccttaggggcttgggaccttccatttggcactgagcatcttgtggggccttaactggctgagacatcccggccctctacatttgccctgttggccaggcagtccccttcccgcaattggagggcgacgctaacttcagaatcccatagtggcgcttgccgcaggtctggtggggtgtcttttttctcctccctcctttccacccctccgcgccctgccactccctggcctgccctgtttttgggtcaacattgctacggagccagcagtgaggcctttcccttcaagggctctgtggtatctctggccacatttgttctaatgtctgaacctctaaatcttttctttttgattggttttactgtttttaagaagccagcactgctgtctcatagatgggatttgtactcttggggcaacttaaagtgtctctctcgctgctaacagacgattgatgtcttgtctctgtgacccactcaccatgtaaagaattaacctcctatcttagcagacatcgtctcctaatatttccctttatttaataaaaatgttatggtg

SEQ ID NO: 222877 - DNA, 1000 bp, Homo Sapiens
aggatgtcttgtattatgagcagcttaagaccaatgtgatacaacatgaccttttggtggacagtctaatctataaagatgtgaagttgacagcaagcaatgatgattattattttgtatttgaagattatttatatcaggtattactttgtttttcccgggatacatctgtgttgagtcactttgcattcaacagtgcctcgccaccaaaatcatacataagaggaaaactaggactggaagaatatgctgtcttttacccaccaaatggtgttatcccttttcatggattttcaatgtatgttgcaccactttgttttctataccatgaaccttccaaattgtatcagatattccgtgagatgtatgtgcgttttttcttcagactccattccatctcttctcatccttctggtattgtgtcactctgtctgctgtttgaaactcttcttcaaacttatcttccccaactcttttatcatctacgagaaattggggctcaaccacttcgcatatcatttaagtggatggttcgagctttctctggatacttagctacagatcagctcttgcttttatgggatagaatcctaggatacaactctctggaaattcttgctgtgctggcagctgccgtgtttgctttccgagcagtgaacctgatggaggtgacatcactggctgcagctgaagcagttcttgctgacctttctactttaaaagttatgcctcttcttcagatttttctgtttgctactgtcacctgatcttcttcacagtcactggcaacacatctagtttttcattagaaacaaatcatgaactatgcaaactctgcataaaaccaaaatgaaactttgcatataagccaataaagatcatgttccctcttcagttaaacctaagtagtttctcactttttgaaacaataactctgcaccaaatattgcatcgcatgctgctgattttcaagagagaagcaataaacacaacttctgct

SEQ ID NO: 222878 - DNA, 1000 bp, Homo Sapiens
aatgggtgtgtgcctagcccttcagatgctaaaagcattagtagtgaagatgacctaaggaacccagactccccctcttcaaatgaattgatacattatagaccaaggacgttcaatgttggcgacttggtctggggccaaatcaaaggactgacttcctggcctggaaaattagtaagagaagacgacgttcacaattcatgtcaacaaagccccgaggaagggaaggtggagcccgagaagttgaagacactaacagaaggtttggaagcctacagccgtgtccggaaaaggaacagaaaaagtggaaagctaaataaccatttagaagctgctattcatgaggccatgagtgaactggacaaaatgtctgggactgtacaccaaatcccacagggtgacagacaaatgagaccccccaaacccaagaggaggaagatctccagataacagagactactccactaatgcgcagtgtttattaaaggaacatgcacagatgtatctgtatataggtattgatatagccacagttatatcaatatttagactatggcagatagctaccaccaccacagggtgctaaaagaaacagtgatacaaaatttttttgatcaggaaggataatgaatgctggaaaagccaatcaaagtctctgtgtgatgagagtgatcaatggtcaagagattactgagaaactctttttctataatactaaattgtgattataagaaatagtccaaatgtttctgaagaattttcaatgttgtatatagaaaatacagaatttcatggtgatatcagaaatgtaaatattgtacagtattgtcatgtacaagcgtacctaatgcacactttatcttttattgtacaaagaaatagtgtacaaaattctttggtttctatggagtacacctaccagagactaccagtgtaaagtgataaataaaaatacaacctaaatgcttttctatgataatgtaaaaaaaaaaaaaaaaaa

SEQ ID NO: 222879 - DNA, 1000 bp, Homo Sapiens
gtggcaatgggagcgtgttccaggcgggcccgcagcttcaggcactggctaacttagaagccaggagggggtctataggtgctgctctctcatcccgggatgtcagtgggctgcctgtttatgctcagtcaggagagcctaggaggctgacccaggcacaggtggcagcgtttcctggagagaatgctttggaacactcttcagaccaggacacctgggacagcctgaggagcccgggtttctgcagccctttgtcatctggtggtggagcagagtccctgccgcctggggggcctggacatgcagaggcaggacacctcggcaaggtttgtgacttccacctgaaccaccagcagcccagccccaccagcgtcctgcctacagaggtggcagcccctccgcttgagaaaattttgtctgtggatagcgtggcagtggactgtgcctacaggactgtgcccaagccagggcctcagcctggcccacatggatcactattgactgaagggtgtctcagaagcctttcgggggacttgaaccggttcccctgtgggatggaggtgcactctggccagagagaactggagagcgtggttgctgtcggcgaagccatggcttttgaaatttccaatgggagccatgagttactgtctcagggacagaagcagatttttattcagacttccgatgggcttatcttgtcccctccaggtacaatagtgtctcaggaggaggacattgtcacagtgactgatgcagaggggcgtgcctgcggatgggcccgctagaaggagttcctctagaagctgtggagtcggtcgtcaccgtggagccagagccctcacagtgaagtggagtcagatcctagattcgtctgattttatccagagaaggtctatggcaagcaatgtatatttttctaatgtgaatattgcacagatgaaccttttatttataaagaataatgtctttctgcaaaaaaaaaaaaaaaaaaaaaaaa

SEQ ID NO: 222880 - DNA, 1000 bp, Homo Sapiens; identical to SEQ ID NO: 117612

SEQ ID NO: 222881 - DNA, 1000 bp, Homo Sapiens
aaaacaacagacttcatccttaggttttctcaagatttaagtgaacacatttacacatatcaatttcttaaagaacacaaaatgtttcctccctagcaaaactatttaagagccaattaaactatgaaatagttataaaattatttttaatatttaaggccttgaaattatattccaaggcaaatctaaatgggtgtagttgtatatgcacgatgtaatttaatgctaaagagtacttacagcttgagggaaaagcataaagttttagttaaatagccttcatactgtggatttttcctcctactaactaatatgtgggaaattaagattacagatgctttgggccccctcaaacagtacattgctacagttcactgtagcaacagatttggtggtgatggggggatagaggtagaagcagatagaaggtaattttaaagttaatttattatgaatcattttcccctaatctgcataaatgaattagaactgattttaataaaaatattctgtgtaaaaagtactcagaaaaacatctaaagctgttggagaagagggactcatataaatagttggattgcgttttgctttttatttctttataaaaatatgtcaaaaacagtttttaattttagaaatcttatacttgaaagaaacctcaattatcagtggctttatgaagtaaagttaaaaacaaacataggaaatgtgaaaatatttgtgtttgttttgtctgactaacttgctgctaaatgctatctttaggtgtgtgaaagttctttgatatgttattgtccttttacatcttgttaaatagccattgcttttgagaatcagatagtgtgttgtttaggggttaattgtgtctatatctttcaaaaacttttatattatgtattataagaagttacagtagtaccattttgattagtctgaatgttttcaggccttgaaataaattttgactaagtaaaaaaaaaaaaaaaaaaaaaaaaaaaaa

SEQ ID NO: 222882 - DNA, 1000 bp, Homo Sapiens
tcagccctggcatccccaggggaatggcagcagtgaggtagatgggaggacatttctggtcagggaactggcatcccattcagcatctcaggactcacaggccaacatgtgttccatggctgggaattgcctaccacccacatcagcttctgtttacctttttggcatcaaataatgaacagtgtttggaaatctttctacaggcaattacctccccaagagaagccttccttattttggagtaaggtcctaagatagctggatgaatcaggaaaaccatgtcccctctaggtattattaatattagcaggaagggatctactataggaatgaagtatttataaaccactgaaagggatagagaagtgaacattggagaaagccagtagcaactgtgagaaatcagcaacttgcaggaggcacagaaaactcctgctgatggtctcagcttccagcagcacaaaagcagatgatgtactggaaaatgctcagaagatgctacaaaacctcatgcctactgtctgccactgctggagaaggaatcatggtttctagaagtgcctctcattagtggactttaaagcaaatcctggctggcaggaaattctgaggaatatagctcttaggcttccagcctctaccatgcaggagagaacacagaaggactgatgtatgttggtggatccatgtatgtgtccagcacagcggcctgctggactctgagaactgggaaagatcagagcaagccttgcctcttatcttcgggaaaccagaatatgtttggggtggtaggagccacacagactcttctgagccccctcactcacttccttccccctgtgcctttcctttgagagtgaaggtgggtggagttgaccagagaaaggggagagaattcgggaaagacccaaagtgtttgtaattcttctttgtccttttacctacagaaatggtcacatggttctatttaaatagcctaataaacacatctggagcctgt

SEQ ID NO: 222883 - DNA, 1000 bp, Homo Sapiens
ttgcatctgtgtacctttgttcagattagttttttttttccagccgatttcctcttagtggctaatgctgttagtgaattttccaactaatttcctctcattggttaatgttgttaatgaattgagagaggtaattgaggaaaggaaatgagtaaatcactgttcagcaacactgatttccgttaacacatcagttatgaatttcagggaattcatctcgccagattcttgataacatgccattcattgcccttaggtgattgaccctattttcttacatggctcaaataaaactagtatgctgttgtatgaatcttttactgaccacaccatccaactataaaaatataacgggacagctttaaaccaaagatcatgtttagaacaatgaaaaattatttgttgtatctaatacacgcctgtattgtgaaaagcttcatttagcaatgatgtaataatttttaacttccaggaaataatctgtgaatggaaagattttttaagattttgagatagtgtttagtctcatgttgggaacacatgaatgtgatgaacatagtgaatactaaagaaaacgcttcagactttcagaatgatggttcagaatttaaaatttttaatcttttctaatttctttttttcagtgtgaaaatagcactttaccaaaagattagccatgaaatggttattttgccagttacatttgatttcttttgtatctgcaatgtaatgagttattttatttcttctgtatttgcagtgtaatgagtttttgtggcaaagtgtattaagcaatttttcattatcttgaagttccacaaagtggagaatatttatattctcacatgcattttaggcacttttgatatgtgaaaatagatgtattttctgatgcatttggttaataaatattaatctgaacattttcatgttctttgctattttgaattccattatagattcatgaataaagtcattactagagaaaaaaaaaaaaaaa

SEQ ID NO: 222884 - DNA, 1000 bp, Homo Sapiens
atgctgtggaatctttagatgaagaagagaaagattattatttttcgaactctgattctgcatagtaaaatgagaaaatatgattcctgggatttttaccataaagcagacagtgtttgtattttcaactggagtacatgtattttctttgtaaagtagcttcctatgaaaatgtggacttttttgaaggtttcatatgtttgtgttcaaagtaaaatatcctcattgctgcagcttactaaaaatgtaaagaaaattgtttttgctcgtgtagatatctgtaaatttgtttttgcatattaaaatatatatagataattttttaataagcatccaagtctgtttactttaagaaaaccatttcccaaacagattttttttttatttcaagaaaattttgctaccatttaagtaagagaaggtgagaaggatgacagaggttgtattggtagctattgaattcatgaaaacttttaagttagcatttgttagcagttattatccaagccagagtaggatttgttaccagttgttatccaaacctaatgtttaaattacacattgttgaaattaaattacacattgttgacatgcttctctcctgattgtttttattttaaacttgtgataggcatatctatgaaacctttgtaaatttagtttattgctttaccattattttactaggtaaaattagagaacagattttgttctctaatttttaagccttatttacatatgcagaaacagcttaaatattttgactagattagacaaacagttaatagatccaccattaggaatcaatatattatgtcataataaacatcctttttctttcactgaaatttcttttagaaataaacttatttttgcttgttatgttttgaaacttgacataggatattttccctctggctacacattcacctacccttgttctctatttagattattcaaataaagttagtttgcttttatagtaaaaaaaaaaaaaaaa

SEQ ID NO: 222885 - DNA, 1000 bp, Homo Sapiens
agacttcaagccttgcaaggcattggagaattcatactggagagaaaccttacaaatgcaatgaatgtggtaaggttttcagttacaattcacaccttgcgagtcatcggagagttcatactggagagaaaccttacaagtgtaatgagtgtgggaaagcctttagtgtgcattcgaacttaactacccatcaggtcatccatactggagagaagccttacaaatgtaatcaatgtggcaaaggcttcagtgtgcattcaagcctaactacccatcaggtcatccatactggagaaaaaccttacaaatgtaatgagtgtggcaaatcctttagtgtgcgcccaaacctcactagacatcagataatccatactggaaagaaaccttacaaatgtagtgattgtgggaagtcctttagtgtgcgcccaaacctcttcagacatcaaattatccatactaaggagaaaccttataaaagaaattaatatggcaaggtcttcagtcaaagtttaaatcctgtgagtcatcaaagaatttatatcagagagaaaccatacaagtataataaatgtggcaaggttttcagtcacaattcactcctacacagcatcagagaatttcattcttgagagaatccttacgagtacagcaaacccttcatcacaagttcaagcattcattgacatcagagtccatgctaaagagaaatcatatacacctaactgtgtggcagaggcttcatttaggtctcacaactcactagacatcaaaatgtgtaaacatctttgtatattttgtgcatgttgaagctattaaccaaggatcaaaactgtaacacatccaaggatttatgtgaggaataattcagtctagttgtgctgataaacttttcatattacacattgtagaacaaatgcaagcccaaatatgttaaaactcacacaacatgatatatattaaaggttgcaggatgtttgaagtcaaaaaaaaaaaaaaaaaa

SEQ ID NO: 222886 - DNA, 1000 bp, Homo Sapiens
ttgtcttcacttttcccccaggtctgttgagctgtatgagattcattcatacttcatttattcattcaactaatatttgttgaacacttacatgtaccagacattattaagtgctgggtatatggtaatgaacagaatagacaaggcccctgcccttttaggggagacagatgagaagtaaattacgggttatgagaaatgttatgaaggaaaggacaacaacagacatgtcttagtacttagggtatcatggctttataggaaagtaacattctctatcttttttttttttttaattttataaaaatagagatggggtctcaccatgttacccaggctggtctcaaactcctgggcacaagcaatccacctgccttcgcctcccgaagtgctgggattacagatgtaagtcactaccccagccagaaactaacattctcaaaagctactaccaaaaaaaccccacaaatttgccaatccatgaaagtatcataggaagtctacctttccaaggaatttggcattgtggccctgctcttgccaaatgctctccagcattgttggtatcaaggtggtctggttgagtaaacttgaccaaacaaaaattaactgttttttgcttttctgtttttgttttgctgatcaaaaaagcccttcagggtctcttgtgcatccaggaggtcattgtagatatcaataatatagtgcctaagtgccactttattgccaagtctagattgatacttttttcagataaaccagctttttatgtaaagagtaagggaaaaagttaaatctttaattctgacctgccataaatacccaaagatataaactgtcttccaccgcccccctcataactaagacatccttcctgagtcactcttaatcatgaaacttgattttctcaattggccagtcttctgatctttagtatctctttagttcagtaatttttacctacctacttgatttattttcctttaaaaggtgaaatgac

SEQ ID NO: 222887 - DNA, 1000 bp, Homo Sapiens; identical to SEQ ID NO: 117617

SEQ ID NO: 222888 - DNA, 1000 bp, Homo Sapiens
tgtatcgccttagagcaagagctgtgttccaggaaccagatcacgatttttagccatggaacaatatatcccatgggagaagacctttcagtgtgaactgttctatttttgtgttataatttaaacttcgatttcctcatagtcctttaagttgacatttctgcttactgctactggatttttgctgcagaaatatatcagtggcccacattaaacataccagttggatcatgataagcaaaatgaaagaaataatgattaagggaaaattaagtgactgtgttacactgcttctcccatgccagagaataaactctttcaagcatcatctttgaagagtcgtgtggtgtgaattggtttgtgtacattagaatgtatgcacacatccatggacactcaggatatagttggcctaataatcggggcatgggtaaaacttatgaaaatttcctcatgctgaattgtaattttctcttacctgtaaagtaaaatttagatcaattccatgtctttgttaagtacagggatttaatatattttgaatataatgggtatgttctaaatttgaactttgagaggcaatactgttggaattatgtggattctaactcattttaacaaggtagcctgacctgcataagatcacttgaatgttaggtttcatagaactatactaatcttctcacaaaaggtctataaaatacagtcgttgaaaaaaattttgtatcaaaatgtttggaaaattagaagcttctccttaacctgtattgatactgacttgaattattttctaaaattaagagccgtatacctacctgtaagtcttttcacatatcatttaaacttttgtttgtattattactgatttacagcttagttattaatttttctttataagaatgccgtcgatgtgcatgcttttatgtttttcagaaaagggtgtgtttggatgaaagtaaaaaaaaaaataaaatctttcactgtctctaaaaaaaaaaaa

SEQ ID NO: 222889 - DNA, 1000 bp, Homo Sapiens
aggaaaagatgtcttgcatcagtcttactaggcataaaagtcacacttaatgactggaaaaaacttgcttattgcctttccctatataaatattaattgtctagaatgaaagctaatataggaacaagactcccaaatccatgaaaacgcttagtgaatatattcttaatcattaataaattagcccattatattttcatctgtatttgccataaaaaatttatttgcatttatgcctttaggataattttgtatctttctaatctgttttatcattgctacaggtttttaaaaaagaacctttcactagctagcacatgccagaggttcacatctgttttgtttttcaaacaggtcgtagctgtatttattggccatgcaagtagaggaaatgcacagtacaaatgtttttctttagcacgtaagggacctatccttgtcttgaaagtttgttgctttaaaagcaagtatctctccataaatattatggccttccattttcttcatacattttttaggatccacttgtgcatgtagttgagaccactgtctcttaaaatatagcacttttcaattctctctaaagaaatacttatgtactactatcacatgttgtaaattttcatgtaatagtgttttctgtgagtaaactccattttgattggcagctaagactttttttcctgtggcttttatttatctaagaggtctttgcatatagatgaaatgtatatttgcctggcggactatttgcgttgtgtggccttagtttgtttattgacattaacgagtgttttaaaaaggtttttaatgaatagtcttaaatctaaatttgtgtgaataatccttttaacacagtgcttttttgtagctgtctaagtgtgttaaattgttaagctatttctttgtaaaataggacaatggaatgcatagtttttttttttcctgtaaagtatttttttaataaaaaaagtctgatttgtcctttaaaaaaaaaaaa

SEQ ID NO: 222890 - DNA, 1000 bp, Homo Sapiens
gaggagatggaagaagaaaacagaaaaatcatagagtttgctaacatgcagcagcaaagagaagaagatcggatggcaaaagttcaagaaaatgaggagaaaaggctacagcttcagaatgcgttgacacagaaattagaagaaatgctgcggcaacgtgaagatttggaacaagtgcgacaagaattataccaggaagaacaagctgaaatatataagagcaagctaaaagaagaagcagaaaagaaattgagaaagcaaaaagagatgaagcaagattttgaagaacaaatggccttgaaggaattagtgctacaggctgcaaaagaggaagaggagaactttagaaaaactatgctagctaaatttgctgaggatgatcgaatagaattaatgaatgctcagaaacaaagaatgaagcagctggaacacaggagggctgtggaaaaacttattgaagagcgtcgccaacaattccttgcagacaaacaacgtgaactagaagagtggcagttgcagcaaaggcggcaaggatttattaatgcaattattgaagaagaaaggctaaaacttcttaaagagcatgctacaaacttactaggctatctccctaaaggagtatttaaaaaagaggatgatattgatctgcttggtgaagagttcaggaaagtatatcaacaaaggagtgaaatttgtgaagagaaatgatatcatcaaaattgggtaaagcatagattttttgtatgttaccactagatgtcagcataacttttgttttacagctcagtggcattaggtatccattgtctgtttggattttgtaaatcatcactgaatttcataacttgtaaacaattatcagatacaaattaattttaatcaagctgttatttttgtactgataatttcaaaatccgatttctacaacactacagagcactgtttgcatccccatcctcaagacagtatatttaccttgactaatacagaactctacccc

SEQ ID NO: 222891 - DNA, 1000 bp, Homo Sapiens
agtctatcaagaacgatttcctacaccagaaagtgcagcacttctgtttcctgaaaaacccaaaccgaaaccacagctgctaatgtgggcactaaagaagcctttccaaccatttcaaagaactagaagttttcgaatgtaataatacttccacagcaacaggtgctagagaccactgttgttgttttgagtgaatggtggttaggagaaagactttggtggtggaagaaagaaaagcataaaacaaagactactgaaatatagataaagattgccttagtttttaaaaatgtttggccattagtatttttataaaactcaatgctagttttaaagtgtataaattggttaaaatttatgagtcaaatatatagtgataatgttaacatgtttgtaattgctacagaatttaagggtatttttatctctgtgctttctttttcatggtgtttattaaataattgtgtatatacatcctagctactgatatctttattatagccttaagacttaattttaagtcttaaaaatagtgtgtatacttgaataagaaagacactgggtactgttactgtgatgctattgacttagtagccaattatcatttctcctgtataaattccagtttttattgctgcacataaattttttaatgtcttatattgtgatagctatgtcttttattgcagatttattggatgttatgacagattttactaaagctagtgtttttataacatatatattagttgatgtttacctataagtggagtagattttcatctgcctgcaatggtataatttcagtcttagctaaaaatggaaagttgaactggataaattctttgggtacccttagacctctgattctaagtcaaatgcaaatgggttaaataaaatgagactacttcctttataaatatattttcatccttttgaaagtaagtgaaatgtaaataaacttattttttttaaaaatgccaaaaaaaaaaaaaaaaaa

SEQ ID NO: 222892 - DNA, 1000 bp, Homo Sapiens; identical to SEQ ID NO: 117620

SEQ ID NO: 222893 - DNA, 1000 bp, Homo Sapiens; identical to SEQ ID NO: 220728

SEQ ID NO: 222894 - DNA, 1000 bp, Homo Sapiens
aaagttactaaagagataaaaatggtaatttccatttttaaaagtaatttggttgtgtttatagttatttgtacaagtatttatcacagactctaaattgaaaaatgtagtatgatctatatttgaccctaaaaatgttggattaatttaacaaatatggcagatttttcataactaagtcttaagtcttctaaaaggaagctgttacccttctgtttttaattacattaattgaaatgtgttttaagagatacaatttcagcatattttatatattaaaaaacaaaaaaggattagtattgagccagtggccaaaaggtaatattactaccatgtagactgttatagttcaaattgtcccacttcacccagaattttagaaactagaagtctgggaggtactatatcagctgtagttgggtaattccaagtgctgatagtactattcatcttttttattattgtgtcagatgaaacaaatgccaagttgcaaaatatgcagatttttattatataatggttttaggcataaattattaacaagccatgccttatgtgtttcatcttatatttttctttagaactaaactataacagattttggaaaatgatttgatgtgcttgctcacttgattgacttggtcagatatttgaatgatggtattacctagattctaatccttgattctagttatataataaataatatagaatatgaaaatatgtttgggcatttactgtttatattatgtagtagcctccatcatgacacacttactacatttatgaattgagcagttctgtaattgtaattattattgctgttcatgtaacaaaacatgcttatgataatagcaaacaaatagaaatgcccccaaaatgctatttttttaattcagttataactgttactcttgtagttgtgtatgacgcaataaaatttgtaaaaaaatttcagcatgaaaaataaaatttgtatcacctaaaaaaaaaaaaaaaa

SEQ ID NO: 222895 - DNA, 1000 bp, Homo Sapiens
ctttttctggacaacagtaccctagtgggcagcgtgggtcccggctcagtgctcgagctactggaggcctgcccgcgcctgcgcgctctcggcctgcacctagccagtttgtcgcacgccatcctcgaagcactggcggcgccagaccgagcgcctttcgcgctcttggctctgcggtgcgcgtgccccgaagatgcacgcgcgtccccgctgcccaacgaagcctgggtcgcgttgcgccgccgccaccctgggctggcagtggagctggagctggagcccgcgctgcccgctgagagcgtgacgcgcgtcctgcagccagccgtccccgtggctgcgctgcgcctcaacctctcaggcgacaccgtaggcccagtgcgcttcgcagcacaccactacgccgcaaccctgtgcgcgctcgaggtgcgcgcagccgcttcggccgagctgaacgccgcgctggaggagctggcggcgcgctgcgcggccctgcgcgaggtgcattgtttctgcgtggtgagccactcggtgctggacgccttccgcgcgcactgcccgcgcctgcgcacctataccctcaagctcacgcgcgagccgcatccctggaggcctacgctcgtggcgtgattgggcgacttctctcccccgtccccgtggacgtaagcgctctgagagggaacggggggggtgtccaggcgcgccccgagtgctagtgccttcttttgggattgttgccccccgggtctttaccgagttgggaactgtgatggcatcgggaccagtcctgggcgccctgagaccactcgctgctctcaccctctgcagacgccccacccgctcggtcctggacacactgcccccctctcttgcctccacccctctgcggactctgcagctccgcggccccggcgcagggagagggagggcacgggcgcgggccgggcctcaagggtgagtgtgaaataaacaaatcctgcagtgaaaaaaaaaaaaaaaaaaa

SEQ ID NO: 222896 - DNA, 1000 bp, Homo Sapiens; identical to SEQ ID NO: 117623

SEQ ID NO: 222897 - DNA, 1000 bp, Homo Sapiens; identical to SEQ ID NO: 117624

SEQ ID NO: 222898 - DNA, 1000 bp, Homo Sapiens
acccgtccgagtccctggagaagatgacgctgcccaaccttccgcggctgagcgcgtgggtccgagagcagtgcccggggccgggttcacggtgcaccaacatcatcgcgggggacttcatcggcgcagacggcttcgtcagtgacgtcatcgcgctcaatcagaagctgctgtggtgctgacgggacccttctgaagttcgggacgcggcggctgcagtttcacccccgaatttccaaatggagtttcgctctcgttgccgaggctggagtgtagtagtgtgatcctggctcactgcaacctccacctcccgggttccagcaaattctcctgcctcagcctcccaagtagctgggattgcaggcgcccgccaccacgcccggataatttttgtgtgtttagcagagacggggtttcaccatgttggccaggctggtctcgatctcctgacctcaggtgatccacccgcctcggcctcccaaagtgctgggatgacaggcgtgagccaccgcgcccggcctatacctcattttctacatgtcgcttgttggagctgctggttcaagttcccagccagccaatggatgccagcaccatttttactcccctttcccaagcaaatcgtgcatttttgtctaacgagagacatcagtttctcaggatgatcctcaagaacgttatggagtccatgttgcaataggttctctttgggacctaatgactcattttccaaaaatccgcttctacttttggtacccggttgctacggtgaaatgaaggtgccccgcatccagaaagacgcactcctggaccacaaccggcggctacctcagccccacggctctgcaggatcagggctcgggcaggccccgcggagatgaagaatttgcagggagcctccctgacttccgtcggctgtgaatccttgtctgtcaggggcgtatccacaaaatcaccaaattcatacagatcgtttaaataaatgaacatcattaaagtc

SEQ ID NO: 222899 - DNA, 1000 bp, Homo Sapiens; identical to SEQ ID NO: 117629

SEQ ID NO: 222900 - DNA, 1000 bp, Homo Sapiens
gagaccgtgctcaagggccagatccaggccgtggccagtcccgatgaccccattcgcaggatcatggaatctcgaatcctgaccttcttagaaacctaccttgcctcgggtcatcagaagccattgcccacagtccctgggggactcagtccagttcagagagagctggaggaagttgctattaaatttgctcgcctggtcaactataacaagatggtcttctgtccctactacgatgcaatcctgagtaagatcctcgtccgatcctaacgtgtatgcaccctacagcagcagtattactcactagccacagaatacctgttctgtactctaatgttgcattggaaaatggctatatagtacatgtctatttaacagcaccgattccaaagggaagaatattgtgtatcactgttgaaaagacttgttgagaaatccactgaattctattttgagagattgtatttatgagtgcaagtttacaaatcaaagaagcattttgttctcgagttttacaggtaacactcagctgttgtctccactcctcccccatcatgtccttccaaggaggctgggacctctctcttctgcaatctgggtagttctttcagatgcctcatgctgagctgacggccatccaagcgcaaaagagaccaagccatggcctcacctcctgccctccctcagacagccttgtccctcacccctcccttctggtatttttgttagaagggctatataacgtcttattgccattttctccccctatttattgcttcctccctgcctggcctagccagggctcccaagcccttttttctagaggagagttatttgtctctctctctttttttttttactttcttttttgtatttaaacattcttttaaccttcccccaaagatacagttattggactttaaaaaaaaaaaaaaaaaaaaaaaaaaaaaaaaaaaaaaaaaaaaaaaaaaaaaaaaaaaaaaaaaaaaaaaaaaaaaaa

SEQ ID NO: 222901 - DNA, 1000 bp, Homo Sapiens
tcgagggagctgtgatgaacaaattgctaacaatgggctcctttaaaagaattaccctttatgactaccaagccatgtgtagagccaacaaggaaagcagcgatggcgcccatggcctcctggatccttataatgccttcctctctgcagtaaaatggatcatgacagaacttgtcttgttcctggtggaatttaacctctgcagttggtggcactccgatatgacagctaaagcccagaaattgaaacagaccctggagccttgtgatactgaatatccagcattcgtctctgagcgcaccatcaaggagactacagggaatattgcttgtgaagactgctccaagtcctttgtcatccagcaaatcccaagcagcaacctgttcatggtggtggtggacagcagctgcctctgtgaatctgtggcccccatcaccatggcacccattgaaatcaggtataatgaatcccttaagtgtgaacgtctaaaggcccagaagatcagaaggcgcccagaatcttgtcatggcttccatcctgaggagaatgcaagggagtgtgggggtgcgccgagtctccaagcccagacagtcctccttctgctccctctgcttttgatgctcttctcaaggtgacactgactgagatgttctcttactgactgagatgttctcttggcatgctaaatcatggataaactgtgaaccaaaatatggtgcaacatacgagacatgaatatagtccaaccatcagcatctcatcatgattttaaactgtgcgtgatataaactcttaaagatatgttgacaaaaagttatctatcatctttttactttgccagtcatgcaaatgtgagtttgccacatgataatcacccttcatcagaaatgggaccgcaagtggtaggcagtgtcccttctgcttgaaacctattgaaaccaatttaaaactgtgtactttttaaataaagtatattaaaatcataaaaaaaaaaaaaaaa

SEQ ID NO: 222902 - DNA, 861 bp, Homo Sapiens; identical to SEQ ID NO: 117630

SEQ ID NO: 222903 - DNA, 1000 bp, Homo Sapiens
aggctagcaatgtgtgccagaagactcgggaggaccagggaagcagtgaaaatgatgagagatttaatgaaggagttcccccttctgagtatgttcaatatccatgaaaaccttttagaagcccttctggaactacaagcatatgctgatgttcaggcagtcttagcaaagtatgatgatataagcttaccaaagtcagcaacaatatgctacacagctgctttgctcaaagcaagagctgtctctgacaaattctctcctgaggctgcatctcggcgggggctgagcacagcagagatgaatgcagtagaggccattcatagagctgtggaattcaatcctcatgtgccaaaatacctactagaaatgaaaagcttaatcctacccccagaacatatcctgaagagaggagacagtgaagcaatagcatatgcattctttcatcttgcacactggaagagagtggaaggggctttgaatcttttgcattgtacgtgggaaggcacttttcggatgatcccttatcccttggaaaaggggcacctattttatccttacccaatctgtacagaaacagcagaccgagagctgcttccatctttccatgaagtctcagtttacccaaagaaggagcttcccttctttattctctttactgctggattatgttccttcacagccatgctggccctcctgacacatcagttcccggaacttatgggggtcttcgcaaaagctttcctcagcactttgtttgcccccttaaactttgtcatggagaaagtggagagcatcctcccatccagtctgtggcaccagctaacacggatctgagagaagccctgtcctccactcacctcacccgccgctgccaccatctcctctgtgccaactccttgtggaccgcaagaaagcatgactttgaaaaagggaagccattccgagattttaaaatgttcatggactattccatattaaaagctgtttttgttgtacaaaa

SEQ ID NO: 222904 - DNA, 1000 bp, Homo Sapiens
agaagaagagttagaggaggaggaggaggaggacccggaagaagataggaaatccacaaaagaagaagagagtgaggtgccgaagtccccggagccaccacccgtccccgtcctggctcccacggaggggccgcccctgcaggccctgggccagccctcaggctccttcatctgtgaaatgcccaactgtggggctgactgtagatgtcatgtcactccctttcttccccaggtgttcagctcccgacaggcactgaatggccatgcccgcatccacgggggcaccaaccaggtgaccaaggcccgaggtgccatcccctctgggaagcagaagcctggtggcacccagagtgggtactgttcggtaaagagctcaccctctcacagcaccaccagcggcgagacagaccccaccaccatcttcccctgcaaggagtgtggcaaagtcttcttcaagatcaaaagccgaaatgcacacatgaaaactcacaggcagcaggaggaacaacagaggcaaaaggctcagaaggcggcttttgcagctgagatggcagccacgattgagaggactacggggcccgtgggggcgccggggctgctgcccctggaccagctgagtctgatcaaacccatcaaggatgtggacatcctcgacgacgacgtcgtccagcagttgggaggtgtcatggaagaggctgaagttgtggacaccgatcttctcttggatgatcaagattcagtcttgcttcagggtgacgcagaactataaagccctgtgtgtcacttagagacagtgaaaacccacggcctccatcttcattaatcaggaaacctggactgcctgcttgttttgtaacccttttaaactacctgttttaaaagtggtcattttattcaggtttagaaaaaaaaatcctatttcttttccttttatttaaaaaaatttgtttttgtggggggttggggggaataaataattggcacaactaaaaaaaaaaaa

SEQ ID NO: 222905 - DNA, 1000 bp, Homo Sapiens
tgagttggggacagctgagactaaaaacatgacagattcagaaatgaacataaagcaggcatctaattgtgtgacatatgatgccaaagaaaaaatagctcctttacctttagaagggcatgactcaacatgggatgagattaaggatgatgctcttcagcattcctcaccaagggcaatgtgtcagtattccctgaagcccccttcaactcgtaaaatctactctgatgaagaagaactgttgtatctgagtttcattgaagatgtaacagatgaaattttgaaacttggtttattttcaaacaggtttttagaacgactgttcgagcgacatataaaacaaaataaacatttggaggaggaaaaaatgcgccacctgctgcatgtcctgaaagtagacttaggctgcacatcggaggaaaactcggtaaagcaaaatgatgttgatatgttgaatgtatttgattttgaaaaggctgggaattcagaaccaaatgaattaaaaaatgaaagtgaagtaacaattcagcaggaacgtcaacaataccaaaaggctttggatatgttattgtcggcaccaaaggatgagaacgagatattcccttcaccaactgaatttttcatgcctatttataaatcaaagcattcagaaggggttataattcaacaggtgaatgatgaaacaaatcttgaaacttcaactttggatgaaaatcatccaagtatttcagacagtttaacagatcgggaaacttctgtgaatgtcattgaaggtgatagtgaccctgaaaaggttgagatttcaaatggattatgtggtcttaacacatcaccctcccaatctgttcagttctccagtgtcaaaggcgacaataatcatgacatggagttatcaactcttaaaatcatggaaatgagcattgaggactgccctttggatgtttaatcttcattaataaatacctcaaatggccagtaacaaaaaaaaaaaaaaaaaaaa

SEQ ID NO: 222906 - DNA, 1000 bp, Homo Sapiens; identical to SEQ ID NO: 117633

SEQ ID NO: 222907 - DNA, 1000 bp, Homo Sapiens
ataaggttttcttgaagttgtgccaaagcattctgtagagtaggatgagatggttgttgccctagtctgttggtagaaccagaaatcaatatgttgtcttttaggttaaagcttgtaccaaaatatttatttcccccatttcaagccctgagtcaaacatttttttctcttaataatagacctgaaatgttttattagtatttctgtgaaatcagttgattcttgtgccatttttgtatatgtaattgtaattttgcccatgttaggccctctaaaaaatgtttgacatcctttgagatattttattactaaaatctgatcttttttggctactgcaaaaatctattcagcaagaaggtatcagctgcataccttgcacagtggagctgactacctataaactctccctaaggcatttgtttacaggtgtattccattttagcagacgttctgatgctcagtgtatgtgctgcatacaaataaatgtgttctgaatcttttcatcttattgatagcatttttacaaatgtgtttccaaggaataaagattattcttgctttttttttgactccatcttcattttttttaaattgattcttgttgctatgcagaagtctcatttgtgaatgaccttggtaacagaacagttggcttttggaagtctgaaggtgagcattcagttaggtgggtggagcaagatcatcctagaatgaggctgctcttggcaagagtggatcttataggcacagcagctgatgcctttcttcatctggggcaactctggtgaaggttgtcctgcctgtcacaggtgctgagtagagagaagtggtggcagtgggatttcctcagtaatagtcctgtaaaggtacgtgtttgtcctggctacttgtgctcttcctggcaggaaggcatccaaacccttatctgtgggctcctggaaattgtgtatgccatataataccctctaataaatacctctctgcttaaaaaaaaaaaaaa

SEQ ID NO: 222908 - DNA, 1000 bp, Homo Sapiens; identical to SEQ ID NO: 117636

SEQ ID NO: 222909 - DNA, 1000 bp, Homo Sapiens
tctgggctatggggaagccatccctgcttttcttcggtttgatggcctcgtggagaacaagaagccaagcaagaaggacgtggtcaacctcctcaaggatgcctggaaggaacgtcttgctgaggagcagaaagagacgttcccagatttcttcttcaatttcctggagcatcgctttgggcccagtgatgccatggcctgggcttatactatttttgaaaatatcaagatcttccactccaacgaggttatgagtcagttctatgcagtcttgatgggaaagcggagtgagaatgtgtatgtcacccagaaggagacagtagcccagctgctgaaggagatgacaaatgctgacagtcagaacgaggggctactaaccatggagcagttcaacactgtcctcaagagtaccttccctctcaagacagaagagcaaatccaggagctgatggaggcagggggctggcatcccagcagcagcaatgcagacttgctcaactaccgctcactgtttatggaggatgaggagggccagagtgagccctttgtgcaaaaactctgggaacaatacatggatgagaaggacgagtacttacagcagctaaagcaggagcttggcatagaactccatgaggaagtgactctgcccaagctgcgagggggcctgatgaccatcgaccccagcctggacaagcagacagtgaacacctacatgagccaggccttccagctccctgagtcggaaatgccagaggagggtgacgagaaggaagaagccgtggtggaaatcctccagactgccctggagcggcttcaggtgattgacatcaggcgtgtgggacctcgagagccagagcctgcaagctaggaacttgtgggcagcctgcgtactccagtcctgctaacccctagcttttaatataaaagtgtttttctgaaaaaaaaaaaaaaaaaaaaaaaaaaaaaaaaaaaaaaaaaaaaaaaaaaaaaaaaaaaaaaa

SEQ ID NO: 222910 - DNA, 1000 bp, Homo Sapiens; identical to SEQ ID NO: 117638

SEQ ID NO: 222911 - DNA, 1000 bp, Homo Sapiens
cctttctgttgtcaaaaagatgaaggagacctttaaggagaaagctaagctctgagctgaggaaacaaggtgtcctccatcccccagtgccttcacatcttgaggatatgcttctgtactttttaaaagcttatagttggtatggaaaacatttttcttatttttaagtgttattaattatatctatggaaaaactattcctgaaatatatacagtcttatgtcccaatcagagtcttttaacctatgatttaaaaatgtataagtaacagaaattaacatattttaatgactttactttttatttctaagaaaagtatttgaaaaatggaataattttaaatcaatgataattctagggatcatgaactcccagaagattttattatttaattgtaaaggtagaggccggacgcagtggctcacgcctgtaattccagcactttgggaggccgaggtgggcgggtcagttgaggtcaggagttcaagaccaggctggccaacatggtaaaaccctgtctctactgaaaaacaacaaaaacaaaaacacaaattagtcgggtgtggtggcacacacctgtagtcccaggtacttgggaggctgaggcaggaggatcgcttgaacccaggaagcagaggttgcagtgagctgagatcgtgctactgcagtccagcctgggctacagagtgagactgcatctcaaaaaaaacccmaaaaaacaaaaacaaacaacaacaacaaaattataaaggtagaaaataaatctaaattgtgtcgtaattaagattattaaaatgagaattatacaatgacttatttttggtggcaaatactttaggagcaataatgccttatggtaattattgatgtatagttttttttgtttatgaagtcaaatttgtataaatttttttaattcaaaggaaaagttttatgtgattttaaaaaaaaaaaaaaaaaaaaaaaaaaaaaaaaaaaaaaaaaaaaaaaaaaaaaaaaa

SEQ ID NO: 222912 - DNA, 1000 bp, Homo Sapiens; identical to SEQ ID NO: 117641

SEQ ID NO: 222913 - DNA, 1000 bp, Homo Sapiens; identical to SEQ ID NO: 117644

SEQ ID NO: 222914 - DNA, 1000 bp, Homo Sapiens
ttcagaaaaatgcaggaagaggaggaggaaagttggagcaccagcagagaccttaccatttcaataagtgaagatgatctgattttagagagcccagaaccacagccaaatccaggtggcaagatggagggagaagatggaatagaggccttaaaattaatccatgctgagcaagaaagagttgccctatccactgaaaaaaattgtattttgcaaaccctaagctctcctgattcagaaaaggaatcctccactaacgcaccaacaagagaacctggacaaacaccagactcagacgtaccgagggcacaggtgggtcagcatgttgccaccttgaaagaacatgataattctgtcaaagaagaggcaacagcattattgagaaaagcccttacagaagagtgtggccgtaggtcagctattcacagtagtgaatcatcttgcagcttgccatctattctgaatgacaatagtggaataaaggaagccaaacctgctgtatggctcaacagtgttcctacaagggaacaagaagtttcaagtggctgtggagacaagagcaagaaagaaaatgtggctgcagatatcccaatcacagaaacagaagcctatcagttgctgaagaaggccacccttcaggataatacaaatcaaactgaaaacaggtttcaaaagacagatgcttctgtgtcacacttgtcaggtttgaatattggcagcggtgcattcgagacaaagacagctaacaaaattgcttcggaagctagtttttcatctagtgaaggaagtcctttgtcaaggcatgaaaacaaaaagaaacccgtgatcaattcaaaatctaatgccctctgggatgagtctgatgacagtaactcagaaattgaggctgctttacgccccagaaaccataacaccgatgattctgatgatttttatgactaacgtgctgtgacattggtttcaaataaagtctttaaacaaactaaaaaaaaaaaaaaaa

SEQ ID NO: 222915 - DNA, 1000 bp, Homo Sapiens
actcacttgggtatttactgcgtaatctggaacatttagctaaaatatacacttttggcttaaaaattattgctgtcaattccaataataattcttagcttataaccaaagagcagtgtttaaaaggagagcttctatacaaaacctattcctggcgttacttttcatacaatttttgttctgttttacctggaaataatttaccaaaataactgagtgttgctgctaaagaacaaaagtggggaggtatcagggaacaagaaaacaagaaagggtatgatcaatcattttcttctgctccaaacagctggagtaaaattcatgggaaatggcccttcatttaaaaaaagatgtacctcactacccactacaaatttggaactttgttcttttcaataattagttttctattgtaaattacctactaaacagtggtagccatgacatggaaagtcaactgattctacaattggacattcatttgtgtgccctggaatttccaactagtaataaacaactactgttgatgtagttttaaaccacttgaagggactcatgaagcatcctgcaacataaatttgcatttttacatcagatttcttttttttcctgaaaaacaactaaccttctaacaactatctttcaaaagtaaatgtaataaaaatgcacaacataaaatgtttatgatcccagcaatacactttttaaaaaatgtgaaagtcaaagaattaagttctagttctgactcatcacaagaggtcaaaagtatttgctactgtaacattcaattcacatttgagaatcatggtaaaaataacttgcatttgccttaccatcatgatcctactgttgagttaggaaaatatggttagacagactcacattactttttttcagaggtaaactctagattactgtgtcaacccaatactatttggccatagatgtaaaaactaccaaataaaagtggattttgtggtctacaaaaaaaaaaaaaaaa

SEQ ID NO: 222916 - DNA, 1000 bp, Homo Sapiens
ccactgccctcttgctcagtttccttggccgccgcaccatccaggcgggttcccaggccatggccggcctcgccattctagccaacatgctggtgccgcaagatttgcagaccctgcgtgtggtctttgctgtgctgggaaagggatgttttgggataagcctaacctgcctcaccatctacaaggctgaactctttccaacgccagtgcggatgacagcagatggcattctgcatacagtgggccggctgggggctatgatgggtcccctgatcctgatgagccgccaagccctgcccctgctgcctcctctcctctatggcgttatctccattgcttccagcctggttgtgctgttcttcctcccggagacccagggacttccgctccctgacactatccaggacctggagagccagaaatcaacagcagcccagggcaaccggcaagaggccgtcactgtggaaagtacctcgctctagaaattgtgcctgcatggagcccctttagtcaaagactcctggaaaggagttgcctcttctccaatcagagcgtggaggcgagttgggcgacttcaagggcctggcatggcagaggccaggcagccgtggccgagtggacagcgtggccgtctgctgtggctgaaggcagcttccacagctcactcctcttctccctgccctgatcagattccccaccttacccgggccctacaggagcctgtgcagatggccatgcccaaccaataacgagacggttcccctccctttccctgccaggctcatgtctttacaccttcactcagccacgccaaccagagactgggttccaatctcaccccaccacatacagagccctcatctgtgaaatgagaatgatcacgtgacccaccccccagggcaggtatcagggtgaactgatcttagcaccggccaaataaatggaacctgctgagagagctgccagaaaaaaaaaaaaaaaaaaaaaaaaaaaaaaaaaa

SEQ ID NO: 222917 - DNA, 1000 bp, Homo Sapiens
aagcagccaatgagatacccagcctggaggagccagaacgggaaggggccactgctaacgtcagtgagggtgaaaaaaaaacagaggaaagtagtcaagaaccccagtcaacctgtacccctgaggaacgacggcataaccaacgggaacgactcaaccagatcttgctcaatctccttgaaaaaatccctggaaaaaatgccattgatgtgacctacttgctggaggaaggatcaggcaggaaactgcgaaggcgtactttgtttatcccagaaaacagctttcgaaagtgaccctcaaagaatgagaacctcaagcatctgggatccagtggagctaatcagtcctgcctcctgctctctgggtatagacaggggtgggaagggtccatctgggcaaggggaatggggccatgttgttgacattaggtacttaataagccttggagctagtggagagggagaggaaagggttctgtccaagacagttcaggttaattaattttcttctccattgcttcaccttaagggttaataatgtagagaggagggaggaccacattgatgaccagaacctactggtactttatagcatttgccccaccccacagcttaggtttttctgtcatcctcagatcccacaggcattgcgaagaagctgcttcctatacccaggtataactcaaaatccaaagggatagggccaggatccctattcctaccccatctattctctgttggctccaagagctaccccagagaccttaaacagaaacagtagctgaggcttcttcctagatacctgactagggaagtttgtctctcctttcttgcccaaccaggtcaaagtaaaatgtgagttgacagctcaaagcacttgtaactgctgccccctccctacctctactccccaaaatggaatcatgggatagggaaggcccccatggggtcagaagggcacggtagttcttgcaattatttttgttttacccttcataacc

SEQ ID NO: 222918 - DNA, 1000 bp, Homo Sapiens
gatcgcggcacactgcagccttggcttccctgggctcaagcagtcctcccacctcagtctcccaaatagctaggactacaggcgtgcgtgaccaagcccagctaatttttgcattttttgtagagatggggttttgccatgttgctcaggctggtctcaaactcctgagcactagcaatccacccacctctgtttccaaaaaaaaaaaaaaaatgaaaggtcaacccctatgcaaattaccacagcaaaggtttcattcaggagattcttccatctgggcaacctggttttccaaatatcatttgacctaagtgaatgttgatactagctaaagattgggtaaattggttgaattattgtattgaagcttgagctgtagctaaaagtaatttaggtttcccctaagatgttattatgttagggacataacacttttgggaggttgttgtgggagatggttgatttaggttttcaaaagctagaaataaaatttacatgccttagatttcataaaattctgctctaattgggtggaaggtgctgtatctaacttgtgttcctcctaaggttatgtcctaataactattcttttaggagtatacttctactttatagaaggttgcttttctttttaattttttctaacaaagaaaagaataaagtatttattaataagaaccagaaagcacttgaaactgatgtttttaatggctcatttagggtagatttatttatctcattaacttaaaacagctatgtgtatgaaataggtcacaacagaacttgaacaccaggttggtgtctgagcaatccctttcttatgggaaaaacaatgttcttgtttgaacagagggtatcattgcagtcagtattcacgtgtatattgttatataagttgtataatatgcttgtaaaggctgagggtgagctgtatctggatgcctttttacaatttgattttaacttttaaaataaatttaaaacataaaaaaaaaaaaaa

SEQ ID NO: 222919 - DNA, 1000 bp, Homo Sapiens
actacccttttcattccgatcaattaatacgagagaaaacctgtatctggtgacagaaactctggagacggtaaaggaggaaaccctgaaaagcgaccggcaatataaattttggagccagatctctcagggccatctcagctataaacacaagggccaaagggaagtgaccatccccccaaatcgggtcctgagctatcgagtaaagcagcttgtcttccccaacaaggagacgatgagaaagtctttgggttcggaggattccagaaacatgaaggagaagttggaggacatggagagtgtcctcaaggacctgacagaggagaagagaaaagatgtgctaaactccctcgctaagtgcctcggcaaggaggatattcggcaggatctagagcaaagagtatctgaggtcctgatttccggggagctacacatggaggacccagacaagcctctcctaagcagcctttttaatgctgctggggtcttggtagaagcgcgtgcaaaagccattctggacttcctggatgccctgctagagctgtctgaagagcagcagtttgtggctgaggccctggagaaggggacccttcctctgttgaaggaccaggtgaaatctgtcatggagcagaactgggatgagctggccagcagtcctcctgacatggactatgaccctgaggcacgaattctctgtgcgctgtatgttgttgtctctatcctgctggagctggctgaggggcctacctctgtctcttcctaactacaaaagccctttctccccacaagcctctgggttttccctttaccagtctgtcctcactgccatcgccactaccatcctgtcaccagtgggacctctttaaaacaagcagccaaccattctttgatgtatcccattcgctccatgttaacatccaaaaccagcctggatttcatacatggacttctgattaaaagtggcaggttgtgcatgttaaaaaaaaaaaaaaaaaaaaaa

SEQ ID NO: 222920 - DNA, 1000 bp, Homo Sapiens; identical to SEQ ID NO: 117648

SEQ ID NO: 222921 - DNA, 1000 bp, Homo Sapiens
gataaatagccagcctagagcacaacagggcattgggtacttgcatcttaggtatttcttcccagtcacatccattttgtggaagattaacccaaccccttacactacactgaacactaaagaataacatataagcacacaaattggtgacagaatttcaattacgtgaacgcatcctctttgctaggtcaaaaacaaagggcaaagcagacattttagtatacagagtgattggcaaatattttcaagatttaatatgagcaacccattatttgccctatccaaaatatattcaagggccttccaagttgtagaagaacaatgatcttcccataatcaaaagtggagagtcgaaatgctgtgccagttgctctggtattcaggtttctctgggttttacagaacgcatggaccccattcacgtttggtttgtttatcttcaaatttgagttgaaacgagtgcgatttatttaagttgtatataaaaataaaaggatagcatttttatacaaatatctttaaaggcacaaaagatttattcacaagttttggagggctttttgttcctctgatagacatgactgacttttagctgtcataatgtattaacctaacagatgaaatatgttaaatatgtggttgctctttatccctttgtacaagcattaaaaaaactgctgttttataagaagactttttgttgtactatgtgcatgcatactacctatttctaaactttgccatattgaggcctttataaactattgatttatgtaatactagtgcaattttgcttgaacaatgttatgcatatcataaactttttcaggttcttgtttaagtacattttttaaattgaacagtatttttcattttggttataatatagtcattttgcctatgtttctacaatgaagtgttaaatactttataaaaaattgttgactgacttatttaaatgaaattctacatataaaaaaaaaaaaaaaaaaaaaaaaaa

SEQ ID NO: 222922 - DNA, 1000 bp, Homo Sapiens
ggtaaccccctcatggtagagtgaagggagaaaagggccaagaagacaaagtaccactgataaagaagagattgtcaaatagatgcattcctagtcatgaattacccttttccaaacatttttaaagcaatgcctttgtgtcaactcaacccttcttccccatttcttgtcatagaatgtagcatggccataggtgaaaaagcttatcattaaagtatgaaaccatgaattataagcattttgccatgatgcccttttatacatatgtttttaaaagtactaaccaacatataggagtttaggaatggtgaagatataatttgattaagttgtaggtaaacagaaaggatcatcttaggctcagaatttctaatatgattacatgagtctactttataaactggtataggctatgtaattagcccgtaagttacttaaaggaccaggggacctaatttttgtcagttttccagtcacattggtgccattcaggactccagctgtttacaggaaatatgtacttagcagaatagtatttttccttgaaaaaaatttgaattcagcctaaatacagaatgaatatgaatagtttgtgaaaagggttagagaacaacaatattcctatagtttctgtattaatgcagtagagacagaggttcctaacgcaaaaagaaaaccacaagtaaagaccgtcaaattagagctttagaatatgacttgaaaaagtagggatgggcaaaacagcataagaaaatattttttcttaatgcagatggacagtgttttcttgttttaaaaatgttttgcctatttgccagcattttttgaagtaatacactgctgctacctggaagatgtctaacttcattttctacaactcttatgtgattttgccattgtcattaagatgcattgattttatttatgaggtgtatgactttaaatatctaaatgctgtattaagtgacttgtttcaaaggaataaatgaagtgaaaacgt

SEQ ID NO: 222923 - DNA, 1000 bp, Homo Sapiens; identical to SEQ ID NO: 117649

SEQ ID NO: 222924 - DNA, 860 bp, Homo Sapiens
cccgcccggcacccggggtgcgccctcctcggtcccgcgccctccgggctcgcagggacgtctcctccctcccggctcgcggccccgcccggcccggcccccgcccagagccccagcgcgccgaggatgtgagtcctgctcgcctctggcggagcagcagccactcgcgcgcggagccggagcgcagcgcagcgcagccgcgggcgctctccgggccgctcgcgcgagtgccgcgctcttgccctagcggcgtcccccggcctctcgccggcgccaccgccgcagcagcccgcgggccgtccccggccggccgcccccggccccagcgccgctgaccctgtccgccgcgggcggggacgcgggcggaggaggcgccgcggcggagcccccggacgcgaccatgtcggaggtgctgccctacggcgacgagaagctgagcccctacggcgacggcggcgacgtgggccagatcttctcctgccgcctgcaggacaccaacaacttcttcggcgccgggcagaacaagcggccgcccaagctgggccagatcggccggagcaagcgggttgttattgaagatgataggattgatgacgtgctgaaaaatatgaccgacaaggcacctcctggtgtctaactcccccaaagacaatgagttaagggagagaataagaacggcggtaacagttattggcaaaaagcatgaaaagagaaagcactttgaaatttattactagcttgctacccacgatgaaatcaacaacctgtatctggtatcaggccgggagacagatgaggcgagaggaggaggaggaggaggagaaggctctgggctcctctgcaaaaaaaaaaaaaaaaaa

SEQ ID NO: 222925 - DNA, 1000 bp, Homo Sapiens
ctagctctgtctgggaacattagtttatgtgagccagctctatcagggtcttcccatggtggttcagaatagatgagcatagcatggttttgtttgtttttgctttcaattttctaatttggcatggatccatatgtatttactatcctttttctaatatattaatatatgctacatttgtatttgcattactataatactttgagttgaaaaagagtttcattgtggagagaaaaagcaaatggtatgccacaagatcactctgatttgagaaaagggaggaggggaagatagtctgaatggaaatctgaaatacggaatgttttagagaaatatgtcacttgcatatagaatgttttaattgaggtataaattaatgagacaaagtgaaaaagaaattatattcagataggactgcactacattatttgtcacacatggatctgttaccatcaggtcaattcctagtatgcataaattttttaacccttttaaaagagacctatgttgaaaacccctgaaaattcactgaagaaaaatcattactctttttctcagtaaatcatatcatctgaaatattacaaatttcaaatttctaggtgctatattaattcaatattacaataactcttacctaattattcttacaagttttaagttgtggtagtttagtgatttttttaaaagatgtgtgaaatgttctctgcaaaataattcaggccactgtctccttttatatattattataattatttattatgaagaccagtgaattacgatatttaaagtgagagaacttaattatttgcaaaggtaagttacagcttgttttttgagagaatcaaatgagtttacttttgttcctgttgtttttaactagctttaagtttaaagatggaagctaagcaatggaaatgctatacgtttttgacatttattaaatggtaccaataaagtattttattaccaaaagttaaaaaaaaaaaaaaaaaaaaaaaa

SEQ ID NO: 222926 - DNA, 1000 bp, Homo Sapiens
tatgatgtggcattctacctcgctggagtccctccccttattggaggtgctgtgctttgttttatcccgtggatccatagtaagaagcaaagagagatcagtaaaaccactggaaaagaaaagatggagaaaatgttggaaaaccagaactctctgctgtcaagttcatctggaatgttcaagaaagaatctgactctattatttaatatcttacatacctccaccagactggacttgctttttgaattttaagcaagtttcctttccttttatacaaattgcaaatttcatatttttttaatcacatcctaggaatagcacaataattgggaaatagaacccttatcactagaagaaccattttctgccactaaatatctctgatgtttccatgagtctgagggcagagactctggtatatgaaaacatgtctgaaagtcacatattgtgaaaatttgaagctatctcagtaaaaagcagctttggaaactgtgaatgatctttagcttgtacaaatgtttaaaaatacctcaggctatactgaaagggttgcagtttggttaggagtggaaatattttgtttgttaatgatgtcttcagttctggtacctctgttttactttcttatgctctttggaaactttttgcaaaatttaagcctgggttctagataataccagatctacctaaacctcaagtctatgttaaagttgctttcctgctgttaaataagctatgatattaagatattctgacttgctccagtgtcaagggaccttctgggagcaggtgccaacatagtgttcagaatcaatatgtgagatgaaaaggatcccctccaggaggatcctgagctgttcagaaatcatttaagtttacagcgttgttccctttgcgtttgcagtgcgttttactcaagtagccagaaacaccccacgtttctgaatttgtttaaactgtaacaataaagtaaaatagaatgcaaaaaaaaaaaaaaaa

SEQ ID NO: 222927 - DNA, 1000 bp, Homo Sapiens; identical to SEQ ID NO: 117651

SEQ ID NO: 222928 - DNA, 1000 bp, Homo Sapiens; identical to SEQ ID NO: 117652

SEQ ID NO: 222929 - DNA, 1000 bp, Homo Sapiens; identical to SEQ ID NO: 117653

SEQ ID NO: 222930 - DNA, 1000 bp, Homo Sapiens
tggagaaaccctgtctcaactaataatacaaaattagccaggcgtggtggcgcatgcctgtaatcccagctactcgggaggctgaggcaggagaatcacttgaacccgggaggcggcggttgcagtgagccgagatcgtaccattgcactccagcctgggcaacaagagcgaaactccatttcaaaaaaaaaaaattggtgacagactcaatgatggaatgatttgtcggaattaacacaaagcagattttattcatataatgacttttttttaagagtctcttttttaaaaaaacttaattctctaaaaccgaaatggttcatgcttctttttaaaaatgattgtataaaatgtatggaatggttagcctggtgtggtggtgcacacctgtaatcccagctacttgggagactgagacatgagaatcgcttgagcctgggaggcggaggttgcaatgagccaagatcgtaccactgcactccagcctgggcgacagagcaagacactgtctctctctctctctccatatatatatgtgtgtgtgtgtatatatatatatatgtgtgtgtgtgtgtgtgtatacatatatacacatatatacacacacacatacatatacatgtgtatatatataccatcccatatatatgtgggatatatatatatatatatatggatatggttatatatatgggatggtttggttggtcccagcaaagtatatgaaaattaaagttctgtgataatgacaaaggaattgctgttactgtactgcaaatatgctgtgggttctcggtgttcaaactcttctaaggaaggacacacagtagctctctgcttgctgatagatggtttcccagtgtgagatttgttattttgatcagagtattcaaatcagaatttaaatctagtgtttctattttagtttagcttcctgatttatataaatgaaatctcatttataaagtataataaagatgactgtaagacaaaatccaa

SEQ ID NO: 222931 - DNA, 1000 bp, Homo Sapiens; identical to SEQ ID NO: 117655

SEQ ID NO: 222932 - DNA, 1000 bp, Homo Sapiens
gagccttgactgggattcatgatgtggaggcccccaacttccagaagcagctggtactctgctcacacaagcgactgggccggccggccctggacccctagaccccgagccgcctgccgactgcctgcacagggagagcagttgaggcccgggcagggcccccacaccagaccccaacatagcttccccacccaggcaccccctcccggggcagcaggcgtgggagtcagggctgcatgctcctcccctcccacctcacaggcggccttaggcaagtcattttctgtcatcacaaggtcgcctctgcctagtcaggtcctggcgtccagagtaaggatgtgcggcccccaggcccccgcacacctccctcagcaccaagaccgggacccccccacccacgtgtctcattgtggctgcctatggactcccgggccttgtgtgcaggccaggcccttccactgattttttaaagtgaaccattgctggatctcagattctgtggcatctaaggcctagcaggggtgggcacacgggtcacccgaggcccataccaagactctgttcctgccctaggcccagtctcaaaggaagccacaaggcgcgggggccactgaggaaggaaatgttcattttcatttgtccaaaaccaccttaagttttaagtatattaatcttgatgctttttaactattgctttttaacttgctgagatttagaaatactgttataaaaacttttttaatttctgtatttttttctgtattgtatcttcatgggacattaggggttttctatggtaagcacacctatggttttggtaaaaacattatcaaatatatatccagacggttcttccctagaagaaaaacaagtctttacacctgataaaatattttgcgaagagaggtgttctttttccttactggtgctgaaaggaaggatggataacgaggagaaaataaaactgtgaggctcaaaaaaaaaaaaaaaaaaaaaaaaa

SEQ ID NO: 222933 - DNA, 1000 bp, Homo Sapiens
caaggccacgttcgacaacgtgacctcctacctgaagaagaaagaggagagactgcagcagcagctagagaagaagcagcggcgccggagtcccccgcctgggcccgacgggcatgccaagaagatgagaccgggggaggcgacgctaagttgctgatcgtggcggtcagtggtgtctctcacctcaaattaggaaaagctttttaacttgttcccctgcatcctggcatgtcccttcaagaaggaaaaggtgacatcagttgtgaccagctcagaggatggggctgtcccctgggctctagaaagaacattctgtgtcaccagcacaggctcttgctgggtgcctgtgccccctttctggttgaagggaagccagaccagtggagtggaagctcttgaagcactttcttttcatgtcggaggctgcgtgtgagccggtggtggcggcagctgtctgtgtttctcctgttctcataccgcccttcgtgtccgctgcatcttcctctaggagcatctgtgggctgacgtttctggcatggtggatgttttcatgttgttccgccgtctcagcatccaggtgacgtgctgtcccgcagtagctgctcgccacacaggctgttgaaactcagcacgaatgcttgagcctgccccagccccagccgtagcccttgtgctcaggagctgctcctggagagtggctcccttgtgggaagtgagaaacacgtttcggagtcgcagggagctctgtctggcatcggtggcacagatggtgaacttgtttcaggaagtgtgagcacgggcctggctggcacccggtttacagggaggtgattgaggacgtcgttatgatttgatttgaccttggcacacactgcagagccacagggatgttgctgaatttcaatcaccgatcagcaaggatgaaccttctcaacttcctaggaatgtttagcagcaacctaatataccaggcaaaactcaaaaaaaaaaaaaaaaaaaa

SEQ ID NO: 222934 - DNA, 1000 bp, Homo Sapiens
tgtagaactcactaaagaacaagaggaggaagataatagttgtggaactttaaacagcacactttggtgggaacgaacacaagaagatagagtagtattttgaatttgtattgttcggtctgcttactgggacttctttctttttcacttaattttaactttggtttaaaaagttttttattggaatggtaactggagaaccaagaacgcacttgaaatttttctaagctccttaattgaaatgctgtggttgtgtgttttgcttttctttaaataaaacgtatgtataattaagtgaagctgcatgtttgtattgaagtatattgaactatatagtttgtatgtcatctttttcaccattcagaaacagtgcttctgaatttgtgatttaaaggaattgtaatagaatagttttatttttaagttatctttaagtttatgccatcttcttaaataagtacgtaatgttccaatctaaataaaaaactaattcataactaatgcatagaaaagatacataaagcaatgtgaaagtttcttgcttctcctttttaatttctaaaaaagccactttgaatggaagttgtcatccgtaaaagctgaagtgtaagcactaggaaatctcaatatagagatttgaggaaagttatatccactaggtggcagtcattgatcataataagtgaaatgagcccttgttctagtacatgattttaggcttaggtaattaggtatgtgaaattacatttctttaatttaaagtaaaattcagaaggttttagttattataattaaaggaagactgtgtgtagaatcttacgtaatagtctgattctttgactctgtggctagaatgacagttatctatggaggtggtagaattaagccataccttttccttcatcactcttggaacatataaattttttgtcatcttccttgcaaagggcacatttaattttgttcttgaataaaatattttattgggtaaaaaaaaaaa

SEQ ID NO: 222935 - DNA, 1000 bp, Homo Sapiens
aacagggccacattgtccattacctgtcacaggtcctcatctccagccccaaggaccaaacagtattccaacacctactgcttcagggttctgtcctcatcctggctctgtggccctgccacatggggttcaaggacctcagcaggcatctccagtgcctggacagattccaattcacagagcacaggtgccaccaacatttcaaaacaattaccatgggtcagggtggcattaaaatggactccaaaaacatttttttaaatgttctgtaagataaactgtatatttcatatgtacctgttaaggtactttttaaagcttgtacatgaacctttgtataaaaaacaccagtgctctttcgttgtatttttctcatttttgctttttaaaattcctttaaaaaatgtgctgttaagccagtattaggtatctttattttgtaagtgaacattccagctgtttttttctggcagatctgatgctgatttgatgctgtatgatcttttttttttttttagttaaattcatttagtgaatgttctattattttatacatacacattaagtactcagctaagtaatggcactatgaggattttttttttctttcctgtcagcagcagttctgtgaatgcatcttaggtataaaaatgcaatacagatttttatattttggtgtggacatggctcattttgttttaccagttatttgcaagcaaaatgtaatttaatgtatagatgatttctaatgtctcctgacaaactgtaaatactgcatttcttttgcgtatataattgcttacagcttttctcatttgatatatagcattgtacatatgacaagtcttttgcaaaactgtgtgatctttgtgaaagtagtacagtatatgacctttaatttcttttttattttaaatatactgtcacactgaagcactggttgggcattttaattcatgttaataaatcccaattatgtcagatttaaaaaaaaaaaaaa

SEQ ID NO: 222936 - DNA, 1000 bp, Homo Sapiens
tatagttgattttgctaaatcttaatttaaaagcctcattttcctagaaatctaattattcagttattcatgacaatatttttttaaaagtaagaaattctgagttgtcttcttggagctgtaggtcttgaagcagcaacgtctttcaggggttggagacagaaacccattctccaatctcagtagttttttcgaaaggctgtgatcatttattgatcgtgatatgacttgttactagggtactgaaaaaaatgtctaaggcctttacagaaacatttttagtaatgaggatgagaactttttcaaatagcaaatatatattggcttaaagcatgaggctgtcttcagaaaagtgatgtggacataggaggcaatgtgtgagacttgggggttcaatattttatatagaagagttaataagcacatggtttacatttactcagctactatatatgcagtgtggtgcacattttcacagaattctggcttcattaagatcattatttttgctgcgtagcttacagacttagcatattagttttttctactcctacaagtgtaaattgaaaaatctttatattaaaaaagtaaactgttatgaagctgctatgtactaataatactttgcttgccaaagtgtttgggttttgttgttgtttgtttgtttgtttgtttttggttcatgaacaacagtgtctagaaacccattttgaaagtggaaaattattaagtcacctatcacctttaaacgcctttttttaaaattataaaatattgtaaagcagggtctcaacttttaaatacactttgaacttcttctctgaattattaaagttctttatgacctcatttataaacactaaattctgtcacctcctgtcattttattttttattcattcaaatgtattttttcttgtgcatattataaaaatatattttatgagctcttactcaaataaatacctgtaaatgtctaaaggaaaaaaaaaaaaaaaaaa

SEQ ID NO: 222937 - DNA, 1000 bp, Homo Sapiens
ggcacagccactgaccggcagagcctggctggggtcctcgcctgtcatgtactgcactcgcacggcaaggttgcgcacggagccctggcggctgctgaagttgaggctgttataccttagaccctcagtcatgccagtgcctgctctgtgcctgctctgggccctggcaatggtgacccggcctgcctcagcggcccccatgggcggcccagaactggcacagcatgaggagctgaccctgctcttccatgggaccctgcagctgggccaggccctcaacggtgtgtacaggaccacggagggacggctgacaaaggccaggaacagcctgggtctctatggccgcacaatagaactcctggggcaggaggtcagccggggccgggatgcagcccaggaacttcgggcaagcctgttggagactcagatggaggaggatattctgcagctgcaggcagaggccacagctgaggtgctgggggaggtggcccaggcacagaaggtgctacgggacagcgtgcagcggctagaagtccagctgaggagcgcctggctgggccctgcctaccgagaatttgaggtcttaaaggctcacgctgacaagcagagccacatcctatgggccctcacaggccacgtgcagcggcagaggcgggagatggtggcacagcagcatcggctgcgacagatccaggagagactccacacagcggcgctcccagcctgaatctgcctggatggaactgaggaccaatcatgctgcaaggaacacttccacgccccgtgaggcccctgtgcagggaggagctgcctgttcactgggatcagccagggcgccgggccccacttctgagcacagagcagagacagacgcaggcggggacaaaggcagaggatgtagccccattggggaggggtggaggaaggacatgtaccctttcatgcctacacacccctcattaaagcagagtcgtggcatctcaaaaaaaaaaaaaaaaaa

SEQ ID NO: 222938 - DNA, 1000 bp, Homo Sapiens; identical to SEQ ID NO: 117658

SEQ ID NO: 222939 - DNA, 1000 bp, Homo Sapiens
gtctcatggtgaccgggggccggagggcagaggccaaggagactgagccagaaagcctggaacatgtcaggggccaggaggagcagccaacacaccaggcccctgcagaagctgcgccggagtcagtcggggaagccgagacggctgaggccatgggcagtgccagaggaggtgctgccaacagctggagcgaggccccgctccccgggtccctcctagacgtctctgtcccaaggagtcgcgtgcacctctcgagaagctcctcacagcgtcgctcccggccctcttttcgtcggactccggcctgggagcagcaggaggagcccccagcccccaaccctcctgaggaggagctgtcagctcctgagcagagacccctccagctggaggaacccctggagccaagccctctgaggcatgatgggaccccggtgccagccaggagaaggcccctgggacacgggtttggcctcgcgcaccctggcatgatgcaggagctgcaagcccgtctgggccggcctaagccccagtgactgagacccggtgctctgggagccaggccctgagtgggtgccagaaggcttgctccaatgccactgagccctgctccctctgccactgtggacacatcctctccaccctctgggcctcagtgtcttgatgtatcattcatggagcaggcaaaaccagacgtctgggaataccgtgaacttaaggagtctgattctccgacacaggctggtggaccacctaccccactgagaccacctctcagggtgcctgccctggttcctccccagcctgagtcagctgtctggactgcaaggaggctgggcacgggggctcacgcctgtcaccccagagctttgggaggccaaggtgggaggatcgcttgagaccaggagttcgagaccagcctgggcagcatagcaagatccccatcttttaaaaacaaaataaaacaataaagactgcaaggaaaaaaaaaaaaaaaaaaaaa

SEQ ID NO: 222940 - DNA, 1000 bp, Homo Sapiens
ttactggggtaaaataacagcaataaacctaaccttttaacagggtctaacatgagagttggagtcaaagccattgttatcttttggtgacacccttaaattttaagtcttccagtcttccatgtgaactttaggcccaaagtttcttatgtatcacacatcccccaaataagtgattttttcccagtgctttgtactgtcaactgcattatctttaattatttaaaggtagaattatttaattttgtgatttgttcttccatatgacattgagcaaatagatctgtttcaaaatatgttcccgctatgtggataactcttctttttaaaaagaaaatagagaatagcaaatcttcatgataatcctcaaaagaacaaaatgcttaactttatctcttaatttctaaaggtaaataacctaggttcagcttttgcttaaacattaaatatcttttccattttttaatgtttgtaagctagatatgccagctttgtttctacattgcaaccaaaaactgtttcttttcacttaattataaaaccagtaattcatttactcttgcccaaaactatacactgtatttctgttatagtaacaaaatagagttatgtagaattgtatggaactcaaatttaaaccatgctttcttgtagtactgattgaaacttacacgttttattctactcatagtgagcttattcttattttggattgattttccaaaaccacagcttcagcagcaacaatcagaatgtccaaatgctgtcctttcccttacagagaagaacaatggtaactaaaagctgcatataactagcaataactacattgaacggtgtgcattgttcatgattgttgtgttttaagacttgtatataaactgctttttccaaactctgtataacttttaaatggctggaactactcgtataaggactagactgtatttttgacatgctcctatttttgtaacttgaaaaaataaaattttgccttgtg

SEQ ID NO: 222941 - DNA, 1000 bp, Homo Sapiens
agaaatttatctttagtttttcttattctgtgaaaatatttgttcttatgtcaaagaattatttttcagatatattggtaaagatggactgatattaaaagtcatatttattcttttacccccttactgtgttttgtgattttcatttttggcccaattattacatatcaggttttcctgatttatatttacatgtttgaaaagttcattatatattttagtagcgttacatatattataaatttttgtaacatttaaatgttcacttatgtggcattttctgtttctcattggtaataagcatttctaatataagcaagtaaaaatacaaatttaattacttagaaatgataactaagatcacaatgactgtgtaccctttaaaatatcttttaatttgaggaattacattctatctaaattgtgtgtctgtttttgaaaggtgttgctttcaagtaggtggtttttatttaaagtacttatttttttgaggttaaaatattcagaaactacttttatgcattgtagcagtaatcatttatggaatgcttttgacatgttttaacagggtaaccaaaacttttaggcctgttttttttggttgtccttgttgttatatttttaatggaaatctgttactcaggctggtagcattaaattagctttttaccctcaactcaagtagcaaatatcatggagaacttcagtgtttagcaggctgttaatttcccatctatgaatagcactttatgatgtaggctaaactaagcaaataatgcagcgttatgtggatcattatgcaataaagctgctaaagtcacatttgtggttgatactcaagccttgtacaagcacatatgatgtagacatttttaaatgtgaagctttaacaggaataggatagctgtttcaaaccttgtgcaattgtaaataaattgtttagctgtgtttctttcatttttaataaaaaattaaaaagaaaaaaaaaaaaaaaaaaaaa

SEQ ID NO: 222942 - DNA, 1000 bp, Homo Sapiens
ggcaaattgacaagagtactgtcaagcctaaaccccagttaagtcattcctctagactttcctctgacttaactagagaaactgatgaagctgcttttgaaccagactataatgaaagtgacagtgaaagtaatgtttctgtaaaagaagaggaatcttcaggaaacatttctaaggacctgaaagataaaatagtggagaaagcaaaagagagcctggacacagcagcagttgtccaggtgggcataagcaggaatcagagccacagcagccccagcgtcagccccagcagaagccacagtccttctggaagccagacccgaagccacagtagcagtgccagctcagcagaaagtcaggacagcaagaagaagaagaaaaagaaggaaaagaaaaaacacaagaaacataaaaagcataagaagcataagaaacatgcaggcactgaagtggaattggaaaaaagccaaaaacacaaacacaagaaaaagaagtcaaagaagaacaaagataaagagaaggagaaggagaaagatgaccaaaaagtgaaatctgtcactgtgtaaaaagacagattttttaaattgacttaattactaagtcatctgtattaaattttgttataatgtaaagagattcaagccttgtaaataatgacatggaagaccctgtgctgcacttaaaatattgctgcttgattatttgatttttacatcagagctttataacacgaacttttgtacagaattgtgagttgtgaccatgtaacatgagaggttttgctagggcctattatttttaaccaccattaattagttggggtggagtttactgtaatgtgaaattttcacatttgaattttttaattgcctggcaaaagctgatataagttctaaaatatcagcagaatgatttgctgaattcattacaaccctgttatgtcactttttgattacaataaaagttttcagtaaacttttcaaaaaaaaaaaaaaaaaaa

SEQ ID NO: 222943 - DNA, 1000 bp, Homo Sapiens
ccaaatgaagcctagatcttcagtatcataaaaaggcagagctggccaggcacagtggctcatgcctgtaatcttatcactttgggaggctgagatgggaggatctcttgagaccaggtgttcaagaccagcctcatcaacatagtgagaccccatctctattaaaaaaataaataggcagagctaaactaaccccagtgtcacaaaactcaactggtcatataaatgagtgaaacaggcctctcacacaagcgatgtaaaacagctgggagcagtgggagctgtggcaaactaaagtgcccaagccgcatttaaaaagggcatctgttcagctccatctgcttgctgcggtgcaagaatgctaaaccaggattaccagttcttcacattttttgaaatccaaattttcatgagaaacattctcatttttaaatatcaagaagtgattttaaaatgtttaaatggtgctggttaaacaaacacgtctgcagctggatttagcttgcaagctgccaagttgcaacctctttcattctagaaacttctgtcattttcatcatagcaagtctatgcggacaaaagcctccaaactttccaactgtgtaggccagtacagctggcaaggttcatagaatataatggctatccccctctgccaaataagactatccacaacccagctcagacacagtggttatatgattttgtgtccatacaggagaggccttggtgtcttcacatacattctctgagccaacatctatccagcagccctgacctcctgctataatttaagtctatttccttttaatctaataagagttgatagtaaaaaggcaggtgatggaaatcagtgtataatcacaatggagtatattggcaactccacagcttatagtttgataaaggcaaatacatgaaaaataataatgctactaatgccccaaaaaaaaaaaaaaaaaaaaaaaaaaaaaaaaaaaaaaaaaaaaaaaaaaaaaaa

SEQ ID NO: 222944 - DNA, 1000 bp, Homo Sapiens
ttaaaacctaagcaatatgcattttgcttgaactgcttactgtaactttaacctaagattatagtgaccttattcaggaaaaaaaaaaaatttagtgtaacttcaaagacttgacattcttgtcagaggaaaaaaaatttctagatactgtttgcttgttttttgttgtttgtagaaagataaaatattttggtaataatttaaaatacaagaacgaatatttatttgtccacagttggagatgttggataaatgtcttttctcaaagatcacaggacttttgtctttcatttttgcctttttatttaccatttataaaagatctggtctggattatggaatttaatgtttatcagctctatgtattcctttatagaggcttgaggaagtatttcacataacatgttttataatacttaaccatttatccaaagatatatttacattgggttgtgcccctttcccttagatcatggtaaatttttcttattgaggtaattatgtactacttatatttgaaggaagcttatgacattttacagtagctaaaatgttgagattagaggtacttttactattcttctcaaaggtaactgatcagataattacccaaattattcaagaaaatagatcagaaataaagaacaacataattttctaagaattcattgaaatttatggaatcagctctcgcactgcccatctttgcagttttgaaaaagaaattgcttaatcacaaatgttctacagtctttaaatgtagtagaattagacagtgagatcatctgagtaaattgattggtgattccagagataagactaatattttaaattatttatgatactgattagtataaaaacgtactcatcacagaatttgaagcaaaatacatgtacacttcaaagagtaaatgacaaatgtataaatgctgtagctcaggattatatgtacctttaaaaatacactaataaagattattgttcaaaaaaaaaaaaaaaa

SEQ ID NO: 222945 - DNA, 1000 bp, Homo Sapiens
ccaaaaaaaagcaaacaaacaaatgagaagacacaaaacataattaccttttcctgaaaggtacaggaaataaatatataagcaatgatgagaaactggaggtggctaatggaagtgagacagacaggggtggggggctccattatcttttaaaagcttcctccaaatgctcagtactgggaccaactaataggtagattttaatatggtggttttgttttggttttgtttttactacggtgctgatgtatatgtaatgtctaaaaaaagttatttgtacataagtttttacaatactgcagatatcactgggtctactatctgtaaaaaatatacatataaatatatatatactgtttgtttaaaatagagtatttttatttcattccttaactcatcatcacagcagtggtattgcacttcagatgacatctaattactaatttgtactgtatgacctctggcaacttgctccattttattcagatttttctagttttctgtttttactttgtacattgagcattgcttatttccttttaagaaatgtacagaacgctgaaatgtagaaatgaagtgatgttgacataccacttttaaagaaaacaaaaacaaaaataaaagattatctgaatcaatccaaagtatagtttattttaagatcctcactggagctccaatcttaattaagcagacatattattcctgggttttaattaactgcagttcttttctcaaaattttgatatcattctttaaacatttatttaatgggagagatcaatcattcccagcctttgcattcaactgcacaactgatgatactttctgaatttactgccgcactctgaaggatgtggcaaagggaagggaggaaagtcaactttgcatggaacatagtgcaatccatttgtagattcagtaccataacaattccatttccaactagttcatctggaggtagggaggctccactggaaaaataaatatttttgtcaaa

SEQ ID NO: 222946 - DNA, 1000 bp, Homo Sapiens
ttttgtatatagtaatggactcatggatcatctatgtgtctgtgaagagggaggcaacaaactatggtataagaagccaggaaatttccagggaacattggatgcattttttaaaatcattcgaaatgagggcattaaatctctatggagtggccttcctcctaccctagtgatggcagttcctgccacagttatttattttacctgctatgatcaattaagtgctcttctgagatctaagttaggagaaaatgaaacctgcataccaattgttgctggaattgtagccagatttggtgcagtaactgtgataagtccactagaattgattagaaccaagatgcagtccaagaagttttcttacgtggaactgcatcgatttgtcagcaagaaagtatctgaagatggttggatttccctttggaggggctgggctcctactgttcttagagatgtacctttctcagcaatgtactggtataactatgaaattttaaagaagtggttatgtgagaaatctggtttatatgagccaacatttatgatcaactttacttcaggggcattgtctggttcttttgctgctgttgcaactttaccatttgatgtagtaaaaacacaaaagcagacacaactttggacatatgaaagtcataaaatttctatgcctttgcatatgtcaacctggattataatgaagaacattgttgctaaaaatggattttccggattattttcaggcctaattcctcgcttaattaaaattgctcctgcttgtgccattatgatcagtacatatgaatttggaaaggcttttttccagaaacaaaatgttcgaaggcagcaatactagtgatgctgtttcaacttgaaacaacaactatagccaaagaagatggagactcttaggcaagaatgtttttcaccattattctctcacaatgattttatgtctttctttcctataatttaaataaataatttcagctctacctctaaa

SEQ ID NO: 222947 - DNA, 1000 bp, Homo Sapiens; identical to SEQ ID NO: 117662

SEQ ID NO: 222948 - DNA, 1000 bp, Homo Sapiens
atatggatgcagtacagatggtgattacagaagcccagaaggttgataccagagccaagaacgctggggttacaatccaagacacactcaacacattagacggcctcctgcatctgatgggtatgtgaacccacaacccacaaccttccagctccatgctccagggctttgctccagaacactcactatacctagccccagcaaaggggagtctcagctttccttaaggatatcagtaaatgtgctttgtttccaggcccagataactttcggcaggttcccttacatttactggaccctgttttaccgttgctaagatgggtcactgaacacctattgcacttgggggtaaaggtctgtgggccaaagaacaggtgtatataagcaacttcacagaacacgagacagcttgggaatcctgctaaagagtctggcctggaccctgagaagccagtggacagttttaagcagaggaataacatcaccactgtatatttcagaaagatcactagggcagccgagtggaggaaagcttgaagagggggttagagagaaggcaggttgagactacttaagatattgttgaaataattgaagagagaaatgacaggagcctgctctaaggcagtagaatggtggctgggaagatgtgaaggaagattttcccagtctgtgaagtcaagaatcacttgccggccgggtgtggtggctcacgcctgtaattctagcactttgggagactgaagcgggtggatcacccgaggtcaggagttgaagaccagcctggccaacatggtgaaaccctgtctctactaaaagtacaaaaattagctggatgtggtggtgggcgcctgtaattccagctactcaggagtctgaggcaggagaatcgcttgaacccaggaggcggaggttacagtgagccaagattgcaccactgctctccagcctggggaacagagcaagactgtctcaaaaaaaaaaaaaaaaggaaaaataa

SEQ ID NO: 222949 - DNA, 1000 bp, Homo Sapiens; identical to SEQ ID NO: 116133

SEQ ID NO: 222950 - DNA, 1000 bp, Homo Sapiens
aggctgccatgaggaggtacccaacaacttatactcagagcatgaacactgtacttgtccaagagatgggacggttcaataagttactgaagaccataagagattcgtgcgtaaatattcaaaaagcaatcaaggggcttgcagtcatgtctacagatcttgaagaagtggttagcagcattttgaatgtcaaaattccagaaatgtggatgggtaaatcctacccaagccttaaaccacttggcagctatgtgaatgacttccttgcaagactaaaattcttgcagcaatggtatgaggttggtcctcctccagtcttctggctttctggcttcttcttcacacaagccttcctgaccggtgcccagcagaactacgccaggaaatacacaattcctattgatcttcttgggtttgactatgaagtgatggaagacaaagaatacaagcatcctcctgaggatggtgttttcattcacggattatttctggatggagcttcctggaatagaaagatcaagaaacttgcagaatcgcatcccaaaattctttatgatacagtgcctgtgatgtggctaaagccctgtaagagggcagatataccaaaacggccaagttatgttgctccattgtataagacaagtgagcggagaggagtattatccaccactggccattccacgaattttgtgattgccatgactcttccctctgaccaacccaaggaacactggattggacgaggtgtagcactgttatgtcaacttaattcataaccagaagacatcatttccttgttcctatttcttgttggctggctgagtagagaaagcatattattttactacttaaacctttttttttgtttgtttaaatacatttgactaaagttataattatgaatttacttatgagcaaatgcagctaaacttaatatgactcatacttaaatgtaaggaaatgttctgaaataaataaagactaaagaaaacacactggc

SEQ ID NO: 222951 - DNA, 1000 bp, Homo Sapiens
tctcccatatgtatgctgtatgctatgctaagactcctgaaatatacttactctgtgcttgtgtatgtgaatgttaatgcaactattacctagagtgaactttaagctttattgttgaatgtaattccattatatttccttttgtacacctgtgaaaaagtggagtagtgtttttttaaccattgttaatcagcttttgtgtatgaaagacacagtaaaatttctttcttaaatcaagatactggtgattcaaggaattttatttatggtccagccaagagccatctcgtgccaagacttctgctggcaagggaatggataaagctgttttgttctagtaacaattttggaatgaatactgacaatattccatgagggtgtgcaagcacaaattttaccaatctgacctctttgaagttgcagaatgctttgaaattctaatggtatctgaaatatcagctcatagaaagtaacaaaatttgctgtcaccttaaataagacattttaattttgttataatgtacaatttagaagtttgattaattatattatctatttaggcattaatataaaagaggtaggagtctgttatttaaaaaaagcattaaatttaaaaaaaaactgtcttgtctacttttagcttcattctcccatattttgaagggtgtgtaacttcagctctgcaggattgcatggggtaaaacttgttaccaacacatgtgaaccattgctacattgtaggttgtgatcattttgccccactgaagcccatgtatctgaccttacgtgccttttgaactaggagaatcgggctaatttattaatgatgataattataatgtatctgtacagcactttttacatttgcgaagtgctttccaatccatgttagttactagttattacagctgtaaggataaaacacgtcatgtggattcattttgaattggtgctattggtatttcctctgttattgctaataaatgaaaatggtggtatg

SEQ ID NO: 222952 - DNA, 1000 bp, Homo Sapiens; identical to SEQ ID NO: 222951

SEQ ID NO: 222953 - DNA, 1000 bp, Homo Sapiens
tcctctcggtgctcctgttcgtggcggtgcggctgtgcaggaggagcagggcggcctcggtgggtcgctgctcggtgcccgagggtccttttccagggcatctggtggacgtgaggggcgctgagaccctgtcccagagctaccagtatgaggtgtgtctgacgggaggccccgggaccagtgagttcaagttcttgaaaccagttatttcggatattcaggcacagggccctgggaggaagggtgaagaaaattccaccttccgaaatagctttggatttaatattcagtaaagtctgtttttagtttcatatacttttggtgtgttacatagccatgtttctattagtttacttttaaatctcaaatttaagttattatgcaacttcaagcattattttcaagtagtatacccctgtggttttacaatgtttcatcatttttttgcattaataacaactgggtttaatttaatgagtatttttttctaaatgatagtgttaaggttttaattctttccaactgcccaaggaattaattactattatatctcattacagaaatctgaggttttgattcatttcagagcttgcatctcatgattctaatcacttctgtctatagtgtacttgctctatttaagaaggcatatctacatttccaaactcattctaacattctatatattcgtgtttgaaaaccatgtcatttatttctacatcatgtatttaaaaagaaatatttctctactactatgctcatgacaaaatgaaacaaagcatattgtgagcaatactgaacatcaataatacccttagtttatatacttattattttatctttaagcatgctacttttacttggccaatattttcttatgttaacttttgctgatgtataaaacagactatgccttataattgaaataaaattataatctgcctgaaaatgaataaaaataaaacattttgaaatgtgaaaaaaaaaaaaaaaaaaaaaa

SEQ ID NO: 222954 - DNA, 1000 bp, Homo Sapiens
cgtgggcgccgcagaccgcggctccccggcgttgagcagcgaggcgctggtgcgcgtgctggtgctggacgccaacgacaactcgcccttcgtgctgtacccgctgcagaacggctccgcgccctgcaccgagctggtgccccgggcggccgagccgggctacctggtgaccaaggtggtggcggtggacggcgactcgggccagaacgcctggctgtcgtaccagctgctcaaggccacggagcccgggctgttcggcgtgtgggcgcacaatggcgaggtgcgcaccgccaggctgctgagggagcgcgacgctgccaagcagaggctggtggtgctggtcaaggacaatggcgagcctccgcgctcggccaccgccacgctgcacgtgctcctggtggacggcttctcccagccctacctgctgctcccggaggcggcaccggcccaggcccaggccgacttgctcaccgtctacctggtggtggcgttggcctcggtgtcttcgctcttcctcttctcggtgctcctgttcgtggcggtgcggctgtgcaggaggagcagggcggcctcggtgggtcgctgctcggtgcccgagggcccctttccagggcagatggtggacgtgagcggcaccgggaccctgtcccagagctaccagtacgaggtgtgtctgactggaggctccgggacaaatgagttcaagttcctgaagccaattatccccaacttcgttgctcagggtgcagagagggttagcgaggcaaatcccagtttcaggaagagctttgaattcacttaagtgttaataaggatctactgaggctagtctcgtttaatttgtggaaagtccttttttactgctttgcccattggaggtgtctccttttattagaaagtaaccatcttattccaattctatgcatgttactggtatttataaatgtatgagtttttttgcggtataataaatgtaaattttctttgtattctaaaaaaa

SEQ ID NO: 222955 - DNA, 1000 bp, Homo Sapiens
gctcggtgcccgagggcccctttccagggcagatggtggacgtgagcggcaccgggaccctgtcccagagctaccagtacgaggtgtgtctgactggaggctccgggacaaatgagttcaagttcctgaagccaattatccccaacttcgttgctcagggtgcagagagggttagcgaggcaaatcccagtttcaggaagagctttgaattcagttaagtgttaataaggatctactgagcctcgtcttagttaatctgtggaaagtccttttttactgctttgtccattggagaggtcttttttggtctggttcaaggcaagtagcaagaatagagcaaaatatcaaatccagggatggcttaggtttcattaacagtactggaaagtagttgtgtggctctgaatgttttgtatttcaatcgagaatccttagtcgatagaacattttgtttatatattgattctactttttctgtagttaatccttgcatattctcctttcatcctggcttgccaacgcagtcttaattccgccttttttttttctaatggggagcaaaaagaaattcactgtcttttaatagtgatttcaaatagcttattaaaataactccattcaaattttacattataaagcaatgtagagagagttccaaaccaccaattttataatttcccttgttgaatatattcatataatgtgttctataatatgcccaaagcagctttgtctatagttaacaaagttttaaggatagacaagaatgtgttttctttaataaatagtaatatatcatctttttagggatatagtactcaaatgaaagtaatttagttcattttctgtgttgacatttgcaattaatatttcaatattttatgtgcttatattggccaaaatatggacacaaatatagactaatatgggtaattaccctttggtttatctaaagtgtgttcatgatgactgaggaaaaaaattaaacctatgccattta

SEQ ID NO: 222956 - DNA, 1000 bp, Homo Sapiens
agaacccttcacaaagcatgaaatgtatatgtgtaatgttttatgtcaaacaattatgcttaatatacagtctattaaatgtaagtcttgtttgagatattttaaattgctttccattgttttcaatctctactgagacttcctgagttgattagaaagctgtatgagtgtacctaccctagtctcagaagcatagactgtagagtatctttttaagcatttttaaaaaatgcttttaatgcatcatacactattttaacacttttaatctgagaagaagcatatgaggcatggtattttaggaatgaacaaatagatggtcttagagattcagtaagttcactaagttccactaactaataagtgacaaaactgagcatccatcccagatctgtctgactctgggtcagtgaccctgctccgattccatactgttttctgtcattagatatcacctggcaagtttctgcctaattaaggagaagtcttttatcatatttatactgctgtccaatcttttctatatttagaaataataatgtacatatttatctatggttttattttcttatacaccaaaagtcctgcttttctgggtcaattttcaactattattactaatgctctgatctgtccaaactcaagcggaaaacaaaattgaaagggcaacctgtgccttctcctttcttcagaacatatgactttcatttcccagaaaaaagattaatggtcctgagtaggaatattacataattttgattgcatcattagttaattattttcttcatattgtagattttctgcagtcacccatacttaacatttgtaatacattttcctgatttgaaagtttgtttttaaaagttttctattaattatagtgcactattgaatcaggaaaatttaagaaaaagaatagttagttttaaatgcataatatcaaagagaatcatagatgatcattaaatttttagaaattctcggaagttaaggagaagca

SEQ ID NO: 222957 - DNA, 1000 bp, Homo Sapiens
gtcctctgaaaagcaaattgtgtcagaagataaagagctttttaatcttgaaagcagagttgaaatagaaaagtctctaacacagatggaagatgtcttgaaagcattacaaatgaagctgtgggaggccgaatccaaattgtcctttgccacttgtaaaagctgaactctagtctgtgtcctccattctgcccccgcccttcctccccttatttgttaaatgaagcaacatagtgagacgtcgtctctacaaaaaaaaaaagaaaaaaaaaattagccaggcatgcgaaacgctgaggtgggaggatcagatgagcttgggaggttgaggctgcagtgagccttggtcatgccactactgtgttctagtctgggcaacagagtgagaccttctctcaaaaaaaaaacccaaaattgtagaattacttctatagctatattttatgataaagaagtgattgtttctcaaaatcgcattttaaagacgttttatggtacttgttggaattgggacttaggagttttgattttgataagaaactgggataattttctgaactttttttcctctgtatcacatttatttactatttttaaaaactttgacatttaacacttgggacaacatttattataaatgataagaaaaatcttagaggtttgtctacccacagtgtcatggaatcttctctgaaaactaatccataaagttccctggagaaattggtcagaatgatctgtcagaaccatttgaaaacttgctcaagagcagttgcttatatatagtaggattttactttttcctgcttatgtactactatatgcttaaaaaacctggaggaatacttaccaaagaggagtaaccatctctgagggtgggattctgggggaatttttgtttttttctgttttctataatgtgaaacttttgtagtatgtatttttctaattgaagagaataaagattaaaacaaagtgctttaaaaaaaaaaaaaaaaaa

SEQ ID NO: 222958 - DNA, 1000 bp, Homo Sapiens
gaagagcagaagtgctccactccggtctacccgtggatgcagcggatgaattcgtgcaacagttcctcctttgggcccagcggccggcgaggccgccagacatacacacgttaccagacgctggagctggagaaggagtttcactacaatcgctacctgacgcggcggcggcgcatcgagatcgcgcacgccctgtgcctgacggagaggcagatcaagatatggttccagaaccgacgcatgaagtggaaaaaggagagcaaactgctcagcgcgtctcagctcagtgccgaggaggaggaagaaaaacaggccgagtgaaggtgctggaaagggagggaggacgcgaggggaaaggcctgtggggagccacgggcgtcagagagacccgggaaggaaggctctcgggtgggggagccaggagacctgctctccggcgcagacaggcggggcccagcgctctcctggacgcccccgcccgcacagctcccggcgggtgctctgaggcctcactactcgagcccacccagcatcccgcgcgcccttccttcccgaggaactcgcctcagcctgatcaggcttcctggtgagaactgaggagcggactcacttgatgtttcctggaagcagagcaaaatgctcttgtccctgtcgcgtctcattttgtccatgtcccccgtgcacggttcaatggtagattcgctgtcccctcagcgggggccttgaagactccctgatcccagacctgtcgtctctcccaccccctccccaaagccactggaaggagcacatactacctagaagtaagaagaggagcctcagaagaaaacaaagttctattttattaattttctatgtgttgtgtttgtagtcttgtcttagctctggacgtgaaatacttcgatgatgatgatgatgatgatgatgataataataataataataacaacaacaacaacaataataaagatgtgaaaactcgaaaaaaaaaaaaaaaaaa

SEQ ID NO: 222959 - DNA, 1000 bp, Homo Sapiens
ctgactcccaggacaccactttgagtgaatcttccttcttgcatgagccccagggaaccccgagggacccagctgcaacctccaaaccatcagggaaacccgccccagaaaacttaaagagcccttcgtggatgagcaaaagctgacccgccttttgctgcgtcaggctgggcggatattttcatatgatccctccctcactttcactgtggatttggatcgaccccttacatcttgatttcccttaaacgagtgaagtcatcctaacttttcccctactcttgccatagagaggaggagaagaaactaaccaacatgcagcacaagaaggggagctgtcagtcgtgtggcctgggagaaccaggagccgccggccaggagacacaaaactccgctcccaccgtgtcttcaagaagaaccatgttttaggaagaacgtgcacacataggcgcacacatccagactgttcccttcgcatcctgcagaagagtcctggtggtggcagcctcaccgcggcacacgttctagctcattcttggcctcgcagaaaactctcggatggcaacattaagtcctacctctgttctcgctgcgctttttatttttaaaacacacgaatgaccaaggcttgttccagggaataatgctctgtctgaaagcgtttttccaaaaaaagaatttttcgttttgtgttttggttgggaccccagacgtgtcaagacttttaacccgacagccccaagcactgctgagtaaagtcatcagatgagtagtcccacgctgttgttgagctgactctgtgcccgaatggtggtgcaggcgccctgtcctggttgtgttgttacgtgtttgaccagcacaggggtccggtggggaaaatgtatgggttgttctcagttgttgctaatgctgaagtttaaatctcaaggggaagggcccaaaaaaaaaaaaaaaaaaaaaaaaaaaaaaaaaaaaaaaaaaaaaaaaaaaaaaaaaaaaa

SEQ ID NO: 222960 - DNA, 1000 bp, Homo Sapiens
gcactgctcctgaaaagggggccaagtcaatgtttcaggtcagtctaaaaaccctagggaagctggccatttaaaagaacccaaactgaccatgggtaaatccagttcccctaaataaggcctgaagaaatccacaggtaccattcccactttccttctccctagctttcttagaggtttggccactaaatcttatgagacttgaaccaagtggcttcctctttctaggcttaggacgggttggggttagaaagggtgatcactgaaggccttgcctgctctgacattctgtgacattaaatgtctattctcctgttacctgtggcctgggacaccagtggggtttatcgaggggaccagaggggcctcaggctttcagatgaaatggctcctcctactcacccactttattcctctccatgtaattcaggacaagctgcaacttcccccagcttaacacaatgcccatacctcatacgatatgcgccctcccgttccatccctggccccctcaaacgagacttctcacaaggctgattacagatggtcaaacctggcttccaaggacagaattgcctctcggaagccagctgtggatctgagtccagagttggccacttgtgtgggtcctcacaagcaaagagagcactaaacttgacattgggggtccaccactccaactttgctttctgaaggttttggtgtacattgagccccagaaggaaaggagagtatctgtgagtgggggcctcccttgaccccagtacgaagtctatgccctgaatccccagagtagcccttcctggtgcccaactggcctggggacaaacagcgtccactacatctaggactgccggctaagtggacacacttcttgacctcctaccaggaactttggtaaaagctagctttggggaaggggttgggtgtaaatatgagagggtggagggagaccagctggtagcaataaacatgggtagaactaaaaaaaaaaaaaaaa

SEQ ID NO: 222961 - DNA, 1000 bp, Homo Sapiens
atccgggagttccatggaaaggactgcagaatattgaccctgagaatgaccctgacgtcactcctggcagtgtccccactgggcctaccatcaacaccaccatccaggatgtcaaccgctacctcctcaagagtggaggtaaactgtcagacatcaaatcgacgtggtcctctggccctacctcccacacgcaagcctctctgtctcatgaactatggaaggtgcccagaaacagtactgcacccacgaggccacctccagggttaaccaatcccaagccctcctccacctggggtgccagccccctcggctggaccagctcctactcctcgggttctgcctggagcaccgacacctcaggaagaaccagcagctggctcgttcttcgaaacctcactccccagattgatggttctacactgcggacattgtgtttgcaacatgggcctcttatcacattccacctgaatctgactcaaggcaatgctgtggtccggtacagctccaaggaggaggctgccaaggcccagaagtctctgcacatgtgcgtcctgggaaacactaccatcctggccgagttcgctggtgaagaagaagtgaatcgcttcttagcccaaggccaggcgctgccacccacttccagctggcagtccagcagcgcgtccagccagccgcggctcagcgcagcgggcagctcccatggcctggtacgcagcgacgctggccactggaacgccccgtgcctgggtggcaaggggagcagtgagctgctgtggggcggggtgccccagtactccagcagcctgtggggcccgcccagcgccgacgacagcagggtgataggcagccccacgccgctaaccaccctgctgcctggggacctgctcagcggggagtccctgtaggcgctgccatcatcagcaccaggagagccgacccctcccgggacccctcccggctgggcggccccacagacccgctggaacccagcagcggccgc

SEQ ID NO: 222962 - DNA, 1000 bp, Homo Sapiens; identical to SEQ ID NO: 117674

SEQ ID NO: 222963 - DNA, 1000 bp, Homo Sapiens
ccaggaagttcaagtttgaatgtaacttcagatcatatgaatacagaaattactacttataagaagaaattgagtactaatcagccatgccataagactgtaacagatgaagctcagagcaaccttaacacaacagttggattttcaaagtttacatttacaaggatgaaaaattctcagattctttctcagtttaatcaaaattgtataactggaagtatgtctgataccaaaattacacagggtgtggagaaaaagaaaggtgtcaacccattactggaggaagctgttggacagcaatctttggtgaaactttctgaatctttgaaacaatcttcaaaagaggaagaagagaaaaatagaaagtgttctcctgaagaaattcagagaaaaagacaagaagcactggttcggagaatggctaaagcacgagcctcatctgtaaatgcagctcccacttcatttctttaatgaaatattagttggaagacttcacgaagactgctgataactatctgtgattgataggaaattttttttcttgatttctctgtgagaaatgtaatgctgacttttataaagcctggacttctactttatttaataaatcaatgtttgcaatggtaaatgaaacatttccttggacatgtatttgaaagtcattaaatacaaaagttttggaaattcaggaaagttagcaattatgtacggatattatacagaggaaagtagttatatttttaaatgctattattgcagaggatcatcaaaaaagaggtaatctacgttatttcctattctaatgtcttttcctaataaaaaacttcaactttctaagttagtagagactgtttttgtagttttactttcattaactgttgcttaaggtttttatacacttccagattttaattaatactttcatatttctaggaacatggttgatatgaaataaaggactttttatttgtaaggaaaaaaaaaaaaaaaaaaactcgag

SEQ ID NO: 222964 - DNA, 1000 bp, Homo Sapiens; identical to SEQ ID NO: 117677

SEQ ID NO: 222965 - DNA, 1000 bp, Homo Sapiens; identical to SEQ ID NO: 117679

SEQ ID NO: 222966 - DNA, 1000 bp, Homo Sapiens
cacccgagtgcagctggtgctgccactcctggtggctgaagctgctgcagccccggctttcctcgaggcctttgcagccaatgtcctggagccacgagaacatgcattgctcaccctgttgctggtctacgggccacgagaaggtggccgtggagctccagacccatttcttggggtgaaggctgcagcagcggagttagagcgacggtaccctgggacgaggctggcctggctcgctgtgcgagcagaggccccttcccaggtgcgactcatggacgtggtctcgaagaagcaccctgtggacactctcttcttccttaccaccgtgtggacaaggcctgggcccgaagtcctcaaccgctgtcgcatgaatgccatctctggctggcaggccttctttccagtccatttccaggagttcaatcctgccctgtcaccacagagatcacccccagggcccccgggggctggccctgaccccccctcccctcctggtgctgacccctcccggggggctcctataggggggagatttgaccggcaggcttctgcggagggctgcttctacaacgctgactacctggcggcccgagcccggctggcaggtgaactggcaggccaggaagaggaggaagccctggaggggctggaggtgatggatgttttcctccggttctcagggctccacctctttcgggccgtagagccagggctggtgcagaagttctccctgcgagactgcagcccacggctcagtgaagaactctaccaccgctgccgcctcagcaacctggaggggctagggggccgtgcccagctggctatggctctctttgagcaggagcaggccaatagcacttagcccgcctgggggccctaacctcattacctttcctttgtctgcctcagccccaggaagggcaaggcaagatggtggacagatagagaattgttgctgtattttttaaatatgaaaatgttattaaacatgtcttctgcc

SEQ ID NO: 222967 - DNA, 1000 bp, Homo Sapiens
agaaccacgaggaggaaatgaagaatatgcaaggaagctctggaggggaggtgaccgtagaaatgaatgctgcgccagggaccgacctgaccaaattactgaatgacatgagggcgcagtacgaggagctggctgagcaaaaccgccgagaggctgaggagcggttcaacaagcagagcgcatcactacaagcacaaatctccactgatgctggggcagccacttctgccaagaatgagataacagaactaaaacgtaccctgcaagccctggaaattgagcttcagtcccaactggccatgaaaagctccctggagggaaccctggctgacacagaagctggctacgtggctcagctgtcagaaattcaaacgcagatcagtgccctggaggaggagatctgccagatctggggtgagactaaatgccagaacgcagagtacaagcaattgctggacatcaagacacgcctggaggtggagatcgagacctaccgccgcctgctcgatggagagggaggtggttctagttttgcagaatttggtggtagaaactcaggatctgtaaacatgggatccagggatctggtatctggtgactcaagatctggaagctgttctggtcaaggacgagattcaagcaagactagagtgactaagactatcgtagaggagttggtggatggcaaggttgtctcgtctcaagtcagcagtatttctgaggtgaaagttaaataaggaacttccagatcaacaaaagtgtctttcaaagaaaaaaaaaatcaagaaggacacaagcgaagaaatggcatcaatctaggcatctttctggataatttcaggaaaagcttcagtccagaaatggatgactagccaacttttctgcatcttcttatttcctcattagaatgctcttgaaatagctgaattaacaactttgctttaattgtttctatgcttcaataaatttacttttgcaagttaaaaaaaaaaaaaaaaaa

SEQ ID NO: 222968 - DNA, 1000 bp, Homo Sapiens
tgctctggaaccggcctcggtttggagagatcaatgaccaggacagaactgatcggtacgtccaggctctgaggaccgtgctgaagccagacagcgtgtgcctgtgtgtcagcgatggcagcctgctctccgtgctggcccatcacctgggggtggagcaggtgtttacagtcgagagttcagcagcttctcacaaactgttgagaaaaatcttcaaggctaaccacttggaagataaaattaacatcatagagaaacggccggaattattaacaaatgaggacctacagggcagaaaggtctctctcctcctgggcgagccgttcttcactaccagcctgctgccgtggcacaacctctacttctggtacgtgcggaccgctgtggaccagcacctggggccaggtgccatggtgatgccccaggcagcctcgctgcacgctgtggttgtggagttcagggacctgtggcggatccggagcccctgtggtgactgcgaaggcttcgacgtgcacatcatggacgacatgattaagcgtgccctggacttcagggagagcagggaagctgagccccacccgctgtgggagtacccatgccgcagcctctccgagccctggcagatcctgacctttgacttccagcagccggtgcccctgcagcccctgtgtgccgagggcaccgtggagctcagaaggcccgggcagagccacgcagcggtgctatggatggagtaccacctgaccccggagtgcacgctcagcactggcctcctggagcctgcagaccccgaggggggctgctgctggaacccccactgcaagcaggccgtctacttcttcagccctgccccagatcccagagcactgctgggtggcccacggactgtcagctatgcagtggagtttcaccccgacacaggcgacatcatcatggagttcaggcatgcagataccccagactgaccactcttgagcaataaagtggcctgagggctggg

SEQ ID NO: 222969 - DNA, 1000 bp, Homo Sapiens
ggagtcttatgcagggaaatatgtgccagccattgcacacctcatccattccctcaaccctgtgagagaggtgaagatcaacctgaacggaattgctattggagatggatattctgatcccgaatcaattatagggggctatgcagaattcctgtaccaaattggcttgttggatgagaagcaaaaaaagtacttccagaagcagtgccatgaatgcatagaacacatcaggaagcagaactggtttgaggcctttgaaatactggataaactactagatggcgacttaacaagtgatccttcttacttccagaatgttacaggatgtagtaattactataactttttgcggtgcacggaacctgaggatcagctttactatgtgaaatttttgtcactcccagaggtgagacaagccatccacgtggggaatcagacttttaatgatggaactatagttgaaaagtacttgcgagaagatacagtacagtcagttaagccatggttaactgaaatcatgaataattataaggttctgatctacaatggccaactggacatcatcgtggcagctgccctgacagagcgctccttgatgggcatggactggaaaggatcccaggaatacaagaaggcagaaaaaaaagtttggaagatctttaaatctgacagtgaagtggctggttacatccggcaagtgggtgacttccatcaggtaattattcgaggtggaggacatattttaccctatgaccagcctctgagagcttttgacatgattaatcgattcatttatggaaaaggatgggatccttatgttggataaactaccttcccaaaagagaacatcagaggttttcattgctgaaaagaaaatcgtaaaaacagaaaatgtcataggaataaaaaaattatcttttcatatctgcaagatttttttcatcaataaaaattatccttgaaaaaaaaaaaaaaaaaaaaaaaaaaaaaaaaaaaaaaa

SEQ ID NO: 222970 - DNA, 1000 bp, Homo Sapiens
ggactgttccccccactgtggtaggacaggactggcccacttagtcctcaagctcccaacctgctgtccctcaagccccgcttctaccagcctgtggagttcaggaggcgagacatcctggcctcctttgagaactgatgggatctaccccctgtccacgcgggacagtttctcagaactggttcatagaccacctgtgtcaccaacagccagatacctaatccctgagcctcctttgggaaggtctggggccgagggtctgggaatttttttttttttttttttttgggacagagtctcattctgtcactcaggctagagtgcagtggcatgatcttggctcactgcaagctccacctcctgggttcaagcgattctcttgcctcagcctcctgagtagctgggactacatgcgcacaccaccacgtccggctaatttttgtatttttagtagagacagggtttcaccatgttggccaggctggtcttgaactcctgacctcgtgatccacccgccttagcctcccaaagtgctgggattacaggcgtgagccaccgtgcccggcccaggacttttaaaacaagcatcccaggggattccggtgcctaccagaagtcgcaagctgcttggctctggagggcgcctaggagtcggtgtcgcctaagatgggataatggcttcaggcaactcctagccttccccatatctcctgcctcagcccccctggcccagtgctggggcgtcagctaaacctgagcttccaagaagtcaggttgccaaaggaaggagccttctgagaccctccccaacccacccaggttcccaaggccctgccgtaccctggggaatcaaccaaggagttcttgttctcgaagaaccccaggcctcatgatggtctacggtagaggtccaacaactacagcctgtgggccacatctggccacagcctgatttgtaaataaagttttattggaacacagcaaaaaaaaaaaaaaaaaa

SEQ ID NO: 222971 - DNA, 1000 bp, Homo Sapiens
ggaagaattattatgttgtatgaacaaccccactgaagcattatacaattcttaattccattaagtgatcccactttttttcaataactttttagaaattaagaatcattaaaattgttaagctattttattgttattttctctactttctactagccccaatagttgaactcttataggaaaatcgaaagataaagtgaaagtttatttcaggactgagaaatatcttgaaggttatttattagatgactatctcaaatgaactttttatagacaatgatgaaaacagaattaaagtcaatgtttcctgactcccaggcccctactattccaggccatcacactggcctgttccggagaatatttctctcacaatattattatctacttataattatggtaaacaataaattttattccatccttgtagtatgaaacatgctccaaggaaatggaatctgtcctttaaatggataacagtatgtgttctaatggcataaaatattactggataaaaacagttgtgtcagtgtctctcctaaggtagtaaatataattgacttattctgaacccattctattttgaatctcccctttcctctcacaatacttgaacattttaatcttttggaatattgtctttctttgttataactattcatttttagcttttgtctccagtgcatgatctcatatttttgcttttatttttagtataagaacatttataaaatcatatttttgttactgcaattgttttatttgttgtgtggcaaatgagaaatcctttatttattgtgctgtgatctctctgtgtggaatgccttggtgagagagatgcttattatgactattatcatttctgaccaagcttctattaatgttatttctaataatacactatcttgattgtactctccagaaaatttttctgtcagtgaaaataaaagaaaaattaaagtaaagctaaggaactgtctataagtccaaaaaaaaaaaa

SEQ ID NO: 222972 - DNA, 1000 bp, Homo Sapiens
tctggaatcatttattggttctgagagagaaactaacccattgtataaggattatcatggattgattcatatacggcagattcctcggcttaataacttgatctgtgatgaatcagatgtcaaagacttagcttttaaattaaaaaggaagctattcaccattgaggctggagtgcagtggcacgatctcggctcacggcggcctcgcctcctgggttcaggcggttctcccgcctcggcctccctggtagctgggattacaggcgcccaccaccacgcccagctaatttttgtatttttagtagagatggggttccaccatgttggccaggctggtctcgaactcctgacctcaggtgattcatccgcctcagcctcccaaagtgctggaattgcaggcatgagctaccgcgcccggcctagggctttgtatttcaaagagaacaagtctaaagtgggtgcaagacaactacttgagacaagagaggaacatttatcctccaggcttctcatacttactcaagcagaaagactctgcatggggagaaggttctttacagcattccacatttttaatgagcttccttgcaaaggcgactgcatttgcctccagacttgtcagacacagtgagccgctcaagcaaaatggatctggcagaatccgccaagcggctgggcccaggctgtggcatgatggccggaggcaagaagcacctggacttctagggattcctccttagtcgctgcatgcagaattctatgacactctaattatgattgctaatagcttatgtaaatatttttcttaacaatttgaccctccactccttgaaaaacacaggattataaaatggtgccgccatttctcattttttaactttttacagaactagcacagcagaaatacttttaaatttttccttcatgctctagagaaaataattttatttttaaataaacgccaaaaaatgtcaaaaaaaaaaaaaaaaaaaaaaaaaaa

SEQ ID NO: 222973 - DNA, 1000 bp, Homo Sapiens
tgcccgggaccagtttttacgtcagatggaacagattgtggaaggaattaagcaaagtagaatgaagatggaaaagaaaaagcaagagaacaaaatgagaagagaccagttgaacgaccagtacttggagctgttagaaaagcagaggctatactttaagactgtgaaagagttcaaggaggagggccgcaagaacgagatgctgctgtccaaggtgaaagcgaaggcctcctgaacatccccagccgtggctgtatgtcattgattttacttttaagcaccgtatatcacctacaagatcatgaaatggttctgaaagcgacagtagagagatgcagttgtgatgatttcaacaacctggatgttttctttctcctctttgcttccattcatctctgttggctgctgttgatggagtcagacagtaaacacgtggcttggataacacccatcatcctatgaagaatatagggagtacttgttctctgttgattcaacttttatgtctccagtaacattgcgcttatgaaggtacctgtatttgtatggactctgaataaagaagaattcatttgtttagcaagtattagttcagcaaccactgagaaataagcactgaggaagattcagagacgtgtaaaacacagttcctactgcacaagtacccagcaggtggcccagggaggcagatacagcacacttgaccgcagaactgggctatccaagatgtttttcagtaaacagaaggcatttagctgaaatgatcagcccatgtagtgttggtcacttgggcctttcacctgccatggtaccttttgttcccagctcctccaggtgccagccagcaggcttggtggtgacagcaactggaacgaaagttcagtgttgttttaatttttatacgttactcaagttgatttctcagaaaattgaaaacagaccttgtgctgaggacacgtcaataaaaattataccttcccctacaaaaaaaaaaaaaaaa

SEQ ID NO: 222974 - DNA, 1000 bp, Homo Sapiens
aaatgtatcttaatttgaaatggcatttaaaataaacatatcagtaagtttctatatgtatcaaaactgaaaaaatagtgttccaggctaacatacttttttaatttttattgaaagttgttcaaatataatatattttttgagaggcagtgttaatgatctaggaaaccctgggctgatagagtagaaaggaatatggctagaataacattgccaaacattaggctttatgttttgttatgtttgtgttttcgttgtataattatgaacatgcacaagtttctgcatgaaaagatattaatatattaatcacatgtatgtgccttttggttacatgcattaaatctaacagagttaaattatttcagtggctcttttggcctcttactaggggggatagtcttgtttctagcttaaacaattttttttttgcacaaaatttcatttttaataaaagtggtatcttttgactgagttattgttttgaaaatggtatataggtttccagtaggtcaacaaccatatgtaaatggtttttataaatttctcaatttggggacaagatttttttgtggtctaaattgtgggcttaagattcttttctttatatgtgtacatataatttttttttctttgccacactggagcacaatgtttctatgtaaagaattattttcattctttatccatgagcaccaggctttgctcacttaaaaaaaaattaagccacattaaggagtgagtcttcttttttacaataatgtaaaaattaaactgtttacatttttttaaagcattgtagtttttaaaaattaagctgttttgttttgtgttgttgaatttgaaagcctttgtaaatatcaatataatgtaccaatgaaataacatctggggcaatgaaaccctgatcatgttgttgatggttagcatatgtttctgaaaattaaatatgtattattaaaagttggtctccaacacttgtttaaaaaaaaaaaaaaaa

SEQ ID NO: 222975 - DNA, 1000 bp, Homo Sapiens
cggcattcatcgacttttgttccttgggagaaagaagggaaagaagccaaagagacttcagaagatattggactgctccatgaagtagtgtcattatgtcatatgacatctgacttccaacaaagcttgaacatttcagacaaaaacacaaatggaaaccaaacttaaatcttgcatccaagcttctatggagacattttgagattcaatgcaatctgtataataaacagaattatttgtaggaatggcaactcatactatttaaatttttttttgcatttgcaacatttttctcacttgttcatttcgaggatatatgaaatgcattgatttttaaatataaagcgaattctactgtgcttttaaatcaggtactagtttgtatgtatgtttaaagtatgtattgaccatgagatttcccagtgtttggtgcttaatgccgtttattttatttaagctaagaatgcatatgtaacccatgcacataaccagtagctactatactaatctggttgagcatgaactgatcaagatatcaaaacttatcaaaactagcctgaagctgatgaaactgttaacccactaattgccttaatcttaaagctgttttttaagcatacttaaataatgtatgaaagtatgtataaagtttgaaggataagttattagtgttctgcagagcaataatgcctttttctattcatcaaatcaaggtcaaaattcatcttttcaagattaaaaagctctcttaatggaaatatttaatttgcttatataaagcactatagccatgttttccaaaaagtataaaatatacacttacctttcattcagtgaaatataggaagtgctgaattacaatgtgaagttaatgacttctgtttacaaatgagacactctaacgagttttcagtctctctgtatgcctttgctatttaggggtccaccccaagaaagccaaatacaacataaaccgtcctgacaaaaaaaaaaaaaaaaa

SEQ ID NO: 222976 - DNA, 1000 bp, Homo Sapiens
ctggatgcagaactgcagctgagtgcccgcctcatccagcaggaggtgggccgggctcgggagcaaggggaggcagagcggcagcagctgagcaaggtggcccagcagctggagcaggagctgcagcagacccaggagtccctggctagcttggggctgcagctggaggtagcacgccagggccagcaggagagcacagaggaggctgccagtctgcggcaggagctgacccagcagcaggaactctacgggcaagccctgcaagaaaaggtggctgaagtggaaactcggctgcgggagcaactctcagacacagagaggaggctgaacgaggctcggagggagcatgccaaggccgtggtctccttacgccagattcagcgcagagccgcccaggaaaaggagcggagccaggaactcaggcgtctgcaggaggaggcccggaaggaggaggggcagcgactggcccggcgcttgcaggagctagagagggataagaacctcatgctggccaccttgcagcaggaaggtctcctctcccgttacaagcagcagcgactgttgacagttcttccttccctactggataagaagaaatctgtggtgtccagccccaggcctccagagtgttcagcatctgcacctgtagcagcagcagtgcccaccagggagtccataaaagggtccctctctgtcctgctcgatgacctgcaggacctgagtgaagccatttccaaagaggaagctgtttgtcaaggagacaaccttgacagatgctccagctccaatccccagatgagcagctaagcagctgacagttggagggaaagccagcctgggggctgggaggatcctggagaagtgggtggggacagaccagcccttccccatcctggggttgccctgggggataccagctgagtctgaattctgctctaaataaagacgactacagagggaaaaaaaaaaaaaaaaaaaaaaaaaaaaaaaaaaaaaaaaa

SEQ ID NO: 222977 - DNA, 1000 bp, Homo Sapiens
ctggctccacagaatgtgacctggagtgtctggtgtgccgggagccctacagctgtccccggttgcccaagctgctggcctgccagcatgccttctgcgccatctgcctgaagctcctgctgtgcgtgcaggacaacacctggtccatcacctgcccgctgtgccgcaaggtcaccgccgtccccgggggcctcatctgcagcctgcgcgaccatgaggcggtggtggggcagctggcccagccatgcacagaggtatcgctctgtcctcaggggctggtggatcctgctgacttggcagcaggacaccccagcttggtgggagaggatggacaggatgaagtaagtgcaaaccacgtggcagcccggcgcctggccgcgcacctactcctgctggccttgctcattatcctcatcgggcccttcatctacccgggtgtcttacgatgggtgctcaccttcatcatcgccctggccctgctgatgtccaccctcttctgctgtctccccagcacccggggcagctgctggccctcctccaggactctcttctgcagagagcagaaacacagccacatctcttccattgcctgagtgccctctgatgaggctatccctgcagccctttctgcccttgggcccccggacttccacaatgaacagggtaaggggttacggactaagactggctcctttgggaaatcacatgccagcgggacttgcaagccacaaccgagatggccagcctgggtcaagaattacacgcttggatgacaggcttgcacttgcccttgggatagcatagctaaaactgttggtggctaggggagcagacacaaactacttgaacatgacaagatgggggaagctcctgttcctcttattccaatgttcttggtttttctttatataacttgatgaaagtattgcagtattgatgccattgtagaatagaactggaattccattctttttgcaatttaaaaaaaaaaaaaaaaaaa

SEQ ID NO: 222978 - DNA, 1000 bp, Homo Sapiens; identical to SEQ ID NO: 117688

SEQ ID NO: 222979 - DNA, 1000 bp, Homo Sapiens
tacgccaaggttaggttcattctaagagtctaaaaatttcaaaaaccaaaacaacattataaatggtgtttctcaaggacctttcactacctttttagattgtgcttgtgattttcaggcaagctaaatgtctgatgaagactgctcttcttttgttctgtgtctgacctactaattcctgcccatgcttcaaactcagttcagaaatcactgaaggaaccatccactgccggcctgcctgcaaccacagctgacagctgagttagttaggttttcctgtccctattatttaccagtttgtactgaaatgctttcatgggctgtgcttccagattatgagttctgtggaatcaggaagtatgtctctgtattcttgtattctttggcttttttgtgtagtaaagggactcaagtaatgtttgacagtgaaggatacaacttcattccttgcctgctttgataaattttagtaataaattcccaaaactatcatgttgattaaaaataaaaagtaaccgtaacctcacacattaactttattcaaacaaacagcacttacaggaaatgtaaagtagaaaaagatttctgcccactttacctacggagacatgataaacacgcaaaaaaaacctagaaattaagcaaaaaatagcacaataatttaactgaaagcaacaagggcaaaactgtctccttttgtagtttgtggtaccttatagtagtgctcattcagtttcgtttgcttgataaatctgaggactatgagatatcagagttactagtagggtaggagtgctgtaagggtactgggagaagtaggattagttaggggcagatcttgaattctggccaagaaactgatatttaacccataaagagatagtcactatatgttatcaaataggagaataacacaaatgagaaatgactgttaattcctgatgcataataacagttgtgagctttagtttaatgtaatatttgtaataaaaacgtttgg

SEQ ID NO: 222980 - DNA, 1000 bp, Homo Sapiens
agtcacctgagagaagtaaatactgtataaatgcaaaaaactacgaacagcctacaatttcttcaaaatcacactctccatctccctacacaaaaagacgcatgtgtgagctatctgaagacaccaggcggcggctggcccatttaaatctgggaccctatgagttcaaaaaagaaacagataaacctccatttgtgattagacatgttgatcccccaagtcccagggctgatactttattgggatcttctggaagagactgtgaaagagatggatggtcaagggtgcacaatgatcattctcatcttggctgctgccgacccaaggattataaggttatcaggacaccccatgggagagacttcgatgactctttagaaaaatgtgaagagtatttgagcccaaggtcgtgtagtaagccccggcattcagcgaggaccttgctagtccattcagcaccctcaacaatgccaaagcattctccaagccctgtgttaaatagagcttctctcagggaaagatttcattctgattggtgttcaccttcaaactgcgatgagatccatgaccgggtaaaaaatgtcttgaaatcacatcaggctcatcaaagacatttatatgatgagagagacctagagaaagatgatgaactggaactgaaaagaagtcttttatgtagagactctgcctatgacagtgaccccgagtatagctcatgtcagcagccacgtggcactttccatttggatgacggtgaatactggtccaacagggcagcctcttataagggaaaatcccaccgacccatctttgagaacagcatggacaagatgtacaggaacttatacaaaaaggcctgtagttctgcttcacatacacaggaaagcttctgagaccatccatgataaacctcattagtgtccgtgtcaatttctcaatgaaaatgtttgatgtgatcaatatctgtattcctttttttaaaaaaaatgggattataact

SEQ ID NO: 222981 - DNA, 1000 bp, Homo Sapiens; identical to SEQ ID NO: 117690

SEQ ID NO: 222982 - DNA, 1000 bp, Homo Sapiens
gtatcaatgcttagagaaatatcctttccttaaaaagaaaataacttttatatttagagtacatagggcatgatgtggatttattagtctggtagataaaatgaaaaaccactcaggtaagaacactcactcatggcagtttttaagcatgaaaattgttttctgaaagtatcatcacttttcctttttaaagaaggctgctaattggattttggtagttcttacctcaagaaaacttgaattatttgggggaaagtaggctcaaaagagaatatatctttcacattcacattcagaacccagcaacctggagtccaattttcagtattttaactacctcaataatgctatgaatgtaagatattgggatagagatcccaacttgaaacaacagccagtgcctgtggtaacttaatgtcttgtcaaatacttttattgattggtttatatgccattcttgttatagaagaatatgcattttaaaaaagcttattaataacactttcccaatttatattttaaaaagctaaagaacactggattaataatcttttgggagggtagaataaaataattgattactattgctgcatacccggggtgggatggggtggttggagaaccagaactatttttaaaacattaggtttcaatataaatacaactcacaactgctagctttggggggtgggggaacattgtgtgggttttgttttgtttaatttattgattagtctttaaagtaggctttttttttttttttgagaatactggaccatcattaaatgtgtactgtgaagagattaatatgtatgaagggctttaccaaagtccactaaataaacactactcaagtacagactgcaaaccaaaatgtatctgtgttacgacattaattgcaaatagcaagtatggtgctaaagtctacaccaatggaattagatgagtgctatgcacttaattttaaaataaaactagttttcagcaaaaaaaaaaaaaa

SEQ ID NO: 222983 - DNA, 1000 bp, Homo Sapiens
agcaatacccccttgggggtcacctctctgcttcccccctccccaggcttcagttccttccccctgaccctgactccttgaacgtcactgaaaacggcagctattgcaaggagtgggggccgcgggcagccgctcttcagctcgcggcccaggggagtggcgaggggcgccccaaccccctgcccgcctctccgcacaatacttgaacattcatctgtactgaagtgttacttgaaccgggggaatctcggacctgggggagccggggtgtgaggggactggaccagcttggactgagacctgagaccgggccggtgggcgcccatttgggactgcgccacccccaggcttgttcttgttttactgtattgagcggcggcacccgccggacccgcattatggctgggggcgccagcccaagaatggggaccatgggactcctccagcctggctcttcccactctttcatcgtcatggaaacttgtatcccatttgcccagggaactgccactcctggttgccatggaaatagcagccaacggacacctcccgatgccagtgctaaggctggaaatggccccctcttagttgccatgggaacctagtaacagactctgctggccctccttccctgccccttcctcgagcgcggggtggggcttcgggaccccggggatgagccgggccaggtcccgcccctccgcgcaggcctccggggggccggggcttaccatgtaggggaggggagatctatccacatacctcaggtaacagggaggtgcgcgggtggggggagggctgggcggaccaaaggccggaggggtggggcctggggatagcgagaggcttgagaatggggccgcttgggggagggaagaggcagcccggcgaggggcaagcgggggacccagccgggctgggcccctgggccccgggtctgtacaatacggtttgctataaaactcaaaatcttccagccgggaaaaaaaaaaaaaaaaaa

SEQ ID NO: 222984 - DNA, 1000 bp, Homo Sapiens
ggtcatttatgacctttcacaagtcccacatcctgcccaatggccaggtcttgggatgctgttgcaagatggttctgtgactccatgtgactgtctgatgattgccccagctggggaaaaggctcccatgtctctttctcataaaaccagtgggcaaggccgggcgcagtggctcacgtctgtaatgccagcacttcgggagaccaaggtgggcggatcacctgaggtcaggagttcaagaccagcctgaccaacatggtgaaaccccgtctctacaaaaatatggaaattagctgggcatgacggcgggtgcctgtaaccccagctacttgggaggctgaggagggataatcagttgaacccaggaggtggaggttgcagtgagccgagatcgcgccactgcactccagcctgggtgacagagcaagactccatctcaaaaacaaacaaacaaaaaactagcgggtgaaatgattcagtgacctaaggacagccagagcactaagctgctgggaacccatctgtgctgaaatgtagatttcccaggaaactcaggcttgggacaggcgcctacctgctcctcgggcaccaggtgattaggagaggtcgaatctcatttccacgtgagtgaggataaagactgggctgccaaggaggactcctcataaacattgacaaattgctctgccccgcctgtgatcccagacgactcctgcagtctgggatcctgagtgtcctgtgggttcatctcggatgggcgctgcataaacagcctgcagggaacgtctgggagaaccagcttcacaacagatataataaggaagaagtttgaaatattgcaagaattgcgaaagtgtgacacacagatacaaagtgggcacatgctcgtgggaaaatgttgccaatagacttgcttgactctggagttaccccgaaccttcaatttgtttaaaaaaaaaaaaaaggcaatatcttgacgtgcaataaagtgaactgcaat

SEQ ID NO: 222985 - DNA, 1000 bp, Homo Sapiens
agagaacacacccatcatcacccagaatgagaacggaccctgccccttgctggccatcctcaatgttttgctcctggcctggaaggtgaaacttccaccgatgatggaaatcataactgctgagcagctgatggaatatttaggagattacatgcttgatgcaaagccaaaagaaatttcagaaattcaacgtttaaattatgaacagaatatgagtgatgccatggcaattttgcacaaactacagacaggcctggatgtaaatattgatgacattgtaaaagctgttggtaactgcagctacaaccaactagtggagaagatcatctcttgtaaacagtcagacaatagtgagctggttagtgaaggtgggctttgtagctgagcagtttctaaataacacagccactcaactgacataccatggattatgtgaactaacttcaacggttcaggaaggagaactttgtgtgttctttcggaataatcattttagcaccatgaccaaatacaagggtcaactgtatttgttggtaacggaccaggggtttcttactgaagagaaagttgtttgggaaagcctacacaacgtagatggtgatggaaatttctgtgactcagaatttcatcttcgacctccttcagatcctgaaactgtatacaaaggacaacaagatcagatagatcaggattatcttatggcattatctctacaacaagaacagcagagccaagagatcaattgggaacaaatcccggaaggaatcagtgatttggaactagcaaagaaactccaagaggaagaggacagacgggcttctcaatactatcaggaacaggaacaagcagcagctgctgctgctgctgcttctacacaggctcagcagggccagccagcacaagcctctccatcaagtggaagacaatctgggaatagtgaacgtaaacggaaggaaccacgagacaaaaaaaaaaaaaaaaaaaaaaaaaaaaaacatgt

SEQ ID NO: 222986 - DNA, 1000 bp, Homo Sapiens
tcctgctcccaggagggatcacatctcaccagctccttggcctctttccctccacctcctacaatgcacggctccaggccatgtggggccagagcctcctgccgcccgtgtccacctctttcaccacgggtgggctgcggatccccttccccagggactgcggggaggagatgcagaacggagccggtgcctccaggaccagcaccatcttcctcaacggcaaccgcgagcggcccctgaacgtgttttgcgacatggagactgatgggggcggctggctggtgttccagcgccgcatggatggacagacagacttctggagggactgggaggactatgcccatggttttgggaacatctctggagagttctggctgggcaatgaggccctgcacagcctgacacaggcaggtgactactccatgcgcgtggacctgcgggctggggacgaggctgtgttcgcccagtacgactccttccacgtagactcggctgcggagtactaccgcctccacttggagggctaccacggcaccgcaggggactccatgagctaccacagcggcagtgtcttctctgcccgtgatcgggaccccaacagcttgctcatctcctgcgctgtctcctaccgaggggcctggtggtacaggaactgccactacgccaacctcaacgggctctacgggagcacagtggaccatcagggagtgagctggtaccactggaagggcttcgagttctcggtgcccttcacggaaatgaagctgagaccaagaaactttcgctccccagcggggggaggctgagctgctgcccacctctctcgcaccccagtatgactgccgagcactgaggggtcgccccgagagaagagccagggtccttcaccacccagccgctggaggaagccttctctgccagcgatctcgcagcactgtgtttacaggggggaggggaggggttcgtacgggagcaataaaggagaaactgaggtacccgg

SEQ ID NO: 222987 - DNA, 1000 bp, Homo Sapiens
ctcatcaagagctccttctgcccttgtaagcccatcccagctacttgtaaccatctctaagggcaatggcattgctccctacccattcatctgcatgagctactcttggcttccttaaagggtcaagaaagcaatttttctgcttactagattcattgagatcagctgtgtgagccccaaagtgggacaagggtgtctccttcattacttaaagatattcatgagggtgggtcactacagatgttggggagcaagggctaggatcactttttaaaaaatcaccacttgtggctgtcccagagtgcggttgtacatcctccccacctcataacgcagccactgaggaagagtggttttcctaagaagacattgctggagttgactttcttctgtccaaacaaacaaacaaaaactaaacacacacacaaacccccagaaacccacaatatgtacacgctaaggaaaaactagcacccttctgtccactcagcaataagagggatctcttcccacctaccctacctactcctacccccaacccccttccccattaatgtgagtaatgaattagcctgaccacaggtggtcactgtaggctaatggaaaatacccaagggagggcaaagccccccatcagatgcatgaatgtttgcgaatgttgactgccactgccccacacactgtgtctttatagaattcccctttgcccaccctcttcctgtctccacctggacacaacttgctcaaaggctggtgacttgtgggccattcatctacaaccaagtcctgatggagcaagaggcccacgcctaggggatgcaagaacaacccgtttcttaaatgttaccagtcccagccaatcttacggtgacattacagttaaatttcccaattgaaaacaagcaaacagacactcaaactggtcctgtaattgttgctagactttatgtgttgtacaactaaacattgctgtttgaacagtaaaaaaaaaaaaaaaaaa

SEQ ID NO: 222988 - DNA, 1000 bp, Homo Sapiens
ggacctgcccatgaaggtggtggacatgttcgggtgctgtttgcctgtgtgtgctgtgaacttcaagtgtttacatgagctggtgaaacatgaagaaaatggcctggtctttgaggactcagaggaactggcagctcagctgcagatgcttttctcaaactttcctgatcctgcgggcaagctaaaccagttccggaagaacctgcgggagtcgcagcagctccgatgggatgagagctgggtgcagactgtgctccctttggttatggacacataactcctgggccagaggctaaaaccccaggacccctgctgtccttcccgcagcttcttcttggagtctcagggcaaaccctttcgagcagcacctcccagtggccagaagctgaaatgacagcagtggtactgcctggtaaaagaattggttctgtgacccgggaagctttggttggccttgatttcttctctggaggcttggaaacgcttcctctcttcttctgttcttcacgccccatgcccctgctagcgtattactgttctgtgacttccctgtgacctctgcagaactcctcatcctgcgtttggtctccaggtgtcccctttctgccgtgttcctaacattttgattcctgtcttgaaaaaagcacctgctgcaccgtaagcccagggatgtggcagctgcagtgggcttggctttgtgaggaactgagtgtgtccacgttgggggaacatcatacttgatacacacgtttttatttgcacaaagaaaatgctatttttggagccagaattttcatgtctgatttatggtgattttcttaagaaccagaactgctggcagaaagggggcacccacacgcttagatagccgatgtcttattagagggcagtttgtggttcctgatttggaaattaacattctccaaacattccagtccaatgaaagttttatccgctttcccatataaaaattcttcccatgaaaaaaaaaaaaaaaaaa

SEQ ID NO: 222989 - DNA, 1000 bp, Homo Sapiens; identical to SEQ ID NO: 117701

SEQ ID NO: 222990 - DNA, 1000 bp, Homo Sapiens
gcttatcactgaggtcctaaggaggaagtttgctctaaaggaagaagatatcagtagaaaaggaaattgacaaccctcagctctgcaaactcagtctcatgctcctggaataccttcaatagctgccttcctcaccgcagatgtttctgcctcttaaggatagatcttctgcaacagtcttgctgacaagctagagcttggactgaaagagaagagctggattatatatttcccagacttcaaaccctagcagaagctaaggcttgtgatttgacctgagacatttgtttcaggtaatcgtgtagaatgaagcatcttagtttaaagggtaagagagaagttgtttctggtttttccttgcccctgtgtgaaaataggtcctaaatgactgacttcactgcattagaccctatagctggtctcacaagacactttgtgcccagctgtcactcactctcagcagcttccttgcagcagagcagggctgaggggaaggggctatgaatgtttgtatacgtgttcacagggcacggaaaatcttatgctgctccgtcataaacctacaccaatgcccagcaatcaccctcctcacttccttgtctagatgtagaggtcaggctgctgaaccagccaacacatgggctactgctgggaagcctgggctgttttttttcttaaacacattttatattactgaacaaccaaatctaccctccacggccctgaggccttatcagttccactgattaaaaactttctcttccacggactttaagcccggtaggaaagagagaggaggagggggaaagagcaaaccatctttcttccaggcccttgactgctcctttgggctgggccaaggtttgtatgtaccacaccatgcatgactcagatgccctcaggtccctttctctatggtatgtatactgcttgtgcttgggttgaagcactacctgacattaaaggaaggacttggagagagaaaaaaaaaaaaaaaaaa

SEQ ID NO: 222991 - DNA, 1000 bp, Homo Sapiens; identical to SEQ ID NO: 117704

SEQ ID NO: 222992 - DNA, 1000 bp, Homo Sapiens
tttttttaatcaaaaaacaatttttttaaaaaaaaagctttgaaaatggatggtttgggtattaaaaagaaaaaaaaaacttaaaaaaaaaaagacactaacggccagtgagttggagtctcagggcagggtggcagtttcccttgagcaaagcagccagacgttgaactgtgtttcctttccctgggcgcagggtgcagggtgtcttccggatctggtgtgaccttggtccaggagttctatttgttcctggggagggaggtttttttgtttgttttttgggtttttttggtgtcttgttttctttctcctccatgtgtcttggcaggcactcatttctgtggctgtcggccagagggaatgttctggagctgccaaggagggaggagactcgggttggctaatccccggatgaacggtgctccattcgcacctcccctcctcgtgcctgccctgcctctccacgcacagtgttaaggagccaagaggagccacttcgcccagactttgtttccccaccgcctgcggcatgggtgtgtccagtgccaccgctggcctccgctgcttccatcagccttgtcgccacctggtccttcatgaagagcagacacttagaggctggtcgggaatggggaggtcgcccctgggagggcaggcgttggttccaagccggttcccgtccctggcgcctggagtgcacacagcccagtcggcacctggtggctagaagccaccctgctttagatcactcgggtccccaccttagaagggtccccgccttagatcaatcacgtggacactaaggcacgttttagagtctcttgtcttaatgattatgtccatccgtctgtccgtccatttgtgttttctgcgtcgtgtcattggatataatcctcagaaataatgcacactagcctctgacaaccatgaagcaaaaatccgttacatgtgggtctgaacttgtagactcggtcacagtatcaaataaaatctataacag

SEQ ID NO: 222993 - DNA, 1000 bp, Homo Sapiens; identical to SEQ ID NO: 117706

SEQ ID NO: 222994 - DNA, 1000 bp, Homo Sapiens; identical to SEQ ID NO: 117708

SEQ ID NO: 222995 - DNA, 1000 bp, Homo Sapiens
atgatgacaccaacagagatggtggccccctcagccacgaacctgtgggaaatgaccttgcttttgagtgcaaaggccaattttatgattattttgagaccggatataatgaaagaaacaatgtaaatgaatcttggaaaaagtccttacggaaaaaggaggcttcaccaccaagtaacaaactgtgctgcagcaaaggaagtaaaatatgagccatcttctcaccgaactttgaagcatgcacagcatgatcagttagctctcgtaaattttattttgaatggattttgtagttttgtacaacagataaaattatgccatgaacatgccatgtcgttttaatgcctggagagcagattgcgtaaaacatctgtatagcaggcatcagcgagcttcttataaatgtggtgatttttaccaaggaaactattgacttaatgcttaaaagtatatcatagttttcttacggaaaagatcagtagatgagattgggggacaatgtgcccttgcaatatttccattgccccccaaggagcctgtcactagctaagaaatttctacatgtttgccagttaattagggagttatttggtaagcaaatcaatataaccagcaaagatacctgcttcttctatatgatacaatattttttttaaataaaagactaaagacagggagctagatgaaatggcttaatggtgctgttaagtatttgtacctaacagtcttgtgtgacagatgaaaataggatgtaacataatgaaacacacctgtctaggggcggcaatcaacagtcttacacagagagggtattccctgcaagtttctggcttgcctgtgatgggtgatgaggcttttagagaggtgttatacagggcgatttttggtgccttacttttatcttaatttttgccaatgtgaaaattaaggataaatcagagttacagcagggatttaacaaacaggacaaaaaaaaaaaaaaaaaaaaaaaaaaaaaaaa

SEQ ID NO: 222996 - DNA, 1000 bp, Homo Sapiens; identical to SEQ ID NO: 117711

SEQ ID NO: 222997 - DNA, 1000 bp, Homo Sapiens
tcaagaaatatgatgtaaatatgcaggacaaaaaatacagaacacctttgcacctagcctgtgctaatggacatacagatgttgtacttttcctaattgagcaacaatgcaaaataaatgtccgggatagtgaaaacaaatccccattgattaaggcagtacagtgtcaaaatgaggattgtgcctactattcttctaaactttggtgcagacccagatctgagggatattcgttataatactgttcttcactatgctgtttgtggtcaaagtttgtcattagttgaaaaactgcttgaatacgaagctgatcttgaagcgaaaaataaggatgggtatactccactattagttgccgttattaacaataatccaaaaatggtaaaatttcttctggagaaaggggctgatgtgaatgcttcagataattatcaaagaacagcccttattcttgctgtcagtggtgaaccaccatgtttagtaaagcttcttcttcagcaaggtgtggaattatgttacgaaggtattgtggattcacagctgaggaatatgtttatttccatggttttactgcatagatacccacaattcactgcgagccatggaaagaagaaacatgctaaatagacaccttattcttggcactacatgtgactaaaggaagatatggaacccatttctacaatttctttgccgcttccttgaattggaaaaatgtactttgaaagaaccggttaagtgaactatgataatatttttgctgactacccagttgaagaaaaagtttcgttaattggatgggatttttttttttcacgttagaagaatgaatgaagaaattttaaaagataaacattatattgtgaaccatcagctgaaaagataaatttgtgttcaatatataggagaaaaaatttgtgtcaaaatgttgaatggaataataatgagaaactgtgttaggcatgtattaaaacatttaaataaaataaaaatacatttc

SEQ ID NO: 222998 - DNA, 1000 bp, Homo Sapiens
tggaactcgaggttctgaaggggctcatgcagagcccccagcccatgctgctgggcctcctgggccagtttctggtcatgcccttgtacgctttcctcatggccaaggtcttcatgctgcccaaggccctggctctgggcctcatcatcacctgctcgtcgcctggcggcggggggagctacctcttcagcctccttcttggaggggacgtcaccctggccatctccatgactttcctctctacggtggctgccactggcttcttgcctctgtcttcggccatctacagccgcctgctcagcatccatgagacgctccacgtgcccatctccaagatcctggggaccctgctgttcattgccatccccatagccgtgggcgtgctgatcaagtccaagctccccaagttctcccagctgctgctgcaggtcgtcaagcccttcagctttgtgctcctcctgggcggcctcttcctggcctatcgcatgggggtcttcatcctggcaggcatccggctacccatcgtactggtgggtatcacggtgcccctggttggcctgttggtgggctactgcctagccacgtgtctgaagctgccagtggcccagcggcggacggtcagcattgaggtaggggtgcagaacagcctgctggccttggccatgctgcagctatccctccgccgccttcaagctgactatgcctcccaggcccccttcattgtggcgctgagcggcacctccgagatgctggccttggtcattggccacttcatctacagcagcctgttcccagttccctgaggcctctgggtcaagctttcatcagccccagcccccacactccaccaaagttctcatgcactatgcactcagaaaaatccaggcttatttttttactgattttttattctccagctttcagtgccaaagaggccatgctgagttaggtaggtgggcgctgcccagaaaatatatttcaataaaagagagaagcaagc

SEQ ID NO: 222999 - DNA, 1000 bp, Homo Sapiens
ggtggatctttggcgagcgtctgcacgaccaggagagaggctggttccccagctccatgactgaggagatcttgaatcccaagatccggtcccagaacctcaaggaatgtttccgtgtccacaagatggatgaccctcagcgcagccagaacaaggaccgcaggaagctgggcagccggaatcggcaatgacccccacccagggggccagcgggagcagggcctgcatgagaccccgacagaaggtggggggggggcctctgggaagcacaggccagcacctccccaggtggcaggatctggcttggggtgcccggccctcatccctgcccacgcagtgagtgctcatgtgtcttggccccttgcttgcaaactggataaagggtgcccaagcctctcctgatgcatttgtaaacaagaaggtttcagcagtattacaccacctccctcatgcctccgagggggtggaagggggtgggcacactccagggccccccatgcccctggcccccagggactggaagaggctcccaacccagagtgtccctgtgggaggcaggcagaaggtgacaattgacacgatttcctgcacgcgtcctcctctaccttggaagcagttagaatctaccaggcacagatgaggccgcccttgcctgacggagcttgatgagcagcccttggtctccggttccaggactgagagcccagctgcctctgcccacccttccccaggcctctgccagcctctggctgcacggtcaggccctgccccatggcaggcctgccagagcttggctggggacccctcccgcctctggctccctgatgggctggatgtaacttgtgtcttctagccgcttaaggagcccaggtgttttaaggaatgaattggtcactgcatcttgtatcgattatggttctgagaaaagcaaatatcacttttggctgcattaaaagaagcatcatatataaaataaaaaaaaaaaaaaaaaaaaaaaaaa

SEQ ID NO: 223000 - DNA, 1000 bp, Homo Sapiens; identical to SEQ ID NO: 117712

SEQ ID NO: 223001 - DNA, 1000 bp, Homo Sapiens
ctcacccctggacaaaggtgttcaaatctcgaacgccgccagaggccatcgcgctctgctctagcctgctggagtacaccccatcctcaaggctctccccactagaggcctgtgcgcacagcttctttgatgaactgcgatgtctgggaacccagctgcctaacaaccgcccacttccccctctcttcaacttcagtgctggtgaactctccatccaaccgtctctcaacgccattctcatccctcctcacttgaggtccccagcgggcactaccaccctcaccccgtcctcacaagctttaactgagactccgaccagctcagactggcagtcgaccgatgccacacctaccctcactaactcctcctgagggccccaccaagcacccttccacttccatctgggagccccaagaggggctgggaaggggggccatagcccatcaagctcctgccctggctgggcccctagactagagggcagaggtaaatgagtccctgtccccacctccagtccctccctcaccagcctcacccctgtggtgggctttttaagaggattttaactggttgtggggagggaagagaaggacagggtgttggggggatgaggacctcctacccccttggccccctcccctcccccagacctccacctcctccagaccccctcccctcctgtgtcccttgtaaatagaaccagcccagcccgtctcctcttcccttccctggcccccgggtgtaaatagattgttataatttttttcttaaagaaaacgtcgattcgcaccgtccaacctggccccgcccctcctacagctgtaactcccctcctgtcctctgcccccaaggtctactccctcctcaccccaccctggagggccaggggagtggagagagctcctgatgtcttagtttccacagtaaggtttgcctgtgtacagacctccgttcaataaattattggcatgaaaacctgaaaaaaaaaaaaaaaaaaaaa

SEQ ID NO: 223002 - DNA, 1000 bp, Homo Sapiens
ccccaacacaaaaccagtgtctgggaggttcattttcctttaaactgatccagctggccctgaaccaattgtttttgactgagtatctaggagagcagtaagtggaacttcagacaagcccactgggtctggtccaggtgaggggcagggggcatggggctgggaggtctcaggggccttccctgggggtggccagcctggtagggggcagagaaggaaaagctgaggggggtccctgtgagggaggaaagaaggatcatttgccccgctgggtctcaaaggcagtgagaagagagctgaagaaagctctggctggctgacaggatccctgtgttgtaattggtccctcctttcagctctctagtgagatgcccgtgtctgtgcgtgtgcgtgtgtgtttcatacagctagcattagatgggtgatgtttcttacttatcatccctaactattgcaacttgaccttaaaaagacaaaaccccacaaaactcttcctgccacgggcttgcagattgaagcactttcgatgttgggcgctggcgtttgtgttctgggcaccaccgtgaccctgcccagatggctataatattattttatacacaaaccttttttttcataaatgttataattttgtgtctgtctttataaactattataagtactatttttgttataattcaaaatagatatttagtataaagtttttgctgttaaatatttgttatttagtaaaatatgaattttgctctattgtaaacatggttcaaaatattaatatgtttttatcacagtcgttttaatattgaaaaagcacttgtgtgttttgttttgatatgaaactggtaccgtgtgagtgtttttgctgtcgtggttttaatctgtatataatattccatgttgcatattaaaaacatgaatgttgtgcattttgtgattttggaaatactcaatgtggctcttctataggcttctagaataaaccgtggggacccgcaaaaaa

SEQ ID NO: 223003 - DNA, 1000 bp, Homo Sapiens
ctgcgccgcctgctgcgcttctccgggctacgcgcgctcgcagcgctcgatgccttcgcgctcaacatgactcgcggcgcggcctacggcgccgaccggcccttccacctgtcagcgcgcgacgcccgggaggcggtgcacgcctggcgcgagcgcctgagccgagagcaggtgcgccaggtggaggccgcctgcgctccagccatgcgtctgctcgcctaccctcgcagcggagaggagggcgacgcggagcagcccagggaaggggagacgccgctggagatggatgccgacggcgccacgtagcctcccatccctgtccccggcacggatccgggtcagtcaccacgaacaggggcactcggcatgctgccccagcactggagaagcagcgctgtgggggcaatctgtcacactctcagagtctgggacttgacttgctaccaacaactgctgtgcaattctgctgagcaggaatatcatgagctgttcaataatgacggacgcattggttgagatgaagtttccagtaaggaagtgacagtgcaatgtggatatttatggctgtaaaataggaagagctttagttcccaggctgaacctgccactgctggagccatttcaacaaggcatcctcacaacaaagaagagatgtgatttggtaccatttcacaccagcaggtgtctggacgaaaacatcaatgtgaataagggccaagtgcagtcctgtcttgattaaattacttaataatattattaaataataataggtctgggcagtattgtttttaacctgactcatccagctgtccttcaaatagctccgtctccctctacccagaactgatttttaaaaagaagtaatttttctccctgggctgggaaaaccctaatgaactgaaacacacttttactttaaaatttttctgtctggcgtttttgtaatcatactattaaatgactctggagtcatgttaatgaaaaaaaaaaaaaaaaaaaa

SEQ ID NO: 223004 - DNA, 1000 bp, Homo Sapiens
ctgtgccagcgtcccaggaaggaagccaaccctgagcgagcctgtcctctgtggcaggtccacacggtgtgggtgggcagggcttggacccccgtctccatggcaggtccatacagcatgggtggcagggtttggacccgcccagcagcaccacggaccccagccactctcgggggcagacgtcagaatccgttcctgagcagctcctgtgccctgggggcagtcacagagccccccaacacccccgtgctctgcaccagcctctccctccacacccgaagcaggcgtccatctgtgtcctcctggcagcccctcaaacacacaccaccccatgtcacacgggtatccagagcaaggctggatctgggctaggtgacccctggggcctcagacctctgagtgggccccagagcccagctgaggaagccacacagcctccaggacgtggcacggttcccctccacttggctgcaagtcgcctgccatggggcgaggaggcctgcaccccagtataagggcctccccagctgagtaagaagctgcttcccctcctctcataggccaagcctattgtgtgaaaccatctcatggtcttggtgacgtagaccatttttgaaaccgtctcatggtcttggtgacgtagaccgtttgcttctttaactccagccgcggaatgacattagtggaaccgggctagggaactgctggaagttcaggatgccaccaccttgaacacctaggccagggatccccaccatgtcccgggtttctttcttcgagagtatagaaccgttcattcttgctttgtgtcccattccatctcttgaaaaaatgtagtctttgaatgtgtgaaaatctagggacattcaatctagtcttttaaattatttttccatatttatatttttaaataaatgcatatattgagtcttaaaaaaaaaaaaaaaaaaaaaaaaaaaaaaaaaaaaaaaaaaaaaaaaaaaaaaaaaaaaaaaaaaaa

SEQ ID NO: 223005 - DNA, 1000 bp, Homo Sapiens
accagcattgggctacagttttgcggctggcactattgatggagttggaggcctcaattttacacaggggaaaacagaaggggatccattttgggacaccattcgggaccagatcctgggaaagccatctgaagaaattaaagaatgtcataaaccaaagcccatccttcttcacaccggagaactatcaaaacctcacccctggcatccagacattgttgatgttcagattattacccttgggtccttggccataactgccatccccggggagtttacgaccatgtctggacgaagacttcgagaggcagttcaagcagaatttgcatctcatgggatgcagaacatgactgttgttatttcaggtctatgcaacgtctatacacattacattaccacttatgaagaataccaggctcagcgatatgaggcagcatcgacaatttatggaccgcacgcattatctgcttacattcagctcttcagaaaccttgctaaggctattgctacggacacggtagccaacctgagcagaggtccagaacctccctttttcaaacaattaatagttccattaattcctagtattgtggatagagcaccaaaaggcagaactttcggggatgtcctgcagccagcaaaacctgaatacagagtgggggaagttgctgaagttatatttgtaggtgctaacccgaagaattcagtacaaaaccagacccatcagaccttcctcactgtggagaaatatgaggctacttcaacatcgtggcagatagtgtgtaatgatgcctcctgggagactcgtttttattggcacaagggactcctgggtctgagtaatgcaacagtggaatggcatattccagacactgcccagcctggaatctacagaataagatattttggacacaatcggaagcaggacattctgaagcctgctgtcatactttcatttgaaggcacttccccggcttttgaagttgtaactatttagtga

SEQ ID NO: 223006 - DNA, 1000 bp, Homo Sapiens
cgccctcatgaagctgcagttcccactcactttctcaggcacagtcaggcccatctgtctgcccttctttgatgaggagctcactccagccaccccactctggatcattggatggggctttacgaagcagaatggagggaagatgtctgacatactgctgcaggcgtcagtccaggtcattgacagcacacggtgcaatgcagacgatgcgtaccagggggaagtcaccgagaagatgatgtgtgcaggcatcccggaagggggtgtggacacctgccagggtgacagtggtgggcccctgatgtaccaatctgaccagtggcatgtggtgggcatcgttagctggggctatggctgcgggggcccgagcaccccaggagtatacaccaaggtctcagcctatctcaactggatctacaatgtctggaaggctgagctgtaatgctgctgcccctttgcagtgctgggagccgcttccttcctgccctgcccacctggggatcccccaaagtcagacacagagcaagagtccccttgggtacacccctctgcccacagcctcagcatttcttggagcagcaaagggcctcaattcctgtaagagaccctcgcagcccagaggcgcccagaggaagtcagcagccctagctcggccacacttggtgctcccagcatcccagggagagacacagcccactgaacaaggtctcaggggtattgctaagccaagaaggaactttcccacactactgaatggaagcaggctgtcttgtaaaagcccagatcactgtgggctggagaggagaaggaaagggtctgcgccagccctgtccgtcttcacccatccccaagcctactagagcaagaaaccagttgtaatataaaatgcactgccctactgttggtatgactaccgttacctactgttgtcattgttattacagctatggccactattattaaagagctgtgtaacatctctggaaaaaaaaaaaaaaaa

SEQ ID NO: 223007 - DNA, 1000 bp, Homo Sapiens; identical to SEQ ID NO: 117717

SEQ ID NO: 223008 - DNA, 1000 bp, Homo Sapiens
ctggattttttctggggcctcaatccagtcttgataacagcgaggaaagaggtattgaagaaacaggggtgggtttgaagtactattttccccagggtggcttcaatctccccacctaggatgtcagccctgtccaaggaccttccctcttctcccccagttccctgggcaatcacttcaccttggacaaaggatcagcacagctggcctccagatccacatcaccactcttccactcgattgttcccagatcctccctgcctggcctgctcagaggttccctgttggtaacctggctttatcaaattctcatccctttcccacacccacttctctcctatcaccttcccccaagattacctgaacagggtccatggccactcaacctgtcagcttgcaccatccccacctgccacctacagtcaggccacatgcctggtcactgaatcatgcaaaactggcctcagtccctaaaaatgatgtggaaaggaaagcccaggatctgacaatgagccctggtggatttgtggggaaaaaatacacagcactccccacctttctttcgttcatctccagggccccacctcagatcaaagcagctctggatgagatgggacctgcagctctccctccacaaggtgactcttagcaacctcatttcgacagtggtttgtagcgtggtgcaccagggccttgttgaacagatccacactgctctaataaagttcccatccttaatgactcacttgtcaactagtggactaattaaccctccaccaaaaaaacacaaagtgcttctgtgagaccaattttgtgctaatgagcattgagactgatgctttgtaagtcacaccacaacaaatattgattgagggcgctgcatgtgctgggtacatttcttggcacttgggaatcagtagtcaagcgaaacccttgcctttgagagtttatggtctggataatataaataaacaagtaagcataaaaaaaaaaaaaaaaa

SEQ ID NO: 223009 - DNA, 1000 bp, Homo Sapiens
cttctcttgcagtatttggatttgcttgaaaccgggaaaactgttcccattaggcttgttaatgtcagagtgacactattatgaatctttctctccctttcctctgcctgtttcttctctctttctccttcaaacttgctctgcagctaaggaaggtgagtctactttccctgaggctttggggtcagagtatatgttgtttggagaaagagggcaatcaggactcttctgggacccagatgagttcttcactagcccttctgaaccccttgctccataattggtcttttatcctggctctgaatgaccctgcaggtcatcatggttttctttttttattgtttttttttttctgagacagagtctcactctgtcacccaggctggagtgcagtagcgcgatctcagctcactgcaacctctgcctcccggatttaagcgattcttctgcctcagcctcccgagtagctgggactacaggtgtgccaccacgcctggctgatttttgtatttttagtagagatggggtttcaccatactggctaggctggtctcgaattcctgacctcaggtgatccacccacctcggcttcccaaagtgctaggattataggcttgagctactgtgcccggcccatggtgtttttctttagggctcttcctacagccttgagaagtagataggcatcagagtatggtactataggaatcagaaaaattcaaaacaaatgtggattaagtgtttaggctctatgtggctcacgcagccagaatccttaagtctgtgtgtttctgtgtctcaagactgggctcacattctggctttgtccataacaatgctctgggatttcagggagttccctcatttgtaaaatgagggggtcagagcaggtgatatccatgtttcttccctttctgatattgttgtctgtggcatattctttgtatggcgaatttaataaattatattaatgtgtctctttgaaaaaaaaaaaaaaaaa

SEQ ID NO: 223010 - DNA, 1000 bp, Homo Sapiens; identical to SEQ ID NO: 117719

SEQ ID NO: 223011 - DNA, 1000 bp, Homo Sapiens; identical to SEQ ID NO: 117720

SEQ ID NO: 223012 - DNA, 1000 bp, Homo Sapiens
acaggttttaggataatttaaatatcaaaaattgattgttatacttaacacattaggtataatttatcatttatctgaaatcacatgtagcagattgcatagtctgtaatcctctcagagggaaacttcttgtttaaacagctctatatggatttatacttttatatttataaatttataacttcatacaaatttataaacatttctttataaattgtaatttaatagattatctcagaaaaacctctctgaatgatgacccttccttaatactgggtgatgtgtgaatatttgtttgttggcagacagggtctcactttgtcacccaggctagagtgcagtggtgcaatctcagctcactgcagcctctgcctcctgagttcaagtgatcctcctgcttcagcctccctagtagctgggactacaggtatgcaccaccatgcctggctaattttttgtattttttgtagagatggggtttcgccatgttgaccaggctggtcttgaactcctggcctcaagggatccgtccgcctcagcctcccaaagtgctgggattacaggcataagccactgcgcctggccttgatgtgtgaatatttgagaggtcataagcagtggttttggccataccgtattataccatatacatcagtaagagctcatcttggaacctgttttgcagtttcttgcagtttcaaaaattaaagacctacatcacagggttaatgtgaagaaagctttatttttcaaatgagtatttaatgaaagtatacataaccaatgttgggtatacagatgcttctcaacttatgatgggtttaggtccagataagcccactgtgagttgaaaataccaaaagtcaaacatcatagcttagcctaccttaaaagggctccgaacactacattagcctacagttgggcaaaatcgtctaatacaaagcctattttataataaagtatgttgaatatctcatgtaaaaaaaaaaaaaaaaaa

SEQ ID NO: 223013 - DNA, 1000 bp, Homo Sapiens
aaacatccctattctctactttcacctttttttttcttttaatccttttggtagaaatcaggttacaaagcaaaaccacaatatcagcaacacttcctaatcaaaattaagcattgaatatttgtttaagcttagttcagaagcaacgctcctacaggacttgacatttgctagttagaatatccctactcttctaaataatttgaaagtatagagcagtaacacagtaacagtgagcacagccaagcctgacactactaaatgatttggtagtgaagccaggacatctacccttgactattttttatgttatttatttattagtttgtccatttgtaacatgtatagatctgtcctgtgagcatttctgatgaatctatggttcttacagaaatttttcaaaggaatcaatttagagatagagttttcatatacttacattaacttattaatgaaatctgtttgcatcagtgcttactgtgacacattaattagcttgattaatttagattagaatcattaacatcatgaaaaataaaagtactacatttctaacgtattcccattgcaggtgttaggtattttttctgtcaacacctctcttttgaattctacatttgagaaataagcatggaaatattagctgccccgtctgccattcaccaggaaaaatttctatggcaattttgtaccatgaagtaaactgttacaatagtttctgagaagcatactataactctgatcttccattgagaataacaaaaataaatatcaattttacacctcatatgtcttcttagttctgaatgattagaagaacttgcatgtatttttatcctagaaggtttaaataatacatcaaagttattttcttccaaatgtaattttatgtctgctttaaggaaaataaaataaaatattaataggaaaaaaaaaaaaaaaaaaaaaaaaaaaaaaaaaaaaaaaaaaaaaaaaaaaaaaaaaaaaaaaaaaaaaaaaa

SEQ ID NO: 223014 - DNA, 1000 bp, Homo Sapiens; identical to SEQ ID NO: 117725

SEQ ID NO: 223015 - DNA, 1000 bp, Homo Sapiens
tcgtcctaactttaaatttttcagtgtgagcatacgaggctgatgactgccctgtgctggccaaaagatttttattttaaatgaatagtgagtcagatctattgcttctctgtattacccacatgacaactgtctataatgagtttactgcttgccagcttctagcttgagagaagggatattttaaatgagatcattaacgtgaaactattactagtatatgtttttggagatcagaattcttttccaaagatatatgtttttttcttttttaggaagatatgatcatgctgtacaacagggtagaaaatgataaaaatagactattgactgacccagctaagaatcgtgggctgagcagagttaaaccatgggacaaacccataacatgttcaccatagtttcacgtatgtgtatttttaaatttcatgcctttaatatttcaaatatgctcaaatttaaactgtcagaaacttctctgcatgtatttatatttgccagagtataaacttttatactctgatttttatccttcaatgattgattatactaagaataaatggtcacatatcctaaaagcttcttcatgaaattattagcagaaaccatgtttgtaaccaaagcacatttgccaatgctaactggctgttgtaataataaacagataaggctgcatttgcttcatgccatgtgacctcacagtaaacatctctgcctttgcctgtgtgtgttctgggggaggggggacatggaaaaatattgtttggacattacttgggtgagtgcccatgaaaacatcagtgaacttgtaactattgttttgttttggatttaaggagatgttttagatcagtaacagctaataggaatatgcgagtaaattcagaattgaaacaatttctccttgttctacctatcaccacattttctcaaattgaactctttgttatatgtccatttctattcatgtaacttctttttcattaaacatggatcaaaa

SEQ ID NO: 223016 - DNA, 1000 bp, Homo Sapiens
ccagagctcggaggtgcccggggctgctgctgagggatcgggagggagtggggtcggcataggagatcgcttcaagattgaggggcgtgcagttgttccaggggtgaagcctcaggactggatctcggcggcccgagtgctggtagacggagaagagcacgtcggtttccttaagacagatgggagttttgtggttcatgatataccttctggatcttatgtagtggaagttgtatctccagcttacagatttgatcccgttcgagtggatatcacttcgaaaggaaaaatgagagcaagatatgtgaattacatcaaaacatcagaggttgtcagactgccctatcctctccaaatgaaatcttcaggtccaccttcttactttattaaaagggaatcgtggggctggacagactttctaatgaacccaatggttatgatgatggttcttcctttattgatatttgtgcttctgcctaaagtggtcaacacaagtgatcctgacatgagacgggaaatggagcagtcaatgaatatgctgaattccaaccatgagttgcctgatgtttctgagttcatgacaagactcttctcttcaaaatcatctggcaaatctagcagcggcagcagtaaaacaggcaaaagtggggctggcaaaaggaggtagtcaggccgtccagagctggcatttgcacaaacacggcaacactgggtggcatccaagtcttggaaaaccgtgtgaagcaactactataaacttgagtcatcccgacgttgatctcttacaactgtgtatgttaactttttagcacatgttttgtacttggtacacgagaaaacccagctttcatcttttgtctgtatgaggtcaatattgatgtcactgaattaattacagtgtcctatagaaaatgccattaataaattatatgaactactatacattatgtatattaattaaaacatcttaatccagaaaaaaaaaaaaaaaaaaaaaaaa

SEQ ID NO: 223017 - DNA, 1000 bp, Homo Sapiens
agatgcatggaaattatgaatgtagaagcaggagattccagagataccattggaaaagaaacttttcatccctttgtgccagaacaccatttaattaaaggttatctacctagaacgttttggtactggaattacaactattatcctcctgtagagggtcctggttgctgctctgatcttgcagtttcttttcactatgttgattctacaaccatgtatgagttagaatacctcgtttatcatcttcgtccatatggttatttatacagatatcaacctaccttacctgaacgtatactaaaggaaattagtcaagcaaacaaaaatgaagatacaaaagtgaagttaggaaatccttgaaagaaaatcatgaatgaacaaaggtaatatgtctagcactgcactgaaaaaggacttctgcatttctgacatagaacactggaatcccagtgaggaattctaagtgaacattccttatagaaacctttcacatgaatgactataaactgaagctttaaatgagctgtgaagtgtgttaaaatgtgttttgatacagtaatatataaatatgtctatatatatgaggaacttgtgttttttaaatggtggccaggtagaggaactagaaaagagattttgttgcctgttttctgaccatctgtgttattgtcactgagaaactaaaatagtaaatttactaaaactacactgcaccatgttagtaataaacagatctgccttaaagaaaagaaaattttagaaagaaatattgttgctcagtgttgttaatatagctcaagaattgagtttatatttgcagtatgctataaatgatacccccctaccacacccacacacacagtttttgtctaatgaaaatgttgctgtgattatttataattggtagtatttcttccagaagaagctaaaataagactggcacttaccctgaagtgcattaataaaaccacactttaaaattaaaaaaaaaaaaaaaaaa

SEQ ID NO: 223018 - DNA, 1000 bp, Homo Sapiens
cacgtgggctcggcgcgatggaggaggagacgcatactgacgccaaaatccgtgctgaaaatggaacagggtccagccctcggggtcctggctgcagcctccggcactttgcctgcgaacagaacctgctgtcgcggccagatggctctgcttccttcctgcaaggtgacacctctgtcctggcgggtgtgtacgggccggccgaggtgaaggtcagcaaagagattttcaacaaggccacactcgaagtgatcctgaggccgaagattgggctgcctggtgttgcagagaagagccgggagcggctgatcaggaacacgtgcgaggcggtggtgctgggcacgttgcacccccgcacctccatcaccgtggtgctgcaggttgtcagcgatgccggctctctcctggcctgttgtctgaatgccgcctgcatggcattggtggatgcaggtgtgcccatgcgggctctcttctgtggggtcgcctgcgccctggactctgatgggaccctcgtgctggatcctacatccaagcaagaaaaggaggcccgggcagtcctgacctttgccctggacagcgtggaacggaagctgctgatgtccagcaccaaggggctctactcagacactgagctccagcagtgcctggctgcggcccaggccgcttcgcaacacgtcttccgtttctaccgggaatcgctgcagaggcgttactccaagagctgaggcaagctggggcaaggggccgctcccattgcctccacccactcaccccctacagcctgaagcaaaccagcagcccagccttgcctctctgacccatgggctccttgagcctgcagctctgtaaccacagggctcctgtggggaggccttggcctgtgacagcccccaggcctgggggcacagatccccccagcaaggataacattcaaaggagctcacatttatggaatggatgaatcaataaattaattcactttaacaaaaaaaaaaaaaaa

SEQ ID NO: 223019 - DNA, 1000 bp, Homo Sapiens
ggggaggaggaggactaaatgaaaagttgttcccagcctgcacatgaacacattcatgacacacaaaactggctggaaggagataagagcactgggtttgagattccctccattaaaacaaccaagacaaagaaaggaggggaaaaaaagataaaaagcaagccagggttccctgccctattgaaactcaaacccagactgccttgggttttatctttcccttacccctggcacctccagagaactgggacctgaaatagtccctccgttctcccctttgaccatgtaataaatgaaccagaagcactgagattaacctatcaacgccctgagaagccttccagcctgcggtgctgtctgctgggaggtcagctggtcaaggcagaggaggagaggaggaaaggatgggggctgaagagcagaagggaggggagacagaggggattaaagaggggaggagagagtgcagagctccaggaaagggtatcagagctgcagccagctctgccctctaccctagggaggccagaaagacacaaacagccctccgggcctttacgctggactctggcttggcaggctccaggcagggtcctctgggaagttactctagaaaacgaagggaggaggagcacaagatcctcagcaacgaacacctgcacttagaaaaagtggacagcttctgccaaccacaccctacccatggtactgtatgctattaactcctggaaacgccccgtaaatgcgagttgtttttgtatttgtgtgttgagatgggccttgtggtttctctgtactcagagcacatttcttgtaattactattgttatttttattgtcatgactgcccctgagctctggtgagaaaagctgaatttacaaggaaagggatgaagttaatatttgcatcacataattatatcattactgtgtatctgtgtattgtactaaatggactgatgctgcgcacatgagctgaaaatgaagagccctcccatcc

SEQ ID NO: 223020 - DNA, 1000 bp, Homo Sapiens
gtctcgagagggccacggggtggtttttatgaccggaatcccgcttcctccctcacgtctgatgtcctgaaggtgcagtcccacctgtacagcccctccccgcccagaactgtgaatggcctgctccaggccatggctgggggcagggagtgaggggacaatttctgagtgaaagagaaagaatggggtcggtggtgaaggtgctctcactttacagaatggagagaacatcgtgtgtgtgtgtgtgtgtgtgtgtgtgtgtgtgtgtgtgtgtgtgtgtgtaaggggaggaaagccaccttgacagcccaggtccctccaggtcacccacagccagtttcaggaaggctgcccctctctcccactaagttctggcctgaagggacctgctttcttggcctggcttccacctctccactcctgtgtctacctggccagtggagtggtccatgctaagtctaacactcctgggagctcaggaggcttctgagcttctcctgtactgtgcatcgtgagggccagagacaggaatgtaaggattggcaactgtgttacctttcaagtttatctcaataaccaggtcatcagggacccattgttctcttcagaaccctatctgggagagaaggcgaaccacctccgggtttccatcatgtcaaggtcacaggcatccatgtgtgcaaaccatctgccccagctgcctccacagactgctgtctccttgtcctcctcggccctgccccacttcagggctgctgtgagatggaattccaggaaagaacttcaggtgtctggaccctttctatctagataatatttttagattcttctgctccctagtgacctacctgggggcaaagaaattgcaaggacttttttttaagggtcagagttttcaaaacaaaagcatcttccctagaaatttttgtgaattgtttgcacttgtgcctgttttaaattaaattgagtgttcaaagcccaaaaaaaaaaaaaaaaaaaa

SEQ ID NO: 223021 - DNA, 1000 bp, Homo Sapiens
acgggcggcgctctgctactggtcccgttaagccagagtagcccaagccctgaagtcactgctcatccggaatggaaatcccgccgaccaactacccagcctccagggcggccttggtggcacagaactacatcaactaccagcaggggaccccgcacagggtgtttgaggtgcagaaggtcaaacaagccagcatggaggatattccaggaagaggacataagtatcgccttaaatttgctgttgaagaaattatacaaaaacaagttaaggtgaactgcacagctgaagtactttacccttcaacgggacaagaaactgcaccagaagtcaacttcacatttgaaggagaaactggaaagaatccagatgaagaagacaacacattttatcaaagacttaagtccatgaaggaaccgctagaagcacaaaatattccagacaattttggaaatgtatctccagaaatgacgctcgttctacatttagcctgggttgcctgtggttatataatatggcaaaattctactgaagacacatggtataaaatggtaaaaattcaaactgtcaagcaagtgcaaagaaatgatgactttattgaattagactacaccattctacttcataatatagcatctcaggagattattccctggcaaatgcaagttctctggcatccacaatacggcactaaagtaaaacataatagccgtctgccaaaggaagtacaactggaataaacaaaaaccctaacactggaagtgtaaacatgtctattgatgtgtatgccaatttcactggcatctagcttatgaggccaaataatcccaaagtgtcactttatataaatgtcttgattacagtatagaactttatagagtccataatacaaagtatcactacataaaaatgtctttaaaacagtaatagtggtatgtatatccaaaataaaaagcttcaatttcagccaaaaaaaaaaaaaaaaaaaaaaaaaaaaaaa

SEQ ID NO: 223022 - DNA, 1000 bp, Homo Sapiens
aagaaagagcacagaaaattctatactatccattgcactggttacttgagaagctggcctccaaatattgttggaatggaagaagaaaggaacagtaagaaagacaacagtaattttacctgccttgtggccattggaagattacagccatatattgttccacagaacagtggagagattaatgtgaaaccaactgaatttataacccggtttgcagtgaatggaaaatttgtctatgtagatcaaagggcaacagcgattttaggatatctgcctcaggaacttttgggaacttcttgttatgaatattttcatcaagatgaccacaataatttgactgacaagcacaaagcagttctacagagtaaggagaaaatacttacagattcctacaaattcagagcaaaagatggctcttttgtaactttaaaaagccaatggtttagtttcacaaatccttggacaaaagaactggaatatattgtatctgtcaacactttagttttgggacatagtgagcctggagaagcatcatttttaccttgtagctctcaatcatcagaagaatcctctagacagtcctgtatgagtgtacctggaatgtctactggaacagtacttggtgctggtagtattggaacagatattgcaaatgaaattctggatttacagaggttacagtcttcttcataccttgatgattcgagtccaacaggtttaatgaaagatactcatactgtaaactgcaggagtatgtcaaataaggagttgtttccaccaagtccttctgaaatgggggagctagaggctaccaggcaaaaccagagtactgttgctgtccacagccatgagccactcctcagtgatggtgcacagttggatttcgatgccctatgtgacaatgatgacacagccatggctgcatttatgaattacttagaagcagaggggggcctgggagaccctggggacttcagtgacatccagtggaccctctagc

SEQ ID NO: 223023 - DNA, 1000 bp, Homo Sapiens; identical to SEQ ID NO: 117730

SEQ ID NO: 223024 - DNA, 1000 bp, Homo Sapiens
atggaggaatagggggtggccctcctccagccaaaaagccagagccagatgctagggaagagcagccgaccggtcccccagcagagtccagggcaatggcattttccactggctaccctggggactttactatccctcggccgtctgggggcggagtccactgccaggaaccccggaggcagttggcagggggtccatgtgtcgggggcctaccaccatatgccaccttccccagacagtgccctcctgggcgaccctacccccaccaggacagcatcccttctctggagccaggcagccactctaaggatggacttcacaggggtgccttgttaccacccccctaccgagtggctgattcctatagcaatggctacagagagccccctgagccagatggatgggctggaggtctccggggccttcccccaactcagaccaaatgcaaacaaccgaactgcagcttctatggacaccctgagacaaacaacttctgttcctgttgttacagggaagaactgaggaggagggagcgggaaccggatggggagctcctggtgcacaggttctgaacgggtggaacactgaagggcaaggaggctaaacaaagttaagctcaactaattggctcatcaagaacacagtccccatgttgagggggaaaatgcagtaatgtttgtgggagcctggctggaaacttttaagtgtgtgcacacaggagtgctgccaggctggcaagagcaggtcggggctggatggcacctcaggggctgtactattcctctgcagagcttgacttgatgaggtttgaggtacaaggggaaaagatggcgattctgtcttataacctcctgggtcccatccagggacctaagagaaagtagcaggggaaggtttggtgtgtgggggtgggaggtgggcagaagtcttggggaggaatgggcaaaggaggttctcagtcaataaaaccaaagttctttaggttgggaaaaaaaaaaaa

SEQ ID NO: 223025 - DNA, 1000 bp, Homo Sapiens
gaacctggactttgaggacccctatgaggacgcggagagccgcttggagccggaccccgcgggccctggggactccaagaaccccggagatgccaagtatggttctcccaagcaccggctcatcaaggtggaggctgcggatatggccagagccaaggcccttctgggcggccccggggaggagctggaagccgacactgagtatttagacccctttgatgctcagcctcatcctgcacccccggatgatgggtacatggagccctacgatgcccaatgggtcatgagtgaacttcccggcagaggggtgcagctctatgacaccccttatgaggaacaggacccagagacagcagatggacccccttctgggcagaagcctcggcagagccgggtgccccaggaagatgaacggccagcagatgagtatgatcagccctgggagtggaagaaagaccacatctccagggcgtttgcagtgcagtttgacagtccagagtgggagaggactccaggctcagccaaggagctccggagacctccgcccagaagcccccagcctgcggagcgtgtggacccagccctgcccctggagaaacagccgtggtttcatggccccctgaacagggcggatgcagagagcctcctgtccctctgcaaggaaggcagctacctagtgcggctcagtgagaccagcccccaggactgctccttgtctctcaggagcagccagggcttcctgcatctgaagttcgcgcggacccgtgagaaccaggtggtgctgggccaacacagcgggcccttccccagcgtgcccgagctcgtcctccactacagttcacgcccactgccggtgcagggtgccgagcatctggctctgctgtaccccgtggtcacgcagaccccctgacagtgaccctcggcccccttttgagtcctcgggcccagaatcgtatcccaaagccctcccatggcctagaaaataaataagttattgttt

SEQ ID NO: 223026 - DNA, 1000 bp, Homo Sapiens
gtcgctgctcttcctcagggatgtttctgccaaagcattcacttcctaaaatatttctcggtccacaaaggacagaatatgtatcctgaaggtcaagtgaaatcccaaatgaaatgtgtggtgctgtgcacagacgcctccctccatctggtggaggctagcgggacccaaggacccaccatcagtgtgcttgttgagaggcctgtaaagcacctggataaaaccatctgtgccgtggccccagtcccagccttacctggcatggtgctcatcttttccaagaatggctctgtgtgccttatggatgtggccaagcgtgaaatcatctgtgcctttgcccctccgggagcctttcctctggaggtcccctggaagccagtgtttgctgtgtctccagaccatccatgtttcctgctccgaggagactattcacatgaaactgcgtccaccgacgatgctggaatccaatattctgttttctattttaattttgaggcctgcccactcctggaaaatatctcaaaaaattgtaccattcctcaaagggacttggataacatggccttcccccaagcactgccactggagaagagatgtgagcgtttcctccagaagagctatcggaagctggagaagaacccagagaaggaggaggagcactgggcccggcttcagaggtactccttgtcgctccagagagagaacttcaagaagtgaggctgccaccgccctgggatctctgaaaaggaggtttcagccacgaggcagctgctcccaggacactgaggccaagagaaatgtaacagagccacagctccacaggcctgcactcggagtctggggcctctgcagagccagcaaggggaaaagtataatctgggggaccttcaaccactaagcctcttgtcagagccctcaggcaggcagatgtgtcacccaaataaacagtgatattgtctccagaaaaaaaaaaaaaaaaaaaaaaaaaaaaaaaaaaaaa

SEQ ID NO: 223027 - DNA, 1000 bp, Homo Sapiens; identical to SEQ ID NO: 117733

SEQ ID NO: 223028 - DNA, 1000 bp, Homo Sapiens
aaggaggagtacaagctgagcctgctgatggccgagtctctgcggggggaccaggtggcacccgtgctgtaccagccgcacctggaggccctggaccggcggctccgcgtcgtgctaaaggccgtccgggactgcgtggagaggaacgggctccacagcgtggtggatgacgacctggacactgagcacagagccgcctcggcgaggtagtgtccgccggccgctgcgctgcccgggacggagacagaggcgccggacctcccagcaagcgcatgcgcccgtcgtgaattcagtgaattcagaggcaggacgggatcatccggagtcgggagctgctgccacaggaggcgaggctccccaggtctcataggacacattttgtcagtgtttgaccagaaaagcttgggaaggaagcgctgtctgtgctcacggacagaggcggccggcgccggaggcattccatcctttctgtagggaaaggagcctttatttactattttgtatttatatttgatgaataagtatataaacagagacgtgtacacagatgccaatcacctaccaaaccaaacacgaggaccgccctccctggttctgggggcccctcaaggccaagctcacccctcaagtgctctcacactcgggacctaattcaagtaaaaaccctttctccttcctggggcctcggctcctggagggctggagggtctcgtctgaggacgggaggaggctctcgctggacgtctggcctgtgcgctggtggacggatgcctacgtggttttggaggacccgatgaccaggcgtcctgcgagtccgcccgctggcctgcagcacccacctcggacttggctgtggacggttggtgcaagtgcatcctgcagggctggctgtgcgcagctgtgggctgacctttgcagagttttgtggaatagtttgcaatgtcataaaagtgcaataaaggtacagcagatgtgaaaaaaaaaaaaaaaaaaaaaaaaa

SEQ ID NO: 223029 - DNA, 1000 bp, Homo Sapiens
gaaactggaaccgtccctggggacctcggcggcacaagccatgcctgcttcccagcgtcagcaggagtcaggagggaaccaggaagcctcttttgactattacaacgtctctgatgatgacgactctgaggaaggggcaaacaagaacacagaggaggagaaaaatagagaggacgtaggcaccatgcagtggctcctcgagcgggagaaggaaagagacttgcagaggaaatttgaaaagaacctcacccttcttgctccaaaagaaaccgacagcagcagcaaccagagagccacccattcagcccggctcgacagcatggacagcagcagcatcacagtggacagtggattcaactccccacgtactcgggagagcctggcttccaacacatcaagcattgttgaaagtaaccgtcgtcagaaccccgctttgagcccggcccatggtggagctggtccagccttcaacttccgagcgagcgcggagcccccgacaaatgaagctgagaagctacagaaaccttccaactgcttgcaagcttctgttactagcgtgtgattgtccttctgcctcagatcttctgtctcattcgatacagcaaagtttacgacactgggactgatgtttacatctttggaaagacaagcatctcaaccacagtttttgtgtttacttaaactgtgctgctaagtagggctagggcaaaaaaacaaaaaatctttatttcagagtattgcttttcacatttatggctctgtagcaactgagtaacagtaggggtgatatgtatacttttgcttcactaattgtatctgagcacacataggaaagtctagacactgtaagtgtaatacgcattttcaatgtcatgcagttgccaattccattttaaaatgccacagatgcgtgttgctcccagtctgtggttaaacggtgccacagaactgatccttgacacttccaaaaaaaaaaaaacaaaacaaaacaaaaaaaatt

SEQ ID NO: 223030 - DNA, 1000 bp, Homo Sapiens
cccccaagctaagaagaagaaaattgacctgattttcaaggatgttctggaggcctcactggaatctgcgaaggtggaagcccaccagttggccctgagcacctcactggtcatcaggaaagtccccaaataccaggatgacgcctacagtcagtgtgcaacaacaatgacccatggtgtgcagaatataggccagacccagggggagggggactggaaggtcccccagggggtctccaaggagccaggccaattggaggatgaagaagaggagccttcatcattcaaggccgacagtcctgccgaggcctcccttgcatctgaccctcatgaacttcccaccacctctttttgccctaactgtattcgcctaaagaagaaggttcgggagctccaggcagaattagacatgcttaagtctgggaaacttcctgagccccccgtattgccaccacaggtactggagctcccagagttctcggaccctgcaggtaagttggtttggatgagattattgtcggagggcagagtacgcagtgggctgtgtggagggtagcctaaagctctctgtggaaaccaccttccgggagacctgaggagtgtaacgtggaggcggctacctccgtgggtgggagcccaggtcctcagtgtctctggcagacccatcggcagctctgccaggtgctccatgtgttgcccttgtatcctccttgtcaataaaggaagttccgctgcagaaggggtgtgtgctgtgttcttgacccgttgcctttctctggtactggtgtcttaccccaaagcccaatttctaaacccagtctttctctgtccccagtctcaagcagggtgtcccactggagagatctcttggcttccctaacttagtccaggaacacagccttgttcttctcttcctgaatctctgtcctgccacacatggtcccagttccctagcctggagttctagaaggatggagagtgaggggatccaggccattca

SEQ ID NO: 223031 - DNA, 1000 bp, Homo Sapiens
ctatatttctcaaacgaagtgaagaaaatagttcaaaatttgtggaaacaaaacagtcacaaactacttccatagcttcagaagatccccttcaaaacttatgtttagcatctcaagaagttcttcaaaaagctcagcaaagtgggagatcaaaatgtctcaaatgtggtggttccagaatgttctactgctatacatgttatgttccagttgaaaatgtacctattgaacagattccacttgtgaagcttccattgaagattgacatcattaaacatccaaatgaaacagatggcaaaagtactgctatacatgcaaaactcttagcacctgaatttgtaaacatttacacgtatccgtgtattccagaatatgaagaaaaggaccatgaagttgcactcatttttcctggacctcagtctatctcaataaaagatatttcttttcatctgcaaaaaaggattcaaaataatgttagaggcaaaaatgatgaccctgacaagccatcttttaaacgcaaaagaactgaagaacaagagttctgtgatttgaatgacagcaagtgcaaaggcacaacactgaaaaaaattatatttatagatagcacctggaaccaaacaaacaaaatattcactgatgagcgacttcaagggttgttacaagttgagttgaaaacaagaaaaacttgcttttggcgccatcaaaaaggaaagccagatactttcctttctacaattgaagccatttactactttctggtagactaccatactgatatattaaaagagaaatacagagggcaatatgacaatcttttatttttctattcttttatgtaccagttgataaagaatgccaaatgctctggagataaggaaacaggaaaacttacacattagtttttaacaagccacttatgtctttttattttgctaacattaataaacttatatttgtgctttgttttttcttaagaaataatcataaaaaaaaaaaaaaa

SEQ ID NO: 223032 - DNA, 1000 bp, Homo Sapiens
aatcatccagataatcaacagctgaagaatgaacaagaagaaagtatcaaagaaagacttgcaaaaagtaaaatagttgaagaaatgctgaaaatgaaagcagacctagaagaagtccaaagtgccctttacaacaaagagatggaatgccttagaatgactgatgaagtcgaacgaacccaaactttggagtctaaagcattccaggaaaaagaacaactgagatcaaagctggaagaaatgtatgaagaaagagagagaacatcccaggagatggaaatgttaaggaagcaggtggagtgtcttgctgaggaaaatggaaagttggtaggtcaccaaaatttgcatcagaagattcagtacgtagtgcgactaaagaaggaaaatgtcaggcttgctgaggagacagaaaagttgcgtgccgaaaatgtatttttaaaagaaaagaaaagaagtgaatcttgaggattccggtcagctacctaggcatcaccttgtttgaagatgtttcttctcttttacaagtaagacctactcctggccacttaggagagctgaatttatggaccttaattattaaatgtttataaggtggtggtaaccacctcaagtttctgatgaacattctgcatccatatacaccctgtgacagtcagcagtctgctattaagtggcctacttcaaggctttgaatcaacttaagggaaaaccttttgtctttgtaaaaataaaagcctgtagctaaggtttacagtggacattagccagatcattttcttcttagattatgccataatctcctttgattcttatggaagttctaacaatatatggtggttccaacacctgcagtgagtttaatgactgacttagtagcaggtacaagaagcaaacttgttaatatagattatttttgtattcttactttaggtattttacttgagcattttccatgactgtaaataaagccattttttaagataaaaaaaaaaaaaaaaaa

SEQ ID NO: 223033 - DNA, 1000 bp, Homo Sapiens; identical to SEQ ID NO: 117735

SEQ ID NO: 223034 - DNA, 1000 bp, Homo Sapiens
agtgattgcctttaagtgtctgtgaacatggagtaatattactatttaaaataggccatttgtatctacctttggtccttaggaaaattcctaaggaagtcaattaatgcactttagatgttaaaagtatttgggctaaggttattattgcctgatatgaaataatatattcttattctcattgtttgaaacctgtctttgaaattagcacctttgttatttatgttgtacttgtgaaaacagtaaaatagtttggatagttatgcaaatgcacctatgtgtaacttccccccaaccccaagctgtttcggaagatatcataatcattctgtgtaacattatgcaaacttctaagcccaaacatgactttgtttttaaaaagttcattaatctaatgtctaggattataaaacatttttttgtgtctaaattggacccaaaacattgaacagtttggggtagtaagctaaatttcatcttgtggagattttgctaaacagactaagacccatgatttagctttgctcaaattagaatgtttagcatgagttgaggtaccaggtagtgttaagtaggttcatcacgctctaaggccgttttttccttagccagacccctgttgatagaccagatacttgagggcaaactgtttgctcctcctcttgaaaatgattaggcacttaaggacagtaaagctgtattttctggaaggaagactgtatcttctggaatagttttctagaaaactagtcatatacaataaaagtatcaaaaatattgggctctaatttgatctgacttagatgtctgagtttgtgttgtttctctaaagattttggcaagactcaagcaatgtggctgactgtaactttattaatttaaaaggtaggaagtaagctacttagtggtttcacctgtgaaataactattttgactgaaatgtaaaataagctattcaacaaagaacatattaaaacatcaaaaaaaaaaaaaaaaaaaa

SEQ ID NO: 223035 - DNA, 1000 bp, Homo Sapiens
atggatgagagaagggagagaataaaatgcaataacgagccagcatttactatgtattttctcctcacctgtctctccatatttaggtcacttaccagtttctgtgcccttttggagcttttgttgagggcttcattctcaccctgtatttctttagccctaaattgacactctctccaaaaatccattccattgtctgtggaccaagatgttctatgtaattcagaagcagaactcttggctaaagggctagtgtggccttcagaaaccattcaattattttctccctacacctttgtcagtttgaaaccagtgaggaaaaaaggtatgttgataagaaacctatattgctaggtagaatttgtacttgttttcttggtagcagttttgaaatattctgtacagtacgttcctattgtttaataataaattcaaaaatatttctaaaaccttaaaaccaactatgccaagcattaagataaacaaatatgatgttctttgacgtaaatcaacgtgatgattctttcacatgtaaacacattttagtgtttctggtttgtcatttttgttgttgttgttgttgttgttatttactctataccctttagcaaaatacagttttaaatttttattgtttttagtagtttcccaactttaagacttatctaatttaactgagaaagaaagcctttttcatatatatatatattggatttctaaggatggtggtttgagccttgattagacttttgatgtgctaagccagacaggcagtctgtacattgatggccatcacaatgcagctttggtttaatttaattcaggcctgctgctgagttatgcacagactttttgttgaccaaaataaaatataaagggttttcttctgtttgacatttgtgttcattttttctctttatgtattacattttaacctatattaaataaatgtttaaatgataatttgcttatgtcttataaaactcagcataagaaaaat

SEQ ID NO: 223036 - DNA, 1000 bp, Homo Sapiens
ccctgcagaaggtgaagggccaagagcgcgtgcgcaagacgtccctggacctgcggcgggagatcatcgatgtgggcgggatccagaacctcatcgagctgcggaagaaacgcaagcagaagaagcgggacgctctggccgcctcgcatgagccgcccccagagcccgaggagatcactggccctgtggatgaggagaccttcctgaaagctgcggtggaggggaaaatgaaggtcattgagaagttcctggctgacggggggtcagccgacacgtgcgaccagttccgtcggacagcactgcaccgagcttccctggaaggccacatggaaatcctggagaagcttctagataatggggccactgtggacttccaggatcggctggactgcacagccatgcattgggcctgccgcgggggccacttagaggtggtgaaacttctgcaaagccatggagcagacaccaatgtgagggataagctgctgagcaccccgctgcacgtggcagtccggacagggcaggtggagattgtggagcactttctatccctgggcctggaaatcaatgccagagacagggaaggggatactgccctgcatgacgctgtgaggctcaaccgctacaaaatcatcaaactgctgctcctgcatggggctgacatgatgaccaagaacctggcaggaaagaccccgacggacctggtgcagctctggcaggctgatacccggcacgccctggagcatcctgagccgggggctgagcataacgggctggaggggcctaatgatagtgggcgagagacccctcagcctgtgccagcccagtgaatgcgtgccccagcccagccagctacccagcccctctctgtgtgcagccggagggtcctaagaatggctcccggagctaactgagggcccagccttttttctgcatgatccaggagcacataccacaaactaccacaataaaaaagctgtttttgctaaaaaaaaaaaaa

SEQ ID NO: 223037 - DNA, 1000 bp, Homo Sapiens
cttctcggacctaagggagagccaggaatcccaggggatcagggtttacagggccccccaggtatcccagggattgggggccctagtggccccattggaccacctgggattccaggccccaaaggggagccgggcctcccagggccccctgggttccctggtatagggaaacccggagtggcaggacttcatggccccccagggaagcctggtgcccttggtcctcaaggccagcctggccttccaggacccccaggccctccaggacctccaggacccccagctgtgatgccccctacaccaccaccccagggagagtatctgccagatatggggctgggaattgatggcgtgaaacccccccatgcctacggggctaagaaaggcaagaatggagggccagcctatgagatgcctgcatttaccgccgagctaaccgcacctttcccaccggtgggggccccagtgaagtttaacaaactgctgtataacggcagacagaactacaacccgcagacaggcatcttcacctgtgaggtccctggtgtctactactttgcataccacgttcactgcaaggggggcaacgtgtgggttgctctattcaagaacaacgagcccgtgatgtacacgtacgacgagtacaaaaagggcttcctggaccaggcatctgggagtgcagtgctgctgctcaggcccggagaccgggtgttcctccagatgccctcagaacaggctgcaggactgtatgccgggcagtatgtccactcctccttttcaggatatttattgtatcccatgtaaaaacaaaaaaacaaaaaacaaagaaaagaaagagattttatagaagaaaatgacacaccaaaaaatccaaatgaaaaacataattgcttcaaaacacttacacagttggaaagttatatgtaagtgaaaatttggaccattgtgtacaaataaaaactaagatgcatgtttaatactcaaaaaaaaaaaaaaaaaa

SEQ ID NO: 223038 - DNA, 1000 bp, Homo Sapiens
attgaattcctccactttcttatatagcctcagatgctgtgatgtctgaccttgtggatatttgcccttggaatttctactttactttctaccgtaattccttctccgtacccaggtcttctctgagagaagctataatttaatctgtgaggaactaaatgacaggagattggtgctaatacgggggaccaagctttgtccaagtgaagcaggcttcgactccttctgagaggtctggtgtgttcctagaatctcaccttttcttcccttgctaaagcatgaagtttggcatttggcacactggaagcctggttgaaatgaaatttgtagcatctgatacaaagccagagacattctagcaagtgcagcagccccttctttctctgtaacagagatatcatttatgtggagatccacaacctttaacagggatccaagatctttgcagttcaatcgaccacataggaatttccaggcaccaaaatgatataacttccttgcttccttgacaaagaagccatcatgggtgtgatccaagatccctgtcgtagtgttgatgatgttagtacatgattttaaaggttagaaccccttctaaatgaatggtctgtggaagattttagtatcttatctgatgcctggtatgatgaggatagaaaatttttccatttttatgtgcctcacaggctgtttgggcattaattttgctttttgagccttaagtgtgttagtaggatggagaaactgtgatggggactgggaacctggatttgtctgattttaggtcactgttccctgggcctgtttttgtgagcccttacacaggaagatataaagagagttctttcatttcactgctaaaatcagtatgtagtatggggaatgtatttgggttgtttttaaagaaaaggggaacagaatcaggagagtgggcaaaggcaataaaatcaaagttcttattaattatttctgagaaaaaaaaaaaaaaaaaaaaaaaaaa

SEQ ID NO: 223039 - DNA, 1000 bp, Homo Sapiens; identical to SEQ ID NO: 117743

SEQ ID NO: 223040 - DNA, 1000 bp, Homo Sapiens
gcgctttaaaaagcatctagagattatcatgaaaataattggagacaaagtcactaggctgctttgtgagaggcagcataccatggctctaaacccgttcacaaaaaacaatgttagagacattaggaattcaggttttgaaaatctttttttcgatttatttgtaatttacataccaaaaaaccacattaaaatagtcctcccttcaacatggctatcttttttcaagttttatatgcatagctctctcagcacttgaatggaaaaactgttacagcatttgggagttgtttttcttttagactttgcagatcttatctcaaggtgactaggaacccagagctaagtatctgtgaggcaatctctgcgaacgctgaacttacctagttggtttctatgaaatatgtagaatgcactgcagtagccattgtaagaaggtactataccggttttttggggcttgttgttgttgtttggtctgagaatgtactgccaacccctcttttataagagagaactgattttgatacatattttaaaatatgatagtacagagttaatggatgttaaaattttatttctttgttttggtaagtagattaaatcgagaatcatataatcagtacatttgagaattatataaccagtatataataatactggacacaaccatttgccatcttttcctgttatcatcccatagagtgggtggggagaatgaatagacataaacctagaataatgataaatggtttttaaaactctatattgaatacattccagctgataatgacttttctttttcaccttggtgatatcagcctcagggtaaaaaaaaaagtttcataaatcttttagttataaacaggaaagttttatattagtgtgtcatttcatttctagactgttgatggtgatgatgataaagaatttggagccaattttgatatatgaatgtattgcttttacatgtgatgattaaagctctccattagcagtt

SEQ ID NO: 223041 - DNA, 1000 bp, Homo Sapiens
cacatggacatcctgtcatagaaaggcttgttacctaccgaaatttgatcaacaagctgtccgttgtggatcagaagctgtcctcagaaattcgtcatctgttgacacttaaggatgatgctgtaaagaaagaactgattccaaaagcaaaatccaccaagcccaaaccaaagtctgtttcaaagacttctgctgctgcctgtgctgttacagatctttctgatgattctgattttgatgaaaaagcaaaactgaagtactataaagaaatagaagacaggcaaaagctaaagagaaagaaagaagaaaatagcactgaagaacaggctcttgaagatcaaaatgcaaagagagctattacctatcaaattgctaaaaataggggacttactcctaggagaaagaagattgatcgcaatcccagagtgaaacacagagagaagttcagaagagccaaaattagaagaagaggccaggttcgtgaagttcgtaaagaagagcaacgttatagtggtgaattatctggcattcgtgcaggagttaaaaagagcattaagcttaaatgaagtttttgcttagcataaggtttttggcagttttggatcaataaatttttacttttaactaaagtcattgtattaatatataatactttaaattttaaaaattcttgtccacaaggaaatttgtctgggttattggacaatttataagaactatgggagcaatatgaaggtgcttgagaaaagagatgatgttgaagttttccaatattctgttgaagttttccaatattaagtattagcttagggaaatttcacagttcattgtggagtgttaaacttagaacatgtgtaacttttcacataaagagaatgcatctttgacagttatcttatttgtaaggcagcctataaaatagttctgaagtattttatttacctaactataattattgggccagatacttgttaataaatgggcttaatgttaacatgga

SEQ ID NO: 223042 - DNA, 1000 bp, Homo Sapiens
gctcccctctggcctatttatatcctggtacctgtagtctgcacctgcagctttgaccgcatccgaggccggccttacaccaccatcctcatgggcatctactttgtgcttgggctcagcagtgttggcatcttctattgcctcatccaccgccaggtcaaacgagcagcacaggcactggaccaatacaagttgcgacaggcaagcatccactccaaccatgtggccaggactgatgaggccatgcctggtcgtttccaggagctggacagcaggttagcatcaggaggacccagtgaggggatttcatctgagccagtcagtgctgccaccacccagaccctggaaggggactcatcagaagtgggagaccagatcaacagcaagagagctaagcagatggcagagaaaagccctccagaagcatctgccaaagcccagccaattaaaggagccagaagagctccggattcttcatcggaatttgggaaggtgactcgaatgtgttttgctgtgttcctctgctttgccctgagctacatccccttcttgctgctcaacattctggatgccagagtccaggctccccgggtggtccacatgcttgctgccaacctcacctggctcaatggttgcatcaaccctgtgctctatgcagccatgaaccgccaattccgccaagcatatggctccattttaaaaagagggccccggagtttccataggctccattagaactgtgaccctagtcaccagaattcaggactgtctcctccaggaccaaagtggccaggtaataggagaataggtgaaataacacatgtgggcattttcacaacaatctctccccagcctcccaaatcaagtctctccatcacttgatcaatgtttcagccctagactgcccaaggagtattattaattattaataaatgaattctgtgcttttaaaaaaaaaaaaataaaaaaagaaaaaaaaaaaaaaaaaaaaaaaaaaaaa

SEQ ID NO: 223043 - DNA, 1000 bp, Homo Sapiens
gaagcttcttgtccaaaacagaattcagcattttatgtggatagtgagttattggttcgagcccttcaagagctgcctctctgcctccgactcaacgttgctgccgaactggtccagggtacagttcctttagaggttcctcaggtgaaaccaaagagaactgatgatggcaagggattagggatgcagttaaaggggcccttggggcctggaggaagggggcccatctttgagctgaaatctgtggctgctggctgccctgtgttgctgggcaaagacaacccaagcccgggtccttcaagggattctcagaaacccacttccccactgcagtcagcaggagaccatttggaagaagaactagatctgttgcttaatttagatgcacctataaaagagggagataacatcttaccagatcagacgtctcaggacctgaaatccaaggaagatggggaggtggtccaagaggaagaagtttgtgcaaaaccatctgtgactgaagaaaaaaacatggaacctgagcaaccaagtacctccaaaaatgttaccgaggaagagctggaagactggttggacagcatgatttcctaaaaaggggaaaaaaagtgcctgaagcaaatcttggttgccttctaacggcaggtgggcataaggctgtccttcaggaccagccagtttacaagcatgtctcaagctagtgtgttccattatgctcacagcagtaaatgcctacctctgtgtttgacatctgaaagaatacattgaagcagcttgttgcatttgtttttctggcttagtaatctaatagatttccttaagggcaggagatagactctggcccttgtttctagcctccttccttgcagtgtttacaacatagccagtgtttacagcatagcagatgctgctgctgattaagagaatagatgcaaacaaggcatgcatttggccaaaataaacaaatgctggtctgtccaaaaaaaaaaaaaaaaaaaaa

SEQ ID NO: 223044 - DNA, 1000 bp, Homo Sapiens; identical to SEQ ID NO: 117746

SEQ ID NO: 223045 - DNA, 1000 bp, Homo Sapiens
aaatgtattcatttgtaatactttggtttaaggcatactttaatttttacgagtttcagaaacagaatttttgtactagggaattcattggtgagagtgttcttttaacctcagaatgtcaaattttggtcttgaaccacagacatccaattacagaaagaatataagcaatctcacaggcctgcaatcggacactgtctctgtgtggttcataggagatgatttttgaggtttgcactcatgcaatttgagaacaccgttgacaagaaggctgagtttacataaatgatctagattgaaactcagctacctttcttcctcatgtggtgtaattacagccctatctggagacagcgaatacagcaaacagattttattacctagttcgctcaaacactacatgaagttattttagttaaagccctcccccaaaagttataaaaccattttatcagggcccaacatgtggcatgcaatgaagagaaaatgtaaagctacagaggttaatgtattgtattataaaatattttaagtgtactcaaaatatcataattgtacagtttatgccaccataatttgaggcctatagatttagcttaagagaacactgttctgtttgaaatgctttctgtcactgaaattggcttaattagtaaccatggataagatgctttagatcagactaggttttaatcattaacttccacaaagaagtcatactttgcgttaggtgtgctggttggatgtgcaggaacttcagcaagcagtaggttttactaagcagatggtcgggcactgcagggcaccaggcaggatcctagggcgcctcttattctgcgttagcatctggtttgctgtatgaccttgcacaagtcacttccttctgagcctcaattttctcatctgtacaatgagattcaaaagttgacctgaaagtcaagtgtgaaaaaaaaaaaagagattaaacaagataattatgaaattcaaaaaaaaaaaaaaa

SEQ ID NO: 223046 - DNA, 880 bp, Homo Sapiens
cgtctgctgcctctcggagaggcacgagggtcccgggtgactgccgcaggctccatcgccctgtggcctgcaggtattgcgagatttatagggaggacgctgggacccccaaaagctgggaaatgggactattggcattcagggatgtggctctagaattctctccagaggagtgggaatgcctggacccagctcagcggagtttgtatagggatgtgatgttagagaactacagaaacctgatctcccttggtgaggatagcttcaatatgcaattcctatttcacagtcttgctatgtctaagccagaactgatcatctgtctggaggcaaggaaagagccctggaacgtgaacacagagaagacagccaaacactcagctttgtcttcttatcttactgaagacattttgccagagcagggcctgcaagtttcattccaaaaagtgatgctgagaagatatgaaagatgttgtcttgagaaattacgcttaaggaatgactgggaaattgtggccatgtgaagatgtgcttgcttcccctttgccttctgccatgattctaagtttcctgaggcctccccagaagcagaagcatgtaaagcccacagaaccggtccagtcgtcgaccatcgagctgctttgaagaccctgcggaggttccgtcgctgcttgaacacagtgcctggactccctgctccgtgaggcgaatttacaccgggtccagctgcgtcagcccgagttctgaattaaaacatgcctcccacagaatctatttctgatgaatatgaaaggaagattgttcttccatgttggtttttattgagatatctctttttttcccttttcatttggttgtcctaactccatgaatagaaaag

SEQ ID NO: 223047 - DNA, 1000 bp, Homo Sapiens
gactttggattgtcaaaaatggagggcaaaggagatgtgatgtccactgcctgtggaactccaggctatgtcgctcctgaagtcctcgcccagaaaccttacagcaaagccgttgactgctggtccatcggagtgattgcctacatcttgctctgcggctaccctcctttttatgatgaaaatgactccaagctctttgagcagatcctcaaggcggaatatgagtttgactctccctactgggatgacatctccgactctgcaaaagacttcattcggaacctgatggagaaggacccgaataaaagatacacgtgtgagcaggcagctcggcacccatggatcgctggtgacacagccctcaacaaaaacatccacgagtccgtcagcgcccagatccggaaaaactttgccaagagcaaatggagacaagcatttaatgccacggccgtcgtcagacatatgagaaaactacacctcggcagcagcctggacagttcaaatgcaagtgtttcgagcagcctcagtttggccagccaaaaagactgtgcgtatgtagcaaaaccagaatccctcagctgacactgaagacgagcctggggtggagaggagggagccggcatctgccgagcacctcctgtttgccaggcgctttctatacttaatcccatgtcatgcgaccctaggactttttttaacatgtaatcactgggctgggtgcagtggctcacgcctgtaatcccaacactttgggaggctgaggcaggaggactgtttgagttcaggagttttaagaccagcctgaccaacatggtgaaaccccatctctactaaaatataaaaattagccgggtgtggtggcgagcacctgtaatgtcagctacttgggaggctgaggcaggagaatcacttgaacccaggaagcggaggttgcaatgagctgagatcacaccactgcactccagcctgggtgacagattgagactccctctcaaaaaaa

SEQ ID NO: 223048 - DNA, 1000 bp, Homo Sapiens
ccgccacaggggcctgagagctgaagagcaccaggtttggtggacaaagctactgagatgcctgttcatctgctgacttctgtctaggctcatggatgccaccccctttcatttcggcctaggcttcccctgctcaccactgaggcctaatacaagagttcctatggacagaactacattctttctcgcatagtgacttgtgacaatttagacttggcatccagcatgggatagttggggcaaggcaaaactaacttagagtttccccctcaacaacatccaagtccaaaccctttttaggttatcctttcttccatcacatccccttttccaggcctcctccattttaggtccttaatattctttctttttctctctctctcgtttctctcttctctctcctctcctctcctctctcttctcctcttctctctctctccctctctctcctttgtccagagtaaggataaaattctttctactaaagcactggttctcaaactttttggtctcagaccccactcttagaaattgaggatctcaaagagctttgcttatattttgttcttttgatacttaccatactagaaattaaagcgaatacatttttaaaataaatacacatgcacacattacattagccatgggagcaataatgtcaccacacacacttcatgaagcctctggaaaactctacagtatacttgtgagagaatgagagtgaaagggacaaataacatctgtgtagcagtattatgaaaatagcttgacctcgtggacttcctcagagggttggtccctggatcacactttgagaaccatacttgtcctgaagtattggagttcatgtctaacttcttcccagggcattatgtacagtgctttttattactgtggggagagggcagtgctaaataaattaatcactactgatagtcaaaaaaaaaaaaaaaaaaaaaaaaaaaaaaaaaaaaaaaaaaaaaaaaaaaaaaaaaaaaaa

SEQ ID NO: 223049 - DNA, 1000 bp, Homo Sapiens
ttgggagcctgaggcaggaggattgcttgagctcaggagttcaaggctgcagagagctatgatcatcccactgcatttgtttaaaaataaatttttaaaatttgtgtgttttatcaggggtctcctgtacagtgtatctgtgtatgtttgtgtgtgtgtttgtatacagccttgtttaatgttttgagcaataagatatgcacacacaggtattttgttgctaaagagattggacaaggttgtagctgtgctcaggcttcagcttggtttgttaaattgagagataaacaatgacaagagctgccagccaaccacactattcaaaaagcaaagtgttcaccactaaagctaaccattcatctggttgcaggcaaggctaaggctctctctcctctagttcctggaacagactcacagattggcatgaagcactgatcaggggctgcactcagactccctggccaagcaaacctacaccagaagagtcagtgtcacagatatgatgcggccaatctctgtctccaaaaacctacctgaacttaatggtagaattcaaagatctggggactgagggcacccagccttctaaaacacaatgtattcatgtgtttagtgtaaactctctgcatggattctcagtgttaataataaaaggaagcattcttttacaactcctgctgtgtgcaaaagaaagtgcaaaggatttggagtggcattccgaagatcaccacacataccttggttctgatggctgctgaactccgacttcttcgctgagacatgactgtgggaacagcctccagctatctgctcatcagaggtgctttcctcaacctcctgcaccacctccaagagaaacagcctaaaaagaaaccccagctgtttacttatattggtctgtaaatccctggaagtaaaccccatgcatttttatctactgtctgaggacatacaataaatctgagaaagtctatgctgtcaaaaaaaaaaaaaaaaaaaa

SEQ ID NO: 223050 - DNA, 1000 bp, Homo Sapiens
tgagttggctctgacaagtagtttttatagtgtcacaaatggttcatatatttcagtttccattttagctatttttgggacagaattttattttaatggaaaagatccttccactcagctactaaaataaggattaagaatatcccagagtaattggagtttttctttaaaaaaaaaaaaaaagtatgttttactgaggtatgatgattttgactacaactaaatgttatctattttagtgtttatgttaattaatgttaattaattttgtttatgttaatttgtgttaattaatgttactgtaatgttataaacataagaccaagtgttcttatagttatttaaaaactacaactactcaatggataaggaatagataaggtctccttattgtaccttttttttcttttgaagtttatatgccagcaggcctttttgtttttttccttttcagaatgtttcttattctctgaagcatcagcattttgaagtgtcttttatggaagtggggacagaaatgggggtaaaaatgagtgtaaacaaagcctagccctacggtcagcacccactggaggtgagaagcagaatggccttggttgtcctggcacctggcccggggcctaggacagaggtcaaggctaggcccctgtgtctggccagattctgccttatagaattcaaatctttcttacaaggtttctggacccgtttcatttctagatatatacctaattctccaaatcattgtcattgggcctcagtagtaaatctcacctctgaagtcttgcttcagtcgctattaatattaccaagtaataataacagcacaggcagagtttatcataatgttatttttaatttgtcatactttattatggttttgtaaggtacatgaaaatgtaattatgtgtgattggtaggtattaaagaacttagctaattgaatttacatggaactaaataaaatctttactactgagccccaaaaaaaaaaaaaaaa

SEQ ID NO: 223051 - DNA, 1000 bp, Homo Sapiens
cccatcctggcctccgtctctgcttttccacttctacctgcgtgtgggtttgccgccttgtcatcggttgtgtgagtgtcgcagacctttccagagctccggttcactctttccaaacaggcctccctgtcggtggcactgcactcctagaaccttcagtttctacgatggtttgtttggtccttttgaaccaccccaaagaactcaacatggcaaagcaaatggtaaaagcttcccgactgttctactttgggtccgcgcgaagcccactcacgtgtgatctgtgttgcccctctcggtggtcccaggcgatccagccatgccccctgcccctctgcccagatgcttcaggggcccggcttttcaggcttgccctcaccagcggccgtcagccgacactcagggatgtagctaacaccactccgccagtgctttcagtaggaagagctgaggctgcctgggaggcccggggcgaccggaaaagggctctctcaagttctgaaaagagaatctgccaccagatcgaatttcgacccctgagcttgttcggacgtatggtccaaattcagattaaggtggtcacccaacccgagatgtcaggaaaggccttctgcagagaaaatgtccccccacccgccatctgcagccaggtgtgtgccacacggcagccttcccgaaacatagtatggattttaaaaatgtgtttatttttgtttctcaaccactttataacgtattttttaatttattttgtaatgtcttgttttgaagtattgctgctatccttgttatccttcccactgtttttatcactgatttattttgtgaaagttgtacactaatgttctatgtcaaaatcaaaagtatttaatgaaatactagttctatttaatgtggttatggaaccagctggaaacacaaaacaaacagtgattgtacagcaggctgggcccaggaggtcaggttcattttgttacatatgcaataaactcacgacttt

SEQ ID NO: 223052 - DNA, 1000 bp, Homo Sapiens
gtctttcccattccttgtccagctaggaataaaggggaaatggtcctagcctggcccctacacacccaggtcccacaggccccctccccactggaatttcaccaaccaacaaggggaaagtacgctgttacagcatagcggtcaggcccagcaggagcttggcacatgatggggaggtggccagctccaggccctgcccgaccccatcatgtgtatttggtgtatggggtgtgggggtcacaccagaagctggcctggggtctcttctttgctggacacagctccctggcccctgcccccagcccctgcagcccctgccggactgtggaagccacatatgggaaaagtcctggcagacaatgtggcgggatgactgggggcttctccctctgaacctgggtccagtgtagcctggctctgagagaaggtggtgagcatgtggagaaggttccatagtccactcttaggggaaccagcaaagcctcatggcagttggctccatctggacctcccatggtcactacaggatggtggagcagggggcatcttttagcctccccccgccaccacatccaggccctctcaggcacctcctgcctcagcccacacctgcctcacccattgcccccctccccccacctactgccatcccactcctctgccagccacttcccagccgccccaccccactccatccaccaaatcacctcctgacttaatcctttctggaaggagctgccgcccaggaaccggtattgcctagagcctccaggaggggccctcctcaggcctccagtggccccatgcccacctgcctgaccctccactgcccctggaagcaaagtgcctatcagcagcgttgcgtcctctggggcccccggtcgggggggagggggtgtgggctaaccttggccaccaccacaaaaggaatgtgccagaatgctgaaccttcttgttaatgctatgaccgtgccttgaataaacaagtcctcccaacctc

SEQ ID NO: 223053 - DNA, 1000 bp, Homo Sapiens
ctatgcccagagggcagactgcctctccctgggccggggtggcctgggtgccaggaggaggggagcataccccacaccctccctgccaccgttgccgttccagaacctcggtcagtgtttccctgtctgggggcagggcccagagcgagcacgcgtctggcggctgctgtcgttgtgttctaccccgtactgacccaacaccacaagggctttctctggtcccctgtccctaagacaataatcgctttctgacaaaggagcctgcacatttgggtgagcagacccaagctgtttacagctctttcttgtcctgccatccagtagcagttagtcttcatccccacgtgaacaaaatgggaaggagccgtgaggagaggagtgaggcaacaggcacccgaagtccctcgtccttccctctgtgtgctctgaatatgtccttgtccttcctgacccatctctgaccagctgggaacctgcttggggtccccctcaaacctgtgtctggggtgtgggctcacagatccctatcagcctggttcgtgggagggctcttcctaaagggacccccatctctaagtcactctgaaagggagttgtggagaggagacgcctccagactctcagaagttttgaggactgaactgggtcactcgggatctgtgttcgaatcctccccacccctttctttgtggagtttcctaacctgctgctgaagcacaatgttttggtgcttgcttttctcatttgttaaaggcagtgtccaaaagccattccagatgccaagaccaggggcttatttctagggaaggtaggtcggtttccatgtttccctcccgttatttttattttttactttttgcctgagacaagccgagtatgaggtggtttgatttaagaaaaatcaatgaaattgtttactactgttttaaaataaaaccgtaaactctggcaaaaaaaaaaaaaaaaaaaaaaaaaaaaaaaaaaaaaaaaaaaaaaaaaa

SEQ ID NO: 223054 - DNA, 1000 bp, Homo Sapiens
cattgtaccaaggacctagttccttctagggatataaatttccaggaatgtgtatttttaatgtggtgagatgcactcttttgttgtaccaaatagggctccccaccccacccctgcgacaagtgctcttctagaacaggttcctaccagcagcactggtgtgaatgaaagagagacccagccgcgtctcacacaggtggaattgcacttcttaacaaaaaggaactttataaaagtttgggattttttttcctaatcataaaaatagccccagaaagagcctaagctatgttcagatagaagcctcgaaattcctgtaaattgtttactttatgatgtttacatacacgtttcactttgaaaaaaaatgcaaatcgactttttaacaactgttgagatgtttcatgggacagtagaactctgactcaccaactgggctaaattttaatttaaaaatgtatttatttgagtgtctttccccccctcaccctcaccatctgaggggctccctgagatcttggtagaggaggcccctcctgcccagaccttcgtttgtttccccggtggcccttgcttcttgctttgcagactgcctgcagccatgattttgtcactgacatctgtgagccaaagactgagcctttttggcaggaataataagcaatactacacaacttgctactttcagaaaacttttttttagcttcaccgatgacaacagaggaagaagggaactgggatttgggtaagttctcctccactgtttgaccaaattctcagtgataaatatgtgtgcagatccctagaagagaaaacgctgactttctttttaagtgtggcacataaggatctgcagaattttccgtagacaaagaaaggatcttgtgtatttttgtccatatccaatgttatatgaactaattgtattgttttatactgtgaccacaaatattatgcaatgcaccatttgttttttatttcattaaaggaagtttaattt

SEQ ID NO: 223055 - DNA, 1000 bp, Homo Sapiens; identical to SEQ ID NO: 117757

SEQ ID NO: 223056 - DNA, 1000 bp, Homo Sapiens; identical to SEQ ID NO: 117758

SEQ ID NO: 223057 - DNA, 1000 bp, Homo Sapiens
ctatttagatgtgtcaaacccgggtgatcattaataatttgggcatatatatgctcccaaacttactctgcccccttccttccctttttttttttttttttttggtatgggccttttaggcttgggccagccagctttcttgagatgagtgaataaaagcgtattgtaatttcatgtctgcttcagatcatggggacagtgccacccaggaactgctgctgaggcctgggaagctcccttgccttcgggtttggagcagtggcatcatcccaccaacctgagtcatgaaagggctgagcagaaagttaaatggtagtttcctgactggaagccacacgtaggtcacttgagtagtcaggaagcacagtgggtgtggagccatcatctgtcttgggctggttcctcccaatctttgtccagtggtataaatggactgtctgctgatggccatacgcagcactggctgttaagatggggaaggggtacatcaggattccactcatagccctggttcgttattgttactcatggctctgacgtccccaagccctcttgaatgttgcaagcaatgttaaatatcacacctcggtctccttttgagcagcccaggtacctaaagcaaggtcaccaaacttgggtttaaacttcagttgccatcacagcagggttcaggttatgcagtttttgcagtgtggagttgaacgctgggtaaagaagggagagctgactctccattgcttttctagtggaaaccagccagtttgacggcacggtgcggatacaggactccatcaggctagtgttggggaaccagcccggcagccttccatgtgaattccaaagctgtttcaacactggctgataggcagacaaaaggttacttgtgtgtttctctgagaagcggtgtaaaggaagtcaccttagaatatattctgtgcggatgcttatattttgttaacttcacgacttatggcatgtcttatttaaaaaaaaaaaaaaa

SEQ ID NO: 223058 - DNA, 1000 bp, Homo Sapiens
taaagaaaatgacaaagaaaaagggaaagagaaagaaaaagagaaaaaagaaaagactccagctactactccagaggccagggtacttggtaaagatggtaaagaaaaaccaaaggaagagcggccaaataaagatgaaaaagcaagagagaccaaggaaagaacgccgaagtctgacaaagagaaagaaaaattcaagaaggaagaaaaagctaaagatgagaaatttaagaccactgtccccaacgcagaatcaaaatcaactcaagaaagggaaagagagaaggagccatccagagaaagagatatagcaaaggaaatgaaatcaaaggaaaatgttaaaggaggagaaaaaacaccagtttctgggtccttgaaatcacctgttcccagatcagatattccagagcctgaaagggaacaaaaacgccgcaaaattgatactcacccttctccatcacattcctccacagtaaaggacagtctcatcgaactcaaggaatcttcagcaaagctctacattaatcatactcctccaccactgtccaagagtaaggagagagaaatggacaagaaagatttggacaagtcaagggaaagatccagagaaagagagaaaaaagatgaaaaggacaggaaagagcggaaaagggatcactcaaacaacgaccgtgaagtgccaccggacttaaccaagagacgtaaagaggagaatggaacaatgggggtttcaaaacataaaagtgaaagtccttgtgaatctccttatccaaatgagaaagacaaggaaaaaaataagtcaaaatcttcaggcaaagaaaaaggcagtgattcatttaaatctgagaagatggataaaatctcctccggtggcaaaaaggagtccaggcatgataaagaaaagatagaaaagaaagagaaacgggacagttcaggaggaaaggaagagaagaaacatcataagtcctcggacaagcacagataatgaagactttccatc

SEQ ID NO: 223059 - DNA, 1000 bp, Homo Sapiens; identical to SEQ ID NO: 117760

SEQ ID NO: 223060 - DNA, 1000 bp, Homo Sapiens
tggctttagttgtaacaaacgattttattctaagtaaggccaggtgctactataaaatcatatattcctgttgaagttcttttgaagtcctatctctatttattatatttgaaagttgtcagccaccagtcatccagaatttccttcctgaatctccatgctcatatgcaatgtctacatcaaggtcttcttaatgactattattctcagggtttagttttctaccttctgcctactattttggtctgacatttttgtagccttctgttattattggaaatagtctcttacataagctgatttcgagaactttcaaaatctcacatagctaatggaagttgctttctgctttcttatgactgtttttataaataaactgtttcataaataatgtatactggaaaattgtcatcactcttgtaaacatttgccaaatccaactgtaattagtaccagaacttagaaggaaagtcacaaagcatgccttttaccagaatattgctttgccttttcttatatggaaaatcactgatgtcatatcatttattatcctcacagcagctggcattcattccctgaaatcgtcgtctcctgataaacaataatttagagatatgttcacttgtaaataaaaaggttagaatctaaggacaaagaatgatccaaaaatactaaggaaaaagaacaattttcaattttcagaaatgaattatctgtacatatgaatagaggaaaatactgagtgctaatgttacagggccacaatctcatatccacaattccaaaatctccaaacctctgaaaactgaaatatttttcataaattaggcgtaaattctatgccctgaacaaatgtaaagctatttatgtactttgcttaatgtaatcattcatatactttgctacaaaaatattaatatatttcattactgaatgctaaactgtatttctttttaaaatttggaaaatttttaattctgaaacacaatctagaccttag

SEQ ID NO: 223061 - DNA, 1000 bp, Homo Sapiens
aaaaattagccaggtgtggtggcgggcgcctgtagttctagctactctggaggctgaggcaggagaatggcttgaacccgggagacggcgcttgcagtgagccgagattgccccactgcactccagcctaggcaacagagtgagactctgtctcaaaaaaaaattaaaataaaataaaataaaaatcataggcacttagtaagtgtagtttcctggatggtaaagtatcagggaaagtggttttctttctttttttttttttctcgttttttttttgagacagagtctcaccttgtcacccaggctagagtgcagtggcacgatcttggctcactgcaacctctgcttcccaggtttaagcgattctcttgcctcagcctcccgagtaggtgggactacaggtgcccgccaccacgcccgtgtaatttttgtatttttagtagagatggggtttcaccatgttgtccaggctggtctcaaactcctgacctcatgatccacctccctcagcctcccaaagtgctggaattataggcgtaagccaccacacccagccagaaagtggttctcatgatgcttctcagaccggcaacatcagcatcactggaacttgttaaaaatggacactctcagaacccacaccagacccaccaaatcagtttgagaactgccattcagtagagaattatttgcctactgtaaattttctaaggatttatgatgggctatttttgacccataggctcagagaatcctgcaaaatccttttttattgtttattctgcagacaaaaatgtgacaatatgctttgaaaacatagatatacttgagtaacatttatttacataaatcccaaattctacctctgaaggtatatgaaatttaactatgtatgtattatgcattttgtctggctttctatcataattttaatttgtaaagaatgtgcttacttgggaaagcaaattaaagtgactactgtttgctatcaaaaaaaaaa

SEQ ID NO: 223062 - DNA, 1000 bp, Homo Sapiens
agggaggccagaatcagcacaatcccggccccgccctcgcggcgggcgcccccagggccaggagagagagacagggctggctcctctcgcccctggagccgcggtgtggacggcccggccccgtccgccccgccgctctgcgggagtgtcctcgggacacacttaaaccttccaagtagcacagaagccccctccacgtcagaggccccctggccgcggggcctgtgagcggagaggggccctgcttcccacacaaatccgccccggtgcacccccggccaggcaggccccggggcggcctaggcgccttgtcggccgggggtggggctgcttttgcttcctttagaggggcgggcagggagaggaagctctagctccgggcctgagtttccccgaggctgcgtcggaggagctgcagggcgagcccggacggctgccgtctccgccagaggccaccccggcccggcctccagggcgcagaggcgcccccctccatcctcccccatcccgggggccacggcaggggggccgcacagcgcggctgggaccgattcggtgacggcccaaggaagctgggctcagggctcgcctctcccgcctcgatcctgcaccttcctctcccaggtcgctgctgcagccaacccagtagcccccttagcgcccccgcggaccccgcagctccagactccgctttggcacctctgctccggctggcatggctgcacgctccggctgctagtaggagccgttaggggaggagtttggggtctccacacgatgcctagagaatgctgcagtctgcacattagacgctttttagaagttttgaaattaccttgatttttttaattgttatgaaaatggatcttttcttgactctcccacatgctctgttatgggagagaatcccctaccctactctgatgtatagaccattctcccttcaccagccgaaccaatgtcaaaattaataaagaaatggactaatggcaaaaaaaaa

SEQ ID NO: 223063 - DNA, 1000 bp, Homo Sapiens
aaggccggtgtttgcggacatcagcaaagacctggagaagatgatggttaagaggagagactacttggaccttgcggcgtccactccatctgactccctgatttatgacgacggcctctcagaggaggagacaccgctggtggactgtaataatgcccccctccctcgagccctcccttccacatggattgaaaacaaactctatggtagaatttcccatgcatttactagattctagcaccgctgtcccctctgcactatccttcctctctgtgatgctttttaaaaatgtttctggtctgaacaaaaccaaagtctgctctgaacctttttatttgtaaatgtctgactttgcatccagtttacatttaggcattattgcaactatgtttttctaaaaggaagtgaaaataagtgtaattaccacattgcccagcaacttaggatggtagaggaaaaaacagatcagggcggaactctcaggggagaccaagaacaggttgaataaggcgcttctggggtgggaatcaagtcatagtacttctactttaactaagtggataaatatacaaatctggggaggtattcagttgagaaaggagccaccagcaccactcagcctgcactgggagcacagccaggttcccccagacccctcctgggcaggcaggtgcctctcagaggccacccggcactggcgagcagccactggccaagcctcagccccagtcccagccacatgtcctccatcaggggtagcgaggttgcaggagctggctggccctgggaggacgcacccccactgctgttttcacatcctttcccttacccaccttcaggacggttgtcacttatgaagtcagtgctaaagctggagcagttgctttttgaaagaacatggtctgtggtgctgtggtcttacaatggacagtaaatatggttcttgccaaaactccttcttttgtctttgattaaatactagaaatttaaaaaaaaaaaa

SEQ ID NO: 223064 - DNA, 1000 bp, Homo Sapiens
tacagtgactcttccaacgcacccctctacaaacatcagcaagaagtccaaagtttctttgtggttatggctttgatttctgtgccgtggatgcttctgattaagccgtttattcttagagccagtcatcggaaatcccagctgcaggcatccaggatccaagaagatgccactgagaacattgaaggtgatagctccagcccttctagccgttctggccagaggacttctgcagatacccacggggctctggacgaccatggagaagagttcaactttggagacgtctttgtccaccaagccatccacaccatcgagtactgcctgggctgcatttcaaacacagcctcctacctgcggctctgggccctcagcctggctcatgcacaactgtctgaagtgctctggactatggtgatgaacagcggccttcagacgcgaggctggggaggaatcgtcggggtttttattatttttgccgtatttgctgtcctgacagtagccatccttctgatcatggagggcctctctgctttcctgcacgccctgcgactgcactgggttgagttccagaacaagttctatgtcggggatggttacaagttttctccattctcctttaaacacatcctggatggcacagccgaggagtaggctgagggctgcacctcccacggtggtcaccatgccaatgaaggaagttcagtcttgtctttgatatcagcccctgcaaggcgctcaatgggaaggttgttcttggctcacctgaagcatgaaactgtgtattatttggacgtcagcctgtggatttgatacgacttaaccacgtcagaggaaggactttggcaagtgatattgtcttcatgtggggtattaattctcaaataataaagtaattgacaaatgaggggagaatgctaaacagatgtcttcttgcaatattttaaatattgtatttgagaaaataaacatctgagtcattcaaaaaaaaaaaaaaaaa

SEQ ID NO: 223065 - DNA, 1000 bp, Homo Sapiens
agacaatggcagcttttggattgaaatatttgctgaatgacactggatgtaagtttgtcttttattatcacagggtgggcacaagagtttccctcagcaccatctgccttctcaatggattccaagccattaagctcaaccccagtatatgcaggtggatggagatcaagattagatccccaaggtttattgacttctgttgtctcctctgctgggccccccatgtcttgatgaatgcatctgttcttctattagtgaatggcccactgaatagcaaaaacagtagtgcaaaaaacaattatggatactgttcttacaaagcatcaaagagatttagctcattacatgcagtcttatatttttcccctgattttatgagtttgggcttcatggtctgggccagtggctccatggtcttcttcctctacagacacaagcagcaagtccaacacaatcacagcaacagactctcctgcagaccttcccaggaagccagagccacacacaccatcatggtcctggtgagctccttttttgttttctattcagtccatagttttctgacaatttggacaactgtagttgcaaacccaggccagtggatagtgaccaactctgtgttggtcgcctcatgtttcccagcacgcagcccttttgtcctcatcatgagtgatactcatatctctcagttctgttttgcctgcaggacaaggaaaacactctttcctaatctggttgtcatgccatgagtcttttctcttcatggaattcagctatttatcataactcttgctaagatttaggaaatattaactactagttatttgtgatagcaacatacacatggccagtaatgctcttgtccaggaagatctaataccagagctaaaaatgaaagtcatggatactgttacacaaagaacactctatataactgtgttaagtccttcagacaagttcaggaaatcaaaaagtttaaaaagggaattctttagagatt

SEQ ID NO: 223066 - DNA, 1000 bp, Homo Sapiens
taccttatcagctgttgcttgaaacctgttaaaaatgttcataacattggatagtctagtctctaaatgatgactaagtagtggggttggctttgaaaacaatgttttatgcaacaaggaacgaatggtagcagccagctttgcggggcgtatgtgtggccagctcttaaccattccagtctattacttgggtgagtccttgtggacaaccacacacacgtgcccacatggtactagctgccgttcgtttctcgttgcctaagatgttttggcaactctagagccacaggcctaagtcattaaaaaattctccctttgtaacctcagtgctggggactgaggcgagccccctcaggtcgctggagtgcaccagtcttggggaagaggtgcaggagaagctgtgttttttatctccacacgcagtatgaagataaaattacatagtattacctagacatagacagtattacctaggtagatgcactgctcacctgcgcccttcccagctctcatttttgttaggtgatttgggatagggatagtgttttggggtatggggggagtgtttctgacctgctttgcagacgtgcctccgcacctcagcagtttggggtgtggccccagggcggttcttggatgtaaaagatgtggccatctagcctcgtaacttcactgtcacctgtgtcccatagggtgccttctgaatactgttattagaataagtttgttgcagaacgtgaccctgcgtgcaaacatgtaccgtggcctggtatatgatagagattgatattaatgtaccatgtatgttaatgtgaatctgtgggcaggatacttttccatggcaggaaatatccaagctgttgaaactggctatgttttaatatgcctcattgtgcctttactgttgtgtggactgcgtgagggacaagaagttccatttgatgtcaataaagcaaagtacttgcctacttttttgaagctgaaaaaaaaaaaaaaaaaa

SEQ ID NO: 223067 - DNA, 1000 bp, Homo Sapiens
taatttaccctttgttattcagaagcatgcttacttatagaaactaaatggtctttataaaagtaattacttaaaaagaaatcaggggaagaaagatatctatctaatctattaaatctttataaaacattacattgcagagggggagctactcctaaatattttcatgatttgcatggtttaatcagatttttttttttttttacaccatattagctaccttttcaatggagaagagacagttcacacaattccctggttagcacagatgtggactgagtgctttgtcacctgcagggtagtaacccagtgatgtttcttacagaagcacaatatgttgaaaatcctgggtgtgaccaatatggaataaagaagaaggcagaaagagagcaaatgaaaaatttcaacttgtatattcattttttacattttgctttgacttttaaatttaggaagtccgtttttacctgagaacaaatgtttaaagttcctgcgtcactctcagtactctcactgcccctcccaaaccctatagctccttacgctgggaaagctggttttttaaaaaaataataataaaatatttaatcttattaagtgttcatttaaaatgcgtaatgctttggaaataatgggtaacagatagcgagaggatatgtttataaagtgagcatgttggtcccatttataaatatatgtatgatttataagcttttttaaaacaaagctcaaattgttggtatttttctaaaatgtgcacagctgtattttacatgaaggctctttctaatgggttgttatactgtactcaacattttggacagcacatgaagtctgccaatgtacttaataaaacatgactttgtttatttaaagtttcttgctgtgaaaaagaactccctacctgtgagttcctttatttataattcttgaaaccaaaatgtataatgtacagttttcacaactgtatctgctctaataaaaaaaagttggttattaa

SEQ ID NO: 223068 - DNA, 1000 bp, Homo Sapiens
ggaccgagaccgggatagggaccgggagcgggatcgagaaagggagagggagcgagagagggagcgggaacgtgagagggaacgagagcggggtaccagcagagtggatgacaagcccagctcaccgggggacagctcgaagaagcgaggccccaagccccggaaggagctcccggacccctcacagaggcccttaggcgaacccagcgccggcctcggagagtacctcaagggcaggaagctggacgacaccccttccggggcaggaaagtttccagccggccacagtgtgatccagctggcccgaagacaggactcggacctggtgcagtgtggtgtgaccagccctagctcagctgaggccacgggcaaactggctgtggacaccttcccggccagggtgataaagcacagggctgccttcctggaggccaaaggccagggtgccctagatcccaatggcacccgggtccgacatggctcaggcccccccagctctggggggggcctgtaccgggacatgggggcccaggggggaaggccctccctcatcgccaggatccctgtggccagaatcctgggggacccggaggaagagtcctggagcccctccctgactaacctggagaaggtggtggtcacggacgtgacctcaaactttttgaccgtcaccattaaggaaagtaacacggaccaaggcttttttaaagagaaaagatgaatgctgggtgggtgtgtccaggaggagagcaggggagagagtgagcgtgagcttggcatagtgatttttatttctgggtgggatgtggccttttggctggtcccgtccctgatgtcacccccaccccaccagcccctttcatccctccttcctccccctcagtttttgttggaaagattatctctagagttatattttctattagatgtaaatatgttatttaagaaaaatatctaaatatatatatttcaactcgaaaaaaaaaaaaaaaaactcgag

SEQ ID NO: 223069 - DNA, 1000 bp, Homo Sapiens; identical to SEQ ID NO: 117766

SEQ ID NO: 223070 - DNA, 1000 bp, Homo Sapiens
gaaccccataggcaagtaacattgactgtaagacctctgtagggcaatgtgaaaatcatgattgctacagaagcactgagataatggagtggggatgactgtggcaaacaaaaggagattcgaacattctagaggggacatccacaagtctcggtgcagttatgatggtgtgggatgggagtgcatagaaattctcaggaccttcagacatctgtatctcctgtggccaaggccactgtcagaggaaataatctaaatgtttgtggattcctgtgtctccctgggcagttgacctgcacagacaggaacctcagcagtgacagaagagagatccagggatgggtcttctctgacccagccagcattccgagtgactgaggtggatgtggacatcattgcttaccaatttttaccaacattgaggcagggctcactctcctaaattgtagggagaggaatatggtaaagccaaaatagttgacagatctaactttcctagtggaacagtatatatagattttaatgaggaacatttatttaatagctttatggaggtatgattaacatgcaataaactgcaaatatgtaaagtgtaaaatgtgctgtttcagcatgtgtgtacacctatgaaaccaccacagtcaagatatccaacacaacaaaagattgtccctttataatcctcaatttttccttatcttgttttccacaattcacaagcaacagcaagcattttctataattttataaatgaaaccatatggtgtgtactttttagggggtggggctctggctttttcagtaaacataactattttaaggttaatccattatcttgttgcatgaatcaattgtttgctcatttgtattgctgcgtagtatttcagtatttcattgtataccacaatttttcttctttgtcaacttaattgttatggatgtttgggtaactttcagtttttggctattacaaataaacctctgaagatttgtgtgcaaa

SEQ ID NO: 223071 - DNA, 1000 bp, Homo Sapiens
ccaccctggggaaccgggggcaggcgctccaggtgcatgcaggctccgccaaggccgctgtggacgcgatgacgcggcacttggctgtggagtggggtccccaaaacatccgcgtcaacagcctcgcccctggccccatcagtggcacagaggggctccggcgactgggtggccctcaggccagcctgagcaccaaggtcactgccagcccgctgcagaggctggggaacaagaccgagatcgcccacagcgtgctctacctggccagccctctggcttcctacgtgacgggggccgtgctggtggccgatggcggggcatggttgacgttcccaaacggtgtcaaagggctgccggatttcgcatccttctctgctaagctctaggaatcttccggccgctgcttcctgccgcctcactcagccaggtggagagcaccaatctgaaccagcaatgcctgcagcccagcccctcctctgaacactcagctattactgcgctttccctccccacggccccaactccagggcaggagcaactggacagtgggcctggcccgtggagctgccacgcaggtgcctgagggccaggtgccacgcaggtgtctgaggaccaggtgccacgcaggtggtgggggtacagacaagatgctgggatgtcccctgccccatggtcaagggtgtcctgcctgcctgggtccagggcctgagggagccacatggatcccgagacttgtgttctcttggctgaaaacactgaggtgctcccatctgtgcgtggcccatgagctgggatggtcctccagctgcccacaaggtccgcccctctgtctctgcaccacctgtttgcataaacacactttgctacaatcttgctagtgcgttttcttaaaagataatctatttactgtaaaaataaattggactttgcaaaagcttttagaaggaaaagaaagaggattaaagagaattgctggtgatcctaaaaaaaaaaaaaaaaa

SEQ ID NO: 223072 - DNA, 1000 bp, Homo Sapiens
agctggactgaggccccgactgcagcctgcattctgcacacagcatctgctcccatcccccaagtctgacgcagccaccactctcagggatcctgccccaaatgcggtcggagcgccagtgaccctgaggaagcccgtcccttatccctggtatccacggttccccagagctttggggaccacgcgaaaacctccaagatatttttcacaaaatagaaactcatatggaacaaaataagaaaccccagccatgaaatctaccatgaagtcttcaagttcatgtcactgagaagcttgtgcaaagcagccaccttggaccataattaaatcaaggacattttctttgagacattccttatagttggagactcaagatatttttgttgcatcaggtgtattcccttgcatgggcagtggcttttataggagcattagtcctcattcgctgaaccctgttgtttaggtctaatttaagttttacatagagacccatgtatgactgcagcccattggctgcaagaccagggaggaaagtggcaagctgtagaaaatgtttacacgcatggaggggcattgctctagccctcagagcgtccggagcagcagggtacatgggtgggaggttcattcagcacccaccagtcaggtatgttctgagtgaacccacagcagtcgcagaatgagcacctggcagggtgggtttcctaggaataatttattatttttaaaaataggcctaataaagcaataatgttctagacatctgtctaagtaatcagactcaggttccacacacaagcaacaactcgtgggcctcttttctatttcaatgtgctactaagaacccttggatgtaacatactagttagttaatgaattctgtgaattctgtgaagagtaatgtgattgaaaataagtctaaacagctgtaaaagtgaccacaatgacatgaaataaatttaataagtctagatcagcaaaaaaaaaaaaaaaaaaaaaa

SEQ ID NO: 223073 - DNA, 1000 bp, Homo Sapiens
gctcaaaaaattgggttctgccctccacgtttggtcactgccaatctcattacaattcaaaacaaggaactggaaagagttatcggtgactgtcgttttgtttctgcaacatttcgcctcttcaaacactctaagacaggaccaaccaagagatgccaagttatttacaatggaggaattacaggacatgaaaaagaactaatgtttgatgccaattttacatttaaggaaggtgaaattgttgaagtggatgaagaaacagcagctatcttgaagaattcaagatttgctcaagattttctgatcagaccaattggagagaagttgccaacatctggagctgttctgctttggagttaaaggatataatcacagatccatttaagcttgcagaagagtctgacagtatgaagtccagatgtgtccctgatgctgctggaggctgctgtggcacaaagaaaagctgctaaatctatagccaaccaggggaccacagtagtgggcaagagtgatctgcatgttttttaacctgcttttccccatagcacagaccataagaaacaacaaatgagccactgcgcccggccataaatgaattatttttaagaggcattgattaaagattcacagcaaatcactagttaagcagattttttttctatttcctacttcaaagttctggtgccacatagtggtcagaaatggaacagagaagctgtcttaagccttgttcaagaagcaggaaaggcatcagaagaagtaacagttggcagagggtctcaggaaaaacatcttccttctgatcttttgcatagcaccttttggaattttcatcatgtttgcttattaaacaaagctcctactgccatcatactaatcatgcaaaaagattgccaaatcatgtttggtaggaggacttttgaggtagcttttgaacaaatgtttttttcttttttctttttttttgcaataaagaaaacaaattaatcataaaaaaaaa

SEQ ID NO: 223074 - DNA, 1000 bp, Homo Sapiens
tttggaggaagaagacaacttccctcattccatcatcaccatctctttctcactaggttctttctagttttcaagcaatagttctagcctgccttggacaagggggccccagttaaacaaactacccatccatgagctgccaggcagtcaaaaacagaagcttccccgacttgtgagtccctgagatgtgctcttgttgtttggcatttggggtgacagggagtgacccagaggccaccactgcttttcatgcaggagttacagacactggtttcttggaaaatggagagaagcgcactttgcacagacgtcgtcaattaagtcccaatttgccacttggtattgagtacactggaccctgaccactggctcttgggcaaacgtccttcctcacggggcgcctccgccaagccggcccagctgcacccctcccttcctggagggatggccagggaaggagaaaacagagaactgacacctttgaaaccacagaatgtgttacatgcagactcgctcaagggcataagttattgtgaacgtttttgccaatcactgctcaacagccctgctagattttgtatgatgctgaattattatgcagactaattccacccagttgagacacaccatgcttgttcacttgtatttattgaaactgtggattcttgcccgtgctgtcccttgtatttactttaagcactgatcacttatcattcattcggtatggttttccctgtcccttgtacacattctggtatgaatttgtaaaaataacctgctacaaattggttgaatgtttctgtctgtggtgcgaaccagcattaacggatggggcacgtgcccaactgaggaacaggagaagaaatcaccaatttgggctctcagagctaagacacacttattgattctgttgcacattttgcactggtttatggcgattgttttcttggacggatagtgtaaaataaacttctctgttctctaaaaaaaaaaaaaaaaa

SEQ ID NO: 223075 - DNA, 1000 bp, Homo Sapiens
taggtgctgaggtcacaggggagatggtggaatcttccctgtttttatcccctcagggtcagttacatagaagctgcttcttgactagtatagctcggtgaccctttgttcaaccgctgaggtttgatttcttaccctttcttctccccattttcatactcttcccagggattagtgatggaggtgaggtctccctaatcatggtaaagtgttaaccttccacctcctcccttccctcctccttcctcatccttctgtcttcctcaattctccgtctcttttttttcatcactgattgccttgtgtccctccaagtctacttgttactatccatctccaggctctgggccgtgtagacactaaacctcatgccctaaggacaggaggaaagaccctctgtttggagcattattagtagagtgaggatcccaccagttctgcctggcttcctccatccccagaggcactaaaagcagtattttaaggttggtgtcttactccctggaagcctgaaatgggtggaatagcggtaaggcttgagtaaaactaggggacagaggttcttatttgtcgattttattttataatttgaccacagcatctgaactccctctctccctggaataagtatttttcccacatttttggatatatgtatggtagacaatttttttttaagacacagagataaatgttttcctgctttggttacctttcctttcccctttaaaaggaattagctatagaactgctttgtaaagatgcttcttgatattttacttttgttccttttccctaatcattcccttttctccccactcctccagaaggcataacccttctctccacaccccctacccccacccccgtcctaggctcccatcctttccatcaagaccttcattagcttatgatatttgctgccgagatgttataacaaggactcgttcatgtatataagctatttcttgatccatttaaaaggaattgtacattgtgt

SEQ ID NO: 223076 - DNA, 1000 bp, Homo Sapiens
ctcccaggcggtttccccaggactctcgtaggaaataaatagccctttcaagattcctcagctgcctcaccccctgcacatgtgcctggggtgtggcctagaagggagtgatgttcttactctggtggtctgtgcttctgaacacaggctacatgcacacactgacaactaccaataaacagacaggggaaggtctttcatctcagccattttctcttccccccgcccccccttagatggagtcttgctctgtcacccaggttggagtgcagtggcacaatcagctcactgcaacccctcctcctaggttcaagcgattgagtagctgagattacaggcatgcatcactatgcctggctttttgtattttttagtagagatggggtttaccatgttggccaggctagtctcaaactcctgacctagtgatgcacccaccttggcctcccaaagtgttgggattacaggcatgagccaccacgccagccattttctctttctaagaagagcaacctcagccggagtgagttttttctgactttgcagctgagtctggagaaaagtggcatgccagagcgggtcggtgggaaacagggtgaactttagcttccatcaacagctctggtagcaaaaccagtcccctaccccctagagaatgcatccgtttccccacctgatatggtttggctgtgtccccacctaaaactcatcttgaattgtagctcccataattgccatgtgttgtgggaaggacccagtgggagataattgaaatatgggggcagtttccgccatactgttctggtgatagtgaatagatctcatgagagctgatgattttataagaggtttccccttttgcttagttctcattctctcttgcctgccgccatgtaagacgtgcctttctgtcatgcttgtgaggcctccccagccacgtggagctgtgagttcattaaacctctttttctttataaattaaaagaaaaaaaaaaaaaaa

SEQ ID NO: 223077 - DNA, 1000 bp, Homo Sapiens
tttatgctgggtgatatagtcaaaatttgcttatttactctgcccctcgtcaaccacagtatcatttcaaggacatgaataaaatacttgacagtatccaaaggagctataccaaaatctaacaagtaaattttggattttgcctctttgtgctttaaagtaccaggatttctgtctctatggataggtcttggagaatgttaagtaatggatgaaactttttaaaataatttgtaaattttacctaagtaggacagtagtccttattgcaatcaaaataatttactgagcacaactcctgtaaattaatctacagtcaggctagtatgattttaatatgatttgagtaaaaagataattttcaaggaaagagtaatcatccatcaatttattataaagccagatagtattcaatttatgtcaagaacaaagaaattgcccttttaaaagcatgtacgtgaatgctttttgaggcacagaagtatgctaagctttaacattttgtatttatttacaacccttttctaagggaaggttacttctcagtgcagatggagaaactgaagcactaaggataaatgattagtttccaatcacatcatttttttccacagacttgctgggactggctttcaggtattgacagccagccccatatattaaggtaaccaggttgaatcttccaatttgagaacccatgtatgggttgcagtgagccgagatcgtgccactgcactccatcctgggcaacaagagcgaaactccgtctcaaaaacaaagaaggatataataaagttaatatataaaccatgtatgtggttaggaataaattcaaattcaccagtctccaatggtgattacttttactacatagaaaaacattttagtgacttacagaggatttttatttgtgaatatttcagtaaagtttgtgttgattgttgataacactgttcatctactgaagcactttaataaaaataaaatgagctggaattag

SEQ ID NO: 223078 - DNA, 1000 bp, Homo Sapiens; identical to SEQ ID NO: 117771

SEQ ID NO: 223079 - DNA, 1000 bp, Homo Sapiens
ggggagaagagaagagggtctggtttttgctgggggtgagtttccgggacactcccaaagcccacagataatccctggtgtgggaagaggagtcctggataccttgatgtttagcactttaaccccctttgtctttaaggtaggcgtgggggctactgccagaagtggctgttgggtctgaccccctcctttctgccctccctctgccacatgctggtccgcagagccctcctcccaaggggtggggccctgggtggagctcagcagggtctgcccactccctacgctggcccacataggcctccaggagccctcagtgagagggaccagcatagctgacccccagagtgtggtgggcgccggccctgcccgaggcccagtcggggccctttctgcagatctacctctggctcagcgcacgccccctgccctgagaacaggaaagggcccggaagggctgactcaccgggccgacgctcacacgaaaatgggatgcactttatttgctggtgcaaaggcaggtgagggtgcctcctgtgtgaccgttggccctcctgcctggtggcgctgaagggaaggagccagtgagcctgaccccgggaggggccgtccccgtgtgccgcgtttggcggggccccaggcggctcccccaggcccgggtctggggccccaggctttcccctgcctcgcggccgggcgtcccgtgctttgggtttcttggtttgggttttttaatgccagttctcagtacataagtgcattttgaaagaggttccagctatcacttgtaaccatatatatatacatatatattctatctacaaagtgtttatttgcgagatgtttcaacggtgagttcgggccccgcccgccttgtgaccatctgtccccggtcctcgtccccgccccgcgccctggtcccgagtggcgtggggacgggccatcactgtatgtattaaaatgactgtatcaaataaatgtttattgatttttttccagg

SEQ ID NO: 223080 - DNA, 1000 bp, Homo Sapiens
agatggattctcactgttgccaggctggagtgcagtggcacaatcttggctcactgcaacctccacttctcaggttcaagcaattctcctgcctcagcctcctgagtagctgggactataggcgcgtgccaccacaaccagctaaatttttttgtatttttagtagagatggggtttcaccatgttgaccaggatggtctcaatctcctgaccttgtgatccacccacctcggtctccccaaagtgctgggattacaggcgtgagccactgtgcctggctggttattttgtttgtttgttgtttttttgagacacagtctcgctctgtcaccaagctggactgcagtggcatgatctcggctcactgcaatctctgcctcccaggttcaagcaattctcctgtttcagcctcctgagtagctgggattacaggcgcgtgccaccataccgagctagtttttttatttttagtagagacggggtttcaccatgttggccaggatggtctcgccctcctgaccttgtgatctgcctgcctcggcctctcaaagtgctgggattagaggcttgagccaccaggcccggctggaatgcttgcattttcttgcctgatttccctgggagcaccccccttaacactgaatggagctggtgagagcaaatatccttgtttctgatattagatattaaaaatatggtttttcaccatcaaagattttattgagtttttcatatatgccttgtagcaatttgagtaaattatattccttgtttgttgcagatttttaatcataaatgggtgttgaattatgtcatgcttttttgcatcaattgagactgtcatttttccgtcatttcctaatgtggtgtattccactgatcaatttccatatggtgaaccatccttacattccagggacaaatctcacttggttatattgcataatgctttgaatatattgctttatatgctttgctggcaaaaaaaaaaaaaaaaaaa

SEQ ID NO: 223081 - DNA, 1000 bp, Homo Sapiens
ataccaacacatcgctggatgctgcaagtgaatatgccaaatactgctcagaaatattaggagttgcagctactccaggcacaaatatgccagctacctttggacatttggcagggggatacgatggccaatattatggatatctttggagtgaagtattttccatggatatgttttacagctgttttaaaaaagaagggataatgaatccagaggttggaatgaaatacagaaacctaatcctgaaacctgggggatctctggacggcatggacatgctccacaatttcttgaaacgtgagccaaaccaaaaagcgttcctaatgagtagaggcctgcatgctccgtgaactggggatctttggtagccgtccatgtctggaggacaagtcgacatcaccatgtgttactggcctggaaactgaagggagttttgcaagtgaaaatttagatttctattgacatccttttgttttctaattttaaaaattataaagatgtaaatggaattataaatactgtgacctaagaaaagacccactagaaagtaattgtactataaaatttcataaaactggatttgatttctttttatgaaagtttcatatgaatgtaacttgattttttactattataatctagataatatgatataagagggctaagaatttttaaattgaatcatatatatgatataatttgatccttcttgtatcttgaagttttgtacttgggatttctggactgataaatgaatcatcacattcttctggtaaatattttcttggagctctgtgtcaactttgatcctttgtctcccaggaaggtgtgacctctcctttgcctgcatacctcaaggccaggggaatatgcctcagtgatgcatttatctttgtatatcaggccgcatgattcccaactttctgccacacttaaattacgttcctccatttcagttttgtcttttctgtctaaagttcagtcaaagagtatcaaaaaa

SEQ ID NO: 223082 - DNA, 1000 bp, Homo Sapiens; identical to SEQ ID NO: 117772

SEQ ID NO: 223083 - DNA, 1000 bp, Homo Sapiens
aacttttctaagtgagcttagcaatgagaagaaaaaaaaacatgaattctttttctggaaaatcagggagacatgggtaataataggtactaataaatatttatagatgagtgaatgaggaaataattacatcaaaaaggtcagtgacaattgataaatgacaaggaaatatttaattaggtaaaactaaatcattgctctctatactaggatagactttatctacttcatctgttcctaagtcagcatgttagttctggggaaggatcataagaaaggaaatactttttaaaaaaaaaatttggaaacatgtaacaaagcaagggtaaaatatatatatatatctatataagtgctgtgactgtaaaagtgtactttccattaattattagccgagttaagagaatggtcacattgaagtactgtgtggactagaaatgtaccctgtcatcatgcaatgaaatattgttatcgttttaacatagctcatttatgtagaatgaattctggtggtttaccccaagtcacagttaggacggtagatggtgagatcgcagatgcgctattatctagattcagtgttacattttcgatgtttatcactcagtgggtttttattaatatgctgattaagttatttactgggccagtcattgtgctaaatagttgctcttttgtgtttcattgccttgatgtttgagtgtaatctagcattttaatacagtgtttattttgcatgatctttaacaaatgttttaagcaattttaaaaaggcaggatgttattgacattatacactgaagtcttaacattttaacatttatagtgcttatttgcaaaattgtataattaggaattatttcagagacaatgttttctttttcaggtgagtagttgccgcgtaatatcattggagtacattctttatactgtttgtgaaattaatactagcatattaagtgtacaaatagatttagaaaacaataaaaaattgcatgct

SEQ ID NO: 223084 - DNA, 1000 bp, Homo Sapiens
cttttgatcctcaatactgattcacaattgagttaaattagacaactgtaagagaaaaatttatgctttgtataatgtttggtattgaaactaatgaaattaccaagatgacaatgtcttttcttttgtttctaagtatcagtttgataactttatattattcctcagaagcattagttaaaagtctactaacctgcattttcctgtagtttagcttcgttgaattttttttgacactggaaatgttcaactgtagttttattaaggaagccaggcatgcaacagattttgtgcatgaaatgagacttcctttcagtgtaagagcttaaagcaagctcagtcatacatgacaaagtgtaattaacactgatgtttgtgttaaatttgcagcagagcttgagaaaagtacattgttctggaatttcatcattaacattttataatcttacactcacttcttgtctttttgtgggttcaagagccctctgacttgtgaagaatttgctgccctcttaagagcttgctgacttgttttcttgtgaaattttttgcacatctgaatatcgtggaagaaacaataaaactacaccatgaggaaaactaaaggtctttatttaaaatctggcattgtattaacatgtaattttatactatgtggtattttatacatttcctcagtagtgatatttggtaaagcagttcatacagcttttttctaagttccatgaatcttacccagtgtttaccgaagtatttaagcagcatctgaatatttccacccagcaatgttaatttatctaggaaagttcagaatttcatcttcatgttgaatttcccttttaacttccgttcatagacatatatgtgacttccaattcgaccctctggcaagtgagtgtggaagaaaacagcagttcttttataattgcttgaaattaggaaagcgcttatttcctagaagcaaataaatgtttaagtaaataaaggctacattttgctg

SEQ ID NO: 223085 - DNA, 1000 bp, Homo Sapiens
aggtcttaggatgagtcctggcatttaccaagggttggatatatgttattatcactattaagtgttgagggtccaggcatgctgggcaacagggaccccatctctacaaaaaagtttaaaaaattagccaggcgtggtggtgcacctgtcgtcttagctacttgggaggctgaggtgggaggatcacttgagcccagaagcttgaagctgcagtgagctaggatcgtgccactgcactccaacctgggtgagagagcgagaccctgtctcaagaaaaagaaaaatgcagagaaacaggagtcttggctactcctttagaggcagactcagaccctcctgcctcacagctttatctttgtatttgccccttactttatcttgtgccttgagaaattgctggggagagaggtatgtccactgggcagctgtacaggatggaggatctagggcgtttccactcccagcagccaggttccctcaccccaagctcacccactgttggggagattatctacaataacaccagaaacacattggggtggattgggggtatccttatgggttcttttcagggaaccattgctggacaaggcacaggagccacctccatttctgagctctgcaagggacaagaactagagccatcaggggctgggctcactgtggccccaccccaagccgtcagcctccagggatctacaccctgccttggctgctacagctttttcactccactgccctaggggagttcagcaacctaatgatctctatctctgaacatctcttcatcccatgctccaagtccagcaacctgcaccctggaaccaggagtggaccctacccgagctgtctgtattaatccccatcccccaccaccaatcttaaaaagccctctgtccccctaccctaaaccccagttaggtacccatgctgggcaggtcagttaacaatttatgcacaggtactagttttattgtattaccgttccagggtagctttg

SEQ ID NO: 223086 - DNA, 1000 bp, Homo Sapiens; identical to SEQ ID NO: 117774

SEQ ID NO: 223087 - DNA, 1000 bp, Homo Sapiens; identical to SEQ ID NO: 117775

SEQ ID NO: 223088 - DNA, 1000 bp, Homo Sapiens; identical to SEQ ID NO: 117777

SEQ ID NO: 223089 - DNA, 1000 bp, Homo Sapiens
acttgagaagtataatagaaaatagcttctaaatcaaacttccttcacagtgccgtgtctaccactacaaggactgtgcatctaagtaataattttttaagattcactatatgtgatagtatgatatgcatttatttaaaatgcattagactctcttccatccatcaaatactttacaggatggcatttaatacagatatttcgtatttcccccactgctttttatttgtacagcatcattaaacactaagctcagttaaggagccatcagcaacactgaagagatcagtagtaagaattccattttccctcatcagtgaagacaccacaaattgaaactcagaactatatttctaagcctgcattttcactgatgcataattttcttattaatattaagagacagtttttctatggcatctccaaaactgcatgacatcactagtcttacttctgcttaattttatgagaaggtattcttcattttaattgcttttgggattactccacatctttgtttatttcttgactaatcagattttcaatagagtgaagttaaattgggggtcataaaagcattggattgacatatggtttgccagcctatgggtttacaggcattgcccaaacatttctttgagatctatatttataagcagccatggaattcctattatgggatgttggcaatcttacattttatagaggtcatatgcatagttttcataggtgttttgtaagaactgattgctctcctgtgagttaagctatgtttactactgggaccctcaagaggaataccacttatgttacactcctgcactaaaggcatgtactgcagtgtgaagaaatgttctgaaaaagggttatagaaatctggaaataagaaaggaagagctctctgtattctataattggaagagaaaaaaagaaaaacttttaactggaaatgttagtttgtacttattgatcatgaatacaagtatatatttaattttgc

SEQ ID NO: 223090 - DNA, 1000 bp, Homo Sapiens
tgctgatgcgacctcggctgacagctgggcctgtggtgcagacaggagctgtgtggacagtcccgcccaggaggggccgcagggcgtgtatgagcagttttgcaaacagaacacaaccacaatgatggtattttgaaaagtgttctttccgtgttcgtcgggaatcaggattattgagaggtgaaggagccaggtggcttcattctggcggtgagaggcccatgaccacgggagtgagagctggtgtggcgaggcccggctctcctgcggtgtggctggtggcctgccgtggccaagagcatcttctgggtggatggaaccctgcctggtcacatttggccagagacacacctggccctcagggggctgagctggagactgagctggggctggccgggacgtgacaaggcaggacagaggcggcccctccgctgctcctttttggaatgcgagctcccaccagaagaaggttccggcacgaatcccatccccacgtctgggccgagaaagcagcccgggtccggaaggtgtagagagtcccggcctcactcagctcacagggcgtgccaggcggcaacaccagaatcttccagaagcccagctccacccgcacacgcagcttcccatccagtccttcaactcaattcttacccaacacgcgtttccgtttgttttgagacaaaatcaccacctgtcaaaaggcaggtggctccagaggggtcaagacccccccccccgcccccgctccaccctggagcccacccccatgggcactgcgtgccgcctgcacgtgggctgtcttcacaggtctgatgtgaaaattcaatcacgacgttaaccggctcgagagagcgccggcctagaggctcattatctatttattttaccaaacgcgaattgagacggactttgacaaaacacgaaatggtaatgtgaagctaagagcagagagtgaccaacagtaaacaacacgcgcagaaaaaaaaaaaaaaaaaaaaaa

SEQ ID NO: 223091 - DNA, 1000 bp, Homo Sapiens; identical to SEQ ID NO: 117779

SEQ ID NO: 223092 - DNA, 1000 bp, Homo Sapiens; identical to SEQ ID NO: 117781

SEQ ID NO: 223093 - DNA, 1000 bp, Homo Sapiens
ttttcaaatgtataatatgtttacagatgtgccctgcatttagtctgccttgttcctattttgatttttgttgagtctcctgcctgcttgccaaaagctaggatgcttcaggcccatgtacaattgaaagcagaggcatccttgagctttaaagcattgaacaaactggaaaatgcaacataccacataactgaagtgaaaaaagtctgtgtttttgtgtttttttaaataaaaattttcaaaaagttaaaaaaaaagacatataaggttgattaaagggaaaaaaggctccagtttgttttacaggttttaaagttctgctgtgtgttcaattgccttgtgtaaccacttgtcgccttagggccagattcccctctctagtccccttttttaaatgtccattttgcttgcctggaattttaaagttcttccgtctcacaactcacaagaaactttctgggtttgtgacatacagaggttgaattgagtatatatttgaaaaggaaaaaacaaaaaacaaacccagaccccacctgaattgggctttttaacttagaagcaacacttgattaaacatctttagaaagctattgcttttctaatttccttccatatccctcaggcctcagtgttcagagaagccaaaaagaatgtatcacttctctgtctgtccaaaggtttttgagagtctcacttctaaatgaaacaatgcaacatttcactttgatttctccactgaaatttccttgattatatggttagaggtatgtagttaggaatgtctgttaactttctgagaaccctagtgccccatcatattaactgtcagtattttgggggcattaggttaatagacttaattgcctaggtacaagcaggactttgggacaaatctctttgtgctgtttggtaacacttaactctatttgttgcaatctttctccttaggtcctcacacaattccttacagagcacttattaaaaaaaaatcttaagagtt

SEQ ID NO: 223094 - DNA, 1000 bp, Homo Sapiens; identical to SEQ ID NO: 117782

SEQ ID NO: 223095 - DNA, 1000 bp, Homo Sapiens
ttcaatgatagcagttcaattgactcatagcagtgttttgtattttttctaattctttagctttcaatattggattaaagtcttgtttgtgaatatagtttccgtatggcaaatgatttcttgcttattagcttttgttaaagaatgcttagtaagagctaagcttttaaaagtaatgcaaacatttatcgttaataaaacctatggtgtaatatcatataatgcttttctttgatctttggagaattattcttttatagtagtatacatgaattttgatttttaaagcatttaaaaacaaatctcaatacattaaaaaacctgttattgttaaaaaggaaattaccatgcctttaagaaacaaggatgtacatcttcaattcagcataagtgtccacatctagaaggctctcattgcagttgtttacagttaaggtacctctatctaaagggccaaagaagcatttcatattttaacacctcacattctttcaggattaagacatatgaaaatagtctgaataggataaatttgataggaagtaacttaaccagtctggaagattcagctttttctataaaaagcttattcctcttcacaactcagatgtagatttcattttcaagaggtagatattttaaagcaatgatctatttgggttttagttttatgagtaaatcattaattgtatggtttgggggttattttattttccatgttaatataagcacttatttctgaagttattgagaggtcatctagctccagttcaaaagattatgtatatctgatgtttaagaggaaaaacatctgaaaaaatatcttttgtttatttgaaaaaagcatatatattccaactttaaaattgtgaatttattttgagtaacctctaattaactgtatttttttgtttctgttgctgtatagttagaaatttcatggcaatattttttactaaattgaaactataggttttaaaaataaagacattttagaaaa

SEQ ID NO: 223096 - DNA, 1000 bp, Homo Sapiens
agaggggaaagcccaggggtgaatcttcacgccccaaacagtgcccggtggggaggaggcacccgctccttgttgagtaaaaccacccatggagactggaacctcatctccctgggtcggggggtgttcaaggccacaggacaaggggagcaccctgggccacacaggcgtggaggtgtccccaccccttccacctgtcccccagacccaaagctctctccccaccctacctgcccacctggggctcctgtgccccctccccactccagaggccaccctacaagttgtcctcaaggtcatcctggagatgggatccaggacgtggggccatgactctctgggaccttgccacagcccccattcccctgcttgcagtctgcaaggacacctttgcagggattcttgtcctgctggccaccccacccacacctgtccctggccagcaggccgcctgcaagcgtcaggcacacagggacagacatggcgagcacagtgcaggcccggggcccacgggcaacatggaaccctgggaactgccctcccccttagctcacagtgcctgcggtagccactctaggtcgttggccttccttgaccactccatttaattctctctgctgtttgggttgggtttttccccttagttatctgtgggtttcctgtattttatgttaatatttctattaagaacatgttgggcatgtggacccaagcacctgggaaggaggtggcatctgagacagcctgatacgttcccgtctgtgcacccatggagatccaggcgtgggcccgtgtctgtccctggttgtaaattcgagggtctgcatatctgatgttcaggtagacctgggcgcctgggaacgaggccatcagctgccatgcacataacaaagagacaatgcattccttcttatttttcctttttaaaaatcgatgaatcatttgtgatgcttttaacaaagattaaatgaatttgatcagcttttgccttaaaaaaaaa

SEQ ID NO: 223097 - DNA, 1000 bp, Homo Sapiens
agccccttactgtgatttgttggttgcactttcatttgctttagttctagaatcacctgttgactcctcagacttcacctaactttggaaactctcttttggaggcttctcatttccccctaattctgtgctgcctgagccctagaattttcccaccaacgaattattccaggtagatcctaagttgctggatctagttgatatttaaacaatatctagttgatatttctcattcagttggatccagaaaccagtatctctaaaaacaacctctcataccttgtggacctaattttgtgtgcgtgtgtgtgtgcgcgcatatgtatatagacaggcacatcttttttacttttgtaaaagcttatgcctctttggtatctatatctgtgaaagttttaatgatctgccataatgtcttggggacctttgtcttctgtgtaaatggtactagagaaaacacctatattatgagtcaatctagttggttttattcgacatgaaggaaatttccagataacaacactaacaaactctcccttgactagggggacaaagaaaagcaaaactgaccataaaaaacaattacctggtgagaagttgcataaacagaattaggtagtatattgaagacagcatcattaaacagttatgttgttctccttgcaaaaaacatgtactgacttcccgttgagtaatgccaagttgttttttttattataaaacttgcccttcattacatgtttcaaagtggtgtggtgggccaaaatattgaaatgatggaactgactgataaagctgtacaaataagcagtgtgcctaacaagcaacacagtaatgttgacatgcttaattcacaaatgctaatttcattataaattgttttgctaaaatacactttgaaactatttttctgtattccaagagctgagatcttagattttatgtagtattaagtgaaaaaatacgaaaataataaacattgaagaaaaaaaaaaaaaaa

SEQ ID NO: 223098 - DNA, 1000 bp, Homo Sapiens
tgtttttgtgatttactaacaatcatcacgaaccagttttgtttttcttttaaatttgaacatcacatcttgtgttttagttttttgctctatgatttttttctcactgcttttcagtcttctctgtacttcatttttgtgaaaaagtgaaaatcacatataatctttatttaaaaatgctcaccaagcactgcagactttggagttagggattcagcagcttgttccagtgaaaaggaggagtgaagctggggaagttagtatctaagaggggcaagctgattgcatgtgcatttatacctatgcctttaaaacattcccataaaaagtattaataaagaaatttccattccacactagtactgatgaaaaggtggttgattttgccttgtgataattatcaaaggatagtttttcatccttagattttattcacatgagagattttttttattttctctgttgacttaggaacacatcataaattcacaccaactgacacgttgctgacgtctgtacttgacataaccatttttattcatacaggaagcattaaatataaaagatggtcagttttgaagagcaaagggtgctgaaatgacttgtacggttggctggtgctttctcaaatggattgccatagttcattactagtaaagaaaaggaaaatgtgatttacgttgtcatttttcctattaaaaaaaacccttaagaatggggcacttgagctgtccctgcaatgttttcatatctagtagtcattttagggaaagtgataatctgtagaatgaatagttatgttttgatatgactgatactttctttgttaaaaggttgtattaagtcttcaatttcaagtctagcttaaaagtgtaaacattatgtgattcatttgaatacaagaatgcctatgaaatacccactataacagcattccttttgtgtttagaactatagaagaaaatgtcttcaaataaagtagttttcagtcaaaaaaaaa

SEQ ID NO: 223099 - DNA, 1000 bp, Homo Sapiens
atggatacccggcgctgtcccacctcatctttccttcgttctccagaaacccctcctgtatcccccagggaatcacttcctggggctgtggtaggggctggggccactgcagagcccccttacacagccctggctgactggacactgagggagcggctgctgccaggccttctccctgctgcccctcgaggcagcctcaccagccagagcagcgggcgaggcagcgcttcgttcctgcggcccccctccacagccccctctgcaggaggcagctacctcagccctgctccaggagacaccagcagctgggccagtggccctgagagatggccccgaagggagcatgtggtgacagtcagcaagaggaggaacacatctgtggacgagaactatgagtgggactcagaattccctggggacatggaattgctggagactttgcacctgggcttggccagctcccggctcagacctgaagctgagacagagctaggtgtgaagactccagaggagggctgcctcctgaacactgcccatgttactggccctgaggcccgctgtgctgcccttcgggaggaattcctggccttccgccgccgccgagatgctactagggctcggctaccagcctatcgacagccagtcccccaccccgaacaggccactctgctgtgaacatccctaatgtgaggctgtgaaaaggcatatggacctgcaaaggaggcccccaaccagacagacctagtttcaaacgagggcactgcccctgcctgcccctttggtgcccaggcacagaccctgatagtgggtttgggtcaccttggtatggaatgtatgtgctgaccccctaggtgagtctggggattggaacagggatcttaggtctgcctctctctctctctctctctctctctctctctctctgtgtgtgtgtgtgtgtgtgaagttttttacaggtgaataaacaaagtttgaaagaaaaaaaaaaaaaaaaaaaaaa

SEQ ID NO: 223100 - DNA, 1000 bp, Homo Sapiens; identical to SEQ ID NO: 117787

SEQ ID NO: 223101 - DNA, 1000 bp, Homo Sapiens; identical to SEQ ID NO: 117788

SEQ ID NO: 223102 - DNA, 1000 bp, Homo Sapiens; identical to SEQ ID NO: 117789

SEQ ID NO: 223103 - DNA, 1000 bp, Homo Sapiens
tgagctggggcaggcctccctcagggccaggggcgatggcaccccggggacaggcagacctccttcctgccgtcagcacccccttccttatcactgtctggtctccgagcttcggctgcagcctgaggtgtgtcctgggctcctcagagcctgaagcaagcttttggaagcctgcagtcctcccagctccagtgcagaagcctctctctccagcctttccccaggcaggagttggggttgggggcctctgtccctcatcgcttaccttggaaaggtgggaagctggcaatctgcaccttggggcctgggctccccctctctgtgccagcggcttcccagcacctgggaggggctgcagccccagctggactccagcctgtccctcttagcactctagctgcccactccagggcagggactcgaaaccccctccgtcctgagcagccacctccagggccctgtttgggaccactctctcagtccccaggtcctcagggccccagagcgggagggtctcctacctggaagtccccctgagctccagggcccagccctacctgccagtgctggtgtcagggcactcaacaccgagtgtgggggccacgccccttgccatgcccacggcctcctcctgtagcccctgcctgcacccacgatgctgcacgggcccgccctggtggggctcggcgagtaatgtgttttgtccccagttaaccaccattctgcggcctggttctgcaaggaaccagggctgccccaccgcccgccgtctgccgccctaggcttcctgactccattagttccgacacttgtgaaactccgagaagtgctgtggtctcagcaatgcacctgttttgtacatgattgtgtaatttaaaggtatataaatacaaatatatatatatatcagttgtgattgtatgactgtggataaaatccagaactgtgtcaaaaaaaaaaaaaaaaaaaaaaaaaaaaaaaaaaaaaaaaaaaaaaaaaa

SEQ ID NO: 223104 - DNA, 1000 bp, Homo Sapiens
cagtcatttcacctggactatttcagtcattacacaggtgtccaaccttttgtcttccctgggccacattggaagaagaaaaattgtcttgtgccacacatacaatacactaacattaacaatagctgatgagctaagaaaaaaaaaaagtctgtgcatagtttagtgatacaccacctccgataagcaaaaaagtcctcacattcaatgggttccatacccatgaattctaaaacttcatcctcttttgtccctttcgagttaacattacagccacagtgacctttcaaaaatgcaaattaagttactcttaaaactctagttaaaatacttgatgtacataaagtgcttagcaaaatgaccaactcatactaagtgcttagtaaatgttagataagtattctccagaattgatgtaaattatttttaaacagtgcattcttgaaagcagtatggcagtcataaaaattttggaaccaaaacagtatctttttttaagctaaaaaaaaagttttaaatggtgtctttctatgttgcccagggtggtctcaaactcctgtgctcaagtgaccctcccacctcattctcaagtggctgcaattacaggcaaccagcctgacttaaaacagtatcttaaggtagatggtgattagcacatgtagtatgcttaacatttaatattataataagacatcacagcggctgtctcatgattaaggctgtgttcccttgttggtgaggaaattaattatgacttgataaatagaacatgttttaagaagtggctatatagctctggataaaacgaacaaaagaattagaattcctgcggggaatatatacaagactttatttagtcaagtaaaaaaaatcactaatgtttaactgaagaaagagaaattgaataatatagttctatttcaacatgtgggttcacagatttattctaaccttccaagtaaagttgttccactagtaaaaaaaaaaaaaaaaaaaaaaa

SEQ ID NO: 223105 - DNA, 1000 bp, Homo Sapiens
agtctgtatgtgtgttatctccacccacccacacacatacatacatacacctggtttattctctacgagctacttcttagatcaaaggaattattttgagaatttttattcccttctttgacttttcctggattgctagtcattcactatagcatttatcacagtgggatcatccaaaggaacattctagagatcgtctgttcaaatatatcctatatatttttagcatagtaaactttaaaaaggacaagtgtttgcctgactgagcctgtgaagaaaatgtgtccgtatagcacgacaggagttgctgatgtgaccttaatgaaacagaaataaacaggggtgagtgctcggaaaggaagggcgggccaaggcactcagccttctagtgcagtagcatcagtgacacgcaccccaccagacctcgtccactttcaccacccctgaaggcagaccatgtatgaaaaggttctctacacagctgctgcagaggacagcagcttatcctgatttcagagaaactgaggcaccagagatgcttctcttccgtgcaccttgataagcatgaaggacattccaaaaggtaataactctatcatgacagtccagcaattcattaaattatctgttcatgctcccacctgcaactgctgaataatacactcagtttgtcttctagtactcagctcagtttgatctagatattgagatacctatcttgaattcaaagaatgttttcatctttaagatgctataaagactgataaaatgctctcttctatgaattgtgttagagaattacctgctagaaaaataatttttcattataaaatacacatttattatataacaaattcaagtagtccataaatgcatatggtaaaatgagaaagtcctgtgcagtcctgagatgattactcttatttggtgtgctgaaaatttgagttgacaaaataaaattctgtggttttttaagtgaaaaaaaaaaaaaaaaaaaaaa

SEQ ID NO: 223106 - DNA, 1000 bp, Homo Sapiens; identical to SEQ ID NO: 117792

SEQ ID NO: 223107 - DNA, 1000 bp, Homo Sapiens; identical to SEQ ID NO: 117795

SEQ ID NO: 223108 - DNA, 1000 bp, Homo Sapiens; identical to SEQ ID NO: 117799

SEQ ID NO: 223109 - DNA, 1000 bp, Homo Sapiens; identical to SEQ ID NO: 117800

SEQ ID NO: 223110 - DNA, 1000 bp, Homo Sapiens; identical to SEQ ID NO: 117802

SEQ ID NO: 223111 - DNA, 1000 bp, Homo Sapiens
aaccgccctttttacctcttcctctgtggccatatgttccatgctgactgcctgctgcaggctgtgcgacctggcctgccagcctacaagcaggcccggctggaggagctgcagaggaagctgggggctgctccacccccagccaagggctctgcccgggccaaggaggccgagggtggggctgccacggcagggcccagccgggaacagctcaaggctgacctggatgagttggtggccgctgagtgtgtgtactgtggggagctgatgatccgctctatcgaccggccgttcatcgacccccagcgctacgaggaggagcagctcagttggctgtaggagggtgtcacctttgatggggggtgggcaatggggagcagtggcttgaacccacttgagaaggctgcctcctaggctctgctcagtcatcttgcaattgccacactgtgaccacgttgacgggagtagagtagcgctgttggccaggaggtgtcaggtgtgagtgtattctgccagcttttcatgctgttcttcagagctgcagttatgccagaccatcagcctgcctcccagtagaggcccttcacctggagaagtcagaaatctgacccaattccaccccctgcctctagcacctcttctgtccctgtcattccccacacacgtcctgttcacctcgagagagagagagagagagcacctttcttccgtctgttcactctgcggcctctggaatcccagctcttctctctcagaagaagccttctcttcctcctgcctgtaggtgtcccagaagtgagaaggcagccttcgaagtcctgggcattgggtgagaaagtgatgctagttggggcatgcttttgtgcacactctctggggctccagtgtgaagggtgccctggggctgagggccttgtggaggatggtcggtggtggtgatggaggtggagagcattaaactgtctgcactgcaaaaaaaaaaaaaaaaaaaaaaaaaaaa

SEQ ID NO: 223112 - DNA, 1000 bp, Homo Sapiens
tgccagtaatgaagaaaggagctctctttacgagaaaaggaagatcctggctggtcagcatgaggatgcccgggagctgaaggagaacctggatcgcagggagcgagtagtgctgggcatcttggccaattacctttcagaggagcagctccaggactaccagcacttcgtgaaaatgaagtccacgctcctcattgagcaacggaagctggatgacaagatcaagctgggccaggagcaggtcaagtgtctgctggagagcctgccctcagatttcattcccaaggctggggccctggctctgcccccaaacctcacgagtgagcccattcctgctgggggctgtactttcagtggtattttcccaacattaacctctccactttaacctcttctaaaatacccaaccaaaagatcactgtttctctcaacactatttaatctgaaaaatgtttcagtacaaaccactgtttgaactatctgggttattggtgtttgttcctgatgaaaggaaaaaaattctctccaggaggaagcctttttccttcttgcccttcctgattgatcttctgagagctcgaatgctgctggacacgtacccctttctattattactttgtagtagaaagaaagttaatgaaactgagaactgattggagggtgtttgatcatttagtttttaacaggctgaggcaacatggatcagtgtgtgtccccctcaggaatgtatccacagtggccttccttgctggtgggcagtgtatcctgatggcagggtacaagtaccattaatgaagggtctgcaacataaagccttaaaaagacacacactaagaaaactgtaaaaccttgaacattgttatttatattttttaaaatggaaaagatcactatgtttgttgtgctaaccacttatttgattctgttttgtggtggacatagatgattacgtttgagctttgtattttgtgaaaaccttaatgaaatgaattccaaagat

SEQ ID NO: 223113 - DNA, 1000 bp, Homo Sapiens; identical to SEQ ID NO: 117803

SEQ ID NO: 223114 - DNA, 1000 bp, Homo Sapiens
ggtcttttatgtcctcccagcagacagacatcaaggatgagttaaccaggagactactcctgtgactgtggagctctggaaggcttggtgggagtgaatttgcccacaccttacaattgtggcaggatccagaagagcctgtctttttatatccattccttgatgtcattggcctctcccaccgatttcattacggtgccacgcagtcatggatctgggtagtccggaaaacaaaaggagggaagacagcctggtaatgaataagatccttaccacagttttctcatgggaaatacataataaaccctttcatctttttttttttcctttaagaattaaaactgggaaatagaaacatgaactgaaaagtcttgcaatgacaagaggtttcatggtcttaaaaagatactttatgtggttgaagatgaaatcattcctaaattaaccttttttttaaaaaaaaacaatgtatattatgttcctgtgtgttgaatttaaaaaaaaaatactttacttggatattcatgtaatatataaaggtttggtgaaatgaactttagttaggaaaaagctggcatcagctttcatctgtgtaagttgacaccaatgtgtcataatattctttattttgggaaattagtgtattttataaaaattttaaaaagaaaaaagactactacaggttaagataatttttttacctgtcttttctccatattttaagctatgtgattgaagtacctctgttcatagtttcctggtataaagttggttaaaatttcatctgttaatagatcattaggtaatataatgtatgggttttctattggttttttgcagacagtagagggagattttgtaacaagggcttgttacacagtgatatggtaatgataaaattgcaatttatcactccttttcatgttaataatttgaggactggataaaaggtttcaagattaaaatttgatgttcaaaccttaaaaaaaaaaaaaaaaaa

SEQ ID NO: 223115 - DNA, 1000 bp, Homo Sapiens
cgcttccttccagggaaagatctgaccgaaaaagaaatgatccaaaaattagacaagctggaactacaactggccaagaaggaggagaagctgctggagaaggatttcatctatgagcaagtctccaggctcacagacaggctctgcagcaaaactcagggctgcaagcaggacacactgctcttagccaagaagatgaatggctatcaaagaaggatcaaaaatgcaactgagaaaatgatggctcttgttgctgagctgtccatgaaacaagccctaaccattgaactccaaaaggaagtcagggagaaagaagacttcatcttcacttgcaattccaggatagaaaaaggtctgccactcaataaggaaattgagaaagaatggttgaaagtccttcgagatgaagaaatgcatgccttggccatcgctgaaaagtctcaggagttcttggaagcagataatcgccagctgcccaatggtgtttacacaactgcagagcagcgtccgaatgcctacatcccagaagcagatgccactcttcctttgccaaaaccttatggtgctttggctccttttaaacccagtgaacctggagccaatatgaggcacataaggaaacctgttataaagccagttgaaatctgaatatgtgaacaaatccaggcctctcaaggaaaggacttcaaccaggcttccttgtacccacaggtgaaaaatgtgagcataatacttctaatattattgataagtaaggtaaccacaattagtcagcaacagagtacaacagggtttctatttacccaccaactactatacctttcatgacgttgaatgggacatagaactgtcctacgtttatgtcaaagtatatatttgaattgcttatattttctttttcactctttatattgagtatgttccagaaatttgtagtaggcaaggtgctataaaaatgcactaaaaataaatctgttctcaatgaaaaaaaaaaaaaaaa

SEQ ID NO: 223116 - DNA, 1000 bp, Homo Sapiens
agctggaggagctgcgggctgccctggagcagggcgagcgcagccggcgactggcagagcaggagcttttggaggccaccgagcgcctcaaccttctgcattcgcagaacacaggcctcctaaaccagaagaagaagctggaggcggacttggcccagctgagcggggaggtggaggaggctgcacaggagaggcgggaggctgaggagaaggccaaaaaggccatcactgatgcggccatgatggccgaggagctgaagaaggagcaggacacaagtgcacacctggaacggatgaagaagacgctggagcagacggtgcgcgagctccaggcccgccttgaggaggcagaacaggccgccctccgtggcgggaagaagcaggtgcagaagctggaggccaaggtacgggagctggaggctgagcttgatgcagagcagaagaagcacgccgaggcccttaagggcgtgcgcaagcatgagcgccgtgtcaaggagctcgcataccaggccgaggaggacaggaagaacctggctcgcatgcaggacctggtggacaagctgcagagcaaggtcaagagctacaagcgccagtttgaggaggcggagcagcaggccaacaccaacctggccaagtatcgcaaggcccagcacgagctggatgatgcggaggagcgggcagacatggcggaaacccaggccaacaagctgcgggcacggacccgggacgccctgggccccaagcacaaggagtgacggcctgaccccctgggctctaaagaggaatgtctgctgttgcacatctggctgaggccacctgccccgatcctgccatctctgcatcgccccctgctgccttcggccttccctgggccctgaataaacaccacagccagtttccttctcattcttttctttggggttcaggaggaaaaacacagtcctagggacaaaagccaggtccacagcagtcatttttaaaataaagttatttaatagtc

SEQ ID NO: 223117 - DNA, 1000 bp, Homo Sapiens
cagatgaacagctactagttattttatcaaatacagatgacatttaaaaattcttaactacaagagattagaaatataaaccttgcctggctcttgccaggagataacaaaatgggttgctgatgaactgcacccttttacatgtgggtagaatataagctcacatggcagtgagatgttgaaaagtcaaaagagacctgtctctctcctttcttttctatctttaaaccagaaaacctcatactcagtcctcagtgaaagaaagtaaagtattaaggactttagacagaagagcattgtgtaacttgactgaagatcatccattaatagttattaggcatttaggtaaaattttctaatacctaaaaattgtcaaaaacagtcaatagggctactgctggcccaaagaccatttaggtccacctcctcttttttgctctttttttttttctgtgacagtttcactgtgtcgcccaggctggcgttcagtggtgcaatctcagctcactgcaaactctgtctcctgggctcaagtgattctcgtgcctcagcctcccgaatagctggaattacgggcatgcaccaccacacctggctaatttttgtatttttaatagagatggggtttcaccatattggccaggctgatctctaactcctggcctcaagtgatctatctgcctccctcagcctcccaaagtctgggattgcagacaagtcatcgtacccggccttcttttttgcccttaaaagtaagggatgtgggtttgtacaaaaaaaaaaaaaaaaaaaaaaaaaccagcatacatatgcaaaactatatatatatgtatatgtagagaaaaatacttcccattgatcatttttaaaaggcttctgattggatattgtgttttaaccaaattttaaagattaatggaatcatgaaagggaaaaaaattgatacaactatgcagattttataaatgtgcaataaaagtatttgttttaaaaaaaaaaa

SEQ ID NO: 223118 - DNA, 1000 bp, Homo Sapiens; identical to SEQ ID NO: 117806

SEQ ID NO: 223119 - DNA, 1000 bp, Homo Sapiens; identical to SEQ ID NO: 117807

SEQ ID NO: 223120 - DNA, 1000 bp, Homo Sapiens
ccgtgctccagggcgaggagtcctcagagagggagagcctgccagagtccttggaactgagctcccctaggtcccccgagactgactgggggcggcctcctggaggcgacaaagacctcgccagccctcacttaggtcttgggtctccgagggtctcccgggcttccagccctgagggtcgccacctcccttccccacagctaggaaccaaggccccggtggcccggccccggatgaatgcccaggagcagctggagcggatgcgcagaaaccaggaatgtggacggcccttccctcgcccgacctccccccggcttctcaccctgggaaggacactgtccccagccagacgccagcctgacgtggagcaaaggcctgtcgtaggacactcgggagcccagaaatggctcagaagctctgggtcctggagtagtccaaggaacaccaccccttacttgccgacttccgaaggtcaccgggagcgggttctcagcctctcccaagccctggctactgaggcgtcgcagtggcacagaatgatgacaggtggaaatttggactcccagggagaccctcttcccggtgtgccgctgcctccttcggaccccacgcgccaggagacccctccccccagatctcccccggtggctaattcgggttccacggggttctctcgccgagggagtgggcgtggaggaggtcccaccccctgggggcccgcgtgggatgccgggatcgcccctccggtcctgccacaagacgagggggcatggcctctgcgagtcactctgctacaatccagcttgtaatccgcccaaaagcggcagccaatcggagcgcgaggacgtggtctggaggtaccgccgaagatctgggaccactcagggcatcagggggcgtggtctggtccccattgcgggcccgggaggggaatggtttctatggccaaagtttggttttctcaacactgtctaaatttggattaaaactttgaactttt

SEQ ID NO: 223121 - DNA, 1000 bp, Homo Sapiens
tgcagttcggagtgaaccatctggggcactttctactcaccaatcttctccttggactcctcaaaagttcagctcccagcaggattgtggtagtttcttccaaactttataaatacggagacatcaattttgatgacttgaacagtgaacaaagctataataaaagcttttgttatagccggagcaaactggctaacattctttttaccagggaactagcccgccgcttagaaggcacaaatgtcaccgtcaatgtgttgcatcctggtattgtacggacaaatctggggaggcacatacacattccactgttggtcaaaccactcttcaatttggtgtcatgggcttttttcaaaactccagtagaaggtgcccagacttccatttatttggcctcttcacctgaggtagaaggagtgtcaggaagatactttggggattgtaaagaggaagaactgttgcccaaagctatggatgaatctgttgcaagaaaactctgggatatcagtgaagtgatggttggcctgctaaaataggaacaaggagtaaaagagctgtctataaaactgcatatcagttatatctgtgatcaggaatggtgtggattgagaacttgttacttgaagaaaaagaattttgatattggaatagcctgctaagaggtacatgtgggtattttggagttactgaaaaattatttttgggataagagaatttcagcaaagatgttttaaatatatatagtaagtataatgaataataagtacaatgaaaaatacaattatattgtaaaattataactgggcaagcatggatgacatattaatatttgtcagaattaagtgactcaaagtgctatcgagaggtttttcaagtatctttgagtttcatggccaaagtgttaactagttttactacaatgtttggtgtttgtgtggaaattatctgcctggtgtgtgcacacaagtcttacttggaataaatttactggtacaattct

SEQ ID NO: 223122 - DNA, 1000 bp, Homo Sapiens; identical to SEQ ID NO: 117809

SEQ ID NO: 223123 - DNA, 1000 bp, Homo Sapiens
ctacagtaaagggtatgtcagctacatgaagttgtaagaaaagcttccagtagagcttcttatattaaagaagttgatggatatttttgaatttctggtttgcctgaatccacctgcagttaccccgatccgtttgcaagaaccagatcgtacttgaaactatagtggccacactctgccttcctgagtcccttccagtcatgtgtgcatcatgtctctttgccaagggaggggagaaaggaacttttaaactgcagttttaactttttctaagctgtttcttgatgggagaggttctgtgcaaaactaccacattctgtccccaaaatgtggaatgcatccaaataggagtcttctgcctcttaacttaaaagaacataggaattttgtttttggtttctttatcatgctacagagagtgaatacactggaattcagacaccgactctgagctgctaggaacctcatttgtccatgtgcaaacgctgtattccaaggcctgtgaatggcagcctgaggaagttttgcatgcaggctgtgttttcgagcaggactaacaactgggaaataagcaaaaaactgcatcgatccccagcctggtgttgttcttccctatacttcacactgaactcaggatgggaagaaaaaggaaacaagctttggctttttccatctcaaaagtattgtggcacctcaacatttcagtgttttgctttttaaaaaatgccctattgtaagttgttggtttatactgtataagtaacactagtagctgttttgaataacataggtgctcttcctcatctcatctcctacaccgtggtgagcatacagagtgtcctgatttgtgttaagtgactgagaagatgttaattacttttgaaaaaggatcatggtttttgctctactttataatcaagacaagtgtttattaaaatactgttttggaatgttggctgtaatgtaacagcaattttcataataaaaggcattcatcttt

SEQ ID NO: 223124 - DNA, 1000 bp, Homo Sapiens
atgtcactgaaggcatggcagctgagctgaaatgtcgggcctccacatccctgacatctgtatcttggattactccaaatggaacagtcatgacacatggggcgtacaaagtgcggatagctgtgctcagtgatggtacgttaaatttcacaaatgtaactgtgcaagatacaggcatgtacacatgtatggtgagtaattccgttgggaatactactgcttcagccaccctgaatgttactgcagcaaccactactcctttctcttacttttcaaccgtcacagtagagactatggaaccgtctcaggatgaggcacggaccacagataacaatgtgggtcccactccagtggtcgactgggagaccaccaatgtgaccacctctctcacaccacagagcacaaggtcgacagagaaaaccttcaccatcccagtgactgatataaacagtgggatcccaggaattgatgaggtcatgaagactaccaaaatcatcattgggtgttttgtggccatcacactcatggctgcagtgatgctggtcattttctacaagatgaggaagcagcaccatcggcaaaaccatcacgccccaacaaggactgttgaaattattaatgtggatgatgagattacgggagacacacccatggaaagccacctgcccatgcctgctatcgagcatgagcacctaaatcactataactcatacaaatctcccttcaaccacacaacaacagttaacacaataaattcaatacacagttcagtgcatgaaccgttattgatccgaatgaactctaaagacaatgtacaagagactcaaatctaaaacatttacagagttacaaaaaacaaacaatcaaaaaaaaagacagtttattaaaaatgacacaaatgactgggctaaatctactgtttcaaaaaagtgtctttacaaaaaaacaaaaaagaaaagaaatttatttattaaaaattctattgtgatctaaagcagac

SEQ ID NO: 223125 - DNA, 1000 bp, Homo Sapiens
aattcctatgtggaaatgattccagccatggtcccctcacttgagcatgtgaatattctcacggagagaagccccagcgagattttccggtgaatacgggattgcacttactctttcatcacggaaacagaccccccgagagaagccccaacgagattttccggtgaatacgggactgcacgtactctctcatcatgaaaacagagccccgttcataaatttttcatctttatttttaaggttatactcctctaaataacccttaagcctcatcaagaaaggtttgtttatagtatttttactatagcttcatccttgataacgtcctaatttccttctggacaacctccttgaccaatggcatattgagatctatgtgacatgaggatatttctcagtaccactttgttactggtacctgatgtacacggattgcgaccagagcatgatgcctccatcaagtggtaatatgtttgcagcctgctgtccagccaagagtgacagatacttctagtgacttccccggtatccactctcatcttcttccaatatcaagagaatccaggttctgtcagattagtaaggtgtgctaatctaaattttaaaaaatctcttacaggttttcttgcagctggtgccatccatgtctcacagccctggccactggcagatcagcagatgtcaccacatgggcttctgagaaagctcttgaatggggatcgttcttaaacatgaattcctccctgtatgttttgttctttgctttacttttcaccttgcaaagagatccagtacctagtattggaagatccaccttaacgaccgtgcatatgaaaaccacagtctaaggaagtgactgcagaaagctcacagcgaccctggcctcccctgtggcctctttgagtgtctgcagcagccctggacttccagacttctatcacatgagaaaaaataaaactgattattggtttaaaaaaaaaaaaaaaaaaaaaaaaaaaaa

SEQ ID NO: 223126 - DNA, 1000 bp, Homo Sapiens
atggatggatgtctttttcctccccattttgctttatactgagtaatgcactcttgcaagtgtatacaaaaactaaatagacttctgccctccaacatctttttattgcattacttcaaaatcctaattttgtctctactgatatgtcttattaacatctgaaaaaatatatattttttattggaaaattctaatttgttaggccttgaaagttttgtgacaattattttgctgtgtttaaccacaatcattcaccttatggcatgctttgattactagacttcaggcagtctcattcattgtatcatacttacacacaattagtaagttgtctccatgtgtgctatatgtctgaggtgtatggagtttttatttaaaaagtgtgccagtctgaatataagcatttgattttgtaacattggacttttcttaaaagtacagaggttcaaagtataggtatgtccattggcataagaatagagtgggtgagggtctggaccaggttccaggttggtccagtcagatgccagaacaaagaagaacagtcaactaaactggtctacttcaaaaatagtgggcctgtgtgaagaatgagaccacatgtgggtgtgcacacctcttgtccccaggtttccctccctttgagcttttctttccctccctaacttctctggcctattgtcattgttgtttctttaaacttaaggagagaaaaacaaaaatgagattcctacactttgcctaattgagccactaccaggttttctggcagctgtggccacattatttgtgagatgattttttttctttatgttcagagtgacttttgattctgattctttatgttttgtatggagcggcacttttatctgtgttttagcagaactgttcctctgtatcctttacggtttttctttgtttttgtttcctttttaaattatgcatagagtttttttgtgtgtatgaaattaaagcctttattaaccttcaaaaaaaaaaa

SEQ ID NO: 223127 - DNA, 1000 bp, Homo Sapiens
aaaagggaagagggttctgatattgaagatgaggacatggaagaacttcttaatgacacaagactcttgaaaaaacttaagaaaggcaaaataactgaagaagaatttgagaagggcttgttgacaactggcaaaagaacaatcaagacagtggatttagggatctcagatttggaagatgactgctgattccagtgccacagatgaacccacaaggacatagctgttccctaacttggtggatggctccagtttgcttttaacgaaaatcacaacttcaggagacatctgaaaagaatgatgtctctgaaagctgtcctttcagatgagggagaaatgaaggatttcacacttcagaatattttactaaaaacattccagtcttggccgggtgcggtggctcctgcctataatcccagcactttgggaggctgaggcaggaggatcacttgagcccaggagttcaagaccagcctgggaacacagcgagaccctctcattaaaaacaacaaaacaaaacaattccagtcttggagtagtctaacagaagaaaatgtaaaattatttgagtgtaaataatagatgtcagtatttatcatgatgggtcacatatagacatatgtacatattatatatatatatatatatatatatatatatatatatatatatatataagctcttttttctgaggctattttatagttatttttaaacataaagatacagaagtcttcttgacttctgattttcaaaaccattcctcagtatcttcaggcatttgacctcctgaatgtgcttggccctgggcttcagttatcctttgatgtcctgcaggggtggctaatgtgctggggtttttctgtgttaatagtcacagtattgttttattggtgaatagctgaaaaacagagggattaagtcatattccgggaaagagaattatagtttttatgcctcctgttgaataaatggtgtcctgataaaaaaaaaaaaaaaa

SEQ ID NO: 223128 - DNA, 1000 bp, Homo Sapiens; identical to SEQ ID NO: 117811

SEQ ID NO: 223129 - DNA, 1000 bp, Homo Sapiens
cgctgatacctccaggtactcccctcactgtcaaagctggggctcagcctcttgtcatctggagctttgtgggcaaagctgagaagctgcaacccagatttcaacccaaaaaggtcaagctgaatgcctcagactgatgtggaaggcagctggccttcctgggttggaacgaggcagtggccctgagccccttctccagggccaggtagaaaggacaaacttggtctctgcctcggggaagcaggaggagggctagaagccagtccctccccacctgcccagagctccaggccagcacagaaattcctgaggccaacgtcaccaaagttagattgaatgtttattatctttctttttcctttttaccttattgatttgatgaatcttgaaatggattcatttccataaaccaagttaaagtatggcccgaccatttaagaaaacaaccatctgagacacgcaggaaattgtgagcatttcgacccgagctctcatttcctatttgtgaagggtcagacacagtctacccaggggtgtctgggggacaagggggtctctggagatgtcacccagggagccccctctatgtctgagaggctgccactgctgcacatgctcagtgaggcttggcggccatcctggcacatggctcttcctgggtcaaccgtgacctgtctggctcaggaatgggctctggctgctgggggagccgtgtcactcctgggccatgggggcacctcctgggcacttaggtgtttcagcatagattccagtttcgcaccctgggcagacccccaggccccatccgggatagggcagaggaggtgctggcggccccagggaaggagggtgtgtaccccaaggccccctggctgtgctgaggggctggggtgagcgctccatgttcacatgagcactgctgcctcttcacttgtgggactttttgcaaacccaaggatgaactttgtgtgcattcaataaaatcatcttggggaagagg

SEQ ID NO: 223130 - DNA, 1000 bp, Homo Sapiens; identical to SEQ ID NO: 117812

SEQ ID NO: 223131 - DNA, 1000 bp, Homo Sapiens; identical to SEQ ID NO: 117813

SEQ ID NO: 223132 - DNA, 1000 bp, Homo Sapiens
gctgctgcaggggccggagccaccacccggcctccccctgcccagtcacccacaggcagcgacacccgcctgcctgccttcctcagcttcaagttcctcaagtcacccgagacccggcgggactctgagcgcagccactcaccgcccaaagccttccatgctggcaagctcttcccctttggtggcacccgggctgagcctgggtccaacggggcgggcgggcaggcccggccagatgggacccccagcagtggcagcagccgggttcagaggagtgggccggtggacgaggccctggctgaggagctggaagccccccggcccgaagaggaaggctcagggacagcgctggcccccgtgggcgcccctgccctccgcacccgccgcagccggagccccgcgccgccgccgccaatgccgctgccccggcccccgacaccgcccgccggctgctggcagtgggacgggccctggggctgcgggggcgagggtgccgccccccgccaggccctggccgctgccgagtgcccaccctgtgccatggccgggcccccacccgccccccagcccctgccgggagacgccagcttttacagcctcccgcccccaccgctaccgcccacctcggatcccctcgagaccccagcgccctcccctagccccagccccagcccccaggccgtgtgctggcccagcggctggcattagctctacccgccctgccttctcttctcatatgcaatatcagtcattcacaggggcggccggtctccaaaatgcaaaatgcgcttcagcccccgagggcccccagtattggtcggtgccccccatctgccgttttcctttccaaacgaaaggaaacccacaaatccaacagaaaacacacacacacacacacacacacacacacacagaacaggcgattatttatttgtttttaatttattttgtcatatttttgtaaaacggcagaaatgcaataaaaactatatttcaacag

SEQ ID NO: 223133 - DNA, 1000 bp, Homo Sapiens
aagacgccttcatctatttggaagagatagtacaattcgaccaggctggctcacagttggaccaacgcttacaaatagcaactacaatgcagaaacatatgcatcctatttcagtgctcctaattcctacttgactggttgtacagaagaaattgagagacttcgaccaaaatcgcctcctcccaaatctaaatctgaccgaggaggtggagctcccagaggtggaggaagaggtggaacttctgctggccgtggacgagaaagaaatagatctaacttccgaggagaaagaggtggctttagagggggccgtggaggagcacacagaggtggctttccacctcgataattgttgaagacattgaacctattcatcctcctctaaccttctttattgtaattaaatttcaagtgggagacttaactttagaactcacttccagcttgcactttgctttaatttctctgagctgcaagaatgtcttagcgagccttgcttgcagttgtcacacacactgtccggtttttttcaggataaatgaatgattctgccttttgttatgtgcgtgaacagaatggaacaactcaagtagcttcatcttcagagactgaatttattctgatagacttcagctaattacaaaggattttgctaatttttgggaataaataatggaaaaagatccagtctgtggtatcatgctagtgctgacagggccttgatagaatagagttggaaaagatggtaagcttttgtcagggttttaacattttcttgatgaaacaataaaaagaggtaagcttttttcttctttttttttaagttttaaataaactcagatataatttgaatactgaagaaattaagagactttgaacaaaatctcttcccaaatctaaatttgataggggaggtggagattccaggggtgggtgaaagaagagatagaacttagcaggcagacttaaaaaaaaaaaaaaaaaaaaaaaaaaaaaaaaa

SEQ ID NO: 223134 - DNA, 1000 bp, Homo Sapiens
gctctcaggccttcatttcaacacagaatggatctccccgcctgaaccgggcagaggtcccagccaggcctgcaccccaggagccctatgatgttgtcttgcaacgaaaagaaaatgaaggatttggctttgtcatcctcacctccaaaaacaaaccacctccaggagttattcctcataaaattggccgagtcatagaaggaagtccggctgaccgctgtggaaaactgaaagttggagatcatatctctgcagtgaatgggcagtccattgttgaactgtctcatgctaacattgttcagctgatcaaagatgctggtgtcaccgtcacactaacggtcattgctgaagaagagcatcatggtccaccatcaggaacaaactcagccaggcaaagcccagccctgcagcacaggcccatgggacagtcacaggccaaccacatacctggggacagaagtgccctagaaggtgaaattggaaaagatgtctccacttcttacagacattcttggtcagaccacaagcaccttgcacagcctgacaccgcagtaatttcagttgtaggcagtcggcacaatcagaaccttggttgttatccagtagagctggagagaggcccccggggctttggattcagcctccgaggggggaaggagtacaacatggggctgttcatccttcgtcttgctgaagatggtcctgccatcaaagatggcagaattcatgttggtgaccaaattgttgaaatcaatggggaacctacacaaggaatcacacatactcgagcaattgagctcattcaggctggtggaaataaagttcttcttcttttgaggccaggaactggcttgatacctgaccatggtttggctccttccggtctgtgctcctacgtgaaacccgagcaacattaaggctttcagggcttttcttggtctttccttaaaaagacttggtaaatttgcatgtcttgtaaatcactttcttcttttgtttt

SEQ ID NO: 223135 - DNA, 1000 bp, Homo Sapiens
agagcatccagagcctctgtcctgcccacgctagcctccctgcagggaccccgggccggctgcaggggccaacaagaggtcagctttgcccagcaggggacccggaggagcctggtggctgcctcagggcagggtgcctggcggagaaggcctgggccctcccactggtccctcggagatctgctggggctatgggaatcggggcgggtgatggaggtggacaagagtggggccactctgcgcctctgctgttgcggtgaatctggaagccggagcaagggccactccacaggctctttggcacagcagggctccctatgtgcctcccaaacgtcaaatgcaggctacccattctccccatcagctgcccacctcgttccccagccctcacccctcacccctcaccatccttcctcaggacttggctaaacaacatgcatctcatttcttcttggagtggggagatgcgggaagctgacccagtggtcctctaggcaggcagggtgctcctggtgtctgcccaccactgtccccttgctgatggcatgggggtccgaccaggcactgacaccgcaggcagaggttgctcggggccttgggtcgggtttaccaatcagccaggacgcccggggccaccagctcagctaccacttccccttccctctgcaccctctggaaccctggcccaattcctcagaccccagagtggcctgggacccaagctgccgcagctgagtggccccagcggacacctcctcaggcttaaatctcaggcttcacattgcaatgacgattgcagttttatttttggagatgacacacctactgcttcttttctaggataaatctaattactgtttactggtggagtacatatgcatagaaacggcttctgtcggggggagagtatataatggaggaaatattatgtattgagattatatttattttctaaatgctgtaatttgaagccatttccataaatctatttaaggattgc

SEQ ID NO: 223136 - DNA, 1000 bp, Homo Sapiens; identical to SEQ ID NO: 117815

SEQ ID NO: 223137 - DNA, 1000 bp, Homo Sapiens; identical to SEQ ID NO: 117816

SEQ ID NO: 223138 - DNA, 1000 bp, Homo Sapiens
tcactctgtctttttagctcaaatgtattttcctaattgcccacttgagaacagacatttgacaagttatatcaacgactgtgcttgtccattattttacacatgccctagaagccaaaactgaaagccactggatcctggtctagctgaatcttcagagtgggaggtctccaaaaagatattaccttattgggcttaacaattcacaaggcactttcacacccattatctaatttaatcctcataatgactatgtgaggcaaatgccacattgcccatttttcagataaagaaacaaaatcttagggaagataagttgagttgtccaagagcacactgaaagttgaatgttatctaatgcattcctctacctttcagaagatcagtagctggctgagaatctttgccaaatcttccttgctagccagaagtggaattggcagcttctagaatatgtacacctctggacaaaatgttcctcaatcttaagatacaaagaccctcattgtctgggtctattcccacacttactgagtacagatgaaggaaagtggtagcaatttaatcataactttcatttgctgaaaaacattatgagaaggcctcccttcctaagccacctctggtcttgctaagtcttgatcttgcttcctgccagcaccaaacattacattcaggggatttcctctggctcagtcttttccccttgaagttctctaatagatgttacttttgacaaaagatcgcctatgagttacaagcaccaggggatgctctacatcaagggatgcaccttcagtcaaactgtcaaaaagcccagaattcccaaaggcattaggtttcccaactgctttgtgctgatatcagaacagcagaaattaaatgtgaaatgtttctgatgacttatgttctacaatctatggacatacgggatttttttttcttgctttgaagctacctggatatttcctatttgaaataaaattgttcggtcattgtt

SEQ ID NO: 223139 - DNA, 1000 bp, Homo Sapiens; identical to SEQ ID NO: 117817

SEQ ID NO: 223140 - DNA, 1000 bp, Homo Sapiens
gttaaaggagactgtgggaacccatctgttgggattttcttttttgtcagttacatcatcatatccttcctggttgtgctgaacatgtacatcgcggtcatcctggagaacttcagtgttgctactgaagaaagtgcagagcctctgagtgaggatgactttgagatgttctatgaggtttgggagaagtttgatcccgatgcgacccagtttatagagtttgccaaactttctgattttgcagatgccctggatcctcctcttctcatagcaaaacccaacaaagtccagctcattgccatggatctgcccatggtgagtggtgaccggatccactgtcttgacatcttatttgcttttacaaagcgtgttttgggtgagagtggagagatggatgcccttcgaatacagatggaagagcgattcatggcatcaaacccctccaaagtctcttatgagcccattacgaccacgttgaaacgcaaacaagaggaggtgtctgctattattatccagagggcttacagacgctacctcttgaagcaaaaagttaaaaaggtatcaagtatatacaagaaagacaaaggcaaagaatgtgatggaacacccatcaaagaagatactctcattgataaactgaatgagaattcaactccagagaaaaccgatatgacgccttccaccacgtctccaccctcgtatgatagtgtgaccaaaccagaaaaagaaaaatttgaaaaagacaaatcagaaaaggaagacaaagggaaagatatcagggaaagtaaaaagtaaaaagaaaccaagaattttccattttgtgatcaattgtttacagcccgtgatggtgatgtgtttgtgtcaacaggactcccacaggaggtctatgccaaactgactgtttttacaaatgtatacttaaggtcagtgcctataacaagacagagacctctggtcagcaaactggaactcagtaaactggagaaatagtatcgatggg

SEQ ID NO: 223141 - DNA, 1000 bp, Homo Sapiens
atgaaaggtctcacactggagagaaaccttatgaatgcaaacaatgtggaaaagccttcatttcttccagtcactttcgactgcatgaaaggactcatatgggagagaaagtctaagaatataagcaacattctgaagccttcggttgttccagctccttctgaatacacaaaagagttcatactggacagaagctgtgtgaatacaaacattgttctaaagcccttaattgttccagtttcttttgagcacgaaagaattcccactggtgagaaacagtatgaatgtaaacattgtgattaagccttcagttgacctaattcatttcaaagacaggactcgtgctgcagtgaaatctgttttgttttttgttttttgtttttttaaaaaaggccaagcttgttggctcatgcctatagtcccagcactttgggaggccaaggtgcaaggcaggcagatcatttgaggtcagaaattcgagaccagcgtggtcaacatggtgtaaccccatctctactaaaaattaccaaaaaatgaaccaggcatggtagtgcatgcctctaatcccagctactcaggaggctaaggcaggagaatcacttgaacctggagacagaggttgcagtgagctgagatcacgccactgcattccagcctgtgcgacagaatgagacactgtctcaagaaaaaataaaagtgggaaaatcttccaactgtcctctagagtgtgaatatatgaaaggagtcagagtggggtgaaagtctataaatgtaagacatttgggaaagccttcacacagccttttgagcacacatgagaatgtatactggagagaaaccctataaatattaagaatgtgggaaattcttcatcctagttcttttgttgttgttgatgatacaaaaatattttcatttaataaagattgtcaggttatatttaataagaaagaaagtatcatgtaaacagcccagtaataaaattttacaatcttaaaaa

SEQ ID NO: 223142 - DNA, 1000 bp, Homo Sapiens
tgaccttgtgtcactatttattttatgccctgatcagactagcaacttagataagtgaaagtttttctaacatgccttaaaaatattatggtttgatccaaagacccactttttctttagctcttgtgataagattttgttttttttacttttatacaaaggcagcatctttgaatttttttttcttttgatgttgcaacttttgggttcttttaaactgtgatagtgatggtaactgatgcctttcattttgttcaacttacacaaaacaagccagcatctgatcaaaagtattacataaaatattttcttaaactattgaaaggtgctttgatgattttctcctttggtttgtagaattaggactgaacttttgactcaaattgctacagttgccatcacctttctgtggtaatactactgatatttgcttttctatataaagaaatgttgcctaaggctgtctggtatttcttttcaagggttttccagtatgaatgttaatgttgtcagtgtatgtatgaatatgaaagtgctttgttttgtttgttgctgttttttgtttatgtgtgtgtttttaatttttttgttcttatcagcagtcttgtgttagcactgggtaagctttaattgtcccttagccaatcaaacattaaggactatggaggtctttttttttttatttaacatgtcattgttcatctattaaatcttgatcagggtttcaagaatgactgcagtgggttttggaaacagacttatcattattgatttgaggtttcccagagatatagttcacagttaattgttgcgctctaatacaactgaccatttaaaattgaacaagtttattgttttgtaacaatgtcagttgttaaaccttgacatttcaattaaaacatgaattgtagttataactcaatgcaaattcaacagttgtatttggagttaaattattttaacaaataaatttatttaatgaagaaaaaaaaaaaaaaaa

SEQ ID NO: 223143 - DNA, 1000 bp, Homo Sapiens; identical to SEQ ID NO: 117822

SEQ ID NO: 223144 - DNA, 1000 bp, Homo Sapiens; identical to SEQ ID NO: 117823

SEQ ID NO: 223145 - DNA, 1000 bp, Homo Sapiens
agcagggcttctactacgacgggaacctgctggaatgcgtggacgtggacgagtgcctggacgagtccaactgccggaacggagtgtgtgagaacacgcgcggcggctaccgctgtgcctgcacgccccctgccgagtacagtcccgcgcagcgccagtgcctgagcccggaagagatggagcgtgccccggagcggcgcgacgtgtgctggagccagcgcggagaggacggcatgtgcgctggccccctggccgggcctgccctcaccttcgacgactgctgctgccgccagggccgcggctggggcgcccaatgccgaccgtgcccgccgcgcggcgcggggtcccattgcccgacatcgcagagcgagagcaattccttctgggacacaagccccctgctgttggggaagcccccaagagatgaggacagttcagaggaggattcagacgagtgtcgctgcgtgagtggccgctgcgtgccgcggccgggcggcgccgtgtgcgagtgtcccggcggcttccagctcgacgcctcccgcgcccgctgcgtggatatcgacgagtgccgagagctgaaccagcgcgggctgctgtgcaagagcgagcgctgcgtgaacaccagcggctccttccgctgcgtctgcaaagccggcttcgcgcgcagccgcccgcacggggcctgcgttccccagcgccgccgctgacgccgccgacgccgccctcggcccagacctcggtgatcactgagggatttccgcgagctcggcctcacttctgccccgacttgtggctcggacccagggaccttcagggcccgcagaccctcccggcgccttgagacccgaggcgcccctaccggcccccctccccggttagcgggcggttgtaaggtctccggcgggcgctgcctgccttcctcccagagggtgtttcctagaaactgataaatcagatcgtgcctctttacccttggctttcgaaaaaaaaaaaaaaaaaa

SEQ ID NO: 223146 - DNA, 1000 bp, Homo Sapiens
aggacacacactggggagaagccatacacctgcagtgtgtgtgggaaatccttctctcggaccacttgccttttcctgcacctgagaactcacaccgaggagaggccctacgagtgtaaccactgcgggaagggcttcaggcacagctcatccctggcccagcaccagcggaagcacgcgggggagaagccctttgggtgccgccagaggctgatctttgagcagacgccagctctcacaaagcatgaatggacagaagccctgggctgtgacccacctttgagtcaagatgagaggactcaccgaagcgacagacccttcaaatgtaatcagtgtgggaagtgtttcattcagagctctcacctcatccggcaccagataactcacaccagagaggagcagccccatgggcgaagccggcggcgtgaacaatcctcgagcaggaactcacacctggttcagcatcaacacccgaactccagaaagagctctgcaggcggagcaaaggcagggcagccggaaagcagagccctggctttgtttgacatccaaaaaatcatgcaagagaaaaaccctgtgcacgttattggggtggaagagccttctgtgggtgcttccatgttatttgacatcagagaatccacataggagagaaactttgctgatgacttttaaccacaagtaaaaaatgtggtaagtccacatagtgtactcatggaaggaggggctgggggtagaaatgtcatgggtgacttctgactttctaaggaaatgatgcttcccaagcactcgaggttggttggtcccaaatctatcaaactcagtgccctctttagcgacatattttgtgacattccttccattacaccacagtgagttcacaggtaatataacctacccacctgtgtaatgtcaaaaaaaatcaatatgcggccccattttgtaaaggatcattaaaatgaaagtaatttatggtagagtaaattgtagagtaacgtgt

SEQ ID NO: 223147 - DNA, 1000 bp, Homo Sapiens
gtactgtggacaaactcattaagaagacaaacctggcccttgtggttgggactaacagctggagagaacagttcattgaagctatcactgtcagtgctggggaagatgatgacgacgatgaatgtggggaagagaagctgccctcctgtttcgattacgtgatgcactttctgactgtgttctggaaggtcctgtttgccttcgtcccccctactgaatactggaatggctgggcgtgtttcattgtctccatcctcatgattggcctactgacagctttcattggagacctggcttcccactttggctgcaccattggcctgaaagattctgtgactgcagtcgtgttcgtcgcacttggaacatcagtgccagacacatttgccagcaaagtggcagccacccaggaccagtatgcagacgcctccataggtaacgtcacgggcagcaacgcggtgaatgtcttcctgggaatcggtgtggcctggtccatcgctgccatctaccacgcagccaatggggaacagttcaaagtgtcccctggcacactagctttctctgtcactctcttcaccatttttgctttcatcaatgtgggggtgctgctgtatcggcggaggccagaaatcggaggtgagctgggtgggccccggactgccaagctcctcacatcctgcctctttgtgctcctatggctcttgtacattttcttctcctccctggaggcctactgccacataaaaggcttctaaaggaactatcagatatagtaaatttatatatatacatatatatacataaaaattatgtataatggacagaggaaactgacatttgtcatgttcacttacctgctgatggaatccagcttcaagagcatactctgtactagggccgaagtaaaaaaccatcacctcccattcccaggggcatcatcatgttcaacaaggcatggaggcagggccatctttgcagctcagtctagaagggctgcactctc

SEQ ID NO: 223148 - DNA, 1000 bp, Homo Sapiens
gagccctctctgggagatggttcaggatggcattgacctcaagagcatcaagtggacccaacactagaagaatagggccctgactttgtgctggtctggcccctcctgcctcaccaacccgtgcacaaccagacaccttgttacacctagtggatgctctagattggtatagaccagttgacttcagcatcagtccacctctatgacagaaacacaagaaaactgtctttccctagcttcagttccttgggtgtggagcactccccatttcttctcgggtcttaaagtgtgtggacattttcatcccgaagccatagagacatttgctgtcatattgctgctgggcacatctgtgctcttggtgaggagagcaagaggaaccagaagaagtctctttggtcagggaccatgatgctctacatggacatttgagtcttcgtcttctgctgctgctcggctggaccagcttctttaacagcaagcataatccacttcaatgtaatattttctgtagctccaaaggctatctcttcatattgactgcagacagactgaatggacagtttcttagagggcttgtctcctttctacccttgtcctctttcctttcctttgacctaatggagctagaaatatgtctgtgactccaccagttattctaataatttgttttcttgaaaattgttaatttcaagactggagaaataaactcaccttctatttactctgtgactttatgagaggttgagggaaaagtggaagctgtacttgggaattgtggagaagaccgccactccatctgatttgcataaatgactcagtgggcttttgtatctcttcatttaagaattatttgaatgcctgccaggagccagatttgttctgggtattaggaatacactggttaacaggaccaaaaaagaccctgccctcactgagttttaaattttagtggagagatggaaaataattaaacaaataaacaatgttatagattgtg

SEQ ID NO: 223149 - DNA, 1000 bp, Homo Sapiens
atttgttttgtttacagataattacctactctggctagaagctaggggtcccagtgaagagccactgccattaaagaatatgaaacatagataaaacatctttgaaattatgtaaattatgtaaattatcaggcaaatttgcattaaattacagaaatttaattcagaaccccaactactgtgttatgcaaaagcaagctgattaaatgacactcatataattatatgttgtaagcaacaggctcactggtcacggatttgtgtctgtgacttttgtgaaagggagaagtgacattgcatcaaagcatcttgcattatgcaatttttatattaaccagatatatattcatcggtattcatccaagttaaatgtagagtttttaaacatcaatctttaaaccaattgctgctacttatataattgccaaaaagtgaaataatgtgtagttcatgtaaataatacattatatttctattttattatgaagaaggtgaatagccatatttgtaaaatgacaatcatgtgtgttaacccagtgctttccattcgtgaaaacacatttgctttttgtgatatgcacaatgtagataagtgttctgtctgactttcttttttgatatagaagtataaagaattgtggtttatatatttaaaagtgtcaagctgagtattaaaatgtatgcatgttgtctaagaaattgaatacttgaatgtgtctcacagtttgaaataagctatttgatgtaatacttcttgtgtgtatgcacatgaaacttagattttacatgaagtattttttcagtattatatgtaccctctgaaatacatagggatatgcgtattataccaaaatgttgctgaaaaatgggcacttaaagctttcagaatatgtcagtgctgatgtagcatgcttgttgcaattgccttttttctgtataaatgtctttaatgcaatatactggaaagcttttctattttaataaaaataatttttatatg

SEQ ID NO: 223150 - DNA, 594 bp, Homo Sapiens
ggggagcgctccctgcgagtggcgcaggtaacagaccgcaggggcaagacagccggcgcgggaggaggatggcgctgtcggtgctgcgcttggcgctgctgctcctggcagtcaccttcgcagcctctctgatccctcaatttggtctgttttcaaaatatagaacgccaaactgctctcagtatagattaccaggatgtcccagacactttaaccctgtgtgtggcagtgacatgtccacttatgccaatgaatgtactctgtgcatgaaaatcagggaaggtggtcataatattaaaatcattcgaaatggaccctgctgatggagcagtttacagaaaagaagatggagagaccaccttcactggcagactagataaattgcatttcccctttttctcttttcctgtgtttctttacatgagatttgttaacacacattttctgagagcaggtatggaagacagccatgtgtagtgatggataatttaaagaaaaaaagaatccttgtttcttggcttttgctcctggagttaagcttactgcccaggtgacttgtgcattgctttatttagttgaaataaaatcagcatt

SEQ ID NO: 223151 - DNA, 1000 bp, Homo Sapiens
cacgaagcacaagtctcaggggaccattcccacattgggggatcctgagggagcccatcaccgcctcttgcatacaactgtccactaggaggcacgcccagtgtgggagagatgtatggtcttgccttccacctgtaaaaactgcacatatgcaagccatttgcactctggaactgcatgccgtgaaaactcctaatggtgtggaacttagtttgaatttgaaatcacgccgcatgcacaaagggacaggcccaggcccgacctcaggtcatccgcccgctggctgcagagcatccctgggagccaaggcgaggcccgtggagcctgagctttgtgtagctcgagctttgtgtagctcgtgcacttattatgcaccacctcccttcagtcaccactcctcttcctccgccatcctcatttatactgattgcacaccccccgctcaaacaacaatgtccttattatgatgaccatctcgtagtggtacattccattcctatttaaggtaagcccaaagcccacttttggattttctcgactgtccgagaaaagttgtgtaagcgcctgcgttcttctgggtttggctagatagggttgtgtccctctatggaatggagagtgatgtgggcaagggtgtcattttctcgcacaatacaactcactgaggatgcttctgtagaagtgagaaacacgatgagtacattcagaattacaataactcactctcactgggtaacttctcatgatagatttgtatgatcaatacgggtctatttttatgtcaactgaacactgtagggtaccttccagtctttttcaagattgttaaattgagacaagtaattgaataatttgtcctatttttattttaaaaaaagtgaatggactgaaatgttaaatgtgaatgtacatttcttaattgcaacttttctactgagtgtttgcactatactttctggaatcttatttaacaaaaataaagggaaaaaattgcttgact

SEQ ID NO: 223152 - DNA, 1000 bp, Homo Sapiens
cctgcctcagcctccctggtagctgggattacaggcatgtgccacacctggctaatttttgtggttttggtggagacagggtttctccatgttggtcagtctggtctcaaactcccaacctcaggtgatatgcccgcctcggcctcccaaagtgttgggattacaggcgtgagccactgcacccggcgcatgttttttcttcattcctattgtattcacatgtgaaagcatgtgatcaacttgctgcatcaaagatatgagattttttttttattaggtgggcattatttatgaccttttctgtggaagagtaagaacattaaaatgaaagatgcatgatgaaaatctaagtagagaggctcttgtggttaactgataatattgagtgatgcatgaggtaggtgttcagagtaatattctgcattatagtgaaaaatttttaatattaaaattcaattatatcattttatgaattgtgcttttcataatgcagtacatttcaaaatttttagattatgtatgaacttagatttttaaacatgttttaacatgttaagacttgtgcattcagtgaagcgttattatgccacaaactaacctacctcaccttactcaatggtgtaggtaaaagatgatagcaatatattatttggttacatagtggactaacatttttagtaatctcttttgccagtggctttaaactgcagataagttaaatattcccataggttttacatttatattttttcttatttaaatttattgttcttatttttcatgggtacatagtatgtttttatgctgtatatggcatgttttgatacaggtatataatatgtaataatcacatcagggtaaatgaggtatcccttactagcatttatcctttgtattttattttaaaatgtacaactaaattgttatggactacagggttatttttatggtcataataaaaattacaaaagtatgaataaaataaaaaaaaaaaaaaaaa

SEQ ID NO: 223153 - DNA, 1000 bp, Homo Sapiens
ggcagtctttgcaagttggccccgacagtgccatattcaggaaattcattctggaaaagctcgaagaagctaatactgatccgtgtgcccctccttttgattccctccagacctacgcttttgagggaacagggtcattagctggatccctgagctccttagaatcagcagtctctgatcaggatgaaagctatgattaccttaatgagttgggacctcgctttaaaagattagcatgcatgtttggttctgcagtgcagtcaaataattagggctttttaccatcaaaatttttaaaagtgctaatgtgtattcgaacccaatggtagtcttaaagagttttgtgccctggctctatggcggggaaagccctagtctatggagttttctgatttccctggagtaaatactccatggttattttaagctacctacatgctgtcattgaacagagatgtggggagaaatgtaaacaatcagctcacaggcatcaatacaaccagatttgaagtaaaataatttaggaagatattaaaagtagatgagaggacacaagatgtagtcgatccttatgcgattatatcattatttacttaggaaagagtaaaaataccaaacgagaaaatttaaaggagcaaaaatttgcaagtcaaatagaaatgtacaaatcgagataacatttacatttctatcatattgacatgaaaattgaaaatgtatagtcagagaaattttcatgaattattccatgaagtattgtttcctttatttaaaaaaaaaaaaaaaaaaaaagaatgctaggtaatcttcgtagaaaactagaaagtatgataaacaacagttggaggaatccatggaaaatagacgagaaaatgtaaataaggctttctggggatcacagaacttttgtatgaataaaagccttataaaaccagctctggcatatgactaaaatattcctctactatttttcaatgtcatctaatgcaaacgctcaacc

SEQ ID NO: 223154 - DNA, 1000 bp, Homo Sapiens
tgacttgtgaagaggcagttttcttatttgagtattaggatggcaaaatgtattaagacaggacatattgttggtgagataatatttaataggtataaaatggtaaaatacctagttttctatttagaggaatttacaaatgggtttttaacaaatgcctcattagtacaggaggcagtcgttttgtaaagttttcaactgcatctgagtaagataagattttctaaaagactattttgataaactatacatacataatttggaattgtttaagtctatttcagtgaaagagaacaagcatactgcccatactctaaaatatccccagctctcacaccacccttgttttttaacccataggtttgagtgtgcctagtgccaatattttgtaatttagaaattttattcacaaacttctgtttggtacaaatacagtgtcattgttttgtgcattctcctttttcccagtatttcagaacaaattgattcaagtttctagcagatattttttgatcaattaacttaatgtcctcgctccatttcttgctggaacagtttaggtacctaccacttcttcacatgacacaggggaatcctgattagtcaaaataataatgatttcattctctttgccagtaacttgttttatagtggtcatatgacctgatactgggtaaacaaaacaaagatggacttgttctgggaaaaggtaaaatggtaatcaaatagattgtgttccaggaatgcaaaggtggcttaatattcacaagtcagttgctattatacaccacctgtagaaaagtaatctggcatgcagaacattcttgtggtacaattaatgttcgtttatgatcttagcaaatgatggattgaaagggacttacttaactgcataaagagacttaaactacaacaaacaatatgcttaatgatgaaatagtgaacatttctcctaagattataaaaataagacaaggatatctgctgtcaatgattttat

SEQ ID NO: 223155 - DNA, 893 bp, Homo Sapiens; identical to SEQ ID NO: 117837

SEQ ID NO: 223156 - DNA, 430 bp, Homo Sapiens
gactgtcactcggtcccagacaccagagcaagctcaagacccagcagtgggacagccagacagacggcacgatggcactgagctcccagatctgggccgcttgcctcctgctcctcctcctcctcgccagcctgaccagtggctctgttttcccacaacagacgggacaacttgcagagctgcaaccccaggacagagctggagccagggccagctggatgcccatgttccagaggcgaaggaggcgagacacccacttccccatctgcattttctgctgcggctgctgtcatcgatcaaagtgtgggatgtgctgcaagacgtagaacctacctgccctgcccccgtcccctcccttccttatttattcctgctgccccagaacataggtcttggaataaaatggctggttcttttgttttccaaaaaa

SEQ ID NO: 223157 - DNA, 1000 bp, Homo Sapiens
tccacaggacttgaaggtcaaagttcacaaagatgaagaatcagggtagctgaccatgtttggcagatactataatggagacacagaagtgtgcatggcccaaggacaaggacctccagccaggcttcatttatgcacttgtgctgcaaaagaaaagtctaggttttaaggctgtgccagaacccatcccaataaagagaccgagtctgaagtcacattgtaaatctagtgtaggagacttggagtcaggcagtgagactggtggggcacggggggcagtgggtacttgtaaacctttaaagatggttaattcattcaatagatatttattaagaacctatgcggcccggcatggtggctcacacctgtaatcccagcactttgggaggccaaggtgggtgggtcatctgaggtcaggagttcaagaccagcctggccaacatggtgaaaccccatctctactaaagatacaaaaatttgctgagcgtggtggtgtgcacctgtaatcccagctactcgagaggccaaggcatgagaatcgcttgaacctgggaggtggaggttgcagtgagctgagatggcaccactgcactccggcctaggcaacgagagcaaaactccaatacaaacaaacaaacaaacacctgtgctaggtcagtctggcacgtaagatgaacatccctaccaacacagagctcaccatctcttatacttaagtgaaaaacatggggaaggggaaaggggaatggctgcttttgatatgttccctgacacatatcttgaatggagacctccctaccaagtgatgaaagtgttgaaaaacttaataacaaatgcttgttgggcaagaatgggattgaggattatcttctctcagaaaggcattgtgaaggaattgagccagatctctctccctactgcaaaaccctattgtagtaaaaaagtcttctttactatcttaataaaacagatattgtgagattcaaaaaaaaaaaaaaaa

SEQ ID NO: 223158 - DNA, 1000 bp, Homo Sapiens
taattaatagtactcatgcatcagtttatgaggctggtccttgctgggtgctatatttagatccaactctttgtgttgtaatggtttgtatacttctttacacaacctatccattacttaaggaatctgctcttattcttctacaaactgttcctaaacaaattgatatcagaaatttgataaaagaacttcgaaatgttgaaggagttgaggaagttcatgaattacatgtttggcaacttgctggaagcagaatcattgccactgctcacataaaatgtgaagatccaacatcatacatggaggtggctaaaaccattaaagacgtttttcataatcacggaattcacgctactaccattcagcctgaatttgctagtgtaggctctaaatcaagtgtagttccgtgtgaacttgcctgcagaacccagtgtgctttgaagcaatgttgtgggacactaccacaagccccttctggaaaggatgcagaaaagaccccagcagttagcatttcttgtttagaacttagtaacaatctagagaagaagcccaggaggactaaagctgaaaacatccctgctgttgtgatagagattaaaaacatgccaaacaaacaacctgaatcatctttgtgagtcttgaaaaagatgtgatatttgacttttgctttaaactgcaagaggaaaaagactccactgaaattctaagtttgccaagtagtgtaattgaagtccttgtctggtcacacagtttaattctatttttgtaagaacataatgggactgcataacagagttctatattacaattttgtgattattagtacagagtacagctatgctgtgactgttttggaaagccagttttaacactatgttacatttttgtttaaagtaagttaaaccttatataacataatgacatttgatttctggatttttcccatgataaaaattagggggataaataaaattgttactggaaaaaaaaaaaaaaaaaa

SEQ ID NO: 223159 - DNA, 1000 bp, Homo Sapiens
gaaggattccaaggcccgcctggtgctcacctctgggattgtctttgtcatctcaggggtcctgacgctaatccccgtgtgctggacggcgcatgccgtcatccgggacttctataaccccctggtggctgaggcccaaaagcgggagctgggggcctccctctacttgggctgggcggcctcaggccttttgttgctgggtggggggttgctgtgctgcacttgcccctcgggggggtcccagggccccagccattacatggcccgctactcaacatctgcccctgccatctctcgggggccctctgagtaccctaccaagaattacgtctgacgtggaggggaatgggggctccgctggcgctagagccatccagaagtggcagtgcccaacagctttgggatgggttcgtaccttttgtttctgcctcctgctatttttcttttgactgaggatatttaaaattcatttgaaaactgagccaaggtgttgactcagactctcacttaggctctgctgtttctcacccttggatgatggagccaaagaggggatgctttgagattctggatcttgacatgcccatcttagaagccagtcaagctatggaactaatgcggaggctgcttgctgtgctggctttgcaacaagacagactgtccccaagagttcctgctgctgctgggggctgggcttccctagatgtcactggacagctgccccccatcctactcaggtctctggagctcctctcttcacccctggaaaaacaaatgatctgttaacaaaggactgcccacctccggaacttctgacctctgtttcctccgtcctgataagacgtccaccccccagggccaggtcccagctatgtagacccccgcccccacctccaacactgcacccttctgccctgcccccctcgtctcaccccctttacactcacatttttatcaaataaagcatgttttgttagtgcaaaaaaaaaaaaaaaaaaaa

SEQ ID NO: 223160 - DNA, 1000 bp, Homo Sapiens; identical to SEQ ID NO: 117843

SEQ ID NO: 223161 - DNA, 1000 bp, Homo Sapiens
cctggcttacctatctgtggaaagctaggcttcccaggctgggctctgcctgtctggtgcctggaggtgtgggagggaagatgagttatttaactggtaagcgatttgaaacactatttttatattaaagtaaatggcatggagtatagtgcaaattcatttttaagatagaacacaaaacttgaaagaagttttatgcgtgtgacagtgtatggggctgcagttggtctccctggaggggacttccacacctcctgcctttaggccatgggtggaaagtgctcagtgaagtacacctgtgtggcccagttctgaaagctttatacagttgaattttaagtggggttgataacaccttggactgttagtgttaaaaatctagtgggttgacctttaaatgcaacagtttttaaaatatattgctgcattttatagaatagtaaaggtacgattatacttgagattttcctccatttttatttcttcgtgaacatagagtttggggccgaaaatgtttttaaagtatgtgtttgagttaaatataaagttggttcacttcaaagctaaaaaattgttaaacttgcagcttggtattgcagagaagattttataagaattttgctttagagaatgccactttggctgaactacaagtgtaggccaccattataatttataaatacagcatacttcaaaactgtttgttatctcttgttaccatgtatgtataaatggaccttttataaccttgttctctgcttgacagactcaagagaaactacccaggtattacacaagccaaaatgggagcaaggccttctctccagactatcgtaacctggtgccttaccaagttgtgcttttctgttttcaagtgtaaatgatgttgagcagaatgttgtacttgaaaatgctataagtgagatggtatgaaataaattctgacttatgaaaaaaaaaaaaaaaaaaaaaaaaaaaaaaaaaaaaaaaaaaaaaaaaa

SEQ ID NO: 223162 - DNA, 1000 bp, Homo Sapiens; identical to SEQ ID NO: 117845

SEQ ID NO: 223163 - DNA, 1000 bp, Homo Sapiens
tctgttttatccaactgagtctctgaccagcaattggtgcataattattacagcaaaagttaagaaatgaaactgtagcaattatgtaaatgaatgtgttggcctcttaatacctgttactagtggacttcctgtgaggaagttagttttttgttttgatgaaatgctttcgttttttaaatcttaattctgctgtccacatcctcccaaagtgtgcttacttcatttgtttaatttaaatgaactttcctccttgtatgtatgaggtgacttggtgggtggggtgggtggtttttgtttttgtgttttttctttcttagggcatctgtaggcctcaaaggacctttcctttaggtcatattcctcagaaagtcttcaatcttcccttgtttttgtttgtttgtttttcttaaagaatattttcaaagcttaaatttgtatattaatttaggactatttagaagtataggctgtcgttggcggcagcagtatattctgaaatgtctcatagatatatatttttgaataaagatggtgttgttgaacaacattgtgtgattttttttttaaactaccctgttactgaaaacagtgcctttctttgtaagcagtgggtgattagtaatcaccaatagagaatgtgctgtcggcacagaatcttgtcccttgggagtttttgtgtctgttagcggcacataaatactcagcatttacgtagtattttctggttctttccaggggcttaattagctttaattaggcagtccacacagtacccatgagaggtgccgccatagttttaccctcattgtacagaagtgggaactgatggagagagattaaatgactcttcccccatacttcacagccaatctctgacagattaaaacttggaagttctttgattttagcgcctttgttcacaccagtaggcctcctgagagcgatttgattttggcagtacacggaaagccacgctgaacagtaaaaagacgaaaaa

SEQ ID NO: 223164 - DNA, 1000 bp, Homo Sapiens
atgccaaagctactatcattcagtgctacatgaactgtgactttaagaattttggtgaactttgatattttttgtttgtctgaaagaaaggaatgtgtaagtgaaagctgaaagaagaataaccaggatgatgagagctgtggaagctgtatcgtccaaggaattgattatgtaccgtgactgtaacttttttgtaatgctgtttaactctcaatcagactgtgaactggatggtcacgaagtcattccccaactcctagcaagtttgactgaatatatcatgtccacagtagattttcaagaatcatttatagtacttaactttaaagaaacaaggctgcttttaaaaaatgaactaataggcttaaatcaattgcatccatatttgctgtttataggattgctatcagtataccttttgcgtttatagtcaacatgtatcatcctgaaatattctttctggacttataactacttccccctttttcactttaaaacaaacctcaagaataaattactaaccagtcttaaccatcttttataaacatatgctcttataaatgttgtgactagatgcaattaaaaataatagggaatgtggtaggtttttaatttgtacatcctcttatttagtgttaccacataaatgatgagtttgtgtggttctgttttccatttttgttctaactgaaaactttttggctgggcacggtgcctcatgcctgtaatcccagcactttgggaggccaaggcgggcagatcacttgagatcaggagtttgagaccagcctggccaacatggtgaaaccctgtctctactaaaagtataaaaaattagccatgtgtggtggcacacgcctgtaatcccagctactcaggaggctgaggcaggagaatcgcttgaacctgggaggcaggggttgcagtgagctgagacggtgtcactgcactccagcctgggtgacagtgagtctttgtctcaaagaaaaaaaaaaaaaaa

SEQ ID NO: 223165 - DNA, 1000 bp, Homo Sapiens
aggaactggacagccaccttcgggatgagcataaggtaagccgtaactttgagctggttggacgggttaacttggatcagctggaacagatgaaggagaaaatggagagctccagcagcgatgatgaggacaaggaagaagaaatgaacagcaaggctgaagacagagagctgatgagattttctgaccacggggctgctcttaacactgagaagcgttttccatgtgaattttgtggacgggcgttttcacagggctctgagtgggaaagacatgtgctgagacacggcatggcattgaatgacaccaagcaggtgagcagagaagaaatccacccaaaagagatcatggagaacagtgttaaaatgccctccatagaggaaaaggaagatgacgaggccattgggatagacttttccctaaagaatgaaacagtagccatctgtgtagtaactgccgacaaatctctcctggagaatgcagaggccaaaaaagaatgagcgtttggtgaaattcttaatcaaaccttacttgaacagtgatgaaaaagtgggagggctggcttgggctgagaagggagggacagaaaagagaagacagaacaaagctgctttttaggactgaacaatctattttcaaagcactggtacctgtgtgagtgagtatgtaaattaaagttatttaaatggttggaatatgtggctccttttccatcactacatcttttcttccggatcttcatcatggaagtttcatttgttgcggaatatggaagcacctcccaatggtacggtgcaccctgtggtggtcttggacagtatgtggaaacagaagctccatgacggtagaagacttctcattggggagcaactttttgacgcacaacttttggtgcgtttttctagttttaataccttaagctttttcaagacctaactgcagccactttgggaaaaaaaaacaaaaaacaaaaaacagaaaacaaaaaaaaaaaaaaaaa

SEQ ID NO: 223166 - DNA, 1000 bp, Homo Sapiens; identical to SEQ ID NO: 117850

SEQ ID NO: 223167 - DNA, 1000 bp, Homo Sapiens
cttgtacctggtgccctgtttgaacgattgtggaccctatggccagtgcctcctgctccgcagacacagctacctgtatgccagctgcagctgcaaggcaggctggcgtgggtggagctgcacggacaacagcacagcccagacggtggcccagcagagggcggccacactgctgctcacgctcagcaacctcatgttcctggcccccatcgccgtctcagtgcggcgattcttcctggtggaggcctccgtctacgcctacaccatgttcttctccacgttctaccacgcctgcgaccagcccggggaggcggtgctgtgcatcctcagctacgacacgctgcagtactgcgacttcttgggctccggggcggccatctgggtcaccatcctgtgcatggcacggctcaagacagtcctgaaatacgtgctgtttcttctgggtacactggtcatcgccatgtccttgcagctggaccgcagggacatgtggaacatgctggggccctgcctctttgccttcgtgatcatggcctccatgtgggcttaccgctgcgggcaccggcgccagtgctaccccacctcgtggcagcgctgggccttctacctcctgcccggcgtctctatggcctctgtgggcatcgccatctacacctccatgatgactagcgacaactactactacacccacagcatctggcacatcctgctggccgggagcgcagccttgctgctgccgccacctgaccagcccgccgagccctgggcctgctcgcagaaattcccctgccactatcagatctgcaagaacgatcgggaggaactgtacgcagtgacgtgacactggcctggggacagctgctgctctgatgacctcttcagccaggagctgtatcgagggggaggcgcctggtccagccctggacagattgatttccagctgaataaattggcctagataccctcttaaaaaaaaaaaaaaaaaaaaaaaaaaaaaaaa

SEQ ID NO: 223168 - DNA, 1000 bp, Homo Sapiens; identical to SEQ ID NO: 118880

SEQ ID NO: 223169 - DNA, 1000 bp, Homo Sapiens
aatgttaaactaaactattgccttcctcttacttttcctaaaatgattttctaatgggaacagtcacttcaagttcatgacatagtttgaaggaggataattcattttttcctggttgtcactgtcttcttatccccttggtgggctgggttcatactgtgaaataaactaaaatgaaaccaaaacgttcctgccgtaaatacgtggcacagcactgcagaaaaagcagtcacctctattcgtgagtccccaagccatagcagggcgtctgtaaaagaagggaaactgcacccaggaagtggtgggcgtcagacgcatcctttcgcccgtagttcatgaaatagttccggctttggtcttccagaaaatctcaacttcaccgtgcacaagtgttaccgggtctttttagtgtagccatggaagatactttcaaaaggacatcttcagatcataagtcttaggaccaaaggtgtttttaatgagataatctttttgattttctaacaagaaaggaaatattcactttacattttaacatcaacttttaagtgatattcagaattaattgaccatggtgatacgttgtaaaatgttttcatattaagaatgtaattatttccttattgtattttttaaaagctaaagtcatatttaaaattctctttgaaagaaacaggcaaagaaacagcaaagatttttttaaattaaatatgttagtagtgcccacttcaaatgactgtaaatatattttcactgtttctcaatgtatttaattcataaagtaaaaattttatgaaaagaaacttgcaaggaaaatcctagttttcagtccactcgccccactttgtagtagcttcactgaatttcctgctttcctggttgaattttctactgtttcacgtggtgtaaccctagactggcgcccttggcgtgcccctttgtgtatgaataaacttctctcccccaaaaaaaaaaaaaaaaaaaaaaaaaaaaaaaaaaa

SEQ ID NO: 223170 - DNA, 1000 bp, Homo Sapiens
gtgtgcaacaacaggaagaactgccactgcgaggcccactgggcacctcccttctgtgacaagtttggctttggaggaagcacagacagcggccccatccggcaagcagaagcaaggcaggaagctgcagagtccaacagggagcgcggccagggccaggagcccgtgggatcgcaggagcatgcgtctactgcctcactgacactcatctgagccctcccatgacatggagaccgtgaccagtgctgctgcagaggaggtcacgcgtccccaaggcctcctgtgactggcagcattgactctgtggctttgccatcgtttccatgacaacagacacaacacagttctcggggctcaggaggggaagtccagcctaccaggcacgtctgcagaaacagtgcaaggaagggcagcgacttcctggttgagcttctgctaaaacatggacatgcttcagtgctgctcctgagagagtagcaggttaccactctggcaggccccagccctgcagcaaggaggaagaggactcaaaagtctggcctttcactgagcctccacagcagtgggggagaagcaagggttgggcccagtgtcccctttccccagtgacacctcagccttggcagccctgatgactggtctctggctgcaacttaatgctctgatatggcttttagcatttattatatgaaaatagcagggttttagtttttaatttatcagagaccctgccacccattccatctccatccaagcaaactgaatggcaatgaaacaaactggagaagaaggtaggagaaagggcggtgaactctggctctttgctgtggacatgcgtgaccagcagtactcaggtttgagggtttgcagaaagccagggaacccacagagtcaccaacccttcatttaacaagtaagaatgttaaaaagtgaaaacaatgtaagagcctaactccatcccccgtggccattactgcataaaatagagtgcatttgaaat

SEQ ID NO: 223171 - DNA, 1000 bp, Homo Sapiens
ggaacactaaacttcatgaattgcgcctcagatttttcctttaacatcttttttttttttgacagagtctcaatctgttacccaggctggagtgcagtggtgctatcttggctcactgcaaacccgcctcccaggtttaagcgattctcatgcctcagcctcccagtagctgggattagaggcatgtgccatcatacccagctaatttttgtattttttattttttttttttagtagagacagggtttcgcaatgttggccaggccgatctcgaacttctggcctctagcgatctgcccgcctcggcctcccaaagtgctgggatgaccagcatcagccccaatgtccagcctctttaacatcttctttcctatgccctctctgtggatccctactgctggtttctgccttctccatgctgagaacaaaatcacctattcactgcttatgcagtcggaagctccagaagaacaaagagcccaattaccagaaccacattaagtctccattgttttgccttgggatttgagaagagaattagagaggtgaggatctggtatttcctggactaaattccccttggggaagacgaagggatgctgcagttccaaaagagaaggactcttccagagtcatctacctgagtcccaaagctccctgtcctgaaagccacagacaatatggtcccaaatgactgactgcaccttctgtgcctcagccgttcttgacatcaagaatcttctgttccacatccacacagccaatacaattagtcaaaccactgttattaacagatgtagcaacatgagaaacgcttatgttacaggttacatgagagcaatcatgtaagtctatatgacttcagaaatgttaaaatagactaacctctaacaacaaattaaaagtgattgtttcaaggtgatgcaattattgatgacctattttatttttctataatgatcatatattacctttgtaataaaacattataaccaaaaca

SEQ ID NO: 223172 - DNA, 1000 bp, Homo Sapiens
gcctcatcctcctgagtagctggggttacaggtgtgtgccgccatgcccagtctcttttttggtagggccaccactcactgggtttagggtcccccaatacactgtgacctcatcttaactaattatatcatcaaaacccgtgtttccaaataaggtcacattctgaggtctgggtgcacatgaatttgagggacccctcgtctgctgcagggagccctgctgtaccccagccttcccaggacgtggtctccagcttcttcatcctgccagagtttccaaatggagcccggggctctgcagcattccagtcccctttgcagatccatagctgctctgcagggcggaagacacctggggcgggaaagcacccctgagttccatcttcctgacatgttgcctgggatgtgacgggcctgacatctccccagggccggggcccagggctgcgtttgctcctggccccttagtgtctggaatgtggccttccacggttgccccactttgtctttctaaggtaagaagccttcaccttccagcttttgtctggcctgtgctgcgtgggagccactggtctgtgcacatccacggtgggtgagtggccaagacaagcagtgtgatagagtccttggtgggtttagtcatctcggaagtcgtagggcagctatggaaaccactgggttctggaacgttccagccaggcagtggttgttcctcataggtaggtggccttggccttcatcccagcctgggatgctccattgcatttgtcacctagtcactgtatatacgtgcacatttgaccttttggcacagcccaggttccaggtgcgtgacctgccctttttctcattcccttaactgacattatttagtgtcagaggccgagcacagtggctcccacctataatcctagcactttgggaggccaacgcgggtggattgcttgagcccaggagttcaagagcagcctgggcaatatagaaagacctcttccctacc

SEQ ID NO: 223173 - DNA, 1000 bp, Homo Sapiens
gtgtgataggttatttataaagactttggatagaaggagatgtattttattacctcctattctagagccccatgctcctaacaagccagagaggccccaaacaggattgtttctttcctccacagcccttctgcccatctgagattgagggagcatcgtccacttgagatcagggatggggtggagaatgggtcatgtcatgtaatgagaaaagccctcttcgggatcatgagacttggttctagtccaatttctgccactgaggatgaatgtaactgtgggcaaactatttaccctcctttatctgtgaaatgaaagggttgaattgatggatctctaaaggcttttgtcctctatgaggatgtgaaaaactagggaccacaaaagggaacaagcaaaaaagtttggattcgataaagtgatatgtaatagttgcagaaggctttatatatgcttataatgaaaagatattttttgtatattgacagcataatttatttttaatgctgtcattacacttaaagtcacaggaaaaaaatatacatgcttactcaggctttcttaaaaataaatttttatagagatccttgagtaaagacattttgcttaatttcttttttcttattccccacttgtatatcccctaccagtaccgggatctgcacacatctttttgcagttacctcttcatagccatgaaccaaaacgttctatgaggagcatgcaagtaagtcaagcctcctattctgttagtacttattagaggaggagatggttttcattgcatagtgacattttcttagccttaacgttctgatagtagcttactactcacttctctttttcagttttcataataagtattcatttttttgccataatgcttcctgtaaagccaattttatatactaataaaacatgaactgcccactcttcatgcctgccaaacttggggcaattgatgctaaatggtatttttaaaataaatgtttttattctt

SEQ ID NO: 223174 - DNA, 1000 bp, Homo Sapiens; identical to SEQ ID NO: 117858

SEQ ID NO: 223175 - DNA, 1000 bp, Homo Sapiens
cacttccagcaccacgccaagcccaacatcttccacaaagacccagacgtgacggtggcgcccgtcttcctcctgggggagtcatccgtcgagtatggcaagaagaaacgcagatacctaccctacaaccagcagcacctgtacttcttcctgatcggcccgccgctgctcaccctggtgaactttgaagtggaaaatctggcgtacatgctggtgtgcatgcagtgggcggatttgctctgggccgccagcttctatgcccgcttcttcttatcctacctccccttctacggcgtccctggggtgctgctcttctttgttgctgtcagggtcctggaaagccactggttcgtgtggatcacacagatgaaccacatccccaaggagatcggccacgagaagcaccgggactgggtcagctctcagctggcagccacctgcaacgtggagccctcacttttcaccaactggttcagcgggcacctcaacttccagatcgagcaccacctcttccccaggatgccgagacacaactacagccgggtggccccgctggtcaagtcgctgtgtgccaagcacggcctcagctacgaagtgaagcccttcctcaccgcgctggtggacatcgtcaggtccctgaagaagtctggtgacatctggctggacgcctacctccatcagtgaaggcaacacccaggcgggcagagaagggctcagggcaccagcaaccaagccagcccccggcgggatcgatacccccacccctccactggccagcctgggggtgccctgcctgccctcctggtactgttgtcttcccctcggccccctcacatgtgtattcagcagccctatggccttggctctgggcctgatgggacaggggtagagggaaggtgagcatagcacattttcctagagcgagaattgggggaaagctgttatttttatattaaaatacattcagatgtaaaaaaaaaaaaaaaaaaaaaaaaaaaaa

SEQ ID NO: 223176 - DNA, 1000 bp, Homo Sapiens
agacatcgacacagacattgattcagtggcttctcagccaatggaacttccagagaatttgtcactggagcctaaagaccaggattcagtcttgctagaaaaggacaaagtaaataattcatcaagatccaagaaacccaaagggttagaactggcacccacccttgtgatcacgagcagtgatccaagcccactgggaatactgagcccatctctccctacagcttctcttacaccagcatttttttcacaggtagcttgctcgctctttatggtgtcaccattgctttcatttatttgcccttttaagcaaatccagaatttatacactcaagtttgctttctgttacttaggtttgtcttagaaaggttatgtgtgactgtcatgtgaaagttaccccatttctcatcttaattaggattgctaaaatagaaagtttggagtattttcttaaaaaattcattgttctacaagtaaataaatattttgatttttctatttcctcctaaagaaagtacacacactctctcgctctctctcggtcttataaaactcgttggtgtcttataaaacaaacagtgataatctcaagttagaaaacagtaggtcctgagaaccataagaaaaatgactggtgtgatgttgagtaacaagttggtacagttactttagctatttattaacttgctcatctcatagaacattttagtagatttttcacacacctcattattaaaaaaaaacaaacatgctggtgtcttggttacccattattcctctgtacctgaattcaggttggtttttctatttggaaaagactttataaatgttggcttaaaaagaggttgagcaccagaatctcagaatttaccaccaaagaactcatccatgtaaccaaaaaccacttgtacccccaaaaactattgaaataaaaatttaaaaaattttaaaaaaaaaaaaaaaaaaaaaaaaaaaaaaaaaaaaaaaaaaaaaaaaaaa

SEQ ID NO: 223177 - DNA, 1000 bp, Homo Sapiens
agttccttcttccctttggaaatttggcagctgccttcaccagtgagcacaaagccacatttcaaaggaaactgacaaattatccccagctgccagaagaagaaatcctcactggacggcttcctgtttcctgtggttcattatctgattggctgcagggatgaaagtttttaagttcataggactgatgatcctcctcacctctgcgttttcagccggttcaggacaaagtccaatgactgtgctgtgctccatagactggttcatggtcacagtgcaccccttcatgctaaacaacgatgtgtgtgtacactttcatgaactacacttgggcctgggttgccccccaaaccatgttcagccacacgcctaccagttcacctaccgtgttactgaatgtggcatcagggccaaagctgtctctcaggacatggttatctacagcactgagatacactactcttctaagggcacgccatctaagtttgtgatcccagtgtcatgtgctgccccccaaaagtccccatggctcaccaagccctgctccatgagagtagccagcaagagcagggccacagcccagaaggatgagaaatgctacgaggtgttcagcttgtcacagtccagtcaaaggcccaactgcgattgtccaccttgtgtcttcagtgaagaagagcatacccaggtcccttgtcaccaagcaggggctcaggaggctcaacctctgcagccatctcactttcttgatatttctgaggattggtctcttcacacagatgatatgattgggtccatgtgatcctcaggtttggggtctcctgaagatgctatttctagaattagtatatagtgtacaaatgtctgacaaataagtgctcttgtgaccctcatgtgagcacttttgagaaagagaaacctatagcaacttcatgaattaagcctttttctatatttttatattcatgtgtaaacaaaaaataaaataaaattctgatcgcat

SEQ ID NO: 223178 - DNA, 1000 bp, Homo Sapiens
ttttagtagagacggggtttcaccatcttggccaggctggtcttggaactcctgacctcgtgagccaccacgcccagcctcttttgctgtttcattgctgacagtgttcaacaatatgccccatctttatatatcctaagaaacactaatcctaggttattgctagccaaaatatttttgtcctgagtagtgtcactgggccaaaagatagatcaggacgacagcctttagttttcctgaaatcaccaggtcaggcacaaggagaaaaggttcctggatactgactaacttgggtgggtctagccaggagaaagacagtaacatgtgttctgtactttctgggaagatccctgaagccatcacagaggctccccaacttctgagtcgcccatctgttgctgtgggagtgtgaacggatcgctgaaggagagggagctttgctctctctaggtgggcaagtttcctgggctctctgtgttgcctccctctggcttcttcctcccgtgccctctccccgtgtgccccagggggatcagggatcctcaccctcctgaggcccagtggggaagaatgaacatggcttcatccaggttaactgatgctgccatttgcccagcctcttccatcccagccctgtcagtgagcccaggtctggtgcaactgctgcaggatgcctgtagtagggaactctggaagtgtattgggctgaggtgggattttccctccccacagtgcactgagcaatggagggtggtgagggagccatgctgctgaattctggttggcatttccccattatgtaaaatggggtgttgggtagggcagactctgcttgggtttggttgtaagataaacctggaggagaagcacagttgtcccattgaattatttgagcaaaaactactgtaaataacttttttgtcttttgtcaaataaaatttttttttgtttttttaagcagaaaaaaaaaaaaaaaaaaaaaaaaaaaaaaaaaaaaaaa

SEQ ID NO: 223179 - DNA, 1000 bp, Homo Sapiens; identical to SEQ ID NO: 117864

SEQ ID NO: 223180 - DNA, 1000 bp, Homo Sapiens; identical to SEQ ID NO: 117868

SEQ ID NO: 223181 - DNA, 1000 bp, Homo Sapiens; identical to SEQ ID NO: 117871

SEQ ID NO: 223182 - DNA, 1000 bp, Homo Sapiens; identical to SEQ ID NO: 117872

SEQ ID NO: 223183 - DNA, 1000 bp, Homo Sapiens
catcttttaatatgaacatcagaggtgacattggacacaaggcctatgagtatcaggaatatggaccgaagccataaaaaaatctcactctgtcacccaggctggagtgcagtggcgtgatctcaggtcgctgcaacctctgcctccagggttcaagcaactctcctgcttcggcctcctgagtggctgggactacaggcatgcaccaccacgccaggctagttttttgtattttttagtggagacggggtttcaccatgttggccaggctggtcttgaactccagacctcatgattcgcctgcctcggcctcccaaaatgctgggattacagatatgagccatcatgcccagccgcaaccctaatttttcattcagtcataataccaacagttatctcatgtacctctgagtgccttcttcccaaaagccagcagtaccatacctgctgtcagcaagtgtgtaatataccatagtgataaatatgaccaaaagccataaatgactgtgagatgtatgagaatgacacgtcacattagtaagaagagaaaaattttggccatgtttatgatttgaaatatgttttcctctatcacatttagaaatatagttacaaaatgcccttagttttatcctgattcatcatggtcactgaggagcatcgtctcatatgcctggtatgtgacatgtgtctcttcaacagtaaaagacttggcattggctgggcatggtggctcacgcctgtaatcccagcactttgggaggccgaggtcaggagttagagaccattctgaccaatatgatcaaaccccgtctctactaaaaatacaaaaattagcggggtgtggtggcatgctcctgtaatcctagctattcaggaggctgacgcaggagacttgcttgaatataggaggcagacgttgcagtgagccgaggtcacaccattcactccagcctgggcaacaagagcgaaactccgtttcaaaaaaaaaaaaaaaaaa

SEQ ID NO: 223184 - DNA, 1000 bp, Homo Sapiens
ctctccctccaccccttgcagcctgggctgtgtatgcctgcggatgcagtgtcccacacaaggacacttcctctaggatgccatcctgagcctcctgtagcagcagtgtcattctgcacttccacattctgtctgtcttccccgcctgccaactaggagttcacgtggggcttgtttaaacagtaccattgcttgtgtcccacctggaccagttcagtcagccccagtggtggcatgttttaaagctccccaggtgattataacttcctagtgtgcagccaggctgtgggccctgtgctgggcttttttttttgagatggagtgttgccctgttgccaggctggaatgcagtggcgtgatcttggcttactgcaagctctgcctcctgggttcaagcgattcccctgcttcagcctcctgagtagctgggactacaggtgcgtgccaccatgcctggctaattttttgtatttttggtacagacggggtttcaccatgttggccaggatggtctcgatctcttgacctcgtgatctgcccgccttgacctcccaaagtgccgggattgcaggcatgagcctccacacctggcccatgctgggtttttgtgcatccctcgacagcttccaatgtcagcctgctggctttggctgagcagagcttgaaggccattctgtctcagtgccctcactccctgctccccgcacccggagcctcagggatgggctcaggctgatggtcagctgggcgcttggaaagtgtttggctggggccttggggatctctttagtcctggcttcccttgggctcctcagagctagtggggaaggaggcagtctaggctgttttgaagtttcctaaacatttatggctgggctaacatgaactcatcatggtaacactgggtatttcagctgatcagaagctcagcatggccattatgcctagttttgatgaataaacatgggaaagccaaaaaaaaaaaaaaaaaaaaaaaaaa

SEQ ID NO: 223185 - DNA, 1000 bp, Homo Sapiens
tgagccaaatagtgtgctagccattgaggatggagttcttagctacttaatgattcttttcttctggaaatcttctagtgaataatttttaaaagcttcttttaaactgctcagtaaaacattgccatacattaactctccatttctgcattaacttcatttgctggaaagaaattattttgttaatgaaccaaacccagccattaagttatgtgaattcaccttctatagacacattgaggtatggcagagaagacacatattccctggcctagagtgggctgacaatattgctgcctcccctaaattgactcaatcttgagaaccacatactgcagtgacagttgatcatggatcagaaatattcctttttctcctagaggaaatccctcatggcattatcattccctaaggacaatgagatgtccctccgctcaaatcctaaagccccctgatgaaagatttggctctgatttgctgccaacttattggtaagtgctgaatgagttactgtgctttggcatagcttctacatcacagcaagtgacttctcagaggggaaaagccaagctccagacaaggagtgctgttagcccaaggggaagagctaatagatacataggccgtaagcacagggctgtacacagatcctttattggcatctgcatgagaggcctagaaatcggatgttagaagctaggaatcatggctctgagcgccttgcatacaggagatactcactgatactaaatcaaggcatgtaaacaatactgggtaaatcatacctaccagaataaagagtaacattcagagcttttcttttatctgttattttaaatgttactccatatttcaaaagtctgcacgtatgaaattgtgtcttatttctggtttttagagcctaagaaagatactcattcttaattcctatttatcatctgaaaaccaaatgaacttttgaaataaatgttttaccagcaaaaaaaaaaaaaaaaaaaaa

SEQ ID NO: 223186 - DNA, 1000 bp, Homo Sapiens
gaccctgtcttggaacgtcgtaccaaatgctggaattctacctcttgtgacaggatcaggacacgtatctgtcccatttccagatacatatgaaataacgaagagttattaaattattctgaatttgaaacaacatatttttatacttaatgaattgtatctcattaatctcttcccttacatcttcatgtattgttggtttgttttttggttttgggttttttttttttttttttggtataagaactaacatcaaaaggcctgtttaaagggaaaggttaatgggctacttaatattatgaacaaaacaaaaaaacaaggctgccacagtggaatattatcttacaagaataagaactacataaaacagatttgtaaaaaatacatatttgaagtattccctgtatttccattattctttatggaatataaagtaagcatgaaaggtagttaaaactttcaggtgcctgtagagtcataataactgtattttatgccttgcattcacgcaaattcacattggatgtgatttaaaagtagacattctctttttcctcttttaggatatgtttgattactggaaaattaatatggttatttgttagaagtctggtttataaaaaagccaaaagtgatggaatttattccatttgtcttaggaaggcccataatacttgtttttcttacatgtgactagcaactttctccacttaaagactaaatacctctttatatgatgtaaattattctaattcattttaaaatcttttaggtcagcaaaatgtgtgtcttcagtgctttctctaaaaacgttcctttatagctttgtacttttttttttagcgttgccattgaaagttaaaatgtttgcatggtttaccctctgagttatgtttcttctagtgagcatgcctgctgtcactaagtgaattatttactactttttgtaggtctatattttaataattattgggataataataaaaaaaaaaaaaaaaaa

SEQ ID NO: 223187 - DNA, 1000 bp, Homo Sapiens
tggagagctctgtctttgatgacatgattaacctcttagaacgtttaaagcatgatatgttgacccgtcaagtagaccacgtttttagagaagttaaagatgctgcaaaattgtataaaaaagaaagatggttgtccttgccatctcagtcagagcaggcagtgatgtccctgtccagttcggcttgcccgttgctgctgacgttacgagaccatttacttcagttggagcagcagctttgtttctccttatttaaaattttctggcaaatgcttgtagagaagctggatgtatacatctaccaagaaataattcttgctaatcacttcaatgaaggaggagcagcccagctgcagtttgatatgactcggaatcttttccctttgttttctcactattgcaagagaccagaaaattattttaaacatataaaagaagcctgtattgttttgaatttgaacgtcggttctgcactactgctgaaagatgtactgcagtcagcttcagggcagcttcctgccacagcagcattaaatgaagttggaatttacaaactggctcaacaagatgttgagattctacttaatttgaggacaaattggcctaatactggaaaataatgtctttcagaaaaaggtttctttggtttttgtttctaagaaagaggaagccaattggatttcaagttatatgatgaaattctgaattaatgaaactggaaaactttatagaattacttattatcttggatttatggtgttattaaaatgctgaccatatttccttcatcctcttgttcctaaggaaacaaaaacagaaaacgaaacaatgaaaactcaattctatttacaagtataaatgctgagtatgtctgttgaagacgagcagagatattaaattataaccaactttcaatttcctgtgctaattaagggaaattctgttgtggataatcaaacatagccaataaatttttttaaaactccaaaaaaaaaaaaaa

SEQ ID NO: 223188 - DNA, 1000 bp, Homo Sapiens
ctattgctgctgcatgatgttcaagaccggcccttggctgttgttacagagatgttgggcagagctatgcaggtgtttcattgtgaactctagctttgatcatggtaaaaagttaaccttttctattttttaatggatgttataccaactattcagaggaactcatacttcaaaaatattaggaaaatctgtcttatagtttctctaataaatatctgaaatctcagtacgacatgaaagaatgtcagaccattgttattgttgaaagtcatttgatgaatggtaaattctatgaaaagtaagtgatttgcatgtataatatcaggaaaattaagcatcccaagtgtgactggacaaagagagcagatgcaccagtgcctgtgccataaagttccgaatcccccatgtgtctctttcagagctggccagaccggaaataaatcattctcataaattcagtgtgtactcagaacacatacacaacaacatagggagttgtatgactgatacggaaaacttccagaaagttttaatcaaagcagtttaattaaggtatcaaaaatatctttgcttactatcaagaagtgtcaaataggttcagcttgctgccaaaatatggatcatttatgaagcaggttcatattttagaggtgttaataaaatcctcatcggaaaagatccaaagtgcaaggatttgattataaacataatttcctagactgaaagtttttggaaaagatgcagggtctgagtcaggccttctggttatattgtgcagtttcaaaagaactatttaaaactcttgaaaactcatgtaaataaaaatcatagggtgaaaattgtatttgttaaaataccttaataatttaaaatgacctgatttcctggaaaattttattattcaaaaggtggaggcattgtaaaaaggaaatagtgatgtaaataaacatgttctctttcaagtaaaaaaaaaaaaaaaaaaaaaaaaaaaaaaaaaaaa

SEQ ID NO: 223189 - DNA, 1000 bp, Homo Sapiens
gaaatgttgccagagcagcaacacttccctgtgggcacagccccgggaaatccggtaccaagtgagcaaggtggcaggacccacccaagcctgatacgcatctgggcccgccgggctcagcaggggaggctgctacggctgcccacttcccagcaccgtctgtcacgcttgaacccctctgtgctgttcccttcctggctaatagggagacccttcgcaggcacccactgtttcaacttgaccctcccaccccctgctactctcctccacacacccctccgttccgctagcctaccctgtcagcctttcaataaaagttatgcacaaatgtgaacacctgagatggagctgaacatttcttcactttgttctttttctgaagtcaaactcttatcaaatgccctaaaattattaccacccaagagaaacaggaaaaaggttacatgtttttgtttactgagagtaagatcacctgcatctggaagacgggctggtaaattggtttggctacagaacagaaagaaaacaaaaacaaacctcgtaagggaagtatcacactcagacaccaccgcttcctagagccaaatgagcaatcccaaactgcaagtgccataagtgggcctgtgaggtcacaccgcccggcccgaggtatcgcatgtgcgggggaggtccacactacagctgtcctctcgtctagaaggcaccacctcgctttcatgtcccgtgtgttttggaaaagcagtatggtgtgtcatgtctagcggcgaacacttccctccctgtccttgaggttgtaatataaaaactgtgtttctgtacgtgtgggtgggaattctctgacggtgctcgttcatagcacaagcttacgctgagttctgaactgtcgttcacagctgcgtgtctgcatggtgtcgcatctgttgtacctttggggaaaatttgtatgtaaatgtacagaaataaaaacgttgccccattaacagaaaaaaaaaaaaaaaaa

SEQ ID NO: 223190 - DNA, 1000 bp, Homo Sapiens; identical to SEQ ID NO: 117877

SEQ ID NO: 223191 - DNA, 1000 bp, Homo Sapiens; identical to SEQ ID NO: 117878

SEQ ID NO: 223192 - DNA, 1000 bp, Homo Sapiens
ggggagctcagttcccattgcttgtgctcagggctgagtcttaaagaagggtttgccggccctaacgctgcagcgcgtgcgcggtgagaggccctttttgagcctgtttactcctgtggccttgggcagaacagtaaatactctgtgcacggaggaaagacatgcccaagaggaaggaagtactgaccatcggctgcctgtgagcagcttagcaaggagcccttgctccctgggaaaggcggtgaacttgagtctaaagatgcagtgcctggcccttcctaaggtccctgcctggcatccgagtgtcggtgtgtggcacagaaggctcctgcttgcttccaaagtgatggacaggaaggggcagagtgagtcacggcccagactgggcaccttcgcgtctcagcctcagggagccccacagccccaagctcgctgaggcaacgtgagaacaggctatgggaaggctgcaaaggctgagaaatgcaaaggctcatatttataaatcccacccccagagtggggagggtcaggtgccagacctggactaaactgcaccaaggaaacacccagcagggtctcctgtgagccggggaccatgcagcccgaaacctccagtcactgcgcccggcaggagtcaggagccagggactgtgcagcctggaacctccagtcactgtgcccagcagggtgggctgtgcccagcaggagtcaggctaagaaacgccaggtctgcctgttcttgctgggcaatggctgatggctgccagtttctgctgatacacaggtaggatgggacccttcatgaatatctgactttaataagttggtaaggatatatttttttgtctatgttctgtttcaacttatgtagattattataaattgatgtaaaccacgtgagaggaaaatgttaataaaaaatgcaaagccccatcatttgcacaaaactcaaaaaaaaaaaaaaaaaaaaaaaaaaaaaaaaaaaaaaaaaaaaaaaaaa

SEQ ID NO: 223193 - DNA, 1000 bp, Homo Sapiens; identical to SEQ ID NO: 117882

SEQ ID NO: 223194 - DNA, 1000 bp, Homo Sapiens; identical to SEQ ID NO: 117883

SEQ ID NO: 223195 - DNA, 1000 bp, Homo Sapiens
ggtagttacggcacttaaaactcccttgctaccgatctggaactcaagccccaagacatccccttagatgatctgaatacgcattcagggacagatctaggcagtttctaaacaacacttagactggggtctaacgttgacaaatccttctagaatttgcctctttgggactgaagtctaaggggctgagaccaagaagggagagcacaagactaactttggtctcttgaccttttcttaccttgcaactgtcagtgcctccagccaaatgcctagcacagagctcagtggatttgattcttccattcagatactcatagcgattgcacactttattctcaatcacaagaagctggggcttccttgagaaggccagccccaaaggtacctgtgtttaaaagatgaaagaaatggttgctgaacccaaaacatgtttaggaggaaaaccagaagaacagagcagtggcactggacctcctgtctgtccgtgaggctgcagaacacaaggcagctcccaatgccgctggactctctgaccttggagagtgtaaacatcatatatgattctgtgttcctgagatctgggtttaacgatctgggctttgtcatggtgttttacgttcgttgttgtttgtgtactttttgcttttcttttgaaagtatgaaaatgatttttacaatgtaaagagagtctgagaaatgcaattgctattctttttatatactttttcagattttttatatgcttctttactacttacatcataatgcacaattttatatactgattttttcaatcaatgtatatcatgagtttttaaaataatgctacaatcttcataactaatattttaatggggagtgactgcttaattggcatgaggtttccttttgagatgaggaaaatgttctgaaaatatggtgatggttgcacaccattgtgaatgtactgaatgccattcagtggtaccctgcaaaataattaaaatcctaactctta

SEQ ID NO: 223196 - DNA, 1000 bp, Homo Sapiens; identical to SEQ ID NO: 117884

SEQ ID NO: 223197 - DNA, 1000 bp, Homo Sapiens
tcagtactattaaaaaagaattcagagctgttaatattttatcacaggataggatacttaaaatatagcattctgtgctgagatctaaggtgaagtctataaagattaaagttcccttttttctgatgttcaagttgattgttgttcagtatggcatatatgacaaaagtatatttgagtcaaatgtggctttctaaaatggatgcaacattagcgttgcaaacaaaatcagcactatatttcttaatgatctaaagattaatttgagagaacacagttttcttaaatattataatgtctagagtttttttaggacagtcttagcaagtatgattgttctagtcttacttgctctaatgtttaaaggtgcaattttatgccattattgaaattgatttttaaaatctatataccatatgattaacatgcattttcaatatgaggcagtgtttatgcagtatttaacagagcaatctgctgccaatagagtttggaggtggatatttagtttacagtgtataaacttaaaatatgcatccctttaacaacgctttgtgttagcatgctgcaaatcaaaatggcacttaatattaaaagctggtttagggaaattttatgaaaatcctgttcataaatgtaatgcatatgatatgtacttttaagttttagttgcttcatgtttacattcagctgttcaacataattaaaatgtaattttacttcatgctatattgtggctttgtgtttcaaataatgttcacctttctgtttttgcaccagataagaatcagttccttgagaataaattttttatctttcttaacttcagaatattaaatttggaatatctactaaaattgtgtgttatgtggctgtaaatgatgtacacgctgtaaaataagatcgctactgttatgtgggattattatttctaaatgttactcattgaaatgagcatacaataaaaagcatttattgcacttaaaaaaaaaaaaaaaaa

SEQ ID NO: 223198 - DNA, 1000 bp, Homo Sapiens
gacctccgcaccagcgtccggaaatgtgtcatggagtgggaggagccccacgacagcaccctgtactgcctgcagacagatggcaaccacctgctggccacaggttcctcctactacggtgttgtacggctgtgggaccggcgtcaaagggcctgcctgcacgccttcccgctgacgtcgactcccctcagcagccctgtgtactgcctgcgtctcaccaccaagcatctctatgctgccctgtcttacaacctccacgtcctggattttcaaaacccatgaccgtcagggccacccctgcctctgggccagggaaaccagctactcagggacttctcttgcctggagggtgcagtgatagctcctcctcactgccccactgtgctcctgggcctgtgaccccagtgctcaggcaccttgcactagaggcttctgactcctgggactttggagcttaccagagatgcagtccctcccaggaacctgttggagaggcaggacctgctgctttagagtgcggctgaacccgggccttgcgtccctgtttggccagagcaaggatctggcctggagaggcccatcctataccccttattagagccatgacagcctacagagtgaggtgaggtgctcccaccttcccagatggttcctttctgccccttcctggaaggaaaggtgaggctgccaatagcctcctggcaccagccagacctcacccttgaccaacctctcggggctgggggttcattcctggggcactgtggcctggttttgctttgaaaccaagaaagagcaaagggaacccagcagttctgagtgagttctgagccagccctacctcaggctggctgttgagacatgctacaattttcatttttgtaaaaataaagcttgattgttcacagaaaaaaaaaaaaaaaaaaaaaaaaaaaaaaaaaaaaaaaaaaaaaaaaaaaaaaaaaaaaaaaaaaaaaaaaaaaaaaaaaaaaaaaaaaaa

SEQ ID NO: 223199 - DNA, 1000 bp, Homo Sapiens
gtgtggtacattaactctccattttagccagaagatacctgataagagaaggtgtaaggtttttatcttatatgccagaggcaccaggccagatgtgccgcacagtcatgtaattcaatcatgtttaatatgtcagtcaaaaccaaattcagaattgttttgtgtaccagtcagctgttgtctgcacattttcgtagtgacagtgtggagatctttttaatgaaagcaaactatgtggcctctgcaaagaaaggaagatttttctttttacaactagatattagttttagaggaaggaaatagctgaaaaactaaatttgctttggtgaaatgtcctgtacagaacagtaccttggcattcagcagctgtaattggggaacattaaaacagtaactgacatccagttaaagccacgatcgtcagcaattctccttttttaatttctgatatttaaagttttttttccagtctacaccaggcctctccaaggagacagttcattatttaggagtgaatgtgttcctcttgcaatattatcagtacctgcatgacttggtaaattcattttataaaaatagtgttttttttttttaatttcagttcattgactctataactgcagaaattagataatgttttataaaataaatttgccacataatatgggatgcaataaccaacaaagctgctaagtgccaaactgttattttactatatataaatattaaaatattgtgttgaagtatagggatgtatttaattttactatgctccaacattaatcatgactcttttgtaaattacagttatttcagtattgtaaaataaatgttgactcatttcatgcaggtttgtgttttaacattccacttatgccttgaaacatcatttcttgataactttttgatacttctttcttgataaggcacttttaccaggtgtgtgttggaattggtggctcaggataggtcttaaattttaaatacaaatatctttggg

SEQ ID NO: 223200 - DNA, 1000 bp, Homo Sapiens
gtctcgtcttattcgttatgaaactcaaactacctgcaccagagaaagttttccagtacctactgtgttgagccctcttccatctcctgtagtttcgtcagatcctggaagtgtccctgacggagaagttttacaaaatgaacttcgaactgaagtatcccgattgaaacggagatctaaagatctgaattgcctttatcccagaaaaagacttgtgaaatctgaaagttcagagtctcttctttctcagacaactggtaatagtaatcactatcatcatcatgtgacatccagaaagccacaaacagaacggtccttaccagtgacttgtccattggttccaattcctagctgtgaaactccaaaacttgctacaaagaccagttcaggtcaaaaaagtatgcatgaatcaaaaacatcaaggcaaattaaggaatcaagatcacagaaacacacacggatactgaaagaagtagttactgaaaccctgaagaaacacagtattaccgagactcatgaatgtttcactgcatgcagccagcgtctctttgaaatctctaagttctatctaaaggatcttaaaacttcaaggggtctatttgaagaaatgaagaaaacagcaaacaacaatgctgtacaggtgattgactgggtattagaaaagacaagcaagaaatgatacataatcattctctttaagacaattataaattggatggagctattattcactacttcttttcttagtttgaaaattataaacaaattttaagctttattcaaagaatagatgttatatttctaaagaatttcatgaatatatattctatatttgtatagtttgagggatgctatgttaatgtatttttaattagatacatattttgtaaagtgttactatattttaaagttatttttatatgttttaaaatgtttactcttatttaattattacaataaacagaatttttttttttttaaaaaaaaaaaaaaaaaaaaa

SEQ ID NO: 223201 - DNA, 1000 bp, Homo Sapiens
atcaaggagctggaggagatgcagcagcggttgcaggaggccctgcaactagaggtgaaagctcggcgagatgaagaatctgtgcgaatcgctcagaccagactgctggaagaggaggaagagaagctgaagcagttgatgcagctgaaggaggagcaggagcgctacatcgaacgggcgcagcaggagaaggaagagctgcagcaggagatggcacagcagagccgctccctgcagcaggcccagcagcagctggaggaggtgcggcagaaccggcagagggctgacgaggatgtggaggctgcccagagaaaactgcgccaggccagcaccaacgtgaaacactggaatgtccagatgaaccggctgatgcatccaattgagcctggagataagcgtccggtcaccagcagctccttctcaggcttccagccccctctgcttgcccaccgtgactcctccctaaagcgcctgacccgctggggatcccagggcaacaggaccccctcgcccaacagcaatgagcagcagaagtccctcaatggtggggatgaggctcctgccccggcttccacccctcaggaagataaactggatccagcaccagaaaattagcctctcttagccccttgttcttcccaatgtcatatccaccaggacctggccacagctggcctgtgggtgatcccagctcttactaggagagggagctgaggtcctggtgccaggggcccaggccctccaaccataaacagtccaggatggaacctggttcacccttcataccagctccaagccccagaccatgggagctgtctgggatgttgatccttgagaacttggccctgtgctttagacccaaggacccgattcctgggctaggaaagagagaacaagcaagccggggctacctgcccccaggtggccaccaagttgtggaagcacatttctaaataaaaactgctcttagaatgaaaaaaaaaaaaaaaaaaaaaaaaaa

SEQ ID NO: 223202 - DNA, 1000 bp, Homo Sapiens; identical to SEQ ID NO: 117887

SEQ ID NO: 223203 - DNA, 1000 bp, Homo Sapiens; identical to SEQ ID NO: 117888

SEQ ID NO: 223204 - DNA, 1000 bp, Homo Sapiens
cccataccagttccatccagggtctgcttaactgccaagagcaggtcctggagttcccttcacctgcagagtccttttcatgacctaggaggtcttattcaaagccctcattgacagaggaggaaacaggccaaggcaggacatggctggaccatggtgatacagctctgtgtgattcaagttctggcagagcttgtaaggctagagcccaggtctgccgacaccctgtgcttgttgcacacttgatttgctaaggctggagacaggcaccattgccatggggctggtcctagtcactggccgaggataagcccgtccctgtcccacattctagccccactatgcgggggtgctgttgtcctgcctgtgtctcatccccggctgcctaagctagggacactcaagtgcttccttccttgccccatcttcctcccaactggaggcctctgagcctcccctgtgccttgggccctgaagccccatatgtagtatagagcaaaggtggctcctggtgaagagagggtggaaaggcccttcagccccagggccatgtctgggttctccatgcccatcagtctctgcagtttctctacctgcccccagagctgaggccatctgcaagcccctgcccatggcccaatggggagcctccagccacaagttccctgtccttatcagccactgggtggttcccactgcatgaccctctatccctgccatctgtccccatggtttccagctcaatccacccctgacccatctgtcagctttttcccagggagccgtttcaggggttctgggcagtaggctgggcctggcctcagaacctggtggctcctgcctgctccttcacttttgtaaaaccatccccttcaccagaatggtattaactcctggtgctttgtactactggtccagctgccctgggctccttttctatattaataaagaaacgagtaaaaattaaaaaaaaaaaaaaaaaaaaaaaaaaaaaaaaaaa

SEQ ID NO: 223205 - DNA, 1000 bp, Homo Sapiens; identical to SEQ ID NO: 117890

SEQ ID NO: 223206 - DNA, 1000 bp, Homo Sapiens; identical to SEQ ID NO: 117891

SEQ ID NO: 223207 - DNA, 1000 bp, Homo Sapiens
atgggaaatgtatttaaaaatcctgcccttcctttagggacagccccatggacctcccaggcctacaatgccctgacatcggtcgtgacatcatgcaagaacttcaaagtgcgcatcagatctgcagccgccctttccgtcccggggaagagagagcagtacgggtctgttgaccagtatgctcggatctggaatgcattggtcaccgctttacagaagagtgaagacaccatagactttttggaattcaagtactgtgtcagcctacggacccaaatctgccaggcactgattcacctcttgagcttggccagtgcctcggacctcccttgtatgaaagaaacccttgaactgagtgggaatatggtccagtcctatattctacagtttttaaaatcaggagcagagggagatgacactggagcaccccacagcccacaggaaagagaccagatggtcagaatggcccttaaacacatgggcagcatccaggcaccaactggagacacagccagaagggccatcatgggctttttagaagagatcctggccgtttgttttgactcatctggatcacaaggggcactcccagggttaacaaatcagtgaagatcccaccatactttctagatgtcgaaggcggcagtaggaagacctgagcttgagcataagatctgtgggatttcatcttaggggcagaaacaatccgttcactatttatttagaatgacttagcagccatttaaattttcacagagggctcaaccacctttggagtgactccatagcactggccatggtcagggttgttggaacatctgacctgtgcatccaggagccgaggagtcaggttgtaatacaggccaagcagacgggctttgagggcatttagtctcagaaaaaaaaaatgtagaaggatttcggaattagaattttgtgtattgtatctgtagttttgtaataaactaacgaaaaatagtgaaaaaaaaaaaaaaaaaca

SEQ ID NO: 223208 - DNA, 1000 bp, Homo Sapiens; identical to SEQ ID NO: 117892

SEQ ID NO: 223209 - DNA, 1000 bp, Homo Sapiens
ttagtgcaaaagcattaaactatttgtgtttttcttgtggtgatgaattcagcaaggtgacagaggtactattataattcttacttgcagaatgttcaatctacgagtgttcatggaagccaaaaaatattaaaggaaaatgaacaaactgttaatattattgtacagaaccatggattttttttgaccatcttctaataaacatagcaagtattatgaatacattaaagttttactaacatgaattttaagagtttgcatatttcagaaatgatctggtgtgagtgcatggaaatattgcttaatttttcttcaatcattgagtgaaaaacctttaactttggcctgcaatagtcatttgattattttttcattttgtaaataatgttaagttttgtaataaaatagttatgttctgataccagtacagtttctatggttgtaattgaacttgaacagacttttaaaggttaaaaattatgatttaaatcttactctgagactctataaaaagaaaaaaaaggtagcatggtggaaacactatcttttcttttttgctagaataagtgtctttgtgcaaacctaaatcacagatagggaatatactacataacctgcagttcttttctttgtgaatcctgacacactgatagatgggggattgtcgatcagagaacttattaatatttagtactggaagaactctgtctccacagttgccagtaataaaaagaaacattggctactatgagcaccaatcactgggttatagctttcaaaattattgatgctgcagtgctttagagctatttccttgaatttaagaaacaaatcttaacagttttatggtgctgatgcttagttgtctcatgccattaaattgtaaaagtgagttgatgcaatacatgtgactttctgctataatgcaaatatttattttttaaatttattttaaaatgccgtgaaaactgtttaataaagatttattgttttaatattt

SEQ ID NO: 223210 - DNA, 1000 bp, Homo Sapiens; identical to SEQ ID NO: 117894

SEQ ID NO: 223211 - DNA, 1000 bp, Homo Sapiens; identical to SEQ ID NO: 118713

SEQ ID NO: 223212 - DNA, 1000 bp, Homo Sapiens
ccaccggtcttctcctcctcttcccagcaagaactacccaagcagacctactccatcattcaaggggcagcccatccagctttgctctgtcccgccgactccattccagattagtgcttaaaaaaacaaaaggagtgggggaaaggaattgagaaaaagaaatcttaagtagaattctctaaaaggtttgctcttaatgttttctttgttttgttttgtttttgagacggagtctcgctctgtttcccaggctggagtgcagtggcgctatcttggctcactgcaacgtccgcctcccaggttcaagcgattctcatgcctcagccctccgagtagctgggaccacaggtgtacgacatcatgactggctaatttttgtatatttagtagagacggggtttcatcatgttgaactcctgacctcaagtgatctgcccacctcagcctcccaaagtgctgggattacaggtgtgagccaccatgcctggccgtggtttgctcttaatgtttttaaggatggttgtgaatccccctggccccataataaattgtaattttatactgcttactataatttttttaacactgtaacaactttgagaccacctctgaatcgtcgcattataactgttgtagaatcttaaatgttaccaagatgattccaatgaggggttggaattaaatgcattaagtagtgaattcatgtgtttgtttccaacttgattttccaactctaataaaggtttctgtccatcttattacatttgtgtagtaaatggtacttcccagcctctcttttgccccattctggaatactccccagagtttgggggtgttcatgttttatacatgtaagtctgttggcatgaaggaccattttctacataatatgacatggatacttgacccaaaaaaaaatgtttagtgctaatgagcagaaaatgaatggttccataataaattgatatctgattaaaatataaaaaaaaaaaaaaaaaaa

SEQ ID NO: 223213 - DNA, 1000 bp, Homo Sapiens
tctgatggcccgtgtgagcagtcctcgcaggagacaccaccagctgtggcagcttggggcggggtgggtagtggtcactgcggtctgggagtgctcagatagcccgcagaacaaatcatgtcaccaagcttcaagccatggaggttccttccctctcacctgcatttttgcccgtctttatgagggtcttgaaaatcaaaatagtagttgcacagtatgtgtaggaaagacagtactggaacggcaaggtttctcagcttatcttcagcaacatatatactggattagggcaagagaaggaatcacccagcacttcaccagttggaaatctctggaaatttacatctatgtatttaaagttctgctaatgcaaatcttttctctggaaagaagcacagaggaggagttctgatgacccaggggttagggctgagacaaccggacgtttgtcacctcctttcccattgggtttttaggaaaacagtgtgaacctcccccttttaatttctggtgttatgaggaagaataaaggggataaaaggggctaagatggactcatgtttagctaagttctgacttgtatccagcatgctggagaccaaagctgccgccttactgctatttttaagtgccctcttttcagtcatttgcataattgcgtccatagagctgcatatgttgtgaataaattctcactcatttcaactttgaataatttgactgtcttgataattggttcctcccaaagactcttctgcaactcccattcatgcccaccaggcctcagactccctcttttccccgccctgcactattggagccctgggttttgtgggagtgctcagcaccgtgagtcttactgtttgatcggacagttagcaagatcagatcctttttgcttattttctatcactttggagggttttctgtagcaaaatcagtgaccaatgaagtaacttaaattcctattgaagaaaaaaaataataaaccacttgattt

SEQ ID NO: 223214 - DNA, 904 bp, Homo Sapiens
gcgaccctcttcttggcgtagagttttcagattgctcttgggaaccatgccgaaagtagtgtctcggtcagtagtctgctctgacactcgggaccgggaggaatatgacgacggcgagaagcccctccatgtttactactgtttgtgcggccagatggtcctagtgctggactgccagttagagaaattgcccatgaggccccgggaccggtcccgtgtgattgatgctgccaaacatgcccataagttttgtaacacagaagatgaggagactatgtatctgcggagacctgaaggcattgaacgacagtacaggaagaaatgtgcaaagtgtggactgccgctcttctaccaatcccagccaaagaatgctcctgttaccttcattgtggatggagcagtagtcaagtttggccagggttttgggaaaacgaacatatatactcagaaacaagagcctcctaagaaggtgatgatgaccaaacggaccaaagacatgggcaagttcagttctgtcaccgtgtctaccattgatgaagaggaagaggagattgaggctagggaagttgctgactcatatgcacagaatgccaaagtgattgaaaaacagctggagcgcaaaggcatgagcaagaggcgactgcaagagctggctgaattggaagccaagaaagcgaaaatgaaggggaccttgattgacaaccagttcaaataaccaggcctttttctaagccctagactagaggcaagcatttagatcaggaggcaaagtaatttcttgattacatagacggattcctatttatgccctagcagaaggctttacgttgtttcccattgattctcctacattcagtgaggtctttaactgagtccatttaacttgctttcttttttttttttt

SEQ ID NO: 223215 - DNA, 1000 bp, Homo Sapiens
tactaaaaaatacaaaattagctgggcgtggtggtgcgcacctgtaatctcagctactggagaggctgaggcaggagaatcgcttgaacccaggaggtgggggttgcaccgagcagagattgcaccactgcactccagtctgggcaacagagcaagactctgtgtcaaaaaaaaaaaaaattaccgatattttacttccagcatagttttaaagataatttattggtcacatacaacaaaatagaattgtgaagtccattatagggctctgagcctgatttaaggtcacagaaaaaagaatttgagtctgtttctcagatctagaattatcaaatataaggaacttctcggcaaaacagggtgccactttcagctgacaaacttgtgggtgagaataaagaaaagtgagtctttaggtagataaagttgtcactcataatggtgtgtaacagtagaaaccttactttaccatctccacggatatgaggatatatgatcttcatggtgtgaacgtctaacttggctgagacaagctatcagtaaaagaaccaagatatagtgaagaatgaggatttcagagccaggagaaatcagtattgttttatttggaaataaatcatctatatttatatgagtaaacattggtattttcatgtaacaatactggtatgcaataagtggtgtaatatgagttgttatggactgaatgtttatgtccctcccaaaactaattatgttaaaatcctcaccatcaatgtgatgttacttggaaatgaggcatttgggaggcaattaggattagatgaggtcatgagggtggagccctcgtgatgggattagtgcctttataagaagagacatcaggctgagcccggtggctcatgcctgtaatcccagcactttgggaggccaaggcgagtggatcatgaggtcaggagattgagacaatcctggctaacacggtgaaaccccgtctccactgaaaaaaaaaaaaaaaaaa

SEQ ID NO: 223216 - DNA, 1000 bp, Homo Sapiens
ttcctgccccgggtctggtgtcttctccgacggtaccagatgatgttcggcgtgggcctctacgaggggactggcctgcagggatcgctgcctgtgcatgtctttgaggccctccaccgactctttggcgtcagcttcgagtgcttcgcctcacccctcaactgctacttccgccagtactgttctgccttccccgacacagacggctactttggctcccgcgggccctgcctagactttgctccactgagtggttcatttgaggccaaccctcccttctgcgaggagctcatggatgccatggtctctcactttgagagactgcttgagagctcaccggagcccctgtccttcatcgtgttcatccctgagtggcgggaacccccaacaccagcgctcacccgcatggagcagagccgcttcaaacgccaccagttgatcctgcctgcctttgagcatgagtaccgcagtggctcccagcacatctgcaagaaggaggaaatgcactacaaggccgtccacaacacggctgtgctcttcctacagaacgaccctggctttgccaagtgggcgccgacgcctgaacggctgcaggagctgagtgctgcctaccggcagtcaggccgcagccacagctctggttcttcctcatcgtcctcctcggaggccaaggaccgggactcgggccgtgagcagggtcctagccgcgagcctcaccccacttaacatatcctgcggggaggaggagccccaggggtgctagtctggactgctgggactcgggcccctggggcctcagagggaccccggctgccactgacatatgaagattatggttctgccagggctcccctccctgcctgtccccaagtcctcacctcaaactccctccaagtcccatgtatataggtcctgatgccttcccaaccccgcccctcaccctgttgccaccttgtttcatttgtaaaaggaaatacagaaacccccccaagaaaaaaaa

SEQ ID NO: 223217 - DNA, 1000 bp, Homo Sapiens
aatacacatgaaaactatgttggatgatgataagcgacagctacgtttataccaagagaggtaccttgctgatggggatctgcacagcgatggtcctgggcgaatgaggaagtttcgatggaaaaacatagatgatgcttcccagatggacttgttccacagagactctgatgatgatcagactgaagaacagcttgatgagtcagaagccaggtggaggaaggagcgaattgaacgagagcagtggcttcgggacatggcacagcaggggaaaattacagctgaagaagaagaagaaattggggaggacagtcagtttatgatactggccaagaaagttacagccaaagcactgcagaagaatgccagtcgccctatggttattcaggaatcaaagtctttgctcagaaatccttttgaagccatcagaccaggaagtgctcaacaggtgaagacaggctcactgctaaaccagcccaaagctgtgcttcagaaactggctgctctctctgaccataaccccagtgctcctcgaaattcaagaaactttgtctttcatacactttctcctgtcaaggctgaggcggcaaaggaatcgtctaagtctcaggtaaagaaaaggggtccatctttcatgacttctccttcacctaagcacctcaaaacagatgatagcacttcaggattgacgcgaagcatcttcaaatatttggagagctaacaccatcaaaggtgccaaaatctacattgagactgctttgagaagtttctagcactgaaagttggaattgacactccagccaatgatccttccttctttcataatcaatgcaataagattgcagacagaaattccagtgatttctactgcacagctctggacatctcttttcctagtattattccctgaattggccactgatttcaattctgcagtatttacaacatcaacaactcatggaatacttgggtgaggtttcctttttttttttttttttaa

SEQ ID NO: 223218 - DNA, 1000 bp, Homo Sapiens
agaccagctggccattcagacgaaggatgcagactccaccgagcactccacaccatcgcttgtgcatgatttcaggccgtcctcaaacaaagagttgacagaagtcgaaaaaggcttggtaaaggacaagataattgtggtgccactcaaggaaaacagtgccttagccaaagggagcccatcatcccagagcatccctgagaaaaactccaaatcactgtgcaggactggctcatgttcagaactagatgcctgccccagcaaaattagccagccagccaggggattctgccccagggaggtgacggtagaacacaccaccaacatccttgaagaccattctttcacagaatttatgggagtgtcagagggaaaagattttgatggtttgacagattcttctgctggagagctttccagtaggaggagtctaccaaataaaacaggcggcaagactgtctccgatgggctccaccaccccagccagctgcattccaagttagagaatgaccaggtaataattccagaggcagccttttgggttctgtgctgtcaatgagtatgtctaactgtatgtcaaccccagaggcccttcaccgcaacaacttggtaggaaagattcatccagttgtttgtgacggcaaagatgagcccacagagaagcaggctcacttcctgcacagctgtctctgtcggagagcaagtctgttttgggaactagaacgcaattgtgaaattataagaccagtggatttttttacctggcacatgggttggtgttgaatgaagtgttcagatggataaggatcaatctcatattcattccctgggatgtttagttaccagttttcccaaagtgttctggtagcatctaccatatttcatcaaatctgtgattcctttgattattatatgaaccattattttatgtatcattaagaaaaaatactgccaattaaactctgtcatatcaaaaaaaaaaaaaaaaaaaaaaaaaaaa

SEQ ID NO: 223219 - DNA, 1000 bp, Homo Sapiens
gccagtgatgatgaagataatgatggcaacgaaggtgacaatgagggcagtgatgatgatggcaatgaaggtgacaatgaaggcagcgatgatgacgacagagacattgagtactatgagaaagttattgaagactttgacaaggatcaggctgactacgaggacgtgatagagatcatctcagacgaatcagtggaagaagagggcattgaggaaggcatccagcaagatgaggacatctatgaggaaggaaactatgaggaggaaggaagtgaagatgtctgggaagaaggggaagattcggacgactctgacctagaggatgtgcttcaggtcccaaacggttgggccaatccggggaagagggggaaaaccggataagggttttccccttttggggatcacctctctgtatcccccacccactatcccatttgccctcctcctcagctagggccacgcggccccacattgcacttctggggggtgaccgacttcgtacacgggtttaaagtttatttttatggtttagtcattgcagagttcttattttggggggagggaaagggggctagtccccttcttttggccctccgcccccgcaggcttctgtgtgctgctaactgtatttattgtgatgccttggtcagggcccctctacccacttctcccagtcagttgtggccccagcccctctccctgtgctgtgtggagtggacaccctgacccccgaagcggggagggccgctgtggccttcgtcacagccgcgcagtgcccatggaggcgctgctgccaccttcctctcccaagttctttctccatccctctcctcttcccgccgcgccgctagcccgcctcggtgtctatgcaaggccgcttcgccattgcggtattctttgcggtattcttgtccccgtcccccagaaggctcgcctctccccgtggaccctgttaatcccaataaaattctgagcaagttcaaaaaaaaaaaaaaaaaaa

SEQ ID NO: 223220 - DNA, 1000 bp, Homo Sapiens; identical to SEQ ID NO: 117900

SEQ ID NO: 223221 - DNA, 1000 bp, Homo Sapiens
ctttgcacagcggatggtgcaaaaagcctcctcctgccactcctccatctctgagctgatacagactgagctggacgaggagccaggagaccacagcccagggcagggtagcctgcgcttccgccacaagccaccagtggagctcaaggggcccgatgggatccatgtggtgcacggcagcacgggcacgctgctggccaccgacctcaacagcctgcccgaggaagaccagaagggcctgggccgctcgctggagacgctgaccgctgccgaggccactgccttcgagcgcaacgcccgcacagaatccgccaaatccacacccctgcacaaacttcgcgacgtgatcatggagacccccctggagatcacagagctgtgactagacagggaagccttgtgggtgtgagcagcacccatccaccgtcccctcccagggagcaagggcagggacagggccggtcgggggggaccctccaaggccaggccttggggacaaccttggcttggccctggcagcccgcatcagctgctcagatcccacttttgccagacgctcattcagcatctgacctctaccttcataagatctgttatttttataagaaaaccaaacaaaaatgttaagcatctaaggacaaggtaaggagggtcactggggcccaagagtctggggaccagcttggctcaggctgagctgaaagaggccaaacaggccctcctccctcccagctccaccccgcaagcaccatcccctccggctaagcaggcgcaagggaggcccagcgcggacatcccctgctggccggacacccgactccagtccaagtctcgctacatttccgccacatccctctctgctggacgtccaggtggaggtggcatccccacgtggacaagaaagtcaatgtcaatgaacaagcattctctccatttcactggcttcccaaatgtgtgcccagcttataaacagaagtgactgatgttccctccggttttg

SEQ ID NO: 223222 - DNA, 1000 bp, Homo Sapiens; identical to SEQ ID NO: 117902

SEQ ID NO: 223223 - DNA, 1000 bp, Homo Sapiens
tccataccagttcatggactctcctgagtgggaatcactacagccttctgaggagggggtgttccaggtcactctgactgctgagacctcatgtagctacatttcctggccccggaaaagtctccatcttcttctgaccaaagagcgatacatctcctgcctcttctcggctctgctgggatatgacatctcagagaagctctacactctcaatgacaagctctttgctaagtttgggctgcgctttgacatccgccttcccagcctctaccatgtcctgggtcccactgctgcagatgctggaccagagtccgagaagggtgatgaggaagtctgtgagccagctgtgtcccctcctcaggccacacccacctctctccagcaaacacccccttgttctacccctccagctaccaccaactttcctgcacctcctacccgggccaggttgtccaggccagacagtggcatactggcttctagaattcctctccagagctactctcaagttatatccaggggacaggcccctttggctccaacccacacgcctgaactttaaggatcattggactatcttctctgtggccagcgcagctctcttctgtgttcacagaatggccactgataggcatgcctcttttcccacccactggaaggctcacaggcaaggtgagagaggacacagaaggtgccaacactgtcgctacagtaaggacctgaagtgactttgagaaattcaccctcacaaaccttccttcaggagcaggcattggtagtgcagaggcacagattccgtcctttaccagctgcagaatcttgggcaagttacatagcctctgtgagcctcatcggtaaacagtgggggttatgaaacccacctcacagggttgttgtgaggatccaatgagttgatttaggtaagcacctagcacatgccgtggcaccaagtaagcactcaataaatcactcaactcttaaaaaaaaaaaaaaaaaaaaa

SEQ ID NO: 223224 - DNA, 1000 bp, Homo Sapiens; identical to SEQ ID NO: 117905

SEQ ID NO: 223225 - DNA, 1000 bp, Homo Sapiens
cctgaaagctactctctcagcttcagagggaaaaaatggttgtagatttctggacttgggagcagacatttcaagaactaatccaagaggcaaaaccccgggccacatggacgctgaagttggatggcaaccttcagctagactgcctggctcaagggtggaagcaataccaacagagagcatttggctggttccggtgttcctcctgccagcgaagttgggcttccgcccaagtgcagattctgtgccacacgtactgggagcactggacatcccagggtcaggtgcgtatgaggctctttggccaaaggtgccagaagtgctcctggtcccaatatgagatgcctgagttctcctcggatagcaccatgaggattctgagcaacctggtgcagcatatactgaagaaatactatggaaatggcacgaggaagtctccagaaatgccagtaatcctggaagtgtccctggaaggatcccatgacacagccaattgtgaggcatgcactttgggcatctgtggacagggcttaaaaagctgcatgacaaagccgtccaaatccctactcccccacctaaagactgggaattcctcacctggaattggtgctgtgtacctcgcaaaccaagccaagaaccagtcagctgaggcaaaagaggctaaggggagtgggtatgagaaattagggcccagtcgagacccagatccactgaacatctgtgtctttattttgctgcttgtatttattgtagtcaaatgctttacatcagaatgatgaaaataggcttgccactttctcttattttaattccatggtagtcaatgaactggctgccactttaatataactgaaaattcattttgagaccaagcaggatcaagtttgtagaataaacactggtttcctagccatcctctgaaaacagtatgaaacatgaccaagtacataatggatttagtaataaatattgtcgaattgctaaaaaaaaaaaaaaaaaa

SEQ ID NO: 223226 - DNA, 1000 bp, Homo Sapiens
aaccacgaagggatatggcaatgagtagagcatgaaggtagaacagtctatatactcttgtgacacatacaatccctaccttgtgctgccaagtaactcatttttgtgcaattctcagtataagccctttgtcgtttctgtgcctatttaaagtctcctaaaggtgtaattgactaggaaggatgtagttctacactgccatttacctatttaaattcatccttgtgaatatctttgttgttgttgttgagacagagtctcgctctgtcacccaggctggagtgcagtggcgtgatcttggctcactgcatcctccgccttccaggtttaagctattctcctgcctcagttgcccgagtagctgggactacaggcatgtgccaccacgcccagctaagttttgcattatcagtagagacggggtttcaccatgttggccaggctagtttcgaactcctgacctcaagtgatccacctgcttcggcctctgaaagtgctgggattacaggcgtgagacactgcgcccagcctcatccctgtgaatttcttattgtacacaagttctttcactatctgtgtgcagtgctctgaggggacagacaaggcttgggtgtatatgccaaccagatctcattgaagtatcagcttgtttggtactaggtgcaagtgtagcatgtcacatgtgaccatgttggatcattgacaatttttaggtatgtactgacctacatttatgatgaagatcctgagcggaggttaagatattaagttattttccatatgaatcagaattatattgattctgtgcaatcaaaacaaaaggcagaatagaatgctgagattggttaagtttgcaatgaccatcttgaaccacagatttctgctatgtgtcatcaaaacatctagttctgagtaacattttcacgattgttataaaattataggtgtgaacttctaaaataaaggaatgctaataaaatgaaaaaaaaaaaaaaaaaaa

SEQ ID NO: 223227 - DNA, 1000 bp, Homo Sapiens
atatacgtcattgacgcacaggatgactacatggaggctttaacaagacttcacattactgtttctaaagcctacaaagttaacccagacatgaattttgaggtttttattcacaaagttgatggtctgtctgatgatcacaaaatagaaacacagagggacattcatcaaagggccaatgatgaccttgcagatgctgggctagaaaaactccatcttagcttttatctgactagtatctatgaccattcaatatttgaagcctttagtaaggtggtgcagaaactcattccacaactgccgaccttggaaaacctattaaatatctttatatcaaattcaggtattgaaaaagcttttctctttgatgttgtcagcaaaatctacattgcaacagacagttcccctgtggatatgcaatcttatgaactttgctgtgacatgatcgatgttgtaattgatgtgtcttgtatatatgggttaaaggaagatggaagtggaagtgcttatgacaaagaatctatggcaattatcaagctgaataatacaactgtcctttatttaaaggaggtgactaaatttttggcactggtctgcattctaagggaagaaagctttgaaagaaaaggtttaatagactacaacttccactgtttccgaaaagctattcatgaggtttttgaggtgggtgtgacttctcacaggagctgtggtcaccagactagtgcctccagtctgaaagcgctgacacacaatggcacgccacgaaacgccatctagtctgaatcccagcgtcggggctctgtgccagcttactcttcactccagggtcggatgccacgtgctacaggacatgggagctgctgcttgtgggaatctggtgcctgttccactagagacaaggggtagagtttctcatttggatgaaaaccccttcaactggtggtgtacaactgaagctactatatcttttttgaaaatggcaaaaaaaaaaaaaaaa

SEQ ID NO: 223228 - DNA, 1000 bp, Homo Sapiens
ccattgaacaggttttaaatggcaaagaacacaagccagacaacaggaacctagcaaactcagaagaactggaaaacacagcctttcagagagcttcaagttttagtcttgctggaattggttttggaactctaggtaataaatcagctttctctcctcttcaaactacttctgcttcttatggaggtgattcaagtctctacggcgtaaatcctagagtaggtatcagtccattaaggctggcatattcttctgcaggaagagggttatctggttttatgtcaccctacctaacacctgggttagtaccaaccttaccttttcggccagctttggattatgccttttcagggatgattagagattcttcctacctttccagtaaagactcaataacttgtggcagactgtacttcagaccaaatcaggacaatccgtaatgtatatgcccattctctctttctggagtttttccagcatacaatacatgcacgtgcacacacatacacacacatccattaatatacttcagtaagtatgtgagtggattatgaggtcttaaaatgctgggttttttttttcaagcaatataataggtcttagatctgaaaactcttcattaggatttatcaagtgaaagaagtaaatctgaacattatatgtgccttgaataaagctatttcaggaaatatttaatgaattttctccctaaattatcatttgtaaacatttttattttaaaactagtttttattttattgaaaagtggaatttttagtgataaaatacatttgtaagtgtaaagcaatacagcataatagaatagaatataaaccgaaaggaagaactgaacaattaaggcaattctatataattaccatttcaaaactgtttcttctattcctggttcataggaaagaaaaaagttattcaaagtatttttaaagcatttgatttgcagatgggtgattcgtaataaataaaacatttgagcattttg

SEQ ID NO: 223229 - DNA, 1000 bp, Homo Sapiens
tacaagggaggcatctacagccacacgccagtgagccttgggaggccagagagataccgccggcatgggacccactcagtcaagatcacaggatggggagaggagacgctgccagatggaaggacgctcaaatactggactgcggccaactcctggggcccagcctggggcgagaggggccacttccgcatcgtgcgcggcgtcaatgagtgcgacatcgagagcttcgtgctgggcgtctggggccgcgtgggcatggaggacatgggtcatcactgaggctgcgggcaccacgcggggtccggcctgggatccaggctaagggccggcggaagaggccccaatggggcggtgaccccagcctcgcccgacagagcccggggcgcaggcgggcgccagggcgctaatcccggcgcgggttccgctgacgcagcgccccgcctgggagccgcgggcaggcgagactggcggagcccccagacctcccagtggggacggggcagggcctggcctgggaagagcacagctgcagatcccaggcctctggcgcccccactcaagactaccaaagccaggacacctcaagtctccagccccactaccccaccccactcctgtattctttttttttttttttagacagggtcttgctccgttgcccaggttggagtgcagtggcccatcagggctcactgtaacctccgactcctgggttcaagtgaccctcccacctcagcctctcaagtagctgggactacaggtgcaccaccacacctggctaatttttgtattttttgtaaagaggggggtctcactgtgttgcccaggctggtctcgaactcctgggctcaagcggtccacctgcctccgcctcccaaagtgctgggattgcaggcatgagccactgcacccagccctgtattcttattcttcagatatttatttttcttttcactgttttaaaataaaaccaaagtattgataaaaaaaaaaaaaaaaa

SEQ ID NO: 223230 - DNA, 1000 bp, Homo Sapiens
ctgcactgtgactgtctcacctcttctggttgatcctcaagtcctacaggttccttgtcttccccttccagtgacccacccctgaccccagacgtgtgattttcagacttttctttcgagcagcagaacttcgtttacggagcacagtcataagtggaggttcagggtgctgacgaaatccaagctgctctggttgaagctgacaagtgcgaggttccctcccaaagctcagccctctgggcggtccccttgcccagggtatctcctacggtacctcttcagaacccaagggctctgcaaatgccagtttgacaagcactgcccagaccaaccatgggttcaaactccagccctgccctttggttcatttttctgcttctcttggctgggggactctggtgccagccttgaaagtcatggtcgtgggccctttcccatggaggctgcagccttaggagagctctgagcctctcagcagccctccttgggttgaactattctccttagtaactaggtaagtgggaaagccttttgatgtggcatggccaaggtccagccacaagtgcaactgccacctgtccaggggtctgggcctccttccctcaaggctgccacacaaagtagcagaaataggatgatgtttgtgagcaccagactcaagaccatgaccttctttgatccttgaaaatgggaactttgacagccatgaccatgaaactcacaaggcaacgcgatgaaactcacaaagcaatgcttggagcaaaactcctgagctagacagcacagcagcacccatcccctgccagagcccttccgttctgaggtcagacacacaaaaccttcgtcaattgcacaccggtgctgttgggagtgaccaaaccacatgaaccagacttttcccgtccaggaaatagcatttcagatttggtttttaatttcatgcccttcggccacaggctcaacgggacatgcaacataaaaatgggaaggttatttaaac

SEQ ID NO: 223231 - DNA, 1000 bp, Homo Sapiens
cacagcaaacacaagcagccccatgagcactcgtccaagtccttccaagcacatgcccagtgacaccgcggcaagccctgtaccccctatgcgtccccaagcacaaggtcccattagccaggtgtcagtggaccagcctgtggttaacacaacaaataaatccacacccatgccctcaaacacaaccccagagcccgcccccacccccacagtggtgaccaccaccaaggcacaagccagggagccaactgccagcccagtgccagtacctcacaccagcccaatccctgagatggaggccatgtcccccacgacacagccaagccccatgccatatacccagagggccgctgggccaggcacatcccaggcaccggagcaggtagagactgaagccacaccaggtactgattccactgggccaacacccaggagctcagggggcactaagatgccagccacggactcgtgccagcccagcacccaaggccagtacatggtggtcaccactgagcccctcacccaggccgtggtagacaaaactctccttctggtggtgctgttactcggggtgacccttttcatcacagtcttggttttgtttgccctgcaggcctatgagagctacaagaagaaggactacacccaggtggactacttaatcaacgggatgtatgcggactcagaaatgtgaggggggcgggggcctggcgggaggcctggccccttcctcgtcctttccttttgcctttgagaccaaaccaagtgcttccaaattcttttggtgcaattgaggagatatgccagatgcttaaacacatttaattgctgtcagattaattccatgatcactaaagagttgctgcttttttcatatttatttttgtaaatgattctgtgcccaggagcagctgggggttccacctcagggtggggcgggcaggaccccgtctccccaggtgtcggagcctgacctgaattaaagtactgactgctcgcc

SEQ ID NO: 223232 - DNA, 1000 bp, Homo Sapiens
gcccctttctctaccaaacctgggaagaaagccaagtccaagaagacattcaaagagccactcaggcccgacaccccaccctccaaaccagtggcctttgaggagtttaagaatgagcaaggtagtgagatcaaccgaattttcaaagaaaacaaatccatcttgaatgaacggaggaaaagggccagcgagaccacacagcacatcaatgccatcaagcgggagattgatgtgaccaaggaggccctgaatttccagaagtcactacgggagaagcaaggcaagtacgaaaacaaggggctgatgatcatcgatgaggaagaattcctgctgatcctcaagctcaaagacctcaagaagcagtaccgcagcgagtaccaggacctgcgtgacctcagggctgagatccagtattgccagcacctagtggatcagtgtcgccaccgcctgctcatggaatttgacatctggtacaatgagtcctttgtcatccctgaggacatgcagatggcactgaagccaggcggcagcatccggccaggcatggtccctgtgaacaggattgtgtctctgggagaagatgaccaggacaaattcagccagctgcagcagagggtgcttcctgagggccctgattccatctccttctacaatgccaaagtcaagatagagcagaagcataattacttgaaaaccatgatgggcctccagcaggcacatagaaaatagaacctcatcgccagtaccttaaaggacaagaccagcaactcccacctactgtagtggagctgctcaaccacctgcccagagctgcagccccctgtactccaatgctgggacccagcacagcgaacacatttggcctgcatgttgggaggagcatcctccaaggacaaccttgctcatctccacagagcactttgggttttaattcactgtcttatatgcagggacaggataaaataactttctagtttggacttttaaaaaaaaaaaaaaa

SEQ ID NO: 223233 - DNA, 1000 bp, Homo Sapiens
aaggagcttatcaatcaccagtgaggaagaccagtataacgttcaacaacagttattttgacaaaaacttattttgtgattcctacagtgaaaacatttttggtgatatctgcctgggaaatctctcttcctaaagtatttgtatatgggagtccttgtttgtgaatgtttcctggattagggaggtgtcaacataaatgtattattaaccatgaagctgctcgctatatttttggcataacaaaataatatttatttactgtggataataattctagtgggaatataatgtgacaggaacttctctttatatacgctaccaatttatgagcactattcactgtcaatttcatttcttgtcttttgaaattgacacttggcctgacttacgaaacttgtactatatgaaattggtcctcttttctgcaatacccaacgaaacaccttttctctttattattcagaaatgtcctaacatggatctgtttgttttaataattgtgctttttttaggcttatcatctactagaggccatttacttaaggtgaaattttaagatggagctaaagtaagatcactggtttttagaaccaaattgctatacatatgtgcctcatagaacttataaaaggagtcaaagtttcaaagcaagatagttattaagcaaaaggaaaaatggtaatgatagaaagtcagttaaaaatagatgattgttcttcattctgtttgttggctctgtgttctcctgtgcttcagattccttatgtgttgttgttttaaagacaatttgcagggggttgggagaaggactgaaaaggtacattaagtgtgctgtaaggaaaagtcttagaaacataataagctaaaatcccattcacacatggccaggctatccaaaaagaaaggagccatgttctcatgtggtttaccataccaaagcttgctttctctggcatgggaaaaataaatttaagcaccaaaaaaaaaaaaaaaagaaaa

SEQ ID NO: 223234 - DNA, 1000 bp, Homo Sapiens; identical to SEQ ID NO: 117914

SEQ ID NO: 223235 - DNA, 1000 bp, Homo Sapiens; identical to SEQ ID NO: 117915

SEQ ID NO: 223236 - DNA, 1000 bp, Homo Sapiens
ggggaaaacttccattgataaactctccttgcttgtttcaggaaggatcagagtgacagttgatggcgaatttctgcattacattttcccccttcagttcctggattctcctgagtgggattcactgagacccacagaggaaggcatttttcaggtaaccctcactgcagaaactgattgtcgatatgtgtcttggaggagaaagaaattatatctgctctttgctcagcatcgctacatctcccgccttttttcagtgctaattggcagtgacattgcagataaactctatgccttgaatgacagggtatatataggaaaaagatatcactatgatattcggctacccaacttctatcaaatgtcaactccagaaatacgcagatcacccctgacacaacattttcagaattccagacgatactgtgataaatgacatcaaagtctgaaatttataagtataaaaaaagactctctcttcatcattccccagtgaaatagcaaaatacaaaaaaagagctccctaatgtttttataaatcaaattcagaagcgagatgccattgccaactgttttattcctttcaacaactgcattgtgaataaactttacaaatttttcttgtatttctcattgttataattggggagggggtggataactatgggcagtttgcccttttctgcatcaaaactgggagaatgaaattccactttctcaattcttttctcacatttactcaaatgcattgtcttgccctatggactcaggagttgcttctcaagaaacagccagcaagtattctcagcctgagggtgggttgctactgtccacataggcatttccggaattcacttttttgctacaacctccagtgaaagcaattattttaaatgtgcagttacttgatgtgactaaaaagtagaataaatgcaagagataataatatgtgaatcttgaagcctattttattgctacaaataaaataacatttaaaaag

SEQ ID NO: 223237 - DNA, 1000 bp, Homo Sapiens
ccgccactctcgaccccggctactacacgtaccgaaacttcttgaagattgaagtcagccagtcgcatccagccatgacagccttctgctccctgctcctgcaagcgcagagcctcctacccaggaccatggcagccccccaggacagcctcagaccaggggaggaagacgaagggatgcagctgctacagacaaaggactccatggccaagggagctaggcccggggccagccgcggcagggctcgctggggtctggcctacacgctgctgcacaacccaaccctgcaggtcttccgcaagacggccctgttgggtgccaatggtgcccagccctgagggcagggaaggtcaacccacctgcccatctgtgctgaggcatgttcctgcctaccatcctcctccctccccggctctcctcccagcatcacaccagccatgcagccagcaggtcctccggatcactgtggttgggtggaggtctgtctgcactgggagcctcaggagggctctgctccacccacttggctatgggagagccagcaggggttctggagaaaaaaactggtgggttagggccttggtccaggagccagttgagccagggcagccacatccaggcgtctccctaccctggctctgccatcagccttgaagggcctcgatgaagccttctctggaaccactccagcccagctccacctcagccttggccttcacgctgtggaagcagccaaggcacttcctcaccccctcagcgccacggacctctctggggagtggccggaaagctcccgggcctctggcctgcagggcagcccaagtcatgactcagaccaggtcccacactgagctgcccacactcgagagccagatatttttgtagtttttatgcctttggctattatgaaagaggttagtgtgttccctgcaataaacttgttcctgagaaaaaaaaaaaaaaaaaaaaaaaaaaaaaaaaaaaaaaaaaaaaaaaaaaa

SEQ ID NO: 223238 - DNA, 1000 bp, Homo Sapiens
aaatttataactttcttttgatcatcatgtacagaggtgttttttttctttaggcttctcatgcatatgaatattttaagcacgaatggactactaaatatctgagttttttttttttttttttaaagatcctaacagaacatagcgtaacaatattggtcttccaggtgttactcatttcaattatgtgtagtataccaggacagacctattttcatgtcttatttctttaaagagctgcttcattggccgggcgccatggctcacgtctgtaatcccagcactttgggaggccgaggcgggtgggttacttgaggtcaggagttcgagaccagcctggcaaacatggcgaaaccccatcttaactaaaaatacaaaaaaattagccgggtgtggtgtcacgcgcctgtaatcccagctacttggggggctcaggcaggagaattgcctgaacccaggaggcggaggttgcagtgagctgagattgggccactgcactccaccctgggcgacagagtgagactcggtctcagaaaaaaaaaaaaaagagctgcttcacatataaatgtctatagctagtagcctggccctttaatgtttaatttgaatagatatatctgttttccgtgaattatcttgaaagttttaaacagaatgacctcatagtttttaataaagaatattatttacctaaaatgtgctagtagcatcttgcccagccataaagcaataaacttctcaataatcttaattttgatatttgaataaataatggaaactttctgtattaagggcatgtatcccatcaattggaatcagtaccttaacagaaaaaggcagctcttcaatggaattaacgtgatataaaatgtttgatataggcagtacttttataaaaaaagataagctggaaattgctccgtgtaattttttaaataaaaagtcaattatggtaaaaaaaaaaaaaaaaaaaaaaaaaaaaaaaaaaaaaaaaaaaaaa

SEQ ID NO: 223239 - DNA, 1000 bp, Homo Sapiens
ctgaaggacctggaggaggagctgcacccaggagaagtcctggtgatgctggtgggcaacaagacggacctcagccaggagcgggaggtgaccttccaggaagggaaggagtttgccgacagccagaagttgctgttcatggaaacttcggccaaactgaaccaccaggtgtcggaggtgttcaatacagtggcccaagagctactgcagagaagcgacgaggagggccaggctctacggggggatgcagctgtggctctgaacaaggggcccgcgaggcaggccaaatgctgcgcccactaggtgcagccactcctgggggctgtggggaagacaccccctgcctgggccatggccagctctaggtggattctgattcactgtcaatgctgggttgctcccgagccctagatgttcctggaagttggccccctttatgaaaaccacttcccacagccagtgggaactgccagaggaagatctggcgtcacatggctcccaggaaagtgctgtgccctatccccactgataccatctgattccccgatgcctgtgcctgttccacctggacggtggccccctcagcctggcagcctctggacagagaggaaggaaggattggaaaagtccccgcagcacagcgacggtgggaagatgccttacgtctgatcttgatgggggcactggcctggagcctgggcccacctgcttctggggggttggggagcaggccagatggaggtggtggtgccaggaagaaatggagcgatgactgactgtggggtgggcccaggatttccacatcttggtgaagttgcccctgggaagggcagctgggggcagtggcgccagttcccttccatggtctcccggctggcaatgtggtgaagctgagtttctgtccaatgagcaggaagattctgagacatttcgcctgagatataagttgtactgcgtatgcagtttttcctccaaaaattaaattgcttttgacaatctg

SEQ ID NO: 223240 - DNA, 1000 bp, Homo Sapiens
cctcatcaggtcacaccacaggctgatgagaagatgccagtgttggagtcaagttcatggcctgccagcaaaggtctggggcatatgccgagagctgttgagaaaggctgtgtgtcagatcctcttcagacatctgggaaagcagcagccccttcagaggacccctggcaagctgttaaatcactcacccaggccagacttctttctcagcctcctgccaaggcctttttatatgagccaacaactcaggcctcaggaagagcttctgcaggggctgagcagaccccagggcctcttagccaatccccgggcctggtgaagcaggcgaagcagatggtcggaggccagcaactacctgcacttgccgccaagagtgggcaatcttttaggtctctcgggaaggccccagcctccctccccactgaagaaaagaagttggtaaccacagagcaaagtccctgggccctgggaaaagcctcatcacgggcagggctctggcccatagtggctggacagacactggcacagtcttgctggtctgctgggagcacacagacattggcacagacttgctggtctcttggaagagggcaagaccccaaaccagagcaaaatacacttccagctcttaaccaggctccttccagtcacaagtgtgcagaatcagaacagaagtagtaccaatcaatgtcacatgaacaaacaagctgcccccagggtaccatttggggaggggaaatcttttctttctttcccccttaaaaaaaaacacatctgccccgaacactttcccactgttattctttcctcatatcccaacactcagaactcttgtgacattagccagtgggggcttatggttgtgtgaaccatgtatgaaaatccagtgggccccaaccaaggagacagacagacttgggtctctttcccccaacttttccacatggtcatcgtgaaataaaaagtccactctggagtcaaaaaaaaaaaaaaaaaaaaa

SEQ ID NO: 223241 - DNA, 1000 bp, Homo Sapiens
gcctgcgggctgcgggagcggctctcaccctaggagccagagcccaatgtgtcttattccccgtggacatgaaggggagggagggtgtggggatgccttgccaaccagaagcccagccccaaggatgaagcaagacatgtggggccgtagcgaggtgtcacatggggcagggaagcttcatgcccacgggttctgccagccccagcacagacccaaactggggctgggcctctatccctcctctgcctctgttcgcatagtaagaaggagtgaccggtatcctccccttcccctaccctaagctgtagcctgggtgactgactggcctgggcctggggtggggacgtccccaagccaaattactccagggcctctgctcctcgtggctgccaggggcctgcagggtctgggtgggtctcccaggagaggaatactgagtgggagatcggctgtctggagtgttctgatgcaagtctctctctcctgagcctcctcttgatgcaagctctaaagggagaagtcaggccctgcctctccagggtatagacggccctgctaggccccagttcttcctccttccccctttcccaggaaaggccagcccagtccatggccttcttgggcctctgggcacagagccaatgttcgtcattgcagctctcagcaaactgggtcatagctttccccacagctcagcctggggcctgggcagggctcccagcctgcaccgcctcccactgccagtggggcatgattctctcaggcttctgccccgaggccttcgtcgtcctcagggtctggacttggtcagtggcctttcaccagtggagctgccttcccagggagaaggagccgtgcgccagggcagggcccgtgccttagacttctcccgacccccagagcgctggtacacaggtctaggcaccacacagtgctttggaaattctcagtgaatgatgtttaataaagcaaaaaatgtcaaggtgtctttcttggatat

SEQ ID NO: 223242 - DNA, 1000 bp, Homo Sapiens; identical to SEQ ID NO: 117922

SEQ ID NO: 223243 - DNA, 1000 bp, Homo Sapiens; identical to SEQ ID NO: 117923

SEQ ID NO: 223244 - DNA, 1000 bp, Homo Sapiens
tccaggtggaggccatcgaagggggagccctgcagaagctgctggtcatcctggccacggagcagccgctcactgcaaagaagaaggtcctgtttgcactgtgctccctgctgcgccacttcccctatgcccagcggcagttcctgaagctcggggggctgcaggtcctgaggaccctggtgcaggagaagggcacggaggtgctcgccgtgcgcgtggtcacactgctctacgacctggtcacggagaagatgttcgccgaggaggaggctgagctgacccaggagatgtccccagagaagctgcagcagtatcgccaggtacacctcctgccaggcctgtgggaacagggctggtgcgagatcacggcccacctcctggcgctgcccgagcatgatgcccgtgagaaggtgctgcagacactgggcgtcctcctgaccacctgccgggaccgctaccgtcaggacccccagctcggcaggacactggccagcctgcaggctgagtaccaggtgctggccagcctggagctgcaggatggtgaggacgagggctacttccaggagctgctgggctctgtcaacagcttgctgaaggagctgagatgaggccccacaccaggactggactgggatgccgctagtgaggctgaggggtgccagcgtgggtgggcttctcaggcaggaggacatcttggcagtgctggcttggccattaaatggaaacctgaaggccatcctctttctgctgtgtgtctgtgtagactgggcacagccctgtggccggggggtcaggtgagtggttgggtgatgggctctgctgacgtgcagggctcagcccagggcatccaggaacaggctccagggcaggaacctgggcccaggagttgcaagtctctgcttcttaccaagcagcagctctgtaccttgggaagtcgcttaattgctctgagcttgtttcctcatctgtcaggagtgccattaaaggagaaaaatcacgt

SEQ ID NO: 223245 - DNA, 1000 bp, Homo Sapiens
cccaaggccacagccatcccactctctgcttccttgagattcaaaccaaaggctgtttttctatgtttaaagaaaaaaaaaagtaaaaaccaaacacaacacctcacaagttgtaactcttggtccttctctctctccttttctcttcccttccttccccttccatctttctttccacatgtcctttccttattggctcttttacctcctacttttctcactccctatcagggatattttggggggggatggtaaagggtgggctaaggaacagaccctgggattagggccttaagggctctgagaggagtctaccttgccttcttatgggaagggagaccctaaaaaactttctcctctttgtcctcctttttctcccccactctgaggtttccccaagagaaccagattggcagggagaagcattgtggggcaattgttcctccttgacaatgtagcaataaatagatgctgccaagggcagaaaatggggaggttagctcagagcagagtagtctctagagaaaggaagaatcctcaacggcaccctggggtgctagctcctttttagaatgtcagcagagctgagattaatatctgggcttttcctgaactattctggttattgagcccttcctgttagacctaccgcctcccacctcttctgtgtctgctgtgtatttggtgacacttcataaggactagtcccttctggggtatcagagccttagggtgcccccatccccttccccagtcaactgtggcacctgtaacctcccggaacatgaaggactatgctctgaggctatactctgtgcccatgagagcagagactggaagggcaagaccaggtgctaaggaggggagagggggcatcctgtctctctccagaccatcactgcactttaaccagggtcttaggtacaaaatcctacttttcagagccttccagctctggaacctcaaacatcctcatgctctctcccagctccttttgcat

SEQ ID NO: 223246 - DNA, 1000 bp, Homo Sapiens
cgtctcagcacctacaccaagatgctctttgtccgcgagcccttcgagaggctggtgtccgccttccgcgacaagtttgagcaccccaacagctactatcacccggtcttcggcaaggccatcctggcccggtaccgcgccaatgcctctcgggaggccctgcggaccggctctggggtgcgttttcccgagttcgtccagtacctgctggacgtgcaccggcccgtggggatggacattcactgggaccatgtcagccggctctgcagcccctgcctcatcgactacgatttcgtaggcaagttcgagagcatggaggacgatgccaacttcttcctgagcctcatccgcgcgccgcggaacctgaccttcccccggttcaaggaccggcactcgcaggaggcgcggaccacagcgaggatcgcccaccagtacttcgcccaactctcggccctgcaaaggcagcgcacctacgacttctactacatggattacctgatgttcaactattccaagccctttgcagatctgtactgaggggcgccgcagctggccggggccgccctgccccggtcactcacctgtgctcccgggcatcctcctgtccctggctcctcatcctgggagcaacagggctctgaggacgtgaggagccatcgctgtgggaggcagcaggccccgggtggggggcagaggcgcccagccttggatggggaccccagcccctggcctgtacctgtttcctcattccttggctgagggagaggctgagaactgggcagacacccctggagctcagccgacagttttgatgagcagggaagtctgaggcccagaggacggggggcccagcggtaagggatgtcccgcactcccttagccattgccttggaccaaaccacgtggtttgcagcttttctacgagccaggggggaggttcccttggattaaggttccaaataaagcacatggtttccagagcaaaaaaaaaaaaaaaaaa

SEQ ID NO: 223247 - DNA, 1000 bp, Homo Sapiens
tacgtctcaggaatgaagtgtagtctatggttgacaatggagttttgtgatcctgcttattgtaactgacaactgttttcaactccaagagctaaactattggcagttcatgttaagttagagtgagggtgtaggtagtgtcagtgagtggctcttgtgcctgctgtagacattaggcctgcactagggccatgtgctgtcaagattcaggaacatggctttaacaagcagatcttgtatcaaggcagaggtgatgccatgccatacttttaggaagtctgagatgataaatatttcaaggtcagtgaagtctatcaatcattctccccttcctcatcagcaatggtagatagaaatgtcctaaacttttctaaatcctagtgatgaggatgtgctgatattcaacatagtccttaaagtgaaaactgagttgttgctgacctccacaaaagaatatggaaaaaagccttgctgtacacctagttgtacagccactctggccaattccatttcctgtccctctgtggttctgactggagaccccagtgtgggggaggtcttaccatttaatatagaaatgatatcaataactaatgctatgtacttggaaaatccaaataaggaagttttaggttggtgcataactttgtttctcaaattttcgttgtcagaacaaatggaaggagaatattatttagactaatccagatttgctttctatgaaaatctaatgtctggattatcttccttttctcatggcctaagaaataaggatcaataaggaatgatttgaatgtaattttgtgaatgtgtggaaaatataaagcagggatttagccttaataaaggtaaccttctgacatctgttgttaatccccctttgtactcttttcctgtatctgcactgttattttgagatgtcatactgtacactgtattgtaaaaataaaaagtaaaattatatttcaaattttaaaagccaaaaaaaaaaaaaaaaaaa

SEQ ID NO: 223248 - DNA, 1000 bp, Homo Sapiens
ttagaaaagaaagagggcagcctaaaataaacgcaaaatttgcttatactccatcacattcagatgtcttggttgtgacttattaccagtgtggcagagaacccaagttacattttagatcaaaatattctttatgtaggtattgttaaaaggctagagcctacaagttgctcttccatgcgttggtcagggggccctgaaaacactggtaatattaagagtctttctcagggtaacttaatgttttcttaatgaacagtgtttccagctacaaattcttccaataaattgtcttcctttttgaaaagtactctcatagaagaaatttagcaatttctcgttgactgactcagtctattttaagtattcagaaaagattttgatccccattgagttaatgctctgccttgaaaattatttttctgatccttgttagtgataacattttttttctactgaaggtcagaggataggaaacaagtatttctcttctggtatacatgtaatgtattctgtaaaaaagtattcatattggcaattttagttaggcataatattgtggttgtaatttttaaaacttagtgttttgtctgattaaagcaggcactgatcagggtatctcctaagaggtaattcacttcttattcctttccaataattattacattctaaattttcatctatgagaaataacaaacaagaagggaatagaattaaattggggtataatctaatcttcattgtttaaatggtttgccttctcaccattgaagccatttttttatagcctcagaaagaggaaataatgcctccaccattttctacctggtgacttgaaaattgaacttttaagttaggaagaagttagagtcagggaacttgtataccactatctatgcagcattgttatagtctgattatttctgtgttttgaatatgattttcctaatgctctaaataaaattttgttaaaaatcaaaaaaaaaaaaaaaaaatcgac

SEQ ID NO: 223249 - DNA, 1000 bp, Homo Sapiens
tactggccaaagatgttccagatgatgccatggagatacctataggagacaggctgtactatggggaatattataatgcacccttgaaaagagggagtgattactgcattatattacgaatcacaagtgaatggaataaggtgagaagacactcctgtgcagtttgggctcaggtgaaagattcgtcactcatgctgctgcagatggcgggtgttggactgggttccctggctgttgtgatcattctcacattcctctccttctcagcggtgtgatggcagatggacactgagtggggaggatgcactgctgctgggcaggtgttctggcagcttctcaggtgcccgcacagaggctccgtgtgacttccgtccagggagcatgtgggcctgcaactttctccattcccagctgggccccattcctggatttaagatggtggctatccctgaggagtcaccataaggagaaaactcaggaattctgagtcttccctgctacaggaccagttctgtgcaatgaacttgagactcctgatgtacactgtgatattgaccgaaggctacatacagatctgtgaatcttggctgggacttcctctgagtgatgcctgagggtcagctcctctagacattgactgcaagagaatctctgcaacctcctatataaaagcatttctgttaattcattcagaatccattctttacaatatgcagtgagatgggcttaagtttgggctagagtttgactttatgaaggaggtcattgaaaaagagaacagtgacgtaggcaaatgtttcaagcactttagaaacagtacttttcctataattagttgatatactaatgagaaaatatactagcctggccatgccaataagtttcctgctgtgtctgttaggcagcattgctttgatgcaatttctattgtcctatatattcaaaagtaatgtctacattccagtaaaaatatcccgtaattaagaaaaaaaaaaaaaaa

SEQ ID NO: 223250 - DNA, 1000 bp, Homo Sapiens
acctctgcttgggggttttgtgtgttcccctccccccatgccctgcctacccccttttccctgaaccacgtccttttgaataatttccagatggatttctgtagccataccaaagccagggtgttttcattcatgcggatactagtatttatagatgtctgactacctaacttaatttttgtttttgaacttctaattggggccagtgtaaggtcgatcccagaggctgatctgcaaatcaagctacatgtatttgtgtataagaccctgtgttcaggactgggtgacttttctaagaaatatggggtttagaatggggttgactgtattttttaacctaattctggagagaagattgtattttttacagttttttgggtttggcttccttctcacatttctttagctttgaatttttactaaataaatttcctcctgattaattttttttttctcatctgggaatttgaaatctcggtgcttactgttacaccaatttgtccaaagagttgaaatcactttaatgccagaacatggtaaatttgcagccatttcaagcaggtgatggtctttttttataacatcgttaacgggtaccattaaatattctgagaggtgaatgtaaaatataaaaggtataggtttttttttttttttaaagaaaacaataaactttcaaagagaaaaccagcatgaagtctgtattgtatccattgacttgataagtgatagaaatttattttaggtttttgatccattgcttatggggaaaggaagttagggcagaggaagggatattctagacatttaattcttagtgaagactaagatacagaatgatgtcaggctaatactcagttttgtaaagagcaatctggggtgttgacccttaaatgtttgtgcactcttcttgttgcagataaaagtcattaaaaatcaagtgaatagaatggatcttgggtggaaaaacaatcttgaaataaacttgtgattgaggata

SEQ ID NO: 223251 - DNA, 1000 bp, Homo Sapiens
tctgtttgtttgggttttgtttcttgctgtgactgaaacaagaaggttattgcagcaaaaatcagtaacaaaaaatagtaacaataccttgcagaggaaaggtgggagagaggaaaaaaggaaattctatagaaatctatatattgggttgtttttttttttgttttttgttttttttttttgggtttttttttttactatatatcttttttttgttgtctctagcctgatcagataggagcacaagcaggggacggaaagagagagacactcaggcggcagcattccctcccagccactgagctgtcgtgccagcaccattcctggtcacgcaaaacagaacccagttagcagcagggagacgagaacaccacacaagacatttttctacagtatttcaggtgcctaccacacaggaaaccttgaagaaaatcagtttctagaagccgctgttacctcttgtttacagtttatatatatatgatagatatgagatatatatataaaaggtactgttaactactgtacaacccgacttcataatggtgctttcaaacagcgagatgagtaaaaacatcagcttccacgttgccttctgcgcaaagggtttcaccaaggatggagaaagggagacagcttgcagatggcgcgttctcacggtgggctcttccccttggtttgtaacgaagtgaaggaggagaacttgggagccaggttctccctgccaaaaagggggctagatgaggtggtcgggcccgtggacagctgagagtgggattcatccagactcatgcaataaccctttgattgttttctaaaaggagactccctcggcaagatggcagagggtacggagtcttcaggcccagtttctcactttagccaattcgagggctccttgtggtgggatcagaactaatccagagtgtgggaaagtgacagtcaaaaccccacctggagcaaataaaaaaacatacaaaacgtaaaaaaaaaaaaaaaa

SEQ ID NO: 223252 - DNA, 1000 bp, Homo Sapiens; identical to SEQ ID NO: 117927

SEQ ID NO: 223253 - DNA, 1000 bp, Homo Sapiens
gacaagagtgggggcggcagcagcggcctggggctctgggaggacacccccaagagcggcgggagcctggtccgtggcctcggcctgaagaacagccggagcagcccatctctcagtgactcatacagccacctatcgggtcggcccattcgcaaaaagacggaggaagaagagaagctgctgaagctgctgcagggcattcccaggccccaggacggcttcacccagtggtgcgagcagatgctgcacacgctgagcgccacgggcagcctggacgtgcccatggctgtagcgatcctcaaggaggtggaatccccctatgatgtccacgattatatccgttcctgcctgggggacacgctggaagccaaagaatttgccaaacaattcctggagcggagggccaagcagaaagccagccagcagcggcagcagcagcaggaggcatggctgagcagcgcctcgctgcagacggccttccaggccaaccacagcaccaaactcggccccggggagggcagcaaggccaagaggcgggcactgatgctgcactcagaccccagcatcctggggtactccctgcacggatcttctggtgagatcgagagcgtggatgactactgaccagcccggacccccagcccctgggctgtaggccagggcagccacagcggcgtggaccgagggtcccagcctgcaggctccccgcagagagcacaggaagaggcaggggcggggtccccagcacttgttacaaacacacgatgcaccttaactcacccaccacgaggcactttacagactgggggagggggtttttctttttattttttttttaattttaaacgactgaagaaaacattaggagaggcaaaaatattgttaaaaactagactctaaacaccccttcctgctgtgaggatagtgggtgtgacaatggaaggtccacagaggtttttgttttttggtttttttttttttttttaagaaaaaaagatga

SEQ ID NO: 223254 - DNA, 1000 bp, Homo Sapiens
ctgtccaaagattagggttggtggtggcagtgcagcaggggagggacaaacaaccaagctatgggtgacagaggctctctcctggtgcctgcacctgcactctagtgaccctgggtgccgccagacccttctcttctacaaagaccccagcaggagtgggagggtctgcaatggcatcgccctgtcctgccttggccagaagcctggagctttggtttgaggaggtagagatatgtgtatccataggaagagatctgtcagaacaggcagctgttgagctcggggtgtcttccccaaggcatgtggctcagcagcaagaaaggcaagttgctcctgctggggccctggactctgccttagctcccacctctcagccttgttattgggtttcatgcccctggaccagccttatctcagacctgcttacctgcatgatgcctttttgggggctggggattgagtcttgctgctctgcccagccctgttctattctgcagggtccctgtgttggaattctccctggggaacctactttctgctcagtgaggctccggccagaaacctggagtccttatcctcccctctgtaagtgttttagggtctggcttttgcaggcaccctctgacctcagcagagctcctgggcctgctgcctgcacaccacatcgcctacctacaatgccaaagcctcactgtcaccctttctgccttggtttccctagctgagccacgctgcccatgcagcagagggcagaaggcttgcacttgggccaaagggcctaaggtccactggacagttgggaaaacacctgaccaccatttaaggactctaagccagaatggaaaattcaccaggactccattcttaagcctatgcgagtcccctagagagaggcattgtactgatatataaatattatataatatatacatgagacatactgacagaatctgtaagctaataaaatgtaagaaaaggttaaaaaaagaaaaaaaaaaaa

SEQ ID NO: 223255 - DNA, 1000 bp, Homo Sapiens
ttattttagaggggagccccctcgaaatgcagaaaaggacttgtggttttgtttttatgctaaggctagtgtactagatgtactttttctaaaaaggaaaggacagaaaaaaatgaagaaaggaaaggaagacaaatgtaaagaaataaggaaaaaagcaaggaatatcccctccccctccccctccccctccccagggctccctgcttagaaaaacccccttgactttctctaggaacctgatggaaacctgaaggagatgtgggtctttcccctccccccatttccagaagggtagataggagcctgcagtcgcctctaaaatcctacctaaccatcccatggtcactcgggcccatgccttcctctccttcgctgtttgatttctattctgttgggcccgccttcctctgagctgcattagtgttagtgctcagaaatcaccataatcacgaaaataataataataaatctttaacatactacctaaagggaacctgcaataatcttgaaaaagaaaaagagaaaaattttaaaatcctgctataggagaaaaaaagagaaaaaaataaaaatcaaaaaaaaaaaaaagaaagaaagaaacctccagcgtattttatcactacctatagaaagaaatcctgctttgagagtatttgtaatgcggttttgttgtcgtttgttgctgcttatttcactaagaaaacccaacaactgagactgcctagcccgccggtcctgtgcgcttttattgtgcttctaaccccagtagagtagaactaaattgcactgaatgtatagttaactctgtcttgaattctctgtttatgcaatgtgctcgaaagaaaaaaatgttaaaaatatatctataataataattttttgtcatttgtctttatgtccagctatgaatgtagattttgtgtcccgacagccctgttcctggtccaagtactttgtattgtatacgtgagtcataataataaaaagaagaagaaaa

SEQ ID NO: 223256 - DNA, 1000 bp, Homo Sapiens
ttttttacaaagattttttgcagtcgagtccatatgtccacccattgatttttaaagcttttgtgatattttagcattttgaaagactttcacagtgagagtagaaggtagatttggaatcatgcattttagcaagtggacttgttgaaacaggaagcaagggccttcagtgtagcccattcttgatccagagctgttgcctgtgacagcggtttctctggatgtcaaaggcagctgcctggtgcccagcttgcttctcgactggtggcccctatgggtgggtgtgcgatggaaatgtgttcctgccggagtctgaggcaccagggtgtgctcaaaggctggccctggtggtggactggcacctgtgcagagtgccgtgtgcttgtggtgcgccatctgaagcaagagtccagcgttctgccgtgtctgtcccccaccatgccccctacaggcggtactgatggcgcttttttttttttttctgtcaggaaaacaatgttggcctgtgggccgcccacaacatatccttccctcactacctgtgtgaccaaggttggcttctgttgacctttaaaaaagaaaccctcaactcaaattgctataattagacacttgcttctgtcttgcctcctgtctgcagctgtgaatagtcatttgactgtgactgttgcccttagccagccagatgcgcctgtgaaccaaagcttcgtgcacatgtgttcccctaaaggttggggagcctcgctgtgtcttgctgttcccaggcaccaccacagcaggtgctgccatactcttgtggtctctgtgcgccccccccccccccccacccgtctgccaagcatgggtatgaatcgtgcacacagccatgcttcaaggccggggcaggggagcctgtgctgatgccatccagggcactgggctgtgcctggaaggcgagccttgattgtctgaacacataaagcaaactgtccagaagggaaaaaaaaaaaaaaaaaaaaaa

SEQ ID NO: 223257 - DNA, 1000 bp, Homo Sapiens
tgttttgtgtgtaggaacctagttgtgttagtttacctgggtgttccacagctgatagtgattgccttgaataaattcaagggcaatttattcatttttactagggagatagacctttacagcaatcaagatatttttgtccatatccaggttagctggtaagaggatttttttggagaaaaaaatgatatttagaaagttaatttctaattccggaatggaataaaaacaatatgagtagtgtaatcttgtagaaaaagagttgtataatcttgtagaatttctcattctgtggtacaacccaggggtaaactattattccagtagtcagtacacttttctagataaatcttgagtgaaaaccagcaatttctttttccttgtggtctgattcctttttctaatccatgaaggccatcttgtagattacatttatcattaatgcaagaataaagacaattcctcctgtcagttgcgtgaattttttttaagaaacaacccagtgaagagttctaccatagcaaggcctaatgttagctttagctttagaaaataacagtttgtgaacttacttccctatatttgcagctgtatctcacactatgatttacaataaaattgtaaagattgacaatagacttaagaaataacattttaaaatctattttatacttaccatttattattctgttattttagtctccatatgttcattacatacataatcttatttaatcttcacaccaaaactgtattcttatgaatatacgctaaaagattaagtaaaatgcccaagggtataaacaaaagcaacatgaaagtggaagccgtatctgtcatttattttatttccagaagcctagcacagtgtccagcatatggtagatacttgtagtgtttgaataaatgaaaccagcattagagctttatatactttctcttaaggacttgaaaagattaggaatctacgcatacactgagagagaaaaaagtgagagga

SEQ ID NO: 223258 - DNA, 1000 bp, Homo Sapiens
gttacatttatgtgctgttagaatatgttgatttttatcaggctttccttgttttgatttatggctgttcctgatttttcatatgtggaaatatacctacctcttccgttggaaagaacatttaaaattaaataaattttaattaaaaaatcaaggagtcttctaatgtaaattttaatgttaactttcaaatccactagtattttttttgcttttatgacaaatagcatacaccaaacatttctgtgaaactatccttctctttcaatgtgtttaattttggagtaacgttttccttgtgactaagttgcaagatcttatttattaactaggtatgaagtataaacccattttggtgcaatattcttgactccttggtgctaaagattgttaaattcaatgcttgatgttacaaggtgttgttaaaacacaaaatgaataaaagtgagagtagtcagaactataacattcaatttgctatttacaaatgaagtatttcatgtaatataagtgaacaactggaaataaagtaggaaagaatttgtatcatgttttactacataggttaattttttaagggatgttgcaaagggattactagagaaagacaaaatgtgaccaaaaaaaagcatgaatatttcttaagtatctcaacaacatgtcaaagctgcatgtgtaggatgtatgctgtttgtacaaactatttcagaatattttgtaagctataacatatttattgtgcattaaaattaaatactttttccccaaaggcatgcagtcatgagaattacagaaaatttgcaacatataaagtagtttgatctaagaggattcaacacctttgttttgttgctcagtgtgtaatgactgagatttgtaaatctttgtgaacattctgtactggttcccaagagctattcattccctgctacctgatttcagcacaataaatatacttctgctgtgggaaaaataaaaaaaaaaaaaaaaaaaaaaaaaa

SEQ ID NO: 223259 - DNA, 1000 bp, Homo Sapiens
tttaaacttaatatcttgaacctaaagaatgctgacttttcctacatttccagagttaggcagtattctacacttaaagactactactatttttataaaaggtaatctattcaaatttcttcacagatttcaagtctctcaaacatcaagacaacttcagcagtcggtacaagtcacatttcattttgattgaatacatgatcttgaacagctcctgtacttgctctttgtaaaaaaaaataaaattattttgaattattctacctttgtaaacaattggctaaaagaatcatctttaagaaattaagccatttacatgtttgtgtttttctatagcagagcattatattttgcattatatgtttcaacctagtctaagtgggtcttttttacatttttcaagaacggatttcctggaatacagcgatataattttggttgtcaaattcctaatgcaaccatttagtctaaacttagtcatttatttgtgacaataagatgtgttcaggggctccctgtttttaagagactcttttaaaaaaaaaaaaacctaatgtttttatcttgagtcaatatgattaggtattttggatttacttttaatcttaaaatactgcatttttatagcttctcagagcatgtggatgggatgggattttcgttattttgctgggtcagcttatctttaatatatggactattcctataaaccaaagtctctgacaagtgcacctaatttatattgtattttaactacagtgtaagtttccattaacaaaaccatcctaaagcgttaactgctcataattttaatcagctacagttatgaaaaaggaagaattttgctctaaagattattaataagcttagaaaatcctgcttttacctaacagaatgaagtggggttgaggggcggtagtatgaacagtgattctaactctatggcgtaaattactttgaagagttcattttggaagtaagggaatcccgcttcccttgg

SEQ ID NO: 223260 - DNA, 1000 bp, Homo Sapiens
atcatcgtgccacccctgaaaacccaggccagcgaagtattggtggagtgtgatagcctggtgccagtcaacaccagtcaccactcgtcctcctacaagtccaagtcctccagcaacgtgacctccaccagcggtcactcttcagggagctcatctggagccatcacctaccggcagcagcggccgggcccccacttccagcagcagcagccactcaatctcagccaggctcagcagcacatcaccacggaccgcactgggagccaccgaaggcagcaggcctacatcactcccaccatggcccaggctccgtactccttcccgcacaacagccccagccacggcactgtgcacccgcatctggctgcagccgctgccgctgcccacctccccacccagccccacctctacacctacactgcgccggcggccctgggctccaccggcaccgtggcccacctggtggcctcgcaaggctctgcgcgccacaccgtgcagcacactgcctacccagccagcatcgtccaccaggtccccgtgagcatgggcccccgggtcctgccctcgcccaccatccacccgagtcagtatccagcccaatttgcccaccagacctacatcagcgcctcgccagcctccaccgtctacactggatacccactgagccccgccaaggtcaaccagtacccttacatataaacactggaggggagggagggagggagggagggagagaatggcccgagggaggagggagagaaggagggaggcgctcctgggaccgtgggcgctggccttttatactgaagatgccgcacacaaacaatgcaaacggggcaggggcggggggggggggggcagagggcagggggacgggtcgggacaccagtgaaacttgaaccgggaagtgggaggacgtagagcagagaagagaacatttttaaaaggaagggattaaagagggtgggaaatctatggtttttattttaaaaaaaaaaaa

SEQ ID NO: 223261 - DNA, 1000 bp, Homo Sapiens
catggagaaggagcagtgaatgggatcgtcggggaagcccctcttcctgctctgctcccctggaaactgttgcaaaactcccagccgcctcatggcaaatgcccaaagcatgttccgcacccaggcgggggcccctgctaatgagaaccttggtgcagctgcagccaggaggggagcgggcccaggagccaggctcaggtccagctggttcctctctggcgccttctgaacccgtctcagcaggtccacagcacctgggcagaggtcagagaccaggggaggccgggccttgccctcccttctgcccagggcccagtgttcttgatagaagacccttctggggagccagggagctcaggggacagataagggaaggacgccccctgactccaggcccctgagcctggcgggaagtggctgcggcccaggcagccagtcctggtggtgttctccctgcatgccctccgtggctgggctgccaccccacccggcccgaatctgtcttgacctgcaggaatacacgggcggcgccaggcattacctcacagcgggactacacagttgctggctttgctcctgggcaaggaggagcaggccagagcctcttttgcttccttttcttgcccatgccgcttctagaagccaggcacaggttgccaagaggtgacacgaaacaggaggaaactcagtgacctctgcctctcccacattcctccccgcgggggaggacctcgccgctctgaagagcaccgtgcacatgtgggtgcacaaacgtgggtgttggtgtggacggggcgcagatctccgtggatgaactgcgtctggactcttagattcataaaatattcgagggtttgggagtcacagaccctcccctctcctcagtgcactttggcatttgcacggtgtcttccccggacagcacagcaataaatggtgtgattgcgtggaaaaaaaaaaaaaaaaaaaaaaaaaaaaaaaaaaaaaaaaaaaaaaaaaa

SEQ ID NO: 223262 - DNA, 1000 bp, Homo Sapiens; identical to SEQ ID NO: 117934

SEQ ID NO: 223263 - DNA, 1000 bp, Homo Sapiens; identical to SEQ ID NO: 117937

SEQ ID NO: 223264 - DNA, 1000 bp, Homo Sapiens
gggcgcctgtaatcccagctacttgggaggctgaggcaggagaattgcttgaacccaggaagcagaggttgcagtgagctgagacggtgccattgctctccagcctgggcgacaagagcgaaactccgtctcaaaaaaaaaaaagaaaagaaaaagaaaaaaaaaatcttggtatactggctgggcacagtggctcacacctaatcccagcactttgggaggctgaggcaggaggatagcttgaggctgggagttcaaaaccagcctgggcaacatagcaagaccccatctctaccaaaaaaaatttttttaaagatttcaggtatatttctcaaaaagataaggactgtcaattgtctactcccccccaacaaaggtcactaaggaaacctgttgactaaacaaagctcattaaacctattgtagtgtagcaaaggagaccatcaacttgacacagagtcttggtaatgattcaaagggaggatgttagagtaaggtatttataaggatttgagataagggtccaactggtttaaaatgagtcaaaatagggaactagtagagactgagaaagggttgtgaatagcttaggtttggtaaacttaggaaatcaacagttttaattttaatatggttaaactgattagtatttcctatttttttatctactgtgtaagaagaccctataatatatgggcattactgagagatactgcccatatgttgtcctcgtaagcaaggagatattttttatctcccatatattacctttcaaacctttgttactttagtttcgagatatagatccagtttatgttgttactcagtagtgaggaagtttcttttttttttttaaatggctatcaagttgtccccccattagttattgaaaagaccataattttttcactcctattcaatgccatttttattgtaaataaactatgtacatgtaaaaaaaaaaaaaaaaaaaaaaaaaaaaaaaaaaaaaaaaaaaaaa

SEQ ID NO: 223265 - DNA, 1000 bp, Homo Sapiens; identical to SEQ ID NO: 117941

SEQ ID NO: 223266 - DNA, 1000 bp, Homo Sapiens
ggcatgcttctactgaagaacagcaactttccttccaacatgcatctgttgcagggtgacctccaagtggctagtagtcttcttgtggagggttcaactggaggcaaagtggcccagctcaagatcactcagcgtctccgtttggaccagcccaagttggatgaagtaactcgacgcatcaaagtagcagggcccaatggttatgccattcttttggctgtgcctggaagttctgacagccggtcctcctcttcctcagctgcatcagacactgccacttctactcagaggccacttaggaaccttgtgtcctatttaaagcaaaagcaggcagccggggtgatcagcctccctgtggggggcaacaaagacaaggaaaacaccggggtccttcatgccttcccaccttgtgagttctcccagcagttcctggattcccctgccaaggcactggccaaatctgaagaagattacctggtcatgatcattgtccgtgggtttggttttcagataggagttaggtatgagaacaagaagagagaaaacttggcgctgaccctgttatagtggttatagtggtgtccctaaagggaggaaatgatttcagcaaaactggttgaacagcggatgaagatatggaattcaaagctctaatggacctttttgaagagaagttgtggcttatgtggagtttacatgggcctctgatggaagaaagctaatctgtttagtatttgtgcattttactaaaatggcagcttaaagttgtgtatctgctattgtgatgccaatgccggtgttttaagtggaaaaaaaatgacctctttgatttgtgctgtgtacacaagatttctggaaaagtaaagaaaaaccctttttatggctcacacagcttaagagtagctgtctctcaaacgtgcgctcacagttgagctgcttttgttttattctaaataaattgtttcttttgaggaaaatgttaaaaaaaaaaaaaaaaaaa

SEQ ID NO: 223267 - DNA, 1000 bp, Homo Sapiens; identical to SEQ ID NO: 117943

SEQ ID NO: 223268 - DNA, 1000 bp, Homo Sapiens
catggagaattttttcttctgagcattttaatatacttgaaaacaacattgacttgaaaaatttcagaacatttttcagtacctagttttattaaatattacacttgagagacactttttaaaaatgtgttaatgtcaatatgatgagattttagcctttctccagaactaaggcattaaagaaaatagcaaatattaaaaaataaaactgttacttttttccttctttcttttcacctttaggttaatatccagtattatgtgttatccctttggataagtatgctttattttacctctgttaaaaattaaaataaatgattctattcatatttgtcagtaattcaaaacttatatgtgtaactgaacgcgcatgtaaggtatggttttatttattttttttttttttgaggaaatttaaatgctaaagaaacaacgaaatgaaaaggtatcaggaaaaaaagatcaggaagttgtattcaggtacaaatctttttttaaataagtattttgttgaggttgaagaattgctggcaattaaaagaatagagctaattatggctttcatcattcattcatgtatttattgagcacctacttattatggtgctcaacacttgttactgcaagctaccttaatttcccaagagtggtgccttactctgttttttctgatatggtcttccaatcagtgtgtgtaacatacctgttgtttatcagccattgtaggtggctgtgtctgttgcatcatcataagaagtttaagctttgtgctctgataaattgtgttctgttaaagaggttagtaggatgaaaacagcaaaacaataattttttcaacaaattgtaaattataagaaaaagagttggtttgtgtacaacaattttaatgattcccttgttcatttttgctgtgaaatgcactgaaaaaaatcctcaaaatgagttatagttcctgtgttgggaaaattgacaaataataaaactagagaacaaacaa

SEQ ID NO: 223269 - DNA, 1000 bp, Homo Sapiens
gaagcctcagggtaatgtgttggttagcacgtaactactaggattggggccctagggattatagccaggactctaatctgcctaccatgccatttaacaagagatcccactctccagctgccttgtgtccctagggtcctggccatgtgtttagtgtgctaaactttctcctttgttctcaggccttccaggtagtccccttcctggacttaagagtgcaaactcttctctgtggttctagccttgggcagaattatatcccagagaccacagagcaactgtcaagctgcttaccccctcacccagggctacagcctgtgcccagccctctaatttgtgcctctcttgtgttgggggtggtgggggttattcctttccctttcctgctctggcctccttgaaagttcagagtacccagtacaagtcagctttaaagtacagcttttagtgtttcctgggttgtttctctggggctttagtgagggacctttgccctctggtttttcttgcctcctggtttagggagcatctcacacttgttagtatctggttgttgggccagccgtgcctcctctagatctggagccaggccaggcaggggccacgtgtgggccagtcagccactacaagatttttgctaagctttgggctgttggcagcatcttggacctcatgcctgggcctgaatgaggctctttcttaagtgtttttacaagtttgtgttttatttatggagtgacttatcccttccattcagagcagccccacccagccagcccttcagcctctgggctcctgctgcttaaaggcagagccgcctggttggtctccaccctgtgcattgggagcccagccaccatgctgacgggtatttttcctcataaagtttataaccagttatttatatgaatctttgttatgtccatttgtttgtattgcgtattttgattataaaataaagtatcttaacagacaaaaaaaaaaaaaaaaaaaaaaaaaa

SEQ ID NO: 223270 - DNA, 1000 bp, Homo Sapiens
ttttttttctgttagaaataaaagccaggggaaattggtttgctttgtgtgctaggaggtgaatcagaacagattataatgaaatgctctttttaaaacattgtttattaagtgatcttattttatttattaaaccaaaacttatttgtgttttcatttgagagtgttgaacaatcccttcttcttctcaaactcagaaaaaagtaatctgataaaagaagaaagttaaaagtcttactgatatcacctccgcatttacttcctcataggcctcaggattatgtagcttttattttttatgttttataaagttttctcctatttctaatagtccatcgatcttctgcatttataggtttgaataaaggcttaagaattgctatttgtcaaaacacaaatgcctttttttcaaagcttcaaattatattgaaattatatttatatgaatttttaagtgactatcattcatcgtgtttttgttataccaagccactattgtctgctattgttgccatttttcaaaaagtaggataagccagcatctagttaaccaaagcatcagaatgtatctaggtggcagtatctgctcttagtttaagatggagtgtagctcgagctctgtagcttgaataaacatttgtattctctagttctccatttaatacagcagtaggattttttcaagtttagttcaacattatactacctttaaaaaggcagactgttaagattgtagtagtgctgactctaactttcagcattcacttcataattgtccaaaaatatttccacatcagtgagctttactgaagggtgaaataaaagcaaattacaacaccaaaaccattattgttttaaagaatgacctttatgtctataaaaatattttagtgtattggggaaaggaataggatttttacctgtggaatttcaataatttgttaactgtgattcagccacaggctaagagtttctgtaataaaattaacatttgtgtgtg

SEQ ID NO: 223271 - DNA, 1000 bp, Homo Sapiens
cagtgatctttattctccgaaagaaagacgggcaggtgaccttcctacatgtcttccatcactctgtgcttccctggagctggtggtggggggtaaagattgccccgggaggaatgggctctttccatgccatgataaactcttccgtgcatgtcataatgtacctgtactacggattatctgcctttggccctgtggcacaaccctacctttggtggaaaaagcacatgacagccattcagctgatccagtttgtcctggtctcactgcacatctcccagtactactttatgtccagctgtaactaccagtacccagtcattattcacctcatctggatgtatggcaccatcttcttcatgctgttctccaacttctggtatcactcttataccaagggcaagcggctgccccgtgcacttcagcaaaatggagctccaggtattgccaaggtcaaggccaactgagaagcatggcctagataggcgcccacctaagtgcctcaggactgcaccttagggcagtgtccgtcagtgccctctccacctacacctgtgaccaaggcttatgtggtcaggactgagcaggggactggccctcccctccccacagctgctctacagggaccacggctttggttcctcacccacttcccccgggcagctccagggatgtggcctcattgctgtctgccactccagagctgggggctaaaagggctgtacagttatttccccctccctgccttaaaacttgggagaggagcactcagggctggccccacaaagggtctcgtggcctttttcctcacacagaagaggtcagcaataatgtcactgtggacccagtctcactcctccaccccacacactgaagcagtagcttctgggccaaaggtcagggtgggcgggggcctgggaatacagcctgtggaggctgcttactcaacttgtgtcttaattaaaagtgacagaggaaaccaaaaaaaaaaaaaaaaaaa

SEQ ID NO: 223272 - DNA, 1000 bp, Homo Sapiens; identical to SEQ ID NO: 117947

SEQ ID NO: 223273 - DNA, 1000 bp, Homo Sapiens
aggtgaacaccaccacccgggcctgtgccctctggggcctggctgaagacagtgactacacagtgcaggtcaggagcatcggccttcggggagagagtcccccagggccccgggtgcacttccgaactctcaagggttctgaccggctaccttcaaacagttcaagcccaggtgacatcacagtggaaggtctggatggagagcggccactgcagactggggaagtggtcatcattgtggtggtgttgctcatgtgggctgctgtaattgggctgttctgccgtcagtatgacatcatcaaggacaatgactccaacaacaatcccaaggagaagggaaaggggccggaacagagtcctcagggaaggccagtggggacaagacagaaaaagtcaccatctatcaacaccatcgacgtttgagtgaagaaacacacccagaagagagatgcactaacaactggggatagggatggggtcagggggagcccaagatggtgatctgcccgagactcccagagggtaatgccactcccacaatctcaggcctggtacccatcctctttccactgtgagcagagccagaaggtaggtctgttcagagtctgtgcccctggacctggggagtggatatcagatgggatatctccttccattccccggtccaggggagagtcactagttgtaccctactccattaggtcccaaatgggggccccatttcacctgtatcaggactctgagcatccccagctgccccacatcttgcctctggccctcagagaggggtgtttctgtgggtactcctcttaccccagcaaataaaaggaattgtctgaccctagaggcagatgctgcactgcactactccaatgtcttccatggagcctcaggtgctccccctctcacctggcagccccttcagctgctagtgatatcacttgttggacatttttccaataaaggttcttggacaaactggaaaaaaaaaaaaaaaaaaa

SEQ ID NO: 223274 - DNA, 1000 bp, Homo Sapiens
tgcgagcctacgagagtgctgtctccttccacttcagcaactattttgtgggctttctttccgaggccacggccacgttggcgggggctggctttaccgaggagaaggatcacctggaatgggacctgacggtgtccaagccactgaatgtggagctgcctcggtcaatggtggaagttgtcacaagctggaacctgcccatgtcttattggctaaataactatgttttcaagaatgctctccgcctggggaccttctcggctgtgctggtcacctatgcagccagcgccctcctacatggcttcagtttccacctggctgcggtcctgctgtccctggcttttatcacttacgtggagcatgtcctccggaagcgcctggctcggatcctcagtgcctgtgtcttgtcaaagcggtgcccgccagactgttcgcaccagcatcgcttgggcctgggggtgcgagccttaaacttgctctttggagctctggccatcttccacctggcctacctgggctccctgtttgatgtcgatgtggatgacaccacagaggagcagggctacggcatggcatacactgtccacaagtggtcagagctcagctgggccagtcactgggtcacttttggatgctggatcttctaccgtctcataggctgaggcacatctgtggaccctcataaccctcttaagacccctctcagggtgccactgatgggggatgagggaaggccctctctctactccttgaccccctccatccttgacccccaacacctcaacacacacacacacacacacacacaaaatcacaccattttcatgcctgtcaatccccaccccaccacaaggcaggaagggggtggtgcctgctggggcctagagggggatgcttggggaaacagagaaggggagatccagggcctccccgccttccttcttcctttttatatacaatttgttattgtcaaataaaagtaggaaatattcaataggct

SEQ ID NO: 223275 - DNA, 1000 bp, Homo Sapiens
ctttttgttttggctacaacttgattgaaacaagttcaaaatttaaacaagttcatacaagtttttaaaaattctcaactggtagcttgcttgctgtgcgtcttccaaactaaagcctgcaagcgccacaattctaagtgccgccttccattttttttcagtatgttttcactggcttatgttttcagatatgattttcctttttcgcatatatggtttaataaatgggggataattttttttttgtaaatccgtgcttgtgccaagtctcatatttctttgccatctcagaattatctttttaccaccactgtttataaaatttccttagagactttttgaagggaaaatagagcaacagggaaaaatgaaagaaatgtcttggttactgagctctaaatagacaggtttgatggcacttctcatgatacattttagttattcttataaaagcaaacaggcaaacatgagtgtaaattaaagacaaaaagaaaactctggttttatatttgagaacacgtgaaaaatcatgggtcaacataaaatcttgagaaccttctactttctctgggaaagcattatatagtggtgcattagtttagaaagtcagctatgattttgcctatagttctagttattagctttggggttttcttgtactttaagacatacctgtaaattgaacctatttgaattatattccactgtatgtgtattatggctcttttcctattagagcaacttgtgtttccctgataatgtgtacattttttaggcatgtacttaatagttcacaatgttctaaatttggaaggacttaaaaaaaaaacttgtttaaatttccatctgttttgtaatatctagctctatatgtaaatgatgggtttgttggtatttaaaatgaatacaacttgaatgtaattaaagtgctgttttttggaagcgataaactttaaatatacttattaaaatgaaattctattaaaaaaaaaaaaaaaaa

SEQ ID NO: 223276 - DNA, 1000 bp, Homo Sapiens; identical to SEQ ID NO: 117949

SEQ ID NO: 223277 - DNA, 1000 bp, Homo Sapiens
ttcactggagaagacaaaacagggtgatcttcatgttattgttttatacaagtgatggaaatgtaccttgccttgtttagaggcaatttcacatttataaatatttttttttcctccatgaaacttacgcagtaatcactacctggaaggtgagttttgatctctttttaaggagaggcactttccaactgaaggtgattgatgtagggaaatgtttgtactatatagaatccatatatttgactgcaagttacaaagttttaagaacatgatggttggtctctaatatatttggaactgattcataagaaaagttattaaaattatctttgaaacacctcttgaagctaatttattagaaaaaatatttcagttggaaggctgtagaagtaatgtttaaatgctaagtcataagttcaggatatttcttttctatttggttgtgcaaaatgtttttcccagttatttaatcgaagtaattccttttaatagaaagagtcagttaaaattcagcattcatggatagatttttggaacgaaaaagggtaagtataagaaaatattgcaaacacattaaaacagttgtatggtgcaggaaaagaagattggaaaaagaccaaaacacacttctccagcaacactccatcagctttttaaaatttagagctatctgctaattttttccctcttccttctcaataaatgaaacaaacactgggcagctgcaggtttctcccaatcatgtctctttatgtaaagacagtaacatgcaaacacttttagtttacatccctcattcacagtgtaaagcaggaaatggtgtgggagatgtgagaccattctgaggtcagcgatagcccaaaggctctgcagtattccctccaatggccaaggattccgtgtgtcatctgcaggagtgagtaggcctgctgtatttcttgtaactgctgggtgttacaaaataagttacaatgttttacactttaaaaaaaaaaaaaaa

SEQ ID NO: 223278 - DNA, 1000 bp, Homo Sapiens; identical to SEQ ID NO: 119045

SEQ ID NO: 223279 - DNA, 1000 bp, Homo Sapiens; identical to SEQ ID NO: 117951

SEQ ID NO: 223280 - DNA, 1000 bp, Homo Sapiens
agccagtgcacacagcctgtttgttttagtatccaaggaagagaccaaggagccagctggcgggaaggggtgggggtgtgcagtctgccctgtccttctgctcataacctgacaaaatgccaaactagtaagcaggatagctgataccacggctatgagggagtaggctctgagagggcacagacttgtggagctgggcgtctggatcaaaactgctttgggatggaacctcgagccctagcagtgaagaagattccatttcttgtccaggggatttaaaagagttttctgctttgagagagaaatagagagtttagaaagcaattgctcttgggaaagctatacacagctctgttttgtcaatgacctttgttgtaagtctcccaacgtcctattaggagccacagcaggtgaggcatttggtgcagcaggaaacatggggactgcctaggctcgaatctgtggcaccctgagcaattacttaaattgtggagcctagttcctcatctgtaagatggacttgagattcctacctctcatgattactatggagattgaataattggtaaaattctcctagctcagtgactgccacaggatgggtctttcagattttggttctctttagcttctggttcttgaaagaaattaatctgtatataacataagaaactttgaaagtcaaaaaaacaaaaaattttaattcctcgtagattaattgatttgctatcttttagtttttttttctatgcatgtagatgtattaaatatgtaaatgtttttcaaagttgaggtaatattgtatagaattttatagcctacattttaatttcttgatatcttaagcatttcacttattagatattgttcaaaaatgccatttttaatatttgtataataccctatcatgtgagtataccttaactaagccattcccatattcaacattttgtgtactgtttttctaattacatatattacaatgaaaaaaaaaaaaaaa

SEQ ID NO: 223281 - DNA, 1000 bp, Homo Sapiens
gtgacccttggccttgtgagccgagatgctgaccctgcataaagggccaaaggagggctgcggcttccttccctcactgaagagcccttatttgaattcactgtgtggagccctagccctccattctcgacattccccaacctcccagccccttccaagcaggactaggtgccctgcattccacccaaggtgggattggccttccttaggctggctacttgtcaccatcaccgacatcactgttgcctgcaaggacaccacgtggccattttccttcaactgagggctcaaaactcctggacaagttgctggctcctgagaccagtatttcctggagctgtgcctcagtgaaggggcccagcctgaggaaccctggctcttttctttaaagcccaggccccacttacgtaaaacatttcagggtcactggaaacagtgaagtgccatttgttgaagcctactgcatgccagcccactgctcatccacgtggtctgccatgcctacgaggaaggccagcgcatgcaggactggtctctaatgctgtggtcattgcacagaagggaaaggtctcaaggaagagtcaactggaacaagcacaagcccaccggacatggccttggtaaaggttagcagactggtgtgtgtggatctgcagtgcttcactggaaataatttattcattgcagatactttttaggtggcattttattcatttcctgtgctttaaataaacaaatgtaccaaaaaacaagtatcaagctgtttaagtgcttcggctacttgtcccctggttcagtagaggccccggtttcccagttgttgactgtgacaggctcagcatgggctcagcagatgctgtcttaatttgtggatgatacagaaagccaggctttgggatacaagttctttcctcttcatttgatgccgtgcactgtgtgaagcagatgtttttgtccggaaataaaaataatagtcttggagtctcgccaaaaaaaaaaa

SEQ ID NO: 223282 - DNA, 1000 bp, Homo Sapiens
agtgatgcaccaggcgaggaaacgagacctctttcgttccttctagaaggtctggaggacgtagagttattgaaaatgcagatggttctgaggaggaaacggacactcgagacgcagacttcaatggaaccaaggccagtgaataagcaactttctacagttttgcaccacggcaagaaaaccaaaaaccaaaacaaacaaacaaaaaaaacccaacaacaacccagaacaaagcaaaacccagcagactgtacttagcattgtctaaatccattctcaaattccaaatatcacagacacccctcacacaaggaatataaaaaccaccaccctccagcctgggcaacgtagtaaaacctcatctatacaagaatttaaaaataagctgggcgtggtggtacacacctgtggtcccagctactagggaggctgagccaggaagaacgctccagcccaggacttcgaggctgcaatgagctataattgcatcattgcactccagcctgggcaacagagaccctgtctcaaccaccaccaccaccaccacccctactacccctgtattcaaggtaaaaattgaagtttgtatgatgtaagagatgagaaaaacccaacaggaaacacagacacatcctccagttctatcaatggattgtgcagacactgagtttttagaaaaacatatccacggtaaccggtccctggcaattctgtttacatgaaatggggagaaagtcaccgaaatgggtgccgccggcccccactcccaattcattccctaacctgcaaacctttccaacttctcacgtcaggcctttgagaattctttccccctctcctggtttccacacctcagacacgcacagttcaccaagtgccttctgtagtcacatgaattgaaaaggagacgctgctcccacggaggggagcaggaatgctgcactgtttacaccctgactgtgcttaaaaacactttcactaataaatggttataaatcac

SEQ ID NO: 223283 - DNA, 1000 bp, Homo Sapiens; identical to SEQ ID NO: 117953

SEQ ID NO: 223284 - DNA, 1000 bp, Homo Sapiens
atgccattcttgttagttgactggtattttttactgaggagcaactcattccagcatcaacaataagataacctttaagtatggcacacttgtatttttgaggtgtaaaattaacttggcatgataattcctgatcattatttaccccacaacttcaaatagtttcttcacggactaggcatgcagaaataagcagtggattttattgaaacctaaaggcattttgaatgacattgttaccaaccattaattggctcaggacctttgtaatttttatttaactatatgagttgtctttttttacgctgcttttttcaatgcatttcttaatattttttaagtttcatgaatgcatgctcagtttattaaaatccataaccatgtaattcttgtaatatgttgattcagtgttttgtaaatgaagtcgtatgtattttcagagtatttttgtatgtactgtaagataccatcttttcaaagagaaacgtttaaaacctttattgtctctccttagtctaattttttaaatatggattatgcttgaattactatatttaaaatgaaaatgtatagattacacagccaggaatgctagtatctaccaccttctttagatttcactcagcatttagtaggtccagtaggaaaaacccaaaatggtacattgagtagtgtggggaagacacctcgtgtattataggactcacgggatgccatctagcaagtggagaaatagcagtccattttctcttgcaagccctttaccattgagttgaaattcttgaattgccagagagccgtatcctccaggtcccactcctgttcattgccccttaggtctccaaaatgtaaattctaatgtttaccttgtaccatggaaaacatgaaaagagtcttagaagtaaagaacaacaaggaaaaaaatgtttgttctattattccctttttatatagcagcaaaagataagaataaaatcacataaccaagttgaaaaaaaaa

SEQ ID NO: 223285 - DNA, 1000 bp, Homo Sapiens
ggctggcaaacccagactgcccatgagaccctgatggtgatgaaggcttgctcgagagttgggccaaaaaagtggctgtagggtgagaagaccaatcaaggcctgcccctctgtgctcccacggagggctggcgggggcgctgtggttccagaacatttcatgacctcaggaaaaaaggaaccttccagttatttgagactagtggccaagtggtgaaacctccatctccctagaactgtctgaggtgggcaggggaagggagaccttccccaccacctccttagcctggtgtgagaaacagtttttagaaaatgagagaagggatccccaagaggccaaggcccagagaaacttttgttcttctctccttggcccacatagacttcacagaatcgtctgagaaaggagagctttttcacccctggctttctagaattttctttgtctgcatttgtgaatataccacacatgatggtgtctctgagccgaccagattatggaaactcaattgtcagaggacccaaaacaaaacttagagtgatttggatattgcctctctgtcaatgctgaaccttaagacattttaagtaaacatcctcctcctctctacacccccaggatttgtgcgttcaccccacccaagacttcaggaagtgtcatagcactcgtggactaggtttcatgggacaaaggcattctgcaagaagtagaagcttgtggccgggtgcagtggctcatgcctgtaatccaagcattttgagaggccaaggaggtggatcaattgaggccaggagtttgagaccagcctggccaacatggcgagaccccatctctactaaaaatacaaaaattagctgagcatgttgacacacgcccgtaatcccagctactcaggaggctgaggtgggagaatcgcttgaacccaggaggtgcaggttgcagtgagccgagattgcgccactgcactctagcctaagcaatggagcaagaccctatctc

SEQ ID NO: 223286 - DNA, 1000 bp, Homo Sapiens
cttacctttgcaaagttaaaaaaaaggggggagggaatgggagagaaagctgagatttcagtttcctactgcagtttcctacctgcagatccaggggctgctgttgcctttggatgccccactgaggtcctagagtgcctccagggtggtcttcctgtagtcataacagctagccagtgctcaccagcttaccagattgccaggactaagccatcccaaagcacaagcattgtgtgtctctgtgactgcagagaagagagaattttgcttctgttttgtgtttaaaaaaccaacacggaagcagatgatcccgagagagaggcctctagcatgggtgacccagccgacctcaggccggtttccgcactgccacaactttgttcaaagttgcccccaattggaacctgccacttggcattagagggtctttcatggggagagaaggagactgaattactctaagcaaaatgtgaaaagtaaggaaatcagcctttcatcccggtcctaagtaaccgtcagccgaaggtctcgtggaacacaggcaaacccgtgattttggtgctccttgtaactcagccctgcaaagcaaagtcccattgatttaagttgtttgcatttgtactggcaaggcaaaatatttttattaccttttctattacttattgtatgagcttttgttgtttacttggaggttttgtcttttactacaagtttggaactatttattattgcttggtatttgtgctctgtttaagaaacaggcacttttttttattatggataaaatgttgagatgacaggaggtcatttcaatatggcttagtaaaatatttattgttcctttattctctgtacaagattttgggcctctttttttccttaatgtcacaatgttgagttcagcatgtgtctgccatttcatttgtacgcttgttcaaaaccaagtttgttctggtttcaagttataaaaataaattggacatttaacttgatctccaaa

SEQ ID NO: 223287 - DNA, 1000 bp, Homo Sapiens
cctggctggcggagcatcgaggaggtcctccgcatcctcccagggccccactttgaggagcggcagccactgcccacaggactgcagaagaaacgtcaaccgggagaaaaccgagtgactctgatatttttccttgggggcgtaaccttcgctgaaattgctgccctgcgatttctctcccagttggaagatggaggtacagaatatgtcattgccaccactaaactaatgaatggaaccagttggatagaggctctgatggaaaaacctttctaggatgttcagaggagacttaacaagtgtactgcagaataaactacctctttgaagaaattgctgaaaggaagtaaaaccccatagaagaaacatgggaatacagaatatattctggggtcagcttcttaaattatactactgtttactgctttctccgtctcttttgtattccctttttttttttcctttgagacggagtcttgctctgtcacccagactagagtgcagtggcacggtctcacctcactgcaacctccacctcctaggttcaagcaattctcctgcctcagcctcctgagtagctgggactacaggcatgcaccaccacacccggctaatttttgtatttttagtagccatggtgtttcaccatgttggccaggctggtctcaaactcctgacctcaggtgatccacctgcctcggcctcccacagtgctgggattacaggcctgagccaccgtgcctggcccctaatctgctgaagaaagaagaatagaagaaaatcaacctgagtaaaagcagcactggttttgagttttctaagctcagggtcttcattagagacctctggaaatacattaaggatggtgggggtagataatccattcagccagacaaacggggccagctcttaaaataagaaagctgagactgaggaggtgaaactgaaaataaaaagagaaagttcatcctctaaaaaaaaaaaaaaaaaaaaaaaaaaa

SEQ ID NO: 223288 - DNA, 1000 bp, Homo Sapiens
gatgaagattgctgactttgggctggcccgcggcgtccaccacattgactactataagaaaaccagcaacggccgcctgcctgtgaagtggatggcgcccgaggccttgtttgaccgggtgtacacacaccagagtgacgtgtggtcttttgggatcctgctatgggagatcttcaccctcgggggctccccgtatcctggcatcccggtggaggagctgttctcgctgctgcgggagggacatcggatggaccgacccccacactgccccccagagctgtacgggctgatgcgtgagtgctggcacgcagcgccctcccagaggcctaccttcaagcagctggtggaggcgctggacaaggtcctgctggccgtctctgaggagtacctcgacctccgcctgaccttcggaccctattccccctctggtggggacgccagcagcacctgctcctccagcgattctgtcttcagccacgaccccctgccattgggatccagctccttccccttcgggtctggggtgcagacatgagcaaggctcaaggctgtgcaggcacataggctggtggccttgggccttggggctcagccacagcctgacacagtgctcgaccttgatagcatggggcccctggcccagagttgctgtgccgtgtccaagggccgtgcccttgcccttggagctgccgtgcctgtgtcctgatggcccaaatgtcagggttctgctcggcttcttggaccttggcgcttagtccccatcccgggtttggctgagcctggctggagagctgctatgctaaacctcctgcctcccaataccagcaggaggttctgggcctctgaaccccctttccccacacctccccctgctgctgctgccccagcgtcttgacgggagcattggcccctgagcccagagaagctggaagcctgccgaaaacaggagcaaatggcgttttataaattatttttttgaaataaaaaaaaaaaaaaaaaa

SEQ ID NO: 223289 - DNA, 1000 bp, Homo Sapiens
acatatatatatataacatatatggaagaggaaaaggctggtacaacggaggcctgcgaccctgggggcacaggaggcaggcatggccctgggcggggcgtgggggggcgtggagggaggccccaggggtctcacccatgcaagcagaggaccagggctttttctggcaccgcagttttgttttaaaactggacctgtatatttgtaaagctatttatgggcccctggcactcttgttcccacaccccaacacttccagcatttagctggccacatggcggagagttttaatttttaacttattgacaaccgagaaggtttatcccgccgatagagggacggccaagaatgtacgtccagcctgccccggagctggaggatcccctccaagcctaaaaggttgttaatagttggaggtgattccagtgaagatattttatttgctttgtcctttttcaggagaattagatttctataggatttttctttaggagatttattttttggacttcaaagcaagctggtattttcatacaaattcttctaattgctgtgtgtcccaggcagggagacggtttccagggaggggccggccctgtgtgcaggttccgatgttattagatgttacaagtttatatatatctatatatataatttattgagtttttacaagatgtatttgttgtagacttaacacttcttacgcaatgcttctagagttttatagcctggactgctacctttcaaagcttggagggaagccgtgaattcagttggttcgttctgtactgttactgggccctgagtctgggcagctgtcccttgcttgcctgcagggccatggctcagggtggtctcttcttggggcccagtgcatggtggccagaggtgtcacccaaaccggcaggtgcgattttgttaacccagcgacgaactttccgaaaaataaagacacctggttgctaacctgaaaaaaaaaaaaaaaaaaaaaaaaaaaaaa

SEQ ID NO: 223290 - DNA, 1000 bp, Homo Sapiens
agtccctcatcatcgtctcccccacaaaatgtacttgctgtagaatgtaggtgataaacattttctctaccttcccagcagtttgctgccatggacataaatccccaaaccctgaattacaaccacagaaagcactcaactggtttgacattgctaagtatatcctgtatacttttccaggctggattgtatctatgcccctctctcttcttttttcttgttgcaaaaaataagctgattaataagtgaaggttaagcagcctgccatatttgtcataatttttcctctttacttttgtttttcgtttgttgtgatatagaacaaagggcacttagcaaatttgaatttgtataataaagctttcaggtgttacagaaatcgtagacaagcaagtgcacatgataaacaatcaaaatattacccagctgaatagttactgctgcactttcactaagatgtatttgaacacttggtgagtagggggtttatgttgtgttttttttcattatcgttttttttatttttgtgaagcacttgctatttagaactgccaaagtatatgttcagcagtgtgcccaggattgaaggtgtaaatgggacaaaataaattgtgaaaggaagtgtagttgactgaaaactacagttgtaataagtcttccactttttataggatttttgagcacacaattatgcaaatattttaatgtttattaatgtttacagtggaattgtgaataagttttcagtggactatcttatcccttgacaaaaatattttgtcttttttctatgtaatttcagagtttttattttgttacaaaaagacaaaaatgaaatatataacaacaatgaagttatttaacaagatttctaaagctgaaatttttgtgtaaaataaggtattatcttgcaacttgttaaatatatttattcagacattggatgttgtatttttatgtattttttaaaatattaataaaatttaaaaaaaaaaaaaaa

SEQ ID NO: 223291 - DNA, 1000 bp, Homo Sapiens
cccactgaggccctggcccccctgcgtgccctgcagtacctgaggctcaacgacaacccctgggtgtgtgactgccgggcacgcccactctgggcctggctgcagaagttccgcggctcctcctccgaggtgccctgcagcctcccgcaacgcctggctggccgtgacctcaaacgcctagctgccaatgacctgcagggctgcgctgtggccaccggcccttaccatcccatctggaccggcagggccaccgatgaggagccgctggggcttcccaagtgctgccagccagatgccgctgacaaggcctcagtactggagcctggaagaccagcttcggcaggcaatgcgctgaagggacgcgtgccgcccggtgacagcccgccgggcaacggctctggcccacggcacatcaatgactcaccctttgggactctgcctggctctgctgagcccccgctcactgcagtgcggcccgagggctccgagccaccagggttccccacctcgggccctcgccggaggccaggctgttcacgcaagaaccgcacccgcagccactgccgtctgggccaggcaggcagcgggggtggcgggactggtgactcagaaggctcaggtgccctacccagcctcacctgcagcctcacccccctgggcctggcgctggtgctgtggacagtgcttgggccctgctgacccccagcggacacaagagcgtgctcagcagccaggtgtgtgtacatacggggtctctctccacgccgccaagccagccgggcggccgacccgtggggcaggccaggccaggtcctccctgatggacgcctgccgcccgccacccccatctccaccccatcatgtttacagggttcggcggcagcgtttgttccagaacgccgcctcccacccagatcgcggtatatagagatatgcattttattttacttgtgtaaaaatatcggacgacgtggaataaagagctcttttcttaaaaaaa

SEQ ID NO: 223292 - DNA, 1000 bp, Homo Sapiens; identical to SEQ ID NO: 117963

SEQ ID NO: 223293 - DNA, 1000 bp, Homo Sapiens
tcgtccagcgatgcagctttaccaaccaggagctcgaagccgaaatcgactctgtccccctgatgacagcaccaagtctggagattcagcagcagaaaggaagcaggaaagtggtattagccatagaaaagaaggaggagaggagtgataagtccagatggccttaggtgtcctgactgtctaggcagccaaagagcacacgttaagcaatccagaggtgccttcagggcaaagaatagagagaaagggagccgctgtgctggtggggtacactgcagaggagtaagtcttgtgtcaaagcaggaatctgatcagaggttcagaattggaagtacaatttcattgcttttgcaatttctacaaattaattttaaagtgtcagaaaaaggtgacggcaaggacatgcattgcaatttgcagggggaattgtcaagtgaggacttcatcacatatgacacgagagaaaagtaagagctggttctaaaatcaaaagctgttgttcatcctgaattgaattttctgaatttgggtggagcagagtcgctttgaagccttgttccgatctaattctattgtattgttgatgataagtgttgacattgggtagtgtagaagcaacaagcatgtccttgtagtacaggtacagtgaaggatagaacacactttcgttgatacaaaaatttaaatagttatgttacttctgtatccagtgtcctaaagttttaggattagttttagttttttgtttgcttatatgagcttagcgtaaagaatatttttaaacttcgtgttttgtcatcagcatcttttctattaagaggtaaaatgtagtccttgtttgactcttgacaatccagtgtgtttgatcttaggtctcatgatctgagtgcataccctctccaggaaggaaactgcaccagtgtctattcctgttaaatagcaacttttagtctcagcttgtttcgttttgatgtcaataaatagtaacagcattcaagtg

SEQ ID NO: 223294 - DNA, 1000 bp, Homo Sapiens
caaaaaaaaaaaaaaaaaagatgaatgaaaatatgaaatatataaactagtatccatttatttgcatttattgtgggatttcagatatgaacggtgtaaatttgagaagcacttatgcatacatgtgggtgaaaaaccaatctaattttgtataaataaaaacaggctcctggaaggtgaaaagtagtcatttgttctaaatctatacatattacttgtatctagtgcagaataagctataacatcccattgaggaatcttaaatttcatagacatgtaaagctgaagtaactctaaagagcagatgcttcagaaccatcagaaggttctggtcaacagtcagtattatctcttaaatgtatatgttggtcactaattgcacaaaatctataatttgccagggctttagagattgagtcaatatgtcatttaccatggttttcccactgaaggctttaacttttctgataaaataatattttaaattttcaaaaacccattcctgaggagaactacttctagcattccttttcatgatgtgcttttgtgcagtaagtagcattttcggctacttaactttacattcctcttatttttcagtttccagtcaagattataaaaagcaaatgattgatataatttgatattcatagagttgtgcctacctttaatggaaaaatacatgtcagatacttagatgtttattgatatgagactatgtggttaaaaaacccaagtatgtccatgtgtttcttataaggtacacttgaaactagtgagtgtttgtcacatttcactttcatggtatataaaatgcagtttgcatatataacttgaatatctggtactagttttttcacgcctgcaatcttggagtctaggttgccttgtctctcctatttttaaataagtgaaatttgggagattgtaaaatctgtaaagtttgttttgtgaaaataaaatgttcacagtaaaaaaaaaaaaaaaaaaaaaaaaaaaa

SEQ ID NO: 223295 - DNA, 1000 bp, Homo Sapiens
agtttgcagacataggctgtggctatggtggcctgttagctgacaaagatgttcttcctcttccccgacccacatttcaagcggacaaagcacaagtggcgaatcatcagtcccaccctgctagcagaatatgcctacgtgctaagagttggggggctggtgtataccataaccgatgtgctggagctacacgactggatgtgcactcatttcgaagagcacccactgtttgagcgtgtgcctctggaggacctgagtgaagaccccgttgtgggacatctaggcacctcaactgaggaggggaagaaagttctacgtaatggagggaagaatttcccagccatcttccgaagaatacaagatcccgtcctccaggcagtgacctcccaaaccagcctgcctggtcactgactgcttactctaccttagctggacctcgtctcccagggattagagaaaagagcaggagtcctgggtcttcccagttgagactgctggagctgagacacagtactctcttaaagaaggtggggagctgcccagggcagaacccactggtgttcatgactacccctggctcctctcaccttgtccctccactgccaacagaaaacaaagcagctgactgagatggtcaaaggactttggaccataggggatctttggaaggctgtggggtcttgctcttccttagcactcctttctccttgtgagatctctcctcagctggaatgaggaatgtagtccatctaaactgcttgctaggctcaattaccacttctgtttgctttgtggatcctgggataacatgtatatgtgtacacatgcctattctgccatttctcaggaaagggtggagtatgtatcatatgccttctaccatcctcctgtcctctccctgcgtaagacttgacctggggaatctgtgttccctaaaaaaaaaaaaaaaaaaaaaaaaaaaaaaaaaaaaaaaaaaaaaaaaaaaaaaaaaaaaaaaaaa

SEQ ID NO: 223296 - DNA, 1000 bp, Homo Sapiens
taaaacagaagagacgaaagatcaaaacagaaccaaagcagatgcatgaagattactgttttcaatgtggagatggtggagagctggtcatgtgtgacaaaaaagactgtcccaaagcataccacctcctatgccttaacctgactcagccaccatatggaaagtgggagtgtccgtggcatcagtgcgatgagtgcagcagtgcagctgtttccttctgtgaattctgtccacattcattttgtaaagatcatgaaaagggggccctggttccctctgcactggaaggccgcctctgctgctcggaacatgaccccatggctcctgtgtcaccagaatactggagcaagataaaatgtaaatgggaatcacaagatcatggagaagaagtaaaagaataaatgtgtggtgtcccctcctttctatttaagtgaaaaaagcaaatagatcatgcatttaaaaagaagagactgctacagtgcatacagcctttgccatcggaactgccttattaaagcaaaaatgggaaaccagttcatgcaggcagaagcagttggtggtgtctggtttttgtttgatttggttggtttgggattcttttgtggagggttaaattcccttggtcttttcttgccttttattgtgcttcagtgccattgcagcttgaaaaagaaatgtttttgctgttaaaataagaacaaagagaaaagtaagttttgttaatgagataaatttaaagtctaagatgtgttccttggttgtataaagcaaaagtagccatcattcctttatttattttcatttttaggaatttcaagaagtgtagttcaatagtctaatcaagtgtgtgtgtgttttaagtaggaatctgagaaagccctctaggaaagggtatgataagctttatatacctctttactgagcagtaggtaggctcacttctctttcccttcaaaatgcttttcataggcttagagaagggctctatggaagtattaaa

SEQ ID NO: 223297 - DNA, 1000 bp, Homo Sapiens; identical to SEQ ID NO: 117967

SEQ ID NO: 223298 - DNA, 1000 bp, Homo Sapiens
gcaagactccagaagcagaagccatactgccacccagaagcctggaaggggtgtgtgcttgggctgctggtatgaccccactttgggcaccccaaaagcaataggcaaactccccttacccagactggcttgggctccaggagggaggctgggaggcaggactttccagaaatcggccctctaagtcaatgtagcacattttcccccaaccccaccctgggtggccaagggtcctcccccaccccctactgctcagggccccccattatgccacctccaaagtggctgcccagccaggaccattggctcacccccactgaaggaattgaagaggcctcaggcctcagcctcatacctcacccccttatcctatccggccaggacccccatttccttgggcactagggtcccagggtgggctcagggttggggaagtcctcgctgccctctcttctcacctgctagtcactggacgtacaactcaggaactgagcgaggctcacactgccccttccaacctggggttgggggacacagacgcaagagagccggagacccccacccccgatctggaaaggaaagagacctgtatcttggtgtttttctggctttttcaccctttcgcctcctgtctttctgcttcgccccttcatcttactctgtttccatttttcccggcacttacctgcctttctctctgcacctaagtccctgccgccctctctctttggccatccttcctttcccccaccttgacccagggaggagaagggagaacatcacccccccaagtcacccccacatcttttcccttcttgtatattaaggacaaaataccacatcattttgtaactttttttctatttattgaacggtgtattacatgtccttttccttttttttttttcaaagattgaacagaaatttttctttttaattttattttgagactggggtgcatctccagagccactcacaccctcaacctcgtttcctccgc

SEQ ID NO: 223299 - DNA, 1000 bp, Homo Sapiens
tcttttcattgagaagaaaatcagtctcacctgagaactcaattatgaaccctattttaaaacacctatgcagggtttagcctaggagtgaaaagaaaaaccaactaccttttaccaaccctgaatctctaaataagcaaagtttcatggaggccaggagatcttctgtcttctgccctgtagcctgaagccttggaggaagaaacaggaatggatgctttgggcaggaaagtaagggaatatgactccggcctctagaaggctcatcttaaatttgtaagaaccatggtacagagacctgattagtttttggtattgtgctccaataatgtcatagttttaagagataatttttatgagaattgactaagaaccagtatccttcaactacttcatcaatgtttggtataatataaaagcacactatcatctgaaaaagctattaaatacccctctttttccaaatatctacctgtgtgaagccaggttttacaacatgtattgcagcaagttgaatgcagaagcaggtatggtaattcagctgccttctatcaagctaaacattaaagagatttgtagaactataaaacaatgctactctccttaccaaattgttttagaaaatagctttataggctaacattattgttaattgtcatttaattgttttgtcatttaaaatattttaaattgttttctgttagtttcttttttgtatattctatgggtattttattgatacatgatagttgtacatttttatggggtgcatgtgatattttgatatgtgcatacaatgtgtagcaatcaaatcagggtaattgggatattcatcacctcaaacatttatcatttatttgtgttggaaacattcaaaccttttcttctagctatttatccattgttggatacttatatcaattctatatcttagctgttgtgaatagagctgcaataaatgtaggagtgcagatatctctttaaaaaaaaaaaaaaaaaa

SEQ ID NO: 223300 - DNA, 1000 bp, Homo Sapiens
ttattttacccttcattatttcattttttatagttctcatagctatgtctttcagttcactaatcttttttccacagtgtttaatctgtcattaatcccatccaaagtatgttttctctcagaaattgtaatttttaacctctaataatttgacatgggtttttccctgttatatctttcatatctttatttatcatggttttacttttaacctatttatgctttcatatttaaagtgggtgtttagtgggcaacatacagttgggccttccttttttatccagttaacaatctctgtctttttactggggtatttagatcatttacgtttaatgtattgatgtttttaggtttaaattactaacttactatttgttgtttattctatgtcttctttgttctccttttcttctttttctgctttcccttagagtagctgagtgtgtttatattacatattgtctcctttgttggcttattaactgtaaatccttgtcatttgattccttgagattttatagcatacatcattgtgagggattgcatatttatgtcctctccaaatttacatgttgaagtcctaatccctaagggatggcattaggaagtgtgacctttggaaggtaattacatcttgaaagtggaaccctcatgatgagattatgtgtcttatgagacaacacagaagagagtttgttttctctttctctgctctttgccatgtgaagacagaatgagatgaccatgcataaaccaggaaatggactctcactggacactagacctgccaacaccttgattgtgttttagagtccagttctagagactcctcagcctctggaacgtgagaaatgaatgtttgttaaggcagtcagtcagtctatggtgtattttttctagtagcctgaactgactgaaagaaaatcatgaacttatcattctaacttcaaggacattatatcacttactgtataataaaataatcttacagtaaaaaaaa

SEQ ID NO: 223301 - DNA, 1000 bp, Homo Sapiens; identical to SEQ ID NO: 118511

SEQ ID NO: 223302 - DNA, 1000 bp, Homo Sapiens
gcatgtacaagctgggggatggtgttgataaggatgaggccaaggccgaggtgctaaaaaatcgagcccagcagctacacagagaacagcagaaaggtgtccaacccttaacatttgggtaatgtggtccaccctccctcccaggcaacaaactgcttgaggctggcagctcctgtttctgaagactgatgcagcccttgaaggtcaacctgctggagcaaaaaaacttgggacttgaatttgtagctccatttacatggatccattgccccagctactggagtatagcctacaatgtttatttcagtcaatattcctttatctgggtgttctgtacaatgtttattacagtcaatattccttcatctggatgttctgtgaagatagccatgtttatgggggtcttagttttcaaactctggcaactctgtgaaaaataggagcaaactagagagccctggagattggtggtagggaagggaggatagcaggaagtttgaaaaattagcagccccggggcctaaaggaatcagctgtcatcattttcatcattattattttggttaggatggcttgaaaatcagaacgtatcttggtttacgtaattgaggtcttaaagaactaagaacagttaaatagtcacaactaccaccctctgacttacataatcattggtgtgggcttcgttttgcctttagagtcacatctttcagtaaattcacagagatcaagagggacgtgcaacatacagcttaaaggctgttatgcttcagggttgctgaagaagatgaaacatcagcctgccatcgtctagaagagacattggcagttaaaaattagcacctccagtgtagtcgcctggcactgcccatcatgctgagggagcagattcttcccaaggcagcttcagctaggagtttgtaagcaaggactttgtgacacatttgtcccctggaactgagcctttttaactgtccctgtgaatgaacaattttgagtg

SEQ ID NO: 223303 - DNA, 1000 bp, Homo Sapiens; identical to SEQ ID NO: 117969

SEQ ID NO: 223304 - DNA, 1000 bp, Homo Sapiens
gattggtagagaagcggcgggtcaatctgcctagggtcctgtccatgccccccgtggctggcaccgcgtgccatgcatacgaccgggaggtccacctgcgttgtgagctctcaccgggctactacctggctgtccccagcaccttcctgaaggacgcgccaggggagttcctgctccgagtcttctctaccgggcgagtctcccttagggccctggcccccgctgcgtccgcatcactctgcatcagcactgccggcccagtgacaccgagttccaccccatcggcttccatatcttccaggtcccagagggtggaaggagccaggacgcacccccactgctgctgcaggagccgctgctgagctgcgtgccacatcgctacgcccaggaggtgagccggctctgcctcctgcctgcaggcacctacaaggttgtgccctccacctacctgccggacacagagggggccttcacagtgaccatcgcaaccaggattgacaggccatccattcacagccaggagatgctgggccagttcctccaagaggtctccgtcatggcagtgatgaaaacctaacagggtggccccctgtgccagctcaggtgactggagcccgagggcctgacaggttcccagcagctgggccggccagccttgcactgtgggggctggtcctgagtcttggcctgcctcccagccctgccagggggctgcggcctaggggtccacgggaagcctccgtcaggagagacgcagccctgggggccagctggtgctgcaaggaagggtgggaagcttgctggcttctgttgcgccactgagacggcagagaccccaggatcccagagcttcccaggatccctcccagatcctctgctgactccatatggaggcctcacacccagagggtagggcagcagatcttctttataactatttattgttcgaatcacttttaggatgtaactttataaataaacatgagcgctgatgatttgc

SEQ ID NO: 223305 - DNA, 1000 bp, Homo Sapiens
cctgctccgagtcttctctaccgggcgagtctcccttagcgccatcagggcagtggccaagaacaccacccccggggcagccctgcctgcgggggagtgggggaccgtgcagctacggggttcttggagagtcggccagacggcggggggcagcaggaactttgcctcataccccaccaacccctgcttccccttctcggtccccgagggccctggcccccgctgcgtccgcatcactctgcatcagcactgccggcccagtgacaccgagttccaccccatcggcttccatatcttccaggtcccagagggtggaaggagccaggacgcacccccactgctgctgcaggagccgctgctgagctgcgtgccacatcgctacgcccaggaggtgagccggctctgcctcctgcctgcaggcacctacaaggttgtgccctccacctacctgccggacacagagggggccttcacagtgaccatcgcaaccaggattgacaggccatccattcacagccaggagatgctgggccagttcctccaagaggtctccgtcatggcagtgatgaaaacctaacagggtggccccctgtgccagctcaggtgactggagcccgagggcctgacaggttcccagcagctgggccggccagccttgcactgtgggggctggtcctgagtcttggcctgcctcccagccctgccagggggctgcggcctaggggtccacgggaagcctccgtcaggagagacgcagccctgggggccagctggtgctgcaaggaagggtgggaagcttgctggcttctgttgcgccactgagacggcagagaccccaggatcccagagcttcccaggatccctcccagatcctctgctgactccatatggaggcctcacacccagagggtagggcagcagatcttctttataactatttattgttcgaatcacttttaggatgtaactttataaataaacatgagcgctgatgatttgc

SEQ ID NO: 223306 - DNA, 1000 bp, Homo Sapiens
cactcaagctctggcagaggaaggccaagttactttcatggtcttaccctctgcttttcccctttttgcaaaaaaccactggccaaatccgaaccattgcccttgtttcccccacgttctctctcagatctttgtctcgaagggaaaacatagtggatgaaaaggtgtggcaggctttggcaccttgttaaaatttctagtcatctgtggatgttaccttgcttgtccacagcagccagtcaccctggccagtcccacttcctggataattctctaccctcaccccacagagccatctctctccagaccaaaagctggaaggagagttgctttgagagcttgtttttacaactgcatgtttattatgatactttctctccaaaggaaacttttaaatcaatgggaacaattagcaacagaaagagcacagtccctgcttttgactgggttcctattttaagcacaaatgagagctctggagccagaatgccagggttctaacttcagcattcacttactagctgtatgatcttggccaagtcacttcacctccctgagccccaattcccaagtttgtgaaatggcaacaatacctatgtgtcactggattattggttaaaacagaatgagattccttgtgtgaaaatagctattatacctgacacactcatcgtatgggctctgcaaagggatattccccaacctgtccttcctgacaggaagcatagggcactgcagatggggaagcatgtcaccttggcagtgactcggtggcttcccaagcaggagtgtcaggggaaccatgagagagagtctaggagcaaacacatcaccaccctgagcagatacaggagtggggagggggctgtaactcagtgagtggcttccaggggccccaggccctgctggatgtgggccaagccctacagcttccctaggcagtaagtaaaaacattctcctagcattaaaatggtttccataaaaaaaaaaaaaaaaaaa

SEQ ID NO: 223307 - DNA, 1000 bp, Homo Sapiens; identical to SEQ ID NO: 117970

SEQ ID NO: 223308 - DNA, 1000 bp, Homo Sapiens
ctctgcagcggcctgcagggaggtcccagaatccaccgcaagagctggcctggggtgcggacagtctgatcttgggctctcagcagcctcttctgccagcaccttgctccccgctgccctgggctctccaaggccccctttgctgaggcagggctgaggtgagaaccccccagacctccatacagggaagcaaaagctgtttctcctcccagagatgctaagaggattgaggtagagaagaaccttgttttctctgttgtctttttctttttacttttttaattttttgagacggagttttgctcttgttgcccaggctggagtgcaatggtgcgatctcgactcactgcaacttccacctcctggagtcaagcgattctcctgcctcagccacccaagtagctggaattacaggcacctgccactatgcccggctaactttttgtatttttagtagagatggggtttcaccatgttggctaggctggtctcgaactcctgccctcaggtgatccacccacctctgcctcccaaagtgctgggattacaggcgtgagccacctcacctggccttttcttttttattctttgaccttcccacaagacaatacccattgtctgttttttttgtttatttatttacttattaagacagcatcttgctcctcacccaggctggaatgcagtggtgtgaactgggctcactgcagcctagacctgctgggctcaaggaatcctcctgccccagcctctcagatggctgtgactacaggtgggcaacactatgcctggttaatttttaaatttttttgcagagatggggttcccactatgttgatcaggctggtctcaaactcctcggttcaagcaattcgcccaccttggcctcccaaagtgctgggattacaggggagccactgcactggccttcattgtctttttgctgcacaacctaaaaaaccagtgaccctgtattggaaaaaaaaaaaaaaaaaaaaaa

SEQ ID NO: 223309 - DNA, 876 bp, Homo Sapiens
gcgcggcggctcccggcaggagggagagggcacaccgccagccccaggccaggctgcgagggccgcggacccgagctgggaaggaccttgggcggacgagccgcgcgtcccgcagccatggagcaggatgacccggtcgaggcgctgacggagctgcgcgagcggcggctgggcgcgctggagctgctgcaggcggcggccggctcgggcttggcagcctacgcggtgtgggcgctgctgctccagcccggcttccggcgcgtgccgctgcggctgcaggtgccctacgtcggcgcgagcgcgcggcaggtggagcacgtgttgtcgctgctgcgaggacgccccggaaaaacggtggatctgggctctggcgacggcaggatcgtgctggcggcccacaggtgcggcctccgcccggccgtgggctacgagctgaacccctggctggtggcgctggcgcggctgcacgcctggagggccggctgtgccggcagcgtctgctatcgccgcaaggatctctggaaggtgagcctgagggactgccgcaacgtgtctgtgttcctggcccctagcgtgctcccgctgctggaggacaagctgcggacagagctgcctgctggggcccgcgtggtgtctgggcgcttcccactccccacctggcagcctgtgaccgcggttggcgagggcctggaccgagtatgggcttatgatgttcctgagggtgggcaggctggggaggccgcctcctcgcggatacccatccaggctgcccccggacctagttctgcccccatcccggggggccttatttctcaggccagctgagtattagacacgataaagactctgtgggttctaaaaaaaaaaaaaaaaaaa

SEQ ID NO: 223310 - DNA, 1000 bp, Homo Sapiens
cctcacgccccccagctctgactccaggccctgtcccctgagctctgccctcggatgtccgaccgcccagagcctgcatgcgccgtggggcgccccaggaccaggagctggtgggtccggggccccctgggcgggggtcccggggcgcccctcctcccttgggacccgttgtcccggtcctggtctttcccccggatctagtattcagggcggaccagcggagcggaccccgacagctgctgaccctctataaccccacaggaactgcgcttcgcttccgagtcctgtgcacagcacctgccaaatacacggtgtttgacgcagagggatatgtgaagccccagtcttgcattgacattgtgattcgccatgtggcacccattcccagccactatgatgtccaggaccgcttccgcattgagctgtctgaggaaggagctgagggccgagtggtgggacgcaaggacattacctccattctgagagccccagcgtacccccttgagcttcagggacagccagatccagcgcctcgcccagggcctcctgctgggacaccaccacccacggccagacacttccaggagcacccccgccagcaactggccaccagctccttcctcctcttcttgctgacggggattgtgtctgtggccttcctgctgctcccactcccggacgaactcggcagccagctgcctcaagtcctgcacgtctccctgggacaaaagttggtggccgcctacgtcttgggcctcctcaccatggtgttcctccggacctgagctccgtgctcaacccccagcccaccccaccctccctgggcagggtcttgaggcagccactgtgatgctcataccttaccttgcctcctaccctcttctctttcctgcctactccccactcctccctgacaaaaaacacccagggatttgtactcattttccaagttgaataaaatacatttttaaaatgataaaaaaaaaaaaaaaaaaaaaaa

SEQ ID NO: 223311 - DNA, 1000 bp, Homo Sapiens
catctgtgagctctgctacctcatctgccacagggtcctgcgaggcctgcacaaggacaagcctcgagggggttgcagcccctcgtcctccgccagccgagcttccacctgccgctgccaccacaagctggtggaggctggggaggtggatccagacccaggcaataacaagctgcaggcttcagcacccaacctgacccccatctgaccacagggcaggggtggggcaacatgcgggctgccaatgggacatgcagggcggtgtggcaggtggagaggtcctacaggggctgagtgaccccactctgagttcactaagttatgcaactttcgttttggcagatattttttgacactgggaactgggctgtctagccgggtataggtaacccacaggcccagtgccagccctcaaaggacatagactttgaaacaagcgaattaactatctacgctgcctgcaaggggccacttagggcactgctagcagggcttcaaccaggaagggatcaacccaggaagggatgatcaggagaggcttccctgaggacataatgtgtaagagaggtgagaagtgctcccaagcagacacaacagcagcacagaggtctggaggccacacaaaaagtgatgctcgccctgggctagcctcagcagacctaaggcatctctactccctccagaggagccgcccagattcctgcagtggagaggaggtcttccagcagcagcaggtctggagggctgagaatgaacctgactagaggttctggagatacccagaggtcccccaggtcatcacttggctcagtggaagccctctttccccaaatcctactccctcagcctcaggcagtggtgctcccatcttcctccccacaactgtgctcaggctggtgccagcctttcagaccctgctcccagggacttgggtggatgcgctgatagaacatcctcaagacagtttccttgaaatcaataaatactgtgttttataaaa

SEQ ID NO: 223312 - DNA, 1000 bp, Homo Sapiens
cggaggatgaagtggaaaaaagagaacaacaaagacaagttccccagcagcaaatgcgagcaggaggagctggagaaacagaagctggagcgggccccagaggcggcggacgagggcgacgcgcagaagggcgacaagaagtaggcttcagctgggactgccagggccgcggccgcccgcacgtccgcgggtcccggccgcgccgccgccgcgcgcccctgcccgagagagctctggccccgctagcggggccaggagccgggcctcccaccgcagcgtcccccgccgcgccagtccccgctagtggtagtatctcgtaatagcttctgtgtgtgagctaccgtggatctccttcccttctcttgggggccggggggaaagaaaaggatttaagcaaaggctccctcgccctgtgagggcgagcggcaaaggcccggctgagccccccatgcccctcccctccccgtgtaaaaagcctccttgtgcaattgtcttttttttcctttgaacgtgcttctttgtaatgaccaaggtaccgatttctgctaagttctcccaacaacatgaaactgcctattcacgccgtaattctttctgtctcccttctctctctctctctcgctcgctcgctctcgctctcgctctctctcgctgcgtcctcatttcccctcccaatcctctctcccctctgcaaccccccagctcgctggctttctctctggcttctctcttttcctcctccacccaccccctttggtttgacaattttgtcttaagtgtttctcaaaagaggttactttagttagcatgcgcgctgtgggcaattgttacaagtgttcttaggtttactgtgaagagaatgtattctgtatccgtgaattgctttatgggggggagggagggctaattatatattttgttgttcctctatactttgttctgttgtctgcgcctgaaaagggcggaagagttacaataaagtttacaagcgagaacccga

SEQ ID NO: 223313 - DNA, 1000 bp, Homo Sapiens
ggtatcttaggtggagctactccccacctcccaccaacatatacattttgttgcaggaaatgtttaattccgcatgatgtttccctctccttccaacaaaagaaggtcaaactgtgggtcgtagagccttgacaatgttgtcctcctgttcatctgtgcaccacttgacagactgtagcttctcttgctctcgaccggccctgcattcttccgcaccctccctagctctgaaatcaactctcttcggtcgtatccaccttgcacccgcaagtcaagccgccccttgtagaaaaatccctccaccttccgttccccgctaggtcaaccccactgtagacaggaaagccaggccaggagagtccgaatgagaatttattgtgaatcgattcccaagctcccttccgggacaagtggtctgggacagggaggagcaacggccccagcgcgcaacgctctgcgcgttcctccgaatcccgtcggcttctcgacccacgcagagaagccccgggcttggcggctctagccccagcgccaaaggagacccgccccagggccgggcttggcctcctgcttcatgggcctggatgcagatctgcgtggctggtgcgtgcgcgcgcttctgggaaacagtcccgcgtgcaaaggaaaggggcaaaatggcacctaagcatcagatggaagcttactctctgcttccgttcctccccctgctcccctacttctcagtccccttcaatttgtagactcttgctcctgcttctcctgatcctgcaaggggacattccagtagaagttttttgctttgtcggtggctgtcgtgaaattgtgcttgtgtttcgtgatttctttgggggtgattgtctcgcttgttttcagttgtcgattatatgggagggttctgggtgggagtggggagggcgaggggcctagagctctaattgtttgttttggaagaaaaaaagaaaaagaacaaaaaatatatatcactctagaaaataaa

SEQ ID NO: 223314 - DNA, 1000 bp, Homo Sapiens
tcggctgcgcagaggtgaacaagcctggggtgtacacccgtgtcacctccttcctggactggatccacgagcagatggagagagacctaaaaacctgaagaggaaggggacaagtagccacctgagttcctgaggtgatgaagacagcccgatcctcccctggactcccgtgtaggaacctgcacacgagcagacacccttggagctctgagttccggcaccagtagcaggcccgaaagaggcacccttccatctgattccagcacaaccttcaagctgctttttgttttttgtttttttgaggtggagtctcgctctgttgcccaggctggagtgcagtggcgaaatccctgctcactgcagcctccgcttccctggttcaagcgattctcttgcctcagcttccccagtagctgggaccacaggtgcccgccaccacacccaactaatttttgtatttttagtagagacagggtttcaccatgttggccaggctgctctcaaacccctgacctcaaatgatgtgcctgcttcagcctcccacagtgctgggattacaggcatgggccaccacgcctagcctcacgctcctttctgatcttcactaagaacaaaagaagcagcaacttgcaagggcggcctttcccactggtccatctggttttctctccaggggtcttgcaaaattcctgacgagataagcagttatgtgacctcacgtgcaaagccaccaacagccactcagaaaagacgcaccagcccagaagtgcagaactgcagtcactgcacgttttcatctctagggaccagaaccaaacccaccctttctacttccaagacttattttcacatgtggggaggttaatctaggaatgactcgtttaaggcctattttcatgatttctttgtagcatttggtgcttgacgtattattgtcctttgattccaaataatatgtttccttccctcaaaaaaaaaaaaaaaaaaaaaaaaaaaaaaa

SEQ ID NO: 223315 - DNA, 1000 bp, Homo Sapiens
ccacagccgcaccataaatcctgagggagataaaccctcccgcctgggccccgccccagaaaatatcaagcggggaaatgactttgcctgtgatgggagggcagatgctgcgggaatggccccacatgtgtgcgtgttccctatctacaaatctacaaaatgcaacgacatgcgccaaaccgggtactgcccgcgcggccccttctgtgcctttgcacacgttgagaagagcctggggatggtgaatgaatggggctgtcacgacctccacctcacgagtccttcctccacgggcagcggccagccgggaaatgccaagcggagagactcgccggccgagggtggccctaggggcagcgagcaagacagcaagcagggggtgcgcgctcacggtgtttatgtctttgaacagaaccacctggccgtgtttgcagcggtccacccgccggcccccagcgtgagctccagcgtggcgtccagcctggcgtccagcgccggctccggcagctcctcccccactgcgctgcccgcgccccccgcccgtgccctcccgctcggccccgccagcagcactgtggaggccgtcctcgccctggagcccaccccttcctctcctacatcctctgctgtgcagggtgtggcgggggagctgggcatgggatcaggaggacagggctgctggagccacgtggtgggggccctcgctgcagtccctgcctggacacactctggggacttggagtgggaccccagcaccatcaggacccgcgtcaatgtgggcggcggcccggcggccagacccgcaatgactcttgcccgagagccgcagcttctggtcgttggtggttgccccacacggaactgctcaggcccagctgcaagcccccagcaactcctagacgatgccggccaaggaggccgaggagagagagactcttcccagcggccacttaggccacagaccacacatcggcaggacactagaccagtcccatcctga

SEQ ID NO: 223316 - DNA, 1000 bp, Homo Sapiens
gttttcaaggaccccacgggagagatgcaggggacggtgcacaggttgctgctggagacgtgccagaatgagctgaagcctggctcagtgctgctgctgaagcagattggagtgttttctccttcacttcgaaatcactacctcaacgtgacacccaacaacctggtccatatttacagcccggattctggggatgggagcttcctcaagccatctcagcccttccccaaggattcagggagcttccagcatgatgtggctgcaaagcccgaggaaggcttcagaacagcacagaacctagaggcagaggcgtcccctgaggaagaactcccagaagcagatgacctggatggactcctgagtgagcttcctgaagacttcttctgtgggaccagtagttgagactgccccaacgcaggacaacccaccatgagcaggcagctctgggcatgtgtctggtcacatccaagggggagaagaaggccagcatgattggagagtggacacagccggggggcttctgtggttgctcccaccctgggtgttttccctgagagccccctcatctctgcgctgccctcactttgggccttcctttgccgttggcaccagaatccggccggagactggctctccagccaacaagaaaggcctgtcaccctcgccttgggtgtccctctcctgcctcagcttaattttagaggatattgggcctggttttcttgtcccttcataccctagtccctggacagctgaggagatgaaaggagccacaccacaacaatggcggcctgcccctccacacaggggagaagcacgctcaggcttcctctgctttgtctcttcagacctgtggttgctctgctcatccatgcccaaggttcccaggtgcaggacagaggtgtggcctattgtaccttgttctgaaataaagcatctcctgcttaaaaaaaaaaaaaaaaaaaaaaaaaaaaaaaaaaaataaaaaaaaaaaaaaaaa

SEQ ID NO: 223317 - DNA, 1000 bp, Homo Sapiens; identical to SEQ ID NO: 117979

SEQ ID NO: 223318 - DNA, 1000 bp, Homo Sapiens
gccgtgccatggggttcccggccgcggcgctgctctgcgcgctgtgctgcggcctcctggccccggctgcccgcgccggctactccgaggagcgctgcagctggaggggcagcggcctcacccaggagcccggcagcgtggggcagctggccctggcctgtgcggagggcgcggttgagtggctgtacccggctggggcgctgcgcctgaccctgggcggccccgatcccagagcgcggcccggcatcgcctgtctgcggccggtgcggcccttcgcgggcgcccaggtcttcgcggagcgcgcagggggcgccctggagctgctgctggccgagggcccgggcccggcagggggccgctgcgtgcgctggggtccccgcgagcgccgggccctcttcctgcaggccacgccgcaccaggacatcagccgccgcgtggccgccttccgctttgagctgcgcgaggacgggcgccccgagctgcccccgcaggcccacggtctcggcgtagacggtgcctgcaggccctgcagcgacgctgagctgctcctggccgcatgcaccagcgacttcgtaattcacgggatcatccatggggtcacccatgacgtggagctgcaggagtctgtcatcactgtggtggccgcccgtgtcctccgccagacaccgccgctgttccaggcggggcgatccggggaccaggggctgacctccattcgtaccccactgcgctgtggcgtccacccgggcccaggcaccttcctcttcatgggctggagccgctttggggaggcccggctgggctgtgccccacgattccaggagttccgccgtgcctacgaggctgcccgtgctgcccacctccacccctgcgaggtggcgctgcactgaggggctgggtgctggggaggggctggtaggagggagggtgggcccactgctttggaggtgatgggactatcaataagaactctgttcacgcaaaaaaaaaaaaaaaaaaa

SEQ ID NO: 223319 - DNA, 1000 bp, Homo Sapiens
tagtggctaatgggacaatgtgctgtccagcaaagcacacatggagaagcggccccaaaattcccaccttgatttccatcctgccccttcttctactccacggaggcgctgtctcactagggtcccctccccaaggctcagctctaagacctgcacctgcttctcttggcccctgcgtgacagacaagtccattccctccttagctcagaacaccaaatatcaccagactgcctaagagacttgatgacacctcccggaatgctctcggggtggggttcacctctccttgtcctgcacccactgctaggccacattctcgtttctgctcacatcccattgcccggctacaaggcctgcccacggcccttaaacttgctgggcaggtttggagcccatgggaccccgtgggtctctgtccaggagcagcagaggaggctgacaggccctgctccctctgctctgggggtgtctgggagccccagctcacaccctcccaatgcttatatgctgaagctcacagaatgggcttcttgcctgacagcaagtcaaagaatgagtttaatatcaaagtgtaagcttactttccatccccaagccagcctgccccctgccccatttcccatgagcacacttctggggaaggaaaacaggctcctggccttcactctcagcagagctttggagatgccccaggcatgccctgagctccttctgtgtacctgctcccacttctgagccacccgctgcccctccgcactgctggcaaacccagttcctgcctcagccaggtctccttccctggtttccagtcacacagagcccagcagctttctctttcagtcccataagggcagccttgtgtccctggccacacttccacccgccagggtcttcctccccatctttccatccttcctgctgagcttccacagagctcgtttgcaaacagggggattaaagcatcactgcgcattcgaaaaaaaaaaaaaaaaaaaaaaa

SEQ ID NO: 223320 - DNA, 1000 bp, Homo Sapiens
atggcaggatttcttccttccttccttttttacccaggtgatgaagtgcacccattgtactgggaagaatgaagaggtgatacctttactagatccttcagacacatctatgagaagatttgttcatttaaaagtctgcccactgaggatagggaaaggattaaggatttttccacctcctcttagtaactcctgaattaccaacatcaacttctttctctccgttcctgaaggaactttggggaatcatcttcatccgtagttacgctttcctgaaccttctcagtggtttacatgcctctgaaactatgtgcaatatttttggttgacacttgtatccatccttaagaaattagtgcagattgcagatgttctgtcttccatcccaaacaagcctgccatgaggtaggatcctaggggtttggctgttcttactccactgctcagaaagcttccattctgctgtcctcagcctcgaccctcttctgtgctggacttccacccacccacccttttcaagtttagatagtgtttcagctgctgtcccaaagtaacaaaacaatacctactgttaagtaggaagtcaatctgtgtgctggttttgttggttatgtggaaatcacaaactccagaggagcaaaggggtttttcaatgtcttttgctttcagaaacagagaatataatattctcactaaggccttgaattgatttttttctcataaaatagtctgataagctaatttttaaaaagaaatgccattaactgtgttgtatcgtggtttaaaattactaacaagttgtgggaaagaaaaataatatttgattttgaatcttaaatgtttttaaaaattagacttgaatgggcacaaagtataaatattttgtttctttatggaggacatgtggaaggagtttgagggtttgggatgggagaagtattttgcagagctatcaatgtccaaataatttaaaaaaaaaaataaaggtatttaagcagtg

SEQ ID NO: 223321 - DNA, 1000 bp, Homo Sapiens
ccctgaacttttgcaggtgaccagagttgaccgagaaaatatactagcaagtgttgcgtttccaacagaaattaaggtcgatgtgtgcaaaagagtaaatctggacattactactttaatcacatatgtatctgccctcagctatggaggctgccactttattttcaaagagaaagtgctcacagaacaagcagagcaagagaggaaagagcaggttctacctcagctggaggcctttatgaaggacaaggagttgtttgcttgtgaatctgctgtcaaggactttcagtctattttagataccttaggaggacctggggagagagagagggccactgtgttaattaagcgaattaatgtggtaccagaccagccttctgagcgtgccttgagactagtggccagttcaaaaattaatagccgctcattaacaatttttgggacgggagacaccctaaaagccatcacaatgactgctaatagtggttttgtcagagctgcaaacaaccagggtgttaaatttagtgtgtttatccatcagcccagagcacttactgagagtaaagaggctctagccacccccttaccaaaagactacacaactgacagtgaacactaaagataccctttaaatatttttgtggaagtaagttatttataccaaaggctgggtcttcccatctaaactggtgggaaaaaaggtctatagtaaaagtaaaactgagaactcttaaaccagtagagtttctttgtctctcatctaaagtatataacctcccaaagtagaaaaagcacaagagagaagcttatctatcaaactgtctgcattagtgcaattaagaaccgaaatacgtctatataaagctttcagctgtattgtaatactttgattcgatagggctacaactcccctactgctaaccacatttcatggaatatggctacattgcatcttgcattaaatatctggagaaaattcaaaaaaaaaaaaaaaaaaaaa

SEQ ID NO: 223322 - DNA, 1000 bp, Homo Sapiens
gtgttactatgtttcactaaatttttgaaggctgtgggacttttcgaatcatatgatctcctaaaagctgttcacattgttcagttcatttttatattaaaacttgggactgcattttttatggttttgtttcaaaagccattttcttctgggaaaactattaccaaacaccagataattggatcactaaaaattcctggtagaaaagaatttaaagacaaaaagttaaatgatcctaggaaactagtgggaaactgagaaatcataaaattgtactctgaagaaaaagatttcaaaatctaccagcagacaagaatatagataatggaaaacagaatactgtcctttttttttttctttctttttttgagaaagagtcttgctccatcgcccaggctgcagtgcagtgacacgatcttgtctcactgcaacctctgcctcccgggttcaagcgattctcctgcctcagcctcctgagtagctggaattacaggcacccaccaccacacccagctcatttttgtatttttagtagagacggggcttcattcaccacattggccagcctggtcttgaactcctgacctcaggtgatctgcctgcctcggcctcacaaagtgctaggattacaggcatgagccacagcacccggcccagaataagaatactgtcttggaaatctagacttagtcaagggatcttatgttttctatttacaaaatatgtaatgatttcacctttaaaatatttgttattattatctttctgtattttatttaaaatttggatatatagcaaaatatatgtgactgaaatttttaatttttttgtttccatttatagtggatcaaaatatttaaacatgcagttgctgggtgtattatttcactcttgtggttttttggcctcactctttgtggaccactaaggtaaataaaaatgcatattttgaaaaaaaaaaaaaaaaaaaaaaaaaaaaaaaaaaaaaaaaaaaaaaaaa

SEQ ID NO: 223323 - DNA, 1000 bp, Homo Sapiens
gcctgacacaaccaaagggagttctcctctatgggccccctggatgtgctaaaaccactctggtgagggccctggccacaagctgtcactgctctttcgtttcagtgagtggagctgatctgttttcaccgtttgttggagattcagaaaaagtgttgtctcagatatttcgacaagcaagagcaagcactccagcaattttgtttttggatgaaattgattcaatcttgggagctcgctcagccagcaagacaggatgtgatgttcaagaacgagttctttctgttctcctgaatgaattagatggtgttggacttaagacaatagagagaagaggaagtaaatcaagtcaacaggagtttcaagaagtttttaaccgaagtgtcatgattattgcagcaacaaatagacctgatgtgttagatactgctttgttacgacctggaagattagataagatcatctatatcccacctccagatcacaagggcaggctttctattttaaaagtctgtacaaaaaccatgccaatagggcctgatgtctccttagaaaacctcgcagcagaaacctgttttttttctggagctgatcttagaaacctctgcacagaagctgctttgctggctctgcaagaaaatggactagacgcaactacagtgaaacaagagcactttctaaaatcacttaagactgtaaaaccgtcgttaagttgcaaggacttggctttatatgaaaacttatttaagaaagaaggattttctaacgtggaaggtatttaaaaatcaccttaaactcttgttcagttcacattaattgaaatgtgaacttgcctgtcgtttgcaacttcacacttttagaatttgtgtttatatttcctgtaagtgaataaataaaacaaaacaaaacaaaaaaaacttgtgcctgataagctaaggctcatttatttttaaaaggcatattaaataaaatactgtaatttaggaaaaaaaaaaaaaaa

SEQ ID NO: 223324 - DNA, 1000 bp, Homo Sapiens
tgaccgagaagaatctgtatgggcgcctggggctgatcctcttcgaccacatggtcccgctggtagaggagatcaacaggttggcggatgaactgaaccccctcaacgcctcccaggagattgagctctcgctggaccggctggcgcaggctctgcaggtggccatggcctcaggagctctgctgtgcacgagagatgacctgagaaccttgtgctccaggctgccccataataacctcctccagctggtgatctcgggtcccgtgcagcagtcgcctcacgccgcgctccccccggggttctacccccacatccacacgcccccgctgggctacggggctgtcccggcccaccccgccgcccaccccgccctgcccacgcaccccggccacaccttcatctccggcgtgacctttcccttcaggcccatccgctaggctggcccgtgtgtgccttctgcgctctcgctggacgaagcctttcgagatggaaggggtggccggactcccagaagagaacctcggggaaggggtcgggcagcccctccccgccggcagaaccgtcttggtgtcacggagtccaggtgcttcccacccggtcgcattctttgacatgcagattggatggtggagggaagagtccagcctctgccgagagcctgctgcgtgcatttttaaaagatgccgatcctgggagcctctgttctctgcgcatttcagacacagcctgtgtggcgaggagtgtgacggcaggagccacgggtgcaagcccgtgtgtctggcctctttcctcgtgaagacgatgtgtccccgccagaaaaagtgggcaccttctgcagccccgtgagctgagcccaggctgcgtagtgaccacaagcttatgtgcagcactgctcagggaggctgtcaggaattcccctcacctcggaaaggaacttctcagttttattgggggtgtctaaatttcctttcatatgttcaaataaatttttctaaacagt

SEQ ID NO: 223325 - DNA, 1000 bp, Homo Sapiens
ccccaacggtgctggggggaccacgctggctgtgttgcacccagaacgtggcatccggcaatgggcccctgctcgccaggcccgctgggaaacccagagcagcatctctctcatcctggaaggctctggggccagcagcccctgcgccaacaccaccttctgctgcaagtttgcgtccttccctgagggctcctgggaggcctgtgggagcctcccgcccagctcagacccagggctctctgccccgccgactcctgcccccattctgcgggcagacctggccgggatcttgggggtctcaggagtcctcctctttggctgtgtctacctccttcatctgctgcgccgacataagcaccgccctgcccctaggctccagccgtcccgcaccagcccccaggcaccgagagcacgagcatgggcaccaagccaggcctcccaggctgctcttcacgtcccttatgccactatcaacaccagctgccgcccagctactttggacacagctcacccccatggggggccgtcctggtgggcgtcactccccacccacgctgcacaccggccccagggccctgccgcctgggcctccacacccatccctgcacgtggcagctttgtctctgttgagaatggactctacgctcaggcaggggagaggcctcctcacactggtcccggcctcactcttttccctgaccctcgggggcccagggccatggaaggacccttaggagttcgatgagagagaccatgaggccactgggctttccccctcccaggcctcctgggtgtcacccccttactttaattcttgggcctccaataagtgtcccataggtgtctggccaggcccacctgctgcggatgtggtctctgtgtgtgcgtgtgtgggcacaggtgtgagtgtgtgagtgacagttaccccatttcagtcatttcctgctgcaactaagtcagcaacacagtttctctgatgtcgaaaaaaaaaaaaaaaaaa

SEQ ID NO: 223326 - DNA, 1000 bp, Homo Sapiens
gtctgccgtgagcctgccccgccgggagcccaccgtctccagcttctatgtgaagcgggcggagctgtgggacacctggaaggttgctcacctgaaggagcacaggagggttttccaggccatgtggctcagcttcctcaagcacaagctgcccctcagcctctacaagaaggtgctgctgattgtgcatgacgccatcctgccgcagctggcgcagcccacgctcatgatcgacttcctcacccgcgcctgcgacctcgggggggccctcagcctcttggccttgaacgggctgttcatcttgattcacaaacacaacctggagtaccctgacttctaccggaagctctacggcctcttggacccctctgtctttcacgtcaagtaccgcgcccgcttcttccacctggctgacctcttcctgtcctcctcccacctccccgcctacctggtggccgccttcgccaagcggctggcccgcctggccctgacggctccccctgaggccctgctcatggtcctgcctttcatctgtaacctgctgcgccggcaccctgcctgccgggtcctcgtgcaccgtccacacggccctgagttggacgccgacccctacgaccctggagaggaggacccagcccagagccgggccttggagagctccctgtgggagcttcaggccctccagcgccactaccaccctgaggtgtccaaagccgccagcgtcatcaaccaggccctgtccatgcctgaggtcagcatcgcgccactgctggagctcacggcctacgagatctttgagcgggacctgaagaagaaggggcccgagccggtgccactggagtttatcccagcccagggcctgctgggacggccgggtgaactctgtgcccagcacttcacgctcagctgaccctggcccacctgtgaataaatctcagctgaccccagccaaaaaaaaaaaaaaaaaaaaaaaaaaaaaaaaaaaaaaaaaaaaaaaaaa

SEQ ID NO: 223327 - DNA, 1000 bp, Homo Sapiens
tttaaccctagtttaagaagaagtcaatatgcttatttaaatattatggatggtgggcagatcacttgaggtcaggagttcgagaccagcctggccaacatggcaaaaccacatctctactaaaaataaaaaaattagctgggtgtggtggtgcactcctgtaatcccagctactcagaaggctgaggtacaagaattgctggaacctgggaggcggaggttgcagtgaaccaagattgcaccactgcactccagccggggtgacagagtgagactccgactgaaaataaataaataaataaataaataaataaataaataaatattatggatggtgaagggaatggtatagaattggagagattatcttactgaacacctgtagtcccagctttctctggaagtggtggtatttgagcaggatgtgcacaaggcaattgaaatgcccataattagtttctcagctttgaatacactataaactcagtggctgaaggaggaaattttagaaggaagctactaaaagatctaatttgaaaaactacaaaagcattaactaaaaaagtttattttccttttgtctgggcagtagtgaaaataactactcacaacattcactatgtttgcaaggaattaacacaaataaaagatgcctttttacttaaacgccaagacagaaaacttgcccaatactgagaagcaacttgcattagagagggaactgttaaatgttttcaacccagttcatctggtggatgtttttgcaggttactctgagaattttgcttatgaaaaatcattatttttagtgtagttcacaataatgtattgaacatacttctaatcaaaggtgctatgtccttgtgtatggtactaaatgtgtcctgtgtacttttgcacaactgagaatcctgcggcttggtttaatgagtgtgttcatgaaataaataatggaggaattgtcaaaaaaaaaaaaaaaaaaaaaaaaaaaaaaaaaaaa

SEQ ID NO: 223328 - DNA, 1000 bp, Homo Sapiens
acatccatccgatcttttcctggtgtggctccacagattccaaggatatcgtgatgcctacgtacgatttgactgattctgttctggaaaccatgggccgggtaagtctggatatgatgtccgtgcaagctaacacgggtcctccctgggaaagcaaaaattccactgccgtctggagagggcgagacagccgcaaagagagactcgagctggttaaactcagtagaaaacacccagaactcatagacgctgctttcaccaactttttcttctttaaacacgatgaaaacctgtatggtcccattgtgaaacatatttcattttttgatttcttcaagcataagtatcaaataaatatcgatggcactgtagcagcttatcgcctgccatatttgctagttggtgacagtgttgtgctgaagcaggattccatctactatgaacatttttacaatgagctgcagccctggaaacactacattccagttaagagcaacctgagcgatctgctagaaaaacttaaatgggcgaaagatcacgatgaagaggccaaaaagatagcaaaagcaggacaagaatttgcaagaaataatctcatgggcgatgacatattctgttattatttcaaacttttccaggaatatgccaatttacaagtgagtgagccccaaatccgagagggcatgaaaagggtagaaccacagactgaggacgacctcttcccttgtacttgccataggaaaaagaccaaagatgaactctgatatgcaaaataacttctattagaataatggtgctctgaagactcttcttaactaaaaagaagaatttttttaagtattaattccatggacaatataaaatctgtgtgattgtttgcagtatgaagacacatttctacttatgcagtattctcatgactgtactttaaagtacatttttagaattttataataaaaccacctttattttaaaggaaaaaaaaaaaaaaaaaaaaaaa

SEQ ID NO: 223329 - DNA, 1000 bp, Homo Sapiens
gaaaagaggtgagccgaagatcaattcgacagacagacggtgtgtatgcccctccctgtttgacttcacacacactcataactttccaaatgaaaccccacagtatagcgcatattttcgatatttttgtgaattccaaaaggaaatcacagggctgttcgaaatattgggggaacactgtgtttctgcatcatctgcatttgctccccaagcaatgtagaggtgtttaaagggccctctgctggctgagtggcaatactacaacaaacttcaaggcaagtttggctgaaaacagttgacaacaaagggcccccatacacttatccctcaaattttaagtgatatgaaatacttgtcatgtctttggccaaatcagaagatattcatcctgcttcaagtcagcttcagaaatgttttaaaagggactttagctctggaactcaaaatcaatttattaagagccatattctttaaaaaaaaaagctggataatattatctgtaatatttcagtcctttacaagccaaatacatgtgtcaatgtttctagtatttcaaagaagcaattatgtaaagttgttcaatgtgacataatagtattataattggttaagtagcttaatgattaggcaaactagatgaaaagattaggggcttccacactgcatagatcacacgcacatagccacgcatacacacacagacacacagatgtggggtacactgaatttcaaagcccaaatgaatagaaacacattttctggctagcagaaaaaaacaaaacaaaactgttgtttctctttcttgctttgagagtgtacagtaaaagggattttttcgaattatttttatattattttagctttaattgtgctgtcgttcatgaaacagagctgctctgcttttctgtcagagatggcaagggctttttcagcatctcgtttatgtgtggaatttaaaaagaataaagttttattccattctgaaaaaaaaaaaaaaaaa

SEQ ID NO: 223330 - DNA, 1000 bp, Homo Sapiens
atattctcgttcttcgatgcaaaatggtgttaaagtttataattcgagaagacccatttcttaaaagaacaacagtcttttcttcaggactcaagttgctttataaagttgctggatacaagaaaaataacttgtacttttatttctgacttttagaaacctagtcttctaaggcatttttctcctcatcttaagcattttgaaactactgttatttcttaaatgttataggatgtagctttaaaattatatttgtactatgtacacagtgtaaacaaggacaaaagaattctttcctatattatgtctgaggtctctatgatttatttaaagtttggctttttatatttaaaatgtcatttctttacttaggatttgatgttctaatcattaatacacttaagttttccagagaactaaatagtaatagtttcatagaagagaactatttattcacttaaatatcatttctcaagtgagtgagttcccctctacttttagccttccacccaaactggaagcctctaggtgctatcaattatttatatccatcgtttacatccatgaaattggctgaataattactcctctgcctggcgtagacatgtgctttgggaaaaaaacgagtttataatcctataatgaagaatactggcacaggcaatgctcactcgaaaacttcaagtaatttctagttggttttggaatgcttgataaagttcctttacagctttattttcctgatttgttttggtttagatcaaagttcaaattaattttaacttagctaatgaactcatcaccaggacagttggagggggtaggccgaggttaaatggtccacgtttcaaaaatgttaatggctaatccataattaaagaaggtttaactgttactgaagtttacaagttttattgtcatgaacatgaaatacaaacacgatggcttcgaaatgtctttcaataaatgtttctgcatttaaaaaaaaaaaaaaaaaaaa

SEQ ID NO: 223331 - DNA, 1000 bp, Homo Sapiens; identical to SEQ ID NO: 117995

SEQ ID NO: 223332 - DNA, 1000 bp, Homo Sapiens
acagcaagtggatcctggcaactgcagctgctggattccagattctgggtccccaatccctctgcccagtccctcaatgttgaaacctcatctcttgaaggcagatcctgatattccaaggcactgaatcccaagccctgaatccccggtttctgatctgaatcttccaggcgccgggtcccaaatgttcaggccccaagtctagatcctggcagcccagtcacagagtatcccacacacactggtgcccagagccggcttctcatgacatgaaattgcatggtcgagggagtctgtggggaaggaagcccaggtcctggctgcaacctgcacggatgctggattccccctcaccccacctctgcatggccaccccctcccagccctgtggggaaactgttccctggaaccactccactccctgcatccccacacttcacagcatcttccatccccctcccaccttctaggcgaatagtccccagagctgtgttcctccaaggggtccgaggaatcactcactcctggaggctggcaaggagacagtctgaggccagggacacatgaagggatgtccccaccccagcactatcagggcctccccaggcttccagagttgaaagccaggagaaaatcggcaaagaccacccttccctaaacccaagcacccaatgatgcaaaaaacaaaaacaaaaaaaaaccaccaaatccccaaattcattccagatctatttttctaccagagagaggagcaaagtcctcctcccctgcgcccttacattctgcacttcatagttggattctgagcttaggatcatctggagaccccatggagggacttggaaaggggaactgggatttggggaggggctggaggacttccgcacgcttccacctccttcgacctccactgcgccccacctccctgcctgtgtgtgttatttcaaaggaaaagaacaaaaggaataaattttctaagctctttaaaaaaaaaaaaaaa

SEQ ID NO: 223333 - DNA, 1000 bp, Homo Sapiens
ggtggcgtcgcaatgcagaggctgcaccagctggtgcccccccagacagacgtccttctgcacattgacgtggcagccgcccagacaggtgtgtctcggtttctccaagtcaacagcgcctggaggtacgacaagagggaggatgtgcagccggggacaggcatgctggcatacacacacatcctcatggaggcggcccctgggctcctggccctctacagggacacacaccgggtcctggccagcgtcgtggggaccacaggtgtgagtctgaacctgacccaactgccccccttcaacgtccacctgcagacaaagctggtgcttctggagaggctcccccggccgtcctgagggggaccaggcagccctcagcagccacaggccttccaggagctgttatcactaccagtttctggcacaattccagcacaattatgacaattcagagaagcaagtcaaaggactgggcacctgcctctgacagacaccagaccaggtccagggcctcctccacagcctcagctggggctctcagcaccaaagaacgaggggcccaggtcttgttggcaccccgggagccactgcccagggtgatggtggccagctcagggcttcctgcgggtgactgtcgcccagaccaggtgccattcatgactaatcaggagcagcgggctcacccaggcacctgtctgccaggaggccacgtgtgtcctgcccacccagggggagctgtattttggcagcaccccacgcttgctgcccgagggcctcttggggcacctaagacagcaccccctctcaggggagaccatggtggccccggccgcacccccccaccctggtgccaccactgcaacttttgtattcacaggcatcccatctccatcacagataaaatcttaggagataaacacattcaaaaaggaatgagataaaaagaataaggcaataaatgttgattggaacctctcaagattacagaaaaaaaaaaaaaaaa

SEQ ID NO: 223334 - DNA, 1000 bp, Homo Sapiens
atgcatgtacgatctcacagtggagacaagccctatgaatgtaaggaatgtgggaaatccttccttacatcctcacgccttattcaacatataagaactcacactggagagaagccttttgtatgtgttgaatgtgggaaagcctttgcagtttcctcaaatcttagtggacatttgagaactcacactgaagagaaggcctgtgagtgtaagatatgtgggaaagtatttgggtatccctcatgtcttaataatcacatgcgaacgcacagtgcccagaaaccatacacctgtaaggaatgtgggaaggcttttaactattccacccaccttaaaattcacatgcgaatccacactggagaaaaaccctatgagtgtaaacaatgtggaaaggccttcagtcattccagttcatttcaaatacatgaaaggactcacactggagagaaaccctatgaatgcaaggagtgtgggaaagccttcacgtgttccagttcctttagaattcatgaaaaaactcacacagaagagaaaccctataaatgtcagcaatgcgggaaagcttacagtcatccccgttcacttcgaagacatgaacaaattcactagtgagaaactgtccatgtaataaatgtgggaaagctctcatttgttccagttcactttaaagacatgaatgaactcactctggagagaagaagctgcatgaaaattacttaattcctgtaatcccagcattttgagaggctgaggtgggtggatcacttgaggtcaggagtttgagaccaccctggccaacatggtgaaaccttgtctctactgaaaatacaaaaaatttagccaggtgtggtgggcacctgtaatcccagctacttgggaggctgaggcaagtgaatcacttgaacccaggaagcagaggttgcagtgagcagagatcatgccactgcactccagcctgggcgatggagtgagactccatctcaaaaaaaaaaaaaaaaaa

SEQ ID NO: 223335 - DNA, 1000 bp, Homo Sapiens
agtggccatggtaatgagggtttctccctccaggccgggactgacaccactggccaggaagtggctgaagctcagctggatgaggatggggatttggacgtggtgagaagaccacgagccgcctctgattccaacccagcagggcctctgagagacaaggtacatcccatgattctagcacaggaagaagacgacgtcctgggagaggaagcacaaggcagcccgcacgatatcatcagaataggtgtggcggggcgccctgctcctggcagactacatcctgttccgacaggacctcttccgaggatgtacagcgctggagctcggggccggcacggggctcgctagcatcatcgcagccaccatggcacggaccgtttattgtacagatgtcggtgcagatctcttgtccatgtgccagcgaaacattgccctcaacagccacctggctgccactggaggtggtatagttagggtcaaagaactggactggctgaaggacgacctctgcacagatcccaaggtccccttcagttggtcacaagaggaaatttctgacctgtacgatcacaccaccatcctgtttgcagccgaagtgttttacgacgacgacttgactgatgctgtgtttaaaacgctctcccgactcgcccacagattgaaaaatgcctgcacagccatactgtcggtggagaagaggctcaacttcacactgagacacttggacgtcacatgtgaagcctacgatcacttccgctcctgcctgcacgcgctggagcagctcacagatggcaagctgcgcttcgtggtggagcccgtggaggcctccttcccacagctcctggtttacgagcgcctccagcagctggagctctggaagatcatcgcagaaccagtaacatgacccatcgcctccaccaggcgcggcgtctcgactgttcttagagtgtatttctagtaaaatcagaagctcaccaaagcaaaaaaaaaaaaaaaaaaa

SEQ ID NO: 223336 - DNA, 1000 bp, Homo Sapiens
acagtgtctgcaccctgcacaggatggacatcttccccatcgtcatccacgtctctgtcaacgagaagatggcaaagaagctcaagaagggcctacagcggttgggcacctcagaggagcagctcctggaggctgcgaggcaggaggagggagacctggaccgggcgccctgtctatacagcagcctggctcctgacggctggagcgacctggacggcctgctcagctgtgtccgccaggccatcgccgacgagcagaagaaggtggtgtggacggagcagagcccccgatgatgcaccgtgccccttcccgggactgtgggggcttctgtgtgcctgttaatgcagtcctgttcctcagcccaggccctcttggcacagctgtgggctccttggcacatgaggccggctctccccactggctggggtctaaccttgaaccctcaccacgtgcaggtcacacacagtgaagccacttgtaactgcacacttttctgtggaaacatcttcaccctttaccaggcttggcatggtctgaactggaaaccctgagaatgtttctgcagtaggacaggagggacatcttcccatgccttccctagaaccggaggccccggacttctctggaaaaccgcctgtctgcaggcccgattcaaatctatgggggctgcacttcccttttacattttgatgtgtcaaaggcttttggagtgaccaaaagcacagaggcagcgggtggggcgcctgggtggtccccaaggtcgctgccacccttgcccggggcagaggcataagcccacatatgctgtgacgctggccaccttttctcagcttctgaggctgcgatgcctcaggaactccagtttacagagaccagtgtgtttacttgtaaataaagcctctgggtggtggagacggtactttcagtgggtctgtgccccgtggcccctgtgcctgttcggtgggggtgtcccagagaagcctggcaccagtacccccgt

SEQ ID NO: 223337 - DNA, 1000 bp, Homo Sapiens
aaatcaaggccctaccgggcctccgtagtcacctctctatagtgggcgtggccgaggccggggtgaccctgccggagcctccgctgccagcgacatgttcaaggtaattcagaggtccgtggggccagccagcctgagcttgctcaccttcaaagtctatgcagcaccaaaaaaggactcacctcccaaaaattccgtgaaggttgatgagctttcactctactcagttcctgagggtcaatcgaagtatgtggaggaggcaaggagccagcttgaagaaagcatctcacagctccgacactattgcgagccatacacaacctggtgtcaggaaacgtactcccaaactaagcccaagatgcaaagtttggttcaatgggggttagacagctatgactatctccaaaatgcacctcctggattttttccgagacttggtgttattggttttgctggccttattggactccttttggctagaggttcaaaaataaagaagctagtgtatccgcctggtttcatgggattagctgcctccctctattatccacaacaagccatcgtgtttgcccaggtcagtggggagagattatatgactggggtttacgaggatatatagtcatagaagatttgtggaaggagaactttcaaaagccaggaaatgtgaagaattcacctggaactaagtagaaaactccatgctctgccatcttaatcagttataggtaaacattggaaactccatagaataaatcagtatttctacagaaaaatggcatagaagtcagtattgaatgtattaaattggctttcttcttcaggaaaaactagaccagacctctgttatcttctgtgaaatcatcctacaagcaaactaacctggaatcccttcacctagagataatgtacaagccttagaactcctcattctcatgttgctatttatgtacctaattaaaacccaagttaaaaaaaaaaaaaaaaaaaaaaaaaaaaaaa

SEQ ID NO: 223338 - DNA, 1000 bp, Homo Sapiens
gagcagctggagcacgttcgggagatgcaggagaagctagcccggctgcacttcagcctggatgtgtgtggggaggaggaggacgatgaagaggaagaggatggggtcactgaggggctgccagaggagcagaagaagacaatggctgaccgtaacctggaccagctgcttagcaatctggaagacctcagtaattctatgtatcctttccaaggaacccgtctatgtgtgtgtgttcctgagaggtcagtttcctcctctccagccctccaggagtattcacacacaaccaacttccccacctcttgcagtcctgtcagatttagccacagactgcccaaacccaggtacaggaatttagaatttccccaaaattagaagaaaagtggttgtaggggatgttttactactgatcaaaatctttgtgagtactttagctgacatcaatcatagcaaagcttgtccgatgtcctcctatcctttcagcattgaacaattatttttactaatttacactaccacctcacctggtcctcagtcagaaacagcgcgagtgcgcgcgcacacaccccagtgtgtctgacctgcacgatctggatgaagagagagggggtgagagagggcaggcggggactgcaacctcagtccacagacggcccgagaccctcgtccccggccctttgcacaggtgagggaactaaacctgtgcaagatgggagaccggggtgggaggaaggactggtccaaagcgccacgatccttgacgggcacagccagaagctgcacctggccgagaacgccgagcctgaggagcagtccgctgcgtaggcgtcccacgcaggcccacactgcccctctcattctcttcaaactgtgactttttacagactcgggcgggtgttctgcggccccccaggtgctatgggggaggggggcgttgaatggaattaaaccagaaagaaagcaaaaaaaaaaaaaaaaaaaaaaaaaaaaaaaaaaa

SEQ ID NO: 223339 - DNA, 1000 bp, Homo Sapiens; identical to SEQ ID NO: 118003

SEQ ID NO: 223340 - DNA, 1000 bp, Homo Sapiens
ctgtgccgggcagggggcctgccccgccatcctgacgccgccctcttcttccctcctctgcgccgcctcatcctcttcaagggtgcccgctactacgtgctggcccgagggggactgcaagtggagccctactacccccgaagtctgcaggactggggaggcatccctgaggaggtcagcggcgccctgccgaggcccgatggctccatcatcttcttccgagatgaccgctactggcgcctcgaccaggccaaactgcaggcaaccacctcgggccgctgggccaccgagctgccctggatgggctgctggcatgccaactcggggagcgccctgttctgaaggcacctcctcacctcagaaactggtggtgctctcagggcaaaatcatgttccccacccccggggcagaacccctcttagaagcctctgagtccctctgcagaagaccgggcagcaaagcctccatctggaagtctgtctgcctttgttccttgaagaatgcagcattgtctttgtctgtccccaccacatggaggtgggggtgggatcaatcttaggaaaagcaaaaaagggtcccagatcccttggccctttcctccgaggacttctatcctccccaggcctttgtttcttcggctaaaggtacagttcctttcaagaggtaacagcactgggatccaagcagggggatgaaaaactcagcagagaaattcgagaccattttgcaagactgtgcccttctcctcaggaccccctggctcagttcttgaaaaacggtgtcatatttagtcagaggccccacccccaggaagcatggatggggatgaaggcacaggcgtctccaacctcagaggccctttgtggggtcaggacacagagtgggagggagactgatgcaggcctaccagtccctggctttttgtctggggctggaataaagaggtgccttcagctggtgggccgagaggcaggaagcagccttaaaaaaaaaaaaaaa

SEQ ID NO: 223341 - DNA, 1000 bp, Homo Sapiens
ccttcctggagcgtccctgcctagagctcagcccacaggactgcttcaggccgtggccacaggtagcagccgcaaggggaaatgaagaaaactgagccctcgtggccacctgtgtcacccttgtgccttagcctcatgggctgcctaggagctgcctgcacggcacagctcgctttcacagtcagaagtgggtctgtgggatctgtggtccctgtcctccctgctgtcccttctggggaggctttggtggctctgaggtggacaaagagctctcgcaagaagagacagcgtgatgcctcccacagtccaccccagaccctggggcagcccctctggccctgccagctgcctgcgtcgttgggcccagggtggctggcaggagtcccagctgcttgctttaggacctggcagcttttcttgccgtccctcccctgcctccagaatcacagcccttctccccaagggaggctgaggaggcttctccaccagtggcagccccaccccgtccctggccattcttggcctccaccccgctcaggcccctactcgggcgctcccagaaggagccacctctcagtgcctcacctccccctgcctcccagcctccgcagatgaggttcctgccccttcctcctcgtaaccaaaaccctcactgctcccaggacggtcttatttataaaccagatacatgttcttagtctggtcccagaccaaggagctggtcagacggccctttctaatcctacatgttgagcttatgtaaaaaatgttgtttcctcctgtttttggttcctttcttacccacaaaccattactacttgaaacttaaaaaactcgccaagtgtaaaggctaaagagaagcagtttgacggaccttgtgatttgtactgtttgctgcggagctatttaaagattttggaataaatatacaaaactacggttgtgaaataaaaacttaaattgtatattttgaaaaataaaacactgaaaagaaaccaac

SEQ ID NO: 223342 - DNA, 1000 bp, Homo Sapiens
ttcttcactgtggaatgggaagctgccgcctttgtagcccgcggctctgactaccgaagtatctgatctggtgtccgtgaggggacacgtatgacctcagaaacacagctggacacagagcttggtggaagaagtcgcctttgatcttcactatatattgggtgatgttcagtatggaaaatcaagggattaagactgttaaatcagccagagttggtgttcaagtttacagatatgagttatttaaagcaagtagaataagggaaagctgttctgtcaactgtaattgttcaaagatgttgtttttcatttcatctatctcaattcttataatcatgttatagaatgtaaatgttttcttctctctcctgctcttgttggaagatcctgccttgatttagaatactaggccatatgtcatataaatattttttctggatatggagtatgttttgctatgtaataatgggaagcatatgtcattccccatatgtgttggagaatgacatttaaataaatagcaaagctgggtgtggtgttgcaccgctatactcccagctgttggggaggctgagacggaaggatcgcttcagcccgggagattgaggctgcggtgagctatgatcgcgccactgcactccaggctgggcaacggagtgagaccctgtcttgaaaataataataggctggtcacggtggctcatgcctgtggtcccagcactttgggaggctgaggtgggtggatcgcctgaggtcgggggtttgagaccggcctggccagcgtggtgaagcctcatctctgctgagaatgcagagatgtgttgggtttggtggtgcatgcctgtgatcctagctgctggggaggctgaggtaggagaattcgcttgagcctgggaggcggaggttgcagtgagccgagatcgtgccattgcactccagcctggatgacaagagtgaaactccatctcaaaaaaaaaaaaaaaaaaaaaaaaaaaaaaaa

SEQ ID NO: 223343 - DNA, 921 bp, Homo Sapiens
cttcagggagaggaagccggcggcctcactgctatgggccgcaacaagaagaagaagcgagatggtgacgaccggcggccgaggctcgttcttagcttcgacgaggagaagaggcgggagtacctgacaggcttccacaagcggaaggtcgagcgaaagaaggcagccattgaggagattaagcagcggctgaaagaggagcagaggaagcttcgggaggagcgccaccaggaatacttgaagatgctggcagagagagaagaggctctggaggaggcagatgagctggaccggttggtgacagcaaagacggagtcggtgcagtatgaccaccccaaccacacagtcaccgtgaccaccatcagtgacctggacctctcgggggcccggctgctcgggctgaccccacctgagggaggggctggagacaggtctgaggaggaggcgtcatccacggagaaaccaaccaaagccttgcccaggaagtccagagaccccctgctctctcagcggatctcctccctcacagcatcactacatgcacacagccgcaaaaaggtcaagaggaaacatccccgacgggcccaggactccaaaaagcccccaagggcccctcgtaccagcaaggcccagcgccgccgtctcacaggcaaagcacggcacagcggggagtgagaccgagaacgaagcggtgccccagtctaggctgcggggacctgtccttgctcagcttggctgtccctgtagcccagcctgcacctaggtgtgcctaccgcatgttgccgctgctgtttctgctgggacgtctgactccagttccttctcccctctccagtgacaaggtcatttacaacttacatttacaatttatagtgtttaccagtattaaattctcagccactcaaaaaaaaaaaaaaaaaa

SEQ ID NO: 223344 - DNA, 1000 bp, Homo Sapiens
gggagtgttggggagcatcagtaaaagaatggacactcaggcacagagtggccctcaggaaggaggtctttgtttgtaggatgtatgggcaaagcttttgtgatcacacaccacagggagaatctgcatgtggggacactgtggagctctgcccagatgaccttttcaggggtaacaccccagctgcttgagagaacagtgttgctgctggcagagatgcattccagagatgcactccgctctggaactcactctcagccacagggagctgcatgcaccacaggggcaatgcacctttgcaggggtaccttctggccccaacccttgactcaacggggacaactccagaaggtcattccagatccagagatccccatcgaactgaaggatcactgggttgcagacacattgcaggtcagcttcttcctctgcccagtcctgccctcactccccagtgaatcctcaattttctgtctcgttgtctgtccagataattgattctaagacatgttaggtatataaggagtgtagataaggcttcagccatgagtcaccccccagtaagccccagagtatattgaatagaaattctgcatgtgtggggagaatggacaaggacttaggaaaaagtcctcatcaaagaacagcttttttgggacaagctttacatgggtggggagggaaaatgtgaaacacattagcaataagttaaacctcatcttgtactaaaggaggacacactcagggagaagacctctgtgggcagggcttgtgggtggagcttcatcccgatgtcactcctcaactgacttaggaggacagtcttgctaccccaagtcactacctcactcacctctgagggattttcaggaaatgtcttgactcccccatgtactctgtatgtgagcgaagatggcagtaactgttaaataagcattcttttctacttcttggaatcagatgaaataaaaaagcaggctttatttaagtaatcaaaaaa

SEQ ID NO: 223345 - DNA, 1000 bp, Homo Sapiens; identical to SEQ ID NO: 118007

SEQ ID NO: 223346 - DNA, 1000 bp, Homo Sapiens
tgggagcgttttgtgcggcgcttcgggcccctgcaggtgctggagacatatggactgacagagggcaacgtggccaccatcaactacacaggacagcggggcgctgtggggcgtgcttcctggctttacaagcatatcttccccttctccttgattcgctatgatgtcaccacaggagagccaattcgggacccccaggggcactgtatggccacatctccaggtgagccagggctgctggtggccccggtaagccagcagtccccattcctgggctatgctggcgggccagagctggcccaggggaagttgctaaaggatgtcttccggcctggggatgttttcttcaacactggggacctgctggtctgcgatgaccaaggttttctccgcttccatgatcgtactggagacaccttcaggtggaagggggagaatgtggccacaaccgaggtggcagaggtcttcgaggccctagattttcttcaggaggtgaacgtctatggagtcactgtgccagggcatgaaggcagggctggaatggcagccctagttctgcgtcccccccacgctttggaccttatgcagctctacacccacgtgtctgagaacttgccaccttatgcccggccccgattcctcaggctccaggagtctttggccaccacagagaccttcaaacagcagaaagttcggatggcaaatgagggcttcgaccccagcaccctgtctgacccactgtacgttctggaccaggctgtaggtgcctacctgcccctcacaactgcccggtacagcgccctcctggcaggaaaccttcgaatctgagaacttccacacctgaggcacctgagagaggaactctgtggggtgggggccgttgcaggtgtactgggctgtcagggatcttttctataccagaactgcggtcactattttgtaataaatgtggctggagctgatccagctgtctctgacctacaaaaaaaaaaaaaaaaaa

SEQ ID NO: 223347 - DNA, 1000 bp, Homo Sapiens
gtttgacatgaaatacatgaacttccgtgtgaaggcctgtaacaaggcagttgcaggagagttctctgagccggtgactctggagacaccagcgttcatgttccgcctggatgcgtccacatcccaccagaacctgcgggtggatgatctctccgtggagtgggacgctatgggcgggaaggtgcaggatatcaaggctcgcgagaaagatggcaaggggcggacggcgtctcccatcaactccccagccagaggtactccatctcccaagaggatgccctcaggtcgtgggggacgggaccgcttcaccgctgagtcctacacagttctgggggacacgctgatcgacggcggggagcattactgggaggtgcgctacgagccggacagcaaggcgttcggcgtgggcgtggcctaccgcagcctgggccgcttcgagcaactgggcaagacggccgcctcctggtgcctgcacgtcaacaattggctgcaggtcagcttcacggccaagcacgccaacaaggtcaaggtgctggacgcccccgtgcccgactgcctgggtgtgcactgtgacttccaccaaggcctcctgtccttctacaatgcccgcaccaaacaagtgctgcacactttcaagaccaggttcacacagccgctgctgcctgctttcacggtatggtgtggcagcttccaggtgacgacaggcctgcaggtccccagtgctgtgcgctgcctgcaaaagcgaggcagtgctaccagcagctccaacaccagcctcacctaggcccccaggcacccacccagctggggtgtttttgggggagtcgccgccaagcccaggctgctggagccaggcaccctcctctgtcacttgctgcttggagccttaactccagatgggggggtcaccaagagggagtgggcaccctggcgggccctctccccacctcacctcttaataaaggtcagacactggccaggcaaaaaaaaaaaaaaaaaa

SEQ ID NO: 223348 - DNA, 1000 bp, Homo Sapiens
tgtaagaagagccatagctgatcatgtccccctgacccttcccttctttttttatgctcgttttcgctggggatggaattattgtaccattttctatcatggaatatttataggccagggcatgtgtatgtgtctgctaatgtaaactttgtcatggtttccatttactaacagcaacagcaagaaataaatcagagagcaaggcatcgggggtgaatcttgtctaacattcccgaggtcagccaggctgctaacctggaaagcaggatgtagttctgccaggcaacttttaaagctcatgcatttcaagcagctgaagaaaaaatcagaactaaccagtacctctgtatagaaatctaaaagaattttaccattcagttaattcaatgtgaacactggcacactgctcttaagaaactatgaagatctgagatttttttgtgtatgtttttgactcttttgagtggtaatcatatgtgtctttatagatgtacatacctccttgcacaaatggaggggaattcattttcatcactgggagtgtccttagtgtataaaaaccatgctggtatatggcttcaagttgtaaaaatgaaagtgactttaaaagaaaataggggatggtccaggatctccactgataagactgtttttaagtaacttaaggacctttgggtctacaagtatatgtgaaaaaaatgagacttactgggtgaggaaatccattgtttaaagatggtcgtgtgtgtgtgtgtgtgtgtgtgtgtgtgtgtgttgtgttgtgttttgttttttaagggagggaatttattatttaccgttgcttgaaattactgtgtaaatatatgtctgataatgatttgctctttgacaactaaaattaggactgtataagtactagatgcatcactgggtgttgatcttacaagatattgatgataacacttaaaattgtaacctgcatttttcactttgctctcaattaaagtctattcaaaag

SEQ ID NO: 223349 - DNA, 1000 bp, Homo Sapiens
agaggagctactcaggggagttcagcagcggctcatccaggctcccttccaagtcacagatgctgctgttctcaacaatgtagcacacacatttggcctaatggacacagtcaagaaggttttagacaacagaaggaaccaagtagagcagggagaagaacagtttctctatactctgacagacttggaacgccagttggaggagcagaagaagcaaggccaggatcacaggctgaaatctcagacagttcaaaatgtggtactgatgcctgtgagcactcctaagcctccaaaaaggccccggctccagcggccagcctccaccactgtcttgagcccttctcctcctgtccagcagcctcagttcacagtcatctcacccatcaccatcaccccagtgggtcagtcattttccatgggcaatattccagtggccaccctcagccagggctccagtcctgtgactgtccacacactgccttctggccctcagctcttccgctatgccacagtggtctcctctgccaagagcagctcaccagacacagtgaccatccacccttcatctagcttggcgctgctgagctctactgccatgcaggatgggagtacactgggcaacatgaccaccatggttagccctgtggaattggtggccatggagtccggcctaacctcggcaattcaggctgttgaaagcacctcagaggatgggcagaccatcattgagattgatccagccccggacccagaagctgaagatactgagggcaaagcagtcatcttggagacagagctgaggactgaggagaaagttgtggctgagatggaagaacaccagcatcaagttcacaatgtggagattgtggtcttagaggattaactggggatctcagggccaggagttatgttttgatttggaattttaattatttgtttatttttatcattgtcccactcatttccacataggacccttttttaaaaaaaaaaaaaaaaa

SEQ ID NO: 223350 - DNA, 1000 bp, Homo Sapiens
cagcaatgcagagagggcataggatctgaggacaaggaaattcctcagcatggcgtatcaggaaagcatggctcattctgcaatgagccatgagtgtgggccatcgcaagtcacagaaattgcacctcattccagtcaagcagaaaaacaggcacaggctcagtgtaggtcccaagagagggtgcctggactcagcaactcggacctgggcttttctcccagctttcagggacagctttgtcctgagtctgcctctgttcacggggatgcttggctggagtcacccccaggacttatccatgcatcactattcagaagacacagagggcccctctctccacattccaaacagagtcctggtttcctcagcctcaccctgcatagcttgcacaacatcctcagaaccattcactggcaaatggaggggaacgtgctgactgggactcccagctggagctgggaggagaggtccacttcccttagaacacctgagctgctgcatgagtggacgtcagaagaatctctatgccctgttaaatggggagacaaaggggtggtgggggcttcagccagtgatttcggaccgaaggtgacagccgtcccaaccctgcccagcctgatgccacctcctctgttcttggaacaacgcataggaaaagaatctcctttggaaggtgacactgctccctgaattaaggtaatggttgcgagcaccaagtacaaggactagacgcatatttacctgcgtatctgagagttccagattcccagcttccagatgatccttgcacagacaacctaccttctttccagaggatgtctttctcctctggagagtagatgcttgctcttgggaaacggaatgaccttggcgctggcttcaggaatatgcatcccacagccagtttagagaaatacatgttgtaaatggcattgacagctgctctttaggatggggagtattatggaaatccacaataacaatctatggcaagcaact

SEQ ID NO: 223351 - DNA, 1000 bp, Homo Sapiens
gtattgccccagcggagagaaatgccccctagtcgggtcgaatgtaccttgggccttcatgcagggcgaaatcgcgactatcttagctggggatgttaaagtgaaaaaggagagagacccttgaaccactgggcagccacctcctttgccctagaccagctcctctccaatcctgagggcccctcccccaacccaactcgaccctccctcccctcacccccaaggtgtagaattgtgaatataacgaaactgcaaaaagttagtcttatgtatagacattattttcgtcgtatgtttctatattttgaaacaaaggtatgtaacttcttcatttgaaggataagctggtttgtgttaagcagtatagtattggttgggtcatttgcatcatatcgttagcatttatttggtggcagaatgtttgcctaggtacagaattaatagcccttagcaacgactgctgctggtgtgtatttttgtaaatgttatgcactctctgaaaggaaaaacacacacaaaagaaaaagacttttttttttttttttttttttttgccaaggccagtgttgctgcctaaaaaaaaaaaaaaaaaaaaaaaaaaaaaaaaaaaatgctataaaatggtgaaagcttccttctaaactgccccaagtgttgaagtcttcactttattttgttgttttgttttgtttttctgttttgtttgcaaaatggtaagggggtgtcgggggggatggggtgtattttgttgcaagtttgtgaggggaaaatgttttggtttgtttctactgacctgaatgtgttggatctacacgtgttgttttgtttttgctttattgatgcacggatgcttttgaacagtagagcgaaatgctagacatggagaatctgctctgtttgtcctttatacatttctgtagttaacagaacactgtaatgtgccttggagcttagtaacttgtaataaattcaattgatattaaaaaaaaaaaaaaaaaaa

SEQ ID NO: 223352 - DNA, 1000 bp, Homo Sapiens
gtgtgcatcatggaagtcaacctcctcccctccaaggtcactcatctcctcatcaagcggccccctttttttcactatagacctggtgactacttgtatctgaacatccccaccattgctcgctatgagtggcaccccttcaccatcagcagtgctcctgagcagaaagacactatctggctgcacattcggtcccaaggccagtggacaaacaggctgtatgagtccttcaaggcatcagacccactgggccgtggttctaagaggctgtcgaggagtgtgacaatgagaaagagtcaaaggtcgtccaagggctctgagatacttttggagaaacacaaattctgtaacatcaagtgctacatcgatgggccttatgggacccccacccgcaggatctttgcctctgagcatgccgtgctcatcggggcaggcatcggcatcaccccctttgcttccattctgcagagtatcatgtacaggcaccagaaaagaaagcatacttgccccagctgccagcactcctggatcgaaggtgtccaagacaacatgaagctccataaggtggactttatctggatcaacagagaccagcggtctttcgagtggtttgtgagcctgctgactaaactggagatggaccaggccgaggaggctcaatacggccgcttcctggagctgcatatgtacatgacatctgcactgggcaagaatgacatgaaggccattggcctgcagatggcccttgacctcctggccaacaaggagaagaaagactccatcacggggctgcagacgcgcacccagcctgggcggcctgactggagcaaggtgttccagaaagtggctgctgagaagaagggcaaggtgcaggtcttcttctgtggctccccagctctggccaaggtgctgaagggccattgtgagaagttcggcttcagatttttccaagagaatttctagcctcacctctccaagctctgccccaagtccacaccat

SEQ ID NO: 223353 - DNA, 1000 bp, Homo Sapiens
ttaaatgaaagttggtatataaatttttgaaaataattgtatttcctgttttatagtcttaggattaatatatgggatttatcttatgttaatcttacatttaggattttgtgaaaatggaaaattatgaggcattggtaggctttgatctctgtaatacaccgctctccagtgttgctcagaagattatgtctgctatgcattcaggtgatttagtggattctaagacttggggaaagagtacagagagtaagtaatttttatgaacctttctttctcttgatactttgaatgttaattgttctaaagactaagaattgaaaatggaatgcatgtagacagatgaagcccagctcccgccccttttacactcattcagtgcagactgagcttctgcttgctaactttcgtgttcccttaaccttcattgctttaaaaatgtaacactctcttccttattccaggtatttctgtcaaacattcccttagaatctggatcaggtattttagtattttcaaaagagatgctttaatcttggttctcaggtcatcaaacctgtacatagtatttgctattttgtgtggtgaacaagagatatgtttttgacaatatgtgtattgtgctgctatagaaatgtaaactcttaggtggcaaggattattggatcagtgtatatggatttatgatgtggtataatagtaaaagcagtggggccgggtgcggtggctcacgcctgtaatcccagcactttgggaggccgaggtcggcgatcatgaggtcaggagatcgagaccatcctggctaacacggtaaaacactgtctctactaaaaatacaaaaaattagctgggagtggtggtaggcgcctgtagtccagctacttgggaggctgaggcaggagaatggcatgaacccaggaggcggggcttgcagtgagctgaggtctccagcgtgggcgacagagtgagactctatctctaaaaaaaaaaaaaaaaaaaa

SEQ ID NO: 223354 - DNA, 1000 bp, Homo Sapiens
aagtgttgtcctccaggtccaagtggactctacagagtgcttgacctcaacacactggattccaggtggactggaccaagagcaggcaaagacacgggaactgaaaaactccacagggtttggagaatagaaatgaaaagccacgtcatataactcaagaataaatggtgttttggaaattttaaaattatcatcgaaggtggtgaaactatttcaggcccaaatgaaaggaaatcgccagttggggatgaaatcacagagcctgtgttttatgatatggttggatgtccactgatgaaattttaaaggagtttcatttttaaaagtgcgcatgattctacatatgagaattctttaggccaagaaactgtccttggctcagaggtgttgggaattaaagcagagagaagccattcgtgatgcttagaaccaaggatggtcatgtacacaaagaccatcgagacggccattcttgtttacaaaacacttaccaagaaagcactttgtaggggaactttagtaagttcttctcatttcattatgtttcttccaaggaaacaggagagactgaattaataattctctctttcctcttaagcacttttaaaataataaagtacatcttgaaatttggggaggcatctctgatttaaaaaaagaaaaaggctgcttgatgtatgttatgcagagacactctgcctctggtggctgcagagcaatacccaagcctcatttggaaggctcaacatttggaattgcactttaattgattaatcctcaattcatgtggccttacgggatggtgggtctgggaccccaattcattcttatctgccaaagaattatctagaagcacatcaaataccagcaccccacctgcacaatgggggtggaaaacttttgtatccctaagcatattattttatagtgtctgccatgccatgtggaaatactttatttttaacctcaggatttaaataaagtaaacactatgacattt

SEQ ID NO: 223355 - DNA, 1000 bp, Homo Sapiens
gagttatttagtgaaaatgtggaactagctgccagtgcctcagtcttcttgtataatgcctttccatggattggcatcctgccttttggaaaacatcaacagctgtttagaaatgcagctgtagtctatgattttctctccagactcattgaaaaagcttcagtcaacagaaagcctcagctacctcagcattttgttgatgcttatttagatgagatggatcaaggtaaaaatgacccatcatctactttctccaaagaaaacctaattttctcagtgggtgaactcatcattgctggaactgaaactacaaccaatgtgctacggtgggcgattcttttcatggccctttatcctaatattcaaggacaagttcagaaagagattgatttaattatgggccctaatgggaagccttcttgggacgacaaatgcaaaatgccttatactgaggcagttttgcatgaagttttaagattctgtaatatagttccattagggattttccatgcaacctctgaagatgcagttgtacgtggttattccattcctaaaggcacaacagtaattacaaatctttattctgtacactttgatgaaaagtactggagagacccagaagtgttccatcctgagcgatttctggacagcagtggatattttgccaagaaggaagctttggttcctttttccctaggaagaagacattgtcttggagaacacttggctcggatggaaatgttcttgttttttacagcattgcttcagaggtttcatttgcattttccacatgaactagttccagatctgaagcccaggttaggcatgacattgcagccccaaccctacctcatctgtgctgaaagacgctgaaactgcctgggatgttttcgggaacaagaatgtatatttgccttatccctgaacttggtttaatcaaatcaatgtgtgtattagaataaaagtcacagcatcaaaaagccaaaaaaaaaaaaaaaaa

SEQ ID NO: 223356 - DNA, 1000 bp, Homo Sapiens
gctcccggtggccagtgctcagcagcccgggactccccgcagccttcgcttctttccctgcctgccctcagcgcagctacagcacggaggagaagccccagcagcaccagaaaaccaagatgatcgtcctgggattctccaaccccatcaactgggttaggactcgaattaaggccttccttatctgggcctatttcgacaaagagttcagcatcacagagttctccgagggagcgaagcaggcttttgctcatgtatccaagttgctgtcacagtgtaaatttgatctgttggaagaacttgtggccaaagaggtgctacatgcattgaaagaaaaggttacttcactacctgacaaccataaaaatgcccttgctgctaacatagatgaaattgtatttacatcaacaggaggcatctccatttactatgatgagaaaggaaggaagtttgttaacatcctgatgtgcttttggtatctaaccagtgccaacatccccagtgaaactttaagaggagccagtgtattccaggttaagttggggaatcagaatgtggaaactaaacaacttcttagtgcaagctatgagtttcagagggagttcacacaaggagtaaagcctgactggaccattgcacggattgaacactcaaaattattagaataattttcttggaaaaatcagcttatggactttagcagttgctgtgaaaaactaaggaagaaaaattttggggtcatttgatcttcacttaatctaagtctgtgaattacttttatattattttgaaatactccttgcagtatattggcatgatacagtaaaagcattttccacagattgttatcaccttctttaaaagaagtcaaaatttaaaaaatacaatagcacgttgttggtgtcatattcaataacatttccaatgctacatataattttatagacataataaagaaggtattgaaaaaactaaaaaaaaaaaaaaaaaaaaaaaaaaa

SEQ ID NO: 223357 - DNA, 1000 bp, Homo Sapiens
tattttgatagaagttttttctccattggttaaattagcattacttaaaatttgtttctttagaaaataaatgcaggttataaatgtgtgtatatttagagattataaggctctctgagccatcttctgatttttcattgctctataattctttttactgaaaatactatgttatgaatggtattaaattttagtctctggaacatccaaaaccaagcaaagggatgtgactattttgaatgaatcagaatgtcaacttgtatgtacactatatctacacttactcattatttaaaaagaataatgaaaaatctagatcaattcttcaatttgattgaactgttcagccttttcaagatttctttatttacaaatgattacatttaaatgaatgtacattcttctcactgactttggtgattttgaaacctagaatgatgtgtttctatctgtaatatctttccatttgaaaaaaatctcaaaacacagattaaaaccacaataggctgtagtattttttattttgggagccagagtatgatttgggggaagaatatgtatcagccctattgcagtataactttaagctccttttctctttagtccacttttgattgtaatttttatggtataggattttgaatcttctattttaggcttgtcagtcttggagttcttatcttccattatccctaaatattgataaactcccaggcaccaaagaaaacatttgcttaattgtctgaaaagaaacaagagaaaaacactggtatttttatgtctgtattcaatatggtataaaatataaaaactatattttaacttagtgaaatattttactatttctctacttcagacaaaatgttgcatccaaggtacatcaagtgaccatttgccttgaaccttgatttcactttgttttttttttttccttaaaggcaactaggaagctttactttcctaaagtgtttttgccattggaatttttgctgatcacagt

SEQ ID NO: 223358 - DNA, 1000 bp, Homo Sapiens
agcctgtggccttccggctgccccgagtccggaaagagttcttccaggatgacgtgttcccagacacggctgtgatctgggagcctgtgctcagtgccgaggcctggctgcaaggcactaatgggcagccctggcttctcagcctgcagcctcctgacatgagcccagtgagccaagccccccgagaggcccctgctcgtcgggccccatcctcagcgcagtacctggaagaaaagtctgaccagcaaaagaaggaggagctgctgaatgccatggtggcaaaactggggaaccgggaggacccactcccccaggactcctttgaaggcgtggacgaggacgagtgggactagcctgcgcccccgtcacctccacctcacctgtgctgccacttcctagtgcacacctcacggctcatcctcaagctggaagatacctctctggccccggcacatgtcacccctgcactcctgccttcccgtgggcacttccacatcctctgggcctctggcagttcccagggactgttttcacctctgctgtctctggggtcagctgctgctcatcagctgcccgctagcatgtggccaggggtgcagggtggcggggggtcagcagcatgtccctgggcaggccctgggcaccctgtctcccctggtctcactgctgacctgggctggtcccagcctggattggcctcatccaggatctttggtcaccccacgctgccccatcttgcctgctgttccagttctggtcaagggccttgggggctggccccccaccaggccttctagagcagcaccagtctcagggccctgggaccagctgccctacttcccaggtttgtagccaggagaagggggcatcacagagctgatggtccaataaggggggtgtgagccccgcagggactggcccgcacctgccttggatgttttcagcaattaaacttttttaagctggcaaaaaaaaaaaaaaaaaaaaaaaaaaaaaaaaa

SEQ ID NO: 223359 - DNA, 1000 bp, Homo Sapiens; identical to SEQ ID NO: 118018

SEQ ID NO: 223360 - DNA, 1000 bp, Homo Sapiens
gatgatgatctccaccgaataaacgaactgatacagggaaatatgcagaggtgtaaacttgtgatggatcaaatcagtgaagccagagactccatgcttaaggttttagatcataaagaccgtgtcctgaagctgcttaacaagaacgggactgtcaaaaaagtgtccaaattgaagcgaaaggaaaaagtctagacccagaacaatcaggagattggaagcaaatttatgaagaatgatggtgggggtggggggagggttttggttttttccaaagtggaacattgaaataaaggaagtgttccttagttcccgtgtgaaagcagaggaacccatgacatccaagggcgtgaaaggatcagagctgactggacatagtgagctgccttcttgcgttcgggtgcacccctgttaaacctgatctgtgtcataagtgactccggatgcatcagtgtccaccagttggaagcaatgacaaggatggctggctggtgtttttcagccttccggtttatagactgtatttatctagtggattcctgcaggccccatactgagcctggactgaaagtatccactcggaccatctgttatctctctacactgaaaataaaacctcttccacccaccccattcggttcttctgcctgaccttcaaatgcccatgttggccttttacagcagtgccacggcaccaagcgagctgccacatctcacactctaaagggtttgaactattagttcttgtcattttttaaaaaaaaccattcccaagtgaaattgttatatcgtctgtcttgcgtgtgtcagaactgggtttttgtggaggttcagagcaggcaacaccataagttgctctcagatccttgttctgaagtacattcttggttatctgtacttctgtagctggtgtgatgctgttaattgtatgtaccacacatctccagacgttaataaaggactcaaagaggtttttgtaaaaaaaaaaaaaaaaaaaaaa

SEQ ID NO: 223361 - DNA, 1000 bp, Homo Sapiens; identical to SEQ ID NO: 118019

SEQ ID NO: 223362 - DNA, 1000 bp, Homo Sapiens
gggtccctggaaaggaagaattcagggaacttcgagaacagccaagtgaccctcaagctgaacaagagcttattaatagtattgaacaagtatatttttctgtggattcatttgatattgttaaatatgagctggagaagcttccacctgttctcaatttgcaagaattagaggcgtatagagacaaattgaaacaacagcaagctgcagtatctaaaaaagtggcagatttaatccttgaaaaacagcctgcttatgtaaaggaacttgaaagagttacctcattgcagacaggtcttcaattagctgctgttatctgtacaaatgggagaagacacttgaatattgcaaaggaaggttttactcaagctagtttaggccttcttgcaaatcaaaggaaacgtcagttgctgattggacttctgaaatctctgagaactataaaaacattgcaaagaacagatgtacggttaagtgaaatgctggaggaggaagattatccaggagctattcagttgtgccttgaatgtcaaaaagctgccagcacttttaaacattacagttgtataagtgaactgaattcaaagctgcaagatactttggaacagattgaggaacagctggacgtagctctttccaaaatctgcaagaattttgacattaaccattataccaaggttcaacaagcttatcgacttcttggaaaaacacagacagcaatggatcaacttcatatgcacttcacccaagccattcacaacaccgtgtttcaagttgttcttggttatgtggaactatgtgcaggaaacacagacacaaaattccaaaagctgcaatataaggatctctgtacagtatgtagtgacttaattactattcatatatctctcctttagattttaaatttatatttcctttatcttggtacatacctatttgaaaatgctactaaaataaaaataaatctttgccaaaaaaaaaaaaaaaaaaaaaaaaaaaa

SEQ ID NO: 223363 - DNA, 1000 bp, Homo Sapiens
cggctctttgcatgatcacagttctgtgttctggcctgtggcagggccgggaagggccgctggcttccgaacagacgtggttgctctccacgaggcgcatggggagcccgcgggccctaagctttgtcgcagatgtcatcattggcagaattacttgtcttgaaaaataagtagcattgctgaaacacacaaccgaattctctacgatggccatttgctcattgtctttcctctgtgtgtagtgagtgaccctggcagtgtttgcctgctcagagtggcccctcagaacaacagggctggccttggaaaaaccccaaaacaggactgtggtgacaactctggtcaggtgtgatttgacatgagggccggaggcggttgctgacggcaggactggagaggctgcgtgcccggcactggcagcgaggctcgtgtgtcccccaggcagatctgggcactttcccaacccaggtttatgcgtctccagggaagcctcggtgccagagtggtgggcagatctgaccatccccacagaccagaaacaaggaatttctgggattacccagtcccccttcaacccagttgatgtaaccacctcattttttacaaatacagaatctattctactcaggctatgggcctcgtcctcactcagttattgcgagtgttgctgtccgcatgctccgggccccacgtggctcctgtgctctagatcatggtgactcccccgccctgtggttggaatcgatgccacggattgcaggccaaatttcagatcgtgtttccaaacacccttgctgtgccctttaatgggattgaaagcacttttaccacatggagaaatatatttttaatttgtgatgcttttctacaaggtccactatttctgagtttaatgtgtttccaacacttaaggagactctaatgaaagctgatgaattttcttttctgtccaaacaagtaaaataaaaataaaagtctatttagatgttgaaaaaaaaaa

SEQ ID NO: 223364 - DNA, 1000 bp, Homo Sapiens
gagtccacagctgtggtgagcttcttggaggaggcagggtcccgaatgcgcaagttgtggctgacctacagctcccagacgacagccatcctgggcgcactgctgggcagctgctgcccccagctccaggtcctggaggtgagcaccggcatcaaccgtaatagcattccccttcagctgcctgtcgaggctctgcagaaaggctgccctcagctccaggtgctgcggctgttgaacctgatgtggctgcccaagcctccgggacgaggggtggctcccggaccaggcttccctagcctagaggagctctgcctggcgagctcaacctgcaactttgtgagcaacgaggtcctgggccgcctactccacggctctcccaacctgcgcttactggatcttcgtggctgtgcgcgcatcacgccggctggccttcaggatctgccatgtcgggagctggagcagcttcatctgggcctgtatggcacgtcagaccggctgactctagccaaggagggcagcccctttttgacccagaagtggtgccatacactgcgagaactggacttgagtggccaggggttcagtgagaaggacctggagcaggccctggctgccttcttaagcacccctgggggctcacacccagccctgtgctctcttaacctcaggggcacccgggtcacaccaagcactgtcagctctgtgatcagcagctgcccgggcctgctctacctcaacctggagtcctgccgctgccttccccggggtctgaagcgggcctaccggggcctggaggaagtccagtggtgtctggagcagctgctcaccagcccctcacccagctaggcagccacagacctgggacacctcagccagcttgcccaccctccacctttgcccaatttcagatatttgagcattttgttaaaataaaacatttttaggaaaaaaaaaaaaaaaaaaaaaaaaaaaaaaaaaaaaaaaaaaaaaaaaaaaaaaa

SEQ ID NO: 223365 - DNA, 1000 bp, Homo Sapiens
ttcgggaatgttgagagcagattggacctgaggaagaatctgcgctgccagagcttcaagtggtacctggagaatatctaccctgaactcagcatccccaaggagtcctccatccagaagggcaatatccgacagagacagaagtgcctggaatctcaaaggcagaacaaccaagaaaccccaaacctaaagttgagcccctgtgccaaggtcaaaggcgaagatgcaaagtcccaggtatgggccttcacatacacccagcagatcctccaggaggagctgtgcctgtcagtcatcaccttgttccctggcgccccagtggttcttgtcctttgcaagaatggagatgaccgacagcaatggaccaaaactggttcccacatcgagcacatagcatcccacctctgcctcgatacagatatgttcggtgatggcaccgagaacggcaaggaaatcgtcgtcaacccatgtgagtcctcactcatgagccagcactgggacatggtgagctcttgaggacccctgccagaagcagcaagggccatggggtggtgcttccctggaccagaacagactggaaactgggcagcaagcagcctgcaaccacctcagacatcctggactgggaggtggaggcagagccccccaggacaggagcaactgtctcagggaggacagaggaaaacatcacaagccaatggggctcaaagacaaatcccacatgttctcaaggccgttaagttccagtcctggccagtcattccctgattggtatctggagacagaaacctaatgggaagtgtttattgttccttttcctacaaaggaagcagtctctggaggccagaaagaaaagccttctttttcactaggccaggactacattgagagatgaagaatggaggttgtttccaaaagaaataaagagaaacttagaagttgtctctggaaaaaaaaaaaaaaaaaaaaaaaaaaaaaaaaaaaaaaaaaaaaaaaaaaa

SEQ ID NO: 223366 - DNA, 1000 bp, Homo Sapiens
atgagacaagcagtgaggtgctagatgagctctaccgtgtgtccaaggagtacacgcacagccggccccaggcccagcgcgtgatcaaggacctgatcaaagtggccatcaaggtggctgtgctgcaccgcaatggctcctttggccccagtgagctggccctggctacccgctttcgccagaagctgcggcagggtgccatgacggcacttacctttggtgaggtagacttcaccttcgaggctgctgttctggctggcctgctgaccgagtgccgggatgtgctgctagagttggtggaacaccacctcacgcccaagtcacatggccgcatccgccacgtgtttgatcacttctctgacccaggtctgctcacggccctctatgggcctgacttcactcagcaccttggcaagatctgtgacggactcaggaagctgctagacgaagggaagctctgagagccctgagcctagcacattccaccttgacaaaatggttgactgagaaaacacagataatgggcttcctaaccctgctcacctggcactaacacttttcaatcttcaggcttcattccttcccaagagtgcttttgactctgagaccagcccacccccaaacagctagtggagaaggagcaatgctgaggggtgaggcctctctcccactccagccccaggacaggaaacagaactgcctgaaaaaggtgaagtgaaacttggatctctatttctcccataagggacttctgaaacagggaagccccctcccatgtgaaccaaggaaaggaggcacagcccagagaacccctttggggatactaaagacagaagaggggaaggtggcccttagagacagagcttggacagatgccagaggctctgttccagagtgcaggaagaaggggctagggcaggggagattctcataggggaaataaaactactaaaatatgaaaaaaaaaaaaaaaaaaaaaaaaaaaaaaaaaaaaaaaaaa

SEQ ID NO: 223367 - DNA, 1000 bp, Homo Sapiens
ctgtggcttttctgatctaacttctagctaaaattgtatcattggtcctaaaaaataaaaatctttactaataggcaattgaaggaatggtttgctaacaaccacagtaatataatatgattttacagatagatgcttccccttggctatgacatggagaaagattttcccataataataactaatatttatattaggttggtgcaaaactagttgcggtttttcccattaaaagtaataaccttactcttatacaaagtggacactgtggggagatacagagaaatggaagatacggatcctgcctggagtaggtaaccttgcttggaaaccccacatgcaaacgtcatgaggagaattaaaggagtattatcagtaatgaagtttatcatgggtcatcaatgagcatagattggtgtggatcctgtagaccctggtgttttctttgaagtgccctctcctaatgcagaggccttgaagcttacagtatacacttgaaaagtcacagatagctagaattatgatctttgaagttataactgtgatctgaaaatgtgtgtggtggtatgacagcataccattaaatacatttacatcacagctcaaaggactgtgatataatccatttatatcacaactcaaaggactgtgatataatccatttatatcacagctcacagtttctgaaaatgtataaaagaatctataatctagtactgaaattactaaattgggtaagatgatttaaatgattttaattttaacattttatttctagaatatatggctccattttattttatagtgtaaagttgtatttcctaaagtttgtgttttgtcgacagtatcttttaaatgagtcttaaaaataaaggcatattgttcatgtttaaaaaaaaaaaaaaaaaaaaaaaaaaaaaaaaaaaaaaaaaaaaaaaaaaaaaaaaaaaaaaaaaaaaaaaaaaaaaaaaaaaaaaaaaaaaaaaaaaaaaaaaaaaaa

SEQ ID NO: 223368 - DNA, 1000 bp, Homo Sapiens
ggactcacggggatgccccagggactgtggcccacagagagtttgggtcacggccagcccctgaccgggttccctggagcccagtgcgcacggtgctgagcagagctgcagccacgcaggcgcattgcaggaggactccagagcgtctcctggagaccttgagcctgaacgcactcaggcgccactggcctgctctcagtccggattaactctcgaccgagcccagcttctgccggttgtgggctcccccggtggccgaggcccaggcccaacgcctctggtgctgttcccctgcagtcccagccccgcgtggctcgcgctcgtctgtgaggaagacacctccagaccttggggtccccgcgcttcctcttgctcctcgctgctcccattagctggtgcaggcttccgttaaggggtccctcccttggcctggcttcccggcgcacctcagcttccctgctggtggggggatccccaggagaccagcatgtgctgaacctctccgtgcctctgcctccgcaccctagacacccacctccagtttgaaggtggcgggccaggggctttcttgctgaattgacgactccgagagccctgactcccgccttgccactcacggctctgtccactagggctcagccctgctgagaaaggacctccgatgcttgggagacgctgctccggcaggtgcagccccggaagtttgtccatgggggtccccgcggctggggctcatggaactgcgagacccgggaccctcctgccctgcgggtccccgagccaccagcagccaggaccggaggctgtggggcatggcgtgacttctcgtgcacagggctggtttggttatgagacgatctcgctgggaccgcccctgcccgtggaaagccacaaggacaaagggagcggccacctcgacccccagacagggcggcccgtattaaagttggccctgcacgcccaaaaaaaaaaaaaaaaaaaaaaaaaaaaaaaaaaaaaa

SEQ ID NO: 223369 - DNA, 1000 bp, Homo Sapiens
ttcggcttcctcagtggcctgctgctggccttcgccttcctgccctacatcaccttcggcaccagcgacaagtaccgcaagcgggcactcatcctggtgtcactgctggcctttgccggcctcttcgccgccctcgtgctgtggctgtacatctaccccattaactggccctggatcgagcacctcacctgcttccccttcaccagccgcttctgcgagaagtatgagctggaccaggtgctgcactgaccgctgggccacacggctgcccctcagccctgctggaacagggtctgcctgcgagggctgccctctgcagagcgctctctgtgtgccagagagccagagacccaagacagggcccgggctctggacctgggtgcccccctgccaggcgaggctgactccgcgtgagatggttggttaaggcggggtttttctggggcgtgaggcctgtgagatcctgacccaagctcaggcacacccaaggcacctgcctctctgagtcttgggtctcagttcctaatatcccgctccttgctgagaccatctcctggggcagggtccttttcttcccaggtcctcagcgctgcctctgctggtgccttctcccccactactactggagcgtgcccttgctggggacgtggctgtgccctcagttgcccccagggctgggtgcccaccatgccccttcctctttctcctcctacctctgccctgtgagcccatccataaggctctcagatgggacattgtgggaaaggctttggccatggtctgggggcagagaacaaggggggagacacaagtagacctcaggtagaacgacactgggcggagccaccccagggcctgctcccagggagtgctcgaggcgcatcaggcccgttttttaccagtttatatcacggtcttcatttttaaaagtaacgctaactttgtagggacgatgtctcatggattaaataatattctttatggcaaaaaaaaaaaaaaa

SEQ ID NO: 223370 - DNA, 1000 bp, Homo Sapiens
gtctggggaaatattgatctgcagtccaagaaaatcccagctgcccttgcctgaactgattctcgttgtcctacacagagacctgaggggcggaagccgagcgaagtggcgcacaagagcatcgaggcagtggtggctcggctagagaagcagaacggcctgagcctgggccatagcacgtgtccggaagaggtcttcgtggaggcctcgccaggcacagaggacatggacagtctagaagatgctgtggtgccccgggctctgtatgaggagctgctgcgcaactaccagcagcaacaggaagagatgcgccacctccagcaggagctggagcggactcggaggcagctggtacaacaggccaagaagctcaaggagtacggggcacttgtgtctgaaatgaaggagctccgtgaccttaaccggaggctccaggacgtgctgctcctgaggcttggcagcggtcccgccattgatctggaaaaagtaaagtcagaatgtctcgagcccgagccggagttacggagcactttcagtgaggaagcaaatacgtcgtcctattaccccgctcctgcgcctgtcatggacaagtatatcctagacaatggcaaggtccatctgggaagcgggatttgggttgatgaggagaaatggcaccagctacaagtaacccaaggagattccaagtacacgaagaacttggcagttatgatttggggaacagatgttctgaaaaacagaagcgtcacaggcgtcgccacaaaaaaaaagaaagatgcagtccctaaaccacccctctcgcctcgcaaactaagcatcgtcagagagtgtttgtatgacagaatagcacaagaaactgtggatgaaactgaaattgcacagagactctccaaagtcaacaagtacatctgtgaaaaaatcatggatatcaataaatcctgtaaaaatgaagaacgaagggaagcaaaatacaatttgcaataaactttggatttttcat

SEQ ID NO: 223371 - DNA, 1000 bp, Homo Sapiens; identical to SEQ ID NO: 118029

SEQ ID NO: 223372 - DNA, 1000 bp, Homo Sapiens; identical to SEQ ID NO: 118030

SEQ ID NO: 223373 - DNA, 1000 bp, Homo Sapiens; identical to SEQ ID NO: 118032

SEQ ID NO: 223374 - DNA, 1000 bp, Homo Sapiens
cattgaagacactgtgagaagttgtgtagcaaagttgttcttcacctgctccctgaagggtcattactgcctatacagtaagtccagttttattctcatcagccaagaacctcagccatggatccagatcatgtttctatttcagcagagcctgtttcctgaacccctgtccattcagagtcattctgtgcaattcctcagagctctgtgggagaagacccaggcagggggtgctcacagctttgaaactgccatgatggagtccacgtttccacagcagaaggatctggaccaggtacagctccatctggaagaagtgaggttctttgacgtgtttggcttcagtgaaacagcaggagcatggcaatgcttcatgtgcaacaatcctgagaaagcaactgttgtaaatcaagatggccagcctctcatagaaggaaaacttaaagagaagcaagtcagatggaagttcatcaaaaggtggaaaacacgctattttacactggctggaaatcaacttctgtttcaaaaaggaaagtctaaagatgaccctgacgactgcccaatagaactcagcaaagtacagagtgtgaaggctgtggccaagaaacgcagggaccgctctctcccccgggctttcgaaatcttcacagacaataaaacctatgtctttaaggccaaggatgagaagaatgcagcagaatggctccagtgcatcaacgtggcagttgcccaagccaaagaaagggaaagtagagaagtaaccacatatctgtagggatttataagtcagccatgacaattatacaccacaggcattgtattatcattgccaatgtcaagaaaaagagctaaatttaccaagccatgttgttttttactaaataccaatggaattgttgtcctttaagaagaagggcctaaaatggcaggattcttagtaaatgtcatactctaacagctttagtattgacttcagaatatatctgatgcccacaaaaat

SEQ ID NO: 223375 - DNA, 1000 bp, Homo Sapiens
atttctagtactgattacctcagtactttgctactagataggatagcctcagtggctgttcagcagattgaaaagatccatccttttacaatccctgctattattcgtccattcagcgtattgaactatgatccacctcaaagggatgaatttttgggaacttgcgtgcaacatcttaattcttacttaggtatattggatccttttatattagtgtttcttggtttctctttggccacacttgaatattttccagaagatctgctaaaggcaatttttaacatcaaattcttagctagattggattctcaacttgaaattttatctccatctcgaagtgcaagagtccagtttcatcttatggagttaaatagatcagtctgcttggaatgccctgagtttcagattccatggtttcatgaccgcttctgtcaacaatataataaaggtattggtggcatggatggaacacaacagcagatttttaaaatgttagcagaggtactaggaggaatcaattgtgtaaaagcctcggttcttacgccttattaccacaaagtagattttgagtgtatcttggataaaagaaaaaaacctcttccgtatggaagccataatatagcattgggacaactaccagaaatgccctgggaatcaaatatcgaaatagttggatcaaggctgccaccaggggctgaaaggattgctttggaatttttggattcaaaagcactttgtagaaatatccctcacatgaaaggaaaatctgctatgaaaaaacgacatttggaaattctggggtatcgtgtaattcagatttcccagtttgaatggaactctatggcactgtcaacaaaggatgctcggatggactacctgagagaatgtatatttggagaagtcaagtcatgtttgtagtttttatttaaaatgaatgtcatcgtgtgttacatttggacctattttaataaagggcctgtctcaaaaaaaaaaaaaaaaa

SEQ ID NO: 223376 - DNA, 1000 bp, Homo Sapiens
tggaagaatgaatctggcacatggattcagtatggagaagagaaagacaaacggaaaaattcaaacgtcgactcttcatacctggagtctctctatcaatcctgtccgaggggagttgtgccatttcaggcgggctcacggaactatgagctgagtttccaagggatgattcagacaaacatagcttccaaaactcaaaaggatgtcatcagaagaccaacatttgtgcctcagtggtatgtgcagcagatgaagagagggccagagtaagtgttctgaagcagctgtttgctgacagatgcttgagatgttcatgccctgggctcatcaagtcactcgtgaatctggagcctgttttcctgaaaagttcctgtttgcattactctgcagtttccatttgcattatcgatgagtaagatgcttgttaagcagcatggtgtgactgaaaggatactagatcggaaaatgaattttctttctgaaagggaagtctgagcgagtctcctaaatactctgggctttagcttctccagctgtgaagagctggattgatgcagtacacctaaggaataatcatatatactgggtttttgttttgctgtggattcttttttttttttttttttttagagggggtctcactttgttgcccaggctggtcttgaactcctgagctcaagtgatcctcctacctcagtctcccaaagtgctgggattacaggcatgagccaccgtgcctggctttgctgtggattcttttgggtgtcttttgttttcctacacgatttatagaggatgaggggcggagaaagagatagaaaaaagggatgagctagctgttagagcaagggttttggtgagagataatattgattgaagggattttaaaggaaatgttgctgtgggggattcattgtaactctccttgtgaactgctcagtaaactctacattgttcatgaacaaaaaaaaaaaaaaaaaaaaaaaaaaaaaaaaaaaaa

SEQ ID NO: 223377 - DNA, 1000 bp, Homo Sapiens; identical to SEQ ID NO: 118034

SEQ ID NO: 223378 - DNA, 1000 bp, Homo Sapiens
caattctcctgcctcagcctcctgagtagctgggattataggcatgcaccaccacacccagctattttttgtatttttactggagacagggtttcaccatgttggccaggctggtctcgaactcctgacctcgtgatccacccgtctcagcctcccaaagtactgggattacaggcgtgagccaccatgcctggccagaaatctatgttttcttagaacatgtggaagaaggaaaaagacaaaaaaggaaatctggattctgaggaccacgtctcacccagggtgacatcaggaatggtgctagcctctgcaacacgacacccagtctgaagagctctatacaggtactaagactagcaggggacaccaagactctgcacaaccagattgcttgtgcagagggccacaataagtgtatgttttatattttattgtattatttattcaaaaataaataatacactcacatgtttccacacccaaaagatatatagagtgaaaagtctccctccaatccttattctccacctgctcagttcctgtctaccctggcctagaggtaaccactattctcatccgtacatccagcatttctttatggatatacaagcaaatgggaatgtagagtctcacattctctctttatacacaaaagttagcacgttatacacatgttctgcaccttgcttttttcccttaacaatctatcttggagacatttcatatcaattcatatgccatttgttcatttttttcattgtataaatgtgttataatttatttcgccagttccacaatgatgagcatttggattctttccaatcttttgcaatgacaatcagctctgcagtgaataatcttgtacaaatgtgcaagcataaagtgtatctctaggataaattcccaaaagtggaattgcaggatcaaaaggtacatgcatttgtaaactattattgtttagtgagggtctttttaattaaagaattaacatgaattgcct

SEQ ID NO: 223379 - DNA, 1000 bp, Homo Sapiens
ttacaggtggaaatagaacccacccgaattatctattgctacctcgggattgctgaggtcaggactctacagcagtgcttatttttacatttccaagcgaataccaaaaccttcagcaaagattgggttggtattaacgggtttttgtctcagaactgtattgtggatcccggagtttcccccaaatccatctacatcaaatttgtagaagtagagagggattttctttccgcaggctctttagttgagtgcctggaaaaagccattggataccccttaaaatttaacaactgaatgtcatccttcataaggatttgggctcttagctccttcttctctactcacttcccattacccggaccacccctcatccagatgccgccgtcagactcttcatggaaaccctttcttcaattgggccagtacgacttctaaggaatcatagtagacttgggccagaaaaaacagacctcacctgaaaatgctcattttgagcaagcaagatatatagcgaacttgcatggtgggtcagctatttcttttttaaaaacagaaaaacaatttttaaatggattttagagccctaatataaacaaatgtaggtacattccatattggacaaaacttatactttgagtttcatatgaaattgaaaaattgtatttttttcacaatgtttcatttttacacatctctatgtctctatataagtaatatttacaaccctgaataaataagcaatagataatggcaagttaaatcttgattcacagttaaaaagactttttcaatatcacccttagctactattgtatataatttagattttcatttttttcaccagccaagtgttttgctatttccaatcagtattgcttgcagagacctttgtttctgtgatgtaccaactttacagttgtgttgccatttaaacctttttttaaaaaaaaaaaaattaaagtaattcctggccaaaaaaaaaaaaaaaaaaaaaaaaaaa

SEQ ID NO: 223380 - DNA, 1000 bp, Homo Sapiens
gtagggggtgaggcttctgaccccaaatacatcactgatcgccggttccgccccttccagtttgggtcagctaaggttttgggctatatacttcggagtggattgagcccccaagaccaagaggaatgtgagcgcctagctacccctgagctccagtacaaggacaagctggatgccaagcagttcccccctaccgtctcactgcccctcaagacttcaaggccactctccccataaacatcagactacagatttaggtggaagagcagccatgtttgaagggcacatgtgatgagtggggggcagcaagatgccatttctgcatctcccagaagggatgagtctttgtcccgatgcaagccccctcttcgctgggctcccagcagtgcttccctcctccaccctccactcattttgttctttccccccaacttttttttttttttgaaacggagtcttgctctgtcccccaggctggagtgcagtggcatgatctcggctcactgcaacctctgcctcccaggttcaagcgattctcctgcctcagcctccagagtagctaggattacagatacgtgccaccatacccggctaatttttatatttttagagacagggattcaacatgttggttaggctggtcttgaactcctcacctcaggtgatccacatgactctgcctcccaaagtgctgccattacaggcgtgagccactaggcctgacctccccttcccctttcctgccccaaggcagatccacatcaccgaagctccctagaggggcaaaagatggagtgagccacaggaagtttggggcgtggtgagttggaatgatacgtccatttctctatgaaatatttgctactagactgttcatttctctctgacatgtttgttgaatgaataaataatttgaaacttaaaaaaaaaaaaaaaaaaaaaaaaaaaaaaaaaaaaaaaaaaaaaaaaaaaaaaaaaaaaaaaaaaaaaaaaaaaaaaa

SEQ ID NO: 223381 - DNA, 1000 bp, Homo Sapiens
gtggcgcgatctcggctctatgcaacctccacctcctgggttcatgccattctcctgcctcagcctcccgtgtagctgggactacaggcgcccgccaccatgcctggctaattttttatatttttagtagagatggggtttcaccgtatgagccaggatggtctcgatctcctgacctcatgatccacaagactgggtaatctgtaaagaaaagaggtttaattggctcatggctctgcaggctttacaggaagcatggtactggcatctgcttggtttctggggaggcctccggaagcttatagtcatgacagaaggtgaagggggagcaggcacatcacatgacaaaagcaggaacaagactcagagcaagaagtcacttatcaccaaggggatggcccaggccattcatgagggatccacctttgtgctccaaacacctcccaccaggccccacctccagtattggggattacatttcaacttgaggtttgggcgggaacaaatagtcaaattatattacccatctacatggttttctttttcttagtatgggagtgtccatgaataaattcatgggcatcctcataactcttccatgaatggcaaggggtacttatggaaaacagttttccaaagatctgattgttttgaaatgtgttagattggacttgttcaaatgttcatatttttgttctatgctaaatgcatcgttaggggagtagtggtaaatattccagaatccatatgaaattcatgagtttatttatgtctaaaacactgaaaactgtgtccaatatcgttcagtttcctgggtctttttcttattagcacatttgagaaaaatattcctttcctttattgtagtaaatctattaaaggcaatagccaataaaacatttttaattttaaaaatttactgtgtttggctttctgtaaatgtagtaggtctgttaaacaaaatattaaatttccatagtaccagaaaaaaaaaaaaaaa

SEQ ID NO: 223382 - DNA, 1000 bp, Homo Sapiens
ctttgctcagagctcagaattcagtggggaccagagagcctgcaattggaaatatgagaaattctttgcccagagagctgccctaacagaacacttcatcctcactccaacgagaaatctacagatgcccagaggttttgaaaacttaccgtctgagctcaaatttgatcactcacaagaggattcatacaagtgggaaaccttagaaatgcactgagtgtgagagagctttctactaatgctcagcccttctcgttgtaagagaattcacaccggagaacaactttttaaatgccttcagtgtcagttgtgctgcagacagtatgaacatctcattggacctcagaaaacccaccctggggagaagccccagcaagtgtgaaaaaagcttctaacaaaactctgacttacccatcagagaagccatactggtgaaaaattgtatatttgtcttaagtatggcaaaagcattcgttggagagccttacttgggtttgcacccaaaaaaaaaaacccaatctgaggaaagactgcaagtgtctgaatgaagagtgcttgtcaatgatcaactcttgtggtacatcagggaactcacataggtgaaaaaacccatacttaccttgagtctgagaaaacctttggtagaagctcctgtcttatcaggccccaaaaaacctgttctgcagtgagagatttaattgtgggtgagaatctatgtacatataatatgtatgagaagactgttctcatagttagttgactcatatggtagagaggactttacatgaaatcagtatgaaaatagttttttagatacccagaagcttgttctgggagaagctagggtgggtcagagtagacctgatgggtaactcaggtaaagatgcttttcttttatctgaactacttaatgattgctttacttttactttttaaaaaattcagaaatccaataaaggaaaggacggtaaccttaaaaaaaaaaaaaaaaaaaaaaaaa

SEQ ID NO: 223383 - DNA, 1000 bp, Homo Sapiens; identical to SEQ ID NO: 118038

SEQ ID NO: 223384 - DNA, 1000 bp, Homo Sapiens; identical to SEQ ID NO: 118042

SEQ ID NO: 223385 - DNA, 1000 bp, Homo Sapiens; identical to SEQ ID NO: 118046

SEQ ID NO: 223386 - DNA, 1000 bp, Homo Sapiens
tcagagagaactgatatgaaaactttatcaaggaaacactggtcacctgtacaggattataaatgttcaagttttgctaataccagtagtaaattcaggcatttgctaagtaacgatggatatccattcaaatgagagacctaaaatatattaacattttaattaagaatacttgatcaacattttttgaagttcaatttaccatattttataaattgcgcattctgcacagtggacaagtttgcaattctgacttattaaaatttcaaattctgcatatcacaaaatctccttatacttttggtatggcttgcagcatttatgagttttccaaaatatagaaagcagtaggtcagtaggagcaaactagccaacaggtactgtctttgaatttactactgtaagactaagcagtgttactggacacagttttaacttgttcaatctgcttcaaaaacaagaaaaacaacaactatgagttatcaaaatattgactccatttatgactagactacatttctgaaagatctttggtttacgattcttaagaatattgacaatacctataaaactttgaagataacttttacttaaatatgaaaattatagtttgaaaattaggctcaagcaaatatcaaatactgcaaaaatccccttgtcccaggataccctaaaatagaagtatattttgatgtttgtttattctacctcaaacagaggcttaagttttgaagtgtaaccagtttatacttcattttatacaaaacttattgctgagaagtctgaatattgtgctttttgttgtttgtaaatagaattgaatttaaatacaccaggataaatcttatttaaaggaagcctgtttgaaaatcaccaactttaacttattgcttatataaatccaagctctgtacctgatctttatgtaaagcaagattcatatgtgtagtatctaatgccctttggtgttacatttgactaaaatacaaatgtctgtatt

SEQ ID NO: 223387 - DNA, 1000 bp, Homo Sapiens
caggcaaaaagatctgaaacattagtttggggggccctcttcttaaagtggggatcttgaaccatcctttcttttgtattccccttcccctattacctattagaccagatcttctgtcctaaaaacttgtcttctaccctgccctcttttctgttcacccccaaaagaaaacttacacacccacacacatacacatttcatgcttggagtgtctccacaactcttaaatgatgtatgcaaaaatactgaagctaggaaaaccctccatcccttgttcccaacctcctaagtcaagaccattaccatttctttctttctttttttttttttttaaaatggagtctcgctgtgtcgcccaggctggagtgcagtgagctgagatcgcaccactgcactccagcctggttacagagcaagactctgtctcaaacaaaacaaaacaaaacaaaaacacactactgtattttggatggatcaaacctccttaattttaatttctaatcctaaagtaaagagatgcaattgggggccttccatgtagaaagtggggtcaggaggccaagaaagggaatatgaatgtatatccaagtcactcaggaacttttatgcaggtgctagaaactttatgtcaaagtggccacaagattgtttaataggagacgaacgaatgtaactccatgtttactgctagaaaccaaagctttgtgtaaaatcttgaatttatggggcgggagggtaggaaagcctgtacctgtctgtttttttcctgatccttttccctcattcctgaactgcaggagactgagcccctttgggctttggtgaccccatcactggggtgtgtttatttgatggttgattttgctgtactgggtacttcctttcccattttctaatcattttttaacacaagctgactcttcccttcccttctcctttccctggaaaaatacaatgaataaataaagacttattggtactcaaaaaaaaaaaaaaaaaa

SEQ ID NO: 223388 - DNA, 1000 bp, Homo Sapiens
cagcacctgggactcatctcacccaatgtgcagttgtctgccagccctgggtctggaatcgttcctgtgtctccaagaatagagtctgttaatgtcgcaccagaaaatgcaggcactcagcaaggaagggccaccaactatgactcaccagtcccaggccagagccagccaaatggacaatcagttgctgtgacaggggcacaacagcctgttcctgtgacacccaaagggtcacaattagtggccgaaagtttcttccgtaccccaggtggacccaccaagccaaccagctcatcctgcatggattttgagggtgctaataaaacctccttaggaactctctttgtcccacagcgaaaactggaagtctcaacagaggatgtccattaatcaacagatgttggcttagtttaattttctaaagagttgtttaatagagaaaatgtacacagactgatttggagaacacattctctgaaaatactgtaaatacgttggggatttgttcaatgtgaaatcagatagttgttttcatacatatatatatatacacacacacacacacacacacacacacatatatttgtataaagctaagtttagctttcaatcctacaaaataaaagtaaaatgttgaactctaagatatattaacttctagggggaaaaatccattattttagctatgcctatactattatgcaaagtaactgtattaaagtttacttccctctaagcaaatatgcttgacatgcctaacacagcattcccttaaacattttgcacaaagaaaatgctgtgtgatgtataatgttgtatttttaaataggggtatagctatattttttgtaatttctttaatctgttgttgcagtgtatctttttgtaaagtttgcaacaatcctcaatcaagtctatggaaaaattatttataaaatgtatttttaatcataagttgttcaaattaaaacttttctaaaaaataaaaaaaaaaaaaaaa

SEQ ID NO: 223389 - DNA, 1000 bp, Homo Sapiens
gaggtggaacaggtgcaggtggaggcagatgcacaggagaaaggttcccgtccgcaccctctcagacctgaggctgagcttgcagtgagggcttctcctcggcccctcgcccgcccccagagctgccatccctgctgttacaagccagaggcacccggatgtgaggccccagatcacctccagggacttggggttcccatctgaaatcctttatttttgtaccatggggtgggccccgggcctgagaaggaagaagcaccctctccccggcctcctctgtctgcacccgtggggctgtgacttactcctgcctccaggggcggggcggggcccccctgggacctcttaaggcccaaggtgggccccaggacctctgggcagagtggactgctcatggcagatgtgtggcaatgtctggctgtgtctctccggcacctgcgtcccctctcccgggctcccctgctgcatggtggatgtgctccttcctggcccggtcacattgcctccttgagccttagtccagggggtcactcctcccaccccacctacctcacagggttgttgtgagggtgcacagaggagcaaagtccctgaaggccctcaggcagtatataggggccgcccaccttcagctgccctgggatgggaaggacccagcccgacccctgggcataacactgtgtttgcaaatggagattcaggtattggggatgcaggttgtggggagctggcctggcagagtaggggtagttggcttggccttctctttggtgatcccacccccagccatttgcattgctggcccagcgcctggcctggggggcggggagaggcagcagaaggggctgggcaggggcggtggaggactcaggaactgcccggggagagtgggtatggcggctgagccaggggccctcctgtgtttgacttcccgggatgggtccttgcttctcagctgtgtccgaccccaccatgtaataaaacccaaaggaacagccca

SEQ ID NO: 223390 - DNA, 1000 bp, Homo Sapiens
gtaactttaaaagtctttagaagaagcacactaaggtcaccagaccagatacaaatattaaattactttatggaacaaatctagaggggaagccaagatttggctaagtgtgtctgttttttccctattttatgcctctgtgtctcagctctgtgttagcctatgtgtttaggggagggtttttctttatagctcctttttactctcctgtatctttttcactccagccctccttcatcgttacatgtttagttcatagaatcatttaatctctgatttgggtgggcttattctaattgtttttaatattgaatacattatttgcattaattttccctactcatactttgtaaagctgagtaaaaggctcaaattatttttttcaaaaagcataaaattaaattagcagtgagtaaaaggctcaaattttttttcaaaaagcataaaattaatttttacttttatgtggtcattggtttactgccacttcatttggaaaacttggatagattttcgcctttgatatacctttgaatatatgttacctgaaatataactgtgcattgttaactctttcatttctgtagtaaaaggttaatactagaaaggatatgcaattaatactttgattttctcctgaccccaagagcttgtaaggatatgtcatgtatttactggtttttcttgtatctggtgcatagccagagttccacagtaacaaataatttgacaatttttatttctaatgtttatttctgttttatttttaatttttatttctaatttatttcatttacaaatgttcatattttaaaaacttgtcaatgtaaataatatgatgcatcttatcatggacaaggacagtgttttctacctttatcagttctctgtaatacccaaaacagtgctgtatttactccaagtattcagaagtgcttgttgaataaaacagtgttatctttaattcattcctttaaaaaaaaagaaaaaaaaaaaaaaa

SEQ ID NO: 223391 - DNA, 1000 bp, Homo Sapiens
atttatttcaaagaattgatttacatgattgtggggattggcaagtccaaaatccatatggtaggcctgcaatctgtaaacctttgggcaggagctgatgctgtagtttgcagatagaattccttgttccttaaaaaaatctgtttttgttcttaagggctttgaatgattggatcaggcccacccagattacctagataatctcttttacttaaagtaaactgattgtaggtgctaatcacatctatgaaatgccttcacagcaacacctagattagcattcaattgaataactggggaatacagcctagccaagttgacacataaaattaaccatcacagcaacatgcctgctaaattttatcgaccgtcttcagactgttaaggattgtggtagagaactgtgacagccactctcagcatcaccctgaaccaaaggcccctatcaagtaacaatatagccaagcaaaattccagtcaatagagacattgactggttggctggcttcccaagggatagcaccagacaagaaatgcaaggatgaggaaaccaggcacgggagagggaggggcaacagaggtccagggtttggttatctttttatttttcactgggaggtggtaagttagccctgttgcccatgtatgcagatgggagaagtgatttagaaactccaaagcaattggtaatccccaaaatgggtgtatctggtttgaaatgaaaccttattttattggaaatggttggtttcccaattctgtttgccattggccaatataattgtgggtttgcacatggccagcacatgccaaacagaagtagacaaaggtctcactctgtaagtgggaccttggggaggagctgcctccatcataaagggaggggttagtaaaaatggtctcttaagcctgttcctgctacagttatagaggttgctcagaaccttctcagcaaatatagcagttatctattgttgtgtattaaaccatttcaacacat

SEQ ID NO: 223392 - DNA, 1000 bp, Homo Sapiens
cattttaaaaaacgtatttaacagaagagagcaaataaagatatatcaggaaggatgtattagttatttacttaaatgtttataatatctggattttttttgttttgttactcatagaactggtgttgtttgctgtttttatttctctaattgttgcagagttctgcctgttacaaagctacagaactgtattgtttttattttccttcttgagcacatgttaacaaactaagcttcacattagagtgatgtcataatgtaaaatgtttgcattgtggttaggtattgaagtttatgtcctgtctgtgtaaagattcatcttttattgtaaatatttagactttaccacagaaatattggaacagtttgctttataagattaaaaagcatccttcagaatggagcttgccttgtgcttagaaataatatgttgaactattttgcaatatactatttttaaatctaaattctgtcacttcgctgcctttttaaaatagtgtggtatttcaaatattgctagagctattttcctgaaatacatttgcaaaataaggctgctttgtaatcaaggaatatttttattgattgaaggaaatgactgtactgcgattcaaaagtaaacttattttattatacagattatttcttaaaaactctatttataccttaacatgaaatccatgaccacaccaaacttggttattcataatttttcctgttaaatataaaacactgtaagttaaaaacagtaatgccaacattgaatttatttttgaggtcaaagaaccagttgttctctttatatttagatgaggatgattgagtccatatactatgtatgtttacatatactatacatgcacattaggtgttttcatttgtgttttgcttatgaaatgtcatttaaagttcacttcttgagcatcaataaaaagggaagctgtgtggttttggaaaaaaaaaaaaaaaaaaaaaaaaagaaaaaaaaaaaaaaaaaaag

SEQ ID NO: 223393 - DNA, 1000 bp, Homo Sapiens; identical to SEQ ID NO: 118051

SEQ ID NO: 223394 - DNA, 1000 bp, Homo Sapiens
gcgaggagcagaagcagacggcagccgtggccctgtgccagctggcggcctacagccccaggaacatccgggtgggcgatggggatgctgcggccccggaacctgcctgccggcaagacacacccacactgagctccatggagagccaagaggcccagtgtgacctcagacccaaaggacaaaagaggacaagtctaagggatgctggaaaatcccagcaaggagctaagaaggcgaagctgcaggacacggccagagtgttcacactacgaaggagggcccgggtgtcctaacgccgggttcacacgtgtgttcacagagctacggccacacacacgccttccaaggtggcaagctacaacacctctgaactggcactttcacatttttacaaatgcagctgctgcttctcaaaaaaacaaacaaacaaacaaacaaaaaaccctccaattcagtttttataaatattaagcatgaatattaaaaggtgcttctacttttggttgtaaaaacacctgaatgactctaagactgatatgtattttcaagtctaagctgtcttacagaagatcttttataaatgtttccttataaatatctcaccattacaacaaattgttttaactgtttttctattagctctagctgcatatttgatgtaaatgacaattactgaaaaaatgtcagaaaaaacattttcagtactaacattaaagtgccatatgtaaaaaagaaaaatgtgatttgtataactaaataacacacaaacatcaagaggctatttatacaaataatttatttccactagggaaagtgcattactggtgaaggtattatcaatttattctacttgcttataatgttacagtgaatgttctggcttactctgcctcactttccattccccaaaatgatgtgtatgttgctaattttccaataaactcatatgaaccataaggaaacataaaatgcaaataaacataaatctatgttatccttt

SEQ ID NO: 223395 - DNA, 1000 bp, Homo Sapiens
atgttacaccatcattgtcgaaggaaccctgagctccaggaagagttgcagattcaggccgcggtggctgctggggatgtccacacagtgcgaaagatgctagaacaaggctattccccgaatggccgagatgcgaatggctggactctgcttcatttctctgcagcaagaggaaaggaaagatgtgttcgggtttttctagaacacggagctgatcctacagttaaagacttaatcggaggcttcacggctcttcactatgcagccatgcatggccgggcccgcattgcacgcttgatgttagaatctgaatacaggagcgacatcattaatgcaaaaagcaatgacggctggactcccctccatgtggctgcccactacggcagggactcatttgtccggctcctcctggagttcaaggctgaggttgacccactcagtgataaaggtaccacaccgcttcagctcgccattatccgagagaggtcaagctgtgtgaaaatcctcctggaccacaatgccaacatcgacattcagaatggtttcctgttgcgatacgccgtgatcaaaagcaatcactcttattgccgaatgttccttcagagaggggcagacacaaacttgggtcgcttagaagacggacagactcctttacacttatctgcccttagggatgatgtgctgtgtgcacggatgttatataattacggagcagacacgaacacacggaactatgaaggacagaccccattggctgtttcaataagtatttctggaagtagtcgaccatgtttggatttcttacaagaagtcacaagtatgtaatataattattactttattgcattttttaaaaatttgcatcttctgaggagcttaatgtgtttttgcaacttaagatgactagatattaatcattcctataaccactgcttggtaagcgatgcctcattcttctgaaataaaaaaaaaactttgactgtaaaaaaaaaaaaaaaaa

SEQ ID NO: 223396 - DNA, 1000 bp, Homo Sapiens
catacaaaggaggcctcaacgctcatgcttctctaatcaagccctaccaagacagacagaaagacagacagaaaaaaggaaggggtagaggagaaggttgaagctgtggagctagactctgcttcacttcctgaagcttcaacttcatgtcgaagattcactgggacccaattcctgcattgttaatatttgtgaggaaaagtgaaacaagtgatctggttttagcccagatgatgaaagtggatatggcacattttcacacacgtgagataattacagcttgccccacaacactgggtgttggagaaagggagagatagtcataagtggaagaaaaagccaagcatagtgagtgggaaagagagtgagagcctgtgcaggctgctgacgagccccaggcagcccacaagtttctcgtggggagatggaggcagagcccagggtaggggacagagctgctggggcctttccttgcctgggaatctgtcccaggaagagcttccccactcccatcccccaaattggaaaaaccgtacattcaagcctgtttggccctgaaattcttaagaatctggttaagaattaactcactaatgtcaaaagtcaaaacctcctaggggttgtcctgggagtcaggttcacgggtacagaagatgaatctcagatgtcactcaacctgagccgtcattctctgtggcagggctgccctgggtttctcttactcaatccctggagtgtaagcatttggattgtgtcacagattacctttttaccttttctttctttttttttctttttttcaatatcagtgcccacaccttactgagtattgagttttagagctttcgcttgatgtgcttgaccaagagacttcttttgtatccttttcttgtcctatgatgtaaataaaagcctcgatttatgtaaaaaaaaaaaaaaaaaaaaaaaaaaaaaaaaaaaaaaaaaaaaaaaaaaaaaaaaaagaaaaaaaaaaaaaaaa

SEQ ID NO: 223397 - DNA, 1000 bp, Homo Sapiens; identical to SEQ ID NO: 118054

SEQ ID NO: 223398 - DNA, 1000 bp, Homo Sapiens
agatgtttcaaagagaatttctcttagtttagttaggtgtaattcagtagctttaaattctcaggtcagaacataacatttctcatttgttaaaagcagcaagaagcctggtaaaactgtgacttttccccaaacgtcaatctttattagaaagcattttctaggtgtgtttagtgtacaaagagactttataacccttactggacaacacacagatccttgagctcacgctgcaggatagtacagttttaccgcagagggaatctggaacagtggaatcatgtgtctgccctgtgtattgcagtttgtattgccacaagctatatttataccagtgtcacccttttcttgtagaatatactaataatctgtgccaactctaccttctcacttttacctctgacgtcattctttttttctgaaagaggtaataattctagttttgatagactctgaggattatgtgaacaggacatttttcatttgtgaatttaatgctatactgtcaaggtacttgcttgtgtctgaactctagtgcacttatgattttgtagaccatgtgaaatttaataagataccttttttttcctttctttgtgtgtagtgcagcaacagtttggtctgcatttgttagaagtttaactcctaacaacccaaagacctatttaacaattggtgcataaatgaaagtagtactgtatacttgaaactgtttaagtacaagttgaacaaaaattatgaaaaggtatatttgcttctcgggaaagcaaagaagctgctttaaaaaataaaaaggggactaaaaatttgttttgtataaagaggttagccctgcgcacgtaggactgaattcagtgatatccctatacactgccatttagtggataggttattgtacttccattcatactctgggcacttgtgttgtattgttctgttacatactttttttaacctgttttgttttatcatatatgcattaaaagtattatctttatca

SEQ ID NO: 223399 - DNA, 1000 bp, Homo Sapiens; identical to SEQ ID NO: 118056

SEQ ID NO: 223400 - DNA, 1000 bp, Homo Sapiens
cagccaggtccccctccccaccccgccgcaggagactggccgtccctgccagcctcgacgtttgtgacaactggcttcggccggagccccctggccaggaagcccgagtgcagagctggaaggaggaggagaagaaacctcaccttcagggcagaccagggagacccttgtccccggccaatgtccctgctctgcctggcgagacggtgacctccccagtcaggctgcaccccgactacctctccccggaggagatacagaggcagctgcaggacatcgagaggcggctggacgccctggagctccgcggcgtggagctggagaagcgactgcgggcggccgagggagatgacgctgaggatagcctcatggtggactggttctggctcattcacgagaagcagcttctgctgagacaggagtcagagctgatgtacaagtccaaggcccagcgtctggaggagcagcagctggacatcgagggcgagctgcgccggctcatggccaagcccgaggctctgaagtcactgcaggagcggcggcgggagcaggagctgctggagcagtacgtgagcaccgtgaacgaccgcagtgacatcgtggactcgctggacgaggaccggctccgggaacaagaggaggatcagatgctgcgggacatgattgagaagctgggcctccagaggaagaagtccaagttccgcttgtccaagatctggtcaccaaaaagcaaaagcagcccctcccagtagtagccagtagggccgtgggctcggcccggacctggcatccggatttggactcggggccatgggcttggcccggacccggaacccggacttgtactcggggccgtgggctcggcccggacccggcattcggacttggactcgggaagggcctcctgtccctacaaggggcatgtggacagcagggacctgcgctaccgtctgtggtctcaataaagaaaccgaccacatggaaaaaaaaaaaaaaaaaa

SEQ ID NO: 223401 - DNA, 1000 bp, Homo Sapiens; identical to SEQ ID NO: 118057

SEQ ID NO: 223402 - DNA, 1000 bp, Homo Sapiens
aatctttctgcaaagtttaccagaaaattattttggtgcccagaccagactatgcttccagatacgttctgtggaagcaaatcattgaacgcaatggaggagtcctcaccagtgccttgaatgtcagctgcctggcgaaggtcactgacggcttcacccaaggacatatagtcgaagtggttaaaggcgtgctcacagatcagagaatccggcggcaaattcataaacctctcactgcagttgagtttattacggcgataaccagcatgaatccagtgtacaaagaggaagaagagagctttaagaactggtatgccaaaactcctctgggtaaaaaacgtgccttggcgataacaggaggcagcacagaaaaggcaaaggacaaagggaaaaggaaataaaagaaagagaaaaaggcaaaaaagaaaaagtaatgcctttctgaagaaccatgcttgagtctctctgggatggagaggaccccaactcgccaaagaaaagattcaccattgcccgcctgaagaagccctcaggggaaggaacttagcagtgtgcaggtgagctgatgccgcaaacccgctaaccactgcatgtgctgttatgcctttcccaggctggacacctagctgggtgttcatcataactttccacagctttaatccacgccaagtttgtatataactgaaattcactcttgacaccctccacagtctttccaagttggactcttcctctcatcagtactagttgtcaaatttaaaatgtgacagttaaagaatattctagtttgacaattagtaagcaatgagtatatcatcagtacactagctttttattaatccatgtacactgtatagtatcttgcatctattttaataaattaattctttgctctagtaatagattttatataatgaaataaaggtgttgtccttgaaaaaaaaaaaaaaaaaaaaaaaaaaaaaaaaaaaaaaaaaaaaaaaaaaaaaaaaaaaaaaaa

SEQ ID NO: 223403 - DNA, 1000 bp, Homo Sapiens
aactgggaaaggactgttcattgattgtaacctgctgtcatcccaggtggcgtgtttgtctcacatagctgcaaattatcttattggtcaaaaggaagcaaaacgttggggtacagctcatggcagtatcgttccttaccaggcttttaaaaccaaggatggctatattgtagttggagcaggaaataaccagcagtttgccaccgtctgcaagatcttggatttgcctgagttgattgataattccaagtataaaactaaccaccttcgggtacacaatagaaaagagcttattaaaatattatctgaacggtttgaagaagaactgaccagcaagtggttatatctttttgaaggcagtggagtcccgtatggcccaatcaacaacatgaagaatgtatttgcagaacctcagaacgctgtctctggcttccaaagcctgctgcattccttggcccatggccccttccttcatcttcaaggatcagcaagggtattacacaatggcctcgttatggagatggagcatccaactgtggggaagatttccgtcccaggcccagctgtgagatacagtaagttcaagatgtcagaggccaggccgccccccctgctcgggcagcacacaacgcacatcctgaaggaggtcctgagatacgatgacagggccatcggggagctgctcagcgctggagtggtggaccaacatgaaactcactgacaaaggaaaagggctcttcctcataacctcgatccgaatacactggcaaaggcaacactttgcttggacccttctccccagttctgataccactaagaagaagatttagagtaactccagatttcttacatggcatctccagaatggctctggtattaatgaatctagtgccttttaaatgtatcccacgttttgttccctaccatcttttttttcagatgatgatttcattatggatttgtgggatttttaaaaataaagatttaatttttttcctgg

SEQ ID NO: 223404 - DNA, 1000 bp, Homo Sapiens; identical to SEQ ID NO: 118058

SEQ ID NO: 223405 - DNA, 1000 bp, Homo Sapiens
caacggaggggatgcggcctccaatcttctttataggtatgacccccgctgtaaacagtggatcaaggtggcctccatgaaccagcgccgtgtggatttctaccttgcctccatcgaagacatgctggtggccatcggcggccggaatgagaacggagcgctctcttcagtagagacgtacagtcccaagactgactcctggtcctatgtggccggcttgccaaggttcacgtacggccacgcgggcaccatctacaaagacttcgtgtacatctcggggggccacgactaccaaattggcccctaccgcaagaacctgctatgctacgaccaccggacagacgtgtgggaggagcggcggcccatgaccacggcgcgcggctggcacagcatgtgcagcctgggtgacagcatctactccatcgggggcagcgatgacaacatcgagtccatggagcgcttcgacgtgctgggcgtggaggcctacagcccgcagtgcaaccagtggacccgcgtggcgccgctgctgcacgccaacagcgagtcgggcgtggcagtgtgggagggccgcatctacatcctgggcggctacagctgggagaacactgccttctccaagaccgtgcaggtgtacgaccgcgaggccgacaagtggagcaggggcgtcgacctgcccaaggccatcgctggcgggtccgcctgtgtctgcgccctggagccacggccagaggacaagaagaagaaaggcaaaggcaagaggcaccaggaccggggccagtgaccctagctgcgcctcttgggaccatcctcaccgtcacctcccagggctctgtagaccagcagcaacttcttagtattccggaaacattatgtacaacttagcagctttttttacttttatgattcttggtatttctatgatatcacagtaaccaattaaatactatctgtaactttaaaaaaaaaaaaaaaaaaaaaaaaaaaaaaaaaaaaaaaaaaa

SEQ ID NO: 223406 - DNA, 1000 bp, Homo Sapiens
gggcgaggaattatcttccagccccccaagcagctgtgtcagcttggagacccttgggagtcacagcgaagaaggcctggatttcaagccctccccacccctctcaaaggtttccgtcattccccacgacctcttctatttcccacactatgaggttcccctggctgcagttttggaggcttatgtagaagacccggaggatctaaaaaatgaagaaatggatctcgaagagccagagggctatatgccagacctggactccagggaggaggaggccgatggctctcagagcagctccagttcctcggtgccaggagagagcctccccagtgccagcgaccaggtgctgtatctcagcaggggtggtgtgggtaccacaccagcctcagaacccgctccactggccccccatgaggaccaccagcaaagggagaccaaagagaatgaccccatggacagccatcagtcccaggaatccccaaacctggaaaacatagcaaaccccctagaagaaaatgtaacgaaagaatcaatcagtagtaaaaaaaaggaaaaaaggaaacatgtggaccacgtagaaagttcactatttgtagcaccaggaagtgttcaatcctcagatgacctagaagaagacagtagcgactacagcattccttccaggactagtcacagtgactccagcatttaccttcgacgacatactcataggtcttcggaatcggatcattttagctatgttcagttgaggaacgcagcagatctggatgacagaagaaaccgaatattaaccaggaaggccaacagctcaggagaagccatgtcactggggagccacagcccgcagagtgactccctgacacagcttgtccagcagccggatatgatgtattttattctcttcctgtggctcctggtgtactgcttgctgctcttcccacaactggatgttagcaggctctgatacgtgtgtctggataataaaaaagacaggaccctg

SEQ ID NO: 223407 - DNA, 1000 bp, Homo Sapiens
cacctgcatctggggacacactttggaaagtgggaccctccagcctggagaccccatggactgatgcctccactgctgtgtgccccatgttgtgttaacacctgcgtgtggggaccccatctgaggtcttggctgaggttggcatctcctgaagaacagagagcacggtgtccagagctggcccttcccccagcccacagccagctccgtgcccgagtgggcgtccccagcgagccttccctctctgccgcttgtccttgtgtctgggctgctccaagtccttgtgctgggcaccctggacacgtcctgctggtgagggacctcgggaaggtgacagtctgtgtgccttggtgtggagaccaacctgaggatgtcctgggaaatgttttcctgatgaatttctccttgactggcctttaaagaacataagaattcccattgcccagcctcagtgcatttggcaaatgcttactttgcttcccagagtcagagaattggcaaaggttcctaaatggtaatctggccggcctgggagaaagactcacgagaaaagccagtggagaaagcgcccttccagggcggcagcagcgggagccacgcagaccccgaggcgcacctgctggctcttgtgtgtggccccagtttctagcggcttttgcagcattagcctacaagctttgtcactccctgccctctgtggtggtcactgtttttctctcttgccaaatgaggcagtctctgagtgacggtgactgtggccttgaagcctggaggactgttgggcatgtagactggcaccttgaagattcaccattgtttaaataaaatcaagcaaatgcttttttaccaagagcccgagcctcgctctaagggacgcagtcctagaggcgtgccctttggggcttgaagagcacactgtgggacgcacgtgcttctgattaaaggaatctcagatctcaaaaaaaaaaaaaaaaaaaaaaaaaaaaaaaaaaaaaaaaaa

SEQ ID NO: 223408 - DNA, 1000 bp, Homo Sapiens
cttctcttcccggataagaagcagaggaccttccagccacccgcgacaggccacaagcgttccacgagcgaaggcgcctggccacagctgccctctggcctctccatgatgaggtgcctccacaacttcctgacagatggggtccctgcggagggggcgttcactgaagacttccagggcctacgggcagaggtggagaccatctccaaggaactggagcttttggacagagagctgtgccagctgctgctggagggcctggagggggtgctgcgggaccagctggccctgcgagccttggaggaggcggtgagcgggggagggtgcccggggcacacaaggcctgcccagccagccagactcacctgcccttcccgtgcccacagctggagcagggccagagccttgggccggtggagcccctggacggtccagcaggtgctgtcctggagtgcctggtgttgtcctccggaatgctggtgccggaactcgctatccctgttgtctacctgctgggggcactgaccatgctgagtgaaacgcagcacaagctgctggcggaggcgctggagtcgcagaccctgttggggccgctcgagctggtgggcagcctcttggagcagagtgccccgtggcaggagcgcagcaccatgtccctgccccccgggctcctggggaacagctggggcgaaggagcaccggcctgggtcttgctggacgagtgtggcctagagctgggggaggacactccccacgtgtgctgggagccgcaggcccagggccgcatgtgtgcactctacgcctccctggcactgctatcaggactgagccaggagccccactagcctgtgcccgggcatggcctggcagctctccagcagggcagagtgtttgcccaccagctgctagccctaggaaggccaggagcccagtagccatgtggccagtctaccatggggcccaggagttggggaaacacaataaaggtggcatacgaagg

SEQ ID NO: 223409 - DNA, 1000 bp, Homo Sapiens; identical to SEQ ID NO: 118060

SEQ ID NO: 223410 - DNA, 1000 bp, Homo Sapiens
tatcagtaaataaccagccgtcctctagtccttcaggacttctggatacaataggaagtgctgtaatgaataataattctctactgcttggtcaaagtcatagccttcaaagagatacatgcttaacccaaaacaatagtactgcctccaccatgggtaaccttccagaaccagatcaaaatctagttgcaatggacgagctggtagaagttggagatgttgaggatacagggaatctggaaggaactgttcatcggattctgttgggagatgtgcagactattccaatacagattatagacaaccactcagctcttattgaagaaaatccagaaagtaccatttctgtgagccaagttaaacaagaacccaaagaaccagcattgtctatggaagcaaaaaactgtggactataagaaattatctgctacataaattattgaagcttttcagaatttacaactctggtgacttctgatgtcttagaaaggaaggtgaatatagtcaaagcgtggcattgagataattggactgaagaccagtttgatgagaagcttttatttaaaactgatatatttgttgccagttccatatttttaccttccttaagagatgttttactcttcttattttgtataatttttatgctctttgattatctaataaggccagtatttcaaaagctgttctgaatttatccacagtaatatagtctgaacacaaatagtttacttaacttatccttggaaatattcaattttggttattacaaaacagaaaagaacaacagcaacaaaaacattgtgtgaatatatgtttgtatgtgtgtatgtatatcatgaattttttttttaagttctgaaaaagaacttgttctctccttaaagttgtgaagaaattgttaattgccagacaggtaagaaaatgtttataatctatctcattaagaaagatgaagtattagattttacatcataacacaaagtccagcagctacatc

SEQ ID NO: 223411 - DNA, 1000 bp, Homo Sapiens; identical to SEQ ID NO: 118061

SEQ ID NO: 223412 - DNA, 1000 bp, Homo Sapiens
acagatgctgccttgaactatgagatggcatggaaatatagcaatcggacaaatccggcagtaggatacaaactggcatttaattacttaaaagcaaaaagatatgtggattcaattgacatatgtcaccaggttcttgaagcacatccaacttatccaaaaatcagaaaggatatacttgataaggcccgtgcgtctttaagaccttgaaaataattttaacttaggtgttggtttaacaggaaatgaaagaaatctaactttcagttcttcctgttcaaaacaggtttgagctcagtgctttgttattagaagtatacccttttttctccagcagaggttgctgctgtacatcaagagaagtactatgtgaaattggtgtttcctaatggagttgaatgagagctggtctatttgactctgttttgattgggtacagatttggtgactctgtggtaaagactataattatttctataaagaatattttgttaaaatctaggtaattaaataccctgtatcttttctaaggaatattatttcaggaaatatatttaaaatgcattgttctcttttaaagtgtttttgttatattcttttatttatttatttatttttaaagacagagcctgggcgacagagcgagaccccatctcaaaaaacaaacaaacaaacaaaaaacatggaagccttggcaactggaataatgttgccaatgtgctgagaaaataactgtcttcctagaattttatatacagaaaaacctttccagaccttgatagaacacaaaagctgaaagacagtattcctagcaatacacattaagaaaacttcaagggatgtatttgttgcagaagaaaaattattccaggtggaaggtttgagatgtatgaagaaatagaaaagtcactggagactatgcacataaataggaatagttattgtctagttgcctacataaaagcaataaaaatgtctaatttcgaaaaaaaaaaaaaaa

SEQ ID NO: 223413 - DNA, 1000 bp, Homo Sapiens
ggtgagcgagtatggtttgagttaacccagggatcaataacaaagagaagcctgtcgggcactgcatttgggggcttcctgatgtttaagacctgaaccccagccccaatctgatcagacatcatggactcgcccagctctcctcggcctggggctctggccaaggatgggctggaggtcattcagttggtctgtctcttccctggaaaccttctgcaaagatggtgtggtgtacgtggcttccctgtaaccacatggggcttggccatttctccatgatgagaaggactggaatgcttctccgggcaggacatggtcctaggaagcctgaaccttggcttggcatgccttctcagacagcacggcctgggctccaactcttcaccacaccctgtattctacaacttctttggtgttttgctcctcctgtggttggaaacttctgtacaacactttaaacttttctcttgcttcctcttctcttctcccttatcgtatgatagaaagacattcttccccaggaggaatgtttaaaatggaggcaacattttggccaacattggaaagcactagagggcaatgggattaaaccaacctgcttggtctctattagtcagtaatgaagacgacagcctggccaaccaagggaaaggaaattagtatctttagtttcagtcattccttgtaggatatggtttagctgtgcccccacctaaaatatcatcttgaattgtaatccctataatccccacatcaagggagagatcaggtggaggtaattggatcttgggggcggttcccccatgctgttcttgtgatagttctcacgagatctgatgattttataagtttgatagttcctcctgtgttcattctccttcctgccaccttgtgaagatgccttggttcctcttcactgtctgccatgattgtaagtttcctgaggcctccccagccatgtggaacagtgagtcaattaaacctctttcctttataaatt

SEQ ID NO: 223414 - DNA, 1000 bp, Homo Sapiens
tgtcagaaattttttaggcacaagtaccacctcattgcacaccagagagttcacactggggaaaggccatatgaatgcagtgattgtgggaagtcatttacccacagctctacattccgtgttcataagagagttcacactggtcagaagccttatgagtgcagtgaatgtgggaaatcttttgccgaaagctccagtctcactaaacacaggagagttcacactggagaaaagccttacgggtgcagtgaatgtgaaaaaaaatttaggcaaatctcttcacttcgtcatcatcagagagttcacaaaagaaagggcttatgagtgcagtgagtccagtctcattaaatattggagaatacacacctgagtaagatcctgtgattgcagcaaatgtggaaaatgtttacccaaaggtctgctctccttggatattggagagttcacactagagaagagtccttacaagtaaaataaatttgggcagttttgtagccacacctctgtattccttcaggattatagttaacactgaatgaaggccttactagtgtgacaaatacaggatatttatccagaagtctcactgcaagccctgcctcctgggttcatgccattctcctgcctcagcctccctagtagctgggactgcaggcaaccaccaccactcctaccttttttgtatttttggtagagatggggtttcaccctgttagccaggaagttctcaatctcctgacctcgtgatctgcccgccttggcctctcaaagtgttgggattgcaggcgtgagccactgctcctggcttgaattttcttataatcccatgaaaccatcatcagagtcacaataatgaatttatctaatctatcacctttgtattcacctggagcctttataaagtttttctctatgcagacaaccattgatttactctgctgtataatactttccattttctagaattttctgactgatgtaataaagtgtttcctcttat

SEQ ID NO: 223415 - DNA, 1000 bp, Homo Sapiens
ccaacactgaaaagcagctgtagttatctcagatctatgcatcacattcctagcaaatttatcccatttgaagactggattagtggagttcataaagacagtcagggttttaacctcatcaaaactttgccgataaactacaggcctccatctaatatgggaattgctattccactcacagataatttttatcatgcagatcctagcaaacccataccaagaaacatgtttcacatgtcaaagaaaaccggtaaattcaaacagtgtgctaatgtttccactcgggaggagtgtaactgcacaaaggatcagaagttttcacatgctgttgctttctcggattgcagggaaaaagttcctcgctttaagtttccaattacacaatatccagtttctttggaaattatcaacgaggatggacgtgtcccattgcaatctccatatctggttactgtgactgaagtgaacatgaggcacaactggaaactgaaacacactgtgccagaaaatattaaaagaatgaaacaattagtagaaccaattcttggtgctgcagtgtataatccttcaggtctcaacttaagcataaagggctctgaacttttccactttagagtgaccgtcatttcaggagtaactttttgtaacttaattgaagaatttcagatttatgttgatgaggcaccattgccattcccaggacacacgcttattgccgtggcaacagcggtagtgctagggggattaatttttatagcatttatgtttcaactgcaaggcatccatccgtggaggacattccaaagatggattagaagaaaccaagagaagttttcaagtatctctctcagtgagctgattcatagatcaaagtctgaagagtgaacacatggtgatcataatttctctttattttctagttttatcagccaattcctagaacaatatatttaaatgttaaatatgcaagctacataaaatcctaaagaattgtcattat

SEQ ID NO: 223416 - DNA, 1000 bp, Homo Sapiens
aaagcctggagctttgcaatgaaataagcttaagtgaaataaaagatgcacccaaagtaaatgcagtggatactttgaacgtgaaagatattgcacctgagaaacaattgcttaactctgctgtaattgctcagcaacgaaggaaacctgacccccctaaagatgaaaatgaaagaagcacctgcaatgtagtacaaaatgagttcttggatactccttgcacaaacagaggactgccattattaaaaacagattttggaagctgccttctgcagcctccttcctgccccaatggaatgtcagctgaaaatggcctggagaagagtggtttttcacaacatcaaaacaaaagtccaccaaaggtcaaggcagaagatggcatgcagtgtttacaattaaaggagaccctggccacccaggaacccacagataaccaagtcagacttcgtaagagaaaggaaataagagaagatcgagatagggcgcggctggactccatggtgctgctgattatgaaactggaccagcttgatcaggacatagaaaatgccctcagcaccagctcctctccatcaggcacaccaacaaacctgcggcggcacgttcctgatctggaatcaggatctgaaagtggagcagataccatttcagtaaatcagacacgagtaaatttgtcttctgacactgagtccacggacctcccatcttccactccagtagccaattctggaaccaaacccaagactacggctattcaaggtatttcagagaaggaaaaggctgcggtaaaatcagtaaagttggaagtggatgaagataagagcacaaagggatccaatttttccaactcggaagtggcaattggtttgtctccttacacctttccccagaagaggcttttccatgttgctggagaagaaaacatcacctaggccggtgtgtgcctggcagaacactgcactccaatttcctcgggcagccacaaaaaaaaaaaaaaaaa

SEQ ID NO: 223417 - DNA, 1000 bp, Homo Sapiens
ccaaacaagcaaaaggatgtaagctgattcatctgtaaaaaggcatcttattgtgcctttagaccagagtaagggaaagcaggagtccaaatctatttgttgaccaggacctgtggtgagaaggttggggaaaggtgaggtgaatatacctaaaacttttaatgtgggatattttgtatcagtgctttgattcacaattttcaagaggaaatgggatgctgtttgtaaattttctatgcatttctgcaaacttattggattattagttattcagacagtcaagcagaacccacagccttattacacctgtctacaccatgtactgagctaaccacttctaagaaactccaaaaaaggaaacatgtgtcttctattctgacttaacttcatttgtcataaggtttggatattaatttcaaggggagttgaaatagtgggagatggagaagagtgaatgagtttctcccactctatactaatctcactatttgtattgagcccaaaataactatgaaaggagacaaaaatttgtgacaaaggattgtgaagagctttccatcttcatgatgttatgaggattgttgacaaacattagaaatatataatggagcaattgtggatttcccctcaaatcagatgcctctaaggactttcctgctagatatttctggaaggagaaaatacaacatgtcatttatcaacgtccttagaaagaattcttctagagaaaaagggatctaggaatgctgaaagattacccaacataccattatagtctcttctttctgagaaaatgtgaaaccagaattgcaagactgggtggactagaaagggagattagatcagttttctcttaatatgtcaaggaaggtagccgggcatggtgccaggcacctgtaggaaaatccagcaggtggaggttgcagtgagccaagattatgccattgcactccagcctgggtgacaaagcaagactccatctcaaaaaaaaaaaaaaaaa

SEQ ID NO: 223418 - DNA, 1000 bp, Homo Sapiens; identical to SEQ ID NO: 118066

SEQ ID NO: 223419 - DNA, 1000 bp, Homo Sapiens
ggtcgtagccaggataggagctgaaagggcctgacatgcagacagcattcatctgttcactaatttcctgggtcctggaatctatagagacaagcaggactgaacctgtgtcctgaagagccttcactgcccagtggcagccctggggggctgagctccagcactgggcaggcacagagcaggggctgcccaggaaggagcacactccaggccaggggtgcatggcagaggaaggtggggagagcccagaaggacattgcagacagacagcctgcatggggactccggcatcagaaagccgaatgtttttgggaaacgggtgggtcacacaggcaggggtgaaacatgggctctgaggttggctacctgattcaaacccggccgcgctgcgcacctgctgggtgacttggccaggatcccccacttcgctgtgcccatatggaaaagagggcaaggccagtcctcactgccgagggccgagaaggcggtgccgagcccctgctgctgcatgaaccttagccgctgtcactgatcccaattactctgatccttttgcccttccttcccataacggcctgctggacgccacagcctgaatactggagagagctgggcattgcccaggtcacaggagagagtccgtagagacctgcgcaggagccgggacccctgctgagcagtgggagctttctgtcatccccatggctcaaggataacctacctgcctgcagagaagagcgaaggtcttgctggatgacttttcacccgcactcacccaggagcaggctcccaagtgaagaaaccaccaaaccatcaccagctcctagaagcctccctcccaccaccttctagtcaccatcccccagaagtaatgactctcaaacctgggggatttgaggccagggggagagccaggctctatgctttctgtaattgtgtctcgtttgtgtgcacgcaggtttgttttatgttttggccattaagattttccccagccctc

SEQ ID NO: 223420 - DNA, 1000 bp, Homo Sapiens
gcatcaaaaactacaactacaaaagccccttccgtgaaacccaaagttaaacagccaaaagtaaaggctgagccaccaccaaagaaacggaaaaaatggaaagaagaattttcatcatcccaatctgactcatctcctgagatccatactagtagtagtgacgatgaggaatttgaacctcccgctccctttgtcactcgctttttgaacacaagagcaatgaaggaaacctttaagagctacatggaatagcttgttagcattgccttggaccctgacacaatgcaagccttagagaagagcaatgatgagctacttttacctcatatgaaaaaaatagatggcatgctaaatgataaccgaaagagacttcttttgaatcttcatttggatcaatcattcaagaatgctttggaaagttttcctgaactaacaataattactcgagattctaaagcaaagagtggaggaactgctatttctaaaatcaaaatgaatggcaaagcctataataagaaaactctaaggacttctaaaacaaccaccaaatctgcacaagagtttgctgtcgatccagagaaaatacagttgtattctttgtatcattcactccatcattataagtaccatgtttatctgatatgtaaggatgagatttcttcggtgcagaaaaaaaatgaagatttaggacaggaggaaattgttcaactttgtatgaaaaatgtaaaatgggtggaggacctctttgaaaaatttggagaacttctaaatcataccggaatgttgggagaaatgcaaagcgtctcagttagcagcaccagaagatcagagcagcagaatattctagaggctgggaagtccaagatcaaggtacctgtatctggtgactgttgagagccttcttgctgtgccttagaatgaaagaaggtggagggcaaggtgatatgaacaatgtgcctttacatggcaaaagaatgaaagaaagtaaacctattcccac

SEQ ID NO: 223421 - DNA, 705 bp, Homo Sapiens; identical to SEQ ID NO: 118067

SEQ ID NO: 223422 - DNA, 1000 bp, Homo Sapiens
tttatttttttgagacagagtctcactctgtcacccagactggagtgcagtggcgcgatctcggctcactgcaagctcagcctccccgattcacgccattctcctgcctcagcctcccgagtagctgggactacaggcgcctatcaccatgcctggctaattttttttgatttttagtagagacagggtttcaccgtgttagccaggatggtctcgatcttctgacagatctgacctcgtgatccgcccatctccacctcccgcagtgctgggattacaggcatgagccaccgcgcccagctgccttttttttttttgagtcttgctctgtcactgaggctggagtgcagtggcgcaatttcagctcactgcaacctctgcctcccaggttcaagcgattcctttttttttttttttttttgagacagagtctcactctgtcccccaggctggagtgcagtggcgcgatcttggcccaccacgcccgcctaattttttgtattttttagtagagacggggtttcaccgtgttagtcaggatggtctcgatctcctgacctcgtgatccacccgcctcagcctcccaaagtgctgggattacaggcttgagccaccgtgcctggcctcaagcgattctcttaactcagcctcttgagtagctgggattacaggaacgcgccaccacgcccagctaattcctgtatttttagtagagacagggtttcaccatgttggccaggctggtctcaaattcctgaccccaggtgatctgcccaccttggccttaaaaagtgctgggattaaaggcgtgagccaccatgcccagcctcctacccttttctttgcccagccagataagcaggactttatggggcaaagcctatgtcagctctctccaagggcactgggaattttcctgaggtgtaatcgcttctcactgtatgttctggaacataaagctagcaatgaaggtatttctttgaaaaaaaaaaaaaaaaaa

SEQ ID NO: 223423 - DNA, 1000 bp, Homo Sapiens
tttttggttttttttttaaggatttcatagttttttttttttttttttggagctgttgcccaaaaaaatggatctgttgcagtggtgcaatctgggctcactgaaaccaccacccaggttcaagcaattatcctgcctcagcctcccgagtaggtgggattataggagcgtgccaccatgcccggctactttttgtatttttagtagagacagggtttcatcatgttggccaggctagtctcaaacccctgaccttaggtgatcagcccgcctcggcctcccagagtgctgggattacaggcgtgagccactgtggccaacctaatttttgtattatttagtagagacagggtttcaccacattggccaggctggtctcgaactcctgacctcaagtgatctgcctgccttggtctcccaaagtgctgggaatacaggcatgagccaccgcactcggccaggagctagttttaccagcaccctgctccactgccttcctctagtgcagcctggaagacatggcagcgggtagctcctggggctgagccagaagcatcactgcagtgaaagtctctgcttacctgtctggctcagcttgggcaagggctgggccatatgtgctcagggacgtgcttctcttgtaaggcaggaggacagaagaggaccaagaagggagggggctgccctgtggtgcacacaggcctgccatggggcgtgggagcccatcccgctgcctgactggagctggccgctgtggtggactcaggaaccacttttaatactgcaactgctcccttttgcccagtcagggaaagctgactgtaagtcccacctcccactccgtccacccttctagtggtttctctgagaggtttctctgcttcagctgtgcttgaagtggcatgcctcctctgctgcagggctcccccacccccacacggcctctaaagatgtttatttccttatagactgattaaagtcagccattctttttcctcaa

SEQ ID NO: 223424 - DNA, 1000 bp, Homo Sapiens
ggaatcgtaggggaacatctggctgttaatcacttgcacagttgagaacatttcctatacatcggcttttaattctagctcttatttcattttgtaatcttattttctttcgtctgcatgttcacaataccaagcattaaatgtattttaataactaaacttttctgaaagaaggttagctaaagttaaatgaaaacttggtttctttgaaaatcaggcaatagagacaggctccagatgaggaatcctccattttctgtccgaagctgacattcctctggcagtccagttcaccttggattacagccaccttcatgtttccacggttggtactaaatctggaaactctggtgacctgggctgccctctcagaaactccagactcccatggcaatgacagccgggacacttttcttccctccagccagggtttctctaaaggagctttgttttgtctaaagtgtggcaagacatagtgcacaacacagggacaaaggcaggtttcctgcagctcgctacctaagtgtttctgtaggggaaggagccaattaagaaaaagtgttggtacagattcatgtttctgatttaaaaaaacaacaacacaggattgaattaagtagagtaatagcactagaagaatttttctgttgtgaaattagaagtggagttggtttttttcttttttcttcttctttttttttaatatgaaaagtacttagctgggagtggtggcaagcgcccttgggtccagctactcaggaggccaaggtgggaggatcacttgagcccaggagttttagactagcctggacaactaagtgagactccatctctacaaaaaatttaaaaattagccaggtgtggaggggcatgcctgtggtctcagctattcaggaggctgaggcaggagaatcacttgagaccaggaagttgaggctgcaatgagccgtgatcatgccactgcactccagcctgggtgacagagtgagaccctgtcttt

SEQ ID NO: 223425 - DNA, 1000 bp, Homo Sapiens
tccccaccctcgcccctcttggcccctcagggcagccctgggattcggcagacgccagtcctccctgagatgcttccccgtccttccctccgccaggccctacgtctccgcaaaccccacgcttcggggtggccgcctcagacaggaccctgagtccgagactggggtaggggacctgcccgatcctgtaacaaccctcgtgcttctgcacaatcgcctcccactagcggtgactgttgggtgtctaccttcccggtgtcccactgagaagcgggctcttccttggcaggggcttcttcattgcctcgctgtggatgtcgaggtggggcaggagagtgaggagaaaacagagaggagggaggtagagccaacgagcgagaaaaggggagggaagtttagatgggaagtggatgggtctgaggaatttgaacaaacaccgacagtgaaggagagtgacctgagcaagcagtagtggggtaaatggaaatagacaaaatgggaatcagcagagatatggaggacagaatacaatgaggaggccttgaccgtcagtagcagagagggcagcagaagcctaattcccaaattccttagatggttttctgatttccaaattagtttcccttttaaatttattgtgtcaggttcagcttatgaggcctcaatacttttcagtcttaattgtatattgaaaatactttttgtttactaaatgctttttacattaattcagtgtgcacttcgtaaggataatgatgatttgagttagtttagtattcaacagcttcctctattcctttatatgatctctgtatttaatagctgtggcataaagtttccaactaagtataagtatcaagttttctttgtgatgttttctgcaaatattgaaggatgacctggattgtcctagaactttgttccaacagattacatgtgttcataacgaataaattgctcaaagataaaaaaaaaaaaaaaaaaaaaaaaaaaaaaaaaa

SEQ ID NO: 223426 - DNA, 1000 bp, Homo Sapiens
cctctgtcagaatcaaagactaagcttaagagttcctcgcatatatcgttgtgcacaggatcaacatgatggtgactgggaaaaaattacttcaagtaacatgcttagctttccctccttaatgtgaaaaatcaagggcttactgacataggaacaacagaaatgctcctggaacttcaagttgctgaattataagtttattttttatcaataaatatttttatacttacattgagtgatgtgtttaacaacaaattgtgacagagctgagtgctcctatcttacagggtcaatgaactacttattaagccttactggtagcactgaatttagcagttctgagaacatgtgaaactatgttaaaactgaaggcactatatatttttacataaaagcttgaacatacagatgaattataacctatgtgaagaaatcttagatataaaactaacttttcaaagatacaaaagaaattaaacaggtttcctgaaattttagttcttggtctgttcacctctgtggggaaaattcttagttccagtgataactgttctagttactacttttaagtatgtaaatactagaaaggtagtactagtgacatcatcacgtgtattgttatctatggggcaaatgtgtggtgcccagaataaaatatacctcatgcctagggtagggacatcctttccagctcaaacgtgggtagggatgtgggagaataagaatgtgggagaaccaagagaaaaagtggggctgggagagtggagttcccgtagggcataggcctgtgaagtaacactggggcagatatgtatgttatatacaactatttttttaaaaaacttatatccatgttgggagtagatgggtatataacagtttggaaatactatctttggagaatgtatttttgtatttataaatcaacttttaaaaactgtctcattcaaaagggaataaagacctgtgtaaaaaaaaaaaaaaaaaaaaaaaaaaaaaa

SEQ ID NO: 223427 - DNA, 1000 bp, Homo Sapiens
aaccgttcctcaatgctacagtgaggtgaggagagaagatggcatacaggcggaagcatcagcaaatgatacttttccgaatgctgattcttcatctgtccctcatggagcagtctattatccagtaatgtcagatccctatgggcagccacctttgccaggttttgactcctgccttccggttgtgccagattattcctgtgttcccccctggcatccagttggtacagcatatggtggttcttctcaaattcatggtgctataaatcctgggccaattggctgtattgctccatctcccccagcttctcattatgtacctcagggtatgtaagatccagcagtatgaagtattcttgcactgccattttcttgctgtttttgtttttaaaaagtattttatgttagtggttaaatgatttaggtgattagtgtttactattgtatttgtctttaaaattattttatcttttgatttaaaatagtactttaaaattaaggggtattattttgggctgtgactaaggaaattgagatggatgtacaactagccccatattgagcatacttcattgtattcagctgttttcctgtcagccatttgtcagctttatattagctgatggtaccaattgataaaatgaatataaagtatttcattggttcaaaaatcacacatcatattaaaccatgcagaattggagtaacttccacttttttctagaaagtaaaaccaagagcctttgcttctggataactcacttaatattaaattaaagagctcttcacgtttcttgagaattatctgaagccagttgcattctgtgatatcagttttgaaggcacatggttctctgctttagatttatcccatatgctattgtttaatactggatgtatgtaagtgttttactgcactgtattgaattggtgtcttttgcacagttagcagtaaataaaaattagcatttaaaattgcaaaaaaaaaaaaaaaaaaaaa

SEQ ID NO: 223428 - DNA, 1000 bp, Homo Sapiens
taatggtgccctttgaaagtcaagcagtgggaagtacatggagctctcagccctgctcccatctggcaccttcaagtcagcagatgggccactgacagagcactgccccatccctggtgctactggtctttctaaacttagcaccctggagagtccaaggaggcagcgcccccaacccagcgccccactaagccttgctgacacgcgtgcatccctctgtgacctcagcccagatgtgcctgttttcattctcaaagacattagactgttttcctgccctatgacacagatagctcacatgaatattgtgctttatttagcaggtgtactcacagatactagctccttagcagctcacaacatcccagaatggaggcaggggggtgactcattatccccattttactgacagggaaactgaggctcaacttaagtaattgacctgccaggtatattcacccatccagtggaagagctgagtccccgccccagtcatctaccagtatccagcatggggcctgtacttagatgtgaaaggtgctgcttcatttctgaccaagagactgagaagtttcccagaatgcaaacaaagcccaggcccctgaaatctttccggtcaagcctttatcccagcactcagttgttttggatgtctgttcctacttgcccttacccccaaagttacagatcctagttacaggactctgccagctttgttaaactgtccgtgagacaagaaagccattggggaaaccaggtgattgcctgaaattcttactccgttccaagtgctgttcctcccaggaaatcaaaggccagggtccttatggccgtggagccttcccgaccacagagccaacttgtgaagcacacagctctgcagcctgggctctgccctgcctcagccgcctcccccacgctcttcaccacgttcctggagagtccggccaacctgtcccagccaaaacactgctgtattagaaaaagtctctttctggtc

SEQ ID NO: 223429 - DNA, 1000 bp, Homo Sapiens; identical to SEQ ID NO: 118071

SEQ ID NO: 223430 - DNA, 1000 bp, Homo Sapiens
gggcgcgtggtctgcgctatttgttgctgcagcacaaccagctggggagctcagggctgcccgccggggctctgcggccgctgcggggcctgcacacgctgcacctctatggcaatgggctggaccgcgtgcctccagccctgccccgccgcctgcgtgccctggtgctgccccacaaccacgtggccgcgctgggtgcccgtgacctggtcgccacaccgggcctgacggagcttaacctggcctataaccgcctggccagcgcccgtgtgcaccaccgggccttccgccggctgcgtgccctgcgcagcctcgacctggcagggaatcagctaacccggctgcccatgggcctgcccactggcctgcgcaccctgcagctgcaacgcaaccagctgcggatgctcgagcccgagcctctggccggcctggaccaactgcgggagctcagcctggcgcacaaccggctccgggtcggcgacatcgggccaggcacctggcatgagctccaagccctccaggtcaggcacaggctggttagccacactgtccccagggcccctccatccccctgcctgccctgccacgtcccaaacattctagttagctggtaaagcaatcagaacaagaaaatgataagagtgggttagaaggtgatgaggaggctgggtgaggtggctcatgcctgtaatcccagcactttggggagccaaggcaggagaatcgctttaggctatgggtttgagaccagcctggcaacacagcaagaccctatctctaccaaaaaaacatagccaagcgtggtggcacatgcctgtagtcccagctattcaggaggctgaggcaggaggatcgcttgagcccagaagtttgaggctgcaatgagccgtgatcgggccactgccctctagactgggcaacagagcaagaccctgtctcttgaaaaaaaaagtgatgaaagaggtaaaaaaaaaaaaaaaaaaagaaaaaaaaaaaaaaa

SEQ ID NO: 223431 - DNA, 1000 bp, Homo Sapiens
gaggagaaggatggactagaagataaagaaactgccctcagtgaagaattggagttacattctgcaccttcttcccttccaacgccgaatggcatacaattagaagctgagaaaaaagcattctctgaaaaccttgatcctgaggattcatgcttaacaagtctagcatcatcatcacttaaacaaattcttggagattctttttcaccaggatctgagggaaacgcatctggaaaagatccaaatgaagaaatcactgaaaaccataattccttgaaatcagatgaaaataaagagaattcattttcagcagaccatgtgactactgcagttgagaaatccaaggaaagtcaagtgactgctgatgaccttgaagaagaaaaggcaaaagcggaactgattatggatgatgacagaacagttgatccactactatctaaatctcagagtatcttaatatctaccagtgcaacagcatcttcaaagaaaacaattgaagatagaaatataaagaataaaaagtcaacaaataatagagcatccagtgcatctgccaggagtggttagaaaagaaaaatgtatatttacatgaaatgcacagaataaaaagaattgaaagtgaaaacttaaggatccaaaatgaacagaaaaaagctgctaaaagagaagaagcattagcatcatttgaggcctggaaggctatgaaagaaaaggaagcaaagaaaatagctgccaaaaagaggcttgaagaaaaaaacaagaagaaaactgaagaagaaaatgctgcaagaaaaggagaagcactacaagcttttgaaaaatggaaagagaaaaagatggaatatcttaaagagaaaaatagaaaggagagagaatatgaaagagcaaagaaacagaaagaggaggaaactgttgccgagaaaaagaaagataatttaactgctgttgagaaatggaatgaaaaaaaggaagcttttttcaagcaaaaaaaaaaaaaaaa

SEQ ID NO: 223432 - DNA, 1000 bp, Homo Sapiens
atccctccaggagcacctgcccgacgtggtggtatacaatgcaggcaccgacatcctcgagggggaccgccttggggggctgtccatcagcccagcgggcatcgtgaagcgggatgagctggtgttccggatggtccgtggccgccgggtgcccatccttatggtgacctcaggcgggtaccagaagcgcacagcccgcatcattgctgactccatacttaatctgtttggcctggggctcattgggcctgagtcacccagcgtctccgcacagaactcagacacaccgctgcttccccctgcagtgccctgacccttgctgccctgcctgtcacgtggccctgcctatccgccccttagtgctttttgttttctaacctcatggggtggtggaggcagccttcagtgagcatggaggggcagggccatccctggctggggcctggagctggcccttcctctacttttccctgctggaagccagaagggcttgaggcctctatgggtgggggcagaaggcagagcctgtgtcccagggggacccacacgaagtcaccagcccataggtccagggaggcaggcagttaactgagaattggagaggacaggctaggtcccaggcacagcgagggccctgggcttggggtgttctggttttgagaacggcagacccaggtcggagtgaggaagcttccacctccatcctgactaggcctgcatcctaactgggcctccctccctccccttggtcatgggatttgctgccctctttgccccagagctgaagagctataggcactggtgtggatggcccaggaggtgctggagctaggtctccaggtgggcctggttcccaggcagcaggtgggaaccctgggcctggatgtgaggggcggtcaggaaggggtacaggtgggttccctcatctggagttccccctcaataaagcaaggtctggacctgcaaaaaaaaaaaaaaaaaaaaaaaaaaaaaaaaaaaa

SEQ ID NO: 223433 - DNA, 1000 bp, Homo Sapiens
acatcatagataaagataccagcagtagtcgcctctctttcagcagttacccagggtttttggagtctctggatgatttttacattcttagcagtggattgatattgctgcagaccacaaacagtgtgtttaataaaaccctgctaaagcaggtaatacccgagactctcctgtcctggcaaagagtccgtgtggccaatatgatggcagatagtggcaagaggtgggcagacatcttttcaaaatacaactctggcacctataacaatcaatacatggttctggacctgaagaaagtaaagctgaaccacagtcttgacaaaggcactctgtacattgtggagcaaattcctacatatgtagaatattctgaacaaactgatgttctacggaaaggatattggccctcctacaatgttcctttccatgaaaaaatctacaactggagtggctatccactgttagttcagaagctgggcttggactactcttatgatttagctccacgagccaaaattttccggcgtgaccaagggaaagtgactgatacggcatccatgaaatatatcatgcgatacaacaattataagaaggatccttacagtagaggtgacccctgtaataccatctgctgccgtgaggacctgaactcacctaacccaagtcctggaggttgttatgacacaaaggtggcagatatctacctagcatctcagtacacatcctatgccataagtggtcccacagtacaaggtggcctccctgtttttcgctgggaccgtttcaacaaaactctacatcagggcatgccagaggtctacaactttgattttattaccatgaaaccaattttgaaacttgatataaaatgaaggagggagatgacggactagaagactgtaaataagataccaaaggcactattttagctatgtttttcccatcagaattatgcaataaaatatattaatttgtcactttcaaaaaaaaaaaaaaaaaa

SEQ ID NO: 223434 - DNA, 1000 bp, Homo Sapiens
ttgccagacagctataaaaagaatttttaatgattctgattttactggctttcttactgtggaatatggaacaatcttaagttcggctaactccataaactggggccgactacttccgcaggtagtttatcatgcttccgcatatcttgatcttgttagtcaaggatttatttcttttggaagcccagtcgatgtctgtattcccacaggaaactttggtaacattttagcagcagtgtatgccaaaatgatgggaatcccgattcgaaaatttatctgtgcctctaatcagaaccatgttttgactgattttataaaaacaggacattatgatctaagggaaagaaaactagcacaaaccttttcaccgtcaatagatattctcaaatcttcaaacctagaacgacatttacacttgatggctaataaagatggacagctaatgacagaattatttaatcgattagaaagtcagcatcatttccagatagaaaaggctctagttgagaaacttcagcaggattttgtagctgactggtgctctgagggagagtgcctagcagctattaactccacctataatacttcagggtatattttggatccacacactgctgttgcaaaagtggttgcagatagggtgcaagacaaaacttgccctgtgattatctcatctacagcccattactcaaagtttgcacctgctatcatgcaggctttaaagattaaagaaatcaatgagacttcatcaagtcagctctatttgctgggttcatacaatgcattacctccactgcgtgaggctttattagagagaacaaaacagcaagagaagatggagtaccaggtctgtgcagctgatatgaatgtcttgaagagtcatgtggaacaacttgtccaaaatcaattcatatgaaagctttcagagtaaatttttttttctagctataagcatgcaataataaatctcaaacactgatttggaaaaaaaaaaaaaaaa

SEQ ID NO: 223435 - DNA, 1000 bp, Homo Sapiens
ccttcctgttggtatttatgaaatctcaaagagatgagccaccttggcttccaatatggcaagagggtgctgggagaaggtgaagatcagtctaagctgccacggtgatgagaccttctcattatttaactcttgatggcatttcccttctgagtgaagatttgaaatatgattgattagaattgtgctcttgatggctgggaatttagaaattttattttaagagttatttcattttcatcctaagagtgatgggagagaaatgtccaaaagagatctgctgatctgctgagaatttcaaacaaacaaaaaaataatctctatgtatgtgttggataaagtctacagactgactaacatgcattagcaaatggagcatcagtaggtagcaacatgataatttatgtaactgatagcttctgtccttattagtacacttaacatttgagactagtatttattgatccaggcaaagtaattaattaatcatgcttgggcttactttttcagtttgtaaggttaagcatatgtgcatgcatgcgtgtgtatataaatgccttttccatatcttaaatgtccctgatgaggagagcagtcatcaattaaatatataagctcttaaaatgagaatggaagtgtcagtatagacccagtgtacttaagtgctgatgactgttagccagtttacaactttttaccatcgatgtacacatttgatatttgtgcagtaaatagactgtacctataaaaaattttattgatgtttatggtcatgttagctatcagagagctattggagtgagagctgaggtgtccttaaccactttttctctcctagattcattttcattatttatgctaggattttcttatggttgacatttgatgacaggaagcaatcatgactcttcaagtgagctcacagaaacctttcatgttgtctgtttccaaaatggattcaataaacaacattttgtccatgttaaaaaaaaaaaaaaaa

SEQ ID NO: 223436 - DNA, 1000 bp, Homo Sapiens
agacggctcacccgaagctctgcgtttctgatctgaaaactgtaacccatagaaaagctccccaggaggtgcctcactctgagaagagatttacaaggaagagtgtggtggcttctcagagtttccaagcagggaaacattactgggaggtggacggaggacacaataaaaggtggcgcgtgggagtgtgccgggatgatgtggacaggaggaaggagtacgtgactttgtctcccgatcatgggtactgggtcctcagactgaatggagaacatttgtatttcacattaaatccccgttttatcagcgtcttccccaggaccccacctacaaaaataggggtcttcctggactatgagtgtgggaccatctccttcttcaacataaatgaccagtcccttatttataccctgacatgtcggtttgaaggcttattgaggccctacattgagtatccgtcctataatgagcaaaatggaactcccatagtcatctgcccagtcacccaggaatcagagaaagaggcctcttggcaaagggcctctgcaatcccagagacaagcaacagtgagtcctcctcacaggcaaccacgcccttcctccccaggggtgaaatgtaggatgaatcacatcccacattcttctttagggatattaaggtctctctcccagatccaaagtcccgcagcagccggccaaggtggcttccagatgaagggggactggcctgtccacatgggagtcaggtgtcatggctgccctgagctgggagggaagaaggctgacattacatttagtttgctctcactccatctggctaagtgatcttgaaataccacctctcaggtgaagaaccgtcaggaattcccatctcacaggctgtggtgtagattaagtagacaaggaatgtgaataatgcttagatcttattgatgacagagtgtatcctaatggtttgttcattatattacactttcagtaaaaaaaaaaaaaaaaaaaa

SEQ ID NO: 223437 - DNA, 1000 bp, Homo Sapiens
gcaggaaaaaaatgttctgcccttgtttctcattgtttaaattctctctctgagttcatggataacatgtccttcttagatgcacttttaactgatgtaagggaacaaaacaaatacggtagaaatgactttagttggacaaatggaaaggttacaagtggactttgtgatgagtttagtcttgagagtaatgatggatggacttctcaaagctctggagaattaaaggcagctgcagaagctctcagctttactaaatgttcttctgctatttcaaaagcattggaaaccttgaattcttgcaagaaattaggaagagatccaaccaacgatcttactttttatgtttcacaaaagcgcaataatgtatactttagtcagtcagcagctaatttagacaatgcttggaagaggatatcagtcattaaaagtgtattttcgagtcgatctcttctctatgtgggtaatagacaagctagtataattgaatacctgccaacccttcgaaacatctgtaagactgagaagctaaaagaacaaggaaaaagtaaaagaagattcctgcactattttgaaggaattcatcttgacattccaaaagagactgtgaatactttggcagctgacttcccttaatgttccatactaacaatgctttgtatagattatcatgtggtccttaagatacatttttatattatgtggatcttcatggaaaagtatatttctcgatgtacattttaaacaaacaatttgtatatttttttattggcgggtaaatatttaaaatatttgagttacaaattttatatatgattgtaattttttttctgaattttttgtattatctgatttagctttgttggagtattttttgtatgtgagtgaactgtttctggaaggtagagttcattaagatgaactccctatttcaagtgtttatattatatattagcttaatattcagatacattatcttggctgctaacattagtgtcac

SEQ ID NO: 223438 - DNA, 1000 bp, Homo Sapiens
atgggcaactttcgcccctgtggggaggggacggggaaggaagaaagaatttaaaggaccggaatgcgagagtccaggtggccttggagaggaaagaggaacggtgaagacaagctgcgagagctgggagctggagggtgaagaggtgaacacttgagtggttagagctgtagatagacattgtggggaagtgtgccagggtggcttccagctacccctgacttagagcctggtggaggtgtggttcttcagaagtcagcaaagggctcaagagccccagtctataaatacagtcacacccaggagactaataatagtaaccccagccaccatgtacttagttttatccctgctactggctttattgcaatatttattttcatctacaatagttgcacatctactcaactatccgaatatgtccatttcgcagaggaggaaagtgaggcccagggagtgcagatagctacagagaggagggtcaaagcacgatttaatcaaggcctgattcccaagtctgtcctctcaatttcacctgcattgacaagtattaattgaaccccaactgtatatgttgcactgtgctaggtactgtggagatgctggaggaacaagacataaaatttctttgtgtagctgatgtatgtaatgagagtagacagatgtcagacaaaaaagacgagaaaatgaataaataaaaaaccaggccaggcgtggtggctcacgcctgtaatcccagcactttgggaggccgaggctggtggatcacgaggtcaagagttcaagagcagcctggccaagatggtgaaaccccgtctctactgaaaatacaaaaattagccaggtgtggtagcaggtgcctgtaatcacagctactcgggaggctgaggcagagaattgcttgaatccaggaggtggaggttgcagcgagccaagatcgcaccactgcactccagcctgggtgacagagcgagaatcagtctcaaaaaaaaaaaaaaaa

SEQ ID NO: 223439 - DNA, 1000 bp, Homo Sapiens; identical to SEQ ID NO: 118078

SEQ ID NO: 223440 - DNA, 1000 bp, Homo Sapiens
caagtatgtctgctttggtatctttgcctctctttgtctctgcatttcctttcctggatctctgtctttatttccaggcttctccacccatattcctccacagatctctcttccttgacatttgtgcttttctccctgggcctcattttaatgttcagtgagaagtaaacagagcagaagtgaccactgggacttcaggcaagaagctcaccaccaggcacacagcaaagggactgaactgacccctgtttgcactaagccacccccaccccccactctgctttcccaagcttgactggcatatacctaggcctgtgtgtgtgtgtgtgtgtgtgtgtgtgtgtgtgtgtgtgctcttccgtctaaggcatgaataagaggggaggtcaaaataaagacccaatctgaggccgggcacggtggctcacgccggtaatcccagcactttgggaggccgaggcgggcggatcacgaggtcaggagatcgagaccatcctggctaacacggtgaaaccccatttccactaaaaatacaaaaaattagctgggcgtggtggcgagcgcctgtagtcccagctactcgggaggctgaggcaggagaatggcatgaacctggaaggcggagcttgcagtgagctgagattgcgccactgcactccagcctgggcgacggagcgagactctgtctcaaaacaaacaaacaaacaaaagacccaatctgagtcttatcgttgtactgatagaagggtcagatatccccacatggagttgagtgggagaaagagattcactagagaataactccttagagaccaatgtctgtagcaggtgtacagcatcttgtgaaagttatggagcatgaaaagactgaagggccaggacagtttgcatgggctgagttataccagctagaccaggaatagaacaaagaattctatacctcaggatttcaaaaagttagcaacttgagaggccagtgctgagcaacccagtacccagg

SEQ ID NO: 223441 - DNA, 1000 bp, Homo Sapiens; identical to SEQ ID NO: 118083

SEQ ID NO: 223442 - DNA, 1000 bp, Homo Sapiens; identical to SEQ ID NO: 118084

SEQ ID NO: 223443 - DNA, 1000 bp, Homo Sapiens; identical to SEQ ID NO: 118088

SEQ ID NO: 223444 - DNA, 1000 bp, Homo Sapiens
acaccatgaaatgaaaggtttatcctgtgccagaaaccaaggtttatcatgctctaggaacttttttcttacactgcctaccgccattcatgattaaaccatccagaaataccatccctgttttacctggtgtctgtgtattgcctgtgtttgtgtttataagtttatgctgataggtttgttcggcttgtttatgtattagtttgggatttgtttttaaataatttataccaagagagtataatctaatggtgcaggttgagagcatcccaaatccgaaaatctaaaactgtttgagcactgtatttatctgttcttgcactgctataaagaactacctgaaactgggtaatttataagtaaagaaaagaggtttaattgactcacagttctacaggtgatacaggaagcatggctgtggaggccctgggaagcttacaatcgtggcggaaggtgaagcggaagcaggtatgtcctgcgtggctagagccagaggaggagggcaaaggggcagatgctgcacactttcaaacaccagatctccaagaactcactaacacagaatagcaagggggaagtctgcccccatgtttcagtcacctccctccaggcccctcctccaacaccgaagattacaatttgacatgagatttgtgtggggacacagagcaaaaccatatcaagcactgacatgacactggaggaaaatgctcattagagcttttcaggttttggattttcggatttgggatacttgactagtaaatataatacagatattccaaaacacacaaaaaaaccaaagtctaaaagacttctggtcccaagcatttcagataagggatacccaacctgtaataatgggaaacaagcagtagaggctgttggttaatcttggcacaagtttaattacaggtttttttttttcctgtttcttaagtacagtcaaacataaacttactggaggaaacatttataaaaataaatatactttcatttg

SEQ ID NO: 223445 - DNA, 1000 bp, Homo Sapiens
gcaggcagcctgagaccgagccagagtttagactgctgtcacagaggagacctggacagctgcttcagcctgcccaacatactaagatggcaaccagacgataagaaactaccagagccggagccccagcccctttccctgccatccctgcaaaatgcctcgtctttggatgccaccagctcttcaaaggactccaggtcccagctgataccctcagagtccgaccaagaagtcacgtctccatcccagtcctcaacagcttctgcagacccaagcatctggggggaccccaaaccctctcctctcacagagcccctaattcttcatctcaccccttcccacaaggcagctgaagattttacagcccaggaaaaccccactccctggctctccactgcacccactgagcccagccctccagaaagcccccaaattctggcccccacaaagcccaactttgatatagcctggacgtcccagccccttgatccttcctcagaccccagttctctggaggaccccagagcccggcctcccaaagccctgctggcagagcgcgctcacctccagccacgggaggaaccaggagccctgaattcccctgctacacccaccagcaactgtcaaaagtcccagcccagcaagccggcccagagtcgctgatcttaagaagtgctttgagggttaagaatcaggggtccaagagagaccccagtccctcaataaagccacaagagcccaaaaaagctggtttttttcctggtgaatttctctggtgccctcactctgctcggaaatccatcccacccacctctgtccctccaagggcagcctctctaactggctcctagcagggaattccaggaagcctcctggtcttctagaatcctggcaaccttacaattcctctcggcatttgtcacttccatctcagctaatgcacccaccagctcaaacacaccaataaagcttttgttactctcaaaaaaaaaaaaaaaaa

SEQ ID NO: 223446 - DNA, 1000 bp, Homo Sapiens
tccactctgactgccacgccccggaccagcagcttggggaccctccagggtactaatggggctctgttctgagatggacaaattcagtgttggaaatacatgttgtactatgcacttcccatgctcctagggttaggaatagtttcaaacatgattggcagacataacaacggcaaatactcggactggggcataggactccagagtaggaaaaagacaaaagatttggcagcctgacacaggcaacctacccctctctctccagcctctttatgaaactgtttgtttgccagtcctgccctaaggcagaagatgaattgaagatgctgtgcatgtttcctaagtccttgagcaatcatggtggtgacaattgccacaagggatatgaggccagtgccaccagagggtggtgccaagtgccacatcccttccgatccattcccctctgtatcctcggagcaccccagtttgcctttgatgtgtccgctgtgtatgttagctgaactttgatgagcaaaatttcctgagcgaaacactccaaagagataggaaaacttgccgcctcttcttttttgtcccttaatcaaactcaaataagcttaaaaaaaatccatggaagatcatggacatgtgaaatgagcatttttttcttttctttttttttttttttttttaacaaagtctgaactgaacagaacaagactttttcctcatacatctccaaattgtttaaacttactttatgagtgtttgtttagaagttcggaccaacagaaaaatgcagtcagatgtcatcttggaattggtttctaaaagagtaaggcatgtccctgcccagaaacttaggaagcatgaaataaatcaaatgtttattttccttcttatttaaaatcatgctaatgcaacagaaatagagggtttgtgccaaatgctatgaacggccctttcttaaagacaagcaagggagattgatatatgtacaatttgctctcatgttttt

SEQ ID NO: 223447 - DNA, 1000 bp, Homo Sapiens
ctgactaccagaaaatattacagaaccagagcaaagtctttgactgtatggagttggtgatggatgaactgcaaggatcagtgaaacagctgcaggcctttatggatgaaagtacccagtgcttccagaaggtgtcagtacagctcggaaagagaagcatgcaacaattagatccctcaccagctcgaaaactgttgaagcttcagctacagaacccacctgccatacatggatctggatctggatcttgtcagtgactttatgagagtttctgccacaaggtgcccaagaggagaggaatgggaagagtgccccagcacgtggtgactgcgtgatttctgctcgttgcctttgaagataactggcaggactgactgtagaacactttgacttttttcaaaaagtgatggaatttgtacatccaaatgaatattgtatagacaattttcccaggaatgtgcaaaatgcttgaaagttcaaacttcttttttgaaatgatcttcagatccagtggcccattcttttatctttatcctgtgaaggtgtttttcaggttttgaaacaatccaaaaatcatttaggaccaagtctaaggaaacattttagtggccaagttggattccgattgtaaaggaatgatactaattttctagcatggctctgaaggtgattttaggtagaagagttttgaggctgggcgcaatggctcacgcctgtaatcctagcattttgggtgactgaggcgggtggattgcttgagcccagaagttgaagaccagcctgagaaataaggtgaaaccctgtctacaaaaaatacaaaaagttagctgggtgtggtggcgtgtgcctgtagtgctagctactcagaaggctgaggtgggaggattgtttgagcccaggaggttgaggctgcagtgagttctaattgcgccactgcactccagcctgagcgacagagtgagacactgtcttaaaaaaaattaaaaattgtaagaaaatg

SEQ ID NO: 223448 - DNA, 1000 bp, Homo Sapiens
acccatctggctaaagttaagacttagcaaaaattaaaatgttgcctttgtccaagtatagattaaggcaacaaacatatttgggtgtgtaatttgaagttttggactgaaatatctttgcaagtatccacataaaattctgtaatgccttataattatattctaataattatgcattatactaagacaccattaagaacagttgaggcactacactaaatcaaaccataaatgaggaaaaaacttttaatgttcttttctagaagtgttcaaataggtcttgatatgaagctaaaagccttatttatattatcttaatatttcggctaaaatgttaagctccataacatgaattgatacaattccaattttatcaatattttgtgatagaaaaatgttaatattattcatgagctatacagtccttacattttttcccttggtgtaggaacaacggaggagtttctcctctgctaactattcatatatgtaactgtaacaaaagtgtactatgttatgcacacattacaaataatataaggggaagttttattagcttagtaggaaattgttattattaaggtttaaaaatgagaacaggtgtgagttttccaaaatacttaaaaataatagtgtcaaaaattcaggggcagttaaggagtcatggatggaactagaggtcactatattaagtgacataagccagaaacagacaaacattgcatgttctcaattatttgcgggatctaaaagtcaaaacaattgaactcatggatatagagagtagaaggatggttactagtggctgggaaaaggggtgtgcgaggggaactggggatgcttaatgtgtacaaaaactatgtagttagaaagtataaataagacctagtatttgatagcacaaccgggtgagtatagtcaataatagcttaattgtacaaataactaagagtataattggattgtttgtaacacaaataaatacttgagtggatggata

SEQ ID NO: 223449 - DNA, 1000 bp, Homo Sapiens
gcgccctggcggcgctgcgcctgcagagcctgcatcgggacttctctccgcgggtgcccctgccccgcctggaccgcctgctcccgcccccggccccgccgcgcgaagacccgccccgcccgacccccaggccgcccccttccgctgccctgctggccggggcgctctggagcccgggcctggccaagaggcgggcggagcgggcccggcgcggcggggccggccgcactgcgggaagcattgcccgcgagggaggaggcggcgccggcacggcagctgccgtgctgggcggctggaagcggctacggggcatgggccgagctgaggccatggccgcctacctggccctggcggcgcagtgtccggggttcggcgctgctcggtatgacgttctggagctgagcacggagcctggtcggggtgctccacagaagctgtgcctgggcttgggagccaaggccatgtccctctcccggccaggggagacggagcccatccacagtgtcagctatggccatgtggccgcctgccagctaatgggcccccacaccctggccttgagggtgggagagagccagctcctcctgcagagcccccaggtggaagagatcatgcagctggtgaatgcctacttggccaacccctcccccgagaggccctgcagcagctcttctcctccatgccaagacctgccagacacctcccctcccagccagcgcccgggcctggacgagccccagggacagtctggctgcttggggcagctgcaggactgagcctgccaagaggtcacgacttccctcctgcctgcagcctgggccaggactgctctgagatttgagggaaacatggacccttttggccctgcagggacagggcacatcccacacccaagggctacaatgggtgtgggtaattttctagtttgtttcttaatttatttgtagaagagaagcaaaaaaaaaaaaaagtttcttatttacacaaaaaaaaaaaaaaa

SEQ ID NO: 223450 - DNA, 1000 bp, Homo Sapiens
aatttttgtatttttagtagagacagggttggccaggctggtctcgagctcctgacctcaggtgatcctcccacctcggcctcccaaagttctgggattacaggggtgagccactgtgcccggccataattttatatttttagaaaataaagaatgaaggacaaaagagcacagctaaatgaaactgctgctctaatttattccactggaaaggtctcaggactccttaactgttttccaggtttggctcttcatatctaacctgtgctaaaatgagaaggtatgctaggtgctgttagaaatcacaccatttccaaagaacccaagtagtatagagaccaaaatgaggcaaaaataaaagagatgaaacaggagagtttatttcttgcatactttccgaccttcatcatacaacctctcctaacctccctgtagtctttaaaatgtttaacttgcctataagctaacatgtaataaaacacatactcaattatatgaatagaagtggagagccagaatgctacaaaagaaatcacagctgctagaagtatcctccatagaaacatcaacatgattgtggatcaaaatgattttcactggatatggaatttgtatgggccatatttattaaaagagttctgtgtggtcacatagagttcctttgggatttcatcccacttttcaggacttaatttgtttgggtttgcttacctaacaagcaacaacaacaacaaaataaatagttccaaaatctagtttattacataaatctctatgaatccttgagggcctatatctatattataaataaatacaaatatagatttttaaatatctatgggactttgccatttacagccttaagtataaaattacgagattatattctttccattaccctttatttctgctaactttttaaagactggaacattctgtggatgttgtcaaagtttgagtttgtttttccctgtgtattataataaatttgtggtattgc

SEQ ID NO: 223451 - DNA, 1000 bp, Homo Sapiens
ctgagcgcaaatcactggctacaagggacttaccagtctggattcagcagtttcttttctaaaacccatttgggtgactcagcagccgcatctgctacctgattttatcctggagaatacagtgcaatatttctctttgattatttattcctcttgattgtggaattaatttgattgcttgctaatggtactagtagtactcctttcagaagaaaaaatggagcgatttaggtgaccaaatattacatacataaatagccacatgaagttttagacgtttggacttgaagcctcaaagatcaaccaaccagtccccttatttagtaaataaggaaattgaggctacacacagaaaattgtgctacagattattactaataacccagcttgctaaattaggctatacctaggtaatctctagaagacaactctgacagactctttaatatttacccctggttggaacaatatttgaaatgtcccggatatttctatgctacttagatatttgtggcaaagcagaaagctttttgactgtgaaggcagaggtcagcactgggggaaacttgctggtggtctctcccacaaccttgcccagagtcctttccactaaggaggtgaagagaacagagaaagagatttccatttctgctgccagagctggtatttgcctgcctgattctctgtgtttcctgtttcaccgccaccctttcaggagagaactacaccagttcatcatgagggtcagggaagcaaaagctctcagatgtgtccagggcgttacttaagaaatgagtatgcagattctggaaggggtgtggaaaaggtgatcctttacccccacccaggaaaacctgcattgtgctagcatggaaaaatcatgggctttggaattaaacccatttggtggaattaaacccatttggtttcaaatcccagttatgacatctgttaactttgcaaactcacaaaaattatttgaaattaaaaaaaaaaaaaa

SEQ ID NO: 223452 - DNA, 1000 bp, Homo Sapiens; identical to SEQ ID NO: 118091

SEQ ID NO: 223453 - DNA, 1000 bp, Homo Sapiens
tgcaaaatcctaactccccgcccactgggatacctctaagacattatgactctggagaaagactttcaaatggagaaagataagctctcaacataaacagtgtactgcagatatttattacatatttattacaaagccaaaacccaaaaatatttataaaaagcaagtatttaatgtcctttgagggatcattgtcttacacaaagtgacctcagttttcgtttttactacacttgttattttaaatccagtactgtacactgagttaatatgatacagtcaaattatttttgctcacgatatttttcagtcttacagaaatgtatgtatatttgtgttaagagtttaaaatgcttgaggatttctaatacagttcattagtttgtattgtatatgtgtttaagtataatttttatttatacaaagatcttatagtcttagaagtatgaaaaataatgcttaagagtatttgatttttttctttttctaattatcttggaaaattggatacttaagacttggagcctttacttcagattaccagtttacattttgtattgcttgtgtgagataatgaataagatgtgatatttggcatgtgtaaacttagttcactctggggttgttaatattatttgtttcattacagagtagctgtaggtaggaaagtaaacatcagaactagcctagtccttgttacgattagtactttggatttgatttttcctgtaaaacagatgcagtcatcttgtttgacctcagtaaccccagacagtttaagaaaacctctccttttgagctgatacaggttttttccccagaatccttttctggcatgtttattgtatgaaataatgaggctctccatggaaggatgaacacatatgagtcaagggattgcaattctctctgatagacttagttttcagaccttataactattgtatatgcattgaagggtgatatatttgcatataaaaataaacgcacctgctctggg

SEQ ID NO: 223454 - DNA, 1000 bp, Homo Sapiens
gaggaagtgattcggagaaactgagagcattgaatgtgcaggttctttcagcagagaccacgcagaggctgcctttggatcaagtccaggaagtgcttcccccaattccagaactataagttacttccacagtgcatcagtgagatcaatatacacgaatatccccgggcaagttggaccgagccctttgaagaatactcagaagtttattttgtgaatgagtagactggaaaatgtttgtgtccagctgaggatgcacagttggaaagcaggaggaatgctgactggttgatgaaaactagcttaagagcattcattcgctccatgagatcaagggaacaagagtgtttgcaagaagccattatgagtcatggaaaaaaagatgatgaaacccatggaaacagcaagagaattcccactctctctcttcttaaaaaaaatctatcattatacagcacagagtggagccaagtttttaattttgaggaaccaaaaacaggatcaaatatgaaaaccctttcttttattgggccacattgtagatgctgatttgataattgtttcctatgcagatagattatttttatttcacagattatttaaaagggaagagggcctggttgtttatttatatgtttgtttgcatttatgaatcttgctgccttttagcaccaggatgtttttaaaaaaattcaaagaggccaggcgcagtggctcatgcctgtaatcccagcactttgggattctgaggtgggaggatcatgaggtcaagggatcgagaccatcctggccaacatggtgaaaccctgtctctactaaaaacacaaaaattagctgggtgtggtggtgcgcgcctgtagtcccagctcctcaggaggctgaggcaggagaatcacttgaacctggcaggcagagtttgcagtgaaccaagatcacgccactgcattacagcctggtgcagagcaagactctgtctcaaaaaaaaaaaaaaaaaaaaaaa

SEQ ID NO: 223455 - DNA, 1000 bp, Homo Sapiens
tggttgttgtatttcacaaaatttcctcatttctaacatgagagatgaacttattttaatataatcctttttctacactttaaaagtcagcaatagtgttatgtatttataggcagcttttaataatcttgtcatatttgtactaacccaaatgattcacagtgacaaaacattttaataacttgatcacaaaaccatatggacaaatatgaattttaatattataaatactatttttaaaaggtagaatttattcgcacagggtaaaaagaatgtaatatttagttctcaagtttgaattatcagtatattattacaattttgtatatcagaatcttaagtgttacaggtacaaaaagaatattgctagccaaatgaacaaagtttagctaaatctctgtagcatgcaaatcaaataaattaaaattttttgctattgctttatctatattgtcttaaatatcaaaagctcaggactgaacttaatatttaatcaggttaaattctgaacatgtttctgttttaatttgtcttgtttgtaaacgtatgcaaatacatcacatagattaactggtttctgcgctttccatgtgtttgtgggtggaaaaaaattcagtggtttttttttaaaaaaaaaagcaaaaacaaagctacatattgcctaatactctatttcagtgtcgtttattgttcagtttatttccctgattggcacaaacacaagagtttccttgaaccatgtaccaagcaaatacaaaatatttcatgaagaaatccccaggctggcagtttgtgatgaatagttcttgttggaactatatgtattgctgataaaaaaggacgaagtattttcattgagcaaataaaatgaagggctccagaaaaaaaaaaaaaaaaaaaaaaaaaaaaaaaaaaaaaaaaaaaaaaaaaaaaaaaaaaaaaaaaaaaaaaaaaaaaaaaaaaaaaaaaaaaaaaaaaaaaaaaaaaaaaaaaaaaaaaa

SEQ ID NO: 223456 - DNA, 1000 bp, Homo Sapiens
tggagcacacggaggaggagagcctggagccccccgagcctccacccagcgtgcgccgtgagttcccgctgaaggtgcgcctgtccacgggcaaggacgtgaggctcagcgccagcctgcccgacacagtggggcagctcaagaggcagctgcacgcccaggagggcatcgagccatcgtggcagcggtggttcttctccgggaagctgctcacagaccgcacacggctccaggagaccaagatccagaaagattttgtcatccaggtcatcatcaaccagcccccaccaccccaggactgatgggcccacggacccctgggaagaggccccgcctggagcactaggcccccaccctgctgctgccttccagtgctgtcattttcttcaggggccctcccctcggtgtggctggtgggtgagccgtgaagggaccctgcctttcagggcactacgcgccaccagttcccggtacccagggagcaggcagccacacacgggccttgcaaccttgtcagagaaaaggcgaacagggccctcaccctgcctgtctcccgaagcaggttcgagccacaagggccaaccaggaggcccctggagcccagatctgtcatctggtgctgccagctgtgctcactctggttttctgctcagggtctgaagcagctgctgtctccctcctctgcccccatcccctggctctcccctgggcacagtgccactcccttggaagggagggaaccacccgtgagccccagggcttgggaagcctgaggcgggcctctgcttctccctgcccccagcacaattggcagagatgaggcgggtggtggacggctgggctgtcgtggcagggtctgcacagggccatgtcctggctgtaacccaggcagtgggaggtctgcagcctggtcatggcctccacagcaggtccctgtggacagacatatctgcatatttatcaataaagccttttgctccttaaaaaaaaaaaaaaaaaa

SEQ ID NO: 223457 - DNA, 1000 bp, Homo Sapiens
ctggctcttctctcccatcctactcccttctgtctccctgccctctgccatcctgaaccatgccttgcttctaacctgcctggtcaagttttgtgaaacttatcctgctgtctcgggctggcacccatatgtgctcaccatgtgtaaggtgacatttccaaatgcctttgtgtgataatgatgatgaatttggttcctagtctcttcttcattgcccttcctcaccagcaatctgcactttcccatcaggcgtcttagtctcatttgtaagtgcataagataatcacagtgatttttcaaagcccaggatcataagtgattgctttttcactggttcttactaactcttcatgtatccactcagaattccaaggacaatcccagcactctgggaggcccaggcaggtggatcgcctgaggtcgggagtttgagaccagcctgaccaacatggagaaaccctgtctctactaagaatgcaaaactggccgggcgtggtggcacatgtctatgatcccagctactggagaggctgaggcaggagaatcacttagacccgggaggcagaggttgcagtgagccgagattgcgccattgcactccagcctaggtaacaagagggaaactccatctcaaaaaataagttaattaaattaaattaaaataaaacatgcgctgggtacagttgcttacacctgtaatcccagcactttgggaggccaaagtgggccgatcacctgagctcaggaattcgagaccagcctggccaacatggcaaaaccttgtctctactaacggtaaaaaaaattagctgggcatggtggagcatgcctgtcatcccagctacttgggaggctgaggcaggagaattgcttgaacctgggaggtggaggttgcagtgagcagagaccgagccactgtactccagcctaggtgacaaagcaagacccacagtaaagcccccacaccccatctcaaaaaaataaaaaaaaaaaaaaaaaa

SEQ ID NO: 223458 - DNA, 1000 bp, Homo Sapiens
  misc_feature (601)..(601): n is a, c, g, or t
ccccgccgcccaccgagctggtgccgtcggagcgcgccgtggtgctgctgtcgtgcgcactctccgcgctcggctcgggcctgctggtggccacgcacgccctgtggcccgacctgcgcagccgggcacggcgcctgctgctcttcctgtcgctggccgacctgctctcggccgcctcctacttctacggagtgctgcagaacttcgcgggcccgtcgtgggactgcgtgctgcagggcgcgctgtccaccttcgccaacaccagctccttcttctggaccgtggccattgcgctctacttgtacctcagcatcgtccgcgccgcgcgcgggcctcgcacagatcgcctgctttgggccttccatgtcgtcagctggggggtcccgttggtcatcactgtggcggccgtcgccctgaagaagattggctatgacgcctcggacgtgtctgtgggctggtgctggatcgacctggaggccaaggaccatgtcctgtggatgctgctgacggggaagctgtgggagatgctggcatatgtgctgctgcctctgctgtacctcctggtccggaagcacatcaacagagcgcacacggcactctntgagtaccggcccatcctctcccaggagcaccgcctgstgcgccactcctccatggcggacaagaagctggtgctcatcccgctcatcttcatcggcctcagggtctggagcaccgtgcggttcgtgctgaccctctgtggctccccggccgtgcagacgccggtgctggtggttctgcatggtatcgggaacacgtttcagggaggtgccaactgcatcatgttcgtcctctgcacccgcgccgtccgaactcggctcttctctctctgttgctgctgctgctcttctcagcctcccaccaagagcccggctggcactcccaaggctcccgcgccttccaagccaggagaatctcaggaatcccaagggaccccaggggaacttccaagcacctgagc

SEQ ID NO: 223459 - DNA, 1000 bp, Homo Sapiens
tccagtctccttttaacatggtgcccagaattccacatacctgagctttgggggctgatacaaagccactgcctctgatcccacggaatgacctgaatttactatcagttttgccacaatcagtgcagtttgaggatacgtagacccctgagatgaggcctgagatagatgttctgggaaaccccaaggaagctaaagtacctgccatggtttctttcatggcaggttgagtaagccaagctcctgagaatgattggtcacattgtctttgctgttaaggtttcttggtttacagatggtgaagttgcagacaagttagcaaaccaactgaattttaataaaggaagctttaggaaaatggatgaagatgcagttggaaaattaaagtcatgcttccttgatacatacctcaattctggcaacttctcacttggaattttccaaagtcagtttttggtaatcttgccatttgtattatctttatttatatagttctggttatgcttggtgtgtgccagctgttttgggagtgatgtttttccttatttctcttggctcctgttaagtgttaagttgctgaaactgacctttaatgcttccaaagcaatcagcatctttctctctggatggcttttagaagtggacacagtttactgatttagccagtgaagagaaagctttccatagtgtggtttactcagagcaggtgacaaaaggatgaatttctggctgggcccagtggctcacgcctataatcccagcactttaggaggccaaggtgggcaatcatttgaggtcaggagtttgagaccagcctggccaacatggcaaaaccctatctctactaaaaatacaaaaattaaccaggtgtggtgacaggcacatgtagctactcaggaggctgagacaagaatcacttgaacccgggaggcaaaggttgcggtaagctgcgagcatgccactgtactccagcctgagctacagagcaagactctgcctc

SEQ ID NO: 223460 - DNA, 1000 bp, Homo Sapiens
aataattaataaactcattcatgtagtatattttaaaacattatttcctctcatttttccttctcttttttcttcctatatatttttaaggcttcaagagaaaacgggcttcagtttttaaaaaaatgtagacttgcatttttactgtgcttatttaaaataatggatataatttatattaaggtccaaattattttattcacaggataatcatggtctctgataaaagatgcccacatttctgtgtactcacagttgttgtatatttttcaatttcaattttgaaagtaaactcaacacattgttttcccattttacctccactacctactcgccagacaaaaatatagatttctctaaaaacacatacaaagaaaatgtctttccttaaaacatgatcttattgacatgaaggtagtttgagcaagggtatgtaataaaataaatggctctcaacctgcatcaatttttatactatagttaaaaaatttatagaggacaacctatgtgttatgctgagatagactcagtaatcatttgtttgcaaattgattatttttttctcatccatccagaaagtacagtgcataacaacaacacttaacaagtgcagaggaacctgtcctgtagtatataataaaaaatgattgtcaccttgctgatctttccatttaaacatgcatgatctccagtactttgtacaatgtatagtatattaaatacatttatgtgtaattttgtgtgtatttttatatggtataattaaaattattacatttatgtgattgtaattcacaaaaagtactacttactatattctgtagagtgtgttgtgaatgtttttacctgtgtttgagcattatggtgtaggtttaatagatgaatatttgccttcagtctctgctcaggtattaatgtgtagtaatttttggtgctttctttttaatctgtgataatctggtgttctgaatgttcaaaaataaatttggttgaatacgca

SEQ ID NO: 223461 - DNA, 1000 bp, Homo Sapiens
cccagcagctgcgtccaatccattttattatctgcatggcacattctccagtattttccaaaaaagtcttgtgttgacttcagatgactatgacttcttttttaaactcttgctgtaaaagatggtgaggacttcattttttttaaaggttttttagaatactgttccaagaagtttagtgttttgcagctttgagctaggtggtaatgcaaatataaaatgctgggaacagaaaaggacaggttaattccaattgttgaggagttaagtcattgatggggtgggtcattgatgagttcttaaaggatggtatggaattttgtttgttaaggctaggaaagacagggagagacaaaagtaaacatgcagaaagaaatcttatatcctctataccaaactttgcttaaggatgagaaatgagatgtgttatgtgagaacattattttgagcccaaaatgtgtcatcacagtttttaaaaatcttatatatgtatttatatgtgtttcgtatttgtatatagtatcaagaattggttctagttcccaaattatcttttcttccttggttttgttctcttggcttgatgttcacattggatatttgtgtttctatataggctaatgtaaaagatgccaagcaaaccttaagtgaaattgttttctgatttgcatcctgtttagctcttaatgtatctaaggatgttctcatctcaccattctactcatttagtgagttttctgatcttgtttaggcaatatttgcatacttatgcaataagataaaggtacccttgcctgcagtagttctgtttcctgtagaaaagtggataaagagtcccagaagaagttcttactagcttgggagttacctgattaaccagagaaaatttttggcttacttatggaacaagcattatttcttctttgttaggaaagatctaaatatggtccttgacttttaataatcattctttagaatgttaaataaaggcaacccaagt

SEQ ID NO: 223462 - DNA, 1000 bp, Homo Sapiens
gccaaaagagcagggaacagcaaaaccctttcctcccaccgtgggccttggagaatgaatgcagggggtggccacgggtagtcgtctggggcttggttctccctgagctaacctcgccagcctggcccagcttgccctgatcccctgatggtccgtgcacatgtgtttatacttgcattgttgactggggtccaattgcctttttggcaaaggcatcaagcattcaaagatgttcagatcttttctgtctggctcttttcctcggaatgaggctccagtgtgtccctttagtcccttagccattatctgagaggctagaattctggcagtgtccccgtgcatctttccccagtggaggagagaactctcggaccagtgagctagagaagcaacccaccccggccgctggaagcaggggaggtgaaatgtgtccaaactcctctcaggctgtcagatggccttgagcggcaccaagtagaaaacgcgctcccacccctgaccttctcctcagcttcattgtgagacctcaagttcctcagcttccaggatgatcaacctagctgaaaacctgaagtccctcccggtacaagtccaagcagtccccagccagggagaccaggtgttgtctgacatcccacacacatcggcacacttgggggattgcaaaagggaggaagggagccaaaggctagggccccggggttcagctaacactcagcacccctcccaaagagcgccccctgtgtgttctggatctctagaggggtttggtttgggccaagtagtgcttagttttaattttctctttctggaaataaatacttttaataagtaaagatgctgctcagctgtcatatcctgcaaggttagaggaaagatgtgggccgtgcgcggtggctcatgcctgtaatcccagcactttgggaggccaaggcaggcagatcacttgaggccaggagttcaagaccagcccaggcaacatggtgaccccatctctacc

SEQ ID NO: 223463 - DNA, 1000 bp, Homo Sapiens
tatggtctaccagtaattcatacttgaggaccatgactgtggggaatgaggcatcttttagcaagagctctcaccaattgtagattggtgtgaattgctaagggaaaaaccttatgcagagaaaagtttttgactggaaatacactgttttgcatcaagctggagtactggatggaaaactctacaataacattttgtgcataattgtagaaatacagattttgttgttataaggggagggtctgggtgcccaggagtagaatatgaagtgctaaatctgaatgtaagaaaaataatagtattgaatggggtatttactgttgattaacctccttagagaaaattaatgaatgagatgactaacggtagaaaagttattgcctaggagtgtgagactgatgttgctggacagaaagtgatccttagcccagtgtgtcagcgtccattgttactcatcactgcattgttgggcaattagtttgtaatttgttttaggcaatcactataaattataattatggacactgcatcagtatacataacatgaaggaataaaaaggatacagaattgtatatacatacttactgtaacacatctaaaaaaatgtatatgggtaaggacctgaaagatccatggaaaagttaacccagttgagatttttaaaaagttttacaaatacatataacacttatgtgctgggctttcttttaaatgctttccaagtgttaacttgtttagtcccctttactctgagataggtactgttaccccagttttacaaatggctaagctgaagcagagatgttgaaggatcctacctaaggggcacaactagtaagggagtagagctgagattggctccagagttcttgttttcagccaccattttatgctgcctctccagtgattttttttcccattttcttcagtgtttctatagcagagatttgataataaaaagaaaatcctaaacaatgagaaataaaaaaaaaaaaaaaa

SEQ ID NO: 223464 - DNA, 1000 bp, Homo Sapiens
agctttctgaggaacaggctgctgtgctgagggccgtcctgaaaggccagagcatcttcttcactgggagtgcaggtagtgggggcagagaggaggtagggggacagtggtggggtgggatagaggaacagggagacctgtctaactttgcccctgtccaggaacagggaagtcatatctgctaaagcgaatcctgggctcactgccccccacaggcactgtggccactgccagcactggggtggcagcctgccacatcgggggcaccaccctccatgcctttgcaggtaagtaggaacccctagggcttgagctaagagcaagcccagcttctgggaagggagagaggggaggtctgcataaagagggagttttgggggctgggcgccgtggctcactcttgtaatcccaaaactttaggaggccaaggtgggaggatcgcttgagcccaggagtttgagaccagcctggccaacacagtaaaccctgtctccacaaaatttaaaaattagcggccgggcgcagtggctcacgcctgtaatcccagcactttgggaggccgaggcaggcggatcacaaggtcaggagatcaagactatcctggctaacacggtaaaaccctgtctctactaaaaatacaaaaaaattagccaggcatggtggcaagcgcctgtagtcccagctactctggaggctgaggcaggagaatggcgtgaacccaggaggcagagcttgcagtgagccgagatcacgccactgcacttgagcctgggcgacacagcgagactccatctcaaaacaaaacaaaacaaaattagctgagcatggtggtgtgtgcctgtagtcccagctactatggaggttgaggtgggaggatcgcttgagcccatgaggcccaggttacagtgagccaagatcgtgccactgcacttcagcctgggtgacagaaagagaccttctctcaaaaaaaaaaaaaaaaaaaaaaaaaaaaaaaaaaaaa

SEQ ID NO: 223465 - DNA, 1000 bp, Homo Sapiens
agaaagagagaaagaaagaaacagaaaaacctaaaagaaagcgaatgaatttgacacctgttggttggatgacagaccacacagagggagagtgaccaggctttgcttgtggagcgggcatccctgcctagctatctccttcatgtgcaaggacagtataagtagtattttgcatgtgagtaaacacacctgcgcagccctggctgaggtcactaggctggccagaggcaggacaggcagtcttgaatttcctctaggggaggcctgcagttttccccaccaaccccttttcacatgctccaaagatgtagtagtgtctgctgttttggatcgaaaatcaccttgagtggaggaagtgacttcactgggtctctggaggctctcggagcttgagtggctctgccccaccctgaatcatgcacccataaatgcagttatgggtggatgtgggtgtatgagagtggagattgtttttgtacattctctttgttttcattttccaaatataatctttaataaacttgatttagtttcttgggaaatttattttctacgctattcaaagatattttaaataatattttaaaaacatgaaatttttttttcatttttgatttgatatcattaattttatatcaggattcatgtaagagactaaaaatgatccatagtggttagtactgtaatttctgtttattacatgaaattacattccatttatccaaatatatgtttatataatatttccactgtgtgactctagtgatctttaacatacacagaatgatctacagtgatctttaacatactcagaaatatgaaaaatgtttgaatatgatctttagggacttctaatgaaaagggtatatgaaatgggaacaataaattctgtacatgtatacagtccatatacacattaagtgtttgtcatttggacaaattgaaaacttttaataaagccattttcttctttgttaaaatgccaaaaaaaaaaaaaaaa

SEQ ID NO: 223466 - DNA, 1000 bp, Homo Sapiens
tttctggggcccaggaggatctgggctggtttgtctggggagacagacaggatgttgtggagctggggtggaacctggtatggagggattaactcagtcatggcattctccgaccaaaaccacacctgtgtctctggcaggctggctggccttgctcccatccctagaactgctgcctctccctggatattccagctcaattagtgccacatatgggggaaacgacacatcccagtgggatttccaacactccccctccccatgcaacaaagcaacttacttctggagttctctcccaaggagaggacacagacacagttgtttgctgtgttatatgttagctccgaacaatggttctcatttggctaagcatcaaaatcacctagggagtcggtgcaaaacaaaatatcccagtcccctcccctgaaacactgactcaggaggtttggttgggggccaggagtctgttcctaaatattccaggtagttctggtgcaggtaagtggccctgagacagtatgttgggaaatgctgacgtaaaggtatcagggccgggcgctgtggctcatgactataatcccagctgtttgagaggccaatgcaggaggatggttgagctcaggagttcgagatcagcctgggtaacatagcgagaccccacctctgccaaaaaaaaaaaaaatagggtatccaaatatctagattctgatcccttttgaggtcctagaccctttgagaaactgatgaagccaggcacctccttcctcaggaaaatgctggtgtacaaatacacacaaagctcttcaggcagctgatagatttcccccagagagctattcaaggacttcctaaggtgggtggactgcagggttaggacacctgctatagaggtgacatttttccaaggacaagcagggactttggtcttgactgttctctgggtgcttaataaataatactaattatgcaagttctagaaaaaaaaaaaaaaaaaaaaaca

SEQ ID NO: 223467 - DNA, 1000 bp, Homo Sapiens
cttcaggagcccccagtgcagagcccaggggctggcaggagcccgtggggcagggcagacagcctggccaaggagcaggccagcgtgtatactaagctgtgtggtgtgtttcccccgcacctggtggaggctgtgatggggcgcttcccacagctcctggacccccagcagctggctgccgagatcctctcctacaagtcccagcaccccagtgagtaagctgcctgtggctggcaagggcagcacccccagcctccaagggccgtcaggctgggctttgggccattgagcagcccattcccagccctgaggcccaccccagaggctggacagagggaggattcaagtcgggaaggaaacccacaaaccaaagatactgtaggattggttctggcccatgcagcacctctagctgtctgcctcagtgggtcagaagcgatcaccctgttgatacacattgtatctctgtagtttaaggagacgctgccggtaacggcgtcggtccgtggctgaggcccaaaccgtcttttctctcagagggtggggagggaggtgggggcagcagaggcctgggctgggtgccctgtgcacgccaccccacttccgccctacccctgggacgttggccttggctggctagttgggcaccgtgtgcctgccctccaagggcctcctctacgccaatgaggcctcatctgtgctctcgctgggcacgtggcttcatgtcagtaagcaagatgcttcttaataacccaccttctgccccactctattccttatcctgctgcccctgtaggggtcaagggccctccgtctacaccctcttcttctcctccatcctttattcagagtcatctcgcccttccccatgggtgggggaacctgtgtttgtttgtgtgcacatgtaaattttaaatattttaagcagaaagtccttacctcctgtaacacatcaataaagtacaatcattgtgagccctttcaaaaaaaaaaaaaaaaa

SEQ ID NO: 223468 - DNA, 1000 bp, Homo Sapiens; identical to SEQ ID NO: 118102

SEQ ID NO: 223469 - DNA, 1000 bp, Homo Sapiens
attgcaagatacctctaagatgaagcgcttcaatcaaacactttcaaccaacaaaagtggttatacaagtcgcaaccctcagtcataccacctacttagtaaagaacaaagcagaaacagtcttcggaaagagtctttaatatttatgaaaggagtcatggatgaatgtactcatgtagcaaatttctcagtcccagttgatccaagcctcattatagtggttcaagccaaagaagatgcctatattccacgaacaggagttcgaagtttacaagaaatttggcctggttgtgaaatccgatacttagaagggggtcatattagtgcttatctttttaaacaaggactcttcaggtaagacggctggtctaaacatgtattcgttcatttgttgtttgttttctggattttttgcttcaacaaatgtaaaagatcacatatttttatagtctgtttcaatctttgaattccctcctcacctcccacaaatctcacagagttacttttccctctttcctagaatttgatcttcttattttcttctagagaactaagcatgatgcatattataggcatgctttatcgtgtggctttcccctcttcaaatattaatggccaggtattttaggatgtgagaaggaagatcatggcttgttaaagttgctttggtgcatcaagagttttttcactctattctgatgttttttcagaatggcctgaacatctgtggaataatttagcaatgtttttcagttagcaagtgaatattgaaccttaaataagaagtgcttttaatgtgaacaaccttatatgactccactattttagttagaacttataaaaacttttatgctggctgggcgcggtggcttacgcctgtaatcccagcactttgggaggcggaggcgggtgtatcacgaggtcaggagatcaaggccatcctggctaacacggtgaaaccccgtctctagtaaaaatacaaaaaaaaaaaaaaaaaaaa

SEQ ID NO: 223470 - DNA, 1000 bp, Homo Sapiens; identical to SEQ ID NO: 118105

SEQ ID NO: 223471 - DNA, 1000 bp, Homo Sapiens
cgaacagctctctcagaagcatctgttccttcctggtcacgaggtggccagagcacaatgtataggcagaccagtggtccttcctctcccaatgtggccatgtggaggacaggatgtcttcctgggggttgggatggactctctgggcactgtactctctctcctacctgcctccctgcagtccctcccatggatgactcaggcctcccagaagcaatttctatctgtccccttcactttcaggccttggggagtctctgctcctacctgactctgtgttgtaatttcaggggagcatcagtggaggaggcagtgggggcagcagcagcctcctgaccaatgcccgctcttggggagtgaggattctgcacgtggatggtaccctttctgtgctgggctcctgtggagggagaattggtgactttgaccaggagtgtcagcttttagaaggatcatggtcatgtgagcttctggtcaccggaagccagaaatactcagctgccatgttgatccacaaaggtgggaggatgtggggaagggggaaagcggtgaggacgcagagtgcaggctgtggcctcggcatcccgcaggaggtccctagaacatgccgtttcatgtcacctgctacagctctcccccagctagtatgatgatcctgttttacaaatgcagaaatgatcttaatattcatgaccactggccaggcgaggtggctcacacctgtaatcccagcactttgggaggccaaggcgggtggatcacaaggtcaagagttcgagaccagcctgaccaacgtggtgaaaccccgtctctactaaaaatagaagcattagccgagcctggtggtgcgtgcctgtaatcccagctactcaggaggctgaggcaggagaatcacttgaacccaggaggcagaggttgcagtcagccaagatcatgctactgcactccagcctgggtgacagagcgagactccgtctcaaaaaaaaaaaacgacaaatat

SEQ ID NO: 223472 - DNA, 1000 bp, Homo Sapiens; identical to SEQ ID NO: 118109

SEQ ID NO: 223473 - DNA, 1000 bp, Homo Sapiens
ttgctgaaaatgaaaggcttcgtaaagaacttaaaaaagaaactgatgctgcagagaaattacggatagcaaagaataatttagagatattaaatgagaagatgacagttcaactagaagagactggtaagagattgcagtttgcagaaagcagaggtccacagcttgaaggtgctgacagtaagagctggaaatccattgtggttacaagaatgtatgaaaccaagttaaaagaattggaaactgatattgccaaaaaaaatcaaagcattactgaccttaaacagcttgtaaaagaagcaacagagagagaacaaaaagttaacaaatacaatgaagaccttgaacaacagattaagattcttaaacatgttcctgaaggtgctgagacagagcaaggccttaaacgggagcttcaagttcttagattagctaatcatcagctggataaagagaaagcagaattaatccatcagatagaagctaacaaggaccaaagtggagctgaaagcaccatacctgatgctgatcaactaaaggaaaaaataaaagatctagagacacagctcaaaatgtcagatctagaaaagcagcatttgaaggaggaaataaagaagctgaaaaaagaactggaaaattttgatccttcattttttgaagaaattgaagatcttaagtataattacaaggaagaagtgaagaagaatattctcttagaagagaaggtaaaaaaactttcagaacaattgggagttgaattaactagccctgttgctgcttctgaagagtttgaagatgaagaagaaagtcctgttaatttccccatttactaaaggtcacctataaactttgtttcatttaactatttattaactttataagttaaatatacttggaaataagcagttctccgaactgtagtatttccttctcactaccttgtacctttatacttagattggaattcttaataaataaaattatatgaaattttcaactt

SEQ ID NO: 223474 - DNA, 1000 bp, Homo Sapiens
agatgactatcagactgagaacaaaatcctgggtgtacactgtctccatcacattgtgcttaatgtgccagctgctgatttgctccagtataacagagcccaggtcctataccatgccatttccaaccacctgtacacaccagagcaccacctcattcaggctgtgctcctgtgtctgctggatttattccccatcctggagaaaaccctgcactggaaaggagatggagctcgacccaccacccattgtgatgaggtcctgcggctgatcctgacccacatggagccagagcaccgccttcttttacgcaggacctacgcaagaaacctgccggctttcgtgaacaggttggggatcctaactgtccggcacttaaagaggctggagagagtcatcattggttatctggaggtttatgatggacctgaggaggaagctagactgaagatattggaaaccctaaaacttctcatgcaacatacttggcccagagtttcctgcagacttgtggtcttactgaaggccctcttgaaactgatttgtgatgtagcaagggatccaaaccttacacctgagtctgttaagagcgccctgctacaggaggccacagactgcctgattctcctggaccgccgttctcaaggacgggtaaagggtctcctggccaaaattccccaaagctgtgaagacagaaaagtggtgaactatatcagaaaagtgcagcaggtttctgaaggcgcaccctacaatggaacttaagacttgtattactttcccaagaggaaaggattttcttcccatcccaatttgtatgaatggagttatttaagaaaaaaagatatttttacacgaaactttgtaagtgaaagctgctttttccttccttctttccttttacctccataagaatagggaaagtagaacaagaaaaaattgaactccttccatttctaaataaagtttgggagaaaaaaggaaaaaaaaaaaaaaaaaaaaaaa

SEQ ID NO: 223475 - DNA, 1000 bp, Homo Sapiens; identical to SEQ ID NO: 118111

SEQ ID NO: 223476 - DNA, 1000 bp, Homo Sapiens
tgttctcttcagtatgtatgcagaactgaaatcccagaagatcaaaattccctccgagatggccaccaacctcatgattctgcacagctatatactagtaaagattcatgttaaaaatggagatcacatgaaaggggctcgcatgctcattcgggtggccaacaacatcagcaaatttccatcacacattgtacccatcctgacgtcaactgtgattgagtgtcacagggcaggcctgaagaactctgctttcagcttcgcagctatgttgatgaggcctgaataccgcagcaaaatagatgccaaatacaaaaagaagatcgagggaatggtcaggagacccgatatatctgagatagaagaggccacgactccatgtccattctgcaaatttcttctcccagagtgtgaactcctctgtcctggatgtaaaaacagtatcccatattgcattgcaacaggtcgacacatgttgaaagatgactggacggtgtgtccacattgtgacttccctgctctatactcagaattgaagatcatgctaaacactgaaagcacatgtcctatgtgttcagaaagattaaacgctgctcagctgaaaaagatttcagactgtacccagtacctgcgaacggaggaggaactgtgattggcacgtgcagatacaatgctcctgagaagacagcattttccacaggaggctgtttcctcccctggtggatttaagagacggtcctttctggatacagagaaatgaaacaacggtgacctctccaggtcggcactttccacttctgtacggtggcaaaacgatgacatgtaaccttgctgtttattgtactttgtatattatttcctcttcaaagtctttcttacacactctatcctctgcactgttaatagtaacctatgacataattgtaaatattcagctttttgctaacttttgtattttgaaaaactttaaaataaaattgttgactagaaaaaaaaaaaaaaa

SEQ ID NO: 223477 - DNA, 1000 bp, Homo Sapiens; identical to SEQ ID NO: 118113

SEQ ID NO: 223478 - DNA, 1000 bp, Homo Sapiens; identical to SEQ ID NO: 118114

SEQ ID NO: 223479 - DNA, 1000 bp, Homo Sapiens
ctgcattacaataatgggatgtcatcaccattgctagaatactggcatgattcttctgagcagaagttgaaactgtaaatttaaaccttttaattatcaccttacctgaaagaggttagttaagatattcacacagtatgtattatattaaccatatcacacttaagttattaaattcagactatttgtaacttattgttatagggcctgccgtatggcttaggatatttgagtaatcatatatttaaagtaaaaactttgggctgggcacagtggctcacacctgtaatcccagcacttggggaagctgaggtgggcagatcagttgaggtcaggagttctagaccagcctggtcaacatggcgaaaccccatctctactaaaaatacaaaaattagctgggcgtggtggcacacacctgtaatcccagttacttgggaggctgaggcacaagaatcgcttgaacccgggaggcggaggttgcagttagccaagatcgccctgctgcactccagcctgggcaacagagggagactctgtctccaaaaacaaaaacaaaaactgttagtgaaggttccctgggacttttgatattttaaaaattgttcttatgactagtagataaattcattgccataatgaggctagctcccagataaacagtgtattttcttctttttttttttttttttggtgagtggtccagagctttaagctacttttccagtagtttgccactttctccgaggtagtttggctgctctttcagtaatgctaattgtgtgtcaaattttgtctacaacagtaggcaacagatgaagataagttggttgaatgtctccagcactatgcatccctattttctatttattgtgtacactcactttcagtaatgtgtttcaaactggtattttttaaaaaacaaatcaatgtaaggactgaagttgaagtagcaatgtaataaagttaatttgtttattttttgaaaaaaaaaaaaaaa

SEQ ID NO: 223480 - DNA, 1000 bp, Homo Sapiens
catcatcaacaagataaatatgaaggacctggtggttgcttatggaaccacagagaacagtcccgtgacattcgcgcacttccctgaggacactgtggagcagaaggcagaaagcgtgggcagaattatgcctcacacggaggcgcggatcatgaacatggaggcagggacgctggcaaagctgaacacgcccggggagctgtgcatccgagggtactgcgtcatgctgggctactggggtgagcctcagaagacagaggaagcagtggatcaggacaagtggtattggacaggagatgtcgccacaatgaatgagcagggcttctgcaagatcgtgggccgctctaaggatatgatcatccggggtggtgagaacatctaccccgcagagctcgaggacttctttcacacacacccgaaggtgcaggaagtgcaggtggtgggagtgaaggacgatcggatgggggaagagatttgtgcctgcattcggctgaaggacggggaggagaccacggtggaggagataaaagctttctgcaaagggaagatctctcacttcaagattccgaagtacatcgtgtttgtcacaaactaccccctcaccatttcaggaaagatccagaaattcaaacttcgagagcagatggaacgacatctaaatctgtgaataaagcagcaggcctgtcctggccggttggcttgactctctcctgtcagaatccaacctggctttatgcacctagatgtccccagcacccagttctgagccaggcacatcaaatgtcaaggaattgactgaacgaactaagagctcctggatgggtccgggaactcgcctgggcacaaggtgccaaaaggcaggcagcctgcccaggccctccctcctgtccatcccccacattcccctgtctgtccttgtgattggcataaagagcttctgttttctttggcaaaaaaaaaaaaaaaaaaaaaaaaaaaaaaaaaaaaaaaaaaaaaaaaa

SEQ ID NO: 223481 - DNA, 1000 bp, Homo Sapiens
atgtcttcatatttgacttgctaagctaaggttcacaaaactttgatgtatcaatgttaactgctatatttaggaattttttgaaagctggtgtgtaccacctgcaaagaactgcattttattttattgaattacccctttagaaatcatgagtttatgatgttacaagtccattttgggagagaactgtacactttttgcaggaccacagaattagtaatttaaatgatatactaaatttgtgtatgggcataagtattacgccttcccaccaggcaatttggactgtctttgaatcctgtctttggtactgtcttggacatgttcttaatatgaacctctgcttcttcatctggatcacactataccccagacttaatgaatttcagtctccaggagtggagcctgaacataatgtatttttagtaagaccatgatgatgttgatgatgattctggtaatcatggcagtaagaataatagctaacatttaacaagttaattataattgttcttccatttgtgtgagtgggtactattatctccattttacagataagtaatttgagatataatttgaaggcactcaaccttgagtgtcttgctgagggttactgtatctagcaggtgatggagcttggatttgaacttgagtaattcgatattagattcatctttttgtacaccaatgtgcttttgttaattaaaaaaagtcggtggtggctaggcgtggtggctcacgcctgtaatcccagcactttgggaggttgaggtgggtggatcatgaggtcaggagttcaagaccagcctgaccaacatggtgaaaccccgtctctactaaaaatacaaaaattagctgggtgtggtggcatacgcctgtaatcccagctactcgggaggctgaggcaggagaatcatttcaacccgggaggctgaggttgcagtgagtggagattgtaccactgcactccagcctggtcaatggagtgcgactccatctc

SEQ ID NO: 223482 - DNA, 1000 bp, Homo Sapiens
gaagaatatggaaatgctcctccaagagaaagtggataagctgaaggagcagtttgaaaagaacacgaagtccgacctgctgctgaaggagctgtacgtggagaacgcccacctggtgagagcacttcaggccaccgaggagaagcagcgaggcgccgagaaacaaagccgcctcttggaagaaaaagttcgcgctctcaacaaactcgtcagtaggattgcccccgcagccctctctgtgtaaagacagattattttctaggattcattcgaaagcacatcttttaaattaagccactgtgctgccttagattccgtgggtcatgagccatgagtcctgggacatctgaggattgggattctttgttcaccccgcagatagttaatgaatggtctgccctgggcaagatggaggtgggggctgggggaatatgcatgttgcagaagccggcgtttttattagcggtcctgagtaatttcccttggcaaaattcccagttttgccactctctggagccagatcctgggagctgtcagcaaggagcaggtaagtgagcagttatggacagcactttccatgtggtgcttccgaccctggctgtcagagtgaaatgtaaagtcagggctctgtacagttttgccatttcactgttctgctttaagcttagcttattagaactcttggtggagggtgcgtacacacattccagaaaaggcttcactcgctgggaacgtcaacccagcgagaaaggaggggaagccccttctccggggaccttatctgtggactcaggaatgatggtgtttattgcaaatgcacaatctttttcccattgaaatgtcatcacactggaaattgtactatatgtaaaaaaaaaaaaaagtatagttttatatttgaaatgtatgcaaattatggccatatggctgattggaatgtactactgtaatataaaaagtcactgtatttgcaataaattcttttctattaaaaaaaaaa

SEQ ID NO: 223483 - DNA, 1000 bp, Homo Sapiens
ctcacgcccaaatggattatttgggtgtttaaagcttctgattcttactacaccctgccctacttcgggtactccatgtgcctgtcccctcccttgggtttcccaggccagcttaggtagtagggaggaactggagctaccctgagattttctcaagttcccaggcaagttatgccagcgttgcctccctgtcctgggcaggggccacttgttattttatttatttttaatttataatttattcaaattggattgccttggtaacctcccacacctgataattggcatcactcctccccgcttcccactctcagatattgctccaacctcaggagttgaagaggcttatgcggtgggggcaggaggagaactgctttccctcagctgagggaagaggggctattccagagggactgagtcagtagccaaagactcagcttcccctgtccttccccagtcccttcacttcccctaccctctgacctatctctgaaagccaagttatgcgtatgtgtgtgtgcacaagcttgtctttgtgtggtatgtgtgtgtgagtgtgcatgtatgcacacacacaggggttaaccacccctcacctagggctccagactccagttgtccctctcctcctacctgtgtctccttgttttggggtcctgactgaagaaggtgtccagggggcagagtcagggccaagcactggggtgcctcctctcacctggccagactctgacccacctacctcagctggggtgaggggcacccctcaaactcagtcatgtggttccaaactaccccattccccactccagactctgacccagcctcagtcctaactcctggggctgggctgaggggaacaagcatttgctgaaacttgaaaaaacaaagcaaatcaaaaacaggaaaaaattgtacctggtacttttttttagaaaaaaagattaaaaaagaaagaataaattcttgtttggaaacttgaaaaaaaaaaaaaaaaaaa

SEQ ID NO: 223484 - DNA, 1000 bp, Homo Sapiens
ccacctgcccttccctgttcctttcttgcacgcgctccctgcctgggcacaccaaactggttgaaacacagctttctaccatccaggtacatgcccaggcctggttctcacccctgttggagtcagctttcaagattgcctgtgcccctgctctgccccatcctggctggcagggctgcatgtttccatcctgtttgcctcttttatttaatgccaaagttttagccaaagacatcttcctacttttgttgtgtttcagcattctgttctgcactgtgggctggctctctgccccaaccctgggcactggcccctggctgggccatttcatggctcaaagcctctgggggctcaaggaaggctgggctgctcagtcccttcatgggtcttgctaatggaaagtagcatatatgtgctttaaaaatattaatccttttgaaaagaactgagaagaaaaatgtataattttatcccatttttaatattttggtctagcaacttgtgatacatagatgacaattttgtgagtttttcaaatgtgtgtacagatttttgtaaatatgactcttttgtaattaactcatgtacagcctcatcctgtatagtttaatgatgaatgtgcaggggacctgtctcaggctcctatatggttcctgggccttatagccaggtttgtgtggcgctcccgacttttgtgactgactggtgtcttcccatttggactgtggcctggccagagccccttgcatatccccactgtcaggggcagccaggactgttcccatcctcctggaatgggggaaccttccttatcccctgcccacatcccctctccaataaagcacctgtgccctcagcaatggcctgccatgtgctgttgctgggatgtttgtattaaaaaaaaaaaaaaaaaaaaaaaaaaaaaaaaaaaaaaaaaaaaaaaaaaaaaaaaaaaaaaaaaaaaaaaaaaaaaaaaaaaaaaaaaaaaaaaaaaaaaaaa

SEQ ID NO: 223485 - DNA, 1000 bp, Homo Sapiens
cattttgtacagtatggaggtatctattccattggcactgaagggtctaggtagtttagttcctttctgatataaccctttttttttcttttttttttttttttaaagacagagtctcactctgtcacccaggctggagtgcagtggcatgatctcggctcactgcaacctctgcctcccggttcaaatgattctcgtgccttggtgtcccgagtagctgggattacaggttcccccccaccttcccccacacccagctaatttttgtgtttttagtagagacggggtttcaccatgttggccaggctggtctcaaactcctgacctcgtgatccacctgcctcggcctcccaaagtgctggggttacaagcatgagccaccacacctggcctattatgacctttttcatttttctctgagctacacattatttagatatttcccctagagattagaaacctcctttcatcctgtccactttttgttagcatactttcattggatttactggtacatgttttgtgatcatgataatgtgatcttgttttggtggtgtccccctactccgtctctatgccatgacagccttctgccccaaagcctggaagattactctttggtcaagggcatacaaatagaaagttaataaaggggaatggtgttgaaatagaacctcatacatttattacagttctacttatacagaaaatctagacaccttcatccttctcacagctctgttttttagtagagtagtctttagagtagtcttcactgttatctatatacctagaaagttaactgggagctttgactcttactgtgccttcactcatagtgtgccttcttagctgctggagaatttggggagaggatgtacacagcactggtgcctcagccctgccaaggtcttcactgtatatattttgtgtgttcttctgaaactcttgatttcttatatggcaataaactcagcatgtattaaaaaaaaaaaaaaaa

SEQ ID NO: 223486 - DNA, 1000 bp, Homo Sapiens
gaagtgatcaccacagccataaaattgtttaagaaagatttatataatgtttacaaatctggaatcaaggattttagctgaaatcctttaagagatattagagcaagtatttaattcaggtattttcaagttttaaaacttaacctgtttacctacttaaaaataaaatagctagtttttttctgcatataaaagttcattgaaatgatatgcccttatttgcaatacttttcccataaagttttaagtgtgaaagaattgtaatttactagatatgtttggtatgggatattttgttaggcaagttttcttttttcttcttaaattgcaataggcttccaaaaagagtataattgtttcagaacaaattaactcttggcattatacgtctccctttttctttacagtattagtaaaaagaaaaattgtacactttctgattttaacttcactaatgtaattactctctcaagaagcttttaaaatttaaattaccatcacacaaccttttttatagtaaagccaacatttgttctctcaccaaaccccatgccaaattcatcatgaagaaagctcagcataagtaattcaaatactgcttataattttagaggggggtagaatttagtaaatattccagccggtcgttttatgcacaaggcttcagtcagaacatagaaaaaaaaaacattctgtgaatgaaatattgtatgttcagattttataaaagacatttttaaaagcccaatttacagccgtatattttcttatgatgtaatttatgaaaaagatgtctgtactaacaggtgctgtaacactactgttgttggattttattgtttggtgataaatgtatacaatatttctaagggaaactatgtactgtgatgtaaaagtctgggcaaaatgtatataatcctgtatataattatgtatttgattataattactgattgtaaagatttaataaaatatgtaaatattccaaaaaaaaaaaaaa

SEQ ID NO: 223487 - DNA, 1000 bp, Homo Sapiens
gttcagcccagtgacggtggggctggggcctggaggcccagatacagcacatccacccaggtcccgagccctcacaccctggacgggaagggacagctgcattccagagcaggaggcagggctctggggccagaatggctgtccttgtcgtagagccctccacattttctttttcttttttgagacagggtcttgctctgtcacccagactggagtgcagtggtgtgatcatagctcactgcaccctcaacctcctgggttcaagcaatcctcctgcctcagcctcctgaacagctgggaccacaggtgcacgccaccacacctggcttttttttgttgtttttagagacagggtctcactatattgctcaggctggtcttgaactcctgggctcaagtgatcttcccacgtgggcctcccaaaacgctggaactacaagtgtgagccaccgcgcctggcccaagccctccacattttcaatccaggagccttgagtctgtgttgtgtcctgacacctccaagttctagggccgtcaggacacgggagggtttggggacagagtgtccttcctctgtcctctcatcccagtcctgatggccgcttggtgagtgtctggtgccctggtggcctgccccagctctcttctggctttctgagcaggaagcgagcagaggctccacaggcttacgctgctctcctgacagccacacgcgaccctcggtgcagagtgcagaggcggctctggttcctccagccacctcagtccctctttgggaggtgatgttcccattgtttttcaaaggcctcaccttcaactgtctgtcttagaattcccctctggagggctatggcctccctatgctttcacttcccacctctctacctaagttccttcccagcacatcgccagccctgggcctggggatgtccccaatgctgtacctggctgaccccggattaaaagcctcatccacgaccgaaaaaaaaaaaaaaaaaaa

SEQ ID NO: 223488 - DNA, 1000 bp, Homo Sapiens
aggtactcttaaaaactggccctgggaaaattttgaatgaaatttcaagggaatttgtcccctctgggttccacttgaggttgtgccgatgctgctaccacactgtcgagcccaggtaagtcctactgcaggattttgtgctgtggccactcatgagtgtccctgaaataactttttttttttttaaatccagttttgggatcacgcaactttcctatttttctcccagtagtcagctcccttagttaacttgtcactttaatttgatatttttattttctctccttttaagtcttagagaccagcagagaatctgtgagagaaagtatttcaggaagttagaaattcaaccgaatctgaggtagtcctaaaaagtgccattttgtttcacttatgggctaaagtaccagcttagtcaggtaagagccctgacccacttcagatggtaacaccacttctcactgccttcagatggaatcacagatttcagtcacggcgcataacaaattgatcagtgagtggctaggcatctgcagataaattgtttcagccatagaagctccattagcacatatgcttccttttccccccttcctttaaaatcatctggaaagaaactattttgtgcccttggggactcctgtctgtctgttacagtttaccaagatggagctgggttaggaaagaagtgagggcccattttgtggttcaagtgcactagacagctgctggggtaggaagcacaggcaatgtctgcaatcagctgtgggagagcggtgactgagaacagtctgaggcctggctccacttggaagtatctggggtgcgatgaaatcacaattatcttgaagcctaaagagggaactacaagactgttaactaagatcaatgtgggcacctaaaagggtatgttaaaatcaccatttctcaggtcaaaatactgtgaaataaaaatggaaacggaaaaaaaaaaaaaaaaaaaaaaaaaaaaaaaaaaaaa

SEQ ID NO: 223489 - DNA, 1000 bp, Homo Sapiens
gatgaagcctccatcgcccccattctggctgaggcccaggcccactttggacgtaggcttggcctgggttcctaccctgactggggcagcaactactatcaggtgaagctgactctagactcagaggaagaaggacccctggaggaatgcttggcctacctgactgcccgtttgccccagggatcgctggtcccctacatgcccaacgctgtggagcaggccagtgaggctgtatacaaactcgctgaatcagggtcttctttggggaaaaaggtggcaggtgccctacagaccattgagacctccctggctcagtacagcctcacccagctctgtgtgggcttcaacgggggcaaagactgcactgccctcctgcacctcttccatgcagctgtgcagaggaaattacctgatgttccaaaccccctccagatcctgtatatccgcagcatctcccctttccctgagctggaacagtttctacaggacactatcaagaggtataatctgcagatgttggaagctgagggcagcatgaagcaggccctgggtgaactgcaggcacggcacccccagctggaggctgtccttatgggcacccgccggactgacccctactcctgtagcctctgccctttcagccccactgacccaggctggcccgcattcatgcgcatcaacccactgctggactggacctacagagacatctgggattttctgcgtcagctgtttgtcccatactgtatcctgtatgaccgaggatacacatcactggggagtcgggagaataccgtgcggaacccggccctgaagtgcctgagcccaggaggacaccccacataccgtccagcctatctactggagaacgaagaagaggagcggaactcccgcacatgacctcccaccctaggagggagggaaggacaccgtcctagggtataacctggcaataaaccgtgcctctcactgtgaaaaaaaaaaaaaaaaaaaaaaaaaa

SEQ ID NO: 223490 - DNA, 1000 bp, Homo Sapiens
ttaactccaagaacagatgtgatgccaggacctattgctacctgctgcccacgtttgcctttgcgcacaaggaccgggacgttcaggatgagacctaccgcctgagcgccgagacgctgcagcaggtcaacaggctcctggcctgctacaagggcacgcacaacttccacaatttcacctcgcagaaggggccgcaggatcccagtgcctgccgctacatcctggagatgtactgcgaggaaccctttgtgcgggagggcctggagtttgcggtgatcagggtgaagggccagagcttcatgatgcatcagatccggaagatggtcggcctggtggtggccattgtgaagggttatgcccctgagagcgtgctggagcgcagctggggcacagagaaggtggacgtgcccaaggcgcccggactcggcctggtcctggagagggtgcacttcgagaagtacaaccagcgctttggcaacgatgggctgcatgagccgctggactgggcgcaggaggaaggaaaggtcgcagccttcaaggaggagcacatctaccccaccatcatcggcaccgagcgggacgaacgctccatggcccagtggctgagcaccttgcccatccacaacttcagtgccaccgctctcacggcaggtggcacgggcgccaaggtgcccagtcccctggaaggcagtgaaggggacggagacactgactgaggcgatgggagctgcccaccagagtgcctctgagcagctcacagtgtgtgcccagatgtgccacccctgtgggcagcaagaagctgggatcgctgcagccatgttttcccggccatgccggcgttgtaacctcaggaccttcccttgtaggaacagcctttctcgaatctgttttcagctcttgcattgcatagatgaacctcagcatgtaaagaactatttttttaaagaagtgattttcttattaaacaagtacaaattttgcttagtcaaaaaaaaaaaaa

SEQ ID NO: 223491 - DNA, 1000 bp, Homo Sapiens
ggtggccgctgcagagttgcagaggtccctgtagagataaagctgaggaggaggctgtgtgtgatggctctggctcggaccaaccagatgagcctcctgaagcccccttccctgcctgcctgctgacccgtggccccagctcactcattgccctcagcagccacccgaggctgtgcagaagggtaggttcaggttgaccaggaagctgccaaaagggacatggatatgaggatacatctggacgtgcttaggaacagggtgctggttgagggcccccagctgacccctactgcagatccgcatgtggaccatgagccggctgccagcactaggtcctgggcagctttgtttgtcccacttttctttgtttcttctcactaaaatgatcacgaagacctttgacaagaggagagatatgcactgtgatattaaattagaaataatttatcaaaatcagacctctcctaaaagaataagaaattcattgtttggcccatcctgaaaggtgaggtggcgagacagtggggtgcctccgtgccgcttcgtgcagcagcaagttcagcctgagatgctggctgtactcagcctttgcaatttttgtagatgtagcttaggacgtgagttatttttccgcagactggccaagagccaggttctaagcttggacctaaggtagaaagctgcccatcgggggccctagctcagccccaccaggccctctgttgggcctgcacacagctctgtggctagaacactccaaggcccttcggtacccatcagagtgggccccttgccaggtggcttttcagttacagagtccagtggaccattttgtagaaccatgcagctccctgcggaaggtggggtagggtgggaaagaggagcaggtctggaggtttgtggaacccagtcccctgcagaatctgtaaaacctaataaatcatggttgtggccaaaaaaaaaaaaaaaaaaaaaaaaaaaaaaaaaaaaaaaaaaaaaa

SEQ ID NO: 223492 - DNA, 1000 bp, Homo Sapiens
aacagctatgagcagaaggccaaggagtcactgcagaaagtgctggaggagaaaatgaatgcagagcagcaactacagagcacacagcgatccctggccctggcagagcagaagtgtgaagagtggaggagccagtatgaggctctgaaggaggactggaggacccttgggacccagcacagggagctggagagccaactccacgtgcttcagtccaaactgcagggagcagatagcagggacttacagatgaaccaggccctgcgatttttggaaaatgagcaccagcaactgcaggccaagattgaatgcctgcaaggggacagagacctgtgcagcttggatacccaggacctacaagatcaactaaaaaggtcagaggcagagaaactcaccctggtgaccagagtacagcagttgcagggtttgcttcaaaatcaatccttacagcttcaagaacaggagaaactcttaacaaagaaagatcaggctttgcccgtgtggagtccaaagtccttccctaacgaagtggagcctgagggtacagggaaggagaaagactgggatctcagagaccagctgcaaaagaagactttgcagctccaggccaaggaaaaggagtgcagagaactgcattcagaattagacaacctcagtgacgagtatctctcctgcctgcgtaagctgcagcactgtcgagaagagctgaaccagagccagcagctgcctcccagaaggcaatgtgggcgatggctcccagtgctgatggtggtgattgctgcagcactggcagtgttcctggccaataaagacaacctgatgatctgaataatttgtgacaactgccttgggtgaaaatcagaagcaagcaactcagcgaaaaactcagaaggtttgggtacattacagcttgggttttccaactgacttaggatttctgactttttattaatttcttaacctactgtaaataaacttcacctgaccagattgttcctca

SEQ ID NO: 223493 - DNA, 1000 bp, Homo Sapiens
catgaaggcccgcgtgaagtcccgcttggcttttgggaagcccctggtggagcagggcacagtgctggcggacatcgcgcagtcgcgcgtggagattgagcaggcacggctgctggtgctgagagctgcccacctcatggacctggcaggaaacaaggctgcagccttggatatagccatgattaaaatggtcgccccgtccatggcctcccgagtgattgatcgtgcgattcaggcctttggagcagcaggcctgagcagcgactacccactggctcagttcttcacctgggcccgagccctgcgctttgccgacggccctgacgaggtgcaccgggccacggtggccaagctagagctgaagcaccgcatttagagccttggggctgcagtggctcaatgtcctggctggtccagctgtgcccagatctgtcactgatgtgcctcgaaagatccggtgtttgtggctccagcaccctgctcagcagctctgtcccgggacagtcagggtggactcaatctttctggttctccacagaagacgtctctgcaagaagcctggagtctgtttcaggccaggaggaggggatttgctgagggccaagggggttctgggacagagtctggaaagctggtcttcaggctctcagtcccaggctgggcaggcacggtcacttcacttcagcctttcagtccctctctctctgcctgtgggaatctggacacattttgggaggcctcccaaggctgtgggacgtgcttgctctggcagctgcagggttcctgtctggcctccctggtgagcagaggggcggccacggcgggcggtggcctagagacccaggacctgggcgcctgggaaaatggaatgcaacccacattgtaaagccactggcatctgattatctccatttgaacacacagcacagaacaatcatttaaatgttattttggaaaggggttttggggacacagaagaataagtaaacacatctcggag

SEQ ID NO: 223494 - DNA, 1000 bp, Homo Sapiens
cgtgtgtgcccgtctgtgactttctactcaccaaggttgaagaaaggaaacggggaaaatcaaaaggggttcaaaccccacctcagtaggtggaggggagcgcctgccattggttgtatttttgttctgagttttcggtgccgtgttcctaactactccatcccatgacctcgccacacctactggggcatctggctggtgcctgctgccatggccagcccccactctcaccctgcacagggggtcttgcagcccccaggcccacagcctcgttgggaggacagggtggccctggggacaagagggaggagcccaggggcttacctcactgagagtgctccccagcaggcatccactaccccagggccccccacatgtcatggcaaggttggtagtgaatgggcctggttgggagcagcccctggcccattgcccacccacccatctcactatgcaattcgagttccaagcaacatttgctcctgccctggggccagctctgccccagccctgagaggggtggtgaggcagccccctggaccccagaaccccagacaagggggcaggcgggggaccagggcctctcctgtgggatctttgttttgtgtttaaccataatggttgtgtactgaaccacttcatatttgttatatataatatatatatatataatctccttaagactcagcctcctggtttacccccccggcctgggcatctgacctcccccaccccagtgtgatttaacatccaggaactgaggcctgaaccattttgcatttccccctcctccagcctctgtagggccatggctgtatgtactgtcgctgtgtttttttgtttttttagaactgggtttgggggctgatttttatttctttgggggctttttttcttggcaaatactaaaaatctcgtcaatgtaatttctgtggtttctattcagcttgggtttcatgttttaaaataaattttaaaaagcaaaaaaaaaaaaaaaaaa

SEQ ID NO: 223495 - DNA, 1000 bp, Homo Sapiens
gcgctggaccgcatggagtacgtgcgcaccttccgcaagcgcgaggacctgcgcggccgcctgttttgggtggcgctggacctgctggacctgctggacatgcaggccagcctgtgggagccgccgcgctccgggctgccgctgtgggccgagggcctcaccttcttctactgctacatgctgctgctggtgctgccgtgcgtggcgctcagcgaggtcagcatgcagggcgagcacatagcgccgcagaagatgatgctgtacccggtgctcagcctcgccaccgtcaatgtggtggccgtgctggcgcgcgccgccaacatggcgctgttccgggacagccgtgtctcggccatcttcgtcggcaaaaacgtggtggcgctcgccaccaaggcctgcaccttcctggagtaccgccgccaggtgcgcgacttcccgccgcctgcgctatcactggagctgcagccgccacccccgcagcgcaactcggtgccgccgccgccgccgccgctgcacggcccgcctgggcgcccccacatgtcctcgcccacgcgtgaccccctggacacgtgacagggcccgcgcggcccccgacacgcccctggggcgcagagacaccgggttggcttggggcgcgcggtttgcatgggatggggtgggggcgggctcccctagggacaggtgcctcgagtgcccgtgcctggggtcccgcggccgcttcttcatctcaggaatctctcggaccgcggatcctcagcccccgctccaccagcccgccccagcgcgtgggtctgtttgggaggcctgggccggagcagagcagaggtgatccggcccctgcctgctgggccgcccgggttggaagggagggcagtgtgggcggagatctgctccttcggtgggggcctctggctcagatttggggccaaggaggcctctgtcattttaaagactcgtgtttacagttttgtatccaaggccaaaaaaaaaaaaaaaaaaa

SEQ ID NO: 223496 - DNA, 1000 bp, Homo Sapiens
gaggcaggcactgctcctcgagggagcagagcgaatactcagcagagatggtgccccggcctggatcctcccaagtgtgaagtgagcgcctcagagcctctcagggcaggccaacttcctgcaccagaggtctcagatggcaaggatcatcttggttcggttaagcaacagtagcagatgaccacaagggggtactggagaggtggctcttggagacacctgacccctgccctgcaaagatggggctgaaggaagtcctctgggccaggaagaccctaccaaatatcatgaaagctccgggaactcagccactggtgacgttcaggttgtgagggccagcagtgccaccctggtaaatcagccctgttgggaccaccccagtggagctcctggaggggcaactggaggaaaggggcagacacctctggactgacaatggtatcagccagatcaccccaggacccctctacttggagtcaagttctcttctgcttgaaaggcccaggctcgttgccaggcaccatacctggcccctgctaagcaaaaacctacctccaccccccacaactgaaagcactgccacaggacccctctgatataaatgatcccttttattgtaagtaatgcgcaacactggcctggctttgcactgcaagccctcggtcaagatatagtcaaataactatggctgcaggttccacagttccacaataaccatggctgcacgatccacaattcagacacagacatagagctggggtgggtggaaggggcaggagggtggcagagtgcggactgtccccagccctggcctctccatgcagagttggcccaggcagacacaccccatggaatgatgagaaagtgacggcacggccccttcccacagcaagcctggggctgccaggaactgcccttcagaacctttgggcccaggtcaccctgaagccccacaactttttatctggattagttattaaaaaacaataaattaagcaac

SEQ ID NO: 223497 - DNA, 1000 bp, Homo Sapiens
tacactgcaggcagccacatttacacgcctgcagttgttttccggagtctgtcccacggcccacacgctcacttgactcatgctgctaagatgcacaaccgcacacccatacacaactacaagggccacaaagcaactgctgggttagctttccacagacataaatatagtccatctgcaatcacaagcacatagccaggtaacccaccaactcccctggatctgcagcccacacgtgggagtctggctgtcaccttcacaagccacagaaacggccacacatgttcacagctcacacgccctctccattcatcgaacttctcagtgtccctgtccctggtgcctggcacagggaacagcatgccccctccggggtcatgccacccagagactgtcgctgtctatggccccaactcatgctccctctcttggctacaccactctcccagcctgtgaccaccgatgtccacacacccccaaccacttgtccacacagctacccacgtacgacatcgtcctggctccccagagtatcttcccactgagacacgccgcccccacagaggcacagtccccagccacctctgcaactgcagccctcagtcacccctttttaagcaccctgattctaccaaatgcaaacacatctgggtctgcgattatgcacagagactttggacatacgaggaccctcagaccggaggaacacctgcccaaccccaacacgtgcttatgtaaccacgtggaaagcggcccctgctgcccctccacacacacatacacactcactgatctacagcccctgttcggcgtcagagtccccactagacccagtggaaggggttagagaccaagtaggggccagtttccaattcaccctgtcagggagtgagccggatctgacgttccttgtgacttaagggtccggcttgggaattaaagtttgtttctggcctttagcctaaaaaaaaaaaaaaaaaaaaaaaaaaaaaaaaaaaaa

SEQ ID NO: 223498 - DNA, 1000 bp, Homo Sapiens
aatacttctcttaaagaaaccaagagtctggtgggagctagaaggcccacaagtacctctgcgacctgactgccttgctatcgtcaataattttgtgttcctgttaggcggggaagagctgggcccggatggtgaattccatgcttcttccaaagtattcaggtatgacccgagacagaactcctggctgcagatggcagatatgtctgtaccacgctctgaatttgctgtaggtgttattgggaagtttatttacgccgtagcaggcagaaccagagatgagactttctattcaactgagagatatgacatcaccaacgataaatgggaatttgtggatccttatccagttaacaaatatggacatgaggggacagtgctcaataacaaattgtttatcaccggtggaatcacctcatcttccacctccaagcaagtgtgcgtgtttgaccccagcaaagaagggaccatagaacaacggaccaggagaactcaagtggttaccaactgttgggagaataagagcaagatgaattacgcgagatgctttcacaagatgatttcttacaatggcaagctttatgtcttcggtggtgtctgtgtgatcttgagggcctctttcgaatctcagggatgcccttctacagaagtatacaacccagagactgatcagtggaccatcttggcatccatgccgattggtagaagtggccatggtgtgactgtgctggacaaacaaataatggttcttggaggcctttgttataatggtcattacagcgattccatcctcacttttgatccggatgaaaacaagtggaaggaagatgagtaccctcggatgccctgcaagctggatggtttacaagtatgcaacctgcattttccggactatgtactggatgaggtcaggcgttgcaactaatgacatcctcctccctaaaaaaagaggcaaacaaagtatttgtttgcacagagtaattaattaaaacatataaag

SEQ ID NO: 223499 - DNA, 1000 bp, Homo Sapiens
attaggaagcatatcaccaatattgattaacattctctttggaactaggtaagagtggtctcttcttattgaacaacctcaatttagtttcatcccacctttctcagtataatccatgagaggtgtttccaaaaggagatgagggaacaggataggtttcagaagagtcaaatgcttctaatgtctcaaggtgataaaatacaaaaactaagtagacagatatttgtactgaagtctgatacagaattaaaaaaaaaaaaatcttgttgaaatattttgaaaacaaattccctactatcatcacatgcctccccaaccccaagtcaaaaacaagaggaatggtactacaaacatggctttgtccattaagagctaattcatttgtttatcttagcatactagatttgggaaaatgataactcatcttttctgataattgcctatgttctaggtaacaggaaaacaggcattaagtttattttagtcttcccattttcttcctattactttattgactcattttattgcaaaacaaaaaggattacccaaacaacatgtttcgaacaaggagaattttcaatgaaatacttgattctgttaaaatgcagaggtgctataacattcaaagtgtcagattccttgggagtatggaaaacctaatggtgcttctcccttggaaatgccataggaagcccacaaccgctaacacttacaattttggtgcaaaagcaaacagttccagcaggctctctaaagaaaaactcattgtaacttattaaaataatatctggtgcaaagtatctgttttgagcttttgactaatccaagtaaaggaatatgaagggattgtaaaaaacaaaatgtccattgatagaccatcgtgtacaagtagatttctgcttgttgaatatgtaaaatagggtaattcattgacttgttttagtattttgtgtgccttagatttccgttttaagacatgtatatttttgtgagcctaagg

SEQ ID NO: 223500 - DNA, 1000 bp, Homo Sapiens; identical to SEQ ID NO: 118142

SEQ ID NO: 223501 - DNA, 1000 bp, Homo Sapiens; identical to SEQ ID NO: 118143

SEQ ID NO: 223502 - DNA, 1000 bp, Homo Sapiens
catgctggagtcatcggccgtggcttaaagccacccaagtttgtccagtcacgaaatcagcaggaagtgatctataacacccagagcctcctcagcctcctggttcactgctgcagtgccccagggggcactgaatgtggggaatgctggggggcacccatcttgagtccagaggcagccaaagcagtggcagtgaccttggtggagagtgtgtgtcccgatgcagctggtgcagagctggcctggccccccgaggaacacgcccgggccaccgtggagcgggatctccgcattggccggcgcttccgcgaacagcccctgctctttgagctgttaaagctggtagcagctgcacccccagccctgtgctactgttccgtgctgcttcgggggctgctggccgccctcttgggccattgggaagcctctcgccaccctgacacgacccactccccctggcacctggaggcatcctgcaccttagtggctgtcatggctgagggaagcctcctgcctccggccctgggtaatatgcatgaagtatttagccaactggcacctttcgaggtgcgtctgctgctgctcagtgtctggggttttctccgggagcatgggcccttgcctcagaagttcatcttccaatcagagcggggtcgcttcattcgggacttctccagggagggtggaggtgagggtggaccccatctggctgtgctgcacagtgtcctccaccgcaacatcgaccgcctaggtcttttctctggccgtttccaggcaccttcaccgtccactctccttcgacaggggacgtagccttttcttgctctggaagcccagggaggttgagcagtgagagagggaagggactaacgtgctccggaagggtggaggtttctcttctaagtccttggtctaaagagcgctgtcacttttttctctcccacttttttttttctaaataaaatttgccaacttgagaaaaccaaaaaaaaaaaaaaaa

SEQ ID NO: 223503 - DNA, 1000 bp, Homo Sapiens
gtttctggggtcatgaacatcctgggtttggccctagcacctgtgacagcaggaggcagtctcatgctctcagcaactgggacagggttgggggcagcagctgccatcaccaacatagtaacaaatgtcttagaaaatagaagcaattcagcagcaagagacaaagccagccgactggggcctctgacaacatcacatgaggctttcggaggaataaattggtctgaaatcgaggctgctggcttttgtgttaataagtgtgtaaaagctatccagggcatcaaggatcttcatgcctaccagatggccaaatccaactctggcttcatggctatggtcaagaattttgtggccaagagacacatccctttctggacggctagaggggtgcagagagcctttgagggcacaactctggccatgaccaatggtgcctgggtgatgggtgctgctggggctggcttcttacttatgaaagacatgagcagcttcctgcagagctggaagcacctggaggatggggcaaggacggagacagcagaggaactgagagcacttgctaagaagctggagcaggagctggaccggctcacccagcaccaccggcacctgccgcagaaggcgagccagacctgttccagctcccggggcagggctgttcgaggatcccgtgtggttaaaccagaagggtctcgctcacctctcccctggcctgttgtggagcaccagcctaggctgggccctggcgtggcactgaggacaccaaagaggacagtctctgccccaaggatgcttggccaccagccagccccaccagcaccagcaagaaaggggagacaggccccgggaagacaccgacaatgagaagagttggtcaccctgtcaccactgaaccttgatttaacagaggcaaaatgcaagtcttccctgaagaatactgggggtagggaaacttctagtggcaatgataaaaccagcagcaatgataatagaaggcaaa

SEQ ID NO: 223504 - DNA, 1000 bp, Homo Sapiens
ttccaggccacccagcaaaagtgaaaggcctggctttggggttcagagacctggaatagaaacttggatctatgcactacgtttatctgacaatgggacaaccagggactgctcatgctgtgacgtcacatcctctcaccatgcgttagcaacgactttctcgcatactaactaggtttgactgtattactcataccagatttaaaattagctagccttgcaacaacgtcctactgagaggtattgtcgagcatttgacataagacagcgtgatgttctttggtggttcaagtctaaatctgtaccacattcggagatgccaaatgattagactgaaacagggaaacggggtttttcagtcatttttagtcagtggtttttccatagtgcttttttcctatggccagtgcaaattgtgttagcacacttgcatatgtgccgtattaagggttgacaattactacatctttattctctaaatgtagtataatttgccttttaacctttgatctgtatcttgcaatagaatggctttggtttttttcttagtaaataggagcccacttctaaagtcatttcacccctcagccctattctctttcttagataccctttacaagagaaaacttccaaatggatttttgcatcaatagcagtgtgtaggtctctctggttctttctatatcatcattttattattatgtcctaatataaagtactggctcatagggccagggtattattatagaatattattctcgcatgtaaacaaagatatctttgctttaagatgtgagaagaaatgaatttactttgtttgcattaagttatggaagagttgtaatatatactttaagaaagaagagaagaaaactagtatctctaagcggtaactatggcaattttgcaatattttcagtagtgctagtaattttttcctccttgagtacacattaaatgtacataacatagcgcggtcaggcttgtggcacagtgcatt

SEQ ID NO: 223505 - DNA, 1000 bp, Homo Sapiens
attctgtgccaggcaacatgctaactgctgtatatatattattacatttgtactttggcaagaatcctgtgaagatttttatctttggactactagaagagaaagctgagttgtagagagagtatgtatttaagtccgtttgggctgctataacagaataccacagactgggtaacgtgatgaacaaaaatttatttggctcacagttctggaacctgggaaatccaaaggcatgatgctagcatttggtgagggcctttgtgctttgtcatcccatgccagaaggcagaagggtaagagagggcaagagtgagcaagagatggaagttgcaacctcaagctcttttataatgagcattaatccattcatgagggcttcaccctcatgacctaaacatctccattaggctccaccttccaatgcaacagttagcataagttttcaacacatgctttttgtagcattcaaaccatagcaggaagcaactttgcttaaaattgtatacctggtaagtggaaaaagagggatttgaatataggcaaatgacttcagaggatttactcttaatttctgttgtactgccttctaatcttggcctccatcatttcagattaccaaagctgtctcttaactggtttctttgtctccaaccttgtgcacttgctatctattctgtgtgctgcagcctgagtttttaaaaaacagaaaatgaggggccaggtgtggtggtggctcacgcctgtaatcccagcaagttgggaggctgaggcgggcagatcatctggggtcaggagttcgagaccagcctgaccaacgtggagaaacactatctctactaaaaatacaaaattagccaggcgtggtggtgcatgcctgtaatcctagctactcaggagcctgaggcaggagaattgcttgaacacgggaggcagaggttgcagtgagcagagattgcgccattgtactccagcctgggcaacaagagtgaaactccatctc

SEQ ID NO: 223506 - DNA, 1000 bp, Homo Sapiens
agaggcggagggcggctcctagctccgtggactaggcgggggagaaaggaagcctttctgagagcgggctaggccggcactggagaggccggagcctttggaacaaaccgtgcggaacgcgtccaggggccttcccgcccagcctttgccagatctctcgtgcggttcgggcaaagccggggtagacctgggctatgctcagttaggggttgcgggatccccgagtgtgggcgggactgggacaccctttggcctctgtttgtcccctttccagtcctccaccccacccctggagcccagcctgggagcgcaaaacccaagaagcggccagaacgcacctccggctccggcggacgcgcgaccgttgtgcaccaccagggaccgccgcgcctactctgcacgggagcagggacagcgctagatttcgtgtacaaaacctgtgtacccctctatatatatgttacatagaatgtatatatgttgggaacatgctcgcttctcccgtgtgtcgccgccgtgcgtcgtgcgcccgcaacagagccccaaccgggcctttgccgggtaaggggctaccgcgacgccacttgtccacgcagccaccaccggcccgggccagtccctgccagtccgtccgcctgtccgtccgtgtcctcagctctgtccacgcttcgataggcctgacgcagcccccagcccagggccgccctagcaacttcctgtacatatgactgtaaaatggtaaacgtgtgtattatatctggcctcgttatatagtgtatatatatgtatacatatacatatatataatatatatgaagactgtaaatgttaagacgactagtgttcttattagtatattgcttcacactgaagattgtgtgtatcgagctgtttctaaaagatgtttattttccttaagagtaaaaaacagtcattgcattcagaaaaaaaaaaaaaaaaaagtcaataaagatacaacgattgttttggaaaaaaaaaa

SEQ ID NO: 223507 - DNA, 1000 bp, Homo Sapiens
ttttaagtgtttgtttttcagtgcaataatttttgtgtgtgtgtgattcttatcagaaagttgaattgttttctgcctacaccgttcatcagccccataacccaggaaggaacaggcattgttagcatcagattatacctcattattaaaaggaggcatggccacacatgaagaaatggtcattctacttcaaagaaattgagccagcactatctgtactccaacattaccggatctggattggggaggttggtcagggaagagaggggttctacccacagatcaactgtgtaatcttttactattcaagctataattcagcttcaaagtagagtagaaaaaaaattgtcttaactgttctagttcttgatggttttcttccttattaacagttggtgtttcttccttggcccttttggactaatgttactgtccaagttctttctcaagaaaccacatctggttcagaagagtgtcaagttggactctttgaactctgttgctgtctgagcaatcgtggtgcctagactttgcattccttgttctgttgacctgcatacatgtgagagctatttctttaagaactatataggctgtgaaaacgcactttctttcccccaaagagctgggaatttatgaagttatggcaatgaactgcagcatgctgggacaattatttgactacttttttttgtaatattgtcaaatgtctctatggattctgacagagatttctttttgttttgttattcttttggttgtcagtttcattttaacgagtgtaactagtaacattttattctttggattttgtataattacagtacatgattgtgtattgtgacatgaatgctgtcaaaatgacattgatggcattgtgaagcctgttactttgtgtcacttcctgataaataagaggtgatgacatggatatacaacagaaaacactttgagttgaaagtaaacacaagctggctgcttccctgtggcaactgtggct

SEQ ID NO: 223508 - DNA, 1000 bp, Homo Sapiens
gcccggaaggagcgacagcttcatatgcaactgtaccccggctggtccgcgcgggataactatggaaagaagaagaagaggaaaagggacaagcagccgggagagaccaatgaacacagcgaatgtttcctaaatccttgcctttcacttcctccgattacagacctcagcgctcctaagaaatgccgagcgcgctttggccttgatcaacagaataactggtgcggcccttgcaggagaaaaaaaaagtgcgttcgctacatacaaggtgaaggcagctgcctcagcccaccctcttcagatggaagcttactagattcgcctcccccctccccgaacctgctaggctcccctccccgagacgccaagtcacagactgagcagacccagcctctgtcgctgtccctgaagcccgaccccctggcccacctgtccatgatgcctccgccacccgccctcctgctcgctgaggccacccacaaggcctccgccctctgtcccaacggggccctggacctgcccccagccgctttgcagcctgccgccccctcctcatcaattgcacagccgtcgacttcttggttacattcccacagctccctggccgggacccagccccagccgctgtcgctcgtcaccaagtctttagaatagctttagcgtcgtgaaccccgctgctttgtttatggttttgtttcacttttcttaatttgccccccacccccaccttgaaaggttttgttttgtactctcttaattttgtgccatgtggctacattagttgatgtttatcgagttcattggtcaatatttgacccattcttatttcaatttctccttttaaatatgtagatgagagaagaacctcatgattggtaccaaaatttttatcaacagctgtttaaagtctttgtagcgtttaaaaaatatatatatatacataactgttatgtagttcggatagcttagttttaaaagactgattaaaaaacaaaaaaaa

SEQ ID NO: 223509 - DNA, 1000 bp, Homo Sapiens; identical to SEQ ID NO: 118149

SEQ ID NO: 223510 - DNA, 1000 bp, Homo Sapiens
ggcagccccggtgcacccacagccgcccggactctggtatcagaaccggctgcagactgacaccctcggcccacgactgtcttcccaagttttacagacttgttctttttacataaaggaatttgtaggaaatgcagccaaaggtgcagtcggaaaagatgcaggggaaatgtatttatgcagcgacaccccacaatgtgaacaaacagacaaaaaatctgtgccctcgtggaattgacgttctgcttgggaacacagaaaagaactcggtgatgaaataatggagatgattccagtgacaaacgacagagatggtgatggtggtcagggaagacctctctgcagaggtagtgacttgtgatgtgagctgagacctctgtcctgggaagaccaaaagaaaagcatttcaggatgagggaatggcatgcgcaaaggccctgaggctgaaatgtgcccatgtgttctaagaaatgcagcgatgctggtgtgcctggagcagggacggagggggagaatgggaggagacaaggagctgaaggagtagttcccgaaggaccttgtgggtgatatagaggacttcgcttttgctctgagtgaggtgggagccatagaagcttctaagcagaagagggacttgccctaattcaggtgatcacaggtgtcttgtggcctccatgggaggttgaaaaccagagaaggtgaaggggggctgcactgagccacaggaacaatgatggagattccagctaagcccagaccccgtggattctagatagattttagaggcagcagacagaattactgaggaattgagtgtaagagtggaataaagttatcaaggacaatgccaagggtggggcacccccaaatttgactctgggagactcagccaaatcctatctggtaataaaatttcttttttatttttaaaaaaaaaaaaaaaaaaaaaaaaaaaaaaaaaaaaaaaaaaaaaaaaaaaaaaaaaaaaaaaaaaaaaaaa

SEQ ID NO: 223511 - DNA, 1000 bp, Homo Sapiens
tgagatcaaagaagatgatggaaaaaaagaggagccacagagtattgtttaaaactgccctatgtagtttcataatttggtaacatgtaccttcatgttgtaaagttaatagagataaatatttttatcaaaaattttataaacacagcctttctttagcattgatttaatttcagaacatcttcatattgattattagccataaagtttctaacatgaaacatttatctataaattttgtgattatagtagtggaatacatagaaaaaaatatgctttcaactttgtgagtgaatttcgtgttgtgtaagttatatgtcaaatctttgaattttaattttactcttttatacatgtgataatttcataaagtgagggatcccaaaaaaagagtttcatccaacattcttgttctgcaggttgcttttataaagaaggtgaactattttcatgtaatgttaagagttaaacttatctttcccaaatataactttattattagcttgggaaaaatgaaattgtattcccatttttaaaataaatacaaatgtttatttcagaagggcagttttgattatatgtgaatacacaaattttactggatttatcttaataaaaagactctgacgatgattgtgttttgttatatcttcaaaaatatagctagtgaaatattgtgcttaatttttttctattgtgttattcatgaaaatatttaatattcactgacataaaattaatataaagtaaaattcaccattttaattataataaaaataaagtatataattcaatggttgtcagtatattcacaatgttgtgtccactgtttaattccagagaatttttatcacccaaataagaaacaaagcaccaattagcagtctcttcccattttcgcccaacttatcccccacctccatcccttggcaaccactaatctgccttctatctctatggatttgcctattctgaacatttattataaatggaatcacat

SEQ ID NO: 223512 - DNA, 1000 bp, Homo Sapiens
cacttggaggaatcagaagggaagatcaacagcaaggatggggcatcattaagacttgctataaaaccttatgaaaatgcttgaggcttatcacctgccacagccagaacgtgcctcaggaggcacctcctgtcatttttgtcctgatgatgtttcttctccaatatcttcttttacctatcaatattcattgaactgctgctacatccagacactgtgcaaataaattatttctgctaccttctcttaagcaatcagtgtgtaaagatttgagggaagaatgaataagagatacaaggtctcaccttcatctactgtgaagtgatgagaacaggacttgatagtggtgtattaacttatttatgtgctgctggatacagtttgctaatattttgttgagaatttttgcaaatatgttcattgggaatattggcctgaaattttcttttccactgtgtctctgccagaatgtttgtatcaggctgatgctggcttcatagaatgagttaggcaggagcccttcctccttgattttttggcatagtttcagcaggattggtaccagttattctttctgcatcttgtagaattcagctatgaatccatctggtctagggcttttgtgttggttggtaagttttttattactaattcaacttcagcgcttgatattggtctaggaggggtttctgtctcttcctggttcaatcttgggagattgtgtgtttccaggaatttagccgtttcctccagattttcttctttatgtgcatcgacttgagtgtaaacataacttatatgcactgggaaaccaaaaaatctgtgtgacttgctttattgcagcatttgttttattttggtagtctggaactgaacctgcaatatcaccaaagtatgcatatagttgcaaaaatgtgatttttgacatagtaaatatgagtatttgcaataaactatgatattacttttgtaagtatatagaataaaatgtaaataatct

SEQ ID NO: 223513 - DNA, 1000 bp, Homo Sapiens
tgccgagagcgtccgctctaccaccaggcagatgagaagctcgctgtcagccgacctgcgccaggctcacagcctgcggggctcctgcctcttctgacttcactgggggcccagaggcagatgggtgggtgggtgggcaggtggcctgccaggccaggagtgggctggagctgctgaggcccagaaggcccgcatagttcctcaccaggagggtctccctccagcacaggtcccgcctgctcagtccctgtgctttccaagtggagggggtgtcagctcggtcaccaagagaagtgacttcccaggagcaccagtcccctcacagaggtgctgtgagcgaggcctccttcggtccaggcagaacctcaggcagtctctcctggtcctgcatgtgtgcaactccagctaataataggtattttatatacagatggacagatatttttttaaactggggagttttcctgatcttgggtcctctttagggggccagacaagaaaggcctacggtttctggagcaaacctgtcccccacctgtgaccagtcactctggggcaagcatcactgggaagggcatagccggagacctttctcctagtgactggtagtcagtggggcattttaggatgtcagggccccagggtgacatgtgtccagcttttctatggcagcagaggcctttccctcagacaagctacaaagtgcccaggatgccatccaccatggtccccttcagtacctcacgcatggtccccagcttctcctaggatcccagtggcatttatcagtggccagctacctgccaggcccgggctggggcacggtctgcggccatgaggccaggccgcctcccgcacccctaccccgtggcagcagcatacctctgcatttctggaatgtgtgtgcatcaatgatgtttgtatatttgaggcatttaaaaatctattttcgttacgagggcaaatgaagaatgaatattgatcttaaaaaaaaaaaaaa

SEQ ID NO: 223514 - DNA, 1000 bp, Homo Sapiens
gccagaccattttagaattgggaaattttagtgagaaaaaatgcactgtaaatatgctttagttttaattcagttgggatgcactacctagcgaaaattgagaaactatatacttctcagagaaatatctgacatctattgtcattccattgctattttttttccccagagacttccataatttaaaataaaatcctagatccagttcttgttttttggcataaatacttaatctattttaaatttataaaatctgagcttctaggatccagctgtgtcaacctttatttagcatatataactataaatcacttattacagatgctaaatagatcaccttttacagatgctgaaatgtttgggatatgtttgttgacaaggtaaatggaaatgagaaactttatacttcagttttcagatatatggatctagatcccaaataaatgattaatcttcattggtttctcaaattcaggttgaaatacaaattaatagcctttattgattttacttttatgagtcattgtagacatctataaatataaaagggcctgtacccaaaggatgccagaatactagtatttttatttatcgtaaacatccacgagtgctgttgcactaccatctatttgttgtaaataaaagtgttgttttcaaagccatctttaaatagttctttaaaaataggtcttttttttatattttggaaaaggcattgtttttaaagtaaagataaaatggtaagtacctaattgtatttactgtaatatcttataacatgcagatgaatgctttataagttaaatatgatgtattttttcatacttctggattatactataattcatatgaaatcttgatattagtccccacacggaaaaagtgaactgcagttgatatttggtgtttaagatagcaccattgtttaaataccgcctatgtactcccaaatgaataaaacataattcttgtcctctgagagcataaaaaaaaaaaaaaa

SEQ ID NO: 223515 - DNA, 1000 bp, Homo Sapiens
tatttagaaagaaatgtggaatgggctaaactttctcaccaatttattagaaagctaaatggataaatacttccctttttgtagatatttttctgtgcattgtaagttataggagcaggacatattttttgtacattgtcttgattgtttatactgcaggtaggtatttccagtgaatggaaacgttgaaatttatagatgggacaatgcacatacttcatatgtaaacaaagcatttttctaaataatttggaaaggattggatttagcaccgttaacttttaatacccatttattggctatttaaggtaaattataaaacctaaaattagtatcagtattttagatcctattattttttcaactttctattattttcacagtggaaaatttgcgtatagtattaaactattcttttttctgtctacctttatattttgaagtgtggttgtacttacgttaatagtaagtgtatttgtagaaagtttttcataaagaagagattaactttccatataaataaataccaggtatgaaattactgattttagtgcaatatctgtatgattatccagaactatcacttcagatgtttctattttgggcaccataactatttgagctcatatttttataattctgattgagaatttaggggcatggtaatttttaccaaaactgaagctggtaattttaagtaaagcaactaaatttaccctttacttattagttaaaaggaaaccaaggcatgtaggaaaatattggtacgttggaaaatgtgaaaagagctttactttcaaaatgtatgtttaatgaattgaattttagggaccgtttcccataatttgggcctatgctatcctgttgatttttatgtctagcttaaaaggtatttgaaaatgttccatttgtgttttattattttctgtcctatgacagttctatgctaaatgtattttaaaataaaagccaaattgaagattaaaaaaaaaaaaaaaaa

SEQ ID NO: 223516 - DNA, 1000 bp, Homo Sapiens; identical to SEQ ID NO: 118153

SEQ ID NO: 223517 - DNA, 1000 bp, Homo Sapiens
ggtgcctgggaatcggtcgcctggaggaccagtatttcccatggagggtgacgatgcctggggagcctgtggacgtggcatgtggcgtggaccacatggtgaccctggccaagtcattcatctaaacctccctcacctgcttgggcggccccgtcccgggaaccactggcactccttggcagaggccagcgcgtggccagccccccggggttcttggatggtggtggcggaggaccctgcgtgcagtgtgacgctctgtcctgaatcccttagcgggtacctaccaggaggatcagggcaaggtccctctccagctgcaggtgaggcctgcggaactcagcttggatggcagcctttggtgggccgctgtggcccgcacgtctctgttctctccaagtaacatgcgacggtgtctggtgtcacgtctcgcctgagaagcccgtcttaggaaagcttagcttgaacacagtgctcgggaggtttctgctctgtctgtcatggcagtctcttggtttgtgtctggccaaggccatgcgtgtgcctcggaccgagccccagcttaggcgagggagtcaggctggcttcggccctcggttttcattcaggccaccctgctcatggcccttcctggccgcctgccacaccgcaagctcgctggggggacactagaagcaccgtggcctgggattccatctggagctgtccgcaggcaccagccccagcctcccaccacgctcactgcctggcttggaaaagttaagaagcccctcaggaagagaatcgaggccaagttcctctgcgccgagggccccgagcatatccgccaaggctcagctgcagtgccaggcggaggaggaagatccagaaattgtgaacaatgtttgatttagtagcgtgacttgcctttccctttaaaaacatcttttacaaatctgtcttggaataaagtctattttctgccttttggtttttaaaaaaaaaaaaaaaaaaaaaaaaaaaa

SEQ ID NO: 223518 - DNA, 1000 bp, Homo Sapiens
gaacacctgtatattcttgtctgcacacgggactcctcagctcgcctccttggaaaaaccaaggacactcccaggctgagtctcctcttggtgattctgggcgtcatcttcatgaatggcaaccgtgccagcgaggctgtcctctgggaggcactacgcaagatgggactgcgccctggggtgaggcacccattcctcggcgatctgaggaagctcatcacagatgactttgtgaagcagaagtacctggaatacaagaagatccccaacagcaacccacctgagtatgaattcctctggggcctgcgagcccgccatgagaccagcaagatgagggtcctgagattcatcgcccagaatcagaaccgagacccccgggaatggaaggctcatttcttggaggctgtggatgatgctttcaagacaatggatgtggatatggccgaggaacatgccagggcccagatgagggcccagatgaatatcggggatgaagcgctgattggacggtggagctgggatgacatacaagtcgagctcctgacctgggatgaggacggagattttggcgatgcctgggccaggatcccctttgctttctgggccagataccatcagtacattctgaatagcaaccgtgccaacaggagggccacgtggagagctggcgtcagcagtggcaccaatggaggggccagcaccagcgtcctagatggccccagcaccagctccaccatccggaccagaaatgctgccagagctggcgccagcttcttctcctggatccagcaccgttgacgaactgcagcgatcttactggccaagccagagcgcctcctctcagattccttctcgacacagcaccctaggcggcttcttcctgtcagtcggaggtggcatgcaagatgaagctctctttgctcttcctgctttcattttgtgcttttccttgtgttttcatgttttgggtatcagtgttacattaaagttgcaaaattaa

SEQ ID NO: 223519 - DNA, 1000 bp, Homo Sapiens; identical to SEQ ID NO: 118154

SEQ ID NO: 223520 - DNA, 1000 bp, Homo Sapiens; identical to SEQ ID NO: 118155

SEQ ID NO: 223521 - DNA, 1000 bp, Homo Sapiens; identical to SEQ ID NO: 118156

SEQ ID NO: 223522 - DNA, 1000 bp, Homo Sapiens
taaggccctggtgtcttacagaaaccatcacgtatgtcgcagcagcatttcacccctgaagtctctaaactctgagcctgaaaagatttgtatttaatacacataacattttttagttcattctgcctttcctatttgttccagtttttgcttggttttagtttggaggggaacttaagtacacagatccttatctctccccatcccctagcctcacaaaacacagttgagagtcttttaagtacctgagctctcgaagctacccagaactgaactagactcccctaccttagactggtaccctcaaacacaggactgaagcttaattgggaatttggctttatggagaaaagaatctttttcaaagtttgtgtcggaaggggagggtgaggtttgcccactgtctctgcaggaaggctccggcttaatctaggaagtagattccagctgcacgatgaggaacacattagcttttgggatcaaaccaggaatatgaatctgtaattattaagctcattgccaacccacaagatatgtttctgaaaacctgtagtttcttaatttaagtccatccccttcattaacgctacagttgtgactcacactgatcccaaacttttaagtgctaaatattaacatttagcattaactgtcttgtcaagcgaaaggccttctctacaacctagtccatctcacttctggtgctacctgagttggacagaattctagctcatggttgctaggaaagctaggcctctgatcatagaagcagatagcttcagtcccagtctaggcctagataaatgactcttattaccacaacccttattattttccaatttcctttctcacatactgtacacaggtagtattttcaatgtgaatccaaagcttgtctggttctctgaaaataattttttcccctttaggttctttacattgtgataatgctgtatttaaagagaatatttaaatgtaatattaaagaaatattcaaaag

SEQ ID NO: 223523 - DNA, 1000 bp, Homo Sapiens
ccgggcaccactgcaccctgagaaggtgtgcaacaccatctagcagccacctgcctgctcctatgtgccctcaccatccaataaaggccccttggctgtggcatggcaactgacttaccttcccctcatgccgctcccatctctacccagtctcaggcctgcttacctcctcacagcccatgaagaccccttctcagccccaaaacctgaaggaggaatttcgccctactctggcccctttgttgtgggcccataacctgctaacaagccttcaggagaggagctgcctttccacccccttcaaggcaaggagggatggaggtcccttatttccttcagaatgatccccatcccccatagtcgccagactttctcatgttcccaggaagctcagaagtatggcagctaagaacacagctggctggaagaagacagggaccagactgaactgccaccctctgctagtcctcatgcaactcagtccccagaatggctccactgggagtggaggaagagctcagaggcccaggtgcagatagttctgcaatttagtctgtagcctcctcgttccctaccctaaaattctaaggggaagggacccatagaggcttgcctgtttccgctactatattatgcccagtgttcctcctcaccccacgtcctggggtcaggccagaccatgtttcgtcagccttggggactaggccagtgttgggcacctccaggaggaggcctgactggttcattaccctcccctactcagactgagcagcagtcccagataaccaagcaagctcagctctgtgggggcctccttcaaaagaccaacatcgcagacattaggaagctgtaggaagagagatcatgggtttgacctctgcccacatggccatggagtcagcctcagccctgtctgtactgctcgtccagctaaacgagcctggaataaacatgcagtttattcagtctgcatgttagtcacaaaaaaaaaaaaaaaaaa

SEQ ID NO: 223524 - DNA, 1000 bp, Homo Sapiens
tcctgaggtaaccataaattagggcaatcgtacttccaggaacagtgaggctgatgggcctgttcccaagggtactttggcagggggtgctggggaaggggctggcctagggccaggttcatcataccgttagccctgcagccccatgcctgtgtgtcctggtttacccgccgtgtagtggtcctgcaggagtggagcctgtaggacttgcttctcagcggctccaagcagaactctgtctgggaaggtgggaggtgcagccagtctagacctgaagccctcacactaaggactaaggtaggcctgctcagccttagcccttcgtcaggcccaagggtgggggaggcaggaggaggctgagcgtagtcgtggatagaaacctttccctaccgcacggttacacacatggcatgggactcctggctgtagctcactcgggtctactgaagaccaagttggtttttagaaatctatttaaaatatctatcatgtatctatttactgtgtttttctgaatacgcaagtgtaaatagtataatttgcagtgcaaaatccttggcaataactttgtgtattatgtttaaaaacactggaaaccgtgactaccatggactgcccttcccctctgaggcaattattacatgtaggactctgaactttaaaccttcagcgtgactgaagcagcagcctgcacatgtggatggtcatcagtgcctcgcccagagatacctggccttcatccaaagggaccctgctgccacaagtcctccaggcagcacccgcactgtggctccttcgcactgagtatgttggactctgccatagactgaccctcttgtctggctgctgcagtttgtctgtaatgccctgacatgttgcattctccccatttggataaataaaaacaaacaaatgcttctgtcacaaaaaaaaaaaaaaaaaaaaaaaaaaaaaaaaaaaaaaaaaaaaaaaaaaaaaaaaaaaaaaaaaaaaaaaaaaa

SEQ ID NO: 223525 - DNA, 1000 bp, Homo Sapiens
gtaaaattagatatacctgtgtttcccacaatcacagccactgtgacttttcaggagtttcgatacgatgaatttgatggctccatctttactatacctgatgactacaaggaagacccaagccgttttcctgatctttaactgacgtggaaaaggatgccgtctaaccaaggaaagaaaatacagagaccctagaagtggatccaaatagaagggacaaatgctttcagtgaagaaaagggaattacacattgaatcgacacatcagtaatacgatacagtgaaatgggcctctaataagaatttcagcgagttttctgatgtgccattttttgtctttttaaaaatatacatattataaatgtaatagtttgacacattaatgaccctaagacctgcgtatgtgaagcagctatgagtgctgtgatttgtttttaaaaatttttacacttcttgttgaaatatatatgcatataaatatatctatatctatatctatatctaaaacactcctggaccattaacgtaaattaaatgtcttaagagatatggagcccttttaaacttgtcatctttatgcaaggtgacatttataaatattccttcgagctttgttttcataaaatgtaaactatgtaacattatgtatagttcagtaatttgaatgtttgttcaatataatgaactagaaggaatgcaattttctgtagatgaatgaaccaaatggtaaccattaaacaattgcatttatatgttgcaatacatttcagaaggagcgttcactctgcagggaataaggtacctcctttagcaccttagtgcaattcattgtggtgctatttgtttttacctgaatgtttgttactaatcttcctttcatagaacctctatttttttttttctaaacttgagtttgagtccttgttatggtcatcataaggtaatggttagcatgtttaaagatattcctcttccaaatctcagcactttaaaaaaaaaa

SEQ ID NO: 223526 - DNA, 1000 bp, Homo Sapiens; identical to SEQ ID NO: 118157

SEQ ID NO: 223527 - DNA, 1000 bp, Homo Sapiens; identical to SEQ ID NO: 118160

SEQ ID NO: 223528 - DNA, 1000 bp, Homo Sapiens
ccctcgggaggtccctccaggtactccgggggtcccgggaagcacctcctgtacctgggccggcccgagggctaccggggccgcgccctgaaaagggtggacgtcgagaagccccagttgtccctgaagcctcccctcgtcgggccctcctcccgccaggccgtcccgaacggcggccgtttcaacttttaaagggagcggtccacggcctccagcgtggggagcgcccgagtcctctcggccacgagctggacgctcttcaggacgtttcaccgccccctcgccccgcacctccagccttcccgactcgcagagtctcccgaggccccttttcgcctcgggtttatttattgactgtctttccccctgtcctcgacagaagagtgggaggtgagaagcccgtctcctcagtgagccagcatttcagggggagctggcggactcccactccccgctcccttccagccaagctgccttaactcgcccctcggggctcccccagagactgtgccccgggcgggccgcgcgcgctgtgtccagagtcctcgggcctcctgggtctgggacgtgcctctcctactgtgtaggagcctccgcttcccaatacagccgtgtctgcagccactgcctgacttcactcgggcgggggagggcggcagtcggtcggctcgctctgggcgccctcgctctctgccttcatctgggccctgggctctcccgggtaatgggatggctgcggtcccgccggggggcagtctggaaaggtttcctaaaggagacgagcgaattaacggtgtcgaggtgagccagggccagggggaccccggtaaagtttagttgaggctggggaaggccctcggagctcgtttccagatcgaggtaagagggactttcttaaaggcctagtctatgggatggggcggcggagggaattttttgagaaataaaatgaagctgcagtgtacgttacttgaagttccacatcagaaaaaaaaaaaaa

SEQ ID NO: 223529 - DNA, 1000 bp, Homo Sapiens
tcgagtggaggaaggatggcttggacatccagctgccaggggatgacccccacatctctgtgcagtttaggggtggaccccagaggtttgaggtgactggctggctgcagatccaggctgtgcgtcccagtgatgagggcacttaccgctgccttggccgcaatgccctgggtcaagtggaggcccctgctagcttgacagtgctcacacctgaccagctgaactctacaggcatcccccagctgcgatcactaaacctggttcctgaggaggaggctgagagtgaagagaatgacgattactactaggtccagagctctggcccatgggggtgggtgagcggctatagtgttcatccctgctcttgaaaagacctggaaaggggagcagggtcccttcatcgactgctttcatgctgtcagtagggatgatcatgggaggcctatttgactccaaggtagcagtgtggtaggatagagacaaaagctggaggagggtagggagagaagctgagaccaggaccggtggggtacaaaggggcccatgcaggagatgccctggccagtaggacctccaacaggttgtttcccaggctggggtgggggcctgagcagacacagaggtgcaggcaccaggattctccacttcttccagccctgctgggccacagttctaactgcccttcctcccaggccctggttcttgctatttcctggtccccaacgtttatctagcttgtttgccctttccccaaactcatcttccagaacttttccctctctcctaagccccagttgcacctactaactgcagtcccttttgctgtctgccgtcttttgtacaagagagagaacagcggagcatgacttagttcagtgcagagagataggtgaggccagctcgagatcttataccactctgtattggacaaaggctagcacagggctaggcaccaataaagatttctaatgatgcacagaaaaaaaaaaaaaaaaaaaaa

SEQ ID NO: 223530 - DNA, 1000 bp, Homo Sapiens
ggttgtgatgagcaatgtgaagagactacggccacggctcagtgctattctctttaagcttcagtttgaagagcaggtgaacaacatcaaacctgacatcatggctgtcagtactgcctgcgaagagataaagaagagcaaaagctttagcaagttgctggaacttgtattgctaatgggaaactacatgaatgctggctcccggaatgctcaaaccttcggatttaaccttagctctctctgtaaactaaaggacacaaaatcagcagatcagaaaacaacgctacttcatttcctggtagaaatatgtgaagagaagtaccctgatatactgaattttgtggatgatttggaacctttagacaaagctagtaaagtctctgtagaaacgctggaaaagaatttgaggcagatgggaaggcagcttcaacagcttgagaaggaattggaaacctttccccctcctgaggacttgcatgacaagtttgtgacaaagatgtccagatttgttatcagtgcaaaagaacaatatgagacactttcgaagttacacgaaaacatggaaaagttataccagagtataataggatactatgccattgatgtgaagaaggtgtctgtggaagactttcttactgacctgaataacttcagaaccacattcatgcaagcaataaaggagaatatcaaaaaaagagaagcagaggaaaaagaaaaacgtgtcagaatagctaaagaattagcagagcgagaaagactcgaacgccaacaaaagaaaaagcgtttattagaaatgaagactgagggtgatgagacaggagtgatggataatctgctggaggccttgcagtccggggctgccttccgcgacagaagaaaaaggacaccgatgccaaaagatgttcggcagagtctcagtccaatgtctcagaggcctgttctgaaagtttgtaaccatggtaataaaccgtatttataaattacaaaaaaaaaaaaaaaa

SEQ ID NO: 223531 - DNA, 1000 bp, Homo Sapiens
tctgtataattagcccaggctgatgtaactataaaaattagttgaaaaaaaaaatattgtttccttaatggaattctcacttcatttgaatataagattttggatgaaaggatttggtataaagtttgggtttttgtctcaaggatttgatccatatttatccctaaatatttcttaagggatgtaactttttataaccattaagtggggggaagggggtggagggggtggtaataattataactgaaaggtttaaatatactacctaagaaaaaagtacttctgtgacatatacaaaaaaatctagtggataggcattagatgaatagagaatattaattttgcagaaatgaaggaaaatctcttcgtgctagtacagcgtattcccaagagagtttattttcctttctccaattaatgtggtcataaatttcggtaaaatcaagaaataggtgaagtgcaagctagtttctataatgaccattaaaaaaattctgctgtgtaattcttgccagttaaaattataacttgcaaatgagcagaataaatgaggtttttttcaattaaaaattactataaatccaggaggcaaactattttagcactcagattatctgatttaatacatattattgaatatcagtctcaaattttgctaaatgcttatcagcatgaaatatgttgatcagtgatgagttgggcttaatgcaaagatcctaatttaataaagaaacctgtaaattactgttacctaaaatatatgtgtatattaatttcacatataaaggtagatttttcaaagaaaaatttggtaggcggtagtttagaactctgatcaggtactacatcaaccaaaagaggaaatactttaaaaattccttttagcaacctgagcaatcttattctcgtaacaatagtagtaatttgggacattgcaaatgtttatcatgttgtaaagtagcatcagttgtatcctttcattaaaacttgataaacaaaa

SEQ ID NO: 223532 - DNA, 1000 bp, Homo Sapiens
attctaaatcttaaaacaactctgcaaacgaagcacttgagtttctgcttgcttcagggatgtaatatggtgtagaactgtttcacataatgatcagccttggtaattttccagtgtagaaaacattatatttgacccttggacaacaaagagattatattgaaggaattttattgattgtatcatgaataaaagctgaagtcaaaattaaaatgtaaaaaaataattcagaggatggaatatgcaaatgtaaactccaaatgatgtggctggaattcataaacatttactttatgcaagatactgtgctattccaggcactcctatggcatttaaagtacaattcttaccttccctaatttttcaacctagtagaggacaataggctaaagggaataagtacatggataacaaaacataaagtagaatgtttttacagccatagaaggcaaagggctaggaattcacaggagagagaaacagtatctagctgagagcataagaaaagcttgtggaaaagataatatctgatggccagagacaatttcttgctttggtatgtttgaagtgttatatttaaatatatatatttttatttaaaaaactcactatagaaaatttataaaattccccaaaatatttagtataaaattaatcatcccatcaaatattaaataatattactattttaaagtgtttatttcagtcttttcctgcatgtatttatggcttttatttttaaatatagtaataaaataatttgaaattagctttttatatatttttgtatcttgctctaatgggttggactaaacatattaagaacactctcaaatgctactaaggacaatttgaaaacataattttaatgactgcataatttatttaactttcctgttttggaaaatattattttttttttattacaaataatatgtcatgagcattctctttttaaaaaaataaactatgtgtgcatataaaaaaaaaaaaaaaaaaa

SEQ ID NO: 223533 - DNA, 1000 bp, Homo Sapiens
atactggtctagctgagttctagaacttctctctttagctggccatctgaatactcccccatcactaattgttaaaaaaagaatcaactgttcttactctagagctcttttttcctttctgctgatttgctggaagcactacaagacttctgtttgttcgttcgtttgtttgtttgtttgtttttaaagatggggtcttgttatattgcctaggctggaatgcagtggttattcacaggcatgattataacacactactctctctaactcctggcctcaagccatcctcccaaatagatgggactactgatgcacactgccatgctggccttacgaaatgttttaataggcatttcactaatagggatctggagtacaaggaaatacagtgcatttaagacataggctgggcatggtggctcatgcctgtaatcccagcacattgggaagatcacttgaggcaaggagtttgagaccagactggccaacacagcgagacccccatctctaaaaaaaaaaaaattaataagacatggatacaaccagggagggaggttataataatagagcatcctgttaatcagaatcatgggggagaacatacagcccagcgtgcctctcactttccagaaagggtgagaggatcattagagagttcattagagagtatttattcctaataagtcagataaatgtcagtttcatttttagaagtttcacacaatacctgctaatggtgtgatgtcatttttccccctgcttcaggttaattttttggatatttcagaaacccatagcaattcagtgatttttctttttgtagtagctcagtcaaaacaggtaacagcagattaatcatagaaaatgttgcttccacattaacaaaacaatcactgaaaaacagcagatgtttaaatagattattttatagcttattttggatattttttcttttaataaactaatatgatcatttgaattaaaaaaaaaaaaaaaaaaa

SEQ ID NO: 223534 - DNA, 1000 bp, Homo Sapiens
aaccgtaaccacctgaaacttccaaacaacatgaaccaaacaaaaagttctgaaccagtcctgactgaggaggatgcaacaagtctgattactgagggctttttgctaaatgcctccaattacaagcagctcacaaacggccacggctctgcacactggatcgtcggaaactggagcgagtgctccaccacatgtggcctgggggcctactggagaagggtggagtgcagcacccagatggattctgactgtgcggccatccagagacctgaccctgcaaaaagatgccacctccgtccctgtgctggctggaaagtgggaaactggagcaagtgctccagaaactgcagtgggggcttcaagatacgcgagattcagtgcgtggacagccgggaccaccggaacctgaggccatttcactgccagttcctggccggcattcctcccccattgagcatgagctgtaacccggagccctgtgaggcgtggcaggtggagccttggagccagtgctccaggtcctgtggaggtggagttcaggagagaggagtgttctgtccaggaggcctctgtgattggacaaaaagacccacatccaccatgtcttgcaatgagcacctgtgctgtcactgggccactgggaactgggacctgtgttccacttcctgtggaggtggctttcagaagaggactgtccaatgtgtgccctcagagggcaataaaactgaagaccaagaccaatgtctatgtgatcacaaacccagacctccagaattcaaaaaatgcaaccagcaggcctgcaagaaaagtgccgatttactttgcactaaggacaaactgtcagccagtttctgccagacactgaaagccatgaagaaatgttctgtgcccaccgtgagggctgagtgctgcttctcgtgtccccagacacacatcacacacacccaaaggcaaagaaggcaacggttgctccaaaagtcaaaagaactctaagcccaaa

SEQ ID NO: 223535 - DNA, 1000 bp, Homo Sapiens
cgccaagccaccggccaccatgcgctgcaacttgcgccgctgccccccggcccgctgggtggctggcgagtggggtgagtgctctgcacagtgcggcgtcgggcagcggcagcgctcggtgcgctgcaccagccacacgggccaggcgtcgcacgagtgcacggaggccctgcggccgcccaccacgcagcagtgtgaggccaagtgcgacagcccaacccccggggacggccctgaagagtgcaaggatgtgaacaaggtcgcctactgccccctggtgctcaaatttcagttctgcagccgagcctacttccgccagatgtgctgcaaaacctgccagggccactagggggcgcgcggcacccggagccacagctggcggggtctccgccgccagccctgcagcgggccggccagagggggccccgggggggcgggaactgggagggaagggtgagacggagccggaagttatttattgggaacccctgcagggccctggctggggggatggagaggggctggctatccccccagagcccctcttcagcatccgccccttccagttcacatagtgagaccccccctccagggtgggtctggggaggggacagctgttcaccccagcaccctttgaacccacccttagggagtccccaacactccccccctcctttgatcggaatatgtactgtgaagagtaggggtggggaggtggtctgccggtgccctgccccccagcactgccctacccctccactccgagctgggggggaatctgtgtctgctatgggaggggggggggtagcaccacctccctgacaccctcccctgacctgactagggggaggatccaccccaacctctgccctgcccgccccaggggcaccccgacatccaggccaccccctcatggtgctacagaccctgccctggggcccacacactcctgccaggaagccctacatcaataaagttctgtcttgtgtagatttctacg

SEQ ID NO: 223536 - DNA, 1000 bp, Homo Sapiens
cccaccaccctacttgacagcgtgggcatcttcaggcacagccttgggagttcctggtgtgctctgacatcatgacctcaaatctaaatcctccaatcccaactccctttcccaaacaaaaagccacagaggcagagcaagcattcccctttaagagcttccactgcaccccctcccaagggacacagcggtaggaatggtgcttaaactccacaggtatcagagagggtgtaactaggacatcctcaagggcagctaggccccgaatgtacaatgttaagacagggaattttgtgttccattgacttttttttttttttttaatggagtttcactattttgcccaggctggagtgcgatggtgcgatcttggctcactgcaacctctgcctcctgggttcaagtgattctcttgcctcagtctcccgagtagtggaaattacaggtgtgtgctaccacatcttgctagttttgtatttttagcagagatgggggtttcaccatgttggccaggctagtctcgaactcctgacctcaggtgatccacctgccttggcctcccaaagcactgggattacaagcatgagccactgtgcccagcctgttccactgacatttcttagacattcagcaaaacccccaccttaacctcttttctttcttgagggttggtcctgtccccacctccaccctcccaccccctggaagaggaagggcccgggcatcagtggctagtccaaataaaatatgggcttggggatggaatgggtggtggtaagttcacagagtgtagttagatcccaactcccatgacctctggcttcagtggtgggtggggcagggcagatgaaagggcttcagtgggaacctctgagagcattttcctgttccccctatcaaccgcccccagtgataacatctgtgaagccagccattactcaataaactgcaaacttgtctaaaaaaaaaaaaaaaaaaaaaaaaaaaaaaaaaaaaaaaa

SEQ ID NO: 223537 - DNA, 1000 bp, Homo Sapiens
cgtagacttcatagtggtgagaaaccttacaagtgtaatgagtgtggcaataccttccgtcactgctcatcccttatataccatcgtagacttcatactggagagaaatcttacaaatgtacaatttgtgacaaggctttcgtgcgtaattcactcctgtcaagacataccagaattcacactgcagagaaaccttacaagtgtaatgaatgtgggaaggcttttaatcaacaatcacacctttcacgtcatcatagaattcatactggagagaaaccttagaaatgtgaagcatgtgacaaagtttccatttggaaatcacaccttaaagacataggagaatttatactggagagaaagcttacaaatgtaaggtttctgacaagacttgggagtgattcacacctggaacaacatactggacttcacactggagagaaaccttacaagtgtaatgagtgtggcaaagcctttggcaagcagtcaacacttattcaccatcaggcaattcatggtgtagggaaacttgactaatgtaatgattgtcacaaagtcttcagtaatgctacaacgattacaaatcattggagaatccataatgaagagagatcttacaagtgtaataaatgtggcaaatttttcagagatcgttcacatattgcaggtcatcggtgaactcatactggagagaaaccttacaaatgtcatgactgtgccaaggtcttcagtcaagcttcatcctatgcaaaacataggagaatttatacaggagagaaacctcacaagtgtgatgattgtggcaaagcctttgcttcacgttcacacgtcattagacatcagagaatctatactggacagaaatcttacaaatgtcatcagtgtggcaaggtcttcagtccaagatcactccatgcagaacatcagaaaattcatttttgagataaccgttcccaatgaaatgagtatagcaaaccatcaagcattaattgacattggagtc

SEQ ID NO: 223538 - DNA, 1000 bp, Homo Sapiens
agaagggagcaagacaagagcaagcaacggctattaaatgtcacaatcctttaattagaaaccatttattggccggacgcggtggctcacgcctgtaatcgcagcactttgggaggccgaggcgggcggctcacgacgtcaggagatccagaccatcttggctaacagggtgaaaccccgtctctactaaaaatacaaaaaattagccgggcgtggtggcgggcgcctgtagtcccagctactctggaggctgaggcaggagaatcaattgaacccgggaggcggagcttacagtgagctgagattgcgccactgtactcctgggcaacagcgagactccgtctcaaaaaaaaaaaaaaaaaaaagaaaccatttattttaaaaatgattagattgctatgcctcaactcatagaagatgaacccttcaagaaaacgtgaagtagaacgggtgggccagaaatgaaaacaggcaagtaaagtatttcttcggaaaacattttatcaaaccaaatgttaaaaagactttccttttgtaaaactggattagagaagacttttcagtgggttatctctaggatgatcagtagttcagcacttaaaaactgcagagaaaactgaaagttatgttccagataactttccgttgtttaccaaattttcttagatttggtcatcatcaggaagcatttgtaaaaataaaaatctccacaaattactggcccatctcggacttgctgaatcaatttgataggattaatctccagtgaagctgtgtttacagggcattccaagtgattcttatcaggaaatgtgaaaaacactcctgtacataatcggttaatttaaaattttacttaataagtgaacaagtaatgaagatttcacctgtttacttagggtatctacccagacccatcgattctgagttcgggagatgattttgaaattactgttttccaaataaaggtgctcccttccaaaaaaaaaaaaaaaaaaaa

SEQ ID NO: 223539 - DNA, 1000 bp, Homo Sapiens
gtgccagacaaggacaccaggctcagggaggccatccccagctggcatgggtgggcaggctgggcgactccaacaacccagcgcctggtggttgcctgctgggcgagagctggggcacaggggctgccctggcctgcgggtacatccaccttctcgccaggtacacggtcctcttctcgcacggcaatgccgtggacctgggccagatgagcagcttctacattggcctgggctcccgcctccactgcaacatcttctcctacgactactccggctacggtgccagctcgggcaggccttccgagaggaacctctatgccgacatcgacgccgcctggcaggccctgcgcaccaggtacggcatcagcccggacagcatcatcctgtacgggcagagcatcggcacggtgcccaccgtggacctggcctcgcgctacgagtgtgccgcggtggtgctgcactcgccgctcacctcgggcatgcgcgtcgccttccccgacaccaagaagacctactgcttcgacgccttccctaacatcgagaaggtgtccaagatcacgtctcccgtgctcatcatccacggcacggaggacgaggtgatcgacttctcgcacgggctggcgctctacgagcgctgccccaaggcggtggagccgctgtgggtggagggcgccgggcacaacgacatcgagctctacagccagtacctggagcgcctgcgtcgcttcatctcccaggagctgcccagccagcgcgcctagcggcggccccaaccggccggacctcagcaataaggcggcccccggacctcaccccgcgccggcccccacccaggggctgcatgtggaccccccgggcggcccaggggaccccgccccgacccaggggctgtggacgatgtacaggcaacagagctacgcactcctttccttttggaagcaagaagaaaatacgtgaaaacggaaattaaagatttaaaattttaaaaaaaaaaaaaaaa

SEQ ID NO: 223540 - DNA, 1000 bp, Homo Sapiens; identical to SEQ ID NO: 118178

SEQ ID NO: 223541 - DNA, 1000 bp, Homo Sapiens; identical to SEQ ID NO: 118179

SEQ ID NO: 223542 - DNA, 1000 bp, Homo Sapiens
cccccggtgtgggaaccagcacctcccaccaaccagccacacccagtgggggcacagtacagaccccagagccaggaacctctcagccgatgccccccagtatgggaaccagcacctcccaccaaccagccacacccggtgggggcacagcacagaccccagaggcaggaacctctcagccgatgccccccggtatgggaaccagcacctcccaccaaccaaccacacccggtgggggcacagcacagaccccagagccaggaacctctcagccgatgcccctcagcaagagcaccccatcttcaggtggcggcccctcggaggacaagcgcttctcggtggtggatatggcggccctgggcggggtgctgggtgcgctgctgctgctggctctccttggcctcgccgtccttgtccacaagcactatggcccccggctcaagtgctgctctggcaaagctccggagccccagccccaaggctttgacaaccaggcgttcctccctgaccacaaggccaactgggcgcccgtccccagccccacgcacgaccccaagcccgcggaggcaccgatgcccgcagagcccgcaccccccggccctgcctccccaggcggtgcccctgagccccccgcagcggcccgagctggcggaagccccacggcggtgaggtccatcctgaccaaggagcggcggccagagggcgggtacaaggctgtctggtttggcgaggacatcgggacggaggcagacgtggtcgttctcaacgcgcccaccctggacgtggatggcgccagtgactccggcagcggcgatgagggcgagggcgcggggaggggtgggggtccctacgatgcgcccggtggtgatgactcctacatctaagtggcccctccaccctctcccccagccgcacgggcactggaggtctcgctcccccagcctccgacccgaggcagaataaagcaaggctcccgaaaaaaaaaaaaaaaaaaaaaaaa

SEQ ID NO: 223543 - DNA, 1000 bp, Homo Sapiens
ctttgtttccccacctcaggcctcacactttcccatgaaaagggtgaatgtatataacctgagccctctccattcagagttgttctcccatctctgagcaatgggatgttctgttccgcttttatgatatccatcacatcttatcttgatctttgctcccagtggattgtacagtgatgacttttaagccccacggccctgaaataaaatccttccaagggcattggaagctctctccacctgaaccatggcttttcatgcttccaagtgtcagggccttgcccagatagacagggctgactctgctgccccaacctttcaaggaggaaaccagacacctgagacaggagcctgtatgcagcccagtgcagccttgcagaggacaaggctggaggcatttgtcatcactacagatatgcaactaaaatagacgtggagcaagagaaatgcattcccaccgaggccgcttttttaggcctagttgaaagtcaagaaggacagcagcaagcataggctcaggattaaagaaaaaaatctgctcacagtttgttctggaggtcacatcaccaacaaagctcacgccctatgcagttctgagaaggtggaggcaccaggctcaaaagaggaaatttagaatttctcattgggagagtaaggtacccccatcccagaatgataactgcacagtggcagaacaaactccaccctaatgtgggtggaccccatccagtctgttgaaggcctgagtgtaacaaaagggcttattcttcctcaagtaagggggaactcctgctttgggctgggacataagtttttctgctttcagacgcaaactgaaaaatggctcttcttgggtcttgagcttgctggcatatggactgaaagaaactatgctattggatctcctggatctccagcttgctgactgcagatcttgagatatgtcagcctctacagtcacaagagctaattcattctaataaaccaatctttctgtaaa

SEQ ID NO: 223544 - DNA, 1000 bp, Homo Sapiens
gctgcaggcggccgagttcctggagcgccgtgagagagaggccgagcatggttatgcgtccctgtgcccgcatcgcagtccaggccccatccacaggaggaagaagcgacccccccaggctcctggcgcgcaggacagcgggcggtcagtgcacaatgaactggagaagcgcaggagggcccagttgaagcggtgcctggagcggctgaagcagcagatgcccctgggggccgactgtgcccggtacaccacgctgagcctgctgcgccgtgccaggatgcacatccagaagctggaggatcaggagcagcgggcccgacagctcaaggagaggctgcgcagcaagcagcagagcctgcagcggcagctggagcagctccgggggctggcaggggcggccgagcgggagcggctgcgggcggacagtctggactcctcaggcctctcctctgagcgctcagactcagaccaagaggagctggaggtggatgtggagagcctggtgtttgggggtgaggccgagctgctgcggggcttcgtcgccggccaggagcacagctactcgcacggcggcggcgcctggctatgatgttcctcacccagggcgggcctctgccctctactcgtgccaggcccacttgccaggcaggagccctccccaagccttcagggctgctcggagtcacctgttggaatggactaaaaggacccttgtgtgggaacaggtgctccccaaacaccctgctgctggctgccaggcaggccctctggaagggaaggggcaggactcatcaggacctccctggacccctgcagggcaggcagcttgggcccgagcccaagcatttggctctgctgcccccaaggggacaggaagcctcttgggcctcttcccttcctggacaaggccccctgcctttgcctcacataaactgtacagtattttcattaaaagcctctttcataaaaaaaaaaaaaaaaaaaaaaaaaaaaaaaaaaa

SEQ ID NO: 223545 - DNA, 1000 bp, Homo Sapiens
ttgagcgggcatttgccaaaatacgaacaagttcacatcctcccagtaggaagaatagaggaacccttctggcaaaatttcaagcatctacaagaggaggttttccagaaaataaagacactggctcagctctcaaaggatgttcaggatgtcatgttctacagtatcctggccatgctcagagacagaggggctctacaggacctgatgaacatgctggaattggacagctcaggtcatttggatggccctggtggtgccatcctaaagaaacttcaacaggattcaaaccatgcatggtttaacccaaaggaccccattctttatctccttgaagccataatggtgctgagtgacttccaacacgatttgctggcctgttccatggagaagaggatcctgcttcagcaacaggagctggtaaggagcatcctggagccaaacttcagatacccctggagcattcccttcaccctcaaacctgagctcctcgccccactccagagtgagggtttggccatcacctatggcctgctggaggagtgtggccttaggatggagctggataaccccaggtcaacctgggatgtagaagcaaagatgcccctgtctgccctctatgggactctctcgttgctgcagcagctggctgaggcctaagccctccctgatgggcagtcagtccagagatgctggccctcgcccagtctatgctgtgagtgtccttatgggtgcaagagatagggctgtgcctctctgcgtttccaggtggagtagagacagtaatgggtagagactttaggaaatgttttggggtggtggaatactctatatattgacaagagtttatatattgacaagagtttatatatttgtcaaaactyctcaaatagtatgttaaagacgtaagcgtttcactatgtataaattttacttcaaaataataaaaacaaatactgactctaaaaaaaaaaaaaaaaaaaaaaaaaaaaaaaaaaaa

SEQ ID NO: 223546 - DNA, 1000 bp, Homo Sapiens
ggccgctgctacttggagctggaccaggcctggcaggcccagaattatggcgagaagtcccagcagtgtgccgaggaggaaggggacattgagtggcaactgaatgccagtgttctggtggcccaggcacaagtgaagctgagagacttcgagtcagccgtgaacaattttgagaaggccctggagagagcaaagcttgtgcataacaacgaggcgcagcaggccatcatcagtgccttggacgatgccaacaagggtatcatcagagaactgaggaaaaccaactacgtggagaatctcaaagaaaaaagcgagggagaagcttcactgtatgaagatagaataataacaagagagaaggacatgaggagagtgagagatgagcccgagaaggtggtgaagcagtgggaccatagtgaggatgagaaagagacagatgaggacgatgaggcttttggggaagctctgcagagcccagcaagcggaaagcagagtgtggaagcaggaaaagccagaagcgatttgggagcagttgccaagggcctgtcaggagaattaggcacaagatcaggagaaacaggcaggaagctactagaagctggcagaagagagtcaagagaaatttataggaggccttcgggagaattagagcaaagactctcaggagaattcagcagacaggaaccagaagaactaaagaaactttcagaagtgggcagaagagagccagaagaactgggaaaaacacaatttggagaaataggagaaacgaaaaaaacaggaaatgagatggaaaaggaatatgaatgaagccatcggtagagatgaggatcaggaagctggtgttcagagggatcatgggattttattaaactggattttcaagcgatttgtctgttataggaaaaatgagggttttacttctgctgctttccatcactattttgccattaaataggtgtctttcactcttgcaaaaaaaaaaaaaaaaaaaaaaaaa

SEQ ID NO: 223547 - DNA, 1000 bp, Homo Sapiens
atacaagagagtttgaaaacaaaaattgtggattctccagagaagttaaagaattataaagaaaaaatgaaagatacggtccagaagcttaaaaatgccagacaagaagtggtggagaaatatgaaatctatggagactcagttgactgcctgccttcatgtcagttggaagtgcagttatatcaaaagaaaatacaggacctttcagataatagggaaaaattagccagtatcttaaaggagagcctgaacttggaggaccaaattgagagtgatgagtcagaactgaagaaattgaagactgaagaaaattcgttcaaaagactgatgattgtgaagaaggaaaaacttgccacagcacaattcaaaataaataagaagcatgaagatgttaagcaatacaaacgcacagtaattgaggattgcaataaagttcaagaaaaaagaggtgctgtctatgaacgagtaaccacaattaatcaagaaatccaaaaaattaaacttggaattcaacaactaaaagatgctgctgaaagggagaaactgaagtcccaggaaatatttctaaacttgaaaactgctttggagaaataccacgacggtattgaaaaggcagcagaggactcctatgctaagatagatgagaagacagctgaactgaagaggaagatgttcaaaatgtcaacctgattaacaaaattacatgtctttttgtaaatggcttgccatcttttaattttctatttagaaagaaaagttgaagcgaatggaagtatcagaagtaccaaataatgttggcttcatcagtttttatacactctcataagtagttaataagatgaatttaatgtaggcttttattaatttataattaaaataacttgtgcagctattcatgtctctactctgccccttgttgtaaatagtttgagtaaaacaaaactagttacctttgaaatatatatatttttttctgttaaaaaaaaaaaaaaaaaaaaaa

SEQ ID NO: 223548 - DNA, 1000 bp, Homo Sapiens; identical to SEQ ID NO: 118186

SEQ ID NO: 223549 - DNA, 1000 bp, Homo Sapiens; identical to SEQ ID NO: 118187

SEQ ID NO: 223550 - DNA, 1000 bp, Homo Sapiens; identical to SEQ ID NO: 118188

SEQ ID NO: 223551 - DNA, 1000 bp, Homo Sapiens
tcaaagtgacagaatatgttataggttgaagcacacatatttgcagtttactgaaaagtagatttcttatgtgacttttttcccttctcagcaaagagccctacactagatttctaccatcactaatatttggaagtatttcattactaacaatctcagtacaacatgaaaattgttgcttctcatctaaaatacaattttgtctatcagaataaacacaagtgaaattttcacctacattaacattatgtctttgcagctttaggtttgttagatgtgttcttaagcataatttttagccacaaacccattgttagatagatatctatggatatagatctacatctatagatatagatatacacacatatatatactcacacacatatagcataaaatactcagcagggctagttattccgatttcttgcacaattatttagctttttgtaagttcaacatgtaaattttaaagacataaatatagagagacttatgtgtttgaatataaatgatatatatggattagcatgtacctgtatattattaaacatgcaatgaactgactggtaagtgacgtctaattgtatggctagcaatgtaatttattcagactgtatttttgtacagagcagtgcactctaacctatgcctctgtgtcctctttaatgcctaaagctgtgcctagaaatttcatctgtcttaaaagtaaaatatacttcatgctgtttatgctattagtttctgtactgctattctatatttattatttttaaatatatgacatgtttactacttaaacatgaattcatggtatcctggttattttttttaagtcatctgggggaaaacctgtttatcactccagtgattttgagtttgcagtttcacaatcagttcttcatttcatgatttttgtagttgacatgaagtcatctatgtggaaaaaaataaaaataaaagtgatttcacggatgtggtttgaaaaaaaaaaaaaaaa

SEQ ID NO: 223552 - DNA, 1000 bp, Homo Sapiens; identical to SEQ ID NO: 118194

SEQ ID NO: 223553 - DNA, 1000 bp, Homo Sapiens; identical to SEQ ID NO: 118196

SEQ ID NO: 223554 - DNA, 1000 bp, Homo Sapiens
gattataaaagaattgacaggacaataaatacttcaaatactttcaggaagtaaatgagtaggagtttaggagggataaacgagataaattccatgcaatgatcaaggaaagcaagagagcagataatacaaaagaaaaagaagaaggttcacataaatagcttctggagtgcaaattataaagacatcaacatttttgatcatataataagtactggcttacagctaagtggttccaaatactggtaattaaaacgatgtatacgttaaagattgcaaaacttaaaagcagatttttatgggaactttttttgaaaggatacatgaccaccttcttaaatagtatgactttacatagactctttttctggtccttactgctcctcccacaacagggaagcccgatcagttctgtcagtataaggttttcttctatttgcccttagtttagatctccatcatcaattccacttactattgtaataccttcagctggagcctgtgtctttctccattcctttttaatacattcgtatttcccagccccagaacccttgaaattaactcttccatgagttttcattgctgaagaaaaaccaaacattcttgtaaaaacatttaagaacttccatagtcttgttcatattgtttacctatcttctacacaaggcgtgtccttgggtaagttatttaacttcaatttaccttacctgtaaaatggaacaaataatatctccttaagattgctctacgaattaattgacacattatgtgtgatgtacttaaaggaataataaatgcataatatgaggtcagtggacgccattttctgttataatcatttttgttatctaatttggggaaactattcatctgtcatatactattgatcctttggcacttaaataaatgtgaaatcctccaggaattttcctgtgattctccttgtaagaattaaatgctctctaatatgatatccctttaaaaaaaaaaaaaaaaa

SEQ ID NO: 223555 - DNA, 1000 bp, Homo Sapiens
aatctcaatagaaaagagatatgttttctggagtcataaaggaattcaattcctagggtttttgtttttgtttttgagatgtaatattgctctgttgcccaggctggagtgcagtggtatgatctcaccttactgcaaccaccacttcctgggttcaagcgattctcctgcctcagcctccccagtagctgggattacaggcaccagccaccatgcctggctaatttttttgtatttttagtagagatgtggtttctccatgttggccaggctggtctcaaaatcctgacctcaagtcatctgctggccttgacctcacaaagtgctggcccagccgagatttgttttctaagatactttgtgtcatgaacagttcagtttagtgtcatgaactattcacttcatatttttcttgtattaactgtttaaatttttaaaatatcttgtagtaactctttaaaatgtatgtaagtaaatggctgcagaaagtttttttagagaatcctgcttccatcagtaatacagcaatattaccccatccactaatggtctttgtttccttaaccactactcattaatccttaatcacctcattcaaactaattcattctgcatttttgagtaccaactcttgtcaggctcagtggcagcttctacgacctgatggatggaaaaaaatcaaactctgtgactctatggttgactgccacctctgcaaccttgactcatctgctgaaaaggcaagaagaagaaagggcagcaagccctgttttagggactacataagatgaggggagataagggggacatagatgagttctttaggattgcgtgtgttttgagtttttgtttctaactgaagaaatctgtcaatattaaatagggtgggaaaatggtttcttagaataactgttcaactgtgtgtaaataaggaaagttttcaatgagtattacttattgtaattaatgcagaaggacttccccagtcaaaaaaaaaaaa

SEQ ID NO: 223556 - DNA, 1000 bp, Homo Sapiens; identical to SEQ ID NO: 118199

SEQ ID NO: 223557 - DNA, 1000 bp, Homo Sapiens
cctcattaggccttcttcctatccccatctctggcctcttgagcttaagcttgtattgtcctggaatcagtggctttctaaccccctgccaggctttgccaaagcaaaaagacagaggctttttttttttttttaaagtttggggtctgtcaggagacagaggcttttttgaattcactgtgaagagaagaacccgaaccttaagacgccagatccctgagagtctttctggctggtttgagtctctcaaatcatggattaggagtaaagaaagaggcaggcgcaatggctcatgcctgtaatcccagcactttgggaggctgaggtgggtggatcacttgaggtcaggagtttgagaccagcctgggtaatatggcaaaaccccatctctactaaaaaatacaaaaattagccaggtatggtggtgaacacctgtaatcccagctacttggaaggctgaggcataggagttgcttgaacctgggagatgggggttgtagtgagccaagttcgtgccatcggactccagcctgggtgaaggagtgagaccctgtctccaaaaacaaacaaaaaaggagcagagaaagacagtggtacagctaacctgaacaagggaactgggaccgttgggctgaaacagtcttgagcctggggttgactgggttagagaagaaccgggatgcaaggagctgcctgtgacacctggcctgccctttctcagctgcctcccctgccctttctcagctgcctcccctgccctcagaaggaaaggagagggctcacttatcacttgtgccatagcacctggtctcaaaatcctaaaagctttcctcgccctcactgccttgctccacaaggtccactttcctgggtcttgtgctgtgcctttccttgtctgcctcctgctgcttctgtaactgcagaccccaggcccaattgcaagccctcggctcagctgcttctccattggaataaactcttgtttctctaaaaaaaaaaa

SEQ ID NO: 223558 - DNA, 1000 bp, Homo Sapiens
acctcctgcggaagaagctggaagaagagagggagcagaagcggaaagaggaggagcgacagaagcaggaggagctgcggcgggagaaggaacagtcagagaagctgcggacgctgggctacgatgagagcaagctggcgccctggcagcgacaggtcatcctgaagaagggggacatcgctaagtactagaggccgcagactcctgtccgcagcctcgcagctccgtggggccctccgccccagccccagccagccaggccctggtggaaaggctgggagccgcacagccctcccctcctgcgctggaaaccctccctgacccccaccctggccccccgtatccccagcccttggcaacactggagtgcacacgccgccacggttgcccagaaaaagtgcccaagctgctgacgcaaacaacaacaaatgctgcttatttgcatgccgacttacatatatttgcatgttcgttgactatcaaagagtgcagagctctccccagccccgtgggtggtgactttgttttcctgcggggctcagccccctccaggatgcagccccctcccccgcaccccggaaccggcgtcgctggcgcatcctgggtggaggcaggccccgagctcggggaaggggttttcccttcctctctgccccagatctgcgcgcggcctagcccgggcctcatttcttatccccgccaagggtttcctctcagtcatttgtttaccagaaacatgaaaactgcctgtctggccgggccgcacttgtggcccccgggaccccacctctggccccacctccctcaagtctgcgccccgtccccagccagacccactcgctgccgggaccctttcactgccccggtggagtgaatagaggatgaggggccctgaccctgtgtctccaactgctgcaccccatcccgaccctgtctccgccacctcgcagccccattaaagcgctctcatctggaaaaaaaaaaaaaaaaaaaaaaaaaa

SEQ ID NO: 223559 - DNA, 1000 bp, Homo Sapiens
ctgccgggtgctgctctttccctacctgtactgggcctacgggcgccatgccggcctgcccctgctggccgtgcccctggccatccctgcccacgtcaacctgggcgctgcgctgctcctggcccctcagctctactggttcttcctcatctgccgtggggcctgccgcctcttctggccccgctcccggccgcccccggcctgccaggcccaggactgaggccgggggccgggaccctccccctccccacccccacccccgtggagacagggctctggggctgatggctggggttgggagccagggtcctcttgcccggacaaccccaggactgacgatgaccccgaaagggaagaggccccatctctcggggactgagggggtggagagaggggacctcttccccctactctgcccccttcctgcacacccttgcgctggaggaggggagggggcaccgcctcccacccactgagggcaggagggcttgtggggagggacaccaacagggtttcaaggggaccaggagtcagaatgtggggagacgcctctgccaaggccatcccagcccctatgctgccatcccccagggctccccatcacccgagaggagaggacgccccaactaacccccgctggccctcgggcctcccgagtggccggctgcaaccacggctcctctccagggtaggccagcttgaggaatcttatttattttatttatttacccaaatttgaactagtctgttgggttgggggaaggaggtggctgctacccccaagccttcccagtgctgacaaccccgggggcaggcgagggcgcccagtccctcaccatcggctgcacatcgcgccctcgggccctgccatgtccctggtgctactgacctctcaaggcttcctccaatctggggtcgggggaccctgggaggtgctttacagaccgctaataaaagacgatctgcgtgaacgccaaaaaaaaaaaaaaaaaaaaaaaaa

SEQ ID NO: 223560 - DNA, 1000 bp, Homo Sapiens; identical to SEQ ID NO: 118202

SEQ ID NO: 223561 - DNA, 1000 bp, Homo Sapiens; identical to SEQ ID NO: 118203

SEQ ID NO: 223562 - DNA, 1000 bp, Homo Sapiens; identical to SEQ ID NO: 118204

SEQ ID NO: 223563 - DNA, 1000 bp, Homo Sapiens
gttagcatgtgcctgtaatcccagcttcttgggaagctgaggcacaagaattgcctgaacccaggaggtggaggttgcagtgagctgggatcgcgccattgcactccagcctggctgacagagcgagactgtctctaaaaaaaaaagactcaagtggaccctacaatgaagcctacacatcccaatagaagccccttcttatgctgagggaagcagccctcagaacatgatagcttgtatccagcagagtggcacgtgctggcacacctcacagaagcaccctggccctggatgcctgcaacctcagaagagtgcagctcccagagggaggcagccatccatctgggatggtcctaagcatggaatcctaactcctgattccgtctcctatttcttgcttggctacgccagttcccaaatctggtagatgtccatgcccatgtgctcctgctgggactcaattcaggctatgtatgactatgaagtcaggctcatctgcttactggctgtgtgaactttttgtatcttggttttcttcatccatgaaatccaagtaatactacctaattgttactgtggagattaagttcaaatgcaatgtatagtaatattaagcaatttctagttattattctagccagtaatggacttcagaatcttttattacacaatataagaatatgtatgtaaagacattttggaatttcctggatgagaaggaagtctgggctgggcatggtggctcacccctgtaaccctagcactttaggaaatcgaggcgagtggatcacttaagctcaggagttcaaggccagcctgggcaacatggcaaaaccccatttctacaaaaaatacaaaaattagctgggcatggtggcacccgcctgtagtccagctacttgaggctgagatgggaggatgagggaggtcggggctgcagtgagccaagatcacgccactgcactccagcaccctgggcgacagagtgagaccctgtctc

SEQ ID NO: 223564 - DNA, 1000 bp, Homo Sapiens; identical to SEQ ID NO: 222951

SEQ ID NO: 223565 - DNA, 1000 bp, Homo Sapiens
gcgggacgcggacgcgcaggagaacgcgctggtgtcctactcgctggtggagcggcggttgggcgaccgcgcgctgtcgagctacgtgtcggtgcacgcggagagcggcaaggtgtacgcgctgcagccgttggaccacgaggagctggagctgctacagttccaggtgagcgcgcgcgatgcgggcgtgccgcctctgagcagcaacgtgacgctgcaggtgttcgtgctggacgagaacgacaacgcgccggcactgctggcgactcaggctggcagcgcgggaggcgcagttaacaagctagtaccgcggtcggtgggtgcgggccacgtggtggcgaaggtgcgcgcagtggatgcggactcaggctacaacgcgtggctttcatatgaattgcagccggcggcgggcggctcgcgcatcccgttccgcgtggggctgtacacgggcgagataagcacaacgcgtgccctggacgaggcagactcgccgcgccaccgacttctagtactggtgaaggatcacggtgagccggcgctgacggccacggccaccgtgctggtgtcgttggtggagagcggacaggcgccaaaggcctcttcccggactttggcgggcgccgcgagcccagaggctgcgctggtggatgtcaacgtgtacctgatcatcgccatctgcgtggtgtccagcctcctggtactcacgctgctgctgtatacggcgctgtggtggtcggcaacgcccactgagggcgcgtgcgcgccggggaagcccacgctggtgtgctcccgcgcggtggggagctggtcatactcgcagcagaggcggcagagggtgtgctctgaggagggcccacctaagacggacctcatggccttcagccccagtcttcctctaggtctgaataaagaggaggaaggggaaagacaggagccagggtcaaatcaccccggacaggtgagttttctacagattccacctatcaggaagtgtatgtga

SEQ ID NO: 223566 - DNA, 1000 bp, Homo Sapiens; identical to SEQ ID NO: 118208

SEQ ID NO: 223567 - DNA, 833 bp, Homo Sapiens
ggccacccgcctttcactatccgccattcttgtcacctcagctgctgccctcgctaccgcaccgacttcgcccgtgtgctcgcctgcacttgcgctgcccgccatggccaccgcccagccgtcgcaggtgcgccagaagtacgacaccaactgcgacgccgccatcaacagccacatcacgctggagctctacacctcctacctgtacctgtctatggccttctacttcaaccgggacgacgtggccctggagaacttcttccgctacttcctgcgcctgtcggacgacaaaatggagcatgcccagaagctgatgaggctgcagaacctgcgcggtggccacatctgccttcacgatatcaggaagccagagtgccaaggctgggagagcgggctcgtggccatggagtccgccttccacctggagaagaacgtcaaccagagcctgctggatctgtaccagctggccgtggagaagggcgacccccagctgtgccacttcctggagagccactacctgcacgagcaagtcaagaccatcaaagagctgggtggctacgtgagcaacctgcgcaagatttgttccccggaagccggcctggctgagtacctgttcgacaagctcaccctgggcggccgcgtcaaagagacttgagcccagatgggccccacagccacggggtcccttccctgggtcaggccactaggcggggcgtgcatgttgccctttcagaacgttctcttcagttttatctttcagttttaccattgttagcaaaaaagttatctggttctcaaagcaataaaggtgtccataaaaaaaaaaaaaaaaa

SEQ ID NO: 223568 - DNA, 1000 bp, Homo Sapiens
ccctgagaggagggctttcccagccctgggaccctccgaggtgggtgtgcgggtctcacaggtgcttcctgggacttcctgtggctgcacagggcttggctttgtcttcgttcccggtggaaaaccgtgggagaggaagcttgggcctctactccaagtatcagagcctgttcaccctcctccctttggtagcttgtgaatgtgccaggtgtttcgaggtaggcttgccttctggcagcatggactttgttaaaataataggcggaaagaagaggcctgggaagggcccccagtcttttggaatgtcctggtcacagggtcatgtcagctgccagttctcgtctcccgtcctggagttgctcggtcttgcggagctgcccgcctgcctgttctggcggctccagcgcaggctgtccctgctgctttgattccaggtgattttattttttttatttttttattttttttgagacggagtcttgctctgttgcccaggcaggagtgcagtggcgcatctcggctcactgcaacctctgtctcaagcgattctcctgcctcagcctcctgagtagctgggattacaggtgcatgccaccaggccccgctgatttttgtatttttagtagagatagggtttcaccatgttggtcaggctggtcgtgaactcctgacctcatgatctgcccgcctcaacctcccaaagtgctgggattataggcgtgagccaccgcccccagctgattccaggcgaattcttctctgatgggcgggcgagggtgtgttcgtgtgatgggttggagtgtgtgtgtctgagtacacagatgatgtgttttcccttcagcttcttacgttttctgagcatccgttgtgccttaacattttctgcttgtcctttgggacaaagcagtattttactcattctttgaatgttctcattcttttgtatcatgtgacttattaaaatcagtttctaacaaaaaaaaaaaaaaaaaaaaaaaaa

SEQ ID NO: 223569 - DNA, 1000 bp, Homo Sapiens
tcgggggcgacttcgatgtggccaccggccagtttcgctgccgcgtgcccggcgcctacttcttctccttcacggctggcaaggccccgcacaagagcctgtcggtgatgctggtgcgaaaccgcgacgaggtgcaggcgctggccttcgacgagcagcggcggccaggcgcgcggcgcgcagccagccagagcgccatgctgcagctcgactacggcgacacagtgtggctgcggctgcatggcgccccgcactacgcgctaggcgcgcccggcgccaccttcagcggctacctagtctacgccgacgccgacgctgacgcgcctgcgcgcgggccgcccgcgccccccgagccgcgctcggccttctcggcggcgcgcacgcgcagcttggtgggctcggacgctggccccgggccgcggcaccaaccactcgccttcgacaccgagttcgtcaacattggcggcgacttcgacgcggcggccggcgtgttccgctgccgtctgcccggcgcctacttcttctccttcacgctgggcaagctgccgcgtaagacgctgtcggttaagctgatgaagaaccgcgacgaggtgcaggccatgatttacgacgacggcgcgtcgcggcgccgcgagatgcagagccagagcgtgatgctggccctgcggcgcggcgacgccgtctggctgctcagccacgaccacgacggctacggcgcctacagcaaccacggcaagtacatcaccttctccggcttcctggtgtaccccgacctcgcccccgccgccccgccgggcctcggggcctcggagctactgtgagccccgggccagagaagagcccgggagggccaggggcgtgcatgccaggccgggcccgaggctcgaaagtcccgcgcgagcgccacggcctccgggcgcgcctggactctgccaataaagcggaaagcgggcacgcgcagcgcccggcagcccaggcaaaaaaaaaaaaaaaaaaaaaa

SEQ ID NO: 223570 - DNA, 1000 bp, Homo Sapiens
aagacagccatttttcaacacaatgggaaaaaaatggaatttgtttcctcggagtctgtcactccagaagataatgatggatttaaaccaccccgagagcatctgaactctaaaaccaagggagcacaaaaggactcaagttcaaaccatgttgatgagtttgaagataatctgctgattgaatcagatgtgatagatataactaaatatagagaagaaactccaccaaggagcagatgtaaccaggcgaccacattggataatcagaatattaaaaaggcaattgaggttcaaattcagaaaccccaagagggacgatctacagcatgtcaaagacagcaggtattttgtgatgaagagttgctaagtgaaaccaagaatacttcatctgattctctaacaaagttcaataaagggaatgtgtttttattggatgccacaaaagaaggaaatgtcggccgcttccttaatcatagttgttgcccaaatctcttggtacagaatgtttttgtagaaacacacaacaggaattttccattggtggcattcttcaccaacaggtatgtgaaagcaagaacagagctaacatgggattatggctatgaagctgggactgtgcctgagaaggaaatcttctgccaatgtggggttaataaatgtagaaaaaaaatattataaatatgtaactaacgcctgtttgtgaaattagcttatcaggctgaaattaaagccatgcaaaagaaggtctaggtccatcaaggaaattcccctccgttttcctttgtcatggggtttatgttttatttcagattttatttgtgtgacttagaaattccaggaacacaattaggatattttcatacacatagggtatcttgttcactgctgtgctactttacatgagtaggatggaagtgtatattttatatgaaataccactgtacaatttataatttatttacaaattatatattaagagaaacaaatgtcaaaaaaaaaa

SEQ ID NO: 223571 - DNA, 1000 bp, Homo Sapiens; identical to SEQ ID NO: 118210

SEQ ID NO: 223572 - DNA, 1000 bp, Homo Sapiens
agagctggctaacctgcgggccagtcagcgtgagtatgaagaactacggaatagtgaacgtgctgaagttcaacgacttgaagagcaagagaggcgacaccgagaagaaaaagaacggcgtaagaaacagcagtgggaaataatgcacaagcacaacgagacatcacaaaaaatcgccgcccgagcatttgcacagcgttacctggctgaccttctcccgtctgtttttggcagcctcagggatagtggctacttttatgatcccattgaaagagatattgagataggatttcttccatggctaatgaatgaagttgaaaaaaccatggaatatagcatggtgggaagaacagtgcttgacatgttgatccgtgaggtggttgaaaagaggctgtgtatgtatgagcatggggaagacacacatcagtctccagaacccgaggatgagcctggtggtcctggagcaatgacagagtcactggaggcctctgaattcctggagcagagcatgtcacagacacgggagctgcttttagatggaggctacctacaaagaacaacatatgacagaaggtcatcccaggaaaggaagtttatggaagagagagaactcttagggcaagatgaagaaacagcaatgaggaagtccttaggggaggaagaattgtcataggagggaagcttcaaagtcatgaaaccaatcaacagccaagtcagcaagcaatcaggtaatgatgtgcgagtcccctcaggttatagaaattatgttgtatttagtcagtatgtctttttgtgtaatggactgggccaatcaaatgtgataaaattaatttgagaatgaaacttaaattgaattcatttatttaatagaatattcaaaggctatattgtaattctaatgagaattatatttaattactagcttctattaccattatatgtaaccagcaaatatatttttccttagcccttctaaaaaaaaaaaaaaaaaaaaaaaaaa

SEQ ID NO: 223573 - DNA, 1000 bp, Homo Sapiens
tactgtctcttgaacagttgcaatcttggcagcttgaaaatggtgctacactctgttttgtgtgccttccttggtacttctgaggtattttcatgatcccaccatggtcatatcttgaagtatggtctagaaaagtcccttattattttatttattacactggagcagttacttcccaaagattattctgaacatctaacaggacatatcagtgatggtttacagtagtgtagtacctaagatcattttcctgaaagccaaaccaaacaacgaaaaacaagaacaactaattcagaatcaaatagagtttttgagcatttgactatttttagaatcataaaattagttactaagtattttgatcaaagcttataaaataacttacggagatttttgtaagtattgatacattataataggacttgcctattttcatttttaagaagaaaaacaccactcattttataaaatatagtacagctactataaggcttgtttgatcccaaatggtgcttatcttgattgaacattcagaacaaggatattattttcagtgattttgtgagatcagctgaaccacttatgataataataataaaaaagactgctttgccctcacgtcagttgtacatggcatggaactttaaaaattttaatataaactttcatccagttagcttcataacttttacgttccagaattttgtttattttcctgtcaatgaaagcaatttttaaagataccagtgggacaggtttggttttttaaaaatctcatgtgttcaaattaacataaatattacacgtcaatacactgtacatggtggtaatagactctaagcaattgccaagatgtattctatttttatgaagtgtatatatattaccttagtgtgcattttctatataatatcttgatggactcttttataaaattattttataaaaaacaatgttacactaaaatcagcctaaataaattttcacaactttttttcat

SEQ ID NO: 223574 - DNA, 1000 bp, Homo Sapiens
agtccagctcgggctgaggtgctgcggagctgcctcctaccaggactggcagcagaacctgtactttaactgcagctcccccggggtgcaggcctgcagccttcccgcctcctgctgcatcgacccccgcgaagatggagcctctgtcaacgaccagtgcggcttcggggtcctgcgcctggatgcggacgcagctcagagagtggtgtacctggagggctgcggcccgccgctccggcggtggctgcgcgcgaacctggctgcctcgggcggctacgcaatcgcggtggtgctgctgcagggcgcggagctcctgctggccgcccggctactcggggccctcgctgcccgcagtggggcggcgtacggccccggagcgcgcggggaggaccgcgctggcccccagagccccagccccggcgccccgcccgctgccaaacccgcccggggctgagcgcacgccccgaggtccgagaccgccacgcacagggatacagggggcgcctccgcccggctaaaaagcgctgcctgcgccgccgccgccgcctgatttcgctcgggcttcgggtgacttcgccgcaggacctacccagctcgctcacttcgctcgctccgcgtcccccatgccagcccccaacgcagggcgcccggcgaagccacgggactggcgggaggagcacgcggggccggaggaaatcctggagctgaccctcacctccgagcccccactcccaccccagccgcacagttcccacctcctggcacctccctcccctggggccgccaccccttctgggctcgtgatggtggagctaaggtccaggcctctccctcccgagtgcatttttggggagatagtaaatgttttattcgggtgtatcattcatacagtaaagacaccaatcttcacaggcaaaaaaaaaaaaaaaaaaaaaaaaaaaaaaaaaaaaaaaaaaaaaaaaaaaaaaaaaaaaaaaaaaaaaaaaaaaaaaaaaaaaaa

SEQ ID NO: 223575 - DNA, 1000 bp, Homo Sapiens
agcctgtggtcgccccaggatgctgaaccgaatggtgggcgggcaggacacgcaggagggcgagtggccctggcaagtcagcatccagcgcaacggaagccacttctgcgggggcagcctcatcgcggagcagtgggtcctgacggctgcgcactgcttccgcaacacctctgagacgtccctgtaccaggtcctgctgggggcaaggcagctagtgcagccgggaccacacgctatgtatgcccgggtgaggcaggtggagagcaaccccctgtaccagggcacggcctccagcgctgacgtggccctggtggagctggaggcaccagtgcccttcaccaattacatcctccccgtgtgcctgcctgacccctcggtgatctttgagacgggcatgaactgctgggtcactggctggggcagccccagtgaggaagacctcctgcccgaaccgcggatcctgcagaaactcgctgtgcccatcatcgacacacccaagtgcaacctgctctacagcaaagacaccgagtttggctaccaacccaaaaccatcaagaatgacatgctgtgcgccggcttcgaggagggcaagaaggatgcctgcaagggcgactcgggcggccccctggtgtgcctcgtgggtcagtcgtggctgcaggcgggggtgatcagctggggtgagggctgtgcccgccagaaccgcccaggtgtctacatccgtgtcaccgcccaccacaactggatccatcggatcatccccaaactgcagttccagccagcgaggttgggcggccagaagtgagacccccggggccaggagccccttgagcagagctctgcacccagcctgcccgcccacaccatcctgctggtcctcccagcgctgctgttgcacctgtgagccccaccagactcatttgtaaatagcgctccttcctcccctctcaaatacccttattttatttatgtttctcccaataaaaacccagcctgtgtgcca

SEQ ID NO: 223576 - DNA, 1000 bp, Homo Sapiens
tcctgcactatgcgtcccagcagcttggggcaaggtgctggagaagtctggcttcgcgtcgactgccgcaacacagaccagacctactggtgtgagtacagggggcagcccagcatgtgccaggcttttgctgctgaccccaaaccttactggaatcaagccctgcaggagctgaggcgccttcaccatgcgtgccagggggccccggtgcttaggccatccgtgtgcagggaggctggaccccaggcccatatgcagcaggtgacttccagcctcaagggcagcccagagcccaaccagcagcctgaggctgggacgccatctctgaggcccaaggccacagtgaaactcacagaagcaacacagctgggaaaggactcgatggaagagctgggaaaagccaaacccaccacccgacccacagccaaacctacccagcctggacccaggcccggagggaatgaggaagcaaagaagaaggcctgggaacattgttggaaacccttccaggccctgtgcgcctttctcatcagcttcttccgagggtgacaggtgaaagacccctacagatctgacctctccctgacagacaaccatctctttttatattatgccgctttcaatccaacgttctcacactggaagaagagagtttctaatcagatgcaacggcccaaattcttgatctgcagcttctctgaagtttggaaaagaaaccttcctttctggagtttgcagagttcagcaatatgatagggaacaggtgctgatgggcccaagagtgacaagcatacacaactacttattatctgtagaagttttgctttgttgatctgagccttctatgaaagtttaaatatgtaacgcattcatgaatttccagtgttcagtaaatagcagctatgtgtgtgcaaaataaaagaatgatttcagaaataaaaaaaaaaaaaaaaaaaaaaaaaaaaaaaaaaaaaaaaaaaaaaaaaaaaaaaaaaaaaaa

SEQ ID NO: 223577 - DNA, 1000 bp, Homo Sapiens; identical to SEQ ID NO: 118214

SEQ ID NO: 223578 - DNA, 1000 bp, Homo Sapiens
ccgtcttgccagaaatgctgttctcaccagaatgccccctccccttgcccttactggacttggccctgcctgatgccaagcaaagacccttccccagaggcctaccccccatatgtcctcagagaggctgagtgtcccctccaggcagtcatgggccctgaggcccctcctgcctggccctgctccccagtggggaggtgactgtgtttcccagagtgtgagccgctctcctccccctaaaaagctgactcactgtgagtgaccttgggcaagttcccaaacctccttgtgcctcagtttccccatctggaaaaaatggggccacctcttgccagcagtagcagggctgcccacgcccctttctccccatgccccatccagcacttgggcgactcatgcctctgcctcagtgggcctgtgggagcctactggagcccagcacttactccccctgagcagcgagcctgcgtctgtctcagctgtccagcgctgagggccagggtcttgtgctgtggggctgggggatgccctcttttctatatttatttcatagaaagtctcctgcgggagcggaaatgcagtccggcctagggctcccagcccttgactgtcctcctgtgagggcctgaagctgggccagggcccgtcgcagcggagccccctctcagcagcccaccgggtccctccaggctgctgcccgtgcgtggtctttctcctccttttcaaagcaatagccgccgggtctgcaaagccctgtcagacagactgggcccttccaaggtcaagccatgtgtctgatgacattcctggtgaagcaaaggagaggaggatgggtcagccctcactgggtgtcacacactgagagaagtcctattgtaaagaaacggaaaaagtcacaaaaaagtttgtataaagacatatttttgtactacatggggactcttcctgcatgtcagcaataaaacttcctgatctggaaccacaaaaaaaaaaaaaaaaa

SEQ ID NO: 223579 - DNA, 1000 bp, Homo Sapiens
atattgggcccacactagatggcaccatttctgtagtttttgaggagcgactgaggcaaatggggtcctggctaaaagtcaatggagaagctatttatgaaacccatacctggcgatcccagaatgacactgtcaccccagatgtgtggtacacatccaagcctaaagaaaaattagtctatgccatttttcttaaatggcccacatcaggacagctgttccttggccatcccaaagctattctgggggcaacagaggtgaaactactgggccatggacagccacttaactggatttctttggagcaaaatggcattatggtagaactgccacagctaaccattcatcagatgccgtgtaaatggggctgggctctagccctgactaatgtgatctaaagtgcagcagagtggctgatgctgcaagttatgtctaaggctaggaactatcaggtgtctataattgtagcacatggagaaagcaaatgtaaaactggataagaaaattattttggcagttcagccctttccctttttcccactaaattttttcttaaattacccatgtaaccattttaactctccagtgcactttgccattaaagtctcttcacattgatttgtttccatgtgtgactcagaggtgagaattttttcacattatagtagcaaggaattggtggtattatggaccgaactgaaaattttatgttgaagccatatcccccatgattatatagttatgcatcacttaatatggggatattttctgggaaatgcattgctagtcaatttttttttgtgccaacatcatagagtgtatttacaaaatcctagatggcatagcctactacacacctaatgtgtatggtatagactgttgctcctaggctacagacatatacagcatgttactgaatactgtaggcaatagtaacagtggtatttgtatatcgaaacatatggaaacatagagaaggtacagtaaaaatactgtaaaa

SEQ ID NO: 223580 - DNA, 1000 bp, Homo Sapiens
ttcttggtgctctatggagaaatggagtctgtgtgcttactgaagagtcccaaaaaccagagaccattttcatttactgccatcataaatattctccaccattcaagatgcctgtgtacacggctatttgggaaacttaagtgttggaggaggcaggggctgaaggtgtcaaaacctcctcagtaggataacccctttctcccctttggaccatctgccatctttcatgagtgtttcccatggtgtttttgcatccagagttgacaacaactcaattttgccttgaatttactcagtcttataaattaaaaatgtgcattttatataaagatgcattttatataaaaatgcacacctttaatctctatatggcagcatatacatatatatatataaaatgcacacttttaatctctatatggcagcatttttgaggctttatatctgcccgtgtaccctcaactgcctcctttttgcagagaacgatccccacaggaactggtctaagaacactgtctgcacatgattgatgcttaaaatccaatataccaccacatatcaaaggttgggattttcagagtccttcttgatttctgagctgaaaccttaacaaatagggaatttggcagggaagacacctgggtttttaattcagaaccctatttatatactgttaaaatttgaggtactgtagtttatataaaagtcggatgttaagatattatatttcagtactaggagcttctttgcagtcattaacatgacaaattaagtaataaatataaaagtgattgtccataaattatcattgaattttttgtttattttgtagtgttctgtatttatctgcactttgtgtatatatacacacatacatatgccaacatgtaaataacctcatgtttattcctaatctaaattgccacaatatttttaatgtatggttacactgtgttttaaattactttaaaaataaactttgtaagcagaaaaaaaaaaa

SEQ ID NO: 223581 - DNA, 1000 bp, Homo Sapiens
gccactaagagaaggcagagaggtccctagtgggtatatttgctgccaagccacttgccaaagaagaggaaccacagaaagagagacatcatgaccaggagaaaaatgtgactagacatgctaacctccaggtttttatatatgacttgagtctgctgtaattggcagcagaaatccaaatttgtatggtagaccaaaaagaaccaaatccatagggtgaaattttgagacctagactctgtaaaaataatcctagtcttcctccaggggtcagttcctcacagtggttctgtaccaaaacttgccaaattcctccatggccaagtgttaaaatctgtgtttggaaaatagcgaattaacctaagacacagaaggcagactgggtgaggagacctagcatgccctattggcagtgctcaggagctgcatcccacttttccctgctctgaatcgaagtcctagttccttcctttgattctcctttggtaggtggaatcagttaatgttttgagaaacctgcctgggctctgcccttagtcatgacatctcgctgagccagacccactctgttccttggaacctagagctggagtgaggagtagaggtctccggctattccagaaagaaaagtgagccacatgcaggctgatgaatgccgacacttccagaatgtatagaaatagtccctgtcctggcctgccactgaccctgtctgtattttctcggaggttgtttttctccttctccttcccaggaaggtctttgtatgtcgaatccagtgcactcaagtttggccaagggactccacagcacccagaggactgcatgcctcaaggtttatgtcactcctctgctgggctgttcattgtcattgctgtgttcagggacctttggaaataaaacctgttctgtcccaaataaaaccagcctgtgatgttcaagggactggaataaagtggcttacgacctgaaggattctaaaaaaaaaaaaaaaaaaaaa

SEQ ID NO: 223582 - DNA, 1000 bp, Homo Sapiens
atatatttttcaaggtattataaattgtgttgtgttttcagtataagaaaatgttgacaggaaacaattttatagcatttataaaaaaccaacacttgtgcaatgctaaattggcgaagcttctgcacctgaattagagcacaataaatatgctgtttataaaccaaatcactgctattccttctctgaaatcatctctcctctttttaaacctttacttatagctagaataaatcactatttaattgcctctaatactttaaaactactggatggttaggcctggtttaactatttatggagagctatttgcaaacttaagttgtgtaaatgtaatttctacttgtgaatctgagctgtagcagcccagagggagctaggcaaactattccagaccaccaactgataagtgatcagattctttgtaatgtaggattttttaacctgttgattatgggtttgttgatataaatgtaataatgttcacctcgattttcctggagtaacaaccagcgttggtagtagcccacctgcatgaggacggccagtgttaacaatatttttgttctgatcttcttccccatttttgtttcctcaaacaggtttttaggagagtggagatttaaagtcaggatgtggcctttttattttaattatatacttaattcttagaacaagtagaatgggaaaggagtgactgataaatctaagattcaaaatagtcccgtcgaaacttaaaggccagattattgctttggagctttctataggtactagccatcccgtcgttaaatgttttcatggatatttgaaaagaagaccatgtacctttaataactgttcttttctcgagtttctgcctcgtgctttgacctggattgcattattattgtttatgcgaagtaaaaaaaaaaaaggaaagcacaagcttttcctgtatattatatttccatttccattttaaaataaaaacaattttcccaacaaaaaaaaaaaaaaa

SEQ ID NO: 223583 - DNA, 1000 bp, Homo Sapiens
tacagatgaagaaaaaaatgacctagctgaaactgatagaggaaatagattggctaacaattcagattgcattttagctaaagacctttttgaaattagaactataaaagaagtagattcagccagagaagtgaaagctgaggattgcatagatacaaagttgaatggaattctgcatattgaagaaagtaaaattgatgacattgatggtaatgtaaaaacaacttggataaatgaactggaactgggaaaaactcatgaaatagaaataaagaactttaaaccatctccttccaaaaataaaggcatgtttcctggttttaagtaataatacttaactctcaagctaagtaaaaatatgtcatcatgcttatgttaaactctgttgtaagtaataatttgtaaattgaataagtggcatactttttaaaaaactattttatgttcagaaatgtaaatgttattattcttgagtttttgggtttctttttttgagacagagtcttggtctgttgcccaggctggaatgcagtggtgtgctctgggctcactgcaaccttcacctccaggttcaagtgattctcctgcctcagccttctgagtagctgggactacaggtgtgcaccaccatgcccagctagtttttgtatttttagtagagatggggtttcaccatgttggccaggctggtctcgaactcctggcctcgtgatctgcccttctctgcctccctaagttgctgggattacaggtgtgagccacagtgcctggcccattcttgagttttgataaagtaattcatacaaagtattgtcctcaaataagtcttccttagctaaatgcaatttaaaattattcaaagatcctagggcacttctagtttcacgtaaatattcatattaggtggttctcttcatccatttgttttcacactgatacataaaaattaacagcagtctaatctagtgacacctcagtcatatttcgctatagattttac

SEQ ID NO: 223584 - DNA, 1000 bp, Homo Sapiens
ggctgctcctattgctgagctgcctggccaaaacaggagtcctgggtgatatcatcatgagacccagctgtgctcctggatggttttaccacaagtccaattgctatggttacttcaggaagctgaggaactggtctgatgccgagctcgagtgtcagtcttacggaaacggagcccacctggcatctatcctgagtttaaaggaagccagcaccatagcagagtacataagtggctatcagagaagccagccgatatggattggcctgcacgacccacagaagaggcagcagtggcagtggattgatggggccatgtatctgtacagatcctggtctggcaagtccatgggtgggaacaagcactgtgctgagatgagctccaataacaactttttaacttggagcagcaacgaatgcaacaagcgccaacacttcctgtgcaagtaccgaccatagagcaagaatcaagattctgctaactcctgcacagccccgtcctcttcctttctgctagcctggctaaatctgctcattatttcagaggggaaacctagcaaactaagagtgataagggccctactacactggcttttttaggcttagagacagaaactttagcattggcccagtagtggcttctagctctaaatgtttgccccgccatccctttccacagtatccttcttccctcctcccctgtctctggctgtctcgagcagtctagaagagtgcatctccagcctatgaaacagctgggtctttggccataagaagtaaagatttgaagacagaaggaagaaactcaggagtaagcttctagaccccttcagcttctacacccttctgccctctctccattgcctgcaccccaccccagccactcaactcctgcttgtttttcctttggccataggaaggtttaccagtagaatccttgctaggttgatgtgggccatacattcctttaataaaccattgtgtacataagaaaaaaaaaa

SEQ ID NO: 223585 - DNA, 1000 bp, Homo Sapiens
cgctacctgatcacggccaccctcacccccgagagagacgcctacgtggaagcagtgctgtcggtctccaacgccagcgtggcccagctgcataccgctgggtacaggagagagttcctggaataccaccgccctccaggagctttgcatacctgcgggggcccgggggcattccacctcatcgtgcacctgaaggcgggagatgcagtcaacgtcgtggtgactgggggcaagctggctcacacagactttgatgaaatgtactccacatttagtggggttttcttatatcctttcctttcccacctctaaggtggctggggagatgtcaggggaaagatagatagttgtaaaaactctaaagctttaatatattcggtttgtatgtaatggaagcacggggctagagtttccacataggccccaacataaaggccttccctcgctgttgaggccaccatgccttactgcatccagccaggctgcagggagtgaggcacacggtgaacatggccactgacttttctgccactctaactggacaactggaagacttggaaaggcctccacctgtatctacactctgagggccctggactgggcctgagcttgccacagaggctccgtctgactgtgggctgggaggagggaggcaggggagagccggtcacggtggctggtctttactgcagggcagcactgtggccagctgtctgtctttacactgcatgcagaagtttaaacactgaagtgccgaagtggcccgtgccgccgcacagagaccccgactttagtttgggctgttccacgcttggctcaccattgccgcctgggacttaacctgctcaggcgggccttcgcccagctgcaaatagggatgcgttagagactgttcccaaagcttgttgggctccttaaatggcatgtacaatttaagtgcaaagacagggagtgtcaataaagatggaaagccatttccagttaacttttgttaatttaa

SEQ ID NO: 223586 - DNA, 1000 bp, Homo Sapiens
agagcagctccagcagctcccagctttaatcgcagacttagaatccatgacagcaaatctgactcatttagaggcgagttttgaggaggtagagaacaacctgctgcatctggaagacttatgtgggcagtgtgaattagaaagatgcaaacatatgcagtcccagcaactggagaattacaagaaaaataagaggaaggaacttgaaaccttcaaagctgaactagatgcagagcacgcccagaaggtcctggaaatggagcacacccagcaaatgaagctgaaggagcggcagaagttttttgaggaagccttccagcaggacatggagcagtacctgtccactggctacctgcagattgcagagcggcgagagcccataggcagcatgtcatccatggaagtgaacgtggacatgctggagcagatggacctgatggacatatcggaccaggaggccctggacgtcttcctgaactctggaggagaagagaacactgtgctgtcccccgccttagggcctgaatccagtacctgtcagaatgagattaccctccaggttccaaatccctcagaattaagagccaagccaccttcttcttcctccacctgcaccgactcggccacccgggacatcagtgagggtggggagtcccccgttgttcagtccgatgaggaggaagttcaggtggacactgccctggccacatcacacactgacagagaggccactccggatggtggtgaggacagcgactcttaaattgggacatgggcgttgtctggccacactggaatccagttttggctgtatgcggaattccacctggaaagccaggttgttttatagaggttcttgatttttacataattgccaataatgtgtgagaaacttaaagaacagctaacaataaagtgtgaggacggtaaaaaaaaaaaaaaaaaaaaaaaaaaaaaaaaaaaaaaaaaaaaaaaaaaaaaaaaaaaaaaaaaaaaaaaa

SEQ ID NO: 223587 - DNA, 1000 bp, Homo Sapiens
atttcagactgtgaagaaagttgaatggtggtttttaaattataaagtaatgtattaaaaggtgcattaggctgtagttctaatattgagttcaactgtgaaatccatcagatgtgccaaatggagaagacagaaagcaacaaagtgaattgttctttagcccaagtggtacagtgaatttgctttaacagatgttgaaaactaaattttctactgtattcccagcacgggtgacttctttttctcttcattagccagagatgactaatttaaatttagaaccagattttaatttaaattaatatttccattaataacctattcattgcagatacctattatactgtgtaacagttgttttggaaattttatgtaaaattaaaactatcagtattttacagatgttttaattagacattgttattaacaggaacagtgcagaaactagaatcaagccttataatatcttatagaccatgcatttttgaagttagtgtccactagggtcctattaactgtacatttgcaagatttcattatttttgcctctgacactatgggaaaaattttttagaagctattgggacagattcaagcttttatgcacttggttactacagctgtaaaatgaaatctcgtcttgtagcatggattattcttctcatgttaaacccaccaaaataaaggggactaaataggtaatgattttcctagtgcatttgcatactgtgataatcctgggccttgcaatagttctacagggctcttgggcattgaattattaggatgtaattgtacatcattgtagtgttcaccttattgaagctcactctgatgttaatgagcttcgggttttgatgcttgtttagagatcagcagtcttggatgggagggaacaaagctaaataaatgttagtttggtgaaaaaaaaaaaaaaaaaaaaaaaaaaaaaaaaaaaaaaaaaaaaaaaaaaaaaaaaaaaaagaaaaaaaaaaaaaaa

SEQ ID NO: 223588 - DNA, 1000 bp, Homo Sapiens
tcctgggcatcatcctcaccgtcagcctggtctttaacctccggtgatggctgctcggtggccccacacccaccagggtcccgaggaaacagccgccatcccttttggttccagatttttttctcctcaccccaaaaggcagggttgggcctgctgttgtggaccgggggtcggggctggcaggatggaaggactgaggaccagcatgaagtgggggtttgttgtctccctgcctctcagaagcaccctgtcccctcctccccaggcctgtgactccggccctggaagcccctttgttcttctgttgaaaggctttggcttccctctgtagagctgctcccgccaccacctgctggggtcctgcctcagcccagtgcccagtatggggagaggaggacatttgggctcacctgtcaaggtggccctgggaccagagctggtcccagcatggggtgcaccgggtacacttaacgtgtctctataagccaagttgcttcaggaccttcaccactggcctctagaatggtccagaggggctggctgggtccctttgtcagactcctgccggcagctgccctgggggacatgtgtgcccatctggcatcctccagcccgtgcagtccgctcttcactgttccacggcctcccagtgcctcccagcattggacccatctccccctgcagtttgaggccagagaggtgagtggacctgacaagtgccagagtaaccgtgtagacagagcagtgtagacagcgctcagccccagccccaggtgtggacctcatgctggtgatggctcccctgggtggcctgccagcacagccagtgccatcagggagctgaaggggctgtcccccacctaactccagctcccccttcacgttgtcaccaaggccctgtgccgcccgcctcgcccccctgctctgtggattcctttgggaagggctccctgggcaggacaataaagagttttgactccaaaaaaaaaaaaaaaaaaaa

SEQ ID NO: 223589 - DNA, 1000 bp, Homo Sapiens
aggcggctgccatgcggaggcagctcctggcacatttccactgcctctcatgtgaccggcccttggagacacctgtgactggacatgccatccccgtgacccccgcgggtccaggcctacctgggcaccattccatccgcccctacacggtgtttgaactggagcaggtccggcagcatagccgcaacctcaagctgggcagcgccttccctcggggtgacctggcgcagatggagcagagcgtggggcgcctgcgctccatgcactccaagatgctgatgaacattgagaaggtgcagatccacttcgggggctccaccaaggccagcagccagataatccgcgagctgctgcacgcccagtgcctgggctccccctgctacaaacgggtgacagatatggctgattacacctactcaactgtgccccggcgctgcgggggcagccacaccctcacctacccctaccaccgcagccgcccgcagcaccttccccggggcctgtatcctactgaagagatccagattgccatgaagcatgatgaggtggacatcttgggcctggatggccacatttacaagggacggatggacacaaggctgccaggcatcctccgaaaagacagctcagggacctcaaagcgcaagtcccagcagcccaggccccacgtgcacaggccgccatccctcagcagcaatggccagctgccctctcggccacagagcgcccagatttcggctggcaacacctcagaaagatagaccttcctccgagggccgtctctcccagccgaacacagcccacccgcccagctccgcctcggtggcaaacagggggctggagaggcacgtggacatgcctcctggggaggggctcgaggagcccacgcgggggccgcggtccagcaccgctcagtgagcggaggtgtaaataaacattcaggaggaaaaaaaaaaaaaaaaaaaaaaaaaaaaaaaaaaaaaaaaaaaaaaaaaaaaaa

SEQ ID NO: 223590 - DNA, 1000 bp, Homo Sapiens
cacaaaaaaacttcttgaagatggagcctgtgtcccatttctaaatccatacacagtccaggcagatctcactgtgaagccctctacatccaaaggctatttgcaagctgtggataatgaaggaaatccactttgccttcgctgtcagcaacccacttgccagactaagcaagcatgtaaagcgaactcttgggattcacggttttgctctctgaaatgtcaggaagagttttggattcgatctaataacagttacctgagagccaaagtatttgaaactgaacatggtgtgtgtcagctctgtaatgtgaacgcacaagaactctttttacgtctgagagatgcccctaaaagtcagaggaagaatcttctgtatgctacctggacttcaaagctcccattagaacagctaaatgaaatgataagaaacccaggggaaggacatttctggcaggtggatcacatcaagccagtgtatgggggaggaggacagtgttccctggacaacctgcagactctctgcacagtctgtcacaaagagagaactgccagacaagctaaggaaagaagccaggtgagaagacaatctctagcatcaaagcatggatcagacatcacacgatttttggtaaagaagtaaagtagaaaaatatatgaatgaatgacaaatggtttacatgtggaagactttaatacagaagttttccatgtttgtttaatatatcgagagtaaaaattttcagaacaaaaatcaagaattcaaattctcttctactaattacttttagtattaaatacattttgaaagtacttaacagaaactaagatacaatactgaatatttctgtggtctttttgatttgattcagactcgcaattatgtttcagcaatgttttgtaaagctctttacccctaatatgcctaatcactgtattgtgcatagattgtgtttaaaaaatgtactctcaattacctaaaaaaaaaaaaaaaaaaaaaaaa

SEQ ID NO: 223591 - DNA, 1000 bp, Homo Sapiens
tgacaatctctttgaaacatttccgagttaatttcccataggcttcaccaccaagaaagtaagaattgcatctttacataatgatcaaggtataatggaaaaatatacctattcttgaagtagtttattatagttttcaaattgatttataccattattaacctgatgtggtctgcttaaaaaatgaatatatcagtatttagaaataaattgcaaaggtgggaatatatacttaaataatttgtcttaagtaaattagcatttggtagtctgaaatggtgacagattacttgttaaaattgtgaaaactctgttgtgtcctctcttcctacatttgtccctgagagtactccacgattactaggttcttgattcccttatatggcaatcaggcagaggcgttccttaagcattagagagttctgaagcttaagatttgttttggttggatgaagtccttagtacagttgaaaaacagagcattaaagactaatcaattgttttgcctcaccagtcattttaaatagtagaatacttatttctcagtgcttaaaatttctttttcaactgtgagattgaataaacagtctctatttctgtggaaaaaacaacagaaaagagatattaaataccataaaatgtaactctgccttttaaagttttgctgaagaatgtgtctgtggttaggatagcacaagcattaacttttgttttatagttatgctttttaaaattcattgtttttaaatttagacttcttatttccacactggattatgagatacttaacaatttttccaccttatatttcttttacacattttgctgttctcttttttgttattgttatgccaccataccattttgttaaaatgttttctttgtgaaacatttgttcaagttctaataaaattaatgttttcccttaacatggctcaataacttaaaaacgttcatttaaataaaattttaatacttgtttgacaaaaaaaaaaaaaaa

SEQ ID NO: 223592 - DNA, 1000 bp, Homo Sapiens
acctccatttacatagcattccaggagaattgcctgatgaacccaaaggttgttactacccatttagaactttctttggtccaggagtaaataataagtctgctcaagttctactgcttttagtgattcctggacatttaattttcctctacactattcatttgatgaaaagtggtcatacttctttaactataatcttcatagtagtgtatttatttggcgctgtgttacaggtatttaccttgctgtggattgctgactggatggtccatcacttctggaggaaaggaaaggacccggatagtttctccatcccctacctaacagcattgggtgatctgctcgggacagctctgttagccttaagttttcattttctttggcttattggagatcgagatggagatgttggagactaataaattctacaaactgctctcaagttaccaaggaagaaaatacacgacaaccacttatggctctttttcaaaactcttaaatcagtagtttgacttttgccagggtaatcttcagttggccctgattcaattaaatggccttaatttttttttaaggaatttgtgtcaaaaccagaatgaagagtattcgtgctgcttttcatagaataaatgataatttgacatagacatagatataagttccagctctgaaattaattaggaaagaatataggatgtttacagtgaataattttaaaaccacaaacatagcagaaatgtactttattattaaatttgtaatgcaggattagaagaagcagagctctagtttagcctttcttgtctcacagatgtgctgtatcccaggcatactataaaacgaagagtgcccaaccaagctttgaatcgtattaacaatgcccacctctatgctagctgaggataaatttaccagttgctcatatttaaactgacctaaatatgttttgctgagcataagataaactcacttttacctccatctaaaaaaaaaaaaaaaa

SEQ ID NO: 223593 - DNA, 1000 bp, Homo Sapiens
tgtacatcaccaagtatctttggcattcttggtatacaaagtatatcacaattttaagtgagtaaatattaatgataatttttgaattgctttgtttggcttgattaactttgatcagaaatagaaacgttttcatttgttgatttaggaaaaagcataaatagaatgcagtataacaccacttccaaaggtaaggatacctaacattcttttttttttttttttttttttttttgggatggagtctcactttgttgcccaggctggagtgcagtggtctgatctcggctcactgcaacctccgcctaccgggttcaagtgattctcctacgtcagcctcctgaatagctgggattacaggtgcacgccaccatgcttggctcatttttgtatttttagtagtgacagcgtttcaccacattggtcaggctggtctcaatctcttgacctggtgatctgcccacctgggcctcccaaaatgctgggattacaggcatgagccaccacacctggcaagggtacctgacattctaagatatcaagacacttaatatgtgggctattagctgcttatttaaatgttgaccaaattgtctgatatatctgattaatcatgatttcacttcatttcggaagaaaaattatccatatcatttttaaagacgcaaatgactttggatttttgcatagagtacaatagacacttcaaacaatagattctaacattctctgaaacacttgagatgtttgagctaccatttatatgggttatttatatttagtctaagtaacacatacatgtttaattgattctgttttcatggatagattcaactaagtcttccaagcaattaattttttgttcgtcgtcgtttttccttcatacgttatctagttatgcagcactggaaacagactgaagatcataaaccagttttatcagacctatgtgtaataagactcctgttaatacaaaaataaaaagctaaaagcaacttgt

SEQ ID NO: 223594 - DNA, 1000 bp, Homo Sapiens
ttcaaacaacgctctgacctctttagacaccagagaatccacacaggtgagaaaccctatggctgccaagaatgtgggaaaagcttcagccagagtgctgccctgaccaagcaccagaggacacacacaggcgagaagccgtacacctgtctgaaatgtggggagcgcttcaggcagaattcacacctaaatcgtcatcaaagtacccacagtagagacaaacattttaaatgtgaggaatgcggggaaacctgtcatatttccaacctttttagacatcagagactacataaaggggaaagaccctataagtgtgaagaatgcgagaagagcttcaaacagcgctctgacctctttaaacaccacagaatccacactggggagaagccctatggatgttccgtctgtgggaaacgcttcaatcagagtgcaaccctcattaaacaccagagaattcacactggggaaaagccttacaaatgtcttgaatgtggggaaagatttagacaaagtacacaccttatccgacaccaaagaattcatcaaaataaagtgctgtcggctgggcgtggtggctcacgcctataatcccagcactttgggaggccaaggcaggcagatcatttgagatcaggagtttgaaaccagcctggccaacatggtaaaatcctgtctctactaaaaatacaaaaatgagccgggcatggtggtgcatgcctgtaagcccagctattcgggaggctgaggtaggagaatcacttgaacccaggaggcggaagttgcagtgagctgagatcatgccactgcactccagcctgggcaacagagcgagactccatctcaaaaaagaaataaagtgctgtcattttgatatgtttctatgtgaaaaaaaaaaaaaaaaaaaaaaaaaaaaaaaaaaaaaaaaaaaaaaaaaaaaaaaaaaaaaaaaaaaaaaaaaaaaaaaaaaaaaaaaaaaaaaaaaaaaaaaaaaaaaaaaaaa

SEQ ID NO: 223595 - DNA, 1000 bp, Homo Sapiens
gaaacccacttcttcaagaaacaaactggagggattctctacttaaagtgttgcctgctctgagaatcctcaatggcaatatactaaactctaattcagaaagccgcactgaagaacacaatcaactgggatcagcaggtttcctggcactttgtcagtctcagattcgagaattcaacttgctaattgaaaattatataactggaaaaggagatgtatttaccttggatactgcagaaaatctctgtcattattttaagaaattgatgatacttagtactgaataccgacatgcacacgaacgaggggatgtaactatcaccaagaaagatgaatcagaagcccagaaaaatcatttggcccctacaaacagtgacagcactctgcaaaatggagtcttctactcttgtgcacgtgaaggtgagccagactcaccagatattcctgagaaatggatggactctgtctccagccactccccattaagcaaatccgccacatgtgaaaatatggaaggaagacatcaggaaatattagtatgtcagaagagagaagacagcaaggcaagcagtattcccaccataagaatcccatttaaggaagtagtaatgacaaattctttgctgaggaatcaccaaaatattgagcctagtgaaaaaatgtaagatatataaataatgtttcttttatagatgtatgtttactccttttgatggatgatattagtcaatggtacctagtaatttgctgaaggattcaaatcacaatcatatttcataccgattccattatgttttcgtgaggtgcattatgttttcatgaggtgcacaaatcattaattatagtgcatattaatttgattaaattctcatttaatttctagtagtatttaaatgagtaaatgtgagtttttttctgccttgtaatttctaaataattaatatgttttaaggagaaataaaatatcacagtctaaaaataataaaaacattttctgagt

SEQ ID NO: 223596 - DNA, 1000 bp, Homo Sapiens
cagctcactgcaacctccacctcccgggttcaggctattctcctgcctcagcctcccgagtagctgggattacaggcacctgtcaccacacccagctaatttttgtatttttagtggggatggggtttcaccatgttggccaggctggtctcaaactcctgacctcaggtgatctgcctgccttggcctcccagattgctgggtttacaggcatgagccaccacgcccagccttcccttgcacttttaatgagggggttaagttcactgttttctctttctatggtattgggtaaaataggtctgcaagctttatatttgcccagggtatcattcattcttcagttgttgatttaggagtgttatttggaaggagtattatttgctcttcccctgagaactgaaagaggggaagggagtacatttgagggcacttaatacaaagttaatgtcagaatgtgtgccttgaaattcttgctttatacatacatctgtcattttcatttcacagggttcacagggtttcacagtctgatgagactgtgcctgttattgttttttatttttactctggattttccttgcatctgacttgccactagcacaggaagctcaggacgaaggcagcgttaggagaatagttgtggtatggtgacttctgtgtttatctgcaggagtgtgaatagccgtaacttgcctgcacctgctgccttaacagtggagttggccaggcgcagtggctcacacctgtaatcccagcactttgggacaccagggtgggtggatcacctgaggtcaggagttctagaccagcctgaccaacatggtgaaaccccttctctacgtataaaaaaatacaaaattagccaggcatggtggtgcatgcctgtaactccagatacttgggatgctgaggcaggagaatcgcttgaatatgagaggcggagccaagatgatgccattgcactccagcctgggcaacaagagagaaggtccttctc

SEQ ID NO: 223597 - DNA, 1000 bp, Homo Sapiens
cctggaactggctttgaccatgaaactgtgaatggccctaacttcaagggaaatgagaaatcgaaggaattggcccaatggcgaggagaggaaaggccaagggaagagaaaagtctgcgttagtctggagaagttggactagtgagatacaaaaccagaaactggtgagtcacctagtctcctttctctccctcactccctataaatgaccaaatgccatgacctgtcattcctatcttctgacctctacatgcccactacctcttagctgagtttaggccctcatcatttttcacttactgctgcagtagactattcaattattctccctgctcccagcctcatctccttccaacccatcctccatgctgttgctatttctaaaatgcaaatttgatcatgtctctcctctgcttaaaattcttcatttgctttccatcaccttcacaataaaatccaatctctttagcatgtcacacaaagtcctttgtgatctggcccctatttaatcactctggcctcatctattctgtccccacttccctcccctgacctagcacatcacactttggctctagatgtgcttaggcatttagagttccctgaacaagctgtgctcactcacctctgaacaactgcccttgttgttccctctggttggaatcacgtcacacacccttactttcaaaccctcctcctcgatcctcctgatcctcttggtccttcaggcctgggtagagcagatcacctctgtgagcctaatagatctacacctctgtacacaaatttgtgacagcacttatcacattgcagaacaactgactgtttctttttgactctatcaatcaactgtgagttgatgaagtcaagggctgcacctgtcatttggggatccttagggtcttatgtactccaagcatatataataaatatttatggaatgaataaatggactaggatacaaattaaaaaaaaaaaaaaaaaaaaaaaaaaaaaaaaa

SEQ ID NO: 223598 - DNA, 1000 bp, Homo Sapiens; identical to SEQ ID NO: 118229

SEQ ID NO: 223599 - DNA, 1000 bp, Homo Sapiens
ctatttttttcaatctgaatattgctgcagcaaaaccaactccaccaaaaagccaggtaacattaacaaaagaattccctgtatcatctggatctcaacatcggaaaaaagaagcggatagtgtttatggagaatgggttcctgtggagaaaaatggtgaagaaaacaaagatgatgataatgttttcagcagcaatttgccctcagagggccgggttaaacggcagggccgggttagacgacagatgaaacaacccgcagcttctcatttgacagtaactcgatgcaattcactttgtggaaccaagccacaaagtgaaaagcatcgaattgcagagaacagtgttatcacatccctacccaacattgggccctccctgcacttgtgggaaggtagtccaaggtacaactatttagcttcccgatttgcttcaaggctctatagctctagattttggtggtagcaaatttatcgggtggagggattgatcggagagggcagatcctcaggttcaacacaagaactggattggaaaaggtcattgtaggttgatgtgagcatcttgggtacatagcccattgcccttaatgatggtttcttactgtttctctgggttgtttgtcagatagcctttaattttaattatttttccttccctttgctaccttggcccttttaaattcttgtgtttaacctaatgctcagccttggtactccattcccttctccttcccctctttgctactattaaaagtcggagaagtggaattcaaacgttgaaatttccacggggctatagttgtatcttaataatgccaagtgtcaaaacaaccccattaaaatgccgcctgattaaataatgtgctgctaaatatagtgcacatgaaaacagcaagactgtatatatatgtaaatatatatatatatctgtatctttgtatgtatctctgtatctgtacctttgctgtatcttttaataaacagtttacttttatttaa

SEQ ID NO: 223600 - DNA, 1000 bp, Homo Sapiens; identical to SEQ ID NO: 118235

SEQ ID NO: 223601 - DNA, 1000 bp, Homo Sapiens
cagaaatccattcaaacgtgactgtcccaaatgccttatgtcaaataaagcagattgcactgatggacatcagacttgaaggaaatgtttccaattttatatttaaggggggtggtgggtgggagggggcaagtaaagacggaacaagtttagtagcagtaatagtaaatcatgtttacatatgagatttatagtcgtgggaggggaataaagttctgttatatttccttgctcgagtttcataccagatgcgttggtccataaaggattgtatcaagtagatgggacaacattctgctctgaacgaaaagtaattttagagacataacctgcttaccaatgcctgtctttgattcatattctactttcaataaagcatgaaagtgaagaacttgtcctaagtgtggaaaagtgtcttcagatttagactcttctccatgtcagctgcagcgccacccgccttacacctgcccggccgtctgtctcttggtattgggtaaaggagggggcacctgcatgtctcctgcaatgagcaaggaattatgtctcatgttttgacttcagaggctttttgctttggtgcatttcagaaaggatggagaacatttattatgtgtgaaagcatcctcttccggttttgctgttattcaaaagtgggaaatgtacctggcacgtttgaaaataaaaaatctgactacctatcagaagagtaaatcagactgaagtacatttggataacacaaggtttctataaaatttgttcttcctgtcctccatgtcactgtttcttggacctcagttctctttttgaaagcattattccaaaatgccctgagagggtctcttagatcattgtttaaaaaaggaaaaaagtatatggatgtgctgtccatccaactcaggattatcattcttagcaacacgtaaccgaagcaatattcttaagaatattgaaggggtttttttaattgaacttaagactggagtttttcctttgaaa

SEQ ID NO: 223602 - DNA, 1000 bp, Homo Sapiens
ctccatggactgcagatgctgaaatctctccaaggcacacatgttgtcacgctgcttggctattgtgaggatgacaacactatgcttactgaatatcaccctctaggttccttgagtaacctggaagaaacactaaacctttcaaagtaccaaaatgtgaacacgtggcagcacaggctggagctggccatggactatgtcagcatcattaattacctgcaccacagccctgtgggcacacgggtcatgtgcgactccaacgacctgccgaagacactgtcccagtatctgctaacaagcaacttcagcattttggcaaatgacttggacgccttacccctggtgaaccacagctccgggatgctggtgaagtgcggccacagggagctgcatggggatttcgtggctccagagcaactgtggccctatggagaggacgtgcctttccacgatgatctcatgccctcatatgatgagaagattgacatttggaagatcccagacatctccagtttccttctggggcacattgaagggagtgatatggtccgattccatttgtttgatattcacaaagcatgcaagagccagactccctcagaaagacccactgcccaggacgttctggagacctaccagaaggtcttggatacacttagagatgccatgatgtctcaggcaagagagatgctgtgaaaaccagtccagccaatgaaggtgggattgaagggctgaatggaagttacagcattctactctgatggtggagttttttgcctgagtttcgtgttttattgttttttttatggcttagccatgtggttcgttgtccacatccacatgtacgtttgtatgtagtccacattggttgttagattttttttttttttctttgagatgcggtcttgctctgttgctgaggctggagtgcagtgatgtgatcttggctcactgcagcctctgcctcccaggttcaagcaattctcccacctcagcctcc

SEQ ID NO: 223603 - DNA, 1000 bp, Homo Sapiens; identical to SEQ ID NO: 118240

SEQ ID NO: 223604 - DNA, 1000 bp, Homo Sapiens
gccaccacagagcacatggctgtgtctaggcgcaagcactttagcagtatctgtttacatgcgcaaggatcaagccgactacctgtgctgtctactgggacagcagtctccgagctactccgtacctccctctgccaggtcgtggagttaggccccagtccctacttgtcactggttcccactgtgctcctaactgtgcagcacctgggagctctggcctggggctggaggccctggtaggagctgcagttggaggccgttctgtgcccagcagcggtgagcggctcccatgggccctgtgtctgcagggagccagggctgcggcacatgtgctgtgaaactggcacccacctggcgtgctgctgccgccacttgcttcctgcagcacctcctaccctgctccgtgtcctccctctccccgcgcctggctcaggagtgctggaaaagctcacgcctcggcctgggagcctggcctcttgatatacctcgagcttcccctgtgctccccagccccaggaccactggccccttggcctgaggggctgggggccccacgacctgcagcgtcgagtccgggagagagcccggagcggcgtgccatctcggctcggccttgctgagagcctccgccctggctttctccctgtctggattcagtggctcacgttggtgctacacagctagaatagatatatttagagagagagatatttttaagacaaagcccacaattagctgtcctttaacaccgcagaaccccctcccagaagaagagcgatccctcggacggtccgggcgggcaccctcagccgggctctttgcagaagcagcaccgctgactgtgggcccggccctcagatgtgtacatatacggctatttcctattttactgttcttcagatttagtacttgtaaataaacacacacattaaggagagattaaacatttttgctaaaaaaaaaaaaaaaaaaaaaaaaaaaaaaaaaaaaaaaaaaaaaa

SEQ ID NO: 223605 - DNA, 1000 bp, Homo Sapiens
ctgggccgaatcgttcaggctgaagaatatctattccaagcccagtggacagtcctcaaatcaactgactgtagtaatgccacccactctttactgcatcggaatctgggacttctctatatagctaagaaaaactatgaagaggcccgttatcatctggccaatgatatttattttgccagttgtgcatttggaacagaggacattaggacttcaggaggctacttccacctggctaatatattctatgaccttaaaaagttggacctggcagacacattgtacaccaaggtctctgagatctggcatgcatatttgaacaatcactatcaagtcctctcacaggctcacatccaacaaatggatttactgggcaaactatttgagaatgacactggcttggatgaagcccaagaagcagaagccattcgcatcctgacttcaatcttgaacattcgagaatctacatctgacaaagccccccaaaaaaccatctttgttctgaagatcctggtcatgctttactacctgatgatgaattcttcaaaggcacaggaatatggcatgagggccctcagtctagccaaagaacaacagcttgatgtccatgagcaaagcaccattcaagagttattaagtctcatttcaactgaagaccatcccattacttagtgacccatgagctctgcatcaagggttattccaggggctactgaagatctaatatattccagccttgcacaactgctttgaggtactgtagactgctgaagtttccaccctcttcccctgggattgcacacatagctgttatttttttcttacacagcatattaagggaatataaagctttaggcatagaaatcactaaaaactgtgtttgtcatgacctttgtacttgatttatcatgactttgtatgactgagtaatatgtagtcagatcactaatatggtatttgtaattaaactacaaatagtttgtcaaaaaaaaaaaaaaaa

SEQ ID NO: 223606 - DNA, 1000 bp, Homo Sapiens
caaccggttcgttgatacctgggccagggatgaggacactgtgctcaagcatcttagggcctctatgaagaaactaacaagaaagaagggggacctgccacccccagccaaacccgagcaagggtcgtcggcatccaggcctgtgccggcttcacgtggcgggaagaccctctgcaagggggacaggcaggcccctccaggcccaccagcccggttcccgcggcccatttggtcagcttccccgccacgggcacctcgttcttccacaccctgtcctggtggggctgtccgggaagacacctaccctgtgggcactcagggtgtgcccagcccggccctggctcagggaggacctcagggttcctggagattcctgcagtggaactccatgccccgcctcccaacggacctggacgtagagggcccttggttccgccattatgatttcagacagagctgctgggtccgtgccatatcccaggaggaccagctggccccctgctggcaggctgaacaccctgcggagcgggtgagatcggctttcgctgcacccagcactgattccgaccagggcacccccttcagagctagggacgaacagcagtgtgctcccacctcagggccttgcctctgcggcctccacttggaaagttctcagttccctccaggcttctagaagcatctgggccagggctcatggctggataatttccctaggcttaacaacccaagcaagcttcgcatcctcgttttatttttggttaaacttatgaaaatgtattaagaaagagtgcagctcgagagagattcagagatggaacacaccagaccccagatcacaaagccaaccatgcccagcccctcccagcacccccagccccacgaccatcgttctgaattctgacgacaccgtgagcctgcctttgtacttcaaactcatggaaggataaccaccttcatgttttgaaataaatgtttcctgttgaaatgaaaaaaaaaa

SEQ ID NO: 223607 - DNA, 1000 bp, Homo Sapiens
ccagccgcaggctgggtccccgaggcgggcggcatttaggctcggtctccacagccatggccgcgacgcaggagctgctgctgcagttgcagaaggataaccgagatggtcgccagcggaagcaggagctagagaagctgatgcgcgggctcgaggccgagagcgagagcctgcctcaaccagcgcctgcaggacctgagcgagcgggagcggaggctgctgcggaggcgaagccaggaagcgctgcttctgcaaggggaggtgcgcgaggcggcgcgggagcgcgcgcagcgggtgcgcagaagactggaggaggcggagcgccacaaggaggacttgaagcccggtaaaccccgtccttacgagccccgcccctagctcttctactacggaggggaactgcagagccagaagagcacggagcagcaactcgcagcccaattggtgacgctgcagaatgaactggagctggcggagaccaaatgcgccttgcaggaggagaagctgcagcaggacgcgctgcagacagcggaggcctgggccatattccaggagcagaccgtagtcctgcaggtgtgacgggcagcttcgcagagtgcagtacagcaccgagtcgctcatggaggagatggccagggcggaccgagagacgcggctgttcggcggtcctcgcgcgctggccatcaggcgctgctgacgctgccgctcctcttcctggggctgtcgctgctctggacggtgctgttggaccccggcgccgtctccgcgtggctctggagcctcacctcggagacgacgctgcgccgcctgcgctacacgctgtccccgctgctggagctgcgcgctaacgggctgctgccaacctaagtgcagcgccccgcgcctggctccaggtggactccagggcaccggctttatttctggtgcactcctctcctgagagtgtagaccaaggtcgcctaataaactcctcaagggataaaaaaaaaaaaaaaaaaaa

SEQ ID NO: 223608 - DNA, 1000 bp, Homo Sapiens; identical to SEQ ID NO: 118244

SEQ ID NO: 223609 - DNA, 1000 bp, Homo Sapiens
ttcatgtgcccgccttggcggcttaagcctgctgctttggcagtgccatgggtgagccgagcagctgtgaggtgggtggggcagggctgtagcccacgccgggtgctattccaggctctaggggctggtgctcatccccacccccagcgacttccgtcctacctggcatgctgcagccctctgccggctgtggtgtcctctgaatttggacccaggttgcctgctcttgttgtgggggtgggattggggctgtctgtgtttcccaggtggagctcatgtttgtgatcctctatctggacagctctccagaatcctgtgttgcccctgttctgcctttctgggatgggagagaaggtgagggagccggcgagcaggttctaccctctctgctaagggcctagcacactttgatgaggttcctggacgtgagaccctcacaaagaccaaccattcctctaatagccatttaacggtactgcagttcatgggaaaatgtcctcattcttaggagatagatgctggattatataggtgaatgccttcaagaaatgtgtaatttaattccaaatagttccccccaaaatacacaaagcaaataaggccaaaatgttcattgttgaatctgcagtggctggtatttcagtgaacagtgtacttgttctttcaacttttctgtatgtttggaatttttcttaataaaagattgtgggaaatggtcatttgctgagcgcctcctagttgccaggcactggagggcgcatcaaagaagagtcctacccaggagggagagcgcagctgctgcaggattctcgcctggaagagtgggtggctggctggctggctggaaggggaggggcgagagggctgtctcggtgatgagcacacgcgtgctggggtggtttggggagagggctgagatttgtcaccagtgagcccttggcacggtctctgctccccaccagggcagcacgggacagaaacgtcacggaggagtagcctc

SEQ ID NO: 223610 - DNA, 1000 bp, Homo Sapiens
aggagcgcatccagctgcgctaccactgccgtgaggaccacatcacggcctccaagcgcgagttcctgcggcgcaccgaggtggacagcaaaggcaacaagatcatcatgacgcccgacatgtgcatcagcttcgaggtggagcccatggagcacaccaagaagctgctctaccagtacgaggccatgatgcacctgaagagggaggagaagctgtccagacatcaggtctgggagtcagagctggaggtgctggagattctgaagcttcgagaggaagaggaggcggcgcacacactgaccatctccatctatgacaccaagcggaatgagaagagcaaggaatatcgggaggccatggagcgcatgatgcacgaagagcacctgcggcaggtggagacccagctggactacctggccccattcctggcccagctcccgccaggagagaaactaacatgctggcaggcggtgcgcctcaaggatgagtgcctcagcgacttcaagcagcggctcatcaacaaggccaacctcatccaggcccgctttgagaaggagacccaggagctgcaaaagaagcagcagtggtaccaggagaaccaggtgacgctgacacccgaggatgaagacctgtacctgagttactgctctcaggccatgttccgcatccgcatcctggagcagcgcctcaatcgacacaaggaactggccccactgaagtacctggctctggaggaaaagctctacaaggacccacgcctgggggagctccagaaaatattcgcttgatgtccctcctggggcctccgccagagctgccagagaaaggaaacctcttcccgcagcctggctcctgtgttccctctatccagccaatgcctgtttacacagacacctggcctcactgccagcccacctcccctacagccctgtttgttcctgcttctcatgattttcctgtaaataaacacactcttaatttgccaaaaaaaaaaaaaaaa

SEQ ID NO: 223611 - DNA, 1000 bp, Homo Sapiens; identical to SEQ ID NO: 118249

SEQ ID NO: 223612 - DNA, 1000 bp, Homo Sapiens
aaataactggaacccagcctctcctcctacaccggcctacccatctgggcccaagagctgcactcacactcctacaacgaaggacaaactgtccaggtcggagggatcacgagacacagaacctggaggggtgtgcacgctggcaggtggcctctgcggcaattgcctcaccctgaggacatcagcagtcagcctgctcagagcgggggtgctggagcgcgtgcagacacagctcttccggagcagccttcaccttctctctgggatcagtgtccggctggccgacgtggcatttgctgaccgaatgctcatagaggttgacccccacagggtcacgcaggactcggacactgccctggaaacatggatggacaagggcttttggccacaggtgtgggtgtcctgttggaggagggcttgtttggagaagggaggctggctgggggagaaacccggatcccgctgcatctccgcgcctgtgggtgcatgtcgcgtgctcatctgttgcacacagctcactcgtatgtcctgcactggtacatgcatctgtaatacagtttctacgtctatttaaggctaggagccgaatgtgccccattgtcagtgggtccacgtttctccccggctcctctgggctaaggcagtgtggcccgaagcttaaaaagttactcggtactgtttttaagaacacttttatagagttagtggaaggcaagttaagagccaatcactgatccccaagtgtttcttgagcatctggtctggggggaccactttgatcggacccacccttggaaagctcaggggtaggcccaggtgggatgctcaccctgtcactgagggttttggttggcatcgttgtttttgaatgtagcacaagcgatgagcaaactctataagagtgttttaaaaattaacttcccaggaagtgagttaaaaacaataaaagccctttcttgagttaaaaagaaaaaaaaaaaaaaaaaaaaaaaaaaaaaaa

SEQ ID NO: 223613 - DNA, 1000 bp, Homo Sapiens; identical to SEQ ID NO: 118250

SEQ ID NO: 223614 - DNA, 1000 bp, Homo Sapiens
cataagagataccagcaatgtgtgcacagaacaaagaccaggagaggacacagtgagaaggcagttatctgcaagcaaagagagaggcttcagaagaaacaaaatcaccagcaccttgatctttgacttctaatctccagaatagtgagaaataaatttctgttgttaagccgtccactgtgggaggccgacgcaggaggattgcttgaggccaggagttcaaggccagcctggacaacatagtaagaccctatctctacccccctaataaattaatttaaaaagccccccaatctgtggtattttattatggcagccctagcaagctaatacagtggtttgagaggctgggagggttgaggggaagataaacttttaaaaagctcttatctttcatttcaatcagttaaaaatacttgctcagtgtaacaattttgcttctcagcttccactctaatattgttgtgccattaagcaatttagctaatcctgacatttcttagattcataatgttaggagcatttaatctgtattttacaagttaggaagcagaggatcagagatgggaaaggactagcccaaggccaacattaacaagccctctaacaaaaactttacaatacatttatgttgaatggaactccaagatctcacctctccatccaggaatggagtccatgtaatcaaagtgaacttaaaaataggacagtttcaacaagtcaggagattcacagcaactgatcaaagggagtccagtcaacgtgagcaagcgtgattatgatgaggaagccccctctgctttaatccacacaaggaacgtaacctgaagtaacctgatgttaaccaatctgctgtgtctactatgctgtttccttgttcctgctagtgctgctttacaaatgcagaccattctatcatacctggcggggcttctgttttattttgtaggctggatgctacccagttcatgaatcgctaataaaagccaattagatcttt

SEQ ID NO: 223615 - DNA, 1000 bp, Homo Sapiens
catctgagatcaggagtttgagaccacctggccaacatggtgaaaccccatctctactaaaaatacaaaattagctgggcgtggtggcacgtgcctgtaatcccagttacttgggaggctgaggcaagagaatcgcttgaactcagaaggtggaggttgcagtgaggcgagattaggccattgcactccagcctcagcaacaagagtgaaactttgtctcaaaaaacaacaacaacaacaacaacaacaacaaaacttcctaggccagatgtggtggctcatatgtataatcttagcactttgggaggccaaggcaggaggattgcttgaggcgaggagttcaagaccagcctaggcaacatagggagacccccatctctacaaaaatttaaaaattagcctagcatggtggcacgctctgtaatcccaaatacgcggtaggctgaggctgaggagggtggatttcttgagcccaggggtttgaggctgcagtgagccacagtcacgccactgcattctatcctgggcaacagatggagaccttgtctcaaaaaaaaaaaaaaattcctgacatcgctatgtattcccaactttatcatttgtctgcctgtttagttttgacttatgtttttttttttttccccctgtggacatgtagttgacggaaatcgtgaaggaactttaatattttatttaaatttcccaaaactaatcatgccttatgtgactaatcttcagtgataatatttcatctactgatatattttcttgaggtgtgtaattttcagtataccttaatcatttggtataaaaaagagagaggtttttgatatatgaatgctgttcttgtaaaaatcaatcttgacactttattttaaactttttattggtaatgacagtgggttttgtacatcatgattttcaatttaggatatctgtctaatttgttttttcagagtaactatattggaattcaataaaaatattcaaaatttttctt

SEQ ID NO: 223616 - DNA, 1000 bp, Homo Sapiens; identical to SEQ ID NO: 118254

SEQ ID NO: 223617 - DNA, 1000 bp, Homo Sapiens; identical to SEQ ID NO: 118255

SEQ ID NO: 223618 - DNA, 1000 bp, Homo Sapiens; identical to SEQ ID NO: 118256

SEQ ID NO: 223619 - DNA, 1000 bp, Homo Sapiens; identical to SEQ ID NO: 118259

SEQ ID NO: 223620 - DNA, 1000 bp, Homo Sapiens; identical to SEQ ID NO: 118261

SEQ ID NO: 223621 - DNA, 1000 bp, Homo Sapiens; identical to SEQ ID NO: 118262

SEQ ID NO: 223622 - DNA, 1000 bp, Homo Sapiens
cttgagcaccgagaaaatgaatttggagacaaagtaaacctactttctgttctggaagctgctaagatgatcaaaccacagactttggcctcagagaaaaaatgattgtgtgaaactgcccagctcagggataaccagggacattcacctgtgttcatgggatgtattgtttccactcgtgtccctaaggagtgagaaacccatttatactctactctcagtatggattattaatgtattttaatattctgtttaggcccactaaggcaaaatagccccaaaacaagactgacaaaaatctgaaaaactaatgaggattattaagctaaaacctgggaaataggaggcttaaaattgactgccaggctgggtgcagtggctcacacctgtaatcccagcactttgggaggccaaggtgagcaagtcacttgaggtcgggagttcgagaccagcctgagcaacatggcgaaaccccgtctctactaaaaatacaaaaatcacccgggtgtggtggcaggcacctgtagtcccagctacccgggaggctgaggcaggagaatcacttgaacctgggaggtggaggttgcggtgagctgagatcacaccactgtattccagcctgggtgactgagactctaactaaaaaaaaaaaaaaaaaaaaaaaattgattgctgtgcctcattacaaatgcatatgatgtttgagtgctgttgtttgaaattatttttcttttcgggtcttcaaaaattcaagaaaagttgatgattgacttgaagattacaaaatttaaggttttttggcatgtgtgttttctattaataattggttatatgatgtcaaagtaatactttcataatagaattgacatgctctgggatagtttgacaaaggtaaattataaagtgagatctcttgtttcattatcttccattctaacctcagagatctgtttctctagaaaaaaagtccatctctggctttaataaaattatgcatcag

SEQ ID NO: 223623 - DNA, 1000 bp, Homo Sapiens
gagaagatgaccgaagaagtggatttcctgggacaggactctgatgggggtagtgaggaagtggtcctaactcctgcagagctcattgaaagattggagcaggcctggatgaatgaaaagtttgcccctgagctgctggagagcaagcctgagattgtagaatgtgtcatggaacagctggagcacatggaagaaaatctcaggagagccaaaagggaggacctgaaggtcagcatccaccaaatggagatggagaggatccgctacgtcctcagcagctacttgcggtgtcgcctcatgaagatagagaagtttttccctcatgtccttgagaaggaaaaaacacgtcctgagggggagccttccagcctctcgccggaagagttggcctttgccagagagttcatggcgaacacagagtcctatctgaaaaatgtcgccttgaagcacatgccccctaacttacagaaggtggacctctttcgggcagttcccaaaccagatctagattcttacgtgtttctgagagtgagagaacgacaagaaaacatactggtagaaccagacacagatgagcagagggactacgtgattgacctggagaagggctcacagcacttgatccgatacaaaaccattgcacctctggttgcatctggagctgtccagctaatttaaaactaggcataaacagccaggcatggtgactcaggcctgtaatcccagcactttgggaggccgaggcgggcggatcatgaggtcaggagttcgagaccaaccgaccaacatggtgaaaccccatctttactgaaaatacaaaataattagccgggtgttggtggtgtgcacctgtaatcccggctactcggggggccggggcaggagaatcgcttgaacctgggagcaggaggttgcagtgagccgaggtcgtgccattgcactccagcctgggtgacagtgagactttgtcacaaaaaaaaaaaaaaaaaaaaaaaaaaaa

SEQ ID NO: 223624 - DNA, 1000 bp, Homo Sapiens
agacctctggatgagctgccccgttcagaccatggatcctgaggtgaccttgctgctgcagtgccctggcgggggcctgccccaggagcagatacaggccgagctgagccccgcccatgaccgtcgcccactgccaggtggggacgaggccatcactgccatctgggagacccggctaaaggcccaaccctggctcttcgacgcccccaagttccgcctgcactcagccaccctggcgcctattggctctcgggggccacagctgctcctgcgcctgggccttacttcctaccgagacttcctgggcaccaactggtccagctcagctgcctggctgcgacagcagggtgccaccgactggggtgacacgcaggcctatctggcggacccactgggggtgggcgctgcactagccacagccgatgacttccttgtcttcctgcgccgctcccggcaggtggctgaggcccctgggctggtggacgtacctggtgggcaccctgagcctcaggccctgtgccctggtggcagcccccagcaccaggacctcgctgggcagctggtggtacatgaactcttttccagtgtccttcaggagatctgtgatgaggtgaacctgccgctgctcaccctgagccagcccctgctgttgggcatcgcccgaaatgagaccagtgctggccgagccagtgccgagttctatgtccagtgcagcctgacttctgagcaggtgaggaagcactacctgagtgggggacccgaggcccacgagtctacaggaatcttctttgtggagacacagaacgtgcggagattgcccgagacggagatgtgggctgaactctgcccctcggccaaaggcgccatcatcctctacaaccgggttcagggaagtcccactggagcggccctagggtccccagccctactcccgccgctctgaaaataataaacgactttattcttggaaaaaaaaaaaaaaaaaaaaaaaaaaaaaaaa

SEQ ID NO: 223625 - DNA, 1000 bp, Homo Sapiens
attatttgtcttccgcctggagttctttcaccacaagtttgagatcctggatgccgtcgtggtggtggtctcattcatcctcgacattgtcctcctgttccaggagcaccagtttgaggctctgggcctgctgattctgctccggctgtggcgggtggcccggatcatcaatgggattatcatctcagttaagacacgttcagaacggcaactcttaaggttaaaacagatgaatgtacaattggccgccaagattcaacaccttgagttcagctgctctgagaaggaacaagaaattgaaagacttaacaaactattgcgacagcatggacttcttggtgaagtgaactagacccggaccagctcccctcaaaaagaagacactgtctcatgggcctgtgctgtcacgagaggaacagctgcccctcctgggccgcttggtgagaggtttggtttgatacctctgcctccctcctgccagcatggattctgggtggacacagccttgtggaaggtccagtaccaccaagagctgcccatccactcccaccccacactgtatcaaatgtatcacattttctcatgttgaacactttagccttaattgaaaatgagcaacaaagctggacaattgctagttgtatataaaatttaatctcaccgaatgtacagttttcaaatttcacgtgtatattaaggaactgatgcatctgagcattctgaaagaaagaaaaagaagctactttagctgccaccccattctagaaaagtctcttattttcaagctgttctaaatagcttcgtctcagtttccccaaaaggggtacccaggcccctcctctgtgtgccccagctgcatcagccagcttctaggtggctccattgttttctgccacctgacaacatttttcctcaattactgtacaactactgtataaaataaaacaactactgtataaaataaactctctcttttccctggaaaaaaaaaaaaaaaaaa

SEQ ID NO: 223626 - DNA, 1000 bp, Homo Sapiens
aaaccttcaacccctcagctcacttcagagagctcagatacagaggacagtgctggaggcgggccagagaccagggaagctctggctgagagcgaccgtgcagctgagggtctgggggctggagttgaggaggaaggagatgatgggaaggaaccccaagttgggggcagcccccaacccctgagccatcccagcccagtgtggatgaactactcctacagcagcctgtgtttgagcagcgaggagtcagaaagcagtggggaagatgaggagttctgggctgagctgcagagtcttcggcagaagcacttgtcagaggtggaaacactacagacactacagaaaaaagaaattgaagatttgtacagccggctggggaagcagcccccaccgggtattgtggccccagctgctatgctgtccagccgccagcgccgcctctccaagggcagcttccccacctcccgccgcaacagcctacagcgctctgagcccccaggccctggcatcatgcgaaggaactctctgagtggcagcagcaccggctcccaggagcagcgggcaagcaagggggtgacattcgccggggatgttggcaggatgtgaattcagaacagaagccatgtatctcccccacaccagggcccaccatggagcttgtgttctcagaatctgatgctttctgatcaacaaaactgagcaaggaagatcccaacactgaaggggtagaaggccaggggggcatggagagtgcagctccattatagtgaagagccaaacatatgtgaactgtttgctgtgtggaggtgttagttctgctgcctaccatcttcatctctagcacctcccctgccaagagtcaaccactaagcaatcccacccaagcctggatgcttctagaggggcccactcccagctgggagagtgtaggggatatgctcacaccacattagcagcaaccaataaaaatgctggaaacaagaaaaaaaaaaaaaaaaaa

SEQ ID NO: 223627 - DNA, 1000 bp, Homo Sapiens
caatgacaatgccccccaggtcctatatcctcggccaggtgggagctcggtggagatgctgcctcgaggtacctcagctggccacctagtgtcacgggtggtaggctgggacgcggatgcagggcacaatgcctggctctcctacagtctcttgggatcccctaaccagagcctttttgccatagggctgcacactggtcaaatcagtactgcccgtccagtccaagacacagattcacccaggcagactctcacggtcttgatcaaagacaatggggagccttcgctctccaccactgctaccctcactgtgtcagtaaccgaggactctcctgaagcccgagccgagttcccctctggctctgccccccgggagcagaaaaaaaatctcaccttttatctacttctttctctaatcctggtttctgtggggtttgtggtcacagtgttcggagtaatcatattcaaagtttacaagtggaagcagtctagagacctataccgagccccggtgagctcactgtaccgaacaccagggccctccttgcacgcggacgccgtgcggggaggcctgatgtcgccgcacctttaccatcaggtgtatctcaccacggactcccgccgcagcgacccgctgctgaagaaacctggtgcagccagtccactggccagccgccagaacacgctgcggagctgtgatccggtgttctataggcaggtgttgggtgcagagagcgcccctcccggacaggtaaggtttagcaagtcatgcttgaccctgttagtgcttttttattcctacatcatattgaggaaggaatggagctgtttttttagtgatgaagatgttttcctggtgatgcattcacactttcaactggcccttcctagatcaaagttagtgcctttgtgagatggtggcctgccagagtgtggtttgtggtcccatttcagggggaagatacttgactcatctgtggacctaattcacatcctcagc

SEQ ID NO: 223628 - DNA, 1000 bp, Homo Sapiens; identical to SEQ ID NO: 118275

SEQ ID NO: 223629 - DNA, 1000 bp, Homo Sapiens
aggctgctcaactcgggaggtgccatggagttcaccatctgcaagtcagatatcgtcacaagagatgagttcctcagaaggcagaagacggagaccatcatctactcccgagagaagaaccccaacgcgttcgaatgcatcgcccctgccaacattgaagctgtggccgccaagaacaagcactgcctgctggaggctgggatcggctgcacaagagacttgatcaagtccaacatctaccccatcgtgctcttcatccgggtgtgtgagaagaacatcaagaggttcagaaagctgctgccccggcctgagacggaggaggagttcctgcgcgtgtgccggctgaaggagaaggagctggaggccctgccgtgcctgtacgccacggtggaacctgacatgtggggcagcgtagaggagctgctccgcgttgtcaaggacaagatcggcgaggagcagcgcaagaccatctgggtggacgaggaccagctgtgaggcgggcgccctgggcagagagactctgtggcgcggggcatcctatgaggcaggcaccctgggcagagagatgcagtgggtgcggggggatcctgtggcccacagagctgccccagcagacgctccgccccacccggtgatggagccccggggggacagtcgtgcctggggaggagcagggtacagcccattcccccagccctggctgacctggcctagcagtttggccctgctggccttagcagggagacaggggagcaaagaacgccaagccggaggcccgaggccagccggcctctcgagagccagagcagcagttgaatgtaatgctggggacaggcatgctgccgccagtagggcggggacccggacagccaggtgactaccagtcctggggacacactcaccataaacacatccccaggcaggacagatcggggaaggggtgtgtaccaggctatgatttctcttgcattaaaatgtattattaaaaaaaaaaaaaaaa

SEQ ID NO: 223630 - DNA, 1000 bp, Homo Sapiens
agtgcacagagcttcagtgtccaccaactgaccatgaaatagagtatgctgtaatcttaaggcataggttattagtgggaagagagtaataggttgctagtgtctgattatatggtagaaataatgcaaggaaaaaggtagccaccttctccattgaacagcagtacctgctgtttagcaaagactgatgagaagtagacttttttttttttggagatagagtctcactctgttgcccaggctggagtgtagtggtgtgttcttggctcactgcaccctccgcctcctgggctcaagcagtccttctgccttagcctcctaagtagctgagactacagacgtgcgccaccacacccagttcatttttgtatttttagtagagacagtgtttaccatgttggccaggcaggtctccaactcctgacctcaagtgatatgttcacctcagcctcccaaagtgctgggattacaggcatgaaccatggtgcccagcctcatttttgaaatggaatagagaacagttatatcacagttgagagtttaatcaaaatgaccggatcagcatattctttttttagatgagacagagtttcgcccttgtcacccaggctgtagtgcggtggcgcgatctcggctcactgcaacctccgcctcccgggttcaagcaattctcctgcctcagcctcccaagtagctgggattacaggcgtgtaccaccatacccagctaatttttgtatttttagtagagatggggtttcaccacgttggccacactggtctcaaactcctgacctcaggcgatccatctgcctcagcctgaaagtgctaggattacaggcgtgagccaccacacctggccagctcagcatattcttaagtaggattcacatttaattcttggtattataagttgcaaccatttgatttagaatgtatgcagctctcatgtttgtagtaataaagtttcatttttcctaagtaaaaaaaaaaaaaaaaaa

SEQ ID NO: 223631 - DNA, 1000 bp, Homo Sapiens
gctaaaggacaaacctctcagcagcatcaaagcagacatcgtccatgcctttctgtcgatccccagcctgagtcacagtgtgctgtcacagaccagcttcagggccgagtacaaggccagtggcggcccctccgtcttccaaaagcccgtccgcttccaggtggacatcagctcctctgagggtccagagccctccccgcgacgggacggcagcggaggtggtggcatctactccgtcaccttcactctcatctcgggtcccagccgtcggttcaagcgagtggtggagaccatccaggcacagctcctgagcactcatgaccagccctccgtgcaggccctggcagacgagaagaacggggcccagacccggcctgctggtgccccaccccgaagcctgcagcccccacccggccgcccagacccagagctgagcagctctccccgccgaggcccccccaaggacaagaagctcctggccaccaacgggacccctctgccctgaccccacggggccggggagggaggggacccccctccaccccccttccgtgccccccaactgtgaatctgtaaataaggcccaaggaacatgtcgggaggggggtggacacaaaaaccggccttgccctgcagggatggggctccacaggccgtgcccaactgggggtggttctaggggaacagggggcgggggagctgtttctattttatttattgattaatttattattttatttattgatcaatctctctgcggggtggggtgggggagggacgggagctggttggggtggcttagcagatccggacagggccctctgtccctgtgtcgtccccaaccccctcttcccgggcccctcctcccctggtcctccccccacgaccttctgtacggatttgctctccggaaggaattctggtttcgcgtgatcctgcctgcgtccgtgtctctgattccgccggcggcaaaaaaaaaaaaaaaaaaaaaaaaaaaaaa

SEQ ID NO: 223632 - DNA, 1000 bp, Homo Sapiens; identical to SEQ ID NO: 118280

SEQ ID NO: 223633 - DNA, 1000 bp, Homo Sapiens; identical to SEQ ID NO: 118282

SEQ ID NO: 223634 - DNA, 1000 bp, Homo Sapiens
acttcaattaaacaaatttatgaaggacattattctgattcataaaagttataaaatattaggtaaatacagagaaaacaataagcctctgaaataagtctgtttctgaaatagtcaatagtcttcccatccaaactataagagaatgtgaatttcttcaacatcatacttaaacattacagaaaatagaaatacaaacaaggttggtacatgagagaaaatgttgaccttttacttccttttacaaaaatgaaaataataaacatgttttcgtataaaataacacaaaatgatatacactgaagttgatgaagcaaataaatattctggcttctttttcaaggtatcagggcaaacaatttccaaacttttcattttgtacagaaggatgaataactacagctcatgggaaatgttttgactttacaaagtatagatgttggaacattaagaaaaatgtatattcccaatgaaaaaatagttatatcatcttatagtaaaccaaaagattagcaataatactatggacacattagattatatactacagacacatatctatccaaaatacctattttaaatttttaatacaatattttattttaatataaacatctgtcagttatagacaaagataataattcacaaagtacatgctatcagaatgaactttggtaaccagaaatgtaaaatttcaaataacggataaaataatgtgttatttttatagagaaagaaaaaaaatagcaacacaatctagtttattttagggtactgagagcctagcagacttaaaggacaaggtagtaaatgttttatcactcaaaaatccattagaagtttcaaataaattgctttcttgctagctgtattccttcctacttgaaaagcgaatttcttttcctcctatgattgattttttaaaatcatgctcttttccatacatcaacataaacagtctttggatactaaataaactttccctaacaagaaaaaaaaa

SEQ ID NO: 223635 - DNA, 1000 bp, Homo Sapiens
acataagagaaaaggaaacctgttacagaaaagacaagaatctgtgttttggaatgagtctattcttgggtattgaacttttagttttgtttgcccaaggattaattgaggaaatcagctaagaaaatggactttagacaaaagcaagaggatcagatgaagaaaaggagaggtagatacagtcagtgtcacttcaggaaagctatttaaaaaaacttgaaatttaattgaaagaagaaacaacaacaaaaaagcctaaacctagcctctgaacaacactaacatgagaacacaagaacttaagagaaaaagaaacctactcaagaaaagacagaagagacagtgatttgggatgagtctactctaggattttcaactttttagttttgttccttcaaagttgaaggaaaaaaagtttggttttataaaattcatgttattgtaatttttctaggtggatggctactttaatctctaaaaaagccaagtgaagtaaaagtattcagtatgccttttcctcaagttactttccttcattttcttaaaaaagaaaaaaaattattaaatgtttctcacatatctcacatataatgtaatttccctaaatgaagttgtctctacttctgctcatcaaattgctgtgatagtgaattatttattcatgggagataatttattttaaaggacagaattaccaagcgttacaaaatcagttctttccttggttttgtgttagtgttggtggtattttattgttgtttttctgtgtttatgtgtctcagctttctccaaggaatatgtatgaaataacttaaactgattttttctttgttaaatctaatttgcagtgtatttttgcattttctagttctgaaagtggaaaatgaaacagtctataataaacttagatgatatatagttttaaaacggtctcaaaaagtactgatataaggtcagtctatattctggaaatgtttatattaaagtgttttaatttcta

SEQ ID NO: 223636 - DNA, 1000 bp, Homo Sapiens
gatgtatcagaaaatttataagttatttgtatttatatataagtacatcagaacttgcccacatgataactcatgtttgctttaataaggaaaatatgttatttgaggttaattatatgatagtgaggaacattttacaattatttacagtgtttgacattaattgctgtcctatgatacagtagtaatgttaacagagagtttaatatgtttagcattatctttatggaatttatattcaccaatttcaggaaaaccaaccatagaactttataataggacagttataacctgactgaaccaaatccatcagcataatgactgtgtgttctgagaaatgcaaacaactttatgaaagtgtggtcatcttgacccccaaagagccacagtagctgtcaattattgagatttttaaatggtaaatattgcaaaagttaaacaagggtaccacaatatcatttataattgatgtcaatattagtagtccactttatgcttaaaataaaatcataaaaaatcaagttttaaggttatattttttaaaataatgaattttctatctctaggcaacatgtctttattattcaagctgaatgtttaagagagattttggtcttaaaggcttcatcatgaaagtgtacatgcatatgcaagtgtgaattacgtggtatggatggttgcttgtttattaactaaagatgtacagcaaactgcccgtttagagtcctgttaatattgatgtcctaacactgggtctgcttatgctagttcagtatttggtctaggcttcattttgatatgactgaattgcaatctatatttttaaaaagaaaaatcaaaatacattagggtttacttggttgtggcaaacaaacaaaaaatgctttcagtgttgaaatatctctattttccaaagatgataaactttcatcgttcttagcctacattgtcatttatatcaccaaatgagtttatagattaatgcaataaactttctaat

SEQ ID NO: 223637 - DNA, 1000 bp, Homo Sapiens
ctaggacgctctgagctgtgcatgtacatatatacatatatagatacatttataatatatacacacagtctatatatttatatacactgtttcctggccccagagctcatttgggttcaggcgcacttcaaaaccctccctgggggaggctgtttcttctcaggattccttgccagggaggaaggggagggaacagggtgggttttctcactgaagagagaaagcagaaggttctagatcctggcacagactgcatcccatgttcccatgctcttctccgtccccaggaatgcgaacggcagtttcccttccccagtggacgtctaggtggggacagggtatcttggctcccagctggaccagagtgccctgcttgcctctgctctccctttgtggggactcaggcagcagaggcatctgggaagtctctgagtaggcagggtcctcctgggaggcacccccacctgtttgaaaggtctggccaggcgtggtggttcaggcctgtaattccagcactttgggaggccgaggagggaggatcacctgaggtcaggagtttgagaccagcctggccaacatgatgaaatgttgtctctactgaaaatgcaaaaattagccaggtatagtggcaggaacctgtaatcccagctacaggggaggctgaggcaggagaatcgcttgaacccgggaggtgtaggttgcagtgagccgagattgcaccactgcactccagcctgggcgacagagcgagactctgtctcgaaaaaaaaaaaggtccgtgccaagctgctccctgcccttgccctttccctttccctggggtccaaaccacatgtgtcctgcctctcctggccctaccacattctggtgctgtcctcactcgcccctggcccagaggctcctgaagatgctgggcggtcctggcacagggaggagcagctctgtaaatctgtgcacatggccactcttggcctaataaaggaggtctcacagtcaaaaa

SEQ ID NO: 223638 - DNA, 1000 bp, Homo Sapiens
ccagtcaccaactgcaggaaaaaaacaccaggccgtacaagatctaccaccagccaacacatttgtgggagcaggagacaacatttcaattggatcagatcactgctctgagtacagctgtcaaaccaataacaagtacagcaaacagccatttcgtagagtgacgttttctgttgtgagtcagcctcaggacccacatcaggggtcactgcagagttgctatgacagcgggctggaggagtcagaaacaccaagcagtaagagttcatcagggccaagactgggtgcgcttccactcccagaggacaactatgaaaggaccacgccggatggcagtgttgattcaaggcctcttccagatgtagccctgactgggaagtgcactcgtgagtgtgatgagtatggccactcagactcctgctggatgccggtccgcacttctccggagaggaagaagagccagcctaaactgtccactttcatgcctgttgatgaacgaggaagccaggaaaagctggccaatggggaggccgccatcatgggtgaccgcaacagaaacctcctgaacaaaaagttgacctcatcctatgagaccttcagtgcagctagtttcagcaaaaatgaggaagccaaccctgaggatattccccttacaaaaacaggggaatataagccatctcctgtcaatactctcactagaagagaagtttacctgtaggctataaaggagcaacagcaaagttctttacatgtatgaaaaggagaataaggggcaaaaaccttacaaagcaaaacgtttaatcacaaagagggggctaccaaagagacaaagctttgcctgccacttctgcctccagatcaggcctttagtgatactgttagcctgattctactgtacaatgtagaaaccatccttgttacttgcatgtctaaccccttcactgattcccaacactcactttctcttccccacccctctccaaaaaaaaaaaaacaaaaa

SEQ ID NO: 223639 - DNA, 1000 bp, Homo Sapiens
gctcccaggagggatcacatctcaccagctccttggcctctttccctccacctcctacaatgcacggctccaggccatgtggggccagagcctcctgccgcccgtgtccacctctttcaccacgggtgggctgcggatccccttccccagggactgcggggaggagatgcagaacggagccggtgcctccaggaccagcaccatcttcctcaacggcaaccgcgagcggcccctgaacgtgttttgcgacatggagactgatgggggcggctggctggtgttccagcgccgcatggatggacagacagacttctggagggactgggaggactatgcccatggttttgggaacatctctggagagttctggctgggcaatgaggccctgcacagcctgacacaggcaggtgactactccatgcgcgtggacctgcgggctggggacgaggctgtgttcgcccagtacgactccttccacgtagactcggctgcggagtactaccgcctccacttggagggctaccacggcaccgcaggggactccatgagctaccacagcggcagtgtcttctctgcccgtgatcgggaccccaacagcttgctcatctcctgcgctgtctcctaccgaggggcctggtggtacaggaactgccactacgccaacctcaacgggctctacgggagcacagtggaccatcagggagtgagctggtaccactggaagggcttcgagttctcggtgcccttcacggaaatgaagctgagaccaagaaactttcgctccccagcggggggaggctgagctgctgcccacctctctcgcaccccagtatgactgccgagcactgaggggtcgccccgagagaagagccagggtccttcaccacccagccgctggaggaagccttctctgccagcgatctcgcagcactgtgtttacaggggggaggggaggggttcgtacaggagcaataaaggagaaactgaggtacccggaaaa

SEQ ID NO: 223640 - DNA, 1000 bp, Homo Sapiens
aaatcgcactgaaggaaaaggttaagaataatacatgatcacagaaatgcataccactgtctgtaaacccaacaaaattcactgttctcttttggatttatttagcctgatgtatttttaattcaatttttatggtgatgggcaaatcattcttggtaaatgtaaatcaaacatgattgatttaaaacttcatggaatttgtagaaaattatggacatttttggtgagaaagaacaatagtcaaaactcacatggatagagtgtgtttgttttttgccaaaaatgccccagactttttcccaaacctcaaaaacgtcttggaaaaattgtaaaagtttgataacagaaacatctttaggatatttttgtctgacatattttgcttctagtatgtgcctactgtgatttttttcatgtggaaaatgcaaaatttgtaacaaaatggttatatggaacatgcctattaaatgaattttactatcttccctaactttggtctgtgtatgtgtgtgtgttttactttaatatgaattatacaaaatactagttgttttacactctcttttcttattcttagggcttttgtgtatgtctgacttgtttttaaataacttcctcagcaatgcagaccttaatttttatatttttttaaagtagctaacatagcagtaggcacttaagcatttagtcaatgatattggtagaaatagtaaaatacatcctttaaatatatatctaagcatatattttaaaaggagcaaaaataaaaccaaagtgttagtaaattttgatttattagatattttagaaaaataatagaattctgaagttttaaaaatgtcagtaattaatttattttcattttcagaaatatatgcatgcagttatgttttatttgattgttgacttaggctatgtctgtatacagtaaccaaataaactctttcactattaaagagatttcttactgaaaaaaaaaaaaaaaaaaaaaaaaaaaaaa

SEQ ID NO: 223641 - DNA, 1000 bp, Homo Sapiens
gaaaagatttatttctgctctcaacaacgttgctgaaagaacttataataatatatttcaatttcatcaacttcggcagattgccaaagaactaaacattcaggttgctgattttgaaaattttattggatcactaaatgaccagggttacctcttgaaaaaaggcccaaaagtttaccagcttcaaactatgtaaaaggacttcaccaagttagggcctcctgggtttattgcagattaaagccatctcagtgaagatatgcgtgcacgcacagacagacagacacacacacacacacacacacacacacacacacacacacacacagtcaaatactgttctctgaaaaatgatgtcccaaaagtattataataggaaaaaagcattaaatataataaactaatttaagaagtgataaagtctccagatgcagtagctcacactgtaatcacagtgactcaggaggctgaggtgagaggattccttgaggccagggttcgagaccaaccttgggcaacatagcaagaccccatttcttaaaaaaaaaaaaaaaaaatttaaacttagctgggtatggtggcacatgcctatagtctcagctacttgtgaggctgaggcaggaggattctttgagcccaggagtttgaggttacagtgagccacaatcacaccaatcactgcactccagcctgggcaataaagtaactcttgactcaaaaaaataaaaaaaattgtagtggtagccatgtgttaattgttaaataaattctccaaagggctaaaagtaaattacttataaattttttatagttgtatttttgacctgccttttatatgtatgaatatttcatagttttgcatatcagatgtaggcatacagacaaatacataaaccaatgaatatattacatattctgtgttccaataaaactttatttatggacactaaaatttgaatttcataaaattttcccatgtcaagaatacaaaaaaaaaaaa

SEQ ID NO: 223642 - DNA, 1000 bp, Homo Sapiens; identical to SEQ ID NO: 118287

SEQ ID NO: 223643 - DNA, 1000 bp, Homo Sapiens
agacatcaaggagagcttttgttatgtggcaatgaactacgaagaggaaatggccaagaaacccgattgtctagagaaagtttaccaactacctgatgggaaggtcatccagctccatgaccagctcttttcttgtccagaggccctcttctctccgtgtcatatgaaccttgaggcccctggcattgataagatatgcttcagcagcataatgaaacgtgatacaggcctgaggaattccttcttttccaatattatccttgccgggggatcaacctctttccctggtttagacaagcggttagttaaggatatagcaaaggtggctcctgccaacaccgctgtgcaagttatagctcctccagaaaggaaaatatcagtgtggatgggaggttctattcttgcatccttgtctgccttccaggacatgtggatcactgctgcagaatttaaagaagttggacccaacatagtacaccaaagatgcttctgaaatacagataaaatggttggaagaaaatgttttgagtatatgtgacagaaaactttggatattatatgtttctgggagaagagaaaatacttcacctattgggatgccaatatttctgttgtatttctataatgggtttgggggataataatggtgaagctcaagaacagatgtctattgagtagaaccaagttaaaataatgtttcccatagtgtttcttctataacttgacgttggtgagcttatatttcccttggaagagagcatttgtggtacaatatgctatgtgccaaatgagtgataagatttaagcttattgaagtttagggaaagaaggttgctgtggtgaggaacgagactccatagcagaggtatgccatcatggaaggggtggcattgggatggagcgcagatatccaggcaagcatactaaaatgaacaagttgctaaagatgagaatgaacaaagcatattcagggcatgtttaatagactgattttgttttt

SEQ ID NO: 223644 - DNA, 538 bp, Homo Sapiens
ccgtgtctccacacgtctgcctccatcactgccatcgcgatcctgcagctatgtcctaccctgtgaccagtcagccccagtgcgccaccaccagctgctaccagacccagctcagtgactggcacacaggtctcacggactgctgcaacgacatgcctgtctgtctgtgcggcacttttgctcctctgtgccttgcctgccgcatctccgacgactttggcgagtgctgctgcgcgccctacctgcccggaggcctgcactccatccgcaccggcatgcgggagcgctaccacatccagggctccgtcgggcacgactgggcggccctcaccttttgtctgccctgcgccctctgccagatggcgcgggaactgaagatccgagagtaaggaagttccctgtcttccccgtccttttccaccagtctcgcctctggccttctctggccactcctgggagggactgcctcaccacccctgtcccgctgccagaaatacacccacaataaaaacctgaaaaccaaaaaaaaaaaaaaaaa

SEQ ID NO: 223645 - DNA, 1000 bp, Homo Sapiens
gaaacatgaggatcagaggccacatttttaattattgttagtgtatttggaagtctgaattggagatgtttgtacctctgtctaaacagttcccttgagaacttccaagcctccggcatcttttcctggtgagtgtttctcctgtgcttggttgtgtataatggagctaactcctaagcggtggggtgaatgtggccgccttagttctgaagctactccagttatgttctgtttcttcaagctgtgatccagaaagatttttgtgcccccagatgcctcttgataggagaggcaacatactccaaatagttgggttcttcagggaagctattagaaactcaggtgacttgttagagcactaacttggtcagagccaaatcctggcaaacgctgcctgaccttcactctgtggttggggcggtgagaaccactgaggtccaatgatgagacttggaggtctggatccagtctctctttgttttaatgtgacttaggtgctgtcaacattagcaagataatggaaatcacgacgccagtgggtgcttacctccctgctaggcatgcaggggctggcggttggcaggggaaggaggcccagtgagccgggtcccttaggggagggagagtttgtcctctttgccccacagtctacccttcagggccttgtggcagtgccagtgttcggggggtgtctgggccactgagtacccactcggtcgtggttgtgctggcctcttgggtgagtgaacctgtgaagcccaggaggtggtgttggctgcagggtacacaaatactgagtggtggtcttttgttacaggcttagcaacaaagctgtgccctgggcatggggggctgtagtgtagctacagttgtgcgtttgtgaaatggcttagctttccatgttgctgagaggaacctggacatggtcccgggcatctgaatgatctgtaggggagggagttcaaataaagctttattttgttcaaaaaaaaaaaaaaaa

SEQ ID NO: 223646 - DNA, 1000 bp, Homo Sapiens
gaagccaaagaagttcactagacaaccaaaaaagcaggtatcttcaccctgtgcccagaggaaagaaaaggcattggagaagtcagcttctagagatgtgtctcctttcgttatgagtatgcagaagaataagtgggatgccacaagatccttgagattcaaccaggatgcacaaagagaagacgatcaacggcgaatgactgaaattacagggcacctaataaaaatgagattgggggatctggaccgagtcaagtcaaaggaagcaaaagaaacagacaaactgagacccagagacggcactgtgtctaagagcaacagaaaaagtggtttgagcagtgtgctcttgatgacagtgttgctgtgttaaacgaattaatacatgaaaggacttggaatactgcttgacatatcgtgaggcagagacacaaagatatggaagaacattggacagatttacatcgatatattaattaaggtgatttcagagttggagcaggagaggaagccttatagatatttttttttctttttgcttgcttgtattttctttttaattattattcagtatttcaagtagacagaaaagtacagaggataatacaacaaatatccaggtacccaccacccagcatttttacatagtagcatttgatgttttgaaataagacataaaacattccaaataccctatcaccgaggatcctgcatcctcttcttttcccagaagtgaacatttctctgaatttgatgcttattatgcccatgcatgttgttatacttttactacatattttatgtagctacagcataatatgctatgtttactttatatagtgacctcatactatacatatcctcatgcaattttttagactctgtttgagaattatatattttgattcaggtagcttaagtttattttagctactcagtagtaatgtattctattaatctactaatatatatttcttgtctatggacaaaaaaaaaaaaaaaa

SEQ ID NO: 223647 - DNA, 1000 bp, Homo Sapiens
tctctgatgcaccacgtgtttagacacagcacagtccttttttctgttcctactgtggaagtagtttctctttgggcatgctgacagcagtttttcatagcctcacggatgagccctttctacgggagtgactccatgcttgtatacagagtatttatacaaatgttttagcatcttcatatgcggtgttaacccctagttctgtacagcatattctgttcaagtatttttttacaagcttgtgctgtaggcacatgccttctgctgcagaagtggacgcccgtggcacactccccccccccccccgtggggtgccacgccttcatgggacattgccacttctgccctggaactcgtgcaggtacgtagtagctgctactgccacaacggcaacaccaagcaagagatggtccatgcttttctgacgttctcagaatagtggctagcttcaaacctgacaagcgctgcttgaagccggaacactagagaatgttgctgagagcagaaacggccacgcgggtcacgactatgcgtgggaaagtctcaagcttccctcctgccagcaacaagaaggctttggagtaggcatgatgttttcacgtgtgcgtgccgtttctccaagcactgcaggttccaccgtgtgtcagaggctgcaagtttaacatcctcctgcctgaaaacaaataggtcctttgctgaaaagagggtaaaaaaagagctttgatcttctcagccaggagaagagggtggtgttttcacgcgggcaactgctcgccggcctacatggggttaattcaagtctgctgcgagcacgactccgcccttggcactggcctccagcaagccctgttctctttggggtacaggggaacgggatggtttagactttcctgctcagtgtgtaaaaaatgtagctaaagccactatttttgctctccttaagctgttcaataaaccggttcctcattttaaaaaaaaaaaaaaaaaaaaaaaaaaaaaa

SEQ ID NO: 223648 - DNA, 1000 bp, Homo Sapiens; identical to SEQ ID NO: 118290

SEQ ID NO: 223649 - DNA, 1000 bp, Homo Sapiens
caggaatggagctcttcccagcctcccatctgactacagccagggtggggactcagcgggtataaagctagtgtgaccctgctcttccagctcctgggccagctctggaagggctgtatttgggcctaatcctcagcaactgttctaccactcgcaggggcaaaggtggtgagccacgggacgtccaaggggaggctggccccagcgcgcccatactgcctgcctcatgccccattctcagcctggctggcctttgcctttatgaatctgagcccctccatctgcctatagcaataggcacgggggtgaggaccctcacactctcatttgagcctccctgaggcagggagccaggaggcacctgaggcctatctgtgccttagtcacttcagctatgagccaaatgttccctttcctggaggggagaggcttcttactaggtaagagacaggtttcctctttccttatttcctcagctgtgccaacacaaaaaacaactttggcacaggtggtgggcagggggtagagagatttcagcttgggttctgcactaacagcctccaagccccctggcacttctgttgccctgagagtgtcccaggggattcagagtctccagaaagatatggctgggccaactctgttgcctacctggcctgacccagtcggagcctgacatggtggagggaaagggagacaagtggggctgcactcggtccagaggccagctaggagggaaaccgcagcttcctggggcttgtgtgtgaagattcctgacttaggggtggcttttgtttacaagatgcaagaggggaaacctgtccccgactcatcgagacaacatgcccagttatcagggagtcctgtgtcacaaggtctgtctctgccattgtaagcaagtgccttgggcgagctggcctctgccccacagtctcatctgtacaccgacagggttgatgcctccctcacagggttgagaacaagagccagttggccaagt

SEQ ID NO: 223650 - DNA, 1000 bp, Homo Sapiens
cgccgtgctcagcgcgagccccggagcccttgagcgcgaggcgcggagcccccggagcccccaaaccgcagacacatccccgcgccccagagccccggcctgcgcgcccagccgggcccgcgcgatgccctcagaccggcctttcaagcagcggcggagcttcgccgaccgctgtaaggaggtacagcagatccgcgaccagcaccccagcaaaatcccggtgatcatcgagcgctacaagggtgagaagcagctgcccgtcctggacaagaccaagtttttggtcccggaccatgtcaacatgagcgagttggtcaagatcatccggcgccgcctgcagctgaaccccacgcaggccttcttcctgctggtgaaccagcacagcatggtgagtgtgtccacgcccatcgcggacatctacgagcaggagaaagacgaggacggcttcctctatatggtctacgcctcccaggaaaccttcggcttctgagccagcagtaggggggctcggcctgggagtcggggggccccggtcaggccctgcccagagagctcctggttcctgaactgagctgcctctaccgtggtgggctgggcaggcatgtgcccccctagtcagagggcaccaacccacctactctgcccctgggtggatcctgggccggtcgtgttagggttgtccctctgggtgctggctggtgggatgggggagggtggggagcagctcccagcacccctgctgtgtggttcatcttttttttaggcccctgcctgtctgcccatctgcccctcacccacccgaggctctgcccaccgcctggacctgcccacccctgaaagactggcccctggctccccgcccctcggtctccacgtggtgtatggatctgtggtcattgtccctctgcagaataaagattgctcaggcctgcctggcaaaaaaaaaaaaaaaaaaaaaaaaaaaaaaaaaaaaaaaaaaaaaaaaaaaaaaaaaaaaaaa

SEQ ID NO: 223651 - DNA, 1000 bp, Homo Sapiens
tccgactctcgggcaagtgcttcagcctggtggagtccacgtacaagtatgagttctgcccgttccacaacgtgacccagcacgagcagaccttccgctggaacgcctacagtgggatcctcggcatctggcacgagtgggagatcgccaacaacaccttcacgggcatgtggatgagggacggtgacgcctgccgttcccggagccggcagagcaaggtggagctggcgtgtggaaaaagcaaccggctggcccatgtgtccgagccgagcacctgcgtctacgcgctgacgttcgagacccccctcgtctgccacccccacgccttgctagtgtacccaaccctgccagaggccctgcagcggcagtgggaccaggtagagcaggacctggccgatgagctgatcaccccccagggccatgagaagttgctgaggacactttttgaggatgctggctacttaaagaccccagaagaaaatgaacccacccagctggagggaggtcctgacagcttggggtttgagaccctggaaaactgcaggaaggctcataaagaactctcaaaggagatcaaaaggctgaaaggtttgctcacccagcacggcatcccctacacgaggcccacagaaacttccaacttggagcacttgggccacgagacgcccagagccaagtctccagagcagctgcggggtgacccaggactgcgtgggagtttgtgaccttgtggtgggagagcagaggtggacgcggccgagagccctacagagaagctggctggtaggacccgcagggaccagctgaccaggcttgtgctcagagaagcagacaaaacaaagattcaaggttttaattaattcccatactgataaaaataactccatgaattctgtaaaccattgcataaatgctatagtgtaaaaaaatttaaacaagtgttaactttaaacagttcgctacaagtaaatgattataaatactaaaaaaaaaaaaaaaa

SEQ ID NO: 223652 - DNA, 1000 bp, Homo Sapiens
ccagggctgctaccccaacgtgtgcgacgacgaccagctgctgtgccagaacggaggcacctgcctgcagaaccagcgctgcgcctgcccgcgcggctacaccggcgtgcgctgcgagcagccccgctgcgaccccgccgacgatgacggcggtctggactgcgaccgcgcgcccggggccgccccgcgccccgccaccctgctcggctgcctgctgctgctggggctggccgcccgcctgggccgctgagccccgcccggaggacgctccccgcacccggaggccgggggtcccggggtcccggggcggggccggcgtccgaggccgggcggtgagaagggtgcggcccgaggtgctcccaggtgctactcagcagggccccccgcccggcccgcgctcccgcccgcactgccctccccccgcagcaggggcgccttgggactccggtccccgcgcctgcgatttggtttcgtttttcttttgtattatccgccgcccagttccttttttgtctttctctctctctcttttttttttttttttctggcggtgagccagagggtcgggagaaacgctgctcgccccacaccccgtcctgcctcccaccacacttacacacacgggactgtggccgacaccccctggcctgtgccaggctcacgggcggcggcggaccccgacctccagttgcctacaattccagtcgctgacttggtcctgttttctattctttatttttcctgcaacccaccagaccccaggcctcaccggaggcccggtgaccacggaactcaccgtctgggggaggaggagagaaggaaggggtggggggcctggaaacttcgttctgtagagaactatttttgtttgtattcactgtcccctgcaagggggacggggcgggagcactggtcaccgcgggggccgatggtggagaatccgaggagtaaagagtttgctcactgctgcaaaaaaaaaaaaaaaaaaaaaaaaaaaaaa

SEQ ID NO: 223653 - DNA, 1000 bp, Homo Sapiens; identical to SEQ ID NO: 118294

SEQ ID NO: 223654 - DNA, 1000 bp, Homo Sapiens
gaggaggggatatcatatatttaggggaaagacttaagcctttgagctctccagcttggaccacacattgcccttttctcagggaaggaaatggaaacaaaaagccaacagggcaggggttttgtaagtggaactctggattgactggtcagttgctacaatcagaatatgctttcttggaccatgtttgagactcagaagaatgggcctttctgccataattcttcactagtcaagaatgccagcagtttctttgtataaagagacctgcctttaaaatcatacattctgaacattttagtcaagctacaacaggtttggaaaacctctgtgggggaggggcgagtataaagttttcctcttttttaactgttccctttgcccttcaaactgcagatatttttttttttaagtggggacttctccctacttgattaaagattgagtggaattctagatgtggtcatttgtgtcataatttttttgttttattttgtttttgattttttttttcctcccctgagtgtatgcttagttgttgagtatatatatttgggaccattaaaactttttttgatgtaatataacctaacgttgtgctggtacctgttttaccatgtgtaatttttgttctacatcacagttcttaatttgtttagagttttatgaaagatggtatagtttttattgacaaaagcaaagtaatcttacaactatgtgcatacaaaagcaatactattttgtgactaaatattttatattaaaatttacatcagcaactgtcttgagaattcagggaaatagaatggaatttaaaacttcaacagttttgttaaatctagaaacatgaaattagtattccaaagagattctgaaatttcttttcttggggaaatgacggtacattaaatcaaaattgaggatggatgatttaaaaacatttgactttttaataataaaaagaaaagtgaagagtaagagaaaaaaaaaaaaaaaaaaa

SEQ ID NO: 223655 - DNA, 1000 bp, Homo Sapiens
gccaatggggcctacagccgggagcagttcaagcctcaagccaccagggatttggagaaggagaaacaaagactccaaaatatctttgccacggggaaggacatggaggaacggaaaagaaaggcccctcctgcacgacagaaggctccagcccctgagctagaccgatttgaagagctggtgaaggaaatccaggagaggaaagaattcctggctgacatggaggccctgggacagggcaaacagtaccgaggaatcatccttgctgaaatctcccagaaactccgggaaatggaagacattgaccacagaaggagtgaggaacttaggaagggtcttgccaccacttaatctgtctccagagacgggcagggtagcccaagctcgaccactggagtccactcctctgccaggcagggccatcctcaggccagcccatcctaccagccttctgccacgtcaggtggtggcatagcactgccctgcagtaccccaaggcatactcagcagcctagcccctgccccggaatgcagatggagcctctgagactcacagccccgtccgcagagaagcaaagcccgagcatccctactaggacatgtgtctaaaggtatccactgggcctgcttcccaccacttctgacctgtggcctgttcatttagttttctgaattcaggaatgaatatgattcctttcttcctgttttaggatttacttatttgatttcttaccgccttaggcaagtattcaaccacaatgattaactggccaataaaacatatttaacgtgggtcattacaagcaccattttgttttcagagggataagcttatttgttcaaggcattagactttgtcaagcccagatggtttctagctacctgtttgcatatttcaagtggcaacgggaaccaacctcttgggcaccccatggctggctgctgtggcgggtgctgaattccactctgttaatgatctcaataaacctctgcaacggtt

SEQ ID NO: 223656 - DNA, 1000 bp, Homo Sapiens
ttcatctataaaatgtcatgaaagaaaataaaggtagtgaaatatggacaaaggacatttatatattaactaaagttgtttatgtttgtgttcttaaatttaaaacacgaagaaaaagaaatgtctttcttgttagtgaacaggcctgttttaaatatcttagtatgatatcaaaagaataatcaatttagttacctcccaactaaaaagtaaaaatgaaaaagacgacatggcagaagttgaaacaaacttgtatgtatctgtatgtgacctctagatggaaataaaagtttgatgtttgctagccgtggtccttttggctatggttgcggttcccctgtaaagcaaatgtacttaagtcatcattcagagtgagagagagaaagcacggctgaggctgagtcagttgaccgttgaggaagacctaaggagctgtccagttcttggctctttttcactgtgactgcacagcggtttccttcttcatagtcccttgctgtagtcaccaagagagcatgctagtgttttcctcttgttcctgcttatgcagagctcagatatatgaaaaatttgtatgctttgaaggctgccaaagcatttatactctggacatagttttaactgcaactgctttggctaccagtttaaaccgagttcttcaaaaagcatgaactcgttttcattcattagccctgtttacaatgtggattttgacataaatgaatttgattttcttttagctccagtaacagaatggaataagatctattgccataaattgtagttaagaactgtaaggcaatcgggcagtgaaacttgatattgtattaacttaataggaaccctgtgtacaatttaaaatatttgtaaaatatcactgtgaatttacagatgtctttttgtcattctttaacaatgaatttcccctgtgcatagttattaatagtattggtattattaaaaactaatttggcattttaaaaaaaaaaaaaaaaaaaaa

SEQ ID NO: 223657 - DNA, 1000 bp, Homo Sapiens
tcaaccaatccttcacaagctaaggcacaccactcaaaagcagggcagaagaggggagggaagcattaaagagctaactccagagatctataaagcatatcctttacccaggccattcctatcatatagtaagcagaagagttgccatgaaagtaaaagactactgtcattagcatgtaaaacaaagaaagatatacatgaccgaattggatatctttgtttgtttgtttgagacagagtttcactcttgttgcccaggctggagtgcaatggcacgatctcggctcaccgcaacctctgcttcctggcttaaagtgattctcctgcctcagcctctcgagtagctgggattacaggcatgcaccaccacacccagctaattttgtatttttagtagaggcagggtttctccatgttggtcaggctggtcttgaactcccgacctcaggtgatccgcccacctaggcctctcaaagtgttgggattacgtgtgtaagccacagtgcccagcccgaattggatatctttaagatatctgtaagtgttatatccctaaccaagaagaaaaatatgaaaataattaagactagaatcaagcagtagataattgaatccaatcttgggtattattagataatgtataacttgcacccagggaatgggggtctatgagacaaccccacttggagaagaatggggttagggtctctaattgcaaagtgactgtacaataggacgaaagttgcctctgtgtctgagaaagtatcttagttgttggctgctccagaggtatctttgtcaaaagcttctggttcaatatcagccactgagcagataaccctgcttatttggtgtggttaaatcaactagcttctgctaatagccccaatttgcttgaatgggaaaactctctcatttgacccttataggtagaaataatgaattaacaaccaataaaattaatcatttggcattaaaaaaaaaaaaaaaaaaaaaaaaa

SEQ ID NO: 223658 - DNA, 1000 bp, Homo Sapiens
acaacaatctgtcggtggaatcaagaagtcgaaccaagcagctctttgaggtgttacatttcctggcagagaacttcatcttctcctacatgggcctggcactgtttaccttccagaagcacgttttcagccccattttcatcatcggagcttttgttgccatcttcctgggcagagccgcgcacatctacccgctctccttcttcctcaacttgggcagaaggcataagattggctggaattttcaacacatgatgatgttttcaggcctcaggggagcaatggcatttgcgttggccatccgtgacacggcatcctatgctcgccagatgatgttcacgaccacccttctcattgtgttcttcactgtctggatcattggaggaggcacgacacccatgttgtcatggcttaacatcagagttggcgtcgaggagccctccgaagaggaccagaatgaacaccactggcagtacttcagagttggtgttgaccccgatcaagacccaccacccaacaacgacagctttcaagtcttacaaggggacggcccagattctgccagaggaaaccggacaaaacaggagagcgcatggatattcaggctgtggtacagctttgatcacaattacctgaagcccatcctcacacacagtggtcccccactaaccaccacgctccccgcctggtgtggcttactagctcgatgtctgaccagtccccaggtgtacgataaccaagagccactgagagaggaagactctgatttcatcctgaccgaaggcgacctgacattgacctacggggacagcacagtgactgcaaatggctcctcaagttcgcacaccgcctccacgagtctggagggcagccggagaacgaagagcagctcggaggaagtgctggagcgagacctgggaatgggagaccagaaggtttcgagccggggcacccgcctagtgtttcccctggaagataatgcttgactttccccccaagc

SEQ ID NO: 223659 - DNA, 1000 bp, Homo Sapiens
ccacttctggatccgactggttcaaattctgcaaaaggggctgtccatcaccaccaaagaccctaggattcttgtcacgcactgcctggtacccaagaactgcagcagcccctcaggagattcgaagttagtacagaagaaactccaagcctcccagcccagcgagagtctcattcagctaatgaccaagggggagagtgaagccctgtctcagatttttgccgacttacaccagcagaaccagttgagtttcaggagcagcagaaaggtggagaccaacaagaacagctcagggaaagattcttcccgtgaagacagcatcccttgcacctgtgacctacgttggagggcttcattcacgtacggagagtgggaaagagagaacccctccggcctgcagcccctctcactactcagcactctggcagcctccaccgggccacagctggccccacccataggaaattctatttgagccacccttccgcactggggagaatctatgcaagcctcatcaacaccactttgcagcattcagctgctgagggattatcgggatggagagtaggagaaaactgcaaccaaggaagaatagagtcatctcatggtgacagcagagcctttccagctgtacataaccacgtcctcgccactgcacctcggcatatgccacctccatgccactgccagagctggcctagcaagatgtgctctcagaatgggcgggcccaagagatgaaggaaaggagtgaaagggaagtaggaccagagaagtggaaggaagcaaaatggaggtgatgagaaaggtggtgggagaaagtcagcagatgagagacacaaagagaagtggtaataggaaacggaagagacttggtagacgagataaggaggacaagagaagggacacacccctgagagatgctcaccaagcttctatttatctaatttaaaacttgaaagtaaagccatgaaaaaaaaaaaaaaaaaaaaaaaaaaaaaa

SEQ ID NO: 223660 - DNA, 1000 bp, Homo Sapiens
gtgaagccaggaaactacattctccaggttgtcatcaacccaaactttgaagtagcagagagtgactttaccaacaatgcaatgaaatgtaactgcaaatatgatggacatagaatctgggtgcacaactgccacattggtgatgccttcagtgaagaggccaacaggaggtttgaacgctaccctggccagaccagcaaccagattatctaagtgccactgccctctgcaaaccaccactggcccctaatggcaggggtctgaggctgccattacctcaggagcttaccaagaaacccatgtcagcaaccgcactcatcagaccatgcactatggatgtggaactgtcaagcagaagttttcaccctccttcagaggccagctgtcagtatctgtagccaagcatgggaatctttgctcccaggcccagcaccgagcagaacagaccagagcccaccacaccacaaagagcagcacctgactaactgcccacaaaagatggcagcagctcattttctttaataggaggtcaggatggtcagctccagtatctcccctaagtttagggggatacagctttacctctagccttttggtgggggaaaagatccagccctcccacctcattttttactataatatgttgctaggtataattttattttatataaaaagtgtttctgtgattcttcagagcccaggagtcagtgctggtggttggagggacctgcccccactggttcatttaaccctctgtctcggtgccctcagaacctcagccagaaaggcaaggaggaaatcagagcaggagcctcatactcttggtgatctattcattctgtgacctcaggggtcacatataaggtcagtgtttctcgtccccgccggatctgcactgccaactgggattgggttcgaacagcttcataaacatcttcagcattttgtaccatctgctccccaatggccaaaatcacatcaccaggccgcagaccagccc

SEQ ID NO: 223661 - DNA, 1000 bp, Homo Sapiens
cacccacaaccccaccaacgccacgctcagcaccttcattgaggacctgaagaagtacggggctaccactgtggtgcgtgtgtgtgaagtgacctatgacaaaacgccgctggagaaggatggcatcaccgttgtggactggccgtttgacgatggggcgcccccgcccggcaaggtagtggaagactggctgagcctggtgaaggccaagttctgtgaggcccccggcagctgcgtggctgtgcactgcgtggcgggcctgggccgggctccagtccttgtggcgctggcgcttattgagagcgggatgaagtacgaggacgccatccagttcatccgccagaagcgccgcggagccatcaacagcaagcagctcacctacctggagaaataccggcccaaacagaggctgcggttcaaagacccacacacgcacaagacccggtgctgcgttatgtagctcaggaccttggctgggcctggtcgtcatgtaggtcaggaccttggctggacctggaggccctgcccagccctgctctgcccagcccagcaggggctccaggccttggctggccccacatcgccttttcctccccgacacctccgtgcacttgtgtccgaggagcgaggagcccctcgggccctgggtggcctctgggccctttctcctgtctccgccactccctctggcggcgctggccgtggctctgtctctctgaggtgggtcgggcgccctctgcccgccccctcccacaccagccaggctggtctcctctagcctgtttgttgtggggtgggggtatattttgtaaccactgggcccccagcccctcttttgcgaccccttgtcctgacctgttctcggcaccttaaattattagaccccggggcagtcaggtgctccggacacccgaaggcaataaaacaggagccgtgaaaaaaaaaaaaaaaaaaaaaaaaaaaaaaaaaaaaaaaaaaaaaaaaaaaaaaaaaaaaaaaa

SEQ ID NO: 223662 - DNA, 1000 bp, Homo Sapiens; identical to SEQ ID NO: 118299

SEQ ID NO: 223663 - DNA, 1000 bp, Homo Sapiens
cttgggccctcatggccacacagaccttctactccacaggccaccagcctgtctttccagccatccattggcatgcagccttcgtgggattcccagagggtcatggctcctgtacttggctgcctgctttgctagtgggagccaacacctttgcctcccacctcctctttgcagtaggttgcccactgctcctgctctggcctttcctgtgtgagagtcaagggctgcggaagagacagcagcccccagggaatgaagctgatgccagagtcagacccgaggaggaagaggagccactgatggagatgcggctccgggatgcgcctcagcacttctatgcagcactgctgcagctgggcctcaagtacctctttatccttggtattcagattctggcctgtgccttggcagcctccatccttcgcaggcatctcatggtctggaaagtgtttgcccctaagttcatatttgaggctgtgggcttcattgtgagcagcgtgggacttctcctgggcatagctttggtgatgagagtggatggtgctgtgagctcctggttcaggcagctatttctggcccagcagaggtagcctagtctgtgattactggcacttggctacagagagtgctggagaacagtgtagcctggcctgtacaggtactggatgatctgcaagacaggctcagccatactcttactatcatgcagccaggggccgctgacatctaggacttcattattctataattcaggaccacagtggagtatgatccctaactcctgatttggatgcatctgagggacaaggggggcggtctccgaagtggaataaaataggccgggcgtggtgacttgcacctataatcccagcactttgggaggcagaggtgggaggattgcttggtcccaggagttcaagaccagcctgtggaacataacaagaccccgtctctactatttaaaaaaaagtgtaataaaatgataatataaaaaaaaaaa

SEQ ID NO: 223664 - DNA, 1000 bp, Homo Sapiens
cacgggcggtcctgcacagattcccaggccagggctgggtcacaggaaggaaacaacattttcttgaaaggggaaacgtctcccagatcgctcccttggctttgaggccgaagctgctgtgactgtgtccccttactgagcgcaagccacagcctgtcttgtcaggtggaccctgtaaatacatcctttttctgctaacccttcaaccccctcgcctcctactctgagacaaaagaaaaaatattaaaaaaatgcataggcttaactcgctgatgagttaattgttttatttttaaactctttttgggtccagttgattgtacgtagccacaggagccctgctatgaaaggaataaaacctacacacaaggttggagctttgcaattctttttggaaaagagctgggatcccacagccctagtatgaaagctgggggtggggaggggcctttgctgcccttggtttctgggggctggttggcatttgctggcctggcagggggtgaaggcaggagttgggggcaggtcaggaccaggacccagggagaggctgtgtccctgctggggtctcaggtccagctttactgtggctgtctggatccttcccaaggtacagctgtatataaacgtgtcccgagcttagattctgtatgcggtgacggcggggtgtggtggcctgtgaggggcccctggcccaggaggaggattgtgctgatgtagtgaccaagtgcaatatgggcgggcagtcgctgcagggagcaccacggccagaagtaacttattttgtactagtgtccgcataagaaaaagaatcggcagtattttctgtttttatgttttatttggcttgttttattttggattagtgaactaagttattgttaattatgtacaacatttatatattgtctgtaaaaaatgtatgctatcctcttattcctttaaagtgagtactgttaagaataataaaatactttttgtgaaaaaaaaaaaaaaaaaa

SEQ ID NO: 223665 - DNA, 1000 bp, Homo Sapiens
aagagctgctgtctgcaccccctcctgacctgggggcccagcggcgccacggttggaaccccaaagactgttcagagaacatcgaggtcaaggaaggagggttgtactttgagcggcggcccgtggcccagagcactgatggggcccggggtaagaggggctattcaaggggcctgcacgcctgggagatcagctggcccctagagcagaggggcacgcatgccgtggtgggcgtggccacggccctcgccccgctgcagactgaccactacgcggcgctgctgggcagcaacagcgagtcgtggggctgggacatcgggcgggggaagctgtaccatcagagcaaggggcccggagccccccagtatccagcgggaactcagggtgagcagctggaggtgccagagagactgctggtggttctggacatggaggagggaactctgggctacgctattgggggcacctacctggggccagcattccgcggactgaagggcaggaccctctatccggcagtaagcgctgtctggggccagtgccaggtccgcatccgctacctgggcgaaaggagagcggagccacactcccttctgcacctgagccgcctgtgtgtgcgccacaacctgggggatacccggctcggccaggtgtctgccctgcccttgccccctgccatgaagcgctacctgctctaccagtgagccctgtgataccacagactgtgctgaggtcttgccaccacccctccccttggggaggtggggaggcactgctggcctagaccagctgctgaaagctggtgaggctgagcccctaccccaacccaagctctgcggaaatcaacagccccagagccacttggagggaggaagaaagggagccggcgttcaaggctatgacagtctgctacgcaaaacattttttcaagtaaaaatagtaagagatgttgttatagaaaaaaaaaaaaaaaaaaaaaaaaaaaaaaaaaaaaaaaaaa

SEQ ID NO: 223666 - DNA, 1000 bp, Homo Sapiens
atctgtaaatagcccggagggcctgctcccggcccccctgcactctgcctcacaaaggtctatattatataaatctatataaatctattttatatttgtataagtaaatgggtgggtgctatacaatggaaagatgaaaatggaaaggaagagcttatttaagagacgctggagatctctgaggagtggactttgctggttctctcctcttggtgggtgggagacagggctttttctctccctctggcgaggactctcaggatgtagggacttggaaatatttactgtctgtccaccacggcctggaggagggaggttgtggttggatggaggagatgatcttgtctggaagtctagagtctttgttggttagaggactgcctgtgatcctggccactaggccaagaggccctatgaaggtggcgggaactcagcttcaacctcgatgtcttcagggtcttgtccagaatgtagatgggttccgtaagaggcctggtgctctcttactctttcatccacgtgcacttgtgcggcatctgcagtttacaggaacggctccttccctaaaatgagaagtccaaggtcatctctggcccagtgaccacagagagatctgcacctcccggacttcaggcctgcctttccagcgagaattcttcatcctccacggttcactagctcctacctgaagaggaaagggggccatttgacctgacatgtcaggaaagccctaaactgaatgtttgcgcctgggctgcagaagccagggtgcatgaccaggctgcgtggacgttatactgtcttcccccacccccggggaggggaagcttgagctgctgctgtcactcctccaccgagggaggcctcacaaaccacaggacgctgcaacgggtcaggctggcgggcccggcgtgctcatcatctctgccccaggtgtacggtttctctctgacattaaatgcccttcatggaaaaaaaaaaaaaaaaaaaaaaaaaaaaa

SEQ ID NO: 223667 - DNA, 1000 bp, Homo Sapiens
tgttgattatccaaagaattgaaactcctagcacatccagtttttacaacagatttgcagctcattccttaccctggttaggtcactacttttgcagattttgctggcactgatctggagatctgcagatctggaggagacgggaaggagtcgattcttaaataaggatcagtgaggcatcctgtcccaagctactgtttggtggggatctgggttcatctcacccacagagggaggatctttaagaggagaaaaaagccaagagggaaagccagagttccctgttctaggggactagccaaatgcctacatcagctgtcccctccctgttgtctccaagtaagtttgccagaaaaggttttagcaaagtgctacaactgtgtctttataggaggataggcctctgccctgccccacccccaccacctgtccccacccagtgtcccaggccacaggagcttattggccaggagggaataatgtcccccaatactgcctgttgagggaccagagttggggtctttggtgcttccaacctcctgccaacctggagttcacaacaccagagccccacggcctcgcacactgaagcaggggcgtgcggtgactcggtgcttctgttttggaagaaccacctgtcatcaaaacatggacagcagggtgttctcagctcccagcgaagcctccacaacagaatggggccacagggcagccgggactccctgtctcacctacattaacccatgcatactgtatgccataaactcactttggtatatccgcgtcacatgcagagaggaactctgcgacgtcaaagtgttgcttcttaaagtttcattattggcaactagagggttgtttttaatgcatggaaactaaacagattcctcggggagttcctgaaggaaccaggtgggcaaacctttgcttatatacatgcggcctcacctggaagagaaataaaccacttgtactaaaaaaaaaaaaaaaaaaaaaaaaa

SEQ ID NO: 223668 - DNA, 1000 bp, Homo Sapiens
tgggcgagcaggtcttcgccgccgagtgcatcctgagcaagcggctccgcaagggcaagctggagtacctggtcaagtggcgcggctggtcctccaaacataacagctgggagccggaggagaacatcctggacccgaggctgctcctggccttccagaagaaggaacatgagaaggaggtgcagaaccggaagagaggcaagaggccgagaggccggccaaggaagctcactgccatgtcctcctgcagccggcgctccaagctcaaggtgggtggctgcgctgggtatgctgaccccacctcccagcacccccttggcgtagggggcaggcagagggagggtttggggccctcaggaagggggtggcacttctgccaacagtctgtccctctactcggaaaacaggagccccctttcttcctgtctctcagcttctgctgccaggggccccagccggctgagagttcctccccgcccctcccaggggcttcctgcttcagcctgtcctgcacgcctctctgctgggtggcagggtcaaactgctgcagacaagcactcttccctcccagggggtccttgggggacggaaaggaacaggaagcatgcgtacagtaggtgctcataggattgccggctggatgtgactcaaaagcctaagatttgggggctactccgggcccacctgcgggtgcaccttaaatcgaggtggccacgaaaggcagggctgactgaatagccagggggtgccaggaggggccttggaggagggcagaggcagtgtgggctgatgatgtgctttggccttctcgggactgtcctgtcacccctcctcgctacagtgatgggctcaccccgccacaggtatgcatgcgcccctggggtccgtggtagggcccctccctcccctgaggacaggtgaggcaggacaggatgggggaggagggcctggcctcagtcccgggtgtggctttgattccctcctccgggcactgtccctg

SEQ ID NO: 223669 - DNA, 1000 bp, Homo Sapiens
attttgagcagcgcgagagtagaagtgaatacccccaggaactccaattgtgctgaagctgatttgtctgttcgtaggatgatgtgcagcctgtcacagtggcagccacaggcattcagtttgtgggcatttcctgtcatttcggatcctgctatagggaaggttcagctctcctgtctggggcatctactggagcacctcagaagacaaggaggaaaacactggctcatgttttctttccatgtgagggaggggaggtttctagatgatactaaaagcctgttgccactgttgtgtcatgatttccattcttcatcatggaaagccacaagcctcagaaggcagccagaggacaggaagagtctgtgatgctcatgtctgtgtcatggcatgagggggaattgacgagtgcttgcttagcatcagctctcattgtattgaaggctgtgcccttggtgtgcttagcagtgagcagcgtcttcattaggtagctctggctgggctttgtcagccagcgtgtgagaaaggagaaccaaaaccaatacctccttatagaagccagaaggatcacattggatgagagaaggtgtctataactgggttcttcccaatcccagctctttcattaactaaatatgatcttggacatatctcttaacctccatcggccttagtttttgcatccaaaaagaagtgattgggctggtcttggaaggtttttttcttttttttcccctgtgtaacattcttcattgttcatcaacatttaagaaatttaattttgtagatgtttttactaaagagggtaacaaactattttggaactgctgtatgttattcaagggaagcacgctgtttggaggaaggagcatacttaatgggtagtattgaggatgaaagggaatttctctctctgccattttatttgataatattaaagaaataaagactggaaagggggattccttgttaaaggtcagattttaaattgcatataaaa

SEQ ID NO: 223670 - DNA, 1000 bp, Homo Sapiens
ccgcctattccctgcgtctggcctccgaggcttcccaaatgtcctcaagaaggtcctcgtggatcagctggtagcctctccattgctgggcgtctgggaattctacaaggcagactggtgcgtgtggcctgctgcgcagttcgtgaacttcctcttcgtgcccccccaatttcgagtcacctacatcaacggcctgacgctgggctgggacacgtacctgtcctacttgaagtaccggagcccagttcctctgacacccccaggctgtgtggccctggacacccgagcagactgaactgtctgcttcctggaccagatgcaagactgtctcctggcggaccaccccctctgacagaaggggaatgggctcctgcagcaagctcgggtcttgagccacgtcccagcaccacttcagctccggagcattgggctgagccgccctttccaagctcacttctgggactgagtttcctcaaccggaacacacccatgaagatggatgatcatcccctagcccttctcagcaggaacctcatgcgacctgtgaccaagatgtcccatcctcagcacagggcccactctgccaaccagtctcaagcaccagcccctcaacactgccatccacctggctctgggccaagccaccaatccagagctccctcaggtcctgggactaaggcggggacatgactgatcccctcagagcaggctcaggcctggagtcggcccccaaaagtttcacatagggccaggcagcctctgtgtttctttccctggtcctgaactgtggaaatgccattaaactctctctataatgtaactgaaactgctggctgggcgcagtggctcccacctgtaatctcagcccttcccgaggctgaggtggaaggattgctcgaggccaggtgttcgagaccagcctgggcaacatagcaagaccctgtctctatttatattgaaaaataaaaataacaaaagaaaaaaaaaaaaaaaaaaaaaa

SEQ ID NO: 223671 - DNA, 1000 bp, Homo Sapiens
cactgccgcctgcgaggagaggccctggtggccctgggccagcccccccacgcccgctgggcccctcagcaggactggcactgggcccggcgctatgggctgccttacgtggtgcgtgtggaccttcgtcgcctggccccagccccaccagctaccccagcccctgctgggaccccaggccccatcctgatcccgaagcaggccctcgccttcgcccccttctccccacccaagcgcctacggctggtggtcagccacggctccatcgacctggatgtcggcggtgaagagctgtgacaggccggacggggaggcccagcagggagagagggtctctctcctagctgctacccaggacctccagaaggagcccttggacctctgggagggagctgacccttgactccagcatagctctgaccctggaatggggttggtttggacacccccagggatctgagccctgaccctttgtgactgctgacccctgagccacccccactcccacagggagccccggccatttgctgccctccccacccctgccccagcctcaggactgcaggagccatccgcccccctcagccccttcctccccagggagcaaagccataaggggcaggggccaccccacggcatctccccagaagtacaggcctcaggaggaggtggaactgatgtagggggtggcactccccagagactgccctcacgaggggactgggttcgctctcagctctgcagctgtctgcggtggggggaaggttggggggtgtctggaggcatgttcccctcaccaccccccgtgggtctcagggaggccgggtgtgacctcatctttctcatggtgctatcctggtgctattggggtggggagttccctcccctcccccacaccagaaaggggtatgttgggggattggaagcacttgaactttttattttattaaaaccttgttataagcagcaaaaaaaaaaaaaaaaaaaaaaaaaaaaaaaa

SEQ ID NO: 223672 - DNA, 1000 bp, Homo Sapiens; identical to SEQ ID NO: 118306

SEQ ID NO: 223673 - DNA, 1000 bp, Homo Sapiens; identical to SEQ ID NO: 118307

SEQ ID NO: 223674 - DNA, 1000 bp, Homo Sapiens
ttctttcaattctgtaggttaaaaaaatggcagtgatgaattttaagggtttcccccaacatataaaataatgcaaagaatccctagactttaggctttcagcttacacaaatctatttaattaggaaaaaaaactattaaggatgtagcttttcacctttactttagaagcacagtaaatatcccaaactgtgatgaagccgaccttagatttagtagtgtaagctagaagaagtgagtgtttctatgagtggaaaaagccaaggtgtcatttatgtgtcagttcatttgtggtgatatagaattagctttttcatccccttacccttagaatccacgtattccccttcccactagcctaggtcataaagaggcgttgctttcactctcctatgccttttacgagtgctaagtgtaggatattttgtcaccagaacacaatgctaccgccccaaagtaaaagaaaccacttctggtcaatcaacactaccagcgtatatataagaaagacatctttctcttttctaaaagacttccctaacacttaccccatggctgcacagttggtggggtcctgccggagaggaagagacactcagaccagagaaggggtgtgcatgcgcctactcgcttgctagaagtagattctggacagtcagctcttcatctgcccaactgtgtagcatctgcattgcccagtctttcatgtgtgccaaggctgatgcaggatttgttctctgtccagcagtcacttcggccagagctgaagagttgccccgtctctgttccatgtctcctttaagagctctggtgataaggacatgatgcttttactgaactttcttatcctagcacatgcttcaatagttcaaggaacttgaaaaatacttttccttacctttaccccatccctgtctttactcctcacacttactgtaagacattagtaacataataaattaaaagtcacacgaatctcaccaaaaaaaaaaaaaaaaaa

SEQ ID NO: 223675 - DNA, 1000 bp, Homo Sapiens
atccaggaaggggcgcgtagatgcttaacggtctcttcggaaatcctgcaaatagaaagataattctagatccggaatacctgtatctggtggaaaccatggatttctacaagctcgaattattcctcattgtatagcctgctttgtaaactagtttacaatttgcaggctgatcttaagatttttttatatctaattgctgctgccttcattttaggttcagcagttacttttaactaccttaatttattgccagaaggtatgagcctaacattctgatgagtccagaaaactacgttttgtcagtagcaatacactaggaagtaaaatatatttagaatttaaacattgtgtgccagtggtcctcgcgcttgactgcacatcagttacttgaagagccacacctcagatcaatgcagtcagaacctgggaagtaggtcccagacatcaggacctttttaaagctccccaagtgattctacgttccccaagtttgaggaccacttttctgtgcattggcttgcacaatttgaaaataatgcttttcctgagctggatcccagtgttgccttaacagggtgtctgtcgtgccgcagtagagcactgctgcttcctccaaccccaaaatttatgttcctaagtaagtcaggtccctaagccccgtcccaagaagtgacacaagtggccaacatccacactgtaggcttgcaggctacccgccctgagatttggtaaagaacactgccttgttccccatcagtaaacaaggttacctacctcaggaggctgcttgtgagagagcaaatgcagtatcttcagaatgatttatttttttaattaattgtaaagacttgtgccattggctgctctttctagtcccctaaatttctgttctagttttaaatttctctagaacttgcaatagttgggggttttataatgatgttttacaatgtttatttcttaaataaaaacttaaaaattcaaaaaaaaaaaaaaa

SEQ ID NO: 223676 - DNA, 1000 bp, Homo Sapiens; identical to SEQ ID NO: 118309

SEQ ID NO: 223677 - DNA, 1000 bp, Homo Sapiens
gccattagggagtttcaaaaaacagaagatatgagaagatacttacatcaaaacagggttccagctgagccatcttccctcctgtcactatcagcaagtcacaatcagctgtcacacacagacctggaacttcatcagagaagggagcagttagtagagcgcactcggagagaggctcagcttgctgccctgcagtatgaggaggagaaaataaggaccaagcagatccagagagatgctgtcctggactttgtcaaacaaaaagcatcacaaagtccacaaaaacagcacccgctcctagatggcgtagatggtgagtgccccttcccatccagaaggtctcagcacactgatgatagtgccttgtgcatgtcgctgtcagggttgaatcaagtgggctgtgctgctaccctgcctcattcttctgccttcacgcctcttaagagtgatgacagacctaatgctctattaagttcacctgcaacagaaacagttcatcattcccctgcatattcttttcctgctgctatccagagaaatcagcctcagcgccctgaaagcttccttttccgagcaggtgtcagggcagaaaccaacaaaggtcatgcttcaccccttcctccatctgctgcacctaccactgattctacagattccataacaggacagaattcaagacagagagaagaagagctggaattaatagaccaactgcgtaaacatattgagtaccggttgaaagtgtctctaccttgtgatctcggagcagctctaactgacggtgttgttctttgccatttggccaatcatgtgcgacctcgatctgtcccaagcattcatgttccctcaccagctgtagtaagttgataatcctaaaaagccttggctattcatcagacatttgttaagcacagtggacagacatttcttaagcattgtgctagatattaaggatacagatataaagagtccagtctctacaaaaaaaaaaaaaaaaaaa

SEQ ID NO: 223678 - DNA, 1000 bp, Homo Sapiens
ggacaggtgctctagccattaggaccacaaatggacatgtcagttattgctctgtctaaacaacattcccagtagttgctatattcttcatacaagcatagttaacaacaaagagccaaaagatcaaagaagggatactttcagatggttgtcttgtgtgcttctctgcatttttaaaagacaagacattcttgtacatattatcaataggctataagatgtaacaacgaaatgatgacatctggagaagaaacatcttttccttataaaaatgtgttttcaagctgttgttttaagaagcaaaagatagttctgcaaattcaaagatacagtatcccttcaaaacaaataggagttcagggaagagaaacatccttcaaaggacagtgttgttttgaccgggagatctagagagtgctcagaattagggcctggcatttggaatcacaggatttatcatcacagaaacaactgttttaagattagttccatcactctcatcctgtatttttataagaaacacaagagtgcataccagaattgaatataccatatgggattggagaaagacaaatgtggaagaaatcatagagctggagactacttttgtgctttacaaaactgtgaaggattgtggtcacctggaacaggtctccaatctatgttagcactatgtggctcagcctctgttaccccttggattatatatcaacctgtaaacatgtgcctgtaacttacttccaaaaacaaaatcatacttattagaagaaaattctgattttatagaaaaaaaatagagcaaggagaatataacatgtttgcaaagtcatgtgttttctttctcaatgagggaaaaacaattttattacctgcttaatggtccacctggaactaaaagggatactattttctaacaaggtatatctagtaggggagaaagccaccacaataaatatatttgttaatagtttttcaaaaaaaaaaaaaaaaaaaaaaaaaa

SEQ ID NO: 223679 - DNA, 1000 bp, Homo Sapiens; identical to SEQ ID NO: 118314

SEQ ID NO: 223680 - DNA, 1000 bp, Homo Sapiens; identical to SEQ ID NO: 118316

SEQ ID NO: 223681 - DNA, 1000 bp, Homo Sapiens
gccacagagaaagcacccagacgccacaggctctgtcgcatttcaaaacaaaccatgatggagtggcggccagtccagccttttaaagaacgtcaggtggagcagccaggtgaaaggcctggcggggaggaaagtgaaacgcctgaatcaaaagcagttttctaattttgactttaaatttttcatccgccggagacactgctcccatttgtggggggacattagcaacatcactcagaagcctgtgttcttcaagagcaggtgttctcagcctcacatgccctgccgtgctggactcaggactgaagtgctgtaaagcaaggagctgctgagaaggagcactccactgtgtgcctggagaatggctctcactactcaccttgtctttcagcttccagtgtcttgggttttttatactttgacagcttttttttaattgcatacatgagactgtgttgactttttttagttatgtgaaacactttgccgcaggccgcctggcagaggcaggaaatgctccagcagtggctcagtgctccctggtgtctgctgcatggcatcctggatgcttagcatgcaagttccctccatcattgccaccttggtagagagggatggctccccaccctcagcgttggggattcacgctccagcctccttcttggttgtcatagtgatagggtagccttattgccccctcttcttataccctaaaaccttctacactagtgccatgggaaccaggtctgaaaaagtagagagaagtgaaagtagagtctgggaagtagctgcctataactgagactagacggaaaaggaatactcgtgtattttaagatatgaatgtgactcaagactcgaggccgatacgaggctgtgattctgcctttggatggatgttgctgtacacagatgctacagacttgtactaacacaccgtaatttggcatttgtttaacctcatttataaaagcttcaaaaaaacccaaaaaaacccaaa

SEQ ID NO: 223682 - DNA, 1000 bp, Homo Sapiens
ggtgagggagtatttgttcccagtttttaagatagtataaaaaagcaaatacttggtgagtgatttaaaaataaaaccaaaacaaaacacaaaaagatattccacaggacatgccactttattataaaacctgacacaggcatagtaccaagtatttcctgcattgttgctaaaattgttttattgtagctccacattctggtgtagtttaaaatgcctttgggggcagtttgaagcagttcttcatgccacttagtttgaaaataaaattctagatatgcaaatgattttcttagaaaacttcacaaaataaaagatcttgtttttttttccatagcacagtaatgaatgtggttatcaatcacatacttttttggattatattgtagcaaaaagttgattagcttaccaagattattaatagcaatgtatgtgttataatacaacttagtacattaaagctacgaaaactcatcctggctgtaggatagtaataaaggaagaattatgacttcattatgaaaaaaagaagttttaaagttttcaattacgagcaatttggaagaaaaaacctaaggtgcttttcaaaagagtaactgaaattgttgcaggccaaaacagcaatatgatatctcagatttagttcaataagaacagtgaaacttttggttcactaataaattctgagtaaattagtggtgaagacaaaatataacttgttttagtgagccactgaggaaagaatatgcttattacaaagacaaaatgtggtgcagaaactatcttgcacctgtgtgcataaactgttagtcgtgactgacttggtgtgttgctattgtgtttctatatactccgtccaatatagataatgttttaataacaactgtgggataaaagttatcttccccttggaaagactaatgagcacaatgatattaatcacttttatggtgaataataaatgcaataattgcctcatgggtgaaaaaaaaaaaaaaaa

SEQ ID NO: 223683 - DNA, 1000 bp, Homo Sapiens
gggacccccgggcggccgggcaggggaaggggcctggccgccacctgctcactctccagtccttcccacctcctccctacccttctacacacgttctctttctccctcccgcctccgtcccctgctgccccccgccagccctcaccacctgccctccttctaccaggacctcagaagcccagacctggggaccccacctacacaggggcattgacagactggagttgaaagccgacgaaccgacacgcggcagagtcaataattcaataaaaaagttacgaactttctctgtaacttgggtttcaataattatggatttttatgaaaacttgaaataataaaaagagaaaaaaactatttcctatagctagtcggaatgcaaacttttgacgtcctgattgctccagggccctcttccaactcagtttcttgtttttctcttcctcctcctcctcttcttcctcctttctcttctcttccccagtggggagggatcactcaggaaaacaggaaaggaggttccagccccacccacctgcccaccccgccccaggcaccatcaggagcaggctagggggcaggcctgggcccagctccgggctggctttttgcagggcgcaggtggaggggacaggtctgccgatgggggtgggagcctgtctgctgggctgccaggcggcaccactgcaaggggtgggagcctggcttgggtgtggctgagactctggacagaggctggggtcctcctgggggacagcacagtcagtggagagagccaggggctggaggtggggcccaccccagcctctggtcccagctctgctgctcacttgctgtgtggcctcaagcaggtcactggcctctctgggcctcagtctccacatctgtacaaatgggaacattaccccctgccctgcctacctcacagggctgttgtgaggaattgatgagatgatgtatgtgaaacactttgtaacctgtaaagcgctgtgcacacgtg

SEQ ID NO: 223684 - DNA, 1000 bp, Homo Sapiens
atcgtcttttctcctcccacctctgtcaccaccaaagacgggcggaggtggggctgggccctcctgcccccgcccatcccccttccatgagcccagacctccctgggtggtgctaggctctgagctgggggctcagaccagggatcgctcaggcccctgtcacctgtgggcccggggaccacttgggggaggtcagaggatgtatgtggccggaccagcttccccaccttcattaggacaagaaactgcccagcactttgccttcagttcaacgcacaaacgctcctggggcctcatgggggcagagcctcccctgggcctgcagagagtcctgttagcagcgacgtccccccgccgcggggtcctgtcagcccggcagtgtcttctcagtgtcttcacctgagcgagtgtctgtggccccaacgcgttctgctgtggctctgccctttccaggttgagaggcctgcaggagaaacacactcccctcctgggtttccacactcaggaggtcagaggactggctcctgtgaccagggcccctctcccctgaatgggaaaggggtctggggatgggagggcgcaccacagagaggagatgatgctgggtgtggcccatcttctgtgggccccttcccagacaccggatccatgggcactaacccgcctcccaggctgatgcccggaggcagcttcctgggcaggagggttccatgggcactaacccacctcccaggctgatgcctggaggcagcctccagggcaggaaggaccctgtgctccccgccccccatcctgacatcctgttcttttgcacttaccctgtgctgtgaatgtaacagtgggccttggccccgcccactctgatttgcattttcatttgtgtttgtttacacatccatgcactgcctgtagcagtcgattgtcacagcttcgacttttggatggtagagtgtgtgcactgactgtgagtcgaataaacaattgagacgaaaaaaaaaaa

SEQ ID NO: 223685 - DNA, 1000 bp, Homo Sapiens
gtggagatgaccccattacccacatgcctccagtttaacagatgtggcccctgtgtatcttctcagattggcttcaactgcagttggtgtagtaaacttcaaagatgttccagtggatttgatcgtcatcggcaggactgggtggacagtggatgccctgaagagtcaaaagagaagatgtgtgagaatacagaaccagtggaaacttcttctcgaaccaccacaaccgtaggagcgacaaccacccagttcagggtcctaactaccaccagaagagcagtgacttctcagtttcccaccagcctccctacagaagatgataccaagatagcactacatctaaaagataatggagcttctacagatgacagtgcagctgagaagaaagggggaaccctccacgctggcctcatcattggaatcctcatcctggtcctcattgtagccacagccattcttgtgacagtctatatgtatcaccacccaacatcagcagccagcatcttctttattgagagacgcccaagcagatggcctgcgatgaagtttagaagaggctctggacatcctgcctatgctgaagttgaaccagttggagagaaagaaggctttattgtatcagagcagtgctaaaatttctaggacagaacaacaccagtactggtttacaggtgttaagactaaaattttgcctatacctttaagacaaacaaacaaacacacacacaaacaagctctaagctgctgtagcctgaagaagacaagatttctggacaagctcagcccaggaaacaaagggtaaacaaaaaactaaaacttatacaagataccatttacactgaacatagaattccctagtggaatgtcatctatagttcactcggaacatctcccgtggacttatctgaagtatgacaagattataatgcttttggcttaggtgcagggttgcaaagggatcagaaaaaaaaaatcataataaagctttagttcatgaggg

SEQ ID NO: 223686 - DNA, 1000 bp, Homo Sapiens
gggcagatcatgagggcaggagattgagaccctcctggccaacatggtgaaaccccgtctctactaaaatacaaaaaattagctgggcatggtggcgcacacctgtagtcccagctactctggaggctgaggcaggggaatcgcttaaacccaggaggcggagattgcagtgagccaaggttccaccactgcactccagcctggcgacagagcaaggctccactcaaaaaaaagatttaaaggggaaaaaattgaaattttctttgtatctaggggtatccgtcactgaacagaaattcttaattttggctaggcgtgatggctcaggtctgtaatcccagcactttcggtggccggggtgggtggatcacttgaggccaggagttcaagaccaccctgaccaacttggtgaaatcccatctctactaaaaatacaaaaattagctgggtgcagtggcgcatgcttgtaatcccagctactcaggaggcagaggcaggagaatcacttgaacccgggaggtggaggctgcagtgaacagagacagtgccactgcacatcagcctgagtgacagagagactttgtctcaaaaaaaaaagaaaattttaattttaatgtagacagtatgaattatcttgttctgcagttggttgctttttgattgcttatttaatagagttgttaagatattttacatcttctcctgttagctgttcagcttttcctttcatattgagaacactacacagtgctgaagtccagctggtacacaccggggtgacaccttggctgcatctgttctcaacagtcagacacttcttctaattggttgatgctgggctgtactggttgctaaatattgcacatcattttaaaactatttgagatgcacttttgtactcaggaggccaaggcaggaggattgcttgagcccaggagtttgagaccagcctgggcaacacagcgagaccttgtctcttaaaaaaaaaaaaaaaaaaaaa

SEQ ID NO: 223687 - DNA, 1000 bp, Homo Sapiens
taactgggaccttgaacaagtcagcatctctgcctttcaaaatgaaggaacattgttctctatcctcccctgaccccccacggccccatgctaggtgcaccatcttcctccatttgactttttaatgctttacaacttcaggctaaagggaggggatgttgggaggagaaaccatcacaagattccctcggtgccacagctgtgctgaggaggccggggactgggaatcggagtgggcacctctgtgtttctctagggagtaacattcaacatttaattgaatcgtgtatcctgataggtggattaggaacaggattcattcctttaactttaacttttggctaaacgacatgccttggattgagtgtatatgtcttccccaaattcatatgttgaagcttaaatcctgaatgtgatggttcttggaattgggacctttggaaggttattgggtcttgagggcagagccctcacgaatgggattaaggcccttataagaagagacatggggccaggtgcagtggctcacacctgtaatcccaacattttgggaggccgagaagggtggatcatgaggtcaggagatggagaccatcctggccaacatggtgaaacctcgtctctactaaaaatacaaaaattagctgggcgtggtggtgcgtgcctgtagttccagctacttgggaggctgaggcaggagaatcgcttgaaccaggcagtcggaacttgtagtgagccaagatcacgccactgcactccagctggagtgacagagccaaactccgtcaaaaaaaaacaaaacaaaacaaaaaaaagacatgggagagatggtgtttttcctctccaccacctggggatacgatgagaagatggccacctgcaagccaggaagacggccctcaccagacaccatgtctgctggcaccttgatcttggacctcccagcctccagaactgtgagaaataaatgtgttttgtttaagctaaaaaaaaaaaaaaa

SEQ ID NO: 223688 - DNA, 1000 bp, Homo Sapiens
catagcttcatgttcagaagctcctgctgggctccagccagagtagtcacactgaagaaatgtccactcagtggctcccaacctatgtccccattcctccctcctgccacaaattccccaaaaattcacagaatcattgctctcctcaccgctcaaaaagggggtccagctgggccatcaggttgttcaggtgctgctctgtctgggccagctgttgtgtcaactgggccagctgttgctctggggataagggaaaaaagggggcagaagtggttatgtatcttctgctgtcccctaaactcccccgacccagcacagacttctgctaaacccacctgactgcagtggctgctgcttgcttgcctcctcgtggagaaccgcagtttcatctttcccctgttgtggaagaaggaaagggcagtactgaagcaacaaggttctgctccatcacctcagtctccagagccagccaagagagagtgcaatttgagatggagacagtgattgggtttttacctcagagaatcacaatcctagtctatctagctcctcacccagcatatgaagcgacgtcctatgtcccacacatggtcagtttgctgaaacacctccaggaatgagcaactccctccggtttgaaaaaagctctggtggctgagtgctgtggctcacacctgtaatcccagcacttcgggaagccaagggcctcctcccaaggagaacatgagaccacttcatatctggaactctagaaacactggctgcagcaatcaacctcctgtgccaaggctggccccactcttgtagcatggacactgctagctgggttcaaatcccagctccagcagttgccagcgctgggtgacctcgagtaagtgactactcctcactggattgtgggagaactaaatgtgatagtcattatttacagttcaccacacgctcttcacatccgttacctccctggatcctcaaaataacctcataatattggaaggcc

SEQ ID NO: 223689 - DNA, 1000 bp, Homo Sapiens
caagcgtaatatccaacagtttaaggtactataccacatggtaacctactgtttgccagcctgtaaaacacacacacacacacacacacacacacaaatattattagacaaattagatgacaaaaatcattaagaagtccaaactttttttttattactagcttcagcagacaaaaacttcctctgtcaaggtgttataaacatttaaaatcacattttccatttccatacatatctttttgttcatcagtaataactagttggccaactgactgtggtccatggactacacagtgagtagaggttctttaaaagaaggaggtatgaactgtatttctcattgcaaatacaaaataaaaattagttgttacctcctcacagttgaccatgattctgacttctaacattacaaattagtttttactattataaacctttctataaattggattatatatcatgtattctttcatatacagcttattaccttcatcatgtccgtgagtctaatcattagtacgtgtggcagaagtttatttatttttatccagtatagaattcaattatatgattatatcacaatttatccattctgctgttgatggacttttacattgtttacagcttagggtcataataaatcatgcttctgagaacatacttgtcttggtgtacatacatgtatttctcttgtgtatatacttaggagtggaatcgctgggtcttagagcatgtgtgtattcagtcagatactggcagacaattcagaactttcaccacatgagataattgacactgaagggaaacagctataaattttatcaatatggtgctggttcaaaccagagaattcatgctgcagggaaactcaatcaatgttattgtgaaaactgggaatgtgaatgtaatatatgtagaaaaacatttagccacagcccaaatcttccaggcaaatgtaataaacgtgacattgccgttagccaaaaaaaaaaaaaaaaaa

SEQ ID NO: 223690 - DNA, 1000 bp, Homo Sapiens
caagaaagcaaataaggggaaacatttttaacattccaagcaagagaaggaagaacgactattgggaggaggtacaccagagattgctcagtgtgcagcctgctacctcacttttggctctggattgcctggtggtagaagggaagagtattatgtagttagcaccttacatatttgatgctcaggaagaaagtgcaagaagatccctaatagaacattaaagattcttaaaagtttttgaagtaggctgcttggggtgaccagccccacccttacatctccatagttggtacagttagcttgtagcagctgaagctgatgcctggagatcactgtctgttggtctgatctcagtatcatactgagacacctcccctgagccttacctacttaaattggtaaccgtcctaccaaaatttgtcaattttaatcaagtgaggcaagttgcaagggagccagagatacgtgaaaaaagaaaagcagaaatactgatactttctaagaaagaagttgtaataatttctttggcacattgacttactgatatcttttgaaatgcatagatgactcttgtgaaccaaagagagcagtagtggttattccccggcgcaataaaaatgcctttgtgtatcacttgcgattgccagtcatttctgtgccagttgctttcattccagagaatggcctcattctccaaaaaaagatgatgattttagaagtaggatttcctaacaaattatgtggtggggagggacggcggggattttattcatcccgtctgagctcttcatacagtattaccattaggttttaagaacaaagatgggggaggagggagtagaaagctgagagtacgtagaacagctacaagacattagtgggtattcagattttgagctgtgtaaatatcaaacatcggcttccagccttaagagttatttgagcagagagttaaggaggaatgggagattttgtgaataaaatgttttgccaaaaaaaa

SEQ ID NO: 223691 - DNA, 1000 bp, Homo Sapiens
aaagtaatggcaaaaccacaattacttttttaccaacctaataacaatgtattagcaaatatttacaaatggtcaggtgatattcttgattgaaaagttgcttaacatttcagtaatataattttaattctaagtcaaaatacaaatgcatagatagtaaatgataaagtagagactcattatgcctgtctagacatcaaattgttggttattgtttacaatctagaaatgatgaagctctttcactaattcctaatatgaaatgtatgatggccaaagacaaattgtattgattataatcctttaaaagggggatttcctttctgaaatacatattgtattagcttcccagggcttccataacaaatgacgacaaacttgggtgcttacaacaattttcctcacagtctggaggccagaagtctaaaatcaaagtgtcagcagagttggttccttctggaggctctaaggaagaatccataaacagacattctatgtctgtttcctaatatcttgtggctgtgtgcaattcttggagttctttggcttctggacaaatcttgtccaagtattgcagacagcaatcttcactccagtctctgcctctgtgttcacacggcctttccctctgtcttctcttcattaccttttaaggacagtgtctttgaatgtagggcccaccctgatctagggtgattgtgtctggagacccttaattatgtttacaaagacccatgttccaagtaagtttgtattcacatgatctgagtagacattgtctcttcgtgggatacttttcagtccatgacagttactaaaggacattttaggatagtcttcatatgattgttaggagactacctttttagattttttttattatatatcaaattatagttgtatatacttatgagaaacaaagtggcattatgatttttgaatataatgtgggattaaataaagctaatctatccatcacctcaaaaaaaaaaaaaaaaaa

SEQ ID NO: 223692 - DNA, 1000 bp, Homo Sapiens
gtggagtgacaaaccgcattgtcctgtgcccgccatggcagaagcgcagcctttgtatggaggcccaaccgcgctcccgtctggagaagcggcttccggggtgtggctgccgggtcggctctggtccacagcacggtgccggggctgcaggttgttgagggctgtgactccgtggggctcagccaggctccagcagggtcagacgtgctgttaagagcaaagccacagacgatgacttgtccattctcagtggatgctccaggctgtgcctacacagcagtgctggtgacatgtccagggttccagggcccggtggcctgggagctgctttctccccactggctgggctgcatctggccctggctggaggccttgctttgaggggctgtgaccctcttcccccaggccctccccagccgacgacagccaccggagaggagatcggaacacgattgtctcagatgcagggcgctgtgcgggacgaagccgcaaggactctcgtatcgggcccttgggactcgggaggtgccagaggcggcggctgctctggacctcggtgttcactgacctttgtttcacttgcctctgctcgactccgagagcaggaaacccggccgtggcctggcagctccgcctcccatgcccgcacgctggggtctgtcttgtctggagcagtggggcacaccccggaggaggcgggggtcagggctgtcggccttggccccctgctggtcgctgtttcggggactcggggcggccagtaccaccgcctgaggcggggctcagcagcgttgcatgtacgggcctcgtactgcctcatggaaaatcctccggagccgccctccattgtgggttcctgagagtaggacacattgccatggttttgtgggaatcacgcgcccctgatggaacttttctgctgttgtgaagtacttttatccatttgcttctctgctgaccttgccaagttgttcgaggtggaattaaacacctcccagac

SEQ ID NO: 223693 - DNA, 1000 bp, Homo Sapiens
cccaggcaccaaaagacagaaaggtccccaccaggaaggccgagaggtcggtcagctgcattgaggtgaccccaggggacaggagttggcaccaaatggtagtgagagccctatcctcccaggagtccaagccagagcaccagggcttggcagagcctgagaacgaccagctcccggaggagtaccaacaaccgccaccctttgcccctgggtactgctagagaacaggtccaccctggctctgggactcgctgccaggggctgccacactcctgaatgccttaacatttcttccatggccccacaccatggcatccgggggtcttcgggaacccgggaaatggaataaagatgtttttggggtctgttcctgcactcacccatggggtgagctggttattttagcaacaatcatcagagtgacgctgatggtttggggcaccagctatacatcagccccagtgccagaccttctattcattattttacgcctcagagcaaggccctcagggagggtcatcctccatgttttgaagaagagactgaggttcagagaggataagaggcgtgaccaaggccacagagctatgggtgtcagcaccaggatttgaagccaggtgaatccgagcccttttcccatatcatctgtttgttctgttgtctaaaagcacactgcaagccgggctcagtggctcatgcctgtagtcccagcactctgtggggccgaggcaggcagatcgcttgaggtcaggagtttgagaccagcctggccaacatggtgaaaccccgtctatactaaaaaattcaaaaattacccggacgtggtggcgcatgcctgtaatcccagctacttgggagcctgaggcgggagaattgcttgaacccgggaggcagaggttgcagtgagccgagatcgcatcactgcagtccagcctggatgacagagtgagactccatctcaaaaaataaataaataaataaaaatgaaattaaaaaaaaa

SEQ ID NO: 223694 - DNA, 1000 bp, Homo Sapiens; identical to SEQ ID NO: 118323

SEQ ID NO: 223695 - DNA, 1000 bp, Homo Sapiens
accagagtcaactggtgtttgaagcatatggcaaaggcatcagaaatcaggcaagatctacaacttctcactgtagaggaccttgtagtggggatctaccaacaaaaatttctcaaggagccctctaagacttggattcgaagcctcctagatgtggccatgtgggattattctagcaacacaaggtgcaagtggcatgaagaaaatgatattctcttctgtgctttagctgtttgcaagaagattgcgtactgcatcagtaattctctggccactctctttggaatccagctcacagaggctcatgtaccactacaagattatgaggccagcaatagtgtgacacccaaaatggttgtattggatgcagggcgttaccagaagctaagggttgggagttcaggattctctcatttcaactcttctaatgaggaacaaagatcaaacacacccattggtgactacccatctagggcaaaaatttctggccaaaacagcagcgttcggggaagaggaattacccgcttactagagagcatttccaattcttccagcaatatccacaaattctccaactgtgacacttcactctcaccttacatgtcccaaaaagatggatacaaatctttctcttccttatcttaatgatggtactcttttcaatttctgaaaacagtaacaggcccaacttccttcttactacagtcatattaaacagatcacatcaatgacaaatgtcactactataaaaactacttaatttgtaaggaaattgtttcatagatttaaaaaaattgtggttggagagcatcttggcatttgtgctttttttcttgagggattgttctgcttcctggctgtatgatgggtatatcattaaagtttggagtcctatatgaacaaaactgacatttttagagttgtacttttgggaatgttatagattgatcattctttctcctgataataaaggtattgaatatctgttatgaaaggttct

SEQ ID NO: 223696 - DNA, 1000 bp, Homo Sapiens; identical to SEQ ID NO: 118324

SEQ ID NO: 223697 - DNA, 1000 bp, Homo Sapiens
agagtctcactgtcacccaggctgaactgcagtggtgtgatctaggctcactgcaacctccacctcccaggttcaagcaattatcctgcctcaggctcccgagtagctgggattacaggcatgtgcaactcacccagctaattttgtatttttagtagagacagggtttcaccatgttggccaggctggtcttgaactcctgaccgcaggtaatccacctgcttcggcctcccaaagtgctgggattacaggcgcaagccacccagcccagcttctttccattccttgataggcgagtattccaaagctggtatcgtagctgccctaatgttgcatattaggcggcgggggcagagataagggccatctctctgtgattctgcctcagctcctgtcttgctgagccctcccccaacccacgctccaacacacacacacacacacacacacacacacacacacacacacacacacacacgcccctctactgctatgtggcttcaaccagcctcacagccacacgggggaagcagagagtcaagaatgcaaagaggccgcttccctaagaggcttggaggagctgggctctatcccacacccacccccaccccacccccacccagcctccagaagctggaaccatttctcccgcaggcctgagttcctaaggaaaccaccctaccggggtggaagggagggtcagggaagaaacccactcttgctctacgaggagcaagtgcctgccccctcccagcagccagccctgccaaagttgcattatctttggccaaggctgggcctgacggttatgatttcagccctgggcctgcaggagaggctgagatcagcccacccagccagtggtcgagcactgccccgccgccaaagtctgcagaatgtgagatgaggttctcaaggtcacaggccccagtcccagcctgggggctggcagaggcccccatatactctgctacagctcctatcatgaaaaataaaatgt

SEQ ID NO: 223698 - DNA, 1000 bp, Homo Sapiens
aaatcgacatggaggttgagcacctctgtactcagccctctgtctgtccttctgaggacgcaacaagcctggttccctagagctcactttgaccctcaatatgttcataatttccctgctgcttctcccatcgttagacatctgccagtaagcctgctgagagaagcctcagcccactcatacctagagacgctgctggggaaggtcagcacacccaagaactttgggagtgtgtgtctgttttggtttgtgagaaagtagctgcccctcattctggccagttctttccagtagccatggggctggctacaagaagcaaaactgcccatgcaaagagaacacaggtcacttttcaaaacacttgcatcattaccctaaaaataggctgttatgcgttttgacaattgcgctatcctacactctgagggagttggcaacgcatgcggtatagtggagtgggaagagttgagactgaaagttaagagaagggttttcaagtcccggctcatctcaccccagtgactttgacagtgtgctcactctcagagccatggattacctggaacaaagtgcagattagtgcccacggtcctttccaggtataacatgctatcgttctttaattttattatatatacatacttttcttctgttttttgctttaagaactaaccccgatcaagagtattttctttagctagcttaaaaagaaaacatatattttatgtaaaaacacatacatggccaaatgcaatactgaagagacaatcatcctgtatcttttatggtttttcctgcttctgagtgtcgttctacaatgcccgttgacttattccattgcgtctctgctttagggtatggtttggtcgctttggttgtcatgagaaagagacattctccttgcagctacctccatgtgagtgaattcctggataaagcaagatttcctttcaataaacgctgtcacccaatgggaattttgaaaaaaaaaaaaaaaaaa

SEQ ID NO: 223699 - DNA, 1000 bp, Homo Sapiens; identical to SEQ ID NO: 118325

SEQ ID NO: 223700 - DNA, 1000 bp, Homo Sapiens
agatgaacctccgtttgatttcacagccttcagcacaggcaactgttactgagtctgcacgaacttagataatgaggtgcagggttatttgcatttaaattgcaatccagcacacgtgtgagaaagaagaggcactagtctaaaaggctgcattgcggggagagatgagacaggcagaggagggtggggtaaagagcgatttaacatctatttaggttaatgttcactttacaaaggtgatgggggatattttgttaggtgatagcagatgcttttcatttttaaacatagaattaaaattggatttgcttctctttaatacttcaacatattgaatttccctaggaaagtgactagctataatgaaaattcaagcgaaaagggaaaaagattgtaaatgcagatgaaataacttcatttttaagtacaaataatagtaggattggtgtatgtaggtttaaaattatagtgatgactagtcgaacttaatatacaatcagttcttgcaaatactttacacttagctgccattacacaacaaattggaattttccagctgttcaactatcatggactctgtacaggatagatgtgtataatggaaaatatgtactgcttctttctttgattgccactcaagatggaaacaccatgccaaggcattttggttatacacagatcattctaaacctgttattttggagaggtgtattggtttctttctcatttataaggctattgtatttttttttgtatgtgattcaggtgtatttatttgaagactatttgtagttataggaaaaccacacctacctgtattgccaaattctttgtaaactctccgtggcacttgtgctttcctggctgagagctctcccctgttgatacagctatggcaccattgtaattacagatgcacctttcaggagcatctccattaaatggttcatagatgatttaataaaaagaaacttctcagttgaaaaaaaaaaaaaaaaaa

SEQ ID NO: 223701 - DNA, 1000 bp, Homo Sapiens; identical to SEQ ID NO: 118982

SEQ ID NO: 223702 - DNA, 1000 bp, Homo Sapiens; identical to SEQ ID NO: 118329

SEQ ID NO: 223703 - DNA, 1000 bp, Homo Sapiens
gcctcagccctcaggctcctaactgctcaagccagaaggagctacaaagccaaatcatttgtcatttttctctggcagattgttttaaaatctccctcccctcttttattttaattatgccacctgtgttaatcctatagcctgcttctttgctttgtggattactgatttcaagttctataacttggggaaagttaggttgagtgaatgggaggacagacactgaatgtgtgttttggaaaaatggactctatcttcagattattcagcttctccacctatcacctctacaacttggccttcattggagaagttttagttggcttattcctggaacaagaccacctagaggcttttagccttgtcagcctgccctcttctgaggtttggaccttgttttaaattgtgtgcatggtgggcttgagactctcttgtaatggaggtaatgggactatcactgaggggttcagcctatccaggtaggctaccgttctagtcatacccatcacttaaattctgccacagtctgcacagacggttggtcctccaggcatattgtcctattaagccaaataggtggacatcatgggatggatgaggtcatcatgaaaacagatttactggatttatggacctagtatatactatgtaacagatggaaaactgaattttacaatctataggtacctttgaaaggtcataaagggtaaaagtctatagttttccagaaaataattcttaaaactgggttttatgtctagatttaaatcatgtatctgtctgtagtgcttcaaatgtggccaggtgtggtagctcacacctgtaattcccagcgctttgggaatttgaggcaagaggattgctagaggccaggattttgagaccagcttcggcaatacggtgagaccttgtctctaccaaaaaaaaaaaaaaaaaaaaaaaaaaaaaaaaaaaaaaaaaaaaaaaaaaaaaaaaaaaaaaaaaaaaaaaaaaacttggg

SEQ ID NO: 223704 - DNA, 1000 bp, Homo Sapiens; identical to SEQ ID NO: 118332

SEQ ID NO: 223705 - DNA, 1000 bp, Homo Sapiens
ccacagctgcactgcccctgagaagaccacttatgaagagacccacatctgctctgaatttttcaacagccaagcaaagaatttagggatgcctgtgcatgcagcttacaacagtgaactcagcaaaagcactgaaagtgacgctggctctgccttgttacagccccctcttgaacagcataccgtgtgtcacttcttctctctgaatcagagatgtagctgcccagatgcctacaaacacttgaactatggcccacactcttgccagcagatgggggactgcttgtgccaccagtgctctcctaccactagcagctttgtccagatccaaaacggcgtggcacctctgaaggccacacaccaagctgtcgagggctttgtgcaccccatcacgcacatccaccactgtccctgcctgcagggcagagtaaagccagccggaatgcagaattctctgcctaggaattttttcctccacccagtgcagcacattcaggcccaagaaaaaattggcaagaccaatgtacacagtcttcagaggagcatagaagagcatcttccaaagatggcagagccatcgtcatttgtctgcagaagcactggatcgttactcaaaacgtgttgcgaccccgagaataaacaaagggaactctgtaaaaatagagacgtgagcaatctggagagcagtggagggactgaaaacaaggcaggagggaaagtggagctgagcttgtcacagacggatgcaagtgtgaactcagaacatttcaatcagaatgaaccaaaagtcctatttaatcatttaatgggggaggctggttgtaggtcttgcccaaataattcacaaagttgtggcagaattgtgagagtgaagtgcaattctgtggactgtcaaatgccaaacatggaagccaatgtgcctgctgtattaacacactcggaactttctggtgaaagtttgttaataaaaacactataataaatgcagcattcaattcag

SEQ ID NO: 223706 - DNA, 1000 bp, Homo Sapiens; identical to SEQ ID NO: 118335

SEQ ID NO: 223707 - DNA, 1000 bp, Homo Sapiens
cacatcccagggcttatggtgcagcaggcgcttttttcaagacaggaatgaaagtgttaggaacatggcagaaaggtgacacctggagaccaaatgcaggatgaggagtactgcagaggtcacagggaagtcacagaacagtaatacgctagcaggggcatggggcatgaagaacagaagacaggaagcatttcagagactccaaagaagaaatcagggccaaccacagcttcccgggtcattcaccaggtgacaccactgccgtcatttcagcttctggccactgggaggcgctgctcgaaaggctttgccctgagactccaagaagctgcgggaaggacagcaggggccctggggttttagcctctggcccaggagttatgtgtccataaccaaagggagcacagtctgcacccagctctcatcccatcagagctgctgagactcttgcaggtacttccagaactggtttagcttgcctgcaggatcagaaaagtttgagaaaagcatctgcaaaatgctaaagagcagagcttaactcattgcctgtccccaccccatcccaggtcaccacttggatgaccccaggtccccgacccaacaacaacccctcccaagtccctaactccctcacttggacttgagacccttcacaacccccctcacttggacttgagacccttcacaacccagcagcgctccacctccaacttgacatcatgctttctggaaacttccccgtatgtcccactttcccacacttggtgccctggagcaccttccggcctctacatgctgtacgttcccctgtgagcaccctcctctcggcctctggccaacacagtcccacccatctgtgggtaacaagggggtgtgggtgttcttttcagccttgctaaactgtctgaatcaaggatcacaaactacagcctgcaggccaaatccagcccacagcctgtgtttgtgaataaagctttgttggaacaaagccacacccctt

SEQ ID NO: 223708 - DNA, 1000 bp, Homo Sapiens
cagatactacaaataattttcttaaaagtctaagatagcagaaaatacagtaaaaacacaggagaagaagctgagctattggaacaggaaatagaaggaactctagtttctgtttgaagtgaggattttctgaattatctaatatcatctaggttttctttaaaattttattttgttcttcagttcaagcatcttctcactaatgtttttcactataacagagaattcatttcaatttgagttggttctctcaatgatctattgatcattacaccctaactctccttccttggctcaaacaatattttccctataacaaaggcaataggacacaaaattcacatcctgctgggccttttttcatcaagtcagggtgatataaaaacattggaagtcttttcaccaaaccctgactttattgaatgctagtagaagatgtagaattagagacatctgatttgtttatcaccttagcagaaaaaccacagtccaaaagacaagcaaattaagaatggagcttaaccatgcctccattgggaagtctagactttgagccaggtacagtaagaaaaattagcctctgattcattaagtttgccacatgacttattttgatattttggatacattaactcacttaggagaattcagaaaagaatgggtgattaaagttcattacagctgaataaatgtgtctaaaacagactcttgtattctgaaagtacagtctacaactgataaaaccttatgattcttttctcccccattatgcccctatatatatcaagatttgggtactttattttagtagaaaatatatatcttttacatatgtatgtatttataaatgcatagatatatgtataaaaatttgtaagcgttagcggcattaattcaccaatgcatttggacaacttgatgtaactgactttattttatgtgactataataaaaagcataattttctcattctgtcaaaaaaaaaaaaaaaaaaaaaaaa

SEQ ID NO: 223709 - DNA, 1000 bp, Homo Sapiens
cagctgtgtgaatttggtcaagggacctaactctctgagttccaggttccttatctttcaaatggggatggtgatccctgccctttctacctcatagggatgtgagaaccacctgacttagtggatgtgaaagctgtttgtgatcagtaaagctaccacagatataagggtgttatgctgaatcctgagaagctttcaagaaccagagaacctgattgctgatgatggccttaaaggtggtgagggagatactgggggcagagcagactttgccagtgcccctcaggtcaaaccaagccaagagcaccctgtccccattccaaggggccagcagcactttggcccaaagtattttctttaaggtgccattccttcatgttttctcagtttggagggtgatgggtagagctttccagaaccttctccattccagaatctctgcccctgtgtaatctgaaggaaggctgtgccatctttgggcactgccaagggagttggggtgatgggcttctttctgcactggagtctcacatctgttagctttgacactcaagcaatgttggaaaatgcagggtgactgagttccctgcccagctttcgggatctctggcccccatccccttgtgtgtgtccctctgcccagctcctgctgtaattagctccacgtgtacccccttcactccctcccaccagctctgcagccagcctatggcaattatattttaagaggtgttcccaggacttttgggacctactaaaacaatgatggttattttagatgtgatgatttatatttatgtagagatatttctggaccactcaagctcttcgataccaaaatcaggagcatcttgggatttattaaattatgtaagaagatagcacagatatcgggatattattgtgtgaaaatgctgcttttactttgatgtgatctcattgatgtacacaaccaagttccaataaagtgctagaatgtgcaaaaaaaaaaaaaaaaaaa

SEQ ID NO: 223710 - DNA, 1000 bp, Homo Sapiens
cctggtgttggcgctgcctgccctgctgccggtgccggctgtacgcggagtggcagaaacacccacctacccctggcgggacgcagagacaggggagcggctggtgtgtgcccagtgccccccaggcacctttgtgcagcggccgtgccgccgagacagccccacgacgtgtggcccgtgtccaccgcgccactacacgcagttctggaactacctggagcgctgccgctactgcaacgtcctctgcggggagcgtgaggaggaggcacgggcttgccacgccacccacaaccgtgcctgccgctgccgcaccggcttcttcgcgcacgctggtttctgcttggagcacgcatcgtgtccacctggtgccggcgtgattgccccgggcacccccagccagaacacgcagtgccagccgtgccccccaggcaccttctcagccagcagctccagctcagagcagtgccagccccaccgcaactgcacggccctgggcctggccctcaatgtgccaggctcttcctcccatgacaccctgtgcaccagctgcactggcttccccctcagcaccagggtaccaggagctgaggagtgtgagcgtgccgtcatcgactttgtggctttccaggacatctccatcaagaggctgcagcggctgctgcaggccctcgaggccccggagggctggggtccgacaccaagggcgggccgcgcggccttgcagctgaagctgcgtcggcggctcacggagctcctgggggcgcaggacggggcgctgctggtgcggctgctgcaggcgctgcgcgtggccaggatgcccgggctggagcggagcgtccgtgagcgcttcctccctgtgcactgatcctggccccctcttatttattctacatccttggcaccccacttgcactgaaagaggcttttttttaaatagaagaaatgaggtttcttaaagcttatttttataaagctttttcataaaactggttgtagttgc

SEQ ID NO: 223711 - DNA, 1000 bp, Homo Sapiens
gacatccctgctcctgccaacttctcccagaggggctactatctcacactgagggccaaccgggtgctgtaccagaccagaggccagctccatgtcctccgcgtcggcaatgatacccactgccaaccaacaaaaattggctgcaaccatcccctaccaggacccggcccctacagggtgaagttcctggtgatgaatgacgaaggacccgtggctgaaaccaagtggtccagcgacactcgcctgcagcaagcccaggcacttcgggctgtccccggcccccagagcccgggcaccgtggtcatcatcgccatcctgtctatcctcctggccgtcctcctcacggtcctcctggctgtgctcatatacacctgcttcaacagctgcaggagcacttccctatcaggcccagaggaggcagggagtgtgagaagatacaccacgcacctcgcgttcagcactcctgccgagggggcttcctgaggggttccagaggggcccacgtgtccctccacctcctccctggcccaggctgcagagcctgagctgggacacgccctgaagcttctggaccctgagagagattgtttcttttctttactatttttttttttttttttgagacggagtctcactctgtcgccaggctggcgcgatcttggctcactgcaacctctgcctcacgggttcaagcgattttcctgcttcggcctcctgagtagctgggactacaggcacacgccaccatgcccagctcatttttgtatttttagtagagatggggtttcaccatgttggccaggatggcctccatctcttgaccttgtgatccgcccgactcggcctcccaagatgctgggattacaggcgtgagccatcaagtctggcgagagagattgtttctagatgagggtgggggtgggtgtccttagcccaaagcttgtgccagtctctatcagaaataaatgcccccaaaacctcaaaaaaaaaaaaaaaaaaa

SEQ ID NO: 223712 - DNA, 1000 bp, Homo Sapiens
aactttacaagagaaattgtgattatgttcttttcacctgtgggttataaaaaatgttgtattctgaagacccacaaaatatcaaagacattctgtagtttatacaccgtgttgcaaagtgtttactgtactatttcaaagcttctaaataaatataaaatatatatattatattatataattttcctaaaatgtggtacaactcagttggtttttaaatggatgcatacagtccacatcatacaataaaataaaaggtaattcagggtcccaaagacaaacttactaagaaaaaatcattaatagttttctcccaatttccatatcttactcaaccgtgtttttccttgtttaaaagaaaatgatgctctaagctacaaaattttgtcaaaaactcatattgaattttcaatgccaaagatgtagctattgatgttatcagacagagcactgactatgtactatcaaactatctaacaatctgcataagtctgattctatttctatgactttgaatttagaatcacttaaagcttttataaagaatcgataaattcacctgtatttgttgttagaaaaaaactgggtgtctgtacattttgtggtgtaaaatatgtaattgaagattactattttaagaagtcatcagtcatatcactcacacagaattttattttacatagttttgtgacttaattacacatgaatataaaatctataattctatatgaatatatagagatatagaaacatctgaactggtaaagaataactataaaatatgaaagctctaaatttaaaataaatttagagatagaatcatggtacattattgtttcagtattccatgtaaaaattttatagcttaaatgtagtcagtgtttgattaatgaaaaaattcttcatgagtcagccttcaaaagttaagcttgccttttacttttatgtcaacaatattaattattaaatttagtaagacgcaaaaaaaaaaaaaaaaaaa

SEQ ID NO: 223713 - DNA, 1000 bp, Homo Sapiens
tactcgggaggctgagacaggagaatctcttgaatccaggaggcagaggctgtggtgagccaagatgacacaactgcactccagcttgggcaacagggcgagaccttgtttaaaaaaaaaattcaatattggggttggaacatttcagttgccattgacagaacacccaattcaaattgactgaagcaaagaagggaatttattgcctctttcacattgaaacccaggagtggataacactggcttcaggcaaagcttgaatcaggactcaatctacaggccagcacctttctcttggccggatgtcctcagggctggcagatgcagtagactgcagtggacagtccccaccttgttactgctactacactttgctcctctggcccaaggcatgaggagagaggctgtgtcagaaactgaagctgttctcaggatcactgggctcttcttggcagaggggatgtctggcttgcctgaagggagtggctctgtaaggacgccttgatgctttcttcattaagattttgagcatttttacgtacttgagcttttttttttttttttttcaatttctagaggaactttttctctgttaattcctggaactgtattttgaatccttaaaggtgagccctcatagggagatccaaagtcctgtggttaacgccttcatttatagatgaggcagctgaggcctggggatgtgaacaacctgctcacagtcctcatttactggatttgacttcagccaggtgaactggaatgccttggggcgtggaagggcattaggagtgtttcatttgatatgtgaatgctcataaaaaaatgtcaaggaatgaagaacaacaactctcagtggtgcctgcatttataattatttatgtgaaagtcaaattcatgtacagtaaatttgttataagaatattcacaagaacactgttctgatatctctgattgtcatgtggatttgaatgtagcttgacagagaaaaaaaaaaaaa

SEQ ID NO: 223714 - DNA, 1000 bp, Homo Sapiens
cttttggggcctgttctaagtgcaaacccagcaagtttcacttgtcctgtccattagatacaactacatcttgcgggggttgtttctttcttgttccacaatgaattgcacatccatctccatcagagctgatagcctgttaataagcactggtctaacacagccaaccctcctccacagcgccatattaatggaggaggggaggaaggtgaaatctactgcatgggattcaggaaacagttgtggttggtcaggacggaagttggggtaagtttggttggtcagagggagttgtgctggagattgtgaaaaatgggttcttgaatgatctactataaggcagggaaggttcatttgtaagtagtaatgtgaactgaattgcattaagagtgtgtggcctttgttgtgatatactatgtattttcttatatgcatgagccaaactgttgcatcataatttagcactgatgtctgcttttattttgatcatctttgtccacccttattagttcttggctgttaaccgtagatagatcttgtaaatccagcaacctttggttgctgcattccccttggttcgattccacgcaaggagccacaagtgagaactccactgtccttagaagaaagggcatttttacttttgaaccaaaaagagaaaaaaaaatcagaagtgttgcatcttgaggcgaattaactgtaagacatttttaattatgactactgcaatttgacaccatttgaaataatcaattcagagacactaaagatttcacaatattcattggtattgtaaaaaaaaaatactattgtatggatttttgtattgctgttaagtattgttttgtgtgtgtgtgtgtgtgtgtgtgttggaacctcctggggacatgttatattttgaagtgattaaactatttaattgtgtgtctatattttggagtggaataatttcttcattaaaaaatgtttttaaaaacactaaaaaaaaaaaaaaaaaaaa

SEQ ID NO: 223715 - DNA, 1000 bp, Homo Sapiens
tattttatgtgagagaaagtgtgagcaaactaacttgacttttaaggctaaaacttaacattcatagaggggtggagttttaactgtaaggtgctacaatgcccctggatctaccagcataaatatcttctgatttgtccctatgcatatcagttgagcttcatataccagcaatatatctgaagagctattatataaaaaccccaaactgttgattattagccaggtaatgtgaataaattctataggaacatatgaaaatacaacttaaataataaacagtggaatataaggaaagcaataaatgaatgggctgagctgcctgtaacttgagagtagatggtttgagcctgagcagagacatgactcagcctgttccatgaaggcagagccatggaccacgcaggaagggcctacagcccatttctccatacgcactggtatgtgtggatgatgctgccagggcgccatcgccaagtaagaaagtgaagcaaatcagaaacttgtgaagtggaaatgttctaaaggtggtgaggcaataaaaatcatagtactctttgtagcaaaattcttaagtatgttattttctgttgaagtttacaatcaaaggaaaatagtaatgttttatactgtttactgaaagaaaaagacctatgagcacataggactctagacggcatccagccggaggccagagctgagccctcagcccgggaggcaggctccaggcctcagcaggtgcggagccgtcactgcaccaagtctcactggctgtcagtatgacatttcacgggagatttcttgttgctcaaaaaatgagctcgcatttgtcaatgacagtttcttttttcttactagacctgtaacttttgtaaatacacatagcatgtaatggtatcttaaagtgtgtttctatgtgacaattttgtacaaatttgttattttccatttttatttcaaaatatacattcaaacttaaaattaaaaaaaaaaaaaaaaa

SEQ ID NO: 223716 - DNA, 1000 bp, Homo Sapiens
ccctgcacccatgtgcctgggcttcccctttatttcccttttccatttaccccgtaatgtgtctctacagctaccttaccactgagccgtaagacaaatgtataggaagaagcaaagtctacagcacatagtctttgtaagggattgatgtgaacacttttttttggatgcactaaggagttatcaatacttctggctttatgagagctcttaaattttgtctaaaaaaccaaagggctgtgagtaagggagctatgtggaaagtgggactctgaagtgtattttgaaaattaatcgccaccctcttccaaattatagaattttttaaaaacaagctgtggccctttccactctctcctggcctctggtgctgctcctctctgccgcctttcctccattccatggcttgaaacctctgcctgatgtggctccttcctttttcccatttgtcaaaccctcttcaaaggaggaacagataagactgggtcagcctagtcatgcctcccaactgtggtggtatatgtgtacacacatacacagggtggatggagaagaggttgctgattaaaatacactccccctataaaggggaagggggagtgtgacactttctttccatgttcaagtgaaaataaataatgtaccctgcagcccttttcccctttgctttcttctggcttgggcaaagggcatcataggtgtaagtgaagtaattcctttttccttccccctcctccactcctacgcccactcccatgcttgggagaatggggctgggacatgcactgagtgttgcacttttatttaggtagggaggcatgttgaatgagccaggaggtctagaactggagcttagtccagctggtacaataccaactccccttctagttcccaaaggcgatgtccagacacagactttatgattattatatttttcaatgccagtgctgctcagccctcagcagaacttcagtttccatgaaataaacaatgactatat

SEQ ID NO: 223717 - DNA, 1000 bp, Homo Sapiens
gggaccccggttagtaaggaccgggcgcccagtggctaaggcggtgccctggtgaccaaggagagccagacctgttgctcaggccgagctcctggttgccagcgagttaccacgggaccagtcgcgtgtatggctgagactcattcccagtttccagggcccggtatttggacactagttgccaagtctggggcctggggattttagggaccagcggttgtgaccatctttcctgagcaccaagggcttccccttttgttgccaaaaaggtagttctcgcgcttgctaggctggcctctcttgcctccccttggccggggcaacaccagttactgtgagcatcaccctggtgtggtgagtcacctctagtcggccctcttgctgctgccaaccaaatcagtattagctttgagcactgcactgtttctccctcccttggacgacacaaagactagcatgaggcactctttgtggggggcagcccctatcctgggttccagcatggacacaggggtagcctggggcttatagagaaacagctggtttcccctaccctttcccggggaagaccccacgattggcctctagtcagcaaatggagataacagagtctggcctttccaatccccatctccttgccccccccttgcccccccccccgaaaaaaattgagcacttaaacccctcccttttggagggggccccctgaagcgtcaggctgggggcagtctggtacggaacatatttattgcctccatgcatgtgtgtgtgtgtctgtgaggactggtgtgcgtggacacgtctgaagcaggcgtgtggggctctttcagggaccacagaggagggagcagtttgcagtgcccagccaccctgaaatccccaataatggtgcctcagtgggccccagagttccagtgggagagtacggttccctcctgtctccctcttcttttccgcacctccatctttgtggataataaataaatatgcacaggttctg

SEQ ID NO: 223718 - DNA, 1000 bp, Homo Sapiens; identical to SEQ ID NO: 118349

SEQ ID NO: 223719 - DNA, 1000 bp, Homo Sapiens
catagatcgatacttgataattaagtatcctttccgagaacaccttctgcaaaagaaagagtttgctattttaatctccttggccatttgggttttagtaaccttagagttactacccatacttccccttataaatcctgttataactgacaatggcaccacctgtaatgattttgcaagttctggagaccccaactacaacctcatttacagcatgtgtctaacactgttggggttccttattcctctttttgtgatgtgtttcttttattacaagattgctctcttcctaaagcagaggaataggcaggttgctactgctctgccccttgaaaagcctctcaacttggtcatcatggcagtggtaatcttctctgtgctttttacaccctatcacgtcatgcggaatgtgaggatcgcttcacgcctggggagttggaagcagtatcagtgcactcaggtcgtcatcaactccttttacattgtgacacggcctttggcctttctgaacagtgtcatcaaccctgtcttctattttcttttgggagatcacttcagggacatgctgatgaatcaactgagacacaacttcaaatcccttacatcctttagcagatgggctcatgaactcctactttcattcagagaaaagtgaggggcttgtgaaacagattgttctacagatgaatctgtaagccagttacagtttgctttaactcatagacatcaatcagagagtgtcacagatttaaccttgatctaaagacaagttgtacccagagtatgtgaaaagaatgggacgacaagaatgtactggtttcttcctctaagaattgaaaggagttgaactgccttatgtttgggcatgtaactccaaaatactaggtagtataaggctttctcaatcagtgcaaaaatggaagatatataaagcaacaagttgtctgcatttgatcactggtcagattgcaaaaaaaaaaaaaaaaaaaaaaaaaaaaaa

SEQ ID NO: 223720 - DNA, 1000 bp, Homo Sapiens
gtttcagaagtcattcgggaagataaatccagtgcgctggccgcagccacctgcattcaaagcttggaccagcgggttcttgttcgggaggcaaatttccctaggaaaaagaagacagacttttctaatgtggtccaaatgcggatcactggtcagatggactctagaagcactgagctccctgtctctggaagtatttaagaaaaggctgggccaggcacgatggctcacgcctgtaatcccagactttgggaggccgaggcaggcggatcacctgaggtgaggagtttgagaacagcctggccaacatggtgaaacctcatctctactaaaaatacaaaaattagccaggcgtggtggcaggtgcctgtaatcccagctacttgggaggctgaggcatgagaatcacttaaacctgagaggcagaggttacagtgagccaagatcgtgccactgcattccagcctgggcgacagagcaagactctgtctcaaaaaaaataaaaaataatcagggcacagtggctcatgcctgtaatcccagcactctgggaggctgaggtgggtggatcacctgaggtcaggagttcaagaccagcctggtgaacatggcgaaaccccgtctctaataaaaatacaaaaattagccgggcatggtggtgcatgcctgtaatcccagctactcgggaggctgaggcaggagaactgcttgaacccaggaggcagaggttgcagtgatccaagatcatgccactgcactccagcctgggcaacaagagcaaaactccgtctcaaaataaaaagaaaagaaaagaatggacagtgtttgcagagagttgctcacgagtttccctctaatcctaaatgtcttcatgtctatcagtctgagcagacggtgagtagggcgggcacattctccaggcccttcttcctagctctgtggttgacctctcagcaagtgctatccaggctgggccaaccagacccacaattaactgagc

SEQ ID NO: 223721 - DNA, 1000 bp, Homo Sapiens
ccatttaccagaaagtgacgggcaaggagctgagatacgagggcctgatgggcaaacccagcatcctcacttaccagtatgccgaggacctgatcaggcgacaggcggagaggcggggctgggccgcccccatccggaagctctatgctgtgggtgataaccctatgtctgacgtatacggcgccaacctgttccaccagtacctgcagaaggcaacgcatgatggggcgccagaactaggggccgggggcacacggcagcaacagccctcagcaagccagagctgcatctccatcctggtgtgtacaggcgtctacaatcccaggaacccacagtccacggagcctgtccttggaggaggggagcctccattccacgggcaccgagacttatgcttcagtccagggctcatggaggcctcccacgtggtgaatgacgtgaatgaggctgtgcagctggtcttccgcaaggagggctgggctttggagtgagggcagtgcggtggaggtgagggggtgagcctggacctgtgggcgagtcccattggctgggctctggcctgatcactgggctcaggtcagggcttggttcccttgccacccttcttgctgccccatgagtgtggcattactggtcacttggaagaagacagtgactctttttccctgctgggtagcattttgtatggaacggttggaattttctgggcccagttcccacgtgcctttcgtggcagtctaacctcaggccattctcttcccctgtgtgcctcagtgtccttctcatttcagtagggacttctgaaatgggggaggcagtgtggaatactgtggatgtctgtgcagagcctttgccggcactgaaggcatgcagcctgtcggcagagtgtcttaacaccagatgctactttttactgtattgtagtttattgcccggagatgtggggctttttttttaaataaaataatcataataaatgttcatgatgctgaaaaaaaaa

SEQ ID NO: 223722 - DNA, 1000 bp, Homo Sapiens
ccacatagcaggtccacaaaaggtggctccgattcctccctttctgagccagggccaggtcggtccggccgcggcttcctgttcagagtcctccgagcagctcttccccttcagcttctcctgctcctcctcatcgggcttgcctgccttgtaccaatgtcagaggaagactacagctgtgccctctccaacaactttgcccggtcattccaccccatgctcagatacacgaatggccctcctccactctgaactaagcagatgccatctgcagaagtgctggtagcataaggaggatcgggtcataagcaatcccaaactaccaacaagaggaccttgatcttggcgaaagccctcggtgtggcagctttagccctcctccagatcacatgtgtgcaaattatggcttcagaggtggaagataaacagtgacgggggaacaaacagacaacaagaaggtttggaagaaatctggtttgagactctgaaccttagcactaaggagattgagtaaggacctccaaagttccccggactcatgaattctgggcccttggcccattctgtgcacagccaaggacttcagtagaccatctgggcagctttcccatggtgctgctccaaccatcagataaatgaccctcccaagcaccatgtcagtgtcgtacaatctaccaaccaaccagtgctgaagagattttagaaccttgtaacatacaatttttaagagcttatatggcagcttcctttttaccttgttttcctttggggcatgatgttttaacctttgctttagaagcacaagctgtaaatctaaaaggcacttttttttagaggtataaagaaaaactagatgtaataaataagatcatggaaggctttatgtgaaaaaagttgaatgttatagtaaaaaaaaaaagatatttatgtatgtacagtttgctaaagccaagttttgtttgtattgatttctttgcatttattatagatattataaaat

SEQ ID NO: 223723 - DNA, 1000 bp, Homo Sapiens; identical to SEQ ID NO: 118352

SEQ ID NO: 223724 - DNA, 1000 bp, Homo Sapiens; identical to SEQ ID NO: 118353

SEQ ID NO: 223725 - DNA, 1000 bp, Homo Sapiens
gaaacactcctccatgggatttgaacatatgacttatttgtaggggaagagtcctgaggggcaacacacaagaaccaggtcccctcagcccacagcactgtctttttgctgatccacccccctcttaccttttatcaggatgtggcctgttggtccttctgttgccatcacagagacacaggcatttaaatatttaacttatttatttaacaaagtagaagggaatccattgctagcttttctgtgttggtgtctaatatttgggtagggtgggggatccccaacaatcaggtcccctgagatagctggtcattgggctgatcattgccagaatcttcttctcctggggtctggccccccaaaatgcctaacccaggaccttggaaattctactcatcccaaatgataattccaaatgctgttacccaaggttagggtgttgaaggaaggtagagggtggggcttcaggtctcaacggcttccctaaccacccctcttctcttggcccagcctggttccccccacttccactcccctctactctctctaggactgggctgatgaaggcactgcccaaaatttcccctacccccaactttcccctacccccaactttccccaccagctccacaaccctgtttggagctactgcaggaccagaagcacaaagtgcggtttcccaagcctttgtccatctcagcccccagagtatatctgtgcttggggaatctcacacagaaactcaggagcaccccctgcctgagctaagggaggtcttatctctcagggggggtttaagtgccgtttgcaataatgtcgtcttatttatttagcggggtgaatattttatactgtaagtgagcaatcagagtataatgtttatggtgacaaaattaaaggctttcttatatgtttaaaaaaaaaaaaaaaaaaaaaaaaaaaaaaaaaaaaaaaaaaaraaaaaaaaaaaaaaaaaaaaaaaaaaaataaaaaaaaaaaa

SEQ ID NO: 223726 - DNA, 1000 bp, Homo Sapiens
acagttgcttaatttgtggatttctgatacaatgtcttctactgagccaccatcaaagcatgctgttactacttccaaaatggatataatttaaatatattaaaaatggtattgatggaacagtatttaatgcttaaaaacaaggaaatcctttcatctgtgacaacctggaggacatgttaagtaaaataagccaggcttagaaagacaaatgctgcataatctcactgtggaatcttaagttgaactcatagaaggagagaatagaatggtggttatcaagggctggtggggcagtggaggattgaggagatattggtcaaaatttacaaaatttcagttagacaaggcaactgagttcaagagatctgttgtacagcttggtgactgtaattaacaacaatgtattttgaaagtcactgagtaaattttaagtggtttttccaaaaaagcacataaggtaatgcacgttaattagctatattgagccattccacaatgtatagatatttcaaaacatgttacacatgataaatccagtttttctacgtcattttttaaaattatatttaatttttttattttgaaagttttttcacagatcttttttttagtattattaccttctgatatatgtgtcattattgaagaaccataccttttaaagttattattttgtaattaagtatgtcaacagtaaaaaataaccagtggccaggcatggtggctcatgcctgtaatcccagcacttttcggaggccgaggagggcagatcacttgaggtcaggagttcaagaccagcctggccaacatggcgaaaccccgtctctactaaaaatataaaaaattagccaggcatagtggcgcatgcctgttgtagccccagctactcaagaggctgaggcaggagaattgcttgaacgcgggaggtggaggatacaatgaacccgaggtcgcgccactgcacttcagcctgggtgacagagctagactccatctc

SEQ ID NO: 223727 - DNA, 1000 bp, Homo Sapiens
ggaagaacttagtgattaaaatcttgccccagcacagtaataaaaatcaagatttgttagtaacaatcttgaagagctaattttaataaaaataagaaaaattaatactatcatgttaatactattattgtcatcccaagaaaaaagatattttaaaaatttatttgaaaagttcattataagggctttattcatgcctgatttgtttacatgaggacttctgaaattaatccttaaaacaaacttcctgaagaccgaaaagttgaatgatttattgttacttatattaataaacttttcaagagaattttgtctttaaatatgggtgttttgtcatcatatttcttgtagctttatcccaatctggataaattgtaaatacctataaaataaattataaatacctataaaatataaagtaacatagctctaaaaggcttaaaatcaaacacaggtgttatttgtctgccctacccatagcaccaaattccattccctagaagaaactacttacatgtgcacacatgtagctaaataaagtacatatatttcagtcacttaataaaagaataaaggagaattattcaatctcttatacttctcctaccttcctcaatattcccaatgtggctgtattaaaaatttgggggaatccatatatatcttttttaataaccaagtaaatacttttcatttctgagccaaggaatatgctatgattacgttttttcctagagttaataattgtctattttttttccatgtattgtctttgtatttatgactaaatcttcccattctgtctgcaggtgggtatatggtaatgggattagagagcctttaattttctgctttgtatatttctatattgtttaactttgtaagaatgcccattacttttttaactagtaaaagcaatagaaataagttaatactatcatagtaatattattattgtcatcccaagaaaaaatatattaaaaagatatttgaaatttca

SEQ ID NO: 223728 - DNA, 1000 bp, Homo Sapiens
gacagacccttctggaagagacaagaggacaccaattgtcatcataaaacagggccatgagccacccacattcacaggctggttcctgggctgggattccagcaagtggtaaattggtatttgtaaaaagcaaacaaacattacaaggcagttatctcattgctgttttgggagaggaacgggaaaagctttttgcttatttgtcttttgaaaattaaggctgggcgcggtggctcacacctgtaatcccagcactttgagaggatgaggtaggcggatcactggggtcaggatttcgagaccagcctggccaacatggcgaaacctcgcctctactaaaaatacaaaaaaattagctgcgcgtggtggtgcacgcctgtagtccctgctacttggaaggctgagacaggaaaattgcttgaacccaggaggctgaggttgcagtgagccaggattgcgccaccacactccagcctgggcaacagagactctgtctcaaaaaaaaaaaaaaaaaaaaattaacctcaaccaaacgcctattttttaatgcttagttttggcttgaaattcttcttcacctggagttttcttacgttaatacattaaaataacctgaaggaaactttcgttatgggccaatattagctcttatggaaactgatttatatcttttttatgacctttcaaaagtaaaatactatgcataatctagaaagatttgtcagataggaaattttataatgcattagccattagtcagagttgttttttaacatgccagagaaaaagttgtaatgccttggaagttattctcttttctatagattgtgttcaaaagatgtgtatacttgcaataaggtttatgttaaggtggctttaacaattggttgctattttccttctttagtcaatatgactttgatgtcattaactgctaagtgttattttctaagaggaattttatcttttttttaaccttattaaaagcctttgaaaacac

SEQ ID NO: 223729 - DNA, 1000 bp, Homo Sapiens; identical to SEQ ID NO: 118359

SEQ ID NO: 223730 - DNA, 1000 bp, Homo Sapiens
ttcttattgccttgaaagttaaaaggaaagcagatttcttcagtgactttgtggtcctactaactacaaccagtttgggtgacagggctggtaaagtcccagtgttagatgagtgacctaaatatacttagatttctaagtatggtgctctcaggtccaagttcaactattcttaagcagtgcaattcttcccagttatttgagatgaaagatctctgcttattgaagatgtaccttctaaaactttcctaaaagtgtctgatgtttttactcaagaggggagtggtaaaattaaatactctattgttcaattctctaaaatcccagaacacaatcagaaatagctcaggcagacactaataattaagaacgctcttcctcttcataactgctttgcaagtttcctgtgaaaacatcagtttcctgtaccaaagtcaaaatgaacgttacatcactctaacctgaacagctcacaatgtagctgtaaatataaaaaatgagagtgttctacccagttttcaataaaccttccaggctgcaataaccagcaaggttttcagttaaagccctatctgcactttttatttattagctgaaatgtaagcaggcatattcactcacttttctttgcctttcctgagagttttattaaaacttctcccttggttacctgttatcttttgcacttctaacatgtagccaataaatctatttgatagccatcaaaggaataaaaagctggccgtacaaattacatttcaaaacaaaccctaataaatccacatttccgcatggctcattcacctggaataatgccttttattgaatatgttcttatagggcaaaacactttcataagtagagttttttatgttttttgtcatatcggtaacatgcagctttttcctctcatagcattttctatagcgaatgtaatatgcctcttatcttcatgaaaaataaatattgcttttgaacaaaaaaaaaaaaaaaaaaaaaa

SEQ ID NO: 223731 - DNA, 1000 bp, Homo Sapiens
aactgaccaaggcctgtgcacaggtagcccctcatgctgggctctggaccatgagctgagtaggaaggatagcagaggccaaccctgaccttcctggaagttgtttccttaacttgaatgttgagcttcctctaaagctttctcgtgtatgtcttctccatgccactactctgaggcctcctgtgttatgtgtgaacagttgtctttatgtgggaatgacgacttgattgggagtagagtctcaaggtcattcccctcttccctcaagactctctgaatgctgctccactgtcttttgtcttggaggtcactcagcaggttccttgcatttgctgcctggatgtgcagctggcaacagtgatgaattggtcactgctctttctctataactgggatagatgtcctgccttggggtcactaaaggggtgaccttgttccttgctttatgagcccattagcactttggttcaaggggcccaccaagtcttggacgggaaggcgctactggttttattgcccaaggttttgttattgcttctcttctgtgtccttctctttgttcagtgaagccaatatgtaagatactgtttttgtccccattcccctactcctgagctaggaggaaaaaatgtgaatcttaccagcagttccagccaaccaagtgattcttcttcattcttgatggggagaagtacatacaaagtttgttctgacagggcgcggtggctcacgcctgtaatcccagcgctttgggaggcagaggcaggtggatcacctgaggtcgggagttcgagaccagcctgaccaacatggagatatcctgtctctactaaaaatacaaaaaaattagccaggcatggtggcacgtgcctgtaatcccagctactcgcaaggctgaggcaggagaatcgcttgaacctgggaggcggaggttgcagtgagccaagattgcgccattgcactccagcctgggcaacaagagagaaactctgtctcaaaa

SEQ ID NO: 223732 - DNA, 1000 bp, Homo Sapiens
gtgggcagcccctgacttgaaccactcccacgtgctgcctcccttaggaggggacactgatgatgaggtctcggagccggcatccttccatccctgtcgagtcccctccacctcagctcccagtccttgtgctttttggagctaagcctgggatgaccaaattcaccccagctccttcattcacagggctggatgtagctgggattgagtccatgttatcggctcggtactcaacacaacccaagtttcatccgaggaaatgtccccgcagtggatgcagctcacatgctgaggaacacccagctctggacagagttcttataaatgtataaattaggctcagaaaccactgcattctgacctgctgtacagactgcccacactgctgacctgcctagcgagcaggacatcccttctgagccatctgctgctctctcatttcatcaccccaactgtcccttgtttttgatcaatggggaccagccactgccccaggagcactttagggctctcagttcaaactgaaggacagttgaactcagatggggttcatgtgggattctgggagctttctgggaattcagttggagtcaagtcaggatgctctcaaggacccctcgggctcagagccctaaagtgggccctggtgaagcagggtggtcctgcgtccacttcccaagcctgagccaagctcatcttcattgaatgtctcatttggccgaggaacaactgaactttgtggtttgctgtttagccttcagtttgctccgctgcctcctacccagaggtttgtgcgagcctgtgttgcagggttgtataaaaccaaggtacttcgttagttttgcccattcagccatggtcacgtgacatgcaaagtaatcttgctcctaattatagaaatgatttttcttttaattttttactttaccagactttactttgtactcagagaagaggcctcacatggctgtgtcacatataaatgttggactaaactctt

SEQ ID NO: 223733 - DNA, 1000 bp, Homo Sapiens
tccacctcctttatttccctgatgaccagaagtttgccatctacatcccactcttcctgcctatggctgtgcccatcctcctgtccctggtcaagatcttcctggagacccgcaagtcctggagaaagcctgagaagacagactgagcagggcagcacctccataggaagccttcctttctggccaaggtgggcggtgttagattgtgaggcacgtacatggggcctgccggaatgacttaaatatttgtctccagtctccactgttggctctccagcaaccaaagtacaacactccaagatgggttcatcttttcttcctttcccattcacctggctcaatcctcctccaccaccaggggcctcaaaaggcacatcatccgggtctccttatcttgtttgataaggctgctgcctgtctccctctgtggcaaggactgtttgttcttttgccccatttctcaacatagcacacttgtgcactgagaggagggagcattatgggaaagtccctgccttccacacctctctctagtccctgtgggacagccctagcccctgctgtcatgaaggggccaggcattggtcacctgtgggaccttctccctcactcccctccctcctagttggctttgtctgtcaggtgcagtctggcgggagtccaggaggcagcagctcaggacatggtgctgtgtgtgtgtgtgtgtgtgtgtgtgtgtgtgtgtgtgtgtcagaggttccagaaagttccagatttggaatcaaacagtcctgaattcaaatccttgtttttgcacttattgtctggagagctttggataaggtattgaatctctctgagcctcagtttttcatttgttcaaatggcactgatgatgtctcccttacaagatggttgtgaggagtaaatgtgatcagcatgtaaagtgtctggcgtgtagtaggctcttaataaacactggctgaatatgaattggaatgataaaaaaaaaaaaaaaaaa

SEQ ID NO: 223734 - DNA, 1000 bp, Homo Sapiens; identical to SEQ ID NO: 118363

SEQ ID NO: 223735 - DNA, 1000 bp, Homo Sapiens
ttttcagaatggttttttcaaaactttgttcctgaggtccgacattttcaacttaatgttctaagatttcatgacgaggacgtcagggcattgttacttctggacagttgcccggctcatccttcctctgaatccctaaccagtgaggatggtcgaataaaatgtatgttcttcccccataacacttcaaccttgattcaaccaatgaatcaaggtgtgatcttgagctgcaaacggctgtatagatggaagcaacttgaagagagtcttgtaatatttgaagaaagtgatgatgagcaagagaaaggagataaaggagtttccaaaattaaaatctacaatataaaaagtgcaatttttaactgggcaaaaagttgggaagaagtaaaacaaataaccatagcaaatgcatgggaaaatcttctttacaaaaaggaacctgaatatgattttcaaggcttagaacatggggattatagagaaattcttgaaaaatgtggggagttggaaactaagttggatgatgatagggtgtggttaaatggagatgaagaaaagggttgtctcctaaaaaccaaaggtggaataacaaaggaagttgttcaaaaaggaggagaagctgagaagcagactgctgaatttaaattatctgctgtaagagagagtttggactaccttcttgactttgttgatgccacacctgagtttcagagattccacttcacactgaaagagatgcaacaagaaatagtcaagaaacagttccagagtaaaatccattctagaattggtagctttttgaaacctaggcctcataatattaaggactccttcagtgggccttcaacttctggttctaatcattagattttgtgtttaaagatttctgccattatatgatgtaggccagctgtgaattgtcttgttttagcaactgacattattttgtatatcagtgcccatttatataatggttataaaatttacagtttgaaaataa

SEQ ID NO: 223736 - DNA, 1000 bp, Homo Sapiens
agaaataatgccctgggtttagtaacaaatacagctcaactattcttgaatatattttgaaaaaaaaatgtatgtaacttaccttttgtaaacgttccatttcttttttccctcatttttgactcttaaaggtgcaatttattactgaattgggatttctggcagcacagaactgctttttattttggggtctgtgagtttcttaggtattagcaatcttgcttataaaataagaacaccttttaattaatgagtgggtcattcctggtgcaattgtgatttttctttagccagaatgaatggcaaactctatttagagcaaagtaagtattagaaaaccctaggaactcttaatcaacgtttattacactttcattaaggcaaactacgtgaaagagccttggggaagttggcccatatcttactaagttgatcagatttctcgttgggctggaaatgtttcgctgttgtatattttaaagtaaattgcacctttgtaacatattgtattgacgaatgatcactaagattagctatatctatacagtcattagtttgacaagaaatagaatcctgtcagatgccaaagagtgggatttttatgtttaatgattaaacaccattatttattgacaatttaccctgtggaactgtattatttctaactatgaaataaaggggtgatgtaaacacacattgttgtgtggtgctttaaactaggtccactatcaacaggctacttactgttcaagaattccactgaagcacttattttaaggccctatttttcttaaacaaaacagtgacaacaacaatcaaaccatttacttttgatgctcattggcattttatgataaaagatgtattcatggcaatgatatgtattcaccctattaggaaacacaactggttacctatgagacctgttctgtccgtgtgcctacgttccttaataatagctaaataaaaatttgtagcttttaaaaaaaaaaaaaaaaaa

SEQ ID NO: 223737 - DNA, 1000 bp, Homo Sapiens
gagctggcagacctgaagcatgtgcatggcaagctgaagaagcagttccaggagaaggtggcagagctggcacatgccaaccggcgggtggagcagcacgaggctgaggtgaagaagctgcggctgcgggtggaggagctcaagaaggagctggcccaggctgaggacgagctggacgaggcccacaaccaggcacgtaagctgcagcggtcgctggacgagcagacggagcagagcgagaacctgcaagtgcaactggagcacctgcagtccaggctccgcaggcagcagcagaacgctcccctcttcgggaagatccgcagtgctcgctttggcaccgaggaggccgaggatggaaccagtgacctggacgaggacgaggacctgcaaatccaggtggcctagagcttcctgtggctgggcaggatgggccgccccatacctgcccagggtccaggctaaccagccactcaaactgatgcagtgcctaggctcactctgggaccagttcctgccacagccgactttcttctctcccagggatggcgtcaacagtcccacctaccaacgccctgtggaaaggaagcctatgttttatatatatatatacacacacgcgcgcgcgcgcgcgcacacccagaagtctttggacccatttggttttataaatacaggacagctccaaggcccagtccagatgacctcacccacccaggacttcatgcagggctgggcatgttgggggcagttgttggagccccaccctgggctgcctctctaggcttcgctgttcatcatacaatgcagtgaacccagttatttgtaataaatgaagttcaagttcttggggcatctgaaagtatggcagatgtgggcgggggttgtgggggacggcatcggcctgcacctgacgctgaaccagagctcaggaatgtcaagtaacttaataaatgagtgaatgtgaagaaaaaaaaaaaaaaaaaaaaaaaaaaaaaaaaaa

SEQ ID NO: 223738 - DNA, 1000 bp, Homo Sapiens
aaaccctatgaatgtataaaatgtggcaaagcctttagatgttccagagtcctcagagtccatgaaaggactcacagtggagaaaagccctatgaatgtaaacaatgtggtaaagccttcaaatattctagtaacctatgtgagcatgaaagaactcacactggagtgaaaccttatggatgtaaggaatgtggtaagtcgtttacttcttccagtgcccttcgaagccatgaaaggactcatactggagaaaaaccctatgaatgtaagaaatgtggtaaagccttcagttgttccagttcccttcgaaagcatgaaagagcttatatgtggtaaaaaacaacaacaacaaaacacctctgtcaatgtaagaagtgtgttaaagctttcagttattctagtttcattagaacacgtgaaaaaattaaaaactcaaattagagagaaacccaacacatgtaaggaagattagaatgtatgcaattttcctagttcccttctaaaacttagaaggacccgtcctgggaaagaacgtcataaaatacgaaaaatgtgttagaacactttattttcccagccgctttcaaatatatttttatcagtggttcattgttaaagaaggtgtctatactttagattttcagttttttgcagggaatcatggagctgagaatttcacagatactttataagccatagtacatgagcttaataggctgtgttttgtttctcatcagttaacataatttttgtctattcatttaaaaatttgttggatccctagactaagttgaaatgtatttctaatagtaggcaattttaattttcatgtagttgtttaattgttctctaattaatggaccaatgaaaaatgagttcatgtgtgtgtgtgtgtgtgtgtgtgtgtgtgtgtattctacctttttatgggaaaactacttttttgttgtaaagattttcttctgttttctttgctaataaagaattgttattaatttgc

SEQ ID NO: 223739 - DNA, 1000 bp, Homo Sapiens
gagcgatcgctattgctgaaatacgcgcgcacgcccacgctggatcctgacacgatgcacgcgcgcctgcgcctgtccgccgatcgcctgacggtgcgctgcggcctgctgggcagcctggggcccgtgcccgtgctgcggttcgacgcgctctggcaagtgctggctcgtgactgcttcgccaccggccgccactactgggaggttgacgtgcaggaggcgggcgccggctggtgggtgggcgcggcctacgcctcccttcggcgccgcggggcctcggccgccgcccgcctgggctgcaaccgccagtcctggtgcctcaagcgctacgaccttgagtactgggccttccacgacggccagcgcagccgcctgcggccccgcgacgacctcgaccggctcggcgtcttcctggactacgaggccggcgtcctcgccttctacgacgtgacgggcggcatgagccacctgcataccttccgcgccacgttccaggagccgctctacccggccctgcggctctgggagggggccatcagcatcccccggctgccctaggggccaggaccggcgtgacagcctccagaatgtcatggaagcagaatcgtacagtatgttcccttctgcatatgctgctttctcactcagcatcatttccttgagatgcatccaggctgctgcacgcatcaatagttcattcctggctgggcgcggtggctcacgcctgtaatcccagcgctttgggaggccgatgtgggtggatcacaaggtcaggagtttgagactagcctggccaagatggtgaaaccccatctctgcaaaaaatacaaaaattagccgggcaccatggcatgtgcctgtaatccctgctactcaggaggctgaggaaggagaatcacttgaacccgggcagcggaggttgcagtgagccgagatcacaccactgcactccagcctgggcaatagagtgagactccgtttcaaaaaaaaaaaaaaaaaa

SEQ ID NO: 223740 - DNA, 1000 bp, Homo Sapiens
ttgcccaaggtcgcacagctagtggtggagctggagtctgggcccaggctgtgagttccaggtctgtgctcatggccaccaggccatactgctcagggtgaatgcagctggtctctggccagtgcctggtgctctggcccctctcgtggagctactgcccatgatgctttcctagtgcctggttactctgcgagacttgagtctacctttggactgccttccttgggggtctgagatgaggccttatggcccagaggggaacttgattcaaaaatttgggattcatgtagcagagacagagctagactgtaaaggtcacaaactagctgtgtcaaggcccgtgatagccagaaagcggcagtttcagtccatatcaattgtgtgaccagggctagtcactttttacttctcagtgccatctataaaatggggataatagcactacctaccaagtgctgtgaggctcaaatgagccaaaggttataaacttgccttaaaactatagtcctatacaaaaattagctgggcgtggtggtgcatgcctgtaatcccagctactagggaggctgaggcaagagagttgcttgaacccaggaggcggagattgcagtgagctgagattgcaccactgcactccagcctggggacagagcaagactcttgtctcaaaaaaaacaaaaaaaacatatatactgctgtatcatgccaggatttatcagcattcccaagggagcttgcacggtactgaccgagtgctgagactactggtattcccagctgccatgtggcagcagcaggagctactagaatattctcagcacaggaatgaggcttccttggtttccatgtctgtaagggttactgatcacttaccttcttctctttcagacttgaatctgtagacatttctttattgatatggcaaattgcttgcagatatttttaaatgacagcaattttctaatatttggtttaataaaatgtgaataatgtccctttt

SEQ ID NO: 223741 - DNA, 1000 bp, Homo Sapiens
gatcacgaggggtcccaagtctagcccggacgagggctctttcttatacacactgcccgacgactccactcaccagctgctgcagccccatcacgactgctgccaacgccaggagcagcctgctgctgtgggccagtcaggggtgaggagagcccccgacagtcctgtcctggaagcagtgtgggaccctccatttcactcagggcccccatgctgcttgggccttgtgccagttgaagaggtggacagtcctgactcctgccaagtgagtggaggagactggtgtccccagcaccccgtaggggcctacgtaggacaggaacctggaatgcagctctccccggggccactggtgcgtgtgtcttttgaaacaccacctctcacaatttaggcagaagctgatatcccagaaagactatatattgttttttttttaaaaaaaaaaagaagaaaaaagagacagagaaaattggtatttatttttctattatagccatatttatatatttatgcacttgtaaataaatgtatatgttttataattctggagagacataaggagtcctacccgttgaggttggagagggaaaataaagaagctgccacctaacaggagtcacccaggaaagcaccgcacaggctggcgcgggacagactcctaacctggggcctctgcagtggcaggcgaggctgcaggaggcccacagataagctggcaagaggaaggatcccaggcacatggttcatcacgagcatgagggaacagcaaggggcacggtatcacagcctggagacacccacacagatggctggatccggtgctacgggaaacattttcctaagatgcccatgagaacagaccaagatgtgtacagcactatgagcattaaaaaaccttccagaatcaataatccgtggcaacatatctctgtaaaaacaaacactgtaacttctaaataaatgtttagtcttccctgtaaccttcaaaaaaaaaaaaaaa

SEQ ID NO: 223742 - DNA, 1000 bp, Homo Sapiens
aagaggtccacgacaaggtggttgcccgggacctggttggagccatgttgagcccactgccgcagccacgcccctctgccccccaggtgctggcccaccccttcttttggagcagagccaagcaactccagttcttccaggacgtcagtgactggctggagaaggagtccgagcaggagcccctggtgagggcactggaggcgggaggctgcgcagtggtccgggacaactggcacgagcacatctccatgccgctgcagacagatctgagaaagttccggtcctataaggggacatcagtgcgagacctgctccgtgctgtgaggaacaagaagcaccactacagggagctcccagttgaggtgcgacaggcactcggccaagtccctgatggcttcgtccagtacttcacaaaccgcttcccacggctgctcctccacacgcaccgagccatgaggagctgcgcctctgagagcctcttcctgccctactacccgccagactcagaggccaggaggccatgccctggggccacagggaggtgaggtgggctggatgccacacagatggtctccgtgctggctcactgaagagctgagcctgtggctggcctcagaatcaggctgggtgcagtggctcacacctgtaatcccagcattttgggaggctgagtgagaggatcacttgagctcaggagttcgagaccagcctggccaacatggcaacaccccatttctacaaaaaatttgtaaaattagccaggcatggtggcgcacgcctgtagtcccagctgcttgggaggctgaggtgggagaatcacttgagcccaggagttcgaggctgcagtgagccaggatcatgccactgcactccagcctggtccacagagagacactgtcaccccctttcccccacaagactggcagaggctgggcagcctggggctgatgaagcagagatgttcgctggatcccaggccctggcacccctcaggaaatac

SEQ ID NO: 223743 - DNA, 1000 bp, Homo Sapiens; identical to SEQ ID NO: 118372

SEQ ID NO: 223744 - DNA, 1000 bp, Homo Sapiens
tacaacatggctgtctacagagtgcgattcccacccacttccgcctagctaccggaagtttctatttgaaacccaggcggccgacttagccggtggcacgacagttgctgcagggaatcttttaaacgagagcgagaaggactgcgggcaggaccggcgggctcctggggttcagccgtgccgcctcgttacgatgaccagtgtggttaagacagtgtatagcctgcagcccccctctgcgctgagcggcggccagccggcagacacacaaactcgggccacttctaagagtctcttacctgttaggtccaaagaagtcgatgtttccaaacagcttcattcaggaggtccagagaatgatgttacaaaaatcaccaaactgagacgagagaatgggcaaatgaaagctactgacactgccaccagaaggaatgtcagaaaaggctacaaaccactgagtaagcaaaaatcagaggaagagctcaaggacaagaaccagctgttagaagccgtcaacaagcagttgcaccagaagttgactgaaactcagggagagctgaaggacctgacccagaaggtagagctgctggagaagtttcgggacaactgtttggcaattttggagagcaagggccttgatccagctttaggcagtgagaccctggcatcacgacaagaatccactactgatcacatggactctatgttgctgttagaaactttgcaagaggagctgaagctttttaacgaaacagccaaaaagcagatggaggagttacaggccttaaaggtaaagctggagatgaaagaggaaagagtccgattcctagaacagcaaaccttatgtaacaatcaagtaaatgatttaacaacagcccttaaggaaatggagcagctattagaaatgtaagaagaagcaagtggccagatggctccctcttgggcataaaatctcagaggaagctacttaggacatcatcttggccatgatcttctggga

SEQ ID NO: 223745 - DNA, 1000 bp, Homo Sapiens
caacttttaggaattacttggttttgcacattaagaggcccataagtttatcagctatttacaaccttcatttcatcacaatctgtgggcttacaaaaaaacaaaaacttttgtagttttgtatgttactcatcttcttacctgatatcccatgatgatcccatggtaggtcttctcacctcgatggtgcataacaggatgtgtttgaacctagtaggggaggaaacaggctttcttactctggtttaatttgaagtgttttaattgtgatgtcaaaaagttgtatcagatcaactaaaatggagagcaagacagagaatgaaaagagttgattttggacctcggaccttgccgtggctaaatctttaccttctcatagctgatgggataatgttggaaagaaaggttgtgaatcctttggccacattttgccctgcttctctcagggttaagggttctggaagaacattaagaatgagatgcaattgaaaatagtcattttgaatcctattgattattcaaaaattcaggctgattgtcttttatcagaggtaggattctgttttatagtatagaatctactttatcccttccttttaatagttcctttagacctgtgaaatttcttcactacatttaatagttctcctatttcccgctcccccatatcaattttccttttgtctccggggctgagtaaataaacatgttctgtcacaaatagcagcaccactttggattgattttgctctccaggacatcagcacatggccctgatcagcactaccacatccaaacataagtcactgaaaaacacttaatatttatgagttggtaatgacaagggacattgtataaagtactatttgctagattcatgcctcaaaagttattataaacagacctttattaaacacatcttgaaagatgtagaagtccctctatagtctagtatagtttacaatagagttgtaagaccaaaaaaaaaaaaaaaaaaaaa

SEQ ID NO: 223746 - DNA, 967 bp, Homo Sapiens
gcggcatgggcagtatccgccgccatcctcttccgtgaggcgcgctgagacccggaccggccctcctgagaggatgccggtgcgggcgcccgcggagagggacccgtcgccatgggccgtgtgatccgtggacagaggaagggcgccgggtctgtgttccgcgcgcacgtgaagcaccgtaaaggcgctgcgcgcctgcgcgccgtggatttcgctgagcggcacggctacatcaagggcatcgtcaaggacatcatccacgacccgggccgcggcgcgcccctcgccaaggtggtcttccgggatccgtatcggtttaagaagcggacggagctgttcattgccgccgagggcattcacacgggccagtttgtgtattgcggcaagaaggcccagctcaacattggcaatgtgctccctgtgggcaccatgcctgagggtacaatcgtgtgctgcctggaggagaagcctggagaccgtggcaagctggcccgggcatcagggaactatgccaccgttatctcccacaaccctgagaccaagaagacccgtgtgaagctgccctccggctccaagaaggttatctcctcagccaacagagctgtggttggtgtggtggctggaggtggccgaattgacaaacccatcttgaaggctggccgggcgtaccacaaatataaggcaaagaggaactgctggccacgagtacggggtgtggccatgaatcctgtggagcatccttttggaggtggcaaccaccagcacatcggcaagccctccaccatccgcagagatgcccctgctggccgcaaagtgggtctcattgctgcccgccggactggacgtctccggggaaccaagactgtgcaggagaaagagaactagtgctgagggcctcaataaagtttgtgtttatgccaaaaaaaaaaaaaaaaaaaaaaaaaaaaaaaaaaaaaaaaaaaaaaaa

SEQ ID NO: 223747 - DNA, 1000 bp, Homo Sapiens
gtggtttcttcagaatcatgaagttcttttgccagataaatattttgatattattttcctttttaatataaaggataggtttgaattgtacttaaaatgcatagcattattaaaaacaatcttttaaaatataatttataacatagattgaagcctccccttaagaaaccttaaagaaataagtatcctactcaaaaaaggaagtctgtttcagaactttagggcctttgaaatatttcctcaagcctatttcatgagatctacttggtttacccaagtcatgtttttaatagactgctaatatcaaaggagaatttttaaagccttaacaatgcctactttccattcactgttaacatggaataaacacaattcccaacatcttagatagtgtattatgcttccaacagacagtccctctcatataaagtttatgtaccctaaaatctaacccaataacctgtcccgttgccaatagattgagaatttctggtttgcttactctacagttattcaaatgagagtcacgcttttaaatttacagctcatcacagaaatcatcagctatacattagtaaaaataaggacatgaggttttctttcttggtttttgtccaagatctttgcaccttaatattaatggactgtttcaggtaaaagagaatgaatgtatgattgtgaactgtgaagagaatgatgcaggatcctatttagttactgaataatacagagtattcaatgcatgttgtatgtgccaccaagttactattaactgtttttggaattgaagactctgtatagtcaatagttgtgaaattcttctcaggctccttaaaccctcgctttgttgtaaaagctaaaataaacagcatgctatattgtaattgtatttcttgctgaccaaatctactaaatgctattgatttctctctgattactaaaacacattgtttattctcagtagtttcccccaaaatgcttttttctttgctgaacttaa

SEQ ID NO: 223748 - DNA, 1000 bp, Homo Sapiens; identical to SEQ ID NO: 118377

SEQ ID NO: 223749 - DNA, 1000 bp, Homo Sapiens
ggggaaggggtgtgtgacaagagccccctggagagatactacgactacagcggggccttccggtgcctggcggaaggggcaggggacgtggcttttgtgaagcacagcacggtactggagaacacggatgaaagtccatcacgaaggcaaacatggaccagatctgaggaggaagaaggcgagtgccctgcacacgaggaagcacgtaggacgatgcgctctagtgctgggcaagcctggaaatgggctcccgttcacaggccccaggacgagtctgacaaaggagaatttggaaaacgggcaaagagtagggatatgttgggttaagaatcagctctttcaaacttggggttttttttgggatgggggtctcaccatgttgcccaggctggtctcaaacccccagcctcaactgatcctcgcatctcagcctcctgagtagctgggatgacaggcgtgcacctggcagctttttcaaagtgttgatggtaatctgaggcaatctaagggagtcattttttaagtgactttatacagaaagattggtaagagccaaggggtagaagtggcataaatgtctaaagcagggaagtgacaggactttcattgttcttggctgaggagaagcgggagtggctgatggaagcacctaaatgatgcctttgtctgtgggaaggcaaatgatgccccagagctctaaccaaaggttttgcagccgccgaaaaacaggaaagttgggaagcgggggtaggactacactgaatcattaacagtgctgtaaactaccatgtggccattaacaatgacctttagggagttttcctaaacgatcactctggtgcgggtgtttggttttgttttaaaatagctttgcagtgaaagctttcatgaccatacaaattatcttttttcttcctatttccttgtagaggtttttttcctccttgtcttaaggtcataaaaatattgttatgtgggaaaaaaaaaaaaaaaaaaaaaa

SEQ ID NO: 223750 - DNA, 1000 bp, Homo Sapiens
cactaagcactgcacaaacaagcaatcaaattatgaataaacataataaatatcagccgtgcgtgactgagtgatggctgcagtttctcagtatccctaggttctagttggtgcagttgtctctgctgtcctttatttatgggagaaacataggcccaggctatccaggctgcagtggagcctggtgaactattctgggggccctgggaactattttcattgtttacaaaagcccaacagaaactgtgcattttcccttaagaaagcttcatgggctaactaaagcctcatgccattctgtgttcagtgccagtcatgacagctctgcttgttagcatactacttaaatataactagaatgattcaaaactcgggttctgtgatatgaggatatagataggttttcatctatttcctggcttataactcccaaaacccttgttttaggcttttgttataatgttgggcacttcgggcctcagaaaacagcaggctgtttctcagatcttctcctgacctcctttcacctgctgctttttctccccaaggcaggccatagaaactaaaagtataatcttcctttgcccatcttccagttggccataaaaagaatcctctgacctaccttgtctgattttaggtcatgagacccccatttcagaagggattctgccccatacctgagaggaagaaatgtagacaggccttgttggacttccccactccatctgtattagattatgcctcttttgtccaatcccatttctccagtgttgtccatgcttcaatcatccctatccaatgaggtctccataaaaggcccaagaagacaggtttagagagctttcggagaacagaacacttggctttgcaaagtggcacgcctggagagaacttggaagctccacgccccttctatacctcaccctatgcatctcttcagctgtatcttttgtgatatcctttataataaaccagtaaacggaaaaaaaaaaaaaaa

SEQ ID NO: 223751 - DNA, 1000 bp, Homo Sapiens
gtcctttagcaatcaatgcatttaatctttcctggatggctgccatgtggactgcatgcaaaatggaccattatgtggctactactgaatttctttggtctgtaccctgtagccctcaaagtctggacatttctttcgcaatacatccagaggatgcaaaagctctatgggacagtgtccacaaaacacctggggaggttacccaggaagaagttgacctattcatggattgcctttattcacatttccatagacatttcaaaattcatttatcagccacaagattagttcgtgtttcaacatctgtagcttcagcacatactgatggaaaaataaagattctgtgtcataaataccttattggagtgttagcatatttgacagaactggcaatttttcaaattgagtgaagccttatgtggactataagttatagattatatactcttattgataacttgcctaattgctatgctgaaagagactgcaggagaaataggcatctatctctgcatctgttttccccaccatgcctttggagttgccaagatggaagccaagaaggatctagaagaacaaagaatatggtagtagatgagccacagccaggtgcccatgtactaatcatgataacctgacatgccattctcaaaatgctgagttgttaatttcttgtcatctttaaatatatatatataggctgggcttggtggctcacacctgtaattccagcactttgggaggctgaggtgggtggatcatttgaggccaggaattcaagaccagcctggccaacatggtgaaaccccttctctactgaaaatacaataattagctgggcgtggtggcacatgcctgtgatcccagctactggggaggctgaggcaggagaatcgttttaacccagaagacaggctgcagtgagccaagactgcaccactgcactccagcctgggcaacaaagtgagactctgcctcaaaaaataaaaaaaaaaaaaaa

SEQ ID NO: 223752 - DNA, 1000 bp, Homo Sapiens
ggttcaggccattctcctgcctcagcctcccgagtagctgggactacaggggcccgccaccacacctggctaattttttaaaaatatttttagtagagacagggtttcactgtgttagccagggtggtcttgatctcctgacctcgtgatccacccacctcggcctcccaaagtgctgggattacaggcgtgagccaccgcgcctggccgatggtactatttagatataacactatgtttatttactaattttctagattttctactttattaattgttttgcacttttttataagagctaaagttaaataggatattaacaacaataacactgtctcctttctcttatgcttaaggctttgggaatgtttttagctggtggcaataaataccagacacgtacaaaatccagctatgaatatagagggcttatgattcagattgttatctatcaactataagcccactgttaatattctattaactttaattctctttcaaagctaaattccacactaccacattaaaaaaattagaaagtagccacgtatggtggctcatgtctataatcccagcactttgggaggttgaggtgggaggattgcttgaacccaagaggtcaaggctgcagtgagccatgttcacaccgctgcactcaagcttgggtgacagaacaagaccccgtctcaaaaaaaattttttttttaataaaacaaaatttgtttgaaatcttttaaaaattcaaatgatttttacaagttttaaataagctctccccaaacttgctttatgccttcttattgcttttatgatatatatatgcttggctaactatatttgctttttgctaacaatgctctggggtctttttatgcatttgcatttgctctttcatctctgcttggattattttaaatcattaggaattaagttatctttaaaatttaagtatcttttttcaaaaacattttttaatagaataaaatataatttgatctta

SEQ ID NO: 223753 - DNA, 1000 bp, Homo Sapiens; identical to SEQ ID NO: 118378

SEQ ID NO: 223754 - DNA, 1000 bp, Homo Sapiens; identical to SEQ ID NO: 118380

SEQ ID NO: 223755 - DNA, 1000 bp, Homo Sapiens
aaacctcattttagatctgacattggtagatagatggatttaggcaaatatgatgcgtttgtggggaatccacgtggttgacgttagaacctcccttctgcagactgttgcctgtcatctaagcgaattggaaatgctgagcttccataagtcagctgagttttaaaggtaaacgttatggctgaagtagtaaagcacctgaccacaaaacctcttgtaaaaacagccctgagtaggtatttccagggctccacaaagttgcttatgggaatcctgagctgcttttcaccatctcaagaagcctaagaagttatatatttaatcaggtagacaaaacagttcaaagcataaggtccatggtggtggaaaatggatgcaagtgattctaagtttgtggatttgtggatagcagagggatcgggacctcttggaggaaccctgggtaccaagctcccaggcccttcctctatcatggatgctgggtgactttgggaagtcaccacctcttcccaagcctgtttcccatatcacagatgtggggccatggcctcgatgatggtctccacaggtctttccacctctgtgagtccaagtcaggtcaatcagcaaggacccatctctgccctgggtcagctcctcagaaccaacccccagcatctctaaagcaaaagcctcacctcaagggctgctcagaagagagcaccttcagcatgagttgttgctggaagatctaataagctgtgtttcctgggaagtggtgctttacttagccctgtggacaacttctctatgcatctgtgtgagcagatgatcattgtattaccttttatcggtagtaagcttggaaaaataatttaagaatacaatggagaaatgtaaataagtatctatgtaaatttgtttaaaataaactgaatgtatttaatggtccatttatatgttcttttatgtaacatgtagtttaataaagttcctgtttatgagagtcatgtttcatctc

SEQ ID NO: 223756 - DNA, 1000 bp, Homo Sapiens
ctcacctggtttccaaactgcttttaacaatggtagtgctcctggaacaatccttccaagctcctctaaggacaatatttaattcagatactaaaggtaagactggttgttacttttgttttgttgtacaattagtactttatagtcacatgttgtatatattaaatagcccagttttattcagacttgtaaatagaactatttcaatgtagttaatctaaaaacaaaaaagaaaaccccagtcacgatttgcatgttctctgtaagcttcatccatgctggttattgcactgaatgatatattattagggcatgttaacagtataccagtaacagcactttatctcatttatatgaacacctttgaggtgctacttaagtccaagctctgatgtattattcatttgtaaagataaggtacaggaatgaaccttggtttaaaggtatttttatatgaaaatggtgtgttattggaagatgttaaaatgctaatttgagagaagtaggagtgtatctgttttatatgttgggatgtgaaatttattttctaaaattgaggagaaggaagttatatatttgcagaatgttttaaagtgaattgttgtaatgaagttcctgtgaacatcattatggttttgtacaaataggaacctctgatgtcattcttcaacgtttgttcctgtgtgtacaattgtactttgtatgaacagctttatcatttttataggctttccatgagttttgctgtaactactatggcttatttattttctttaatatttgtgaaagtcttactcctttgttagttttgtttctgcacaactactgtacttttccatatggaataaagactattaatagaaaaaaaaaaaaaaaaaaaaaaaaaaaaaaaaaaaaaaaaaaaaaaaaaaaaaaaaaaaaaaaaaaaaaaaaaaaaaaaaaaaaaaaaaaaaaaaaaaaaaaaaaaaaaaaaaaaaaaaaaaaaaaaaaaaaaaaaaaa

SEQ ID NO: 223757 - DNA, 1000 bp, Homo Sapiens
cctcactccagcggggctccctcactgcacagaacccaccccttctgtgtgggcactgctgaccacacagatgacccagacccaaagagcctggcagaagctctgtggttggagctgggctccgtctccaggtctggttcagggggatcaggaaggctcttttccacctgtggcttcactggccctttgagatttcctatctcaccgttacttcagttacccttgcagggggccagggagtcaagaatataccgtgttcctccagggtttaagccggccatgccttcccgagagcataaccaacttgacaggggtgcccagttaccccacaaactgaaggaaggagatccttcccccatccccaggagtgctctcaaccagcctcagaaagcttgagaagatggaccctttgcccaccagggttaattcctggtggggcagctcggctgtgatcagggcaaccaaacctataggaagccttccagtgtgagctggaattagactgaacatgtgcttgggcctgcctctccctagacgcagttgcggggcactccagggaatgaaccagctcaagtgtgtccctaacagcagcctggagctacccccaatccctcacagcctgaccctcctcattccatcagatgcatttgtagaatcggggcaaatttccttatttatttatggcccatgcctttcgccctcttcatcctgatcccgttttgctttgaagagaccccagtaaccaaaaaacagcctccagaagccaaaaccatgcctggatctcccatagcttctcctttgcttccaggagaaagttcactgaaaaaaaaatatcttctggcttcttgtgtgtacagagacaacagaactcggtggggaaacgggaatcttttctgcaccaaagctgcttctaaagcagaaagcagtggggctcttggtgtttcatgctgccttatttatattaaaggaagaattaaatcttgcaaaaaaaaaaaaaaaa

SEQ ID NO: 223758 - DNA, 1000 bp, Homo Sapiens
cacctcacaggaactgttcagttcccaccctcagtgggcaccacacaccccacttccagcagagtcctgcctcctcccaatccccacagacacacacattgatcctcctcctcagctccttgcagatgtagcccttgcccatcttcacagacacatacacccatcttggcaccctgattattcatacatgtctgcctaccacacacaaaatatatccttggttctatcttccttttcctcactgaattcccagctccccatccccataaatgcatacacatacatgcacacacacacgttatcccatgatgttccactgagaaaacaccaaaaaattttgaaaaagaagataaaaagaagaaacgaaaaagaaagcccaaggcaaagaagggggaaggaaaacaaacttcgccactctctcttctccttcctaaccctttgtctagagcaccacaccgctcacaaactctttccaaatgctcagttggctcccaaagttggagcctggcatgggcagggagcccacaaaactctaaccaaactggaggctggcatgggagaagtgcttctggttcactcttcctaccctctccctcctaaccctctccttgcctgacaggggagcccctgtggcctggactctaggggatgccgccaccagaaacccctctgccaatccctaccttgcaccctgggaactgcagtaacttattctcaaaggctttaaacacagagatcctctcagcggccgtgggcctgccccttgtcctagccctgccacgtgagggtccagcctccagggacaggcactgcccaccaacggcaaatccaaagttctttcaaaaaaaaaaactgaaacacaaccaaaaaagcaagagcgagagagagtacgtgcacacgcgcacaaaagagagaaacggacaccagaggaatgaactaaagaaaaacgtaaacttggaaaatacagaaaaaaaaaaaaaggaagaaaactcccatcaga

SEQ ID NO: 223759 - DNA, 1000 bp, Homo Sapiens; identical to SEQ ID NO: 118384

SEQ ID NO: 223760 - DNA, 1000 bp, Homo Sapiens
gtggtgtgaacagggctaactgcagcctcaacctgcagtgctcaaggaatcctctcccatcagccttccaaatatctgagactacaggcgggcaacactacggccagctaatttttaaattttacatagagatgaggttctcactgttgtccaggctggtctcaaactccttggctgaagtgatcctgtcgtctcggcttccgcaagtgctgggattacaggcgtgagctaccaccatgcctggcttccattgtctttgtgtgtgtgtgtgtgtgatggggttttgctcttgttgcccaggctggagtgcaatagcgcaatctcagctcactgcaacctctgcctccagagttcaagcaattctccttcctcagcctcccaagtagctgggactacaggcacccaccacctccattgtctttttactgcccaagttaaaatcctgtgactgtgtactggatctggcctgcggttgtcatatttattgatctgagtccaggcagtgtttttaagtgatatgagttagtagtgaaaattgaaaaggatattttacaaccaaatacaggttttctggtgtcttttgaaaaatccaaagatttggcaactcgacctaggctccgacaaaaccacagttgttgggagctgagccggagccagaactcacaattcaccgtggcccggccacccatccccaccactcccgtgggctcctgaccaagcaccacgtgccattcatcatggcttgcttttagtgtttttggtgtttatcttaaagtacagcgaagaagaaagggaagtatttcttagacccatgtctctgtccaaataggcctttccatctggcatttcccgctcatttatatgacttgctgagttcctatggtcatttgagtttgcaaacagtggtctgtagcactcaggttttctggagttggagagaaagggtggcaagagagaagtaaaagttggttttattttaaaaaaaaaaaaaaaaaaaaaa

SEQ ID NO: 223761 - DNA, 1000 bp, Homo Sapiens
cgaggcttggtgcccattcttttccggaatggactcagcaatgtcttgtttttcggccttcgaggtcccattaaggagcatctgcctaccgcaacgactcacagtgctcatctggtcaatgattttatctgtggaggtctattgggtgccatgttgggattcttgttttttccaattaatgttgtaaaaactcgcatacagtctcagattggtggggaatttcagtctttccccaaggttttccaaaaaatctggctggaacgggacagaaaactgataaatcttttcagaggtgcccatctgaattaccatcggtccctcatctcttggggcataatcaatgcaacttatgagttcttgttaaaggttatatgaaaaaaccatcagttaagtgccatttatcaactgaatagaccttctaagaagaatgcagtttggcctcttttttttttttttttaaaggaaatcccaatcttattatggaaagccatcaactgggtgtggggagtaggtcagagggttagtgaaagtccaggggatttctcctccaagtcctaccacacaaaggaaagtctcaagcctctattcaccccttctcaatcctcacaaaatagggggttgttcaatattgtcttcaatgataaaaactttgtggttaaaagtttctccttaggactagtgacaaagttaggcttatacttttttttttttttgaggcagagtcttgctctgttgcccaggctggagtgcagtggcgcgatcttggctcactgcaacctccgcctccagggttcgggcaattctcctgccttagcctcctgtagtcctagctgctcgggaggctgaggcaggagaatctctttcttaattggccaaatataagttggtgtcgtaactccaggccacagtgagttatgggcaaagcttttttccttaagcatcaacaaaataggataaaaggttccaataggaaaaaaaaaaaaaaaaaaaaaaaaaaaaa

SEQ ID NO: 223762 - DNA, 1000 bp, Homo Sapiens; identical to SEQ ID NO: 118385

SEQ ID NO: 223763 - DNA, 1000 bp, Homo Sapiens; identical to SEQ ID NO: 118387

SEQ ID NO: 223764 - DNA, 1000 bp, Homo Sapiens
agcatgagggctatcaggccaaaattcattattgtatttccaatacagtttgtcttgaatgtctgtctcttaaaccagtttttacttgtcagttttctctcagcaaacagtcttactattatgtggaatttaacttttcagagaaaatttccaaagtcctctaccttatttggcttttatctgtgtcttttggaaaaggagctgcatggcctcagtgcctccataaaaagcttaagttgagttcatgggagaacattaagatcgttttttttcccttttagctcggtaatctcatgtaccacaggtaatgaccaagcatctctgctagaggatgtacctctcataactcctgtgtaaaatgaggatcctgttggtgatcctcattccagtttccaaagcgagaggagccttctgagcagaagtatgcaagactgattctgtttggaacagtttcctatttggctgcattctaggaggcctcctgacttattcatagtattgtcgcctggtggcattggtgtggcgtagcttgtcctgctacttgctaaagttctctttctttgagaaaactgaggaaccagaatgcttagagttcataaaataatctctaaaccatgttaggttaaaacaaaatgaccatctcacaaaaacgagtttagttgaatgctcaatttcttacaaaatcttcatttaaggctgagtgtggtggctcatgcctgtaattccagcactttgggaggccgaggcaggaagactgcttgagcccaggagttcaagaccagcctgggcaacataggaagactctgtctctacatagaaattttattataaaagtagctggggatggtggcacacacacctgtagtcccagctactcaggaggttgaggtgggaagattgcttgagcccaggagtttgaggttgcagtgagctgatcatgccactgcactctagcctaggctacagagcaggaccccatctccaaaaaaaaaaaaaaaaa

SEQ ID NO: 223765 - DNA, 1000 bp, Homo Sapiens
ctttccgtcaaagcttttctatgtctatatttatcactgaatagtcccagtatggttttaaagcaagttttatgaatctcatttgcctaacaggaatctgaaatataacttgccaaaaacacacagttggtgtggaatggtcattagaacctggggctcctcttcacggactccctgctcattaagggattcagtggtccagagtctaagatcctattaagtgtttgattcaaacctctacccgaggaagggctgttaccttactcctggtcctggtttcaagctcattcctgaaattccagctggtttctctagcacctagtgttgtttacaagaaggccacggtgctcttagcattcaaactgcagatactaaacagatgctgtgatttattaaagagttagccatatttcaacaagaaagggaaatgatggctatattcattacttacctcaaagcatgctgcaagaaaattagttagttacttgtcatgctttgaaatctctggatgaaaggtgctttggaagcacaaaccattatcacttgtctcatagggattgtccccttgaacatccagcagtgttattttacagaagacaaattaactgaaggcttttcttttattacatctaaagagctctacataaacaggtaacattcaataggtaaacaatttttttccaatgcatgtaataaatattttcacttggtacttttatacaaactgacattgtctactatacatttttaaaagccattttactggtttggcatgcggtatggaaattctaagagagaaagttttaaggcaatgaatcacagatttaagttcatggaatttatggtaactttatctgtttatgtacattttcccctttgttaaacaattaacagcagcacactctgggaccaccagctattttccctctctttctgaaatctaagctttgtatttaattaaaaaacagaattcaacattaaaaaaaaaaaaaaaaaaaca

SEQ ID NO: 223766 - DNA, 1000 bp, Homo Sapiens
acttttttttttttaaagagtactgagtcacaacatgttttagagcatccaagtaccatataatccaactatcatggtaaggccagaaatcttctaacctaccagagcctagatgagacaccgaattaacattaaaatttcagtaactgactgtccctcatgtccatggcctaccatcccttctgaccctggcttccagggacctatgtcttttaatactcactgtcacattgggcaaagttgcttctaatccttatttcccatgtgcacaagtctttttgtattccagcttcctgataacactgcttactgtggaatattcatttgacatctgtctcttttcatttcttttaactaccatgcccttgatatatcttttgcacctgctgaacttcatttctgtatcacctgacctctggatgccaaaacgtttattctgctttgtctgttgtagaattttagataaagctattaatggcaatatttttttgctaaacgtttttgttttttactgtcactagggcaataaaatttatactcaaccatataataacattttttaactactaaaggagtagtttttattttaaagtcttagcaatttctattacaacttttcttagacttaacacttatgataaatgactaacatagtaacagaatctttatgaaatatgaccttttctgaaaatacatacttttacatttctactttattgagacctattagatgtaagtgctagtagaatataagataaaagaggctgagaattaccatacaagggtattacaactgtaaaacaatttatctttgtttcattgttctgtcaataattgttaccaaagagataaaaataaaagcagaatgtatatcatcccatctgaaaaacactaattattgacatgtgcatctgtacaataaacttaaaatgattattaaataatcaaatatatctactacattgtttatattattgaataaagtatattttccaaatgt

SEQ ID NO: 223767 - DNA, 1000 bp, Homo Sapiens
cagatattggaaaaaagacaacattgatgttatttgtgctctttgtttggcctagaatgtttataaagtggtaacacaaccattctggaaatgtatcccatagaagctgatgtttaacatatgaaaaaaaaagtattgtctataaaatgtttcttcagtactttttaaatgctgtgtattgggtgtaaggtatttgtcatcttacattagtaaacccaataagccaagttgaaggtggattatagtaaatgtacaactgtgctcactaggcttcaagtaaaaagttttcctttcatctttgactgtaagatgtcaaagggaggcagcctgcttgaacaggaaacaatacacaaaaggttgccaactcgcatgagctacctccctcttttcataaagtatttttgacatatctgtcaacccacttgactgtgtgggtgcattgagaacacaaagtttcctagacacacaggagaagtagcttaaattcactaatattaatttaaaaagcagcatgaaccctctacttataaacaagggtttggtgtttttaaagtgtgtatacatacatacacatacacacatgcacatatgtcaaatataatttttttaaaaattgagtggcacatcaaagaaatgtgaaattaaaaagaattcttccaaaaagcagcttccattaaaatgggaattcagtatgcacatactgaatgcatatatgtagaaccatacagaatttaggtggataagggctagaaattttgagcaacaaaatttgtcacttgaccagattttatcttcaaaaactgtattctactccttctcctttgctgttgaggtaacttgcatattatatgtattctgtatactcagttcataaggttatttagcacaaagtatagcagcttcacctggagagctgcttttgctcagtaaattcaacttccatgttttatctttttttgttcaataaaaacatttaatgtcaaaaaaaaaaaaaaaaaaa

SEQ ID NO: 223768 - DNA, 1000 bp, Homo Sapiens
gaccaaaaagataacaaataccaggtatggcaagttgtgaagacagcacattaaaacatacctaatttcacagtattcctgtcacgacagaatgttagtattcatctctttgaatcatttgctcaaataataacattccaccttttcctgctgtatcacaggaagtgatttgcattttttttcagttcatctgacttatgttcacagaaccgtatcagcgaccaagaaaataggactgtcagaagctgccagttattactgaaccattaaatacttatatactaagaataaataaaatatacccatgtgaaataataattggattatggataacaagagagtgaaagccaaagcactttctgtctactgtactcttctaaatggaattttaaaagtcatagctggctttacgtgttgtcattattagcattataaatatgcatgatagtataatccagtaatggttgaagaatgtattttacttaaagagggatttttttttttaagtcctgaataagtctactggaagaattattcttctgggtgaaaaagcttttgtttgtgttcttattttaaataatcggagtcaatttattaaaatgttcttgaaagtactattcccagggattttaatgcacaaaccatattgtgacaagagatgagcctctgtactgtaaataagaaatgaagtagagaaatgttaaatattttatgagtttagaatatagtaaataaaaggtgatgtaaatgaatgctgcacaaacggtgttcatgatacttttagtagtactttaggaaaaactacacattctcagaagctcttgatgtctctaatgaagggggggaatgctgttaatgagaacagtcataaatttttagcatataattacaagaacagcctgtggatatgatcacttaaatgattttgtggtgattcgtgccattgcttttttatttaaaagaaaattttgtaattaaatgcctttttctaaattaaaaa

SEQ ID NO: 223769 - DNA, 1000 bp, Homo Sapiens
gctgcccatctatacggagctctgccggccctccaagcgcaggatgcaggccgtggccaacgtgtccattggggccatgttctgcatgtatgggctcacagcaacctttggatacctcaccttctacagcagtgtgaaggcggagatgctgcacatgtacagccagaaggacccgctcatcctctgtgtgcgcctggccgtgctgctcgcggtgaccctcactgtgccagtcgtgctgttccctatccgccgggccctgcagcagctgcttttcccaggcaaggccttcagctggccacgacatgtggccatagctctgatcctgcttgttttggtcaatgtccttgtcatctgtgtgccaaccatccgggatatctttggagttatcgggtccacctcagcccccagcctcatcttcatcctccccagcatcttctacctccgcattgtaccctctgaggtggagcctttcttatcctggcccaagatccaggccctgtgctttggagtcctgggagtcctcttcacggccgtcagtctaagctttatgtttgccaactgggccacaagccagagccgcatgtctggacactgataaggcctgctggcccaggtccctgtgcgcatgcacatggaggggtcagggccgctccctagggtccctcctgcccaacatgtggaggtggctggttcccatgaacgtggttgtcagaggcgggggacagcagaggctgcagactggcccacttccctcctccccagggatgccaagcttggatcatggccctaatcccaaccccaaccccatgggaggaggaggaagaagaggaggaggaggaggaggaggaggaggaggaggaggccaggtcctggtggagcctttgcccagcccagtcctctctgcctcctcctggctgaagctgtttgtcaggattaccctcgggctaaagaggaaaaataaagatgttgagctaccaaaaaaaaaaaaaaaaaaaaaaaa

SEQ ID NO: 223770 - DNA, 1000 bp, Homo Sapiens
ggagatctgcatttccagaacgtcaccctagaggacacgggatactacaacctacaagtcacatacagaaattctcagattgaacaggcatctcaccatctccgtgtatacgagtcagtggctcagccctccatccaagccagcagcaccacagtcacagagaagggctccgtggtcctgacctgccacacaaataacactggaacctctttccagtggattttcaacaaccagcgtctgcaggtcacgaagaggatgaagctgtcctggtttaaccatgtgctcaccatagaccccatcaggcaggaggacgctggggagtatcagtgtgaggtctccaacccagtcagctccaacaggagcgaccccctcaagctgactgtaaaatatgacaacactctaggcatcctgatcggggtcctggttgggagtcttctggtggctgcacttgtgtgtttcctgctcctccgaaaaactggcagggccagcgatcagagtgacttcagggagcagcagcccccagcctccacccccggccatggaccctctgacagctccatctcctaggaattgctacactctgacacaaacatttactgctggatcgaccacaaagcagatgtggcttcttaggttcctctgggagctgctcctgtgggttgatggagcgtccctgaagcccccagccctggggatggggaaggacatggagcctgagccagagaaccagctctgagtcctgaggagacacaggcctggggacaggaagggatgggggtccctgctgaatatatagagacctcaacagactgccccgggctctgggtgggccaaggcgaaggcttcccatcaccacaggaagtgggggcttgcagggaaagtgaatgggcctatggcccacccggggtcacctggaaaggatctgaataaaggggaaacttcctctcaaaaaaaaaaaaaaaaaaaaaaaaaaaaaaaaaaaaaaaaaaaaaaaaaaaaa

SEQ ID NO: 223771 - DNA, 1000 bp, Homo Sapiens; identical to SEQ ID NO: 118397

SEQ ID NO: 223772 - DNA, 1000 bp, Homo Sapiens
ttggggatgataatccaaaagtatttcacagcactaatgctgatcaaaatttgctctcccaccaagaaaatgtaaaagaccacaattgttcttcaaaaacaaacaaaacaaaacaaaacaaaattaactgcttaaatgttttgtcggggcaaacaaaattatgtgaattgtgttgttttcttggcttgatgttttctatctacgcttgattcacatgtactcttttctttggcatagtgcaactttatgatttctgaaattcaatggttctattgactttttgcgtcacttaatccaaatcaaccaaattcagggttgaatctgaattggcttctcaggctcaaggtaacagtgttcttgtggtttgaccaattgtttttctttctttttttttttttagatttgtggtattctggtcaagttattgtgctgtactttgtgcgtagaaattgagttgtattgtcaaccccagtcagtaaagagaacttcaaaaaattatcctcaagtgtagatttctcttaattccatttgtgtatcatgttaaactattgttgtggcttcttgtgtaaagacaggaactgtggaactgtgatgttgtcttttgtgttgttaaaataagaaatgtcttatctgtatatgtatgagtcttcctgtcattgtatttggcacatgaatattgtgtacaaggaattgttaagactggttttccctcaacaacatatattatacttgctactggaaaagtgtttaagacttagctaggtttccatttagatcttcatatctgttgcatggaagaaagttgggttcttggcatagagttgcatgatatgtaagattttgtgcattcataattgttaaaaatctgtgttccaaaagtggacatagcatgtacaggcagttttctgtcctgtgcacaaaaagtttaaaaaagttgtttaatatttgttgttgtatacccaaatacgcaccgaataaactctttatattcattcaaaga

SEQ ID NO: 223773 - DNA, 1000 bp, Homo Sapiens
ttggattgtctgtggcctggtttctttccagtagtacagtaatagggtagattgaaaacaagtatttacttctgattctgcctgcatttagtgtgaaatgctcttaaggtattgcttctaaaaagcaaattaagcagttaagtataaagtccctgcacgaggatttcaaaataaggcttttatgagatttttattaaaaattgcaatagccatcacaaatctgagtttttctaggggtgagagaaaactgtattgtgatgagctagattagttgtagttccagaataagaacaaaaattcagagttgtgtggtgcccatcattgagtaaatgaaccctaaaaatgaataagctaatgaactagttcatggaattatttctgatggtcttttgacctgatgctgccatactgcagtgttaccagctccccctagaaaacggaactgtttaaaaacacagcaagttacagaaaccattttattctacagccattggggtacttcagtttatgggatgtttttggaaacttctgctttgggagggatgaagatcattgataaatgttatttgctttctgagttttggggtcatttcattgcttatcaatgaagggcagacagaggagagaatatctcaagtcttttctgataaaaggcttgcttgagggagcttataacttgcacctagagggtttacccactttgtggatttgatttatccaccaaccacagcaaccaataatgtcaagattctaggagtttatgaaagaggctagtatgttttcattttgagtcagacattcttttctcattctcaaatctgttttaaatgctccaattttaaaaatgccaatgaaaattttataatgcttctgtagtaaccatatgcagtttactttgaatttaggaaaacagttttgtatgatgaaatattgtgcagaatctgtaaataaggtagcttaaaaattaaaaaaaagtctaattaaaaaaaaaaaaaaaaaa

SEQ ID NO: 223774 - DNA, 1000 bp, Homo Sapiens
actgcctcccatgacaccattacagtccactggatctcggatgatgagttcagcatcagctcctatgagcttcagtacaccatattcactggccaggctaacttcatcagcctgtataattcagtagacagctggatgattgttcccaacattaaacagaaccattacacagtgcatggactccagagcgggactcgctacatcttcatcgttaaagccataaaccaagccggcagccggaacagtgaacctacccgactaaaaacaaacagccaaccctttaaattggatcccaaaatgactcacaagaagttgaagatctccaatgatggattgcagatggagaaggatgaaagctctctaaagaagagccacaccccagagaggtttagtggcacagggtgctatggggcagcaggaaatatattcattgacagtggctgccactattgggaggtggtcatgggttcctcaacatggtatgcaattggcattgcctacaaatcagctccaaagaatgaatggattggcaagaatgcctcctcatgggtcttctctcgctgcaatagtaacttcgtggtgagacacaacaacaaggaaatgctggtggatgtgcccccacacctgaagcgtctgggtgtcctcctggattatgacaacaatatgctgtctttctatgacccagctaactctctccatcttcatacttttgatgtgaccttcattcttccagtttgtccaacatttacaatctggaacaaatccctaatgatcctgtctggcttgcctgccccagattttattgattaccctgagcggcaggaatgcaactgcaggcctcaagaatccccttatgtttctgggatgaaaacctgtcattaagtttcaggagagtatataattcactggctctctagttcagcagttcttcccctcctacacctaagttagcgttcaatatacgagacacaaaataaagtttgtttgaagcatccaaaat

SEQ ID NO: 223775 - DNA, 1000 bp, Homo Sapiens; identical to SEQ ID NO: 118402

SEQ ID NO: 223776 - DNA, 1000 bp, Homo Sapiens
actgttccttggttttagagttgggtattctttcaaaagtgaatttaggcacatgcatgtacattgtatttataaagattatatatgtagtttccaaggaagaaacaaagacctatacagtttagactttatttgtttggtgaacgtgctgttgtgtttggcatagctagagaaatgtaaggtaaaaggctcactttgttttccagtgggtccagagtcttctctatacccaacatatgtttactttatgaacttaaatggaaattaatttattgtagactacatctctatttggaatgatgaggtaaatgtataccttagcattttctttaacaaaaatgttctgtgtgtcaggaaagaggtgtgagagtggtaggcagcctgccgcaaacacacggatggctccccccgccacgaaggttgagaacaaagccagggggcccagaggagcaatagccctgggccacaagcgtgggtaggcctttcacgtattccgtctgcacaggcaaccaaggccagtagaaagctatggctgcaaaaccctggggtggacgatgtttgatgattagacggtcatctctaactactaaactaatatctgcattcttgttaacataaatctctccttggctattttaatagccacagtcccaaacttcatcccagcttagatttctcagcactgaggtaaactctgcattgtcatcccagcgtacacctttaatgttttattgatttcactggcactgtatttggacctgtccttgtatatgtagagacatatgtggcttcattggtaatttacaagcaaaagatgacatgacgtgacacctgtatgaaaatgtgatgattgaactccctgtgtacagcgagtgaattaaaatgtctgcctctccagacatttcttaatgattccacttaatagactctatgtgtgctgaatgttcctgtgtacatatgtgtgttaaataaaacaattgtattgaagactgtttttctc

SEQ ID NO: 223777 - DNA, 1000 bp, Homo Sapiens
cccctagatgtggccttcctccgggcagtacacgagaaagtcaacatcatcccagtcattggcaaagcggatgctctgatgccccaggaaacccaggccctcaagcagaagatccgggatcagttgaaggaagaggagatccacatctaccagttccccgaatgtgactctgatgaagatgaagacttcaagaggcaggatgcagagatgaaggaaagcatcccttttgcagtcgtgggatcatgcgaggtggtgagggatggcgggaaccggccggtgaggggacgccgctactcctgggggaccgtggaggtggagaacccacatcactgcgatttcctgaacctgcgacggatgctggtgcagacacacctgcaggacctgaaagaggtgacgcacgatctgctctacgagggctaccgggcccgctgcctacagagcctggcccggcctggggctcgcgatcgagccagccgcagtaagctttcccgccagagcgccacagagatcccgctgcccatgctgcctctggcggacaccgagaagctgatccgcgagaaagacgaagagctgcgccgcatgcaagagatgctggagaagatgcaggcccaaatgcagcagagccaggcccagggcgagcagtcagacgccctctgaggccacgccccgcccggccttacctcggctccgccttcagtcggcctcttgtccaatccccgcgccccacactgcccagcgccccccgggacctccgcgggtgccgccctcgcgcgggctagggggaggttctcccagcctgagtccgtagccccgccccggcgctggtcccgcccacccagacaccgcccacttcccggcccggggcctgcacaatctccgaccgcatcactgtcttccggagtcccccttcttctcccagactctgtcttcaataaaaactgagcttcccgcggccaaaaaaaaaaaaaaaaaaaaaaaaaaaaaaaaaaaaaaaaaaaaa

SEQ ID NO: 223778 - DNA, 1000 bp, Homo Sapiens
cttcgagaaaatgatttcattgaaattgaactggaccgacaggagctcacctaccaagagttgctcagagtgtgttgctgtgagctgggtgttaatccagatcaagtggagaagatcagaaagttacccaatactctgttaaggaaggacaaggatgttgctcgactccaagatttccaggagctggaactggttctgatgataagtgaaaataattttctgttcagaaatgctgcatccacactgactgaaaggccttgctataacaggagagcttcaaaactgacttactaatgcagcagggacttttatcactgagtattatgacagtgtgcatcacctctgggccaaggacaagccattgatctaaatgcctcagatgcccgggagggcctctggtgccactgcatagtatatactaacatcattctgccaaggtaggaagcccctgacccccaagcagtggtgccactcttccaagcctcttggtgcacagtaaacctattgcttgaagctttgaacagctgagaagtggtctggagaggcagaagctgaaggttctatatccagtgtgttttatgtccagaatgtaagagagttgtctaagcagcagctgagagagagcggagcctatttctagccactcctgttgacagtgcacctgaagggctgggatgcgtttttcttggtgttgcatgctcacaactctgctgacattgggaacttatgagagaggaagactcgggaaagcacagatactggacagatggattctggtgtggggaaagcacagatactggacagatggattctagtgtgacttgtgactgtgaggtttcctataacatatttataaatgttactcaggttaaaagtatttaagaatacagttaactaattgtaaatatgctgttaaccaaaagagctttccctccctcactttttcctttgtaaacactcatgactgctaaaaaaaaaaaaaaaaaaaaaaaaaaaaaaa

SEQ ID NO: 223779 - DNA, 1000 bp, Homo Sapiens; identical to SEQ ID NO: 118408

SEQ ID NO: 223780 - DNA, 1000 bp, Homo Sapiens
atttgaactggccaaccagtctttaaaacactggactagaagagataatgattgaaacatttaaaaaaaaaaagtgctccattcgcaggagcttttcctgtcctgtggttttccagttggtgaccaccatgggaggtcgctggctcggctcactcccttctcccacccttgagaatgtggagaactcccatggagaggcagaatggcaggaggtttcatgtcccgcgttgcatctcctcctgaaagaaaagcagtgatacctgaataatgctggctctccgattgatcctgtgaggatgaatttgcatttccagaatccttgagcatggattagatgtttcctgggaggtgccttgagtaccattatgtgcaagctacataattaaaacatttttcttagtttccctgggaagcttttcttgactcacagcccaggttcttctgcccaacacaaaaggagtgagttggggtctttagtctcttcttattgggtagctcttgctttaatattctgtttggtgagtgtaagggattctgcaagggacagggggcctgactacccagtctttgacttgtatcctctcccctcttcatacactcctgctgaaaaatgttaatccaaatacacatttaaacttagggtcggtccttattctgatttgagtattttaatgtctcagtgtgctgatttggtagttggaagaattattcttctggaggtctgttagactacatcctacactgacttcagaaaacagtctgtcagacaaaaaggccttatgtcaccactggtacctcagtttcctcatcccatttacagtttttctaactccagggtagtgtttagtgttaatatttgggatatattttttttcaaaactgtttttaagtagtttgtaatttgtaacaaacttgtaacctggttgggactgatattgtcatagctatgataaactttggatattagcagaatttgggaaaaaaaaaaaaaaaaaaaaaa

SEQ ID NO: 223781 - DNA, 1000 bp, Homo Sapiens
agtagagtgaaatatttgtccctgtacaaagtggcctgaatgactgttggagttcctgtgtctggttttcctgtttattccctgtgatgcccagagtaatggcccatccaaagatgtccagatgtccatgtgctagtctccagaacttgtaactgtgttgttatgtggcaaaggggaatgaaggctgcagatggaagtaaaatagattatgctggattatctgggtgtgcccaattgatcaccggatccgtaaaagtggaagagaggcagatcaggatgtcagcgtgatgaggtgtgagacagacttgacttgctgttgctgggaggaaggggaggtcatgagccaaggaatgtggacagtctcttgaagctggaaagtgtgcattggacatctggaagccagaaaagacaaagaaatatccagaaaggaacaaagtcttgtggacaccttgattttggtccagtgagaatatgtttgacttgttaacctacaaaactttatgatgataaatttgtgttggtcgtaagccactaaatcacagtaatttgttatagcagcagatagaaaactaatatactccctttaatataaggttatctactattgattctttctaggattttagcttctggtctgatgtgggtttacagccagatcacccggcttgaattgcttacagtgtgtagtctcatggtaaaggcgttctatgagtgaagtgtatatactttaatgtgtgtatactgtcacattttgactattttggaagactttcacctctgtttcttgtctttgaggctgatgaatgtgtttctaagttataaatttaatattaagggattcatgtattattgttattgaatccaaacaatgtgttaagtaatatttagggccagaaaaatcttgtacagaataatgatttctcctaatgtaaatcttggaaagggttttgttcaacttgagaaatattaaattttttattctaaaaaaaaaaaaaaaaaa

SEQ ID NO: 223782 - DNA, 1000 bp, Homo Sapiens
tcagcaccttctcacagtttgggaacatatattgctgtttactccagtgtaaaaatgaggtgccactggatctgagtgctacacgaacacaagtagaagtattaatttgttgaaatgtgttgttaccaaaaagactgaaaagccccaaagtctagatataaagacctagacttcggcacgcgaaatcccagctatgctacctcttatttacctgaaaggaggacacgcaggatgggcagtcatgctggtgactcttgtactcccttgagggacattgggggggggggggcgtggtcccaggcaggatgcccagtctttgagctgagattggaaggcagtgaggctgagggtgccaagatttccccagggttcacccagaggggaaggggctacatgcccccagctgtgtgcagggaggacacatcagcccactaccgctgccaacaccaatgcctaaaacttgtttcatacattggggttttctatatatttcagctgggaaaagcttacatttaaccttttgaaaaaataaatacgtgattagcctcaactaaacattgctgactataaagacagtatattcaccatgtcgctggcaatatgtcattgcgtaacaccaaataaccccccagaagtagccagaggccagtttgaacatcacaattctaagtgttttagtaactatttctggcgtgagtcaacagatcatgtagatagagtcaattattgtttgtggagtttttcagctataggggaggggaactattaaaatccatttgtttctattcaataggtaataaaaattagttgtccctgggtttgggaaacttaaatgcccattacagccctggggaagggttttctgtcttatggagtgagtcttagcatttaagttatacagttgctgccttaaaatagtagcctgctacaatgacttctttgggtagccattttcataagaaataaaatacaagatatgagtaaaaaaaaaaaaaaaaaa

SEQ ID NO: 223783 - DNA, 1000 bp, Homo Sapiens
atattgacacccccagctaaagcacaagcaccttagtcacccctcctctccccccgcctcctggcctgccaccccaccccagcgtttaccccaaagcacaatgccctggtcacttggcaagcggctgggcctgacggaggccgaggggcagaccggggctccagccagacccctgaaaggaaggtgctcccccacttccaggccttagttggggtgggggggccagctcctgggcctggggtcttctcacccccacccccttgtcctgggtaggcccctgcctgcccctctctgccttttcctcgggtgtccctcctcgagcccctgtggcattggcttgggtggcagagcccacttgtttcagggaccccaggaggtgccccctggctcccaggactgtgtgtgggtccggggggtgggggggtggggagaagggtcgggcagggggtgcaggggaggaaactcctcaccaggagagccaaagacagggttgtgccttaccccaggagccacccctgtaccccccttgccctgccattcaccctccacccctacccctgggcggcctgctgctttttccttctcttcctcccctgccctgagctgcatggttcccccaccctgggcagccaggaaggaatctgaatggagaatcaccaaccaccagagaaaaaagactgtggggccctcccctgccaactccccttccctggccgcccactcaacccacacctctttcacgcaggacaggctgcccaccctgtccacgtgaagtgccaacgccctccccaccctgggccgagcccccacccctccctgggcccccaagtgagattgcacatttaactactgtaaggagaggagcggcgttggcaaatgtgaaccatgagaatatcagtgatactgatgagaataaactaaacgcctttgtaacaaaaaaaaaaaaaaaaaaaaaaaaaaaaaaaaaaaaaaaaaaaaaaaaaaaaaaaaaaaaaaaaaa

SEQ ID NO: 223784 - DNA, 1000 bp, Homo Sapiens; identical to SEQ ID NO: 118411

SEQ ID NO: 223785 - DNA, 1000 bp, Homo Sapiens
cctggccgcacttcaccgcggtgagtcttcgcagcctgcactacacggcccgccgcccctccgtctacacaagctccacgaggcccctgccccctgcctgtaacagctgtgcccgcacagcctcagccaggcccccaacttcccggcggcacgtctattcaggaaacctaggcccagcctttgcgggtcactctgcgggcaacatccctgatcctgtgacttctgcctatgcagcctcagctcagccccagacccagccagcctgtcctttccccagctcctaatacctctacctttccagccaaggcatggaccctgacacctgccaacagcccctctgccctcacaacctcagcctggccttcatgacttctctacccaagtcacaacctgtcaggctgcaccacctcatcctggcccgccgaaccttgacctcacccctgcccctacccgaaggccctctgtccacacaacatgaacctaggctgtgaccttttgccttcacaacctctgtccagtccttaatcctgtgttgcaattctctgtccagacaatctcaactctgaggttgcttgtttcgtccctgactccttaacccctgatgacaactcttatgccagcacaactttgacctgatgacctcatcccagcccttgatcgccatcactaaaacaattttagaatcacacctggacaatctcgtgctacctacatactgccactccatttcattaagctattgactagcacatccatctcggcctatagttggctttgtcctcactctctcactttgggccactgtcccctccctgatccagggttccaccaccaggagggcagacccagccacataccacaaccacccccaagcctcacactcccttgtctttttccagactgttaagccaagacctgccaggagtgtctctaagagatccaggagggagccacccccaaggaccctgccagccacagacctccaataaagacagcatgg

SEQ ID NO: 223786 - DNA, 1000 bp, Homo Sapiens
ccgagtttccgaccttctcaggctcccttcttgatcacaggcccctagaaggggtcccctctgcgtgccacaggcctccgaggggttgtgcagcctctagggctgttgcgtccccgtctttccagcccctcccatcacaaatacagaagaaccccttctaccaagctccctcgtggccacgaggccacgaacccggccagccctgacgccccactgtcccctcacagccctcagctctactcccggtcacactgggcgaccacgggggcctgctcagcaccctcacctcccaccccctgagagctggggcaggctcctgagatgtctagactggtgcgttgtggtctccggtggggccagatccccagaacagggagagactgcatacaagtctgagtggcagaagcttcaagtgggtgaggatcggtgtgtgagacccgcgagtgggcacgtctctgaatgtgaggtctcgggcagcacgtgaggtagaacgagtgtgagcgtctccacgcagtggctggccccgtggccggggcgtctcttgcatgctgttggtggtccttccccagttcctatctcccacccgcctggttccagccccatcccctctcccactgagtcacaggtttgagattcccagagaggccaaagacagctacaggaagtaccctgggggctcagctgagagagagtcacagaaaggccagagggtctcaggaaggtctggaggtcacagctgggctcacagaagctcttgggccctggcatcctgggtgaccggtgttcttgggtattggggacaggacagagagctcattctataaccacagttgtcttttaaaggccaccctctccagccccttgtcccccctgtgctgtgagcccaagtcccttgtgaccactcagtgtcccgtccccacccctccagccgcagtttttggctacaaactgtcacagtatacattggtaataaaatatttccccaaaaaaaaaaaaaaaa

SEQ ID NO: 223787 - DNA, 1000 bp, Homo Sapiens; identical to SEQ ID NO: 118413

SEQ ID NO: 223788 - DNA, 1000 bp, Homo Sapiens; identical to SEQ ID NO: 118414

SEQ ID NO: 223789 - DNA, 1000 bp, Homo Sapiens; identical to SEQ ID NO: 118416

SEQ ID NO: 223790 - DNA, 1000 bp, Homo Sapiens
ctgcgacggctcccgtgagtgcccaccacacttgcccatggtactgccaaggcccccccgcgcaggctcacagcctctctgtcccccagcagcgaccgagggagagctccccacgcacgagcaggtcttcctgcagccccccacctcctctaagccccgaggccctgtgctgccgcaggagctggaggagcgcaggcagcttggcaaggcacacctgaagcgtgccatcctggggcaggaggaggcgctgcggctgcacgccctgtgccgcgtcctgcgcgaggtggacctgcttcgggctgtgatctcccagacgctgcagcgctcactggccaagtatgcggagctcgaccgtgaggatgacttctgtgaggctgccgaggccccggacatccagcctaagacccaccagaagccagaggccaggatgccacgcctgtcccaggggaaggggcctgacatcttccatcggctggggcccctgtctgtgttctcagccaagaaccggtggcggctggtggggcccgtccacctgacccgaggagagggcggctttggcctcacgcttcggggagactcgcctgtcctcatcgctgccgtcattccagggagccaggccgcggcggctggcctgaaggagggcgactacattgtgtcagtgaatgggcagccatgcaggtggtggagacacgcggaggtggtgacggagctgaaggctgcgggagaggcgggcgccagcctgcaggtggtgtcgctgctgcccagctctagactgcccagcttgggggaccgccggcccgtcctgctgggccccagggggcttctaaggagccagagggagcatggttgcaagaccccggcatccacgtgggccagtccccggcccctcctcaactggagccgaaaggcccagcagggcaagactggaggctgcccccagccctgtgccccagtgaagccagctccgccctcatccttgaagcacccagggtggccgtga

SEQ ID NO: 223791 - DNA, 1000 bp, Homo Sapiens
cagagatttttctacgtttttattttttgcctcagagggatgggattggggaggaggggatgggcagcggagggttgggggcatggtctgcaggctcatctgtgtccgcctttcactccactaatgctgtctcagtgttttctctctctctctttcgagcttgcactccggtacccgacccggcgccctggcccatcccatgccggggggccagtggaaagaagacaggccgtccagcccgtgcccgcctgcggcgggggcacccagcaagcccgcccaccgcccgctgcctcacctgcttcgccacagactcttgttcccagccccttggggcctccgtgtttggggtgggggagctgcttagagactgtgcccgtcctcggccccccaccctgaagtgccagcaccaccagcaccagatcctccgccgccacaccgcactgaggacacgccggccgggccgcctcgtctcaagttgtataaagttgtctccgtgtcccctcctccctctgcccccagtgtttcttctgatttttttttcccctttccctccctccctctccgcattcttcccttggttcagcacaggtaaaacggttcccctccctccctgccttcatggatcaccagctcacgtcatgttgccttctcttttctttgtgtgtgtgtttatttaagttatttttcttcctcctctcccttttctttttggccctccctccctccctcttctgccatgtaactggaggatgtgctatgagtttgcaaacagctggactgtcaggctgctttttttccagatgttcctcctctgcctccccttcccctcctctcccctccttttccttccttccttcctttccttggagcactgagcaccatttggaagcttgagagaaaccaaaattaaagagagaaagagagagaaaaaaaaaaaaaaaaaaaaaaaaaaaaaaaaaaaaaaaaaaaaaaaaaaaaaaaaaaaaaaaaaaaaaaaaaa

SEQ ID NO: 223792 - DNA, 1000 bp, Homo Sapiens
caggcccagtgtagaggctcacacctgtaatcccagtactttgagacgctgaggtggggggatcacttgagcccaggagttcaaaaccagcctgggcaatatagtgagaccgtatcactacaaaaaagtttttttagttcaccgagcatggtggcacatgcctgtagtcccacctactcgagaagctgagatagggtcacctgagcctggtaggctgaggctgcagtgagccaagatcgcactactgcactccagcctgggtgacagagtaagaccctgtctcaacaaaaaaataacaggttctgttgctgctgagctttcgtcaggaagataagactttcccaacagtccgaagcctaggatatgagggctgaggaggactcaaaccgttgcagtcagagagacacctattttggtgaatattttttgaaatagttaagtggcctccagtacaaactcccagttcccagaaaagacttaaaactagtatctggagattccaagtcctttaaaaggattttagctgatctgcaggcatctggatgttagcctggggttttggctggattccacctcgctcagtgatgatagtctgtttccctggaacattcctgtggttttagtagtaatgagatgtgtgcaccactccagtgggaactgaagctcttagtagttacattgtaattaaaaaagaattataaaacaagaaatcagcaagcctgcttacctccagagacacaccgttccacttacagtatctagcttcctcgactcctttgttaaaatcgtggagtatgaaccgtgaccagagaagtaaatatggagcagttttattgagcagtttcctccagggatgacggctgtcagtgtgtttcctgccagttttccagtccttactctctgcccttcattctgtactcttggcagagtcagtaaccaaccactaataaaatcaaagttgtagtaaaaaaaaaaaaaaaaaagaaaaaaaaaaaaaaaa

SEQ ID NO: 223793 - DNA, 1000 bp, Homo Sapiens
taaccttttggagccttagtctcccagactgaaaaaggaagaggatggtattacatcagctccattgtttgagccaagaatctaagtcatccctgactccagtgtctttgtcaccaggccctttggactctacctcagaaatatttcttggaccttccacttctcctccaactccttgaccaccatcctgtatccaaccatcaccacctctaacctgaatcctaccttaagatcagaacagttgtcctcacttttgttcttgtccctctccaacccactctccacaagatggccagagtaatgtttttaatataaattggatccttcagtttcctgcttaaaaccctgcaggtttcccaatgcactcagaaagaaatccagtttccatggccctggatggtctggcccacctccagcctcagctagcattacccttctgacactctctatgtagcctccctgatcttctttcagctcctctattaaaggaaaagttctttatgttaattatttacatcttcctgcaggcccttcctctgcctgctggggtcctcctattctttaggtttaattttaaatatgtcacctcctaagagaaaccttcccagaccactctttctaaaatgaatcttctaggctgggcatggtggctcacacctgtaatccctgtactttgggaggccaaggggggagatcacttgaggtcaggagttcaagaccagcctggccaacttggtgaaaccccgtctttactaaaaatacaaaaaaattagccaggcgtggtggtgcacccctaaaatcccagctacttgagagactgaggcaggagaatcgcttgaacccaggaggtggaggttccagtgagccaaaatcatgccaatgtattccagtctgggtgacagagtgagactctgtctcaaaaaataaataaataaaataaaatgaaatagatcttataaaaaaaaaaaaaaaaaaaaaaaaaaaaaaaaaaaaaaaaaaa

SEQ ID NO: 223794 - DNA, 1000 bp, Homo Sapiens
tcattgcctgtaatcccagcactttgggaggccgagacgggtggatcacgaggtcaggagatcgagaccatcctggctaacacggtgaaaccccgtctctactaaaaatacaaaaattagccgggcatggtggcacgcgcctgtagtcccagctacacgggaggctgaggcaggagaatggcgtgagcccaggaggcggagcttgcagtgagtcgagatcgcgccactgcactccagcctgggcgacggagcgaaactccgtctcaaaaaaaaaaaaaaaaatcaactcataacttagaaaccggatgttattcatagattccagacattgtatagaagaacatttggaaactcactgccttgttctgtttctctctgaccaccagtgcatgcagcccctgtcatgtaccgcctgtttgctcaaatcaatcatgaccctttcatgtgaaatctttagtgttgtgagcccttaaaagggacagaaattgtgcattcaaggagcttggattttaaggcagcagcttgctgatgccaccagctgaaaaaagcccttccttctccgactcggtgtctgagaagttttgtctgcagctcatcctgctacagaatgaactccttgtaattctacaagatatgccatgggccttttcacaggggacacaggcttcttaaaacaacccggcttcctcaccctatgtcctttatttacaaagctgtgctcctattcatgagcatggaatgtttttccatttgtttgtgacatctcttatttctttcaggggtatcttgtaattctcattatatatatcttttgcttccttggttagctgtatttttaggtattttagtcttcttgtggcaattgtgaatgggattgcattcctgatttggctcttggcttaatgttattaacgccacattttttaaatagacaaaaatatgagattaaaaatgtttgaatttttacttaacaataaaagttgttcaaaggaaaaaaaaa

SEQ ID NO: 223795 - DNA, 1000 bp, Homo Sapiens
gcagtggggatctgccttgcatagagaatgcagtcctggccttggctcagagagagaactcagctgcagtgcaaaaggccattgcccactatgaccagcaaatgggccagaaagtgcagctgcccatggaaaccctccaggagctgctggacctgcacaggaccagtgagagggaggccattgaagtcttcatgaaaaactctttcaaggatgtagaccaaagtttccagaaagaattggagactctactagatgcaaaacagaatgacatttgtaaacggaacctggaagcatcctcggattattgctcggctttacttaaggatatttttggtcctctagaagaagcagtgaagcagggaatttattctaagccaggaggccataatctcttcattcagaaaacagaagaactgaaggcaaagtactatcgggagcctcggaaaggaatacaggctgaagaagttctgcagaaatatttaaagtccaaggagtctgtgagtcatgcaatattacagactgaccaggctctcacagagacggaaaaaaagaagaaagaggcacaagtgaaagcagaagctgaaaaggctgaagcgcaaaggttggcggcgattcaaaggcagaacgagcaaatgatgcaggagagggagagactccatcaggaacaagtgagacaaatggagatagccaaacaaaattggctggcagagcaacagaaaatgcaggaacaacagatgcaggaacaggctgcacagctcagcacaacattccaagctcaaaatagaagccttctcagtgagctccagcacgcccagaggactgttaataacgatgatccatgtgttttactctaaagtgctaaatatgggagtttcctttttttactctttgtcactgatgacacaacagaaaagaaactgtagaccttgggacaatcaacatttaaataaactttataattattttttcaaactttaaaaaaaaaaaaaaaaaaaaaaaa

SEQ ID NO: 223796 - DNA, 1000 bp, Homo Sapiens
atctgccacagtttgacaccaaggtcatcatacagacattgttgaaataccccattaaccacttttggggggtatcatctatatatcgaatgattctgcagcaggatttcaccagcatcaggttccctgccctggagcactgctatactggcggggaggtcgtgttgcccaaggatcaggaggagtggaaaagacggacgggccttctgctctacgagaactatgggcagtcggaaacgggactaatttgtgccacctactggggaatgaagatcaagccgggtttcatggggaaggccactccaccctatgacgtccaggtcattgatgacaagggcagcatcctgccacctaacacagaaggaaacattggcatcagaatcaaacctgtcaggcctgtgagcctcttcatgtgctatgagggtgacccagagaagacagctaaagtggaatgtggggacttctacaacactggggacagaggaaagatggatgaagagggctacatttgtttcctggggaggagtgatgacatcattaatgcctctgggtatcgcatcgggcctgcagaggttgaaagcgctttggtggagcacccagcggtggcggagtcagccgtggtgggcagcccagacccgattcgaggggaggtggtgaaggcctttattgtcctgaccccacagttcctgtcccatgacaaggatcagctgaccaaggaactgcagcagcatgtcaagtcagtgacagccccatacaagtacccaaggaacgtggagtttgtctcagagctgccaaaaaccatcactggcaagattgaacggaaggaacttcggaaaaaggagactggtcagatgtaatcggcagtgaactcagaacgcactgcacacctaaggcaaatccctggccactttagtctccccactatggtgaggacgagggtggggcattgagagtgttgatttgggaaagtatcaggagtgccataatcactagtgaattc

SEQ ID NO: 223797 - DNA, 1000 bp, Homo Sapiens
ggtgagatgtggtacccaaagtggcggcgctttgccaagatccagattggcttgaaagtctgcgactctgcagaccgaatccgggataccttgatccatgaaatgtgccatgctgcctcctggctgattgatggtatccatgattctcatggtgacgcatggaagtattatgccaggaaatccaacaggatacacccggagctgcccagggtcacccgttgccataactataagattaactacaaggtccattatgaatgtactggatgcaaaacgaggattggctgctacaccaaatcgttggacaccagccgcttcatctgtgccaaatgcaaggggtctctggtcatggtgccattaactcagaaagatgggacccgtattgtgccccacgtgtgaccatttgctgtgtatgtgcagaagtattatagaaaaattatgcaggagatggctaggattagccttggggatgtgatgaaaacacttggcaggaattacaaggcaatgaagaattcttaaggttatcttagagtatattaatgtgagctatatcctttactggtaagaagttttagaaaggtttgttttgtgaagttaggaatattagaatttaggtactgttaagtaagtaatgttagaatttaagattcatgttattaacgatgattgaccttaaatagggactctattgctaaccattctgtgcccttgacagggtatttctgaagcccttgggatctaccttgggtcttacttgagttccatatttttcacatgtagaacaaaatgcaaaagaaaagtgagttttcaagagtggcaggttgagagaggagaatgctggaaagaggacaagtttgagaggcaacacttaaacactagggctactgtggcatctatgtagacaggaaagacaaacgtgtttcataaaattcgttgttgatggtattgattgaaactatctgagccatgtaatcaaaaaataaaagttttctgcatcttg

SEQ ID NO: 223798 - DNA, 661 bp, Homo Sapiens
gagcctccggccgcccgccgggtttgtcccgcgatccccgaccatgcccgccgacctcagcggtacttggaccctgctcagcagcgacaacttcgagggctacatgctggccctaggtattgactttgccactcgtaaaatagccaagttgctgaagccacagaaagtgattgagcagaatggggattcttttaccatccacacgaacagcagcctaaggaactactttgtgaaatttaaagttggagaagaatttgatgaagataacagaggcctggacaacagaaaatgcaagagtttggttatctgggacaatgacaggctcacctgtatccagaagggagaaaagaagaacagaggctggacccattggatcgaaggagacaaactccacctggaaatgttctgtgaaggtcaagtgtgcaaacagacattccagagagcctgatccacatccagcagcagagcccacttgtggctgcagctttatgccaaattatattgcagactgaacagacgtttatctatcccatttggcgacgaggactcgtggctggagagagccacacagcgtgtaacctgaagtcatctagattatggggaaactgctcagcttcaataaacctgtccacaatgaaaaaaaaaaaaaaaaaaaaaaaaa

SEQ ID NO: 223799 - DNA, 1000 bp, Homo Sapiens
cgacgtcagcaccaatcgctccgtgcgcgcgtccatcgactttctttccaactgagggcgcgccggcgcggtgccagcgccgtctgcccggccccgccctctttcggttcaggggcctgcggagcgggttggggcgggggaaacgatagttctgcagtctgcgcctttccacgccctccagccccgggggagataaggtcatgggagagtgggtggggacacacccagagactggctttgggattgggcactggtccgctgactgccaggctgaagggacccgccaaggactgaacgggtaagagaagaggtttgcaagacagagcgcgcagcccggcaaggggcatgtgaccccgaaggaagaacgcaacagaagagtcctggtctgaacttggccgagtaggggtgggggtgggatggcaggaggagccgcaggaggaaggaggttgtgcagggtctggacctgcagggctgaagttcactcatcgaccgactcagccccaaccgggagccaggcagaaaaaccctgtgccgtaggaaagtgactggaagtggactccagagggacaggtgtggtggcacagtcctggtgtggtgctgaccacccaaatatgactgtgaattgtggaaagggcagtagatctctaatgtggaggtgggaacattattgtggtggaggcaattatgagggtagcatttctttcgagacaaaacacccgtctgggaaggccccaaggtcagcttatgaaggaccccacttgcaccccaccccagccatggaagagcagctggagggtggatggggaggccagagggagcaatgaggggtggtcccagctctgctattgactcggtatgcctttaggacattctcttaccgctcatgggcctcagtttcctaaagtgtgaaatgtcaggcacttccctctaactggcatgcaacagccccacctgcctgagagccctgaggtgacaataaaacatttatgctcaaggggaa

SEQ ID NO: 223800 - DNA, 1000 bp, Homo Sapiens
agggcctgcggcagctggacatgctggacctctccaataactcactggccagcgtgcccgaggggctctgggcatccctagggcagccaaactgggacatgcgggatggcttcgacatctccggcaacccctggatctgtgaccagaacctgagcgacctctatcgttggcttcaggcccaaaaagacaagatgttttcccagaatgacacgcgctgtgctgggcctgaagccgtgaagggccagacgctcctggcagtggccaagtcccagtgagaccaggggcttgggttgagggtggggggtctggtagaacactgcaacccgcttaacaaataatcctgcctttggccgggtgcgggggctcacgcctgtaatcccagcactttgggaggcccaggtgggcggatcacgaggtcaggagatcgagaccatcttggctaacatggtgaaaccctgtctctactaaaaatataaaaaattagccaggcgtggtggtgggcacctgtagtcccagcaactcgggaggctgaggcaggagaatggcgtgaacttgggaggcggagcttgcggtgagccaagatcgtgccactgcactctagcctgggcgacagagcaagactgtctcaaaaaaattaaaattaaaattaaaaacaaataatcctgccttttacaggtgaaactcggggctgtccatagcggctgggaccccgtttcatccatccatgcttcctagaacacacgatgggctttccttacccatgcccaaggtgtgccctccgtctggaatgccgttccctgtttcccagatctcttgaactctgggttctcccagccccttgtccttccttccagctgagccctggccacactggggctgcctttctctgactctgtcttccccaagtcagggggctctctgagtgcagggtctgatgctgagtcccacttagcttggggtcagaaccaaggggtttaataaataacccttgaaaactgga

SEQ ID NO: 223801 - DNA, 1000 bp, Homo Sapiens
aagaactatggtggtgttttttttcccacttcccacaaacctcaacatgtgccagtcaccctaaaatgcttcacatggttaaaaacaagcacaattttgaatcctacagcaaggatgaaaggcccctagccgtgaaaacagtgctttggggagcagttgtcagtctaagtgatgctattccaagagaaggatatgctgagggaaaatgcccacatgacctgttcccatttggagtacagtgatgtggtagctacagcttcccccagaattatcattttagcaccttctctcagggatgacctatcagtttgagagcagttgcctcttttctcaaaataccatactaactgctaaagccctccaagagtctttcctagatgcaacgcagaaggcccttgctggtgatggcctcatttcccatgtgtgtacaaggtggtttgattgaagagtgaagtgcatgcctgcagagcagagagaaatttgtagcaatgttgctaatatgtgttatcagatctgcgggaaaactatttctattcataatacatcatgggaatcatactattctggtaaaaatcagttattagcataacagcctgagcacttatgtctctcgtttcatcctgcaggaggatgtagcgcctcagtttattttaatgttcataagattatggtgtctaatttaataaattacaggattggaactgcgatccttggtaccacagtcacagaactgggggtcattttctagatgaaacaaacggaacaagttctcttccaacaaagaaactgtactgtagaaattaatttcctccatgaattttatatattgtgtacaaatataaggtatgtatctgaatacaaagaaaagcctatcatcatatagatatcagtattctctgttactgcacagaagtaattttctcatgatgaaataaagttcacacacatactttctccaaaaaaaaaaaaaaaaaaaaaaaaaaaaaaaaaaaaaaaaaaa

SEQ ID NO: 223802 - DNA, 1000 bp, Homo Sapiens
gaaagtgaagagtcccagatatctgccaaagagcaaatcatcctagagaaactgaaggaaacagaaaaatccttcaaggactttcagaagggtttctccagtacggatggagatgcagtaaattacatttcctcccagcttcccgacctgccaatcctctgttcacgaacagcagaaccatcacctgggcaggacgggaccagcagagcggctgctgtgtacgccatggaaattaatgtggagaaagacaaacaaacaggagagaccaagattctctctacatctaccattggcccagagggggtccatcagaaaggagtcaaagtctatgatgatggtaccaaagtagtgtatgaggtgcgctcaggaggcaccgtagtagaaaatggagtgcacaaattaagcacaaaggatgtagaagagcttattcagaaggctggacaatcaagcttaggaggagggcacgtgtctgaaaggactgtgattgcagatgggagcctcagccatcccaaggaacacatgctctgcaaagaagctaagttagaaatggtacataagtctaggaaagaccattcttccgggaacccagggcagcaggcccaagcccccagcgctgcagggccggaggcaaacttggatcagcccgtcaccatgatttttatgggctaccaaaatatcgaggatgaagaggagacgaaaaaggtgctaggctatgatgaaaccatcaaggctgaattggtcctcattgatgaagatgatgagaagtcattgagggagaagacagtgacggacgtgtccactattgacgggaacgcggctgagcttgtgtccgggaggccggtctcagacaccacagagccctcatccccagaagggaaggaagagagcctagctacagagccagccccaggtacccaaaagaaaaagcgctgtcaatgctgtgttgtcatgtgaccacttctttcttctcctttcttctgggcagcctgtactctccacc

SEQ ID NO: 223803 - DNA, 1000 bp, Homo Sapiens
tttttttttgttttgttttgtttgccacttttttatctcctattcctcaccacatagtgctttttcctgaaaagctggactgagaattggccttgaatcaggtcagagtgttaactgtcaacatgaagtattttcacttcgcagcatcaactttcaagcataagtaaaaacacaacttgcatactttgatggagcttaattgtgtgagtagaatatgtagcaaagctttttaggattttcagaactagaatactttttaaggaattaaaagtgtttctggaagtcaaaaatgggaaagcaaaaagtagctgtcctccctaaagagctttagaagatagcttaacctgtaggtacatgttatgaaataaacacatttctaacaatacaagggagtaggggcagacctgtgttgagtatttgtgtgggttcttaattttgaaggacctccaatcactacattttgttaatactgccaataaaatcattttcaacttattttttaaagtaggttttcttactttggtggaccagaagtgagagattgttatatttaggatataggcaaatacagtaaaagttaaaaaaaaaaaacctgacccaaagtatactctgatagactatattatattcaattttgtatccccagtcgagaacatcttgtaagccttcattaagggccacctgctgtctgttgaactagactgaacaaaatatattttctcacaagctccatccctttttctttaggacatgttatatataatccatctcagaagttgaagatgtgatgttgctcggcctttggaataatttttaaatctgtaaatgtctatatgagcagaaacaaaacattgtgtaacatgttttaagcattattgtaattcctgtgttaacagtttgtgtgtctgctgctctggttttgaaacatgtttgtatatagatacaggagttggcataaattttgttaaataaagcaacaaaaattttctttgccctttga

SEQ ID NO: 223804 - DNA, 1000 bp, Homo Sapiens
atttgcgtgaattacccatagcgccgtcacacgtgatagaaatgagcagcagccgctgctctgccacgccctcagcacaagtgaaacctatcgtcagcgcgtcaccaccctcgcgggccgtggcgggttccagaagctcacagggaaagacggaagtgaaagtcaagccagctagccctgtggctcaacctaaagaagaggcaaaaacagaaacagagtttcctgatgaagatgaggaaacaaggttatatcgcttaaagatagaagaacagaaacgcctaagagaagaaatcctgaaacagaaggagttacggcggcagcagcaggctggtgccaggaagaaggagctgctggagagactcgcgcagcaacagcagcagctgtacgctcccccacccccagcagagcaggaagagcaggcactgtcaccatcacccaccaacggtaacccactgttgccctttccaggtgcacaggtcagacaaaatgtgaagaacagacttcttgttaaaaaccaggatgtcagtatttcaaacgttcagcccaaaacatccaattttgtaccatccagtgccaacatgcagtatcaaggacaacagatgaaagcactgaaacatttgagacagaccagaacagttcctcaaagtcagactcagccgctgcataaagtgctcccgatcaaacctgcagatgtggaggagccagctgtcccccagactcctcgagtggcgtccatccagggccggccccaggacacaaagcctggcgtgaaaaggactgtcacgcacaggacaaacagtggtggtggagacgggccccacatcagctccaaggtcagggtgattaagctgtcaggtggggtaagttgacaagttttatgagagcctctttgagtctgtgtatcacatagaatgtcctcatttgcagagaatgtttttgaagaaagaattaaaagttacctctgttatagtcttgtaaaaaaaaaaaaaaaaaaaaaaaa

SEQ ID NO: 223805 - DNA, 1000 bp, Homo Sapiens; identical to SEQ ID NO: 118427

SEQ ID NO: 223806 - DNA, 1000 bp, Homo Sapiens
ttccactattcacagcatttccttttctcagaaggactctttatatttccatgtaaatctagatctttggagcaattaagatggaattacaatttctagggagcattttaaggaaaatgttttggctttttcataattttatgtcttacagtatggaattataatacgaaaatctttatatgagttttggcttcttggtatttgtacttattcaggggaaaaagtctttcgattacttatgcctctatagagcttaatttcttgagaaattcaacagtcattttcaccagcataattttatcttaaggaataactaataggaaaagtcagcttaattatttaaggccctagtttctacatataatatattcgatagaaatgaaaatctgccgtggaattaactaataagtagtaacaataaacttcatatttagaatgcaaagtctataaagaataattttacatgatcctcaatatcaactccagtttaaaaagtgttatttttaaaacatttgaaaccaagtactgtttaatttcaatcagaagatgcaaatacatactttgatctatgtttgattttgctaataatatttgaaggagattgcctaccaaggacaaaacaataaatttaaaaatcaaacgatttctccatacgctcatagtcacatatggaattttgagaaaataaagcatgctgtctttaggaatttttatacttctttgtctttcttccttaatatttgcttctagctgctcttggcaatgatgaattgttatgtatgcattaatgttttgcagcccaaaagttgttcacatttttcctatataagatctgtggagtgtgtgtttcaaagagagaactacagaaatgttaaagcaggaaaacctgaatgtgatgtgcacattttcatcccacatggacaatgtatgtgttttaataaatggaattttcagattcaaaaaaaaaaaaaaaaaaaaaaaaaacaaaaaaaaaaaaaaa

SEQ ID NO: 223807 - DNA, 1000 bp, Homo Sapiens
gctgacattggcttcgtcatcgacggctccagcagtgtggggacgggcaacttccgcaccgtcctccagtttgtgaccaacctcaccaaagagtttgagatttccgacacggacacgcgcatcggggccgtgcagtacacctacgaacagcggctggagtttgggttcgacaagtacagcagcaagcctgacatcctcaacgccatcaagagggtgggctactggagtggtggcaccagcacgggggctgccatcaacttcgccctggagcagctcttcaagaagtccaagcccaacaagaggaagttaatgatcctcatcaccgacgggaggtcctacgacgacgtccggatcccagccatggctgcccatctgaagggagtgatcacctatgcgataggcgttgcctgggctgcccaagaggagctagaagtcattgccactcaccccgccagagaccactccttctttgtggacgagtttgacaacctccatcagtatgtccccaggatcatccagaacatttgtacagagttcaactcacagcctcggaactgaattcagagcaggcagagcaccagcaagtgctgctttactaactgacgtgttggaccaccccaccgcttaatggggcacgcacggtgcatcaagtcttgggcagggcatggagaaacaaatgtcttgttattattctttgccatcatgctttttcatattccaaaacttggagttacaaagatgatcacaaacgtatagaatgagccaaaaggctacatcatgttgagggtgctggagattttacattttgacaattgttttcaaaataaatgttcggaatacagtgcagcccttacgacaggcttacgtagagcttttgtgagatttttaagttgttatttctgattagaactctgtaaccctcagcaagtttcatttttgtcatgacaatgtaggaattgctgaattaaatgtttagaaggatgaaaaaaaaaaaaaaaag

SEQ ID NO: 223808 - DNA, 1000 bp, Homo Sapiens
tgtatggcaacgtggtggtcaccagcatcgggcagctggtgctctacaacgcgcggcccgaagacgccggcctgtacacctgcaccgcgcgcaacgctgctgggctgctgcgggctgacttcccactctctgtggtccagcgagagccggccagggacgcagcccccagcatcccagccccggccgagtgcctgccggatgtgcaggcctgcacgggccccacttccccacaccttgtcctctggcactacgacccgcagcggggcggctgcatgaccttcccggcccgtggctgtgatggggcggcccgcggctttgagacctacgaggcatgccagcaggcctgtgcccgcggccccggcgacgcctgcgtgctgcctgccgtgcagggcccctgccggggctgggagccgcgctgggcctacagcccgctgctgcagcagtgccatcccttcgtgtacggtggctgcgagggcaacggcaacaacttccacagccgcgagagctgcgaggatgcctgccccgtgccgcgcacaccgccctgccgcgcctgccgcctccggagcaagctggcgctgagcctgtgccgcagcgacttcgccatcgtggggcggctcacggaggtgctggaggagcccgaggccgccggcggcatcgcccgcgtggcgctcgaggacgtgctcaaggatgacaagatgggcctcaagttcttgggcaccaagtacctggaggtgacgctgagtggcatggactgggcctgcccctgccccaacatgacggcgggcgacgggccgctggtcatcatgggtgaggtgcgcgatggcgtggccgtgctggacgccggcagctacgtccgcgccgccagcgagaagcgcgtcaagaagatcttggagctgctggagaagcaggcctgcgagctgctcaaccgcttccaggactagcccccgcaggggcctgcgccaccccgtcctggtgaataaacgcactccctgtgcctcag

SEQ ID NO: 223809 - DNA, 1000 bp, Homo Sapiens
ctccttcagactgggggcttcctgaggacagagactgctctaccaatagatctttgtttgttttgagacagaatcttgatctgttacccaggctggagtgcagtggcatgatctcggctcactgcaacctctacctcctgggttcaagggattctcctgcctcagcctcccaagtagctgggattacaggcgcctgccaccacgcccagctaattttttgtatttttagtagagatggggtttcatcatattggtcagggtggtctcaaactcctgacctgaggcgatctgcccacctcggcctcccaaagtgctgggattacaggcgtgagccaccgtgcccggcctctcccaataggtctttattcctcaatcctccaaatgctctggagaggcccccacccttgagaagaactgacacagagaagaacattttctcaggctcgtagagaggtgggatagaggaagggaggtttgagccagacaggcctttcccagggaagcctcctcccaggtgcttgccccagctcccaccccacagcccactctcaggcaggaacaatcctcagaggggaagtgcccatctagccattgactcatgacctgggtcaaagaagccgtctccaggctctctgtcagcattacaggatccccagaaagctgttgaataagccctaagggtggtaggaacccaggagggacccaggaaactaagatttgagattcagtgcctctgaaagactaccaaaatctaagttggtttaatagttaaaagctgctgtagatttattctgcccacaacttgggggtcctttctggatctcggcttctccagctgtaaaatggacacacaatcctcctccagggactgctgtgaaatcaagaaatcggaaaatactttcagaagttaaaatgctagaaaaacaaccccaataaatgatgattattgttaaaaaaaaaaaaaaaaaaaaaaaaaaaaaaaaaaaaaaaaaaaaaaaaa

SEQ ID NO: 223810 - DNA, 1000 bp, Homo Sapiens
tcctcttgatgttgctgctcatcttcttctacatttttgctgtgactggtgtctacgtcttctcagagtacacccgttcacctcgtcaggacctggagtaccatgtgttcttctcggacctcccgaattccctggtaacagtgttcattctcttcaccttggatcattggtatgcactgcttcaggacgtctggaaggtgcctgaagtcagtcgcatcttcagcagcatctatttcatcctttggttgttgcttggctccattatctttcgaagtatcatagtagccatgatggttactaactttcagaatatcaggaaagagctgaatgaggagatggcgcgtcgggaggttcagctcaaagctgacatgttcaagcggcagatcatccagaggagaaaaaacatgtcacatgaagcactgacgtcaagccatagcaaaatagaggacagaggagctagtcaacaaagggaaagtttggacttatcagaagtgtctgaagtagagtctaattatggtgccactgaagaggatttaataacatctgcatcaaaaacagaagagaccttgtcaaaaaagagagagtaccagtcttcctcctgtgtctcctccacatcctcttcctattcttcctcttctgaatccagattttctgaatctattggtcgtttggactgggagactcttgtgcacgaaaatctgcccgggctaatggaaatggatcaggatgaccgtgtttggcccagagactcactcttccgatattttgagttgctagaaaagcttcagtataacctagaggaacgtaagaagttacaagagtttgcagtgcaggcactgatgaacttggaagacaagtaaagcaatggatggcttcaatatccttgggcccagcaaaagataatgaagggaattgttggaaatagagaattgaaaatataaacattcagatagaacaatgtctgttcattaaaattaaaaagtataaaaaaaaaaaaaaa

SEQ ID NO: 223811 - DNA, 1000 bp, Homo Sapiens
ggaaagggctctgaccccctggcccagccgggctctctagtggtgatccggctcattctcctgcaagttggaagcacaattttccccccaagtggaggaaaaggaaagggccccagcctactgaagaggtgtttattttttaactaacagcctcccaccccattaagactcaccaggagaggtctgagggccattcagaacccactcctgagtgggtgggtgggtgggactcagtccagagacctaacattcagaatatagcattggttgcctattttgagatggatttaatctcccacagtattcatgagaccatctgatggaatcagatccctgagccaccttgcaggacgttttccccaacctcttacaccctggatgtcactttggaaaccaagcccttggaagcaagtggggtggcatgggagagaagggaggaggtgggcacaggtggtgagcttatgtgtgggcactctactgcctcacagaagccagccaagtgccaaggtcagcttggctggtctgaggccaccttcttagccaaaaacctagggttcattttcaggactttgataatgaacaacaaaatggggacttctttgggcagatgctaggtcagttgttttcacctaatatcctcttttagctgcatgtatatttatttataattataaccctggtggactgcagccttcatctttattgggaatgagtttgttataaatcagaaatgggtccatgatgaccactgttttccaaacccagtctgttccctgctccctcgctggcaagccccaccacacaggagtgaggccaggggctaggagttctaagaacagaggctggggtgagggtggcacccaggcagctgcatctggtctgttttaatttaactgtatttaatttgctttcaaaattaaaagtcaaatacagtttttaacagtcaaaaaaaaaaaaaaaaaaaaaaaaaaaaaaaaaaaaaaaaaaaaaaaaaaaaaaa

SEQ ID NO: 223812 - DNA, 1000 bp, Homo Sapiens
ataggaccacaacatcaggcaggatctgattcattgctcacaggaatggcctttttcaaaatgagagaagtatgaagacatcactgcctttttctcagttggttgttaggttgagaacattaaaaatcttgtggccaaagattttgggcaacaagtacctactaagtaaagatataattagagataccatatgagtcacatccaccacacttaaaagtattcaaaaataagtcatcttgaaatgtagttcagaaggaactgggagaacatgttcatcatagaaccaacaattttaaaacataaactacctgagaagtcatgtaggtccaaccatattatttctcaggtgagaaaacaggctaataacttccatgattaaacacattactagtgggagaactccagagttcttttctgactcccattggtgctccttctacaaggcaaggaatctttatattaggtttattctagcatgaccccttttaaggtttaaactggtgataaatatattatttgctcatgtcattcttcagtgctttgaagattttatagagaagaactcaggctcttttactgcattgagtcttaaaaggggggttgaattccgaagggatcaaataaatccaacgtagtagttgcatcagaaaccatattaggaaaaccctccttaaacggcaaaaggcagagatcagttccttgagtataaagtgttagggatggaagaatgaaactaaatgaacccattatctactcctaagtaattaagtgatgtgcacagatacacctagctataggtaaacaggaaaattggttgtgcaaaaaacaagtgaggtttttcttgactataagttttcccttttggaaaaattcgctgtggatttgagtatattttctcttagacattaaattgagactgagaatttaaaactttttgtagcaatgtattgataatagaaagcattaaagctgttttgctaagtaaaaaaaaaaaaaaaaa

SEQ ID NO: 223813 - DNA, 1000 bp, Homo Sapiens
gatataaatatatgctgtatatgttatgtaatttattttaggctataatacatttcctattttcgcattttcaataaaatgtctctaatacaatacggtgattgcttgtgtgctcaacatacctgcagttgaaacgtattgtatcaatgaacattgtaccttattggcagcagttttataaagtccgtcatttgcatttgaatgtaaggctcagtaaatgacagaactatttttcattatgggtaactggggaataaatgggtcactggagtaggaatagaagtgcaagctggaaaggcaaaaatgagaaagaaaaaggcaggccctttgtgtctaccgttttcagtgctgtgtgatcatattgttcctcacagcaaaaaagaatgcaagggcataatgttagctgtgaacatgccagggttgcattcacattcctgggtacccagtgctgatggggtgtgcccacgtggggacatgtccttggcgtgcttcctcagagtggcttttcctccattaatacatatatgagtactgaaaaattaagttgcatagctgctttgcagtggtttcagaggcagatctgagaagattaaaaaaaaatctcaatgtatcagctttttttaaaggacattactagaaaattaaacagtattttttaacatgtgtgactttcatgcttctggggttggagcttaaagatccaaactgagaaagcaggccgggcatggtggctcatgcctgtaatcccaacactttgggaggccaaggagggtggatcacttaaggtcaggagtttgagaccagcctggccaacatggcaaaaccctgtctctactaaaaacataaaaattagctgggggtggtagcacatacctgtaatcccagctactcaggaggctgaggcaggagaatttgcttgatcctgggaggcagaggttgtagtgagccgagatcgcgccatcgcactccagcctgggtgacaagagcaaaactccatctc

SEQ ID NO: 223814 - DNA, 1000 bp, Homo Sapiens
ccttttcacaccttatttcattgactgctggctgctttaaaaaaaaaaaaaaggatccattgtaccgttgtcttcatcactgggaaatgattattacatagtacagaagattctttgtttttctccactgagcacttaacaattgctttctctctggcctggacattctctggcagcacctccaggatacataaattcaatggatcaatttatttgtcttcaaatggccttaacttggattgtctgtttggccaaccatgaaaattaaagagtgaagcagatgtaatggcctgacattccaaaaactctgaattgggtttattagcacaaatgttgtgttcatttgttgagccatatctcagaagaaggaaagggagctacagaaaggaggtttaggattgcagagaagatgcaagagcactttggcccaattctccagctcaacccagcagctgaaaagcttcaagagatctaggaaaagacattttcatgttaatgagaatttccaccattgtagagaatttccttcctactgagaatctacctctattccccctgccctagctcttctctaacttggttaaccataaccataaccagattcccttgcaatcgatttctctttagtcgttggtgttagaagtaccagcacaatttgagcattcccattaacaaaggtgttcacagttgagaaactctcctgccgggcgcggtggctcatgcctgtaattccagcactttgggaggcagagttgggaggatcacctgatgtcaggggtttgagaccagcctggtcaacattgcaaaaccttgtctctactaaaaatacaaaaattagctgggcatggtggcgcatacctgtaatcccagctacttgggaggctgaggcaagagaatcgcttgaacccaggaggcagaggttgcagtgagctgagatcatgccattgcactccaacctgggtgacagagtgagactccatctcaaaaaaaaaaaaaaaaa

SEQ ID NO: 223815 - DNA, 1000 bp, Homo Sapiens
gaagcaaacaatgctctaatcacaatattaactgtttaattaaaatgttgtaacaagtataaaacagggaatgtaagtttattaccaaagtgatatgtattccaaaaaagtcatagaagatgaagcactataatattgttcccatatatttaaaatacccaagtacattctaattaccagtatatcagaggaaaattttcgtagtctttgtaaaataatatactcatcatagaaaacttgaaaaatgcagaaatgtataaaaaagcaaaaatgattactgataatatcacaacccagaagtaaccacctttaaaaagcaacccccatgtatgcctatatgtgtattgtatactttttttacataattggagtcatactgtaaacagttttataagtagatctttttcattgcaaaattgccacattttcttatggcattaaaaattttacaaaaacataattttaatggctatattatattccatttaatggatgcaactcagtttatttaaccattcccatgttgttaactatttaggttgtttctaattttcattattataaagttgcagaaatttggtgtacataaaactgtctccatataattgattattaggatatattcccatgaaggattctttttttaaaaaaatgtgaaatgtcatcttgtacttacacctttcatgaaaagggatttcctgcttttgtactgcatgggtggcagttgtgaggaaaagccagtcaaatgacctttttacaaaagaaatgcagtggtcacttcagttgagagtgactttttaatacaacaagatcaactagaagaattcaactgtctcaagaatcaaggtaccccaatatatctcgcaattccaaactttgtttgagggactcgttatccagctcttggtagccacacctgcaatgtaaaatggaagaaaatgcaaagaaaccaaatgtgccgagtgaataaaggattgtcatatcaaaaaaaaaaaaaaaa

SEQ ID NO: 223816 - DNA, 1000 bp, Homo Sapiens; identical to SEQ ID NO: 116183

SEQ ID NO: 223817 - DNA, 1000 bp, Homo Sapiens
ctgtagaggcttctgggaaatgagctgtctgcaggaggtgaagcagtgttttccttggaatgtttgaggacctgcaatagaagatgttgcctttatggccctagagaaagtcaaggaacatggggaccaacaaagcatttccagttgtaagaatatgtcagaagagtgctcggttagcccacggtgccaaaactccaaacaagttccccggtggaatgacgtggccattggagggctgcaggtcgtcctctctgtatgtgccccgcgcatttccttggcctcatctgagatctggtgtcagagttctctgctcctgttggcaaatcgcaccttatctgaacatttgttccagccaccttttgcacatggattccgtaccttgcactagcaatgtctaccttcagtaacgtcgttctttttcaccctgtattctcaatgatcccttcctccccatatgccacccttcccccaaagctgatagggcagaggtgcactttatgaaactggcacttgactgaacagaaggaaacagctgtacctctaagctcctttcacagaaatcgtcatctgccttggaatgcaaatagttcttatttgccaaagaacagtgaattgggcccaaagatcaaacacagcatttcatgtaatcagaattctaaacgcacaactcgggagctgtgcacggcttctcaagtgattcagttgcagaaccaagagcaaaactcgcctgtttttgtcctcaatggcacccatgagctttccaatagtatagttttctttctttccttgtcctggttgaaggtaacgtgttcctagaaaagaaaatgctgcataggaaaactgagatgccttttattccaacgtgtttgatccctgtcactcattattctgtactttttattgtacattctattcctgtaattattgtgccctttaagtgttgtaaaatcgttttggaatttgtgcctgctagttatgcaataaacaggctctacaagtg

SEQ ID NO: 223818 - DNA, 1000 bp, Homo Sapiens
cgccatgctgagatttggaaagaagaaagaggataagggtggaaaggctgagcagaaaggtactctgaaacatggtggcctgagagaagaagagctggagaaaatgaaagaagagcgtgaaaggattggagcaaaacatcaggagctaagggaaaagcaggcaagaggtcttcttgattatgctactggtgcaattggatcagtgtatgatatggatgatgatgaaatggaccccaattatgccagagtgaaccactttcgggaaccatgcacatcagcaaatgtctttagatctccatctccccctcgagctggaccatttggttaccctcgggatggccatccactgtctccagaaagagaccacttagagggtctctatgccaaggtcaacaagccataccatccactggttccagctgacagtggccgtcctacgggtggaagcactgaccgtatccagaagttgcggaaagagtattatcaggctcggagggaaggtttccctttatatgaagacgacgaaggaagagcaaggccatctgagtatgacctactctgggtgcctggaaggggtccagatgggaatgcacacaacctccgctttgaagggatggagaggcagtacgcatccttacccaggggaggacccgcagatcctgtagactatctgccagcagcacctcgggggctctacaaggaaagggagcttccctattatccaggggctcatcctatgcaccctcccaaagggagctatccccgccccacagagctcagggtggcagatctccggtatcctcagcactacccacccccgccagctccccagcacaaaggaccctttcgacaagacgttccgccttcccctccccagcaccaaagaatgccagcctatcaggaaacaggcagaccagggccccgtgggggcagcccagaccagtacccttaccgaacccaggattcccggcagaagaaccccatgactgcagccgtatag

SEQ ID NO: 223819 - DNA, 1000 bp, Homo Sapiens; identical to SEQ ID NO: 118436

SEQ ID NO: 223820 - DNA, 1000 bp, Homo Sapiens
gagtccggctggcatgaaaatctgactttgcccagctcttttccttgatgcagtttcccagtgtggaaggaacctaaccagttctcggtgataactgaagctggaacgtgtgaattattaggaattctttgaagaactctgcattgagaattatttttatttagttttttttttttttaattgagagtatatagtccagtccaggtaccggaataaaaatatggagacaaggggaaaatattttacgaagctctgtgttctcaacgccctcatgaacttttcagtaggctgtctggtttatgtgtggtcaacttgaaaaactaattgaatctaggtctctgtattgttcctgtttctaccctgactgtttccgtcacaccaagcccttatctggggcgcgtcttcctgcccaggtggaacactggcattttgttgactgtcaggttaggtgtcccttagtcgtcatcagaagctgaagccttcctttccacaccctcatcagattcatctccactgataaccggtttccttgatgcagacatagtttagctttctttgactgcagagatgtctcattccacagacatttcttgaacccatttgatgtgtccaatattgtgccagggatacaaatatggccgtatagcctcaggccttcatttctgaaaagaaaaaagctcaaaaagctgctgaatttctctgggagtttaggaaaggaagttatttgagtaacaacaaaagtgcttagtgtcgtactttacacatcataggtgttctaatggaagcaaggactggagaagcaaagagtggaatgtgaggagcagacctaggcagacaccttgagactaaaagtcagagctgaagggagtcgctggggccaggacggcatgcaggcctgtaccctgttccctaagttcctgcaagcgtcgggaggtgtgttttcagataccagaaagagccttcagtagattcacaagattaaaattgatgcgcttaattt

SEQ ID NO: 223821 - DNA, 1000 bp, Homo Sapiens; identical to SEQ ID NO: 118438

SEQ ID NO: 223822 - DNA, 1000 bp, Homo Sapiens
gtgcagaagcggggagctccaggtgcaggagggcaccggccggggcccacgccctctgcccgcctccctggggctccttcctgccacctcctcccatcacctcctgcggcagaacagcacccgtgacccacccagagagcaaggccaggggtcttggtgctccccgacggggcccggcaagttctctttcttctctctgggaaaatgaacgtccaggacacacctgtatcccagagagcaaagtgatgaggagactgagcgtccccagccccacctggcggcatggacacagaaaagctacgccggctggcctctccagaccagttcccaggctgggtctgccgctgggccctggggcggtggggacagatgttgacacaaattatttatgttttcttagtatcagaagaggattctcggcactaacacatagccagtcctaactccgtactctgtgtcagcccatcccctagacaccctctgtttcctttcccggccccacctggccggccctctgcccctgcagagctgaggcagcctggggttgatggggaccacgcggtgcctgcaggtcctagaagtgagctgggcaggggctcttcagaccacacagccctgaccgggccttggaggagagccatggacaggctcctccatgccgtctttccttcttttgaaaatcctatcaatggctgggcgcggtggctcacacctgtaatcccagcactttgggagaccgaggcaggtggatcacctgaggtcaggagttcgagaccagcctggccaacgtggtgaaaccctgtctctactaaaaatacaaaaattagctgggcgtggtggcgtgcacctgtaatcccagctactcaggaggctgagacaggacacttgcttgaacccgggaggtggaggttgcaatgagccaagattgtgccactgtattccaacttgggtgacagagcacgactctgtctcaaaaaaaaaaaaaaaaaaaaaaaaaaaa

SEQ ID NO: 223823 - DNA, 1000 bp, Homo Sapiens
caccagtaatatggctcttgtttatcagctaatcttgaatttattctgtggtaaatcttttgagttgttgagtatatttgagattgattggattcgacctcttgttgaactgaaaacttaattttttctctgtatttttgttacaaagccactgatacgtgcacaattgtaattaagtatgttgcagttgtaaatattagagtttaatctcatgctctacctttatttagcaattacctaatttgccagtagctttataatttttaaagataattgttcattattttgtcaatgttatttgaacttggggtacttaggagcctctttgtagggactgtgcctaggtagcatgtcctaacatttgttctggtcttgcataacttcagtaatctttgtcattatatgtaactttgttgctctgtatggcataatattgtatccataaacatggtaattttgatacagttatacttttacagtggtacataatccaaggactagtatagaattaagctgagtgcaagatgagggagggaagggctttcttggtaatttagatgtgaaacctctacagagctatcatgtaaaaactacataaggtggttgtgctactgtataattgggggtgataataccaggaattttaataagattttgtaaagaatatccagaaaagtagtgaacttattttcagtagacatagaaaacaatgtgaatatttaaggtctgtgactatagttaaacttcactaagaatttgcagaattgttttgagatgtgtgaataaaggtaattttattgaatcttcattggtgctaatgatggacagttaaaaagatagctagtgtatattgttatgggtcagtacttattagtacttccaaaattgaatttgaaatgctatgtattcacttttcactctgtaaatgtaattctttacaatgactttatttattaaagggcagccagttgtcatttgtaaaaaaaaaaaaaaaaaaaaa

SEQ ID NO: 223824 - DNA, 1000 bp, Homo Sapiens
tgtgggcgtttgtaagtggaagatttacgccattataaccctaatatattcctgcagagtaacaacacagcctatctaatatacaatgatggagtccctaaacctgtgaattacagcagaaagtatggacacaccaaaggtttactgctgtggaacagagttcaagggttctggctgattcattccatccctcagtttcctccaattccggaagaaggctatgattatccacccacagggagacgaaatggacaaagtggcatctgcataactttcaagtacaaccagtatgaggcaatagattctcagctcttggtctgcaaccccaacgtctatagctgctccatcccagccacctttcaccaggagctcattcacatgccccagctgtgcaccagggccagctcatcagagattcctggcaggctcctcaccacacttcagtcggcccagggacaaaaattcctccattttgcaaagtcggattcttttcttgacgacatctttgcagcctggatggctcaacggctgaagacacacttgttaacagaaacctggcagcgaaaaagacaagagcttccttcaaactgctcccttccttaccatgtctacaatataaaagcaattaaattatcacgacactcttatttcagttcttatcaagatcatgccaagtggtgtatttcccaaaagggcaccaaaaatcgctggacatgtattggagacctaaatcggagtccacaccaagccttcagaagtggaggattcatttgtacccagaattggcaaatttaccaagcatttcaaggattagtattatactatgaaagctgtaagtaaacttggtgaaaggacacaggtactatcattgaaaaccttgacaatgggtcttcttccattacaccttctttatattttaaaggcctgtgaatatacttataacctgcatatcacaaaataaaacatttttctctcatgttaaaaaaaaaaaaaaaaaaaa

SEQ ID NO: 223825 - DNA, 1000 bp, Homo Sapiens
gttgcaggaagttagttttagttctgtagaaggcaagagtagggtagaccaaatcaaatgctcactggggtcaggctgatggagacagtaacactggcgagcaggtgccccagctcggactatactgctgagttctggtctgttgctgccactctacaggtccagggttgttagatcttctgggtttttgttttgctttttgaaataaggaaaataagcttatcttaagtttatttttccttggatatacctagattccatacagtgacaatacaaatacaaaggaagaacatctggatttcatccttgacctcatttacaaagcaaaaagagatgctggattcagatataaatgtttaattttgcagtgtttaagtcagcaaatcttctgttttttaaaaataagccacatatctagatttttctgtgaaagctctcaattaagtgttgggaactaatttcaagattttaaaaaatgttatgcaggcttaacgtgtctgagagccataaatgacctaacgtttcccgttagtctctgaactaggtgatctcagttctctttcaactccagtactctgtaagtttctgtgacctgtagtgtaccattctcaggtggtgatatggtttggatgttttgtcccctccaaatctcatgttcaaagtgtgacattcagtgttagaggtgggcctagtaggaggtatttgggtcatgggggcggatcccttatgtatgactttgtgccatccccatagtaatgagtgagttctcactctggttgtttatgcaagagctggttgtttaaaagagcctggaacttcctcctctctcgcttgctctctctcaccatgtgacacactggctccccttcaccttctgccatgattgtaagcttcgtgaggccctcaccagaagcagatgccagcgccatgcttcctatacagttctatgcagaacagtgagccaaataaacctcttttctttctaaaaaaaaaaaaaaaa

SEQ ID NO: 223826 - DNA, 1000 bp, Homo Sapiens; identical to SEQ ID NO: 220866

SEQ ID NO: 223827 - DNA, 1000 bp, Homo Sapiens
ccacgaaatttagttttatcagtagtcttaaagtgttgatctcaaacaagtacattagaaaaatcatgtttcttctctctcatcttactttttcttctcagatttctcccttcctagaacattctctctgtttagcactaatgttcacctcgtattttttggaagtgcaaaaatctcaatttgtgtctgtttacagctctctctcctcactgctcacagcaaggggttctgtatcagtggatttcattttgtagctgctgagatgttaaggcaagcctcagcatctgcccctgctgggtgcacaatgctgcttcctcgaagagaagacacagagtccaagtggcaggacttgaggttggcttccactctgccttagaagttaattttccaaagtacattacaaatctctgaggccattaggggaaaaggaaggggtgtggtttgtctttgaaattacggttaatacttttagacagtaagtccggctggttgcagggctatttgccccgacagcatcagcctgtaacatttcttctctttcctttgtgccactgagtcgttccctggccagaggacataaatggtgctggtaggaggttatcagagtaaggaaggtagcagatataggtgcagggtgcctgtcattcactgtgttatttggtttaaatcaaagtgattctgggggaagctatgctctttcagtggataataaaattggtaactctattgtaaaacatgtcaatggtgtgtgaagaaaaatcaaccaatctgtaggtgttgataactagacagtactgtgtatgttacgtgcctgtgtggatgtgcacttccagcatggtatgtgtagcgatgtggatcatgccagagttcgtagatcctgttttggggtttgcacatggatcgtatgttaagctttttcttttcaataaatgaattttatttttatttttgaaaaaaaaaaaaaaaaaaaaaaaaaaaaaaaaaaaaaaaaaaaaaaaaa

SEQ ID NO: 223828 - DNA, 1000 bp, Homo Sapiens; identical to SEQ ID NO: 118443

SEQ ID NO: 223829 - DNA, 1000 bp, Homo Sapiens
tccagggatgggttcaacttcacagaactttttgaaaatgcaggaaaccttacagtctgtcaaaaggagctttgctgtcatttaagctacagaatgttacaaaaagaagagaatgaagtatacgttctaggagcttttacaggattacatggccgaaggagaagagagtactggcaggtctgcacaatgctgaagtgcaaaactactaatttgacaacttgtggacggccagtagaaactgcttctacaagatttgaaatgttctccctcagtggcacatttggaacagagtatgtttttcctgaagtgctacttaccgaaattcatctgtcacctggaaaatttgaggtgctgaaagatgggcgtttggtaaacaagaatggatcatctgggcctatactaacagtgtcactctttgggaggtggtacacaaaggactcactttacagctcatgtgggaccagcaattcagcaataacttacctgctaatattcatattattaatgatcatagctttgcaaaatattgtaatgttatagggcgtctctttatcactcagcttctgcatcatatgcttggctgaatgtgtttatcggcttcccaagtttactaagaaactttgaagggctatttcagtagtatagaccagtgagtcctaaatattttttctcatcaataattattttttaagtattatgataatgttgtccatttttttggctactctgaaatgttgcagtgtggaacaatggaaagagcctgggtgtttgggtcagataaatgaagatcaaactccagctccagcctcatttgcttgagactttgtgtgtatgggggacttgtatgtatgggagtgaggagtttcagggccattgcaaacatagctgtgcccttgaagagaatagtaatgatgggaatttagaggtttatgactgaattccctttgacattaaagactatttgaattcaaaaaaaaaaaaaaaaaaaaaaaaaaaaaaa

SEQ ID NO: 223830 - DNA, 1000 bp, Homo Sapiens; identical to SEQ ID NO: 118446

SEQ ID NO: 223831 - DNA, 1000 bp, Homo Sapiens
aaaatattcaccgaagaggaaaacccaaaagtgacactgtggattttcactgttctaagctccccgtgacctgtggtgaggcgaaagggattttatataagaagaaaatgaaacacggatcctcagtgaagtgcattcggaatgaggatggaacttggttaacaccaaatgaatttgaagtcgaaggaaaaggaaggaacgcaaagaactggaaacggaatatacgttgtgaaggaatgaccctaggagagctgctgaagcggaaaaactcggatgaatgcgaggtgtgctgtcaagggggacaacttctctgctgcggtacttgtccacgagtcttccatgaggactgtcacatcccccctgtggaagccaagaggatgctgtggagttgcaccttctgcaggatgaagaggtcttcaggaagccaacagtgccatcatgtatctaagaccctggagaggcagatgcagcctcaggaccagctgaaatgtgagttcctcctcttgaaggcctactgtcatccacaaagctccttttttacgggcatcccatttaatattcgagattacggtgagccctttcaggaagcaatgtggttggacctggttaaggaaaggctgattacggaaatgtacacggtggcatggtttgtgcgagacatgcgcctgatgtttcgcaaccataaaacattttacaaggcttctgactttggccaggtaggacttgacttagaggcagaatttgaaaaagatctcaaagacgtgctcggttttcatgaagccaatgacggcggtttctggactcttccttgaccctgttctgtaaagactgaagcatccccacctcaggattcagctgatgggaccctggcttggactgttgattgccagtgagtctgggatgtaattggctgccctcaggacccaaacccagacacttcataggattatcacaccctccatctttattctttctttttacctttaaaagtctatatcta

SEQ ID NO: 223832 - DNA, 1000 bp, Homo Sapiens
ggtggctcacagctttgaacctgccaaaggacccctcgactggccacagcccagcccagcctgacgtggatgtggctgcccaggaaaagacttaactgtgaaaaagtactgagaacccacctgacccaggcttgccccaagcagaggctagagaagaggctcctcttctcagtgtttcccaaaggggcggctcttgtggtttcaaaatctctggcaccatcttgacctcttggctctctctgcactttgccccctgtctcaaaaatgtccctcatgtccatttcctgtccaggagactcatgaggactgtgtgacctgcacaagcccacacctgggcaggctgttggtgtctccttggtccttaggcagatactcccctgagtccccgatctagggccagctgcagagggctctctctaggcagagcgttcctggccagagctctacctctttgcctcctgctgacccctgacagcgtcccgtggcatttctttcatgtctgcatattgcatagccttgtcctcctgtgtgcctgagctcctcccttttcaataagattattagtcgtgcatgtctgtgagctgcctttcatcaccatttttcctgagtagggcttagttttattctggaaagacatctccaaggtgaggtccacccccacagcagacctcaagtagaaattgcccaatttttaccagctggagggacacccttgggtttttgtacgaagctatttaatgagcctgtgtcttggggactcagcaggctggagcttggggcctggtggaccatcacctggtgtctgtaggtggacccggtctcccacaggtgacatcaacctgagggtggcgtctttagagacaggcacatgggcagctctgttcccttcgcctctactgcgaggcctggggagatgttgttttcatgctgcttccaccatcacactggggtttctggatgggaaataaaaaaataaaggcagttcatttccccaaaaaaa

SEQ ID NO: 223833 - DNA, 1000 bp, Homo Sapiens
taaaaactggcccgtggagactgagatcactgactctgactcatccccacagctggctctgacaagatggtccatttgttcctgcttccgagatccccagggcagcctggatccctgcccttctcaagactttagcttttccttccatccggtggcctattccaggaattcctcttttgcttaaatcagttggagtttgtgtctgttgcttgtaatcaagcctttatggctgctgggctgagtgacacaagcactttaatggcctggagggacttttaatcagtgaagatgcaatcagacaagtgttttggaaagagcaccctcgagaagggtggatgacagggcagagcaggaaggacaggaagctggcagaacggaggaggctgcagccgtggtccaaccaggagctgatggcagctggggctaggggaagggctttgagggtggaaggatgggatgggttccagaggtattcctctcttaaatgcaagtgcctagattaggtagactttgcttagtattgacaactgcacatgaaagttttgcaaagggaaacaggctaaatgcaccaagaaagcttcttcagagtgaagaatcttaatgcttgtaatttaaacatttgttcctggagttttgatttggtggatgtgatggttggttttatttgtcagtttggttgggctatagcacacagttatttaatcaaacagtaatctaggtgtggctgtgaaggtattttgtagatgtgattaacatctacaatcagttgactttaagtgaaagagattacttaaataatttgggtgagctgcacctgattagttgaaaggcctcaagaacaaacactgcagtttcctggaaaagaagaaactttgcctcaagactatagccatcgactcctgcctgagtttccagcctgctagtctgccctatggatttgaagtttgccaaccccaacaattgtgtgaattaatttctaaaaataaagctatatacagcc

SEQ ID NO: 223834 - DNA, 1000 bp, Homo Sapiens
ccccagccccctgccagctgcagctgctactttaaccaggccttccacctgccctgccgccacatcctagccatgctcagtgcccgccgccaggtgctccagcccgacatgctgccggctcagtggacggcaggctgtgctaccagtctagacagcatcctgggcagcaagtggagtgagaccctggataagcacctggcagtgactcacctcaccgaggaggtgggtcagctgttgcagcactgcaccaaggaggagtttgagcggaggtatagcaccctgcgggaactggccgacagctggattgggccttatgagcaggtccaactctgattattctcgatgcccagagatgctcatgcacctgtgcacactcacatccacccatacacacacacacacacacacacacacacacacacacactcccttacactgttgtacttccgtgggccctccttccagaacaaggacaacaaggacaaggttgaagggtcttctcatctaccatggcctgctacctagcatgtgtctagctcaatgagacaggagtcagcaaatcttaatctgtttagtttactcaggtggccacatacagtctctgttgtatattcttggttttgttttaatattttttttctttttttttttttttttttttttgagagggagtctgtctccagcctgggagggtgagactccatctaaaaaaaataaaataaatggcaacccctggtctaagataagagataaaacatcaggtggtgaggttgaggtttggggcttggtagcagttgccccagtcatgagatgactcacttaacccgtctcctttaagtgagctgggctgggaggcttcctacaggggaagaggcccctctggggagctgactcagccaggctccctgaacttttttccttgtcccatcctggggtcaataaaactgaatgttgcatattctaaaaaaaaaaaaaaaaaaaaaaaaaaaaaaaaaaaaaa

SEQ ID NO: 223835 - DNA, 902 bp, Homo Sapiens; identical to SEQ ID NO: 118453

SEQ ID NO: 223836 - DNA, 1000 bp, Homo Sapiens
ctaggtcgttccccagcacctccaggttggcccacacaggtaccataagctgcctcggctccctgtggcttgtgcccatgcacctgccagggcccagcaggccaacccatcatctagagtagtggccatcagcacccgcctaacgggcaccatgccaagcactttcatcattatttatacatcgtcaccacaccccctctattcatgagaagtaaagctgagaaaggaccagattgaccaagcgccagagacaaaatgtggcacaacgagaaccccagccctgtccaggtggctccgcgcccagggcccaggcttagcagtgctccctgccctatctttgggaaaatcttgcttttatggtcttcccccctctcgccctcaagaacaagggccttgtgcgtgggccttcccattgctgctttcccaagaaggcctggattcaggggagaggccttcccagggccactccccttacaccctcccagaggcctgagcaacccctctctgggtggtttggggctggtgctgcctggcggaaggacagtgagggcggccctagccgcctccaccctcttgcgcctctgccctctcccagtccccctgtggcttctgaaaatctcagggacagatgaggctgagcccctagtcccctctgtgtgctttgagcctccagactcgaggctggtcactgcaggtcccaggtggaatttggacaactggcctggccgctcccatcctgtaagcccccaccacggggagaccctcatccctgcccctgtgtggctgcgcaagtattctgcccgcctcccaccatcagccttcgcccaaggggcccttctgcctctgcttccctcccttctcctctgtcttgccctggcccacgcacgcctgtctcgtcttccttgttttgctgcactcacttttttatactctgacaaaaaaaaaaaatcagaaataaagctggttcccaagtgaaaaaaaaaaaaaaaaaaaaaaaaaa

SEQ ID NO: 223837 - DNA, 1000 bp, Homo Sapiens
ctatgttcatggaccgccgccagcacccgggcagccacgtgcacgggccgcgcctcgtcatctgctgcgaaggcaacgcgggcttctacgagatgggctgtctgtctgcaccgctcgaggccggctactccgtgctgggctggaaccaccccggcttcggcagcagcactggcgtgcccttccctcagcacgacgccaacgccatggacgtggtggtcgagtacgcactgcaccgcctgcacttcccgcccgcgcacctggtggtctacggctggtctgttggcggcttcacggccacctgggccaccatgacctacccggagctgggtgcactggtgctggacgccaccttcgacgaccttgtgccgctggcgctgaaggtcatgccccacagttggaaggggctggtggtgcgcaccgtgcgcgagcacttcaacctcaacgtggccgagcagctgtgctgctacccggggccggtgctgctgctccgacgcacgcaggatgacgtggtcagcacttcgggccgcctgcgccccctgtcacctggtgacgtggagggcaaccggggcaatgagctgctgctgcgcctgctggagcaccgctaccccgtcgtgatggcgcgagagggccgcgccgtcgtcacccgctggctgcgcgctggcagcttggcgcaggaggccgccttctatgcacgctaccgcgtggacgaggactggtgcctggcgctgctgcgctcctaccgtgcacgctgcgaagaggagctggagggcgaggaggccctggggccacacggacccgccttcccatggctggtgggccagggcctgagctcgcggcggcgccggcgcctcgcactgttcctggctcggaagcacctcaagaacgtggaggcgactcacttcagccctctggagcctgaggagtttcagttgccctggcggctgtaacctatatgccccagtgggggatcacgcacttgaactccaaaaaaaaaaaaaaa

SEQ ID NO: 223838 - DNA, 1000 bp, Homo Sapiens
ggcgctggcccccgatgacgacgacgacgacgaggatgagccccggggctccaggggcgggagcgacgccgcagaagacaactacctgtagccaccgcccctgcggacggcgtggctcagcagcccacctctgagtctcagctttgcttcggggaccctatccccagggcccccccatcacacctggcggggccggggggtcttcactccagggtctcgctccctgcccttggggcccggggccatgcagtacctggagtgtcctgcagggggaaagcgaagccgggccctgaagtccggggcagtcacccggggctcctgggccgctctgccgggctggggctgagcagcgatcctgctttgtcccagaagtccagagggatcagccccagaacacaccctcctccccgggacgccgcagctttctggaggctgaggaaggcatgaagagtgggctccacctgctggccgactgagaaaagaatttccagaactcggtcctattttacagattgagaaactatggttcaagaagagaggacggggcttgagggaatctcctgattctccttatatgacctcaaactgaccatactaaacagtgtagaaggtctttttaaggctctaaatgtcagggtctcccatcccctgatgcctgacttgtacagtcagtgtggagtagacggtttcctccacccagggttgactcagggggatgatctgggtcccattctggtcttaagaccccaaacaagggtttttttcagctccaggatctggagcctctatctggttagtgtcgtaacctctgtgtgcctcccgttaccccatctgtccagtgagctcagcccccatccacctaacagggtggccacagggattactgagggttaagaccttagaactgggtctagcacccgataagagctcaataaatgttgttcctttccacatcaaaaaaaaaaaaaaaaaaaaaaaaaaaaaaaaaaaaaaaaaaaaa

SEQ ID NO: 223839 - DNA, 1000 bp, Homo Sapiens
cgcgcgctcgcggaaccccgtggcttccccgacgcagcccagcggcacggagaaagacgcggctgaggcccggcgagaattccagcgcgacgcgggcgggccagcagtgctcggggacccggcgcatcctccgcagctgctggcccgggtgctaagcccctcgctgcccggggccggcggcgccggcggcttagtcccgctgcccggcgcgcccggaggccggcccagtcccccgaaccccgagctgcgcctggaggcgcccggcgcatcggagccgctgcaccaccacccctacaaatatccggccgccgcctacgaccactatctcggggccaagagccggccggcgccctacccgctgcccggcctgcgtggccacggctaccacccgcacgcgcatccgcaccaccaccaccaccccgtgagtccagccgccgcggccgccgccgccgctgccgcagctgccgcggccgccaacatgtactcgtcggccggagccgcgccgcccggctcctacgactattgccccagataacacgggccctgtcgcgctcccgccccggtcctgcacagccccgaagttcgccgggcccggccaccctgccccaagggcaagcaaggaatacgttcccccagccccaggggccaccgcggctctccccttccccagcctcgaagccatgggggccccctcgccacccccagccccttgggctatcgaagtatccggttccccagtccctggagccaccgcgggtccttccccggccccgagggccaagggggtccccgcccgccagtgccaaagcgcccggtcggaggcggaaggaagtgatatttattgttctccccgagaccgcgtcgcccgcggcccggccggcagttgcagtgtagacagcccgagagccccgcctgcaggcggtgtagatacatgtagatactgtagatactgtagataccgccccggcgccgacttgataaacggtttcgcctcttttgg

SEQ ID NO: 223840 - DNA, 1000 bp, Homo Sapiens
ggtgccacatgctgctacctgctctccagtatttttggcaaacagttggtggtgtcctactttcctgataaagtggccctgctgcagagaaaggtggaggagaacagaaacagcttgttttttttcttattgtttttgagacttttccccatgacaccaaactggttcttgaacctctcggccccaattctgaacattcccatcgtgcagttcttcttctcagttcttatcggtttgatcccatataatttcatctgtgtgcagacagggtccatcctgtcaaccctaacctctctggatgctcttttctcctgggacactgtctttaagctgttggccattgccatggtggcattaattcctggaaccctcattaaaaaatttagtcagaaacatctgcaattgaatgaaacaagtactgctaatcatatacacagtagaaaagacacatgatctggattttctgtttgccacatccctggactcagttgcttatttgtgtaatggatgtggtcctctaaagcccctcatttttttttgattgccttctataggtgatgtggacactgtgcatcaatgtgcagtgtcttttcagaaaggacactctgctcttgaaggtgtattacatcaggttttcaaaccagccctggtgtagcagacactgcaacagatgcctcctagaaaatgctgtttgtggccgggcgcggtggctcacgcctgtaatcccagcactttgggaggccgaggccggtgattcacaaggtcaggagttcaagaccagcctggccaagatggtgaaatcctgtctctaataaaaatacaaaaattagccaggcgtggtggcaggcacctgtaatcccagctactcgggaggctgaggcaggagaattgcttgaaccaaggtggcagaggttgcagtaagccaagatcacaccactgcactccagcctgggtgatagagtgagacactgtcttgacaaaaaaaaaaaaaaaaaaaaaa

SEQ ID NO: 223841 - DNA, 1000 bp, Homo Sapiens
ggtgcagcccagcccacggtgcctgttccatgaatgctggctacctatgtgtgtggtacctgttgtgtccctttctcttcaaagatccctgagcaaaacaaagatacgctttccatttgatgatggagttgacatggaggcagtgcttgcattgctttgttcgcctatcatctggccacatgaggctgtcaagcaaaagaataggagtgtagttgagtagctggttggccctacatttctgagaagtgacgttacactgggttggcataagatatcctaaaatcacgctggaaccttgggcaaggaagaatgtgagcaagagtagagagagtgcctggatttcatgtcagtgaagccatgtcaccatatcatatttttgaatgaactctgagtcagttgaaatagggtaccatctaggtcagtttaagaagagtcagctcagagaaagcaagcataagggaaaatgtcacgtaaactagatcagggaacaaaatcctctccttgtggaaatatcccatgcagtttgttgatacaacttagtatcttattgcctaaaaaaaaatttcttatcattgtttcaaaaaagcaaaatcatggaaaatttttgttgtccaggcaaataaaaggtcattttaatttaaaaaaaaaaaaaaaaaaaaaaaaaaaaaaaaggccaaggaaaaaaaatattcctacttaaattttaagtctataattcaatttaaatatgtgtgtgtctcatccaggataggataggttgtcttctattttccattttacctatttactttttttgtaagaaaagagaagaatgaattctaaagatgttccccatgggttttgattgtgtctaagctatgatgaccttcatataatcagcataaacataaaacaaattttttacttaacatgagtgcactttactaatcctcatggcacagtggctcacgcctgtaatcccagcacttggggaggacaatgtggggtggatcacgaggtc

SEQ ID NO: 223842 - DNA, 1000 bp, Homo Sapiens
gtaatctctgccaagccatctcttaatattaaagcagacaccacagaatagatttcttcacttacaaatgcatattgggcacttataatacagcaggaactcttctcacctggagccttgatgttaaaagacacagccatgctcttgaggagcttacaatcctggctggaggcaggggagggtatattctttaaatatgcttaagtgttatagggaaagacggggttaccagtaaacatgtaactagaaagccaggctcagttcttacctctgggaatcagaactctttatgcaacttggttaatagaatctactatctggaagataaatgaaggattttaataaaattttcaatagaataaacctaatctgtatggatactttatcaaaaatgaatgtccctgctatttctggatttatgaggcaatggtacactaaagaatggaatcagttcagtgagtagaaaggtatccaaggtgaagcctgagacgaatggctttcccaggctaccttccatcactgttgtacagaaaagaaatccagagaatcaaatggactggccttgggggtctctgctatggaaatgccattttttgtgtctcctttctcctactctttctcacatcctcttcatgattgaagcatggcacaaggcaaggtgttgcctgcgagtctggttgtaagttcagcctttggtgtttgcactactgctatcataaggggtcagggacattccggggagaagtgaccactaaggtgaggattagagagtgagtagaagtgagccagacaaaaaaagcagaaaatgcagatgatggaaaggacatgtgccatgcactatcataagaacttcctaactgaacactgatactacaattctgaatccctgatcttaaaaaataattatacttcaccaacaaaacttggcctcttttggttccactctgccaccctgccattggaacttggattactgtgaacattgcagctatagcaaaat

SEQ ID NO: 223843 - DNA, 1000 bp, Homo Sapiens
cttctcctaaccagtttttcaccaagtcctgtgccatttcacctcctaacgtctgtcagctatccttttgcctttacctcaccactattaccctagagaagactttcattatttctcatctggattaccagctcgatctctaatctgcttcagttcatccttcttgctacttctaggctaaacatcaaaaacagatctggtaggggcggggaaatgagggggaagaaacaaaaacgtgatggtgcctcatgctgcttaaaatcttcagtacattgatgttttgatggcggactacataagcgttaaaaattgtgtttttcagaatctttaaaatataagacagtgctatctagtgaataaaaaaattagtttgaaagatatctggagaaatcgcattcataaaacaattggaagtgaaactattaaaacaatagggctttttaaaattaaaaatatttaaaattcaaaagtaattaatagtgttggaagatgtaggtgagaaaatattcctgaaagtagaactgaaagagacaaagagaaaagatgaaagccacagaagataaatacaggggtcaaaaccagactaacagttttagaaagtgaaaaaagttaaaaaagaaatgggggcagtgggttattagaaataacataaatggctggtatggtttgtctgtgtcctcacccaaatttcatctcgaattgtaatccccataatccccatgtgtctagggagagacctggtgggaggtgattggatcatgggggtggtttcccctacgatgttctcctgatagtgggtgagttctcacaagatctgatggttttataaagggctctgcccctttaactcctcactctttctcctgaagccttgtgaagaaggtgctttgcttcccctttgcgttcccccatgattgtaagtttcttgaggcctccctggccatgctgaactcttcagtcaattaaacactttcctttataaattaaaaaaaaaaaaaaa

SEQ ID NO: 223844 - DNA, 1000 bp, Homo Sapiens
tagctgagatcggcctggccttcaacatcctggggatggtggtctttgcctttgccactatcacgcctctcatgttcacaggatatgggttgcttttcctgtcattagtcatcacacctgtcatccgggctaaactctccaagctggtgagagagacagagcagggtgctctcttttctgctgtggcctgtgtgaatagcctggccatgctgacggcctccggcatcttcaactcactctacccagccactctgaactttatgaaggggttccccttcctcctgggagctggcctcctgctcatcccggctgttctgattgggatgctggaaaaggctgatcctcacctcgagttccagcagtttccccagagcccctgatctgcctggaccagaagacagagggcaagaggagcaaagtgaacaccaagcaactggaggtctgcagctggaagcccagcccacagcaggacaagcaactcttgtctaagggcagtgctctctttggacgaggtagtcaagagagaccaaggcaccaccccatccacagctgacccagcctctgtctaggatctagaatcataacccacacaggcccactgcaggacaggtggcagaggagctatttgggacaggagtcagttctccctttctgctatccatcacttataaccccacaggccagaggagaggtcctgagagaggtgacacttcggggaccagaggcagcacgagggctggcatctctccttccagcccaaactgcacagccccaaccaggttcccaacacgtgtagcagtcatcagccattccttaacaatgaatgtggtacctggttagtgccagccttgggaaggagggagggaggtaagaggggcttggtgatctctggaggaagagtgttgcctttgctgtggttggggaatcgatccttggctatggcctacccactcccctggctgaagagtgccaatcattacaaatcagcttcagcaaactg

SEQ ID NO: 223845 - DNA, 1000 bp, Homo Sapiens; identical to SEQ ID NO: 118458

SEQ ID NO: 223846 - DNA, 735 bp, Homo Sapiens
gctgtgaggcgccagtgcggagcgggcgggcgggcgggcgggcgggcggcgcgaggcggagcgcgggcggccggcgaaactccaagggcggaccgcggcagggagcgatcggcctcgggctgcgggagccggagaccgcggcggcggcggctgctgcagctgcaggaggagcccagggaacaccgcccctgcctgtgctctgcctcgggccatcgctcctccccagggcccagtgcggactcgcctccgtgaagtgtcacaccatgtctgaccggaaggcagtgatcaagaacgcagacatgtctgaggacatgcaacaggatgccgttgactgcgccacgcaggccatggagaagtacaatatagagaaggacattgctgcctatatcaagaaggaatttgacaagaaatataaccctacctggcattgtatcgtgggccgaaattttggcagctacgtcacacacgagacaaagcacttcatctatttttacttgggtcaagttgcaatcctcctcttcaagtcaggctaggtggccatggtgaaggtgtcagtggcggcggcagcgatggcaagcaggcggcgttgctgggactgttttgcactggagccagcatcaggatgtcctctccaatggctgtgctactgcatggactgtatactcgatttcatgtgtatgtcgcagtaaacaaaaccaaacctcaaaaaaaaaaaaaaaaaaaaaaaaaaaaaaa

SEQ ID NO: 223847 - DNA, 1000 bp, Homo Sapiens
ttttggctccctgcaacctccgcctcctggattccagcaattctcctgcctcggcttcccaagtagctgggattacaggcacgtgccaccatgtctggctaattttttgtatttttttaatagatatggggtttcgccatgttggccaggctggtctcgaactcctgacctcaggtgatccgcccacctcggcctcccaaagtgctgggattacaggtgtgagcctccacacctggctgttttctttgattttattctttttttttttttctgtgagacagagtttcactcttgttgcccaggctggagtgcagtggtgtgatcttggctcactgcaacctctgcctcccgggttcaagcgattcttctgcttcagtctcccaagtagcttggattacaggtgagcactaccacgcccggctaatttttgtatttttaatagagacggggtttcaccatgttggccaggctggtctcgaactcttgacctcaggtgatctgcccgccttggcctcccaaagtgctgggattacaggtgtgagccgctgcgctcggccttctttgattttatattattaggagcaaaagtaaatgaagcccaggaaaacacctttgggaacaaactcttcctttgatggaaaatgcagaggcccttcctctctgtgccgtgcttgctcctcttacctgcccgggtggtttgggggtgttggtgtttcctccctggagaagatgggggaggctgtcccactcccagctctggcagaatcaagctgttgcagcagtgccttcttcatccttccttacgatcaatcacagtctccagaagatcagctcaattgctgtgcaggttaaaactacagaaccacatcccaaaggtacctggtaagaatgtttgaaagatcttccatttctaggaaccccagtcctgcttctccgcaatggcacatgcttccactccatccatactggcatcctcaaataaacagatatgtatacatat

SEQ ID NO: 223848 - DNA, 1000 bp, Homo Sapiens; identical to SEQ ID NO: 118460

SEQ ID NO: 223849 - DNA, 1000 bp, Homo Sapiens
tgacagctccatgagatagagacctgcctcccccttgcacccgaggccctcgcagcagggagctcagcgaggcagagggtggggctgcacagaggggaacatcagctgcagctctgcaccaggccggtccctggggactggggcgctcctccctcaggctttctccctcagtcttggcttctccagggctctggggtgtctggagctaggcttggccctaccattctggggccatttccaccacagttggggctctcctgccttcacgcgtgggtgtctgctacttccccatctttaaaatgctgccagagcgattgcggcccctcaccttgtccacgtatcaggaatgtgaatgtgggacctttcctccatccctgttgtccggagccagctcactgtcttccacactggtgctaactggcccaggcactggagtggaatagaatgcagctggaggctacgcatggcctctgcagcacacgcagctggagagggcttctgtccctgtcagcggcagagggcgttggggctggccggggcaccttgtccctgctatggtccacatgctcacgctgtccacctgccaggtggagtgtatgtggctgtggccctccctcgtggaggtgccgtgctttaaagaggccttagtgcccgggatgggcacagtgttttgaagggaggtgggagctcttgctctcctggtcactgcagaatgacagagaaggtgaagctccatgcatgtgtgcgcgggtgtatgtgcgctcagggtctctgtttaagtatcagctaaagatgtgcttcctccgtgtctgtcatacactgagaccaacaggctacagtgtccctgattcttggaaaagcctggagaagctggggagatgcggttcacaatgcctcggtataggaggctgtgttgagctgacattcaaatggattctttaataataatgaaactggcgagtaaaaaaaaaaaaaaaaaaaaaaaaaaaaaaaaaaaaaa

SEQ ID NO: 223850 - DNA, 602 bp, Homo Sapiens; identical to SEQ ID NO: 31093

SEQ ID NO: 223851 - DNA, 1000 bp, Homo Sapiens
cgctgggagcccagcggcaaggcagagccccgcctgcctgaccgtgtctacattcaccccgactctcctgccactggtgcacattggatgcggcagcctgtgtctttccatcgtgtcaagctcaccaacagcacgctggacccccacggccacctgatcctgcactccatgcacaagtaccaaccccgcatacacctagttcgggcagcccagctctgcagccagcactgggggggcatggcctccttccgcttccccgagaccacattcatctccgtgacagcctaccagaacccacagatcacacaactgaagattgcagccaatccctttgccaaaggcttccgggagaacggcagaaactgtaagaggtgggagttgttcattcatttgttcatgcattcaacaaatgtttattaatcactcactgtgtgccaggcaccgtgctggacatcagaaatgcagtggtaagtgaaaacattcattcactgactcagcaaatacttatatagtacctgctatgtgccagggacagttccaggcactggagataaaacaaacaaagcaaaccaaagccccggccctcatgcagctgatttctagtggggagagtagacaagcagacaagagaaataaataaaatgtcatctgttaggaagccattctaaagagaagagagaccaggtgtggtggctcacgcatgtaatcccagcactctgggaggctgaggcgggcagatcacctgaggccaggagttcgagaccagcctgccaacatggtgaaaccctgtctctgctaaaaatacaaaaattagccaggcatggtggcaaacgcctgtaatcccaactacttgggaggctgaggcaggagaatctcttgaacccaggaggtggaggttgcagtgagtcgagatcatgccattgcattccagcctaggcaacacgagcaaaacttcctctcaaaaaaaaaaaaaaaaagaaagaaaagaaaactctgtctc

SEQ ID NO: 223852 - DNA, 1000 bp, Homo Sapiens
atggggacctagtgggttttgacagcgtggtgtccagtcctagccccctcagtgcttgctgttcacacttaagcaagtgaaggcctgaaggtgcccagctgtgccctcaggggaaacttaagtcacccgccctgtcagcacttggcccttgtcgggcagtgagagtggagctgcccccgcagcaccctcaggagccatgcagttcacagcagtagctggatctccctgaggacatttgtccttgcatatcttaatgatttgtccacagaaacaccgggttgtcttcctctgcccctctgccccgcagtgggggcactctctgtaactcagcatcacggtggggggcagctgggaggcctggttccaggtgaccttctccacctagatgttcaccccactcagttccagctttaccaacagggccccccgcagggacttggggtcgcagagtcccggcctgtctcagggccttgttcatggaagggagatgagtcaggttgaaagctcatcgtgtagggttctgtgcagggcccttacaggactggaccgcagccaagatgcctgcctgttaaccatgcccagcccccgtcatttccgcgtgaagccgcaggcctcggagccttggtctgaaatgcctgtggagtaacctcggtccataaacatgggtgcacagtctgttctccccaagtacagggcaggaggaaacaccgccctctgtagctgctcgaatggaaagggctcttttctctgaggtctttatacattagaaagctcttctgggaagaatgtttgaatccatagtgtctttctgtattcacttttaattgctttctaaattagctgagaaattctgacttgaaatattgtcaggtaagcatttcttcagttttcatgtgtgtatgtaacagtagctttgcatggaaattgtaatcagagtcaaatacagtattgaatggaatgtactgccttctcctcctaaatcaataaacatctttcatgg

SEQ ID NO: 223853 - DNA, 1000 bp, Homo Sapiens
ttcttcgaagaacaccttctattaaacttgttatctcttgtaaattattgtgtgtgtccttttgataatattcacaggtgtttcaaaggtaaggaataggttgtctcttggattaagtcatatgcctccagccattatatgagaactgtgaaaccaatatggttttctttatgtcttggctgcttgaaaattaaaaaaaaaaaaggtttgttcaatattgccgttacatttattagcctgtaatttctaaattggagattctctacatttcacttgcagtttcctgttctcctcattgcctgccttccattcatattacacttatttttctattttttgtattacctttttaaaaatatataccagttcaagtccttttaggaagaagaaaatacctaatttatgtaaaatttaaataattacttttttataatatgattcacttatgccacagattcaacattagaatatgttttatctctactgtcagttttattaccttatatacaaatcttcattttcatacatagtacaatgtaaatatataactttgttaacacttttgttagctctttgaccataaaataatgacaataagctgtttctatgtatttgtttatctacaaattacaggtttatccatttgcaaatattttcaaaatggaaatcactgtttatattgattataaacataagacatgctcattgtaaaaaatgtacacaaggcagaaggaagtaaaatttccacagttcagaaataccacaattaatattttcaatgtgtaaatatcttttcatattttttcctacgtatacacaaacattttgaccaaaaatccacactatatgtactgttctgtatttttaattttaaactgaacaataatcatcttttcctgacaataaatatcaatctctatcatcaaaaaaaaaaaaaaaaaaaaaaaaaaaaaaaaaaaaaaaaaaaaaaaaaaaaaaaaaaaaaaaaaaaaaaaaaaaa

SEQ ID NO: 223854 - DNA, 1000 bp, Homo Sapiens
ctccccacccacagccgcctgacctggacggccacccagagcccagcaaggctgaagtgctgagaccagagtccgacgaactggatgagacagacaccccaggcagcgaggtgggcctgagctcccaggcggaggccactacgagcacgaccggggaggggcctgagtgcatctgcacccaggagcacgggcagggtccaccacggaagaggaagcgggcctcggagcctggggacaaagcctccaaaaagccatccagagggagaaggaaactgacagccactgaggggcccgggagcccaagggacgccgaggaccacagtccctcccccaacagcagcccctgggaggagacctagccagcctgcaccagggtccacagtgagcccggggcagccctccacctgcccaccagggcctggagagggcacaccatccaaccagcaggcagccctgcacagaaccctgggagaagacctagccagcctcagctgaacccacagtgagcccagggcagctctctgcctgctcaccacagcctggagagggcacaccacccaaccagcaggcagccccgaagagccggtgacgggcacatcctggcccacttcaagaggggctggaggaccgagaggggtctcaggctggcgattcaccccgtctccgcccacctgggaaatgctctgcggcccctcccacagcccagcacctgctccctgaggggtgtggggactggaggcgggatcactcaggctccagcccagccctacccctgctgtgcactgcagccgttcccaggcagtgcccacgctctgggaggcaacggaccactcggacccccacccctgcccgccaagctccaagcacaatcttggacgccccctcgtgggctgacagcaaacagatgtctggcagtgagggtggagggagacagtgggcggcagcaccctcgaagaccgggtcccctgagtgacggagagtaaacacttgaagaaccgtg

SEQ ID NO: 223855 - DNA, 1000 bp, Homo Sapiens; identical to SEQ ID NO: 118463

SEQ ID NO: 223856 - DNA, 1000 bp, Homo Sapiens
ggcagccccgaccaggcctatgacttcctgctcaagttcctgctggtgggcgacagggacgtaggcaagagtgagatcctggagagcctgcaggatggtgcagctgagtccccgtacagccatctcggggggatcgactacaagacgaccaccatcctgctggacggccagcgggtgaagctgaagctctgggatacgtcggggcagggaagattttgtaccatattccgctcctactctcgtggtgcacaaggagtgatcctggtctacgacattgcaaaccgctggtctttcgagggtatggatcgatggattaagaagattgaggaacatgcccctggtgtccctaaaatcctggtggggaatcgcctacatctggcattcaagaggcaggtgcccagggagcaggcccaggcctacgccgagcgcctgggtgtgaccttctttgaggtcagccctctgtgcaatttcaacatcatagagtctttcacggagctggccaggatagtgctgctgcggcacaggatgaattggctcgggaggccgagcaaggtactgagcttgcaagacctctgctgccgcaccatcgtgtcctgcacacctgtgcatctggtggacaagctcccgctccccagtaccttaagaagccacctcaagtccttctccatggctaagggcctgaatgccaggatgatgcgaggcctctcctactccctcaccaccagctccactcacaagagcagcctctgcaaagtggagatcgtctgcccaccccagagcccacccaaaaactgcaccagaaacagctgcaaaatttcttaaggaaggcaccaaaaggaaacaagctggaatcgctccaggaaaaactctggttacacctggaagatggaagtcgcattgtagattcaagaaattagttttcagtttctcacgggaaccatgctgcttgggaatgtgtgtgatgccttctgtcaataaaaacacattacacaaaaaaaaa

SEQ ID NO: 223857 - DNA, 1000 bp, Homo Sapiens
tctccctattactgtcaggagtgggggcagattctgctgctggggaaggaaacaggagcctggttcacaggcttagtgatggagatatgacctcagccctaaggggggttgctgatgaccaaggacagcacccactgttgaagatgcttcttcacctgttggctttctcttctgcagcaacaggtcaccttcaagccagtgtcctgacccagtgccttaaggttttggtgaaattagccgaaaacacttcctgtgatttcttgcccaggttccagtgtgtgttccaagtgctgccaaagtgcctcagcccagagacacccctgcctagcgtgctgctggctgttgagctcctctccctgctggcggaccacgaccagctggcacctcagctctgttcccactcagaaggctgcctcctgctgctgctgtacatgtacatcacatcacggcctgacagagtggccttggagacacaatggctccagctggaacaagaggtggtgtggctcctggctaagcttggtgtgcagagccccttgcccccagtcactggctccaactgccagtgtaatgtggaggtggtcagagcgctcacggtgatgttgcacagacagtggctgacagtgcggagggcagggggacccccaaggaccgaccagcagaggcggacagtgcgctgtctgcgggacacggtgctgctgctgcacggcctatcgcagaaggacaagctcttcatgatgcactgcgtggaggtcctgcatcagtttgaccaggtgatgccgggggtcagcatgctcatccgagggcttcctgatgtgacggactgtgaagaggcagccctggatgacctctgtgccgcggaaaccgatgtggaagaccccgaggtggagtgtggctgaggccctgagtgtccagccacatggtggcaccagcaccactcctttccttaccacatcaactgattaaagcagtgaccagcaggaactgcccagagaactgg

SEQ ID NO: 223858 - DNA, 1000 bp, Homo Sapiens
aaggccaggatggaggaagaagcctacagcaagggattccaagaaggtctaaagaagaccaaagaacttcaagacctgaaggaggaggaggaagaacagaagagtgagagtcctgaggaacctgaagaggtagaagaaactgaggaagaggaaaagggcccaagaagcagcaaacttgaagaattggtccatttcttacaagtcatgtatcccaaactgtgtcagcactggcaagtgatctggatgatggctgcagtgatgctggtcttgactgttgtgctggggctctacaattcctataactcttgtgcagagcaggctgatgggccccttggaagatccacttgctcggcagcccagagggactcctggtggagctcaggactccagcatgagcagcctacagagcagtaggaaacctcacacctagccagtgccctgctctgagacactcagactaccaccctttccccaagtataacgtcaggcccaagtgtggacacactgccgcccatcccatcaggtcatgaggaagggttcttttaacactcggcacttctgtgggagctattcatacacagtgacttgatgttcttggaggatcaacaaaactgccctgggaaagcatccagtggatgaagaagtcaccttcaccaaggaactctattggaagggaaggtctcctgcccctagctcaggtggctggggagaactaaaacaccttcactggtggttgggggtaaggagcggggcacgggggaggaggaggtagggggcagtaaaaaacttactctcttttttcctctctgtaattggttatcaggaagaatttgcttaatgactaacaccctaagcatcagacctggaatttggagttgcaaagtgactatcttcccatttcccatctcattttcaataacttcagcctcccattctttcctttggaatgagagtttctttttacagaagtaggaaaggcttctcagaaaaaaaaaaaaaa

SEQ ID NO: 223859 - DNA, 1000 bp, Homo Sapiens
aaatctaatattttatctttctttttttatgaccaacaaccaaataaagcccatcatcaatcatctctcactatatattatagtaaaaccctcgaaagggatcacccccacactcctttcccttcccctctccagcccttttctccatccctgtccaattcatctttgctaaatcaggtgtcaccttccctcagcctcgcctatcaagaaagcctcacttcaatgtcatctttgccacttccctcttctttgtccagagagccagcccacagccaatgcttattgatctgttctaagcatcccagctgtctcctcttttctattcctactgtcaatctacaacccataacacgctcttacaatttcatggatcatttaatgcattcttcaagttttgctctgaaatttgtcttttaaaattattctgttggatggacaatgatttgacactcctggcaatattaaaaatatacatttcattatatatttcatataacatatatatttatttatttcccccccatagaaggcaaaatggctttcaacaatggcagttaagtctacacagcctctcaactgctttgacagagacaacctcctctgaaatattaaagttctggtatatttttgaaacagtcatattacatgtcaacgtaactataatgtaaacatcatatcaaaaaacagatgtgacccttttctgctatggtatgaatcatctgtttatgaagtggctgaacaagcagaaacagcccttcatttggaaattcaaatctgaaagtcatagtgctgaattaagtcttcacaaacaacacataaagatccagacattaggactgtataccttttcaatctgtttttgtttattgagttctttctgttgcttctcttttactctctctatttctttttgtttttctgatgccctacgatcctaaagaacagatgaataaaactaatgaattaaatatgaaataacttaaaaaaaaaaaaaaaaaaa

SEQ ID NO: 223860 - DNA, 1000 bp, Homo Sapiens
ttattgatggatacagacaacagaaagcctacatcgctacccaggggcccttggcagagaccactgaagacttctggcggatgctctgggaacacaattccaccatagttgtgatgctcaccaagctgcgtgaaatgggcagagagaaatgtcaccaatactggccagcagaacggtctgcaagataccagtactttgttgtagatcccatggctgagtacaacatgccacagtatatcctaagggaattcaaggtcacagatgccagggacggccagtcccgaacagtaaggcagttccagttcactgactggccagagcaaggagtgccaaagtccggagaaggatttattgacttcatcggccaagtccataaaacaaaagaacagtttggccaagatggacccatttcagtccattgcagcgcgggcgttggaagaactggagtcttcataacgctaagcattgttttggaaagaatgagatatgaaggagttgtagatatcttccagactgtcaaaatgttaagaacacaacgaccagctatggtacagacagaggatcaatatcagttttcctatcgtgccgcactagagtacctgggcagctttgaccactatgcaacgtagaaacccctgacccattctggatttttactacaggcccttcaatatccatggagtctcttctgagccatacagggcacttgagaagtccttcttaacttctagctaacaactacttagtgggactattacacacaaaacaaattaaaaacaaattattccaggtggaccaagaattctttgacatcgccccttcccaccatactgctcataataacattttaggggccaaggggagggaatgtttaaaaagaaagtccttgatttagttttttagtattgtaaagatactgctgacctgtgcttcatttctaactgtgtaaacttttttttaacaaaatgtatcattcgataaagtgaattttaaaaaagtt

SEQ ID NO: 223861 - DNA, 1000 bp, Homo Sapiens; identical to SEQ ID NO: 223860

SEQ ID NO: 223862 - DNA, 1000 bp, Homo Sapiens
cccacacccaggggccaggctctcccggggtctcatgctttgcccactgacccggcagttctgagcctggctttggcactcccagctttgtgactttgggtgagccttacagcccctgagtcctacacccagaaggtggctgagggaactgaggccagcatttttcctcctgcccctgggggtttggggccggcttctcccctcttgtgaagcacaaagtcccctccccacctacccttcctgcagatggcttctcaaactcgggcatcatggaagagcgcctcctagacgcagtggtgcccttcctcccgctccagcggcaccacgtccggcactgcgtgctcaacgagctggcccagctgggcctggagccaagggatgaggttgtccaggctgtgctggacagcaccaccttcttccctgaagacgagcagctcttctcctccaacggctgcaagaccgtggcctcccgaatcgccttcttcctctgactctctgagtggtgtcctcggcccccctgatggccaggccatgcaggaaaggccaggggcctctgtcacaggaacccagagcaccaagtgagatgaacggagtgtcggctaggccacgggacagatggccaggaagggccctggcctctaaactggctcgagagcatcttggccccggccaccttccccagggaaacccctggtcaccccagaacctcactgagccttgacctccccctgcagcctgagccttcttactgtgaattataactcagggactgtggctcgtggcggtgctccctcctcagtctgccacccttgccccttgcctccttggtcgggcaccatacctcctcccctccaccccacaccctgtgtccatatcaagccaggtggagccttctcagtttccagaaatggagggactcatgctgccacttgggcctggttttagatgtttttaattttgtaaaagaaaacaagtataataaactcagctgtgggaccag

SEQ ID NO: 223863 - DNA, 1000 bp, Homo Sapiens
atggtctgcgacgtcaggccccaggtccaccccaactaccggatttctgcctagggccaccgtagggcctgactccttctgccagttccctccctcaaagaaatcctccaatcaaaatcacctcccaccataatccctgtcttctttccatcccctagaaatcctgggaggcaggatccaataattttcctgtgacacttataaatatcctgctcacatctgaatctccttgttgttctttaaccctcactgggactttgtaaacttccaagtcattctcacctaaaccctctgtgaaatttgtaatatggggaagtaggaatgtggaaaacatcctgacttcagtgtctggccgatgtgggtccctctcttgaccctgtcacttgctggctgtgaaaccaggacaagctacttaacttggtagcctcgatgtcctcctctgtgaaactgggatgataataatgcctaccttgtgagggttgcttcaatgattaggaatcattctgtaaagtctagcacagttccttgcatgttgtagcagtgattcagtaagtagcaaccctgtgatactattaccaccacctgctcactggtcaaaacctacacagctgtttcctcacgtccatcactggctctctaattccacttgttcattctgtgaccctagttattttctgaaaaattggttcttctcttttcccagagaccttctgatctccaaaaagaggagatgactacatttagcccctctcttataattccaggtagataactgcattttgtagcctctctttgtttttcttttgctgatctttgtctttattagattttcctcctttcctatttccccaaagacttatcagatgctcattgctttctaagatctaaaatgatactgtgttccctcatatgcatgcccttcctttctatatccttgacaccttactttcccattgtaacaataaaaaaagtatcaataaaataattattggcaaataaa

SEQ ID NO: 223864 - DNA, 1000 bp, Homo Sapiens
acttgggtcttgctgcccatccttcctcagcacagggaacccggaagcccgttgcactgacagaggctcacaccctctgggttttttgttttttttttaaacttcatttctcttccaacccattgtgttcctctgccctcattctttacctttgttgtaagaactttagctccagggaactgaggcagaggccctgtttgtggtctgtgttgacagccacccaccctctcccacctcatgctcctgcacctgcaccaccaaggttgatgccggattcgaagccaggaaggcccagtccctcctctgctctcctcaaagacgcaaaacattttccaacaagagctgtcacagtggcagcaaagcaggggccacccgtctccacagtccttcagagtttcagctgcatcctggtgtcccacccaggtcgagcccccaggcttctggaaaagagtgtgtgctctactttgatggaaacatggcaaggaatttaaagacaggaatgtattaatattattgaaggtgtgttcgtaacctctgattctgtggacttgccactttctccaaacgctcggttcctttgaagatttcttctgaacgtgtgtgcgcacgctgggcgggttcgtgcatacatgcggggaccccagactgtcagcacagggaagatggatcccatcctaatttttatcacctgaaggttggaaccagtgagggactgggagagagtgatttataagcaccaatatcaacttcatgtggatttttgacaaggaggggtagtttgtaatttcatttaaattcttttcagcagctggaaatattgcactatctgaaacactgaatctccttttgtaactggtgttcactgacaccttgatggctcttgatggctctaaaaagttgtaggattttttgtttttgtagctaacttatggattgagatgtgatcaaaggctttattaaatttgtacttcagcataaaaaaaaaaaaaaaaaaaaaaaa

SEQ ID NO: 223865 - DNA, 1000 bp, Homo Sapiens
gctgggaggaggtggaggaggaggaagaggagaaggaaaagtgacgaagagagaggaggaggggggccccagatggcccttcctttggtgcatgaaaaactgtacaatgaggttcagcacagccagcatcagccgagcttttttgtgaaactcagatcagccacccaggaggaagagcgggctgaggaaacccagagggaccaagcgctgagaccaaagttgaccctcgggtagggttgtcctgcctggggccccacttgaaggaggcaggacagaggcaccgaggccagggagacgcccaacgaggcagccctgggctcttctctggcctcttcaccagggcacccatccaaggaacctccgaacagccaggaaaagccatgagttgcaaccaaaacgcggctgaggatggaactcagaatgaaactgcaacccacctgcccccagccctgcccctcgccctgatgcgaagctggagaggggcgtgctgcggggccctgatgcccccacccacctcggtccagcgcggccctgcccaggaggcggcagccgggcgcaccctcgccagccctgctggagtttgctgtgggcactgaggcgcgggcgcccttccaaagcacatactcaccgaatgtttacagactggctgtcctggcagggctttcaactgcacatgttttttatactttcctttttttttttttttttaatattttttacaaaaaaaaagattttatacaagcaatatatatatggatttctataatcactcgatgtgatacagtataaatatgctatggtttgtttgttatgaacagatagccaccagttacggccgttgtgtgtaactcctaagtactgtagtctctgggtgtcgggggtggccagggcgggggcggggtgcatttccatccttgtaaacccttcatagtactcagtcctgtatcgctcagtaaacattgctcttacttaaaaaaaaaaaaaaaaaaaaaaaaaaaaa

SEQ ID NO: 223866 - DNA, 1000 bp, Homo Sapiens; identical to SEQ ID NO: 118470

SEQ ID NO: 223867 - DNA, 1000 bp, Homo Sapiens
tcggggccgccttcgtggccaaggtgatgtcggtcggagaccggactgtgacattaggtatttgggacacagcaggctctgagcgctatgaggccatgagtagaatctactatcggggtgccaaggctgccatcgtctgctatgacctcacagacagcagcagctttgagcgagcaaagttctgggtgaaggaactgcgcagcctagaggagggctgccaaatctacttatgtggcaccaagagtgacctgctggaagaagaccggaggcgtcgacgtgtggacttccacgacgtccaggactatgcagacagtagctgctcctcagccctttggggggtgggggtgtgtggctgtctgggtggatcaaagaaaatagggactgccttggctgccagggcaaggtgctctaggaggtcttcctggcctccttgaactgtggggtccaggagactccctgaactgctagccctcccttttgtctgtttatctaattctcaggtatgaggctttagtcacttctctttacagatatcaaagctcagctctttgaaacatccagcaagacaggccagagtgtggacgagctcttccagaaagtggcagaggattacgtcagtgtggctgccttccaggtgatgacagaggacaagggcgtggatctgggccagaagccaaacccctacttctacagctgttgtcatcactgagtcagcactcacctggcctgggggaattaaaggaattccccgtaagggctggacccagctcctttctgggcttgggtagtcaaatgtctgagctaccccaggtcctcatgtcagcagagtggcgcctgcctgtgctggcccatggaacggagacagcattgggctgactgtgggcatgaggagggataaggctgatttggaccccaggcttctgccctggacagcacttgtgtctgcagattatttaagtggcttttgatctgtaaataaaatcagtgcactgtgaatcac

SEQ ID NO: 223868 - DNA, 1000 bp, Homo Sapiens
gactgctctgactttagcatcagcttaatacacagaagaggtttctgtttttctgtggctctgtccatggcatcccacttgcccactctccttcctggagtgttgaggtcacacattgactcccctgagccctcttctctccaggctaaagaatcccgaaggcatcgaggccatttctgctgcaacaaggtttcctgtctcttcactgtccgcacatttcttagtattccctccaggcttgggcagggagactcgcagatgcacacccacaagtattcagttctcaaactctagacgagtgttggcaactggattgcaagatgctcctaccctgatagatcaggggtggctgctggaggctgtgctggggatctgaggtttggtctgggctcagtgggagatggcagtgcaatcctgatgagtgatgtctgccaggcaccgtaagtttgattagtgatgtctgccacgggcagggatggaaggagcagtgtgatgtctgctctcttctctcccctctgtccctcttcaggaagaaagagctcattctgtctcacaagccaccggcatcctgtatcagcttccagcctcccctcaggctttccagtcaccagggacactcggagccacagcctagagccccgtgttccctggcctgtgcgtctgcccccttctgagatgcagccagaagctctgtgcctgctgcaaagattcaggtggaccctcctctaatctcctcctgctgtgcccgccagtccttgccctcccaccaggtctctgagctcagtcttaccaaattcgccctttaacagcttgctctggcaaccccataaatgacacctgagctccgtagaagctaagctcctgagacccagggggacctgccactggtaccgcggcccagcctggggcctgggggctgcccctcttgaaccacccacatgcttagccccagctttttggaagaggcaaatggctggtctgaggatgacacacaaaaaca

SEQ ID NO: 223869 - DNA, 1000 bp, Homo Sapiens
agatatgctgatcatcagtctcaggccacagtttccttcactaatcgtccagcttgagtgttctgttctcttcctgcccatttccttgaacctcctgctctagccttggcggagggagagtgctgtttgcttttgttctccctctgtcttaggaaaagccatctttaatatagttcttcaccaccgttggggttgttttgtgattttttttttcttccgaagaactcctggttgttattggattttgtattttaatacaaattattgaattttataagcttgtacacaatatttaattagtgtgaaaggaaacaaagaatgcaggaaaaataatttaatcaacctcagttgacaaggtgctcagattattcaattcgggatcctccttttgttaggtttttgagacaaccctagacctaaactgtgtcacagacttctgaatgtttaggcagtgctagtaatttcctcgtaatgattctgttattactttcctattctttattcctctttcttctgaagattaatgaagttgaaaattgaggtggataaatacaaaaaggtagtgtgatagtataagtatctaagtgcagatgaaagtgtgttatatatatccattcaaaattatgcaagttagtaattactcagggttaactaaattactttaatatgctgttgaacctactctgttccttggctagaaaaaattataaacaggactttgtagtttgggaagccaaattgataatattctatgttctaaaagttgggctatacataaattattaagaaatatggatttttattcccaggatatggtgttcattttatgatattacgcaggatgatgtattgagtaaaatcagttttgtaaatatgtaaatatgtcataaataaacaatgctttgacttaaaaaaaaaaaaaaaaaaaaaaaaaaaaaaaaaaaaaaaaaaaaaaaaaaaaaaaaaaaaaaaaaaaaaaaaaaaaaaaaaaaaaaaaaaa

SEQ ID NO: 223870 - DNA, 1000 bp, Homo Sapiens
gtggctctaactccttgatgtcttgagtttcatttttcattttctctcctcggtggcatttgctgaataacaacaatttaggaatgctcaatgtgctgttgattctttcaatccacagtattgttcttgtaaaactgtgacattccacagagttactgccacggtcctttgagtgtcaggctctgaatctctcaaaatgtgccgtctttggttcctcatggctgttatctgtctttatgatttcatgattagacaatgtggaattacataacaggcattgcactaaaagtgatgtgatttatgcatttatgcatgagaactaaatagatttttagattcctacttaaacaaaaactttccatgacagtagcatactgatgagacaacacacacacacacaaaacaacagcaacaacaacagaacaacaacaaagcatgctcagtattgagacactgtcaagattaagttataccagcaaaagtgcagtagtgtcacttttttcctgtcaatatatagagacttctaaatcataatcatccttttttaaaaaaaagaattttaaaaaagatggatttgacacactcaccatttaatcatttccagcaaaatatatgtttggctgaaattatgtcaaatggatgtaatatagggtttgtttgctgcttttgatggctacgttttggagagagcaatcttgctgtgaaacagtgtggatgtaaattttataaggctgactcttactaaccaccatttcccctgtggtttgttatcagtacaattctttgttgcttaatctagagctatgcacaccaaattgctgagatgtttagtagctgataaagaaaccttttaaaaaaataatataaatgaatgaaatataaactgtgagataaatatcattatagcatgtaatattaaattcctcctgtctcctctgtcagtttgtgaagtgattgacattttgtagctagtttaaaattattaaaaattatagactcc

SEQ ID NO: 223871 - DNA, 1000 bp, Homo Sapiens
aggaagtttgttgtttgtttattataaacaaaaagcatgtgaaagtgcacttaagatagagtttttattaattacttacttattacctagattttaaatagacaatccaaagtctccccttcgtgttgccatcatcttgttgaatcagccattttatcgaggcacgtgatcagtgttgcaacataatgaaaaagatggctactgtgccttgtgttacttaatcatacagtaagctgacctggaaatgaatgaaactattactcctaagaattacattgtatagccccacagattaaatttaattaattaattcaaaacatgttaaacgttactttcatgtactatggaaaagtacaagtaggtttacattactgatttccagaagtaagtagtttcccctttcctagtcttctgtgtatgtgatgttgttaatttcttttattgcattataaaataaaaggattatgtatttttaactaaggtgagacattgatatatccttttgctacaagctatagctaatgtgctgagcttgtgccttggtgattgattgattgattgactgattgttttaactgattactgtagatcaacctgatgatttgtttgtttgaaattggcaggaaaaatgcagctttcaaatcattggggggagaaaaaggatgtctttcaggattattttaattaatttttttcataattgagacagaactgtttgttatgtaccataatgctaaataaaactgtggcacttttcaccataatttaatttagtggaaaaagaagacaatgctttccatattgtgataaggtaacatggggtttttctgggccagcctttagaacactgttagggtacatacgctaccttgatgaaagggaccttcgtgcaactgtagtcatcttaaaggcttctcatccactgtgcttcttaatgtgtaattaaagtgaggagaaattaaatactctgagggcgttttatataataaattcgtgaaga

SEQ ID NO: 223872 - DNA, 1000 bp, Homo Sapiens
tcagagactgaagcagaacagagtaagactcatgagaatctccacatgaaggcccctcccctgggatcactgtgtttaagagagagtggttcctgctgtttattctctggtcatgccttttcagcgaaagcctgtctcctcacccacccccagccctagcataggaaaagcttccttgatgtgagctctgggggagtgtgaaggatgcatctctagccccccagtaatcatcagtgtgatttatatgcattatcttcttcagtcacaacaacctcgtcatcatccccactttaaaccccaggagactgaaactcaaacaaccctgggcaagtaatgtgcaaaagatggcagggtggggatttgaacccaggtctacctgttgcagagtcaagggacttgcatgtgcaagttgggtggatgctgggaggcaggaggctcatgctcctgtctgcctggcttcttgtctgtcctgcttctaccccgaggactcctctgcagggagcgccatctgtgtgcgtgtgcaaatatgactcaattcacgtaaagatgcactcttgcagctccccagcctctacctgtcaggatgactccaggaagacagctggagtactgcatttgtgtttagggtttgtatgacccttccgagttgtcaccttcccacgctgatcccacatgtgtacatcatgcgagccaccccctgagctctgacctttctcttggccccttgtacaccccaggagagaagttctcaatcccagcagttctttgtagtcattccaagtggtacacgtctgtgccctgaaggaacactggcctccattctgacatctgggctggggcctcaggaaccacaagagatagcaatgtgttttaagttgcgcaggcccatcgtgataaggaattaggtcacaaatgggaaataaatcagaagcaatgaaattcctttcttaaagttctgtgttgtcaaaataaaagaagctttctgtcataaaaaaatgtc

SEQ ID NO: 223873 - DNA, 1000 bp, Homo Sapiens
cgcgacacaggggccgctggcggagaccacggaagacttctggcgcatgctgtgggagaacaattcgacgatcgtggtgatgctgaccaagctgcgggagatgggccgggagaagtgtcaccagtactggccggccgagcgctctgcccgctaccagtactttgtggtagatccgatggcagaatacaacatgcctcagtatatcctgcgagagttcaaggtcacagatgcccgggatggccagtcccggactgtccggcagttccagttcacagactggccggaacagggtgtgccaaagtcgggggagggcttcatcgacttcattggccaagtgcataagactaaggagcagtttggccaggacggccccatctctgtccactgcagtgccggcgtgggcaggacgggcgtcttcatcacgcttagcatcgtgctggagcggatgcggtatgaaggcgtggtggacatctttcagacggtgaagatgctacgaacccagcggccggccatggtgcagacagaggatgagtaccagttctgttaccaggcggcactggagtacctcggaagctttgaccactatgcaacctaaagccatggtcccccccaggcccgacaccactggccccggatgcctctgcccctcccgggcggacctcctgaggcctggacccccagtgggcagggcaggaggtggcagcggcagcagctgtgtttctgcaccatttccgaggacgacgcagcccctcgagcccccccaccggccccggccgccccagcgacctccctggcacggccgccgccttcaaatacttggcacattcctcctttccttccaattccaaaaccagattccggggtggggggtggggggatggtgagcaaataggagtgctccccagaaccagaggagggtggggcacagaccatagacggacccctcgtcctcccccagcggtggtagggggacccggggggctcctccccgctctgcacc

SEQ ID NO: 223874 - DNA, 1000 bp, Homo Sapiens
cgaggagatgatcggctactacctgacgagcgcgcaggagcgcttcagcgccgagcaggagcagcggcgccgcgacgccgctactgcggccgccgctgccgccgccgccgccgccgccacggccaagcggccgccgcgcagaccggagacggagggcgtgccggtcccggagcgcgcctctccgggcccacccacgcagctggtgctcaagctcaaggagcggccgagccccgggcccgcggcagggcgtgcggcgcgggcggcggcgggcggcacggcctccccggggggaggcgcgcggcgtgcgagcgccagcggaccagtgcctggccgcagccccccggcgccagcgcgccagagcgtcatccacgtgcaggcgtcgggcgcgcgggacgaggcgtgcgcgccggccgtgggggcgctgcggccgtgcgccacgtacccgcagcagaaccgctcgctgtcgtcgcagagctacagcccggcgcgcgccgccgccctgcgcaccgtcaacacggtcgagtcgctggcgcgcgcggtgcccggggccctaccgggcgcggcggggacggcgggggcggccgagcacaagtcgcagacctacaccaacggcttcggcgccctgcgcgacggcctggagttcgccgacgccgacgcgccgaccgcgcgctcgaacggtgagtgcggccgtggcggcccggggccggtgcagcggcgctgccagcgcgagaactgtgcgttctacgggcgcgccgagaccgagcactactgctcctactgctaccgcgaggagctgcggcggcggcgcgaggcgcgcggggcccggccctgagcggcgcggcgcggcgcgggcggcgaggttctaccttcgaggatttcttttccattgtgtcggtgtcttttttacatgccctggtccaccggaaggccggcgcctcctctgtcagtgccgtgtacgtgtttggtcaaacgttcctaatggtgcctgaacctacactga

SEQ ID NO: 223875 - DNA, 1000 bp, Homo Sapiens; identical to SEQ ID NO: 118475

SEQ ID NO: 223876 - DNA, 1000 bp, Homo Sapiens
tccccccacagaaggaagagacattgcccagctaagcatcaggaagctgtgttaaaagcccttctatgggtttggttttgtgatgtttttccctaatgggaaaaacgttatagttgtttcttactgccctgtctgggaagcagggcaaacctccaggtttttaaatgagctagatgcccctcttcctcttctctggtcactgaacctggaccaaagcactttgatattccaggtgtgattttctctgtcatggggatttgctccactgcagagccccatcattttcacagcgtaggccaacagagtgagaacctagggctaccctagctgatggatgtgaggctgctgtctacaggagctcatcccagccctgttaactggcagtggcaaggatactcgtcatcggccattgcactggggaactccctcaccccatggcttcccaacttgaaacccagatttacctccagggagaggtgagaaaaaaattgtaaatagacttgctaaagagcaactcagggttggggtgtgttttaattctcctgatcacttgaaataatctgtaggctgagtgcttatgggggtgggggagaagggtgactccagggtccttccattttgtgaagctctgggggtggagtgtgggcatctgaggccctatgatggcactacattgagctgtctgcccttccggaaacccaacctgcaatcaactgcaaatcaaattcttcacattccagctacagtctttctttccccattgaatctcagtccctggccatgtggtcaaggtggctttctgttaagctaccctaatttcgggaatgggaggggagagaggagggccattacaactctgccttcaagactcatctcttaaaaacaaaacgaaacaaaactacaaccaccatcaaaaccacacgcaaaaaaaaaaaaaaaaaaaaaaaggataactttaaccgaaggaagggtttggttccattcaactccacattcattg

SEQ ID NO: 223877 - DNA, 1000 bp, Homo Sapiens
tattcaagttgtgaagggatttgttttgtcaaaaaattaaaaactcaatgtgtatgacgccactctgaagagtaggtgagcgctttgcagtcacagaaggtggcatctgactgcggctcatacaggtcaccctgaagggccacgtgcttttagcagttggctggaatgtgttcactaggttccgttatgtttggtaatatcatcttgaaaagtccctgtaatagatcaaggagactgcattccctgccctgaaggaatgtatttctaaggcaaataggcaacttggtactatcttattctgagtagagagtggagaaagtattttcagactgaagaaaactttgaaaagtcaggagctaagctgctcggagctcagtgccgcagcatggctgtggtggacgcgggaaacaacgggaaagttcttgacagagtctgtgtccgctcagtccctgcacttttcctttccaaatgcatctcgttggatatggaatagatcgtagatgttgtagactgagatttgggactatgttgggaccgtacaggtgaatgtgccacctccacaaatggcttctccgagtgagtcacgtcacctggtgcgtggaggtggagcctgcggctggagtaaggcttgctgtgggacgccctcgtactttgctctccttgcgggtggttgccgagccgagagcattggatcctccccgactgtggctagttgtctgtccggtggctgggagggggtgtggtgggaaaaagtcggaatctctgcaatctgtgtcatggactgtactattgtaaggtctatattctgtatgtgggtcccagaccctgatcaggaaatgagcctcatgtgtgtcgttaacatttatatatttccattcaaaatatgtattcagtgtttatttcctcaaaacagactttgttaatgtaggaaatctctccaagtggaaacgtgctaactttttctgtaaatctgaaataaaaggtgctgttccttcctctg

SEQ ID NO: 223878 - DNA, 1000 bp, Homo Sapiens
tccaaaaactgttaaactaatgagcaagtaacactaactttgaatgtctctacaatacccgttgataactcagtggagccaggctttggggtagcggccctgagcttgcagggtttctcgccactggggctgaccacgcccccagctgtgaccgtgggtgtggctggctctcggccctgcccagctttgttctgaggacgtggtgacttcctgaacatcagcttcaatcctccatcattaatgtgaagcaaaacacaaaaaccgccccaatccctcaggattccttggcatccgaaaccagcatctgcacctaaacccatacccacccgtgtgcgcccacagggggatgtgtccgaatgggcagcttaaaatgtggtcacctgtgggggaaactcttcaggcacctgaagtgagaacccagctgtccgtcctcaggccggcctttcttccggcgacacccgtccatggctggctgggtccccttcgcagtgtttgtctgtcttgacatctaaaccccggcgtgtgcagtgcccatcttccaggactaccttattttccagaattaaacctgttttataattcaagttaatgcaaatgactgtcagttgccaaatatcttgatcctgtgagtgtagttgatgactgtttgttagtcagtagagtaaaatgctgtgtccacggggtgtcacagcctcaccataccctgttgaggtgtgaaatgccccgtcagaaattaaatacaaacttaaatgtgcctattggtgtctaaacttcatacaatgtaaggtcagattccttttaggaatactgggtgctgtcaccaggtttgatagttagacttaaaaacttgaaattcactttttggggggagggatatactgaaatagagagttgagacttgccagttgggggaaaatagcatttaaaatggaaagctgtgtttggaaaattgtgtatgagtatttttgtattaaaaacattttaaaggcttttttcttaa

SEQ ID NO: 223879 - DNA, 1000 bp, Homo Sapiens
ctacaggcgcgtgccaccacacctggctaatttttgcattttttgtagagacagggttttgccacgttgcttaggctggtcttgaactcctgaactcaagtgatccgcccacctcagcctcccaaagtgttgggattacagacattagccatcacgcctgccctagaaacagttttttaataggagatatttgagaggcattgaggtagaagactctatgacatgccctcagaatatcagaatcttcttagaaataaactaggaaatgcagatgtttttaactactcagacttttgaggaattaatccttttaaaacatttttgttaaagttagtgtatcagtaagaaacagacctagtttaaaaggaataatcaacaattttataaaggagatggcttattcaaccatagcccctccaacatatctactggaaattctgctggttaactttatctctctctctcttaatttagactttcaacctatgaaaatgtaaatacctttgaaaaaactaaactatcagtcatttacatcttctcatgaatgaaatgcagtgtagggagaggagatggcaggacacagcaaacaggacacatttgcctgcttctctcttgcctaattcttcctgacctgtatttactgatgcttaataatacttgtaagactctaggggttcatttcccatttcagcggaaagtacttcactcaacaacaatattctcaagagtcttctactggaagctagaaagaaataggaatttaagtccatagaatgaaggtagttattcctgcctgtgttgcccacctgttcacaaaaagtacctttatgcttgaaaacattaggttctttggttactgcactgtagtttcaaatggatcctccagatggcattcatgtcttactcagaaagggcactgccattgtccccaaggcttctgtctactaattctattggtcttgtgttttgcttgattgcttggcaaaaaaaaaaaaaaaaa

SEQ ID NO: 223880 - DNA, 1000 bp, Homo Sapiens; identical to SEQ ID NO: 118481

SEQ ID NO: 223881 - DNA, 1000 bp, Homo Sapiens; identical to SEQ ID NO: 118481

SEQ ID NO: 223882 - DNA, 1000 bp, Homo Sapiens
cgcctccctcactgggagcttccccatcctccctgccttccccagtgggaagttagggaagctcaggagcctgggaccccgcatgtcccaaaatgggattggagaagctggagagaaagcagaagaggccgaggagtgaggcagcagcctctatgcttgatttccacaccgggtccgtgcagaggaaacagaaactcccaactgtccttacccaccgacatcacagcccctatgaagaaagtagccacaatctcaaataacaaaagggaatgttctaaaactttttcttccttaaaaaatggagaaaattgcacttgtgcttgctgtgtggtatataaaccaggattagtcccagggtcgtgaggtttctggtgaaaaggttaaatcgtagaagctagtatattttttatatttttgtaacaattgcttttttcatgggggaggcggggttagtatttatagtcctaacaagtccagtaattttttataaatcttcagattataaacagcccctaaaaactttacaacgtttacacagttttttaaaaagagactgtatacacttgatttgctttcaaaataaataaggtcagctagtctaggaggttaacgtcgggtaggaatgctgatcatgataggtttggttttctacagattctgttccggtgcctttcctatccaggcaccacctgagaaagttgtcatttgaggtcgcacttggaagttacatctgtgaagtttctgtcattcgtccagatctgtgtgtgtagcatgtgctgaggaagcacgtgctgggctgtgcctcagacagtgcatcaccgggcacccagaggcttgcctggctattcctgttctggtgtgtgtggagtgttggggaggaacagatgcagatcaacctgtggctgttttcccgtctaggttctcacaggtatctcctgacagaggtacttaacaatggctctgctggaaatttctataaataaaatgtccaaaatggaaa

SEQ ID NO: 223883 - DNA, 1000 bp, Homo Sapiens
tctgaccctcactgagagcgacctgaaggaaattggcatcacgctgtttgggcccaagaggaagatgacgtccgccattgcccgctggcacagcagtgcccgcccacccggggatgccctggagctggcctacgccgaccggctggaggctgagatgcaggagctcgccatccagctgcacaagcgctgcgaggaggtagaggccacgcggggccaggtgtgtcaggagcaggagctgcgcgccgtggtggagagctgcctgctggagcaggaccgcgcccgcgaggacctccaggcccggctgcgggagacgtgggccctggcccgggatgctgccctcgtcctggaccagctgcgagcctgtcaagctgagctgtcatctcgagtgaggcaggaccagccccctggtgcagccactctgggcctagccgtccccccagctgactccaagggctggcaagcgtccctgcaggccatgagcctccccgagctctcgggagccctggaggaccgtgtccgtgagatggggcaagcactgtgcttagtgacccagagcctggagaagctgcaggtgctgaacgggaagaagtggcgggagacctagcctgcgggccgaatctgacgttgggtgattggtccaccctgaagctgtgtgccagggagtgaggaggacagtgagcaggtagctgccatgtgcagcccaggcccagtgggggccagaggatcaggccccgggagcagccggcagacagaggcaagacgggggctgcggccctggctcggcagctcgggccagcactgaggcgggacgagggcctcacccagaacctcgtggtgaggcccagagttcatgggctgccctggcccataccaggcagggccctggggggaaagtgtatccatatacacgcacaggtgccaactgaggtgggaccttaggaatgaggactggggcacctggaaaatgccattttttggaaaataaaatttaagaacagct

SEQ ID NO: 223884 - DNA, 1000 bp, Homo Sapiens; identical to SEQ ID NO: 118482

SEQ ID NO: 223885 - DNA, 1000 bp, Homo Sapiens
tcctccgctgtgcccgtctctccggagccctcctgcctcattgctcctgtaattttggcctttcgagtgccttggaggtttccctgacctcccgtgaagatacagagactgtctcctttttttttaactttgacaactgacttctgtttccttttctaagttttatttttcaaaccaccccggacagcccccagctctgattccttcaaggcccggcctgtccgggccaccattccacaccttgcggtttgaaacagctgtttttcccacatttgctgcaggcatggctgtctcctgcccctgcctgcccatctggcctataccccagccgtggggcccggggtccctgccgcagccccctccccttctgatgccttaaaagctgggccccaggccctgctggccagagccacagatgccaagctctgggagcttgactatggaccaaacagctctggcctagggattgggccaccctacccaggatctccaccctggggacagtagaaggggaaagccttcatcttggcgaaccggccccaccaccccctcctacccgggcctccgtgcagagatgggctttctctgccagtcccctgctgtctgtctgtgggagtcggacattgtgcccatctcccggagcctctgctgtcactcgcttgttgaagatgaattcttgaattctgcctgcccacccccggccagatccctggagctggcctccttccagcccagtgccagaaaccagcactccatgaagataaactctgggcccgcccaccagcaggacctgtcgacctgaggtgaccctgggccttgcccccagccaactgggccaccagcttccctcccttgactctgggggtccacatccactccaaggggactattcccccgaccccaccccagtctccccacacggacctttgctgaattaaagtttgtaagtaaatggttttaaagaaaaaaaaaaaaaaaaaaaaaaaaaaaaaaaaaaaaa

SEQ ID NO: 223886 - DNA, 1000 bp, Homo Sapiens
gggaggcacaagcatgggccaggcgccaagcggctctggaggctgcagtgcgccaggcctgtgcccctcaggagctggagcggttcagccggttcatggccgacctagagcgcgtgcttggccttctgctgctgctgggcagtcgcctggcgcgcgtgcgccgcgccctggcccgggcggcctcagacagcgaccctgatgagcagcgactccggctcctgcagcggcaggaggaggacgccaaggagctgaaggagcacgtagcgcggcgcgagcgggccgtgcgggaggtgctggtgcgagcactaccggtggaggagctgcgcgtctattgcgccctgctggcgggcaaggccgccgtcctggcccagcagcgcaacctggacgagcgcatccgcctccttcaggaccaactggacgccatcagggacgaccttggccatcatgccccgtctcccagcccggcgcggcccccagggacctgtcctccagttcagccgcccttccctcttctccttacatagttataggtggagagggtggggtgcaccgcccctatctctcacccacgtaagtggggtgatgctgatttagtctctgcttttcccttgagggattggggaggacccagtccaggcctttctaagatactcctccagccgggcgcggtggctcacgcctgtaatcccagcactttgggaggccgaggcgggcggatcacaaggtcaggagatcgagaccatcctggctaacacggtgaaaccccgtctctactaaaaatataaaaaattagccgggcgtggtggcgggtgcctgtattgccagctactcggaaggctgaggcaggagaatggcgtgaacctgggaggtggagcttgcagtgagcggacatcgcgccactgcactccagcctgggcgacagagcaagactccgtctcaaaaaaaaaaaaaaaaaaaaaaaaaaaaaagatacttctccaaagtgttctcatgtggcctc

SEQ ID NO: 223887 - DNA, 1000 bp, Homo Sapiens
catcagagcattcatactggcgaaaaaccctttgagtgtaaggaatgtaggaaggcctttagacttaattcatcccttattcaacatctgagaattcattctggtgagaaaccctatgaatgtaaggaatgtaagaaggcctttaggcaacattcacaccttactcatcatctgaaaattcataatgtaaaaatctaagaaagtcttttcaacttctgtgttatagaacattctatgaatgtagtaattaatctattttgctccatacatgcaactgcgttggcattagaggttttataccattaaaagagtgtgacaatgtattgtagtccatcatcactcaaacctgaaacttcagcatatttgttctaaaaactaatcctgttataagaatgaaaaagacatttaccgtcatccctatcccatcactttgtgtcatactggacaagacgcttaactgctctgtgctataattttttaatttatgacatggtcatataagagtgcagcagtttgacacactttcaatcaagaggtggaatctacatccctctgttgtatacaggaatctacatccctctgtgactgcttcgcccagtagaatatggtagacgtactgctgtgctggtttcttgactcagactttactggtagggttacttcatctcatgaaatgacagaactgtcttgttacaaagtctggctactttgctgaagagaccacatgaagaggccctgaaactacgtagagagggagaggcacctgctgaaccctgtcttcttgacatccaccaagataccagacatttgagtgaaattttggatccaccagaccagccaccagctaaatgccagtgagcgacttggtaacctgaactgatgccatgtagaatggaagaattgaccagctgagcccctggcccaaatttctgacccacaaaaacatgagatataataaaatggttgttgttttaagccacgaaaaaaaaaaaaaaaaaaa

SEQ ID NO: 223888 - DNA, 1000 bp, Homo Sapiens
aggttaagaaaccagaggccaggcgcggtggctcacgcctgtaatcccaacactttgggaggccaaggagggtggatcacctgaggtcgggagttcaaggacagcctgaccaatatggagaaacctcgtctgtactaaaaatacaaaaattagcaggacatggtggtgcatggctgtaatcccagctactcaggaggctgagacaggagaatggcttgaacccaggaggtggaggttgcggtgagctgagatcgtgccattgcactccagcctgggtaacaagagtgaaactctgtctcaaaacaagataaaaagaaaagaaacaccagagaatttttactagaatataatttgtaggtgcagtaaatgtgaagaaatatttaggctaaaattaagactatgtaaacatcagaggatttacagtagaaagaactaaggaactaacacttcagactttaaaataaatcagagtattaagtataacaaaagttgaacctgttagaaaatttccttgtatataagttgaaaagtaggtttttgaagagatatattcgaaatatattttttcacttgaaaaaagtaaaaatttttttcaaaagcaaataattcaactctaaaattatactatttcaacattctcatttatgtgaaagcatgtgataaattgttgctgcgtcagagatatgagaaactcctttgcattaggtgggcattattcatagacttctacatgaaagagaagagaaataaaagatgcaccaggaaaatctgagcagagaggcttttagtggttgacttactgagtgatgcctgaagtaggtgttcagagtaatactttgcgttatactgagagagaatctgaattttagtagtaaattgttttgccaactgtatatttatgtaataagtgcaataaaatgcagtaaattttaaaattctcttaagataatgtgtgaacttaatttttgaaataaaaattgttattgtgttaaaaaaaaaa

SEQ ID NO: 223889 - DNA, 1000 bp, Homo Sapiens
cttggtgggaaaagtccttttcttccttgacaggccttggctccatctccttgggcctctgtcacggctttccttcacaggataccatcctttttctgaactcttcttcaaaaggaacatcagccctcctgattgcaaaggaatactgagctgatggtgtcatccagcagcctcccctcccaagcaaagcttctaaaactgggggtcggtgctcaagggaaggatttgctatgacctcatagaaccttgtccagtgtggccacttaccctatccttaccctccttatcctcaaagtttgggctgatgtaagactagaggctggccctcccagataacagagaaaagggagccccaaatgcaaccagcctcttgttctattcttgcctgcaaaagaacagaggtttctcaaatgcctcagtccctgagagccatttcttcccctacatcgtctcactttgcttcctattgactgctggtagaaggagatttggggtaggggctagacctccttttatttgaagggggcaagggctgagatgtggtccccaaggggccagaaattcccaagttggtcacaggtggcttagaagtgtgtgttatggttttacggatttccttgaagcctctctccttctctgcctacaaagaccctatactctcagtctccccaacccacccccaaggagctgtgggaggctttgtgttatctgtgaaactccaaaacaggggtgttgcggagaagggagagttcaaggcaaacgcaaggactggacttagctccctaggtgccacagtcagatgccggacacggatttatatataaatatatatatataaatatattatactcactcatcacggccatctttgttgtaaccatttctgtgtttataaatgcattatctctgagaattttcatatttgatgttttgtttatttttgtcctttttttccctctctccacccctgtcctctagccacagcatttttctttttgtc

SEQ ID NO: 223890 - DNA, 1000 bp, Homo Sapiens
aactcccaagctgcatgtgcccagtgtcatcaagccaacgcggcctgaccgaggctggttcgtggccccctttgggaagaacccgtggtgggtatacccagcaagcatcctgcccgccctgctggtgaccatcctgatcttcatggaccagcagatcactgccgtcattgtcaaccggaaggagaacaaactgaagaaggctgccggctaccatctggacctgttctgggtgggcatcctcatggctttgtgctcctttatggggctcccctggtacgtggctgccacggtcatctccatcgcccacatcgacagcctcaagatggagacagagaccagtgcccctggggagcagccccagtttctgggagtcagggaacagagagtaaccggcatcatcgtcttcatcctgacgggaatctctgtcttcctggctcccatcctaaagtgtatccccctgccggtgctgtacggagtcttcctctacatgggcgtggcctccctgaatggcatccagttctgggaacgctgcaagctcttcctgatgccagccaagcaccagccggaccatgccttcctgcggcacgtgccgctgcgccggatccacctcttcaccctggtgcagatcctctgcctggcggtgctctggatcctcaaatccacggtggctgccatcatcttcccggtcatgatcctgggcctcatcatcgttcgaaggcttctggatttcatcttttcccagcacgacctggcctggattgacaacatcctcccagagaaggaaaaaaaggagacagacaagaagaggaagagaaaaaaaggggcccacgaggactgtgatgaggagccccagttccctcctccctcggttataaagattcccatggaaagtgtccaatcagatccccaaaacggtatccactgcattgccagaaaaagatcttccagttggagttactcactctgattcttccttcagtgacacagaacttgaccgaag

SEQ ID NO: 223891 - DNA, 1000 bp, Homo Sapiens; identical to SEQ ID NO: 118486

SEQ ID NO: 223892 - DNA, 1000 bp, Homo Sapiens; identical to SEQ ID NO: 118488

SEQ ID NO: 223893 - DNA, 1000 bp, Homo Sapiens
ctccagcagcagctccctggcagaggcccagccacccctggctgctccaccacagaagccccagcctcacccacagctcaacaagtcgcagtccctgacaaatgccttcagcttctctgagtcctccttcttccggtcttcagccaatgaggatgaagccaaagcagagaccatccggagcttgaggaagtcctttgccagcctcttttcagattagctcttcagacacacggggcacccagcccaaccgggaaaggcatctaagacattcaccaacaacagtcagccagcttggtggttatgtcccatgaccttgacgtgtgtggtcccttcctctgctctgttgtactaagtgatgttgtgcagcccagaaaggaccatttgacagtctcagggcaggtgcctacccagcaaggggtacctggcatcagagaggaaagagctgcttccctgtagtcatgagagcttccttctgaagtcatcgttcgctgtgagtttagtggccttattgtgacagtgccatcatgtcttattcttccctgtgaaaccaggattaatcgtggactcctggcagcttaacctagctcagttgcagtgctaagcatgccccgcccccattcagtgatacctgtttgggaagtatatacttccccaaaagtactcttggccctaagttttaggaactttccccgacctggatcccttgtcatacctgtgttactgtttaaagcacacccacccaacttacaagatcttaggctgctgtggtggtgaagcaccttgagtctgctgatattcgggagaacaaggatctgcagtttccccttttctcccctctgaagagtggttcttatgtgcaatctgcagtaaccttgaactccagagctgcactatagaggagaatgcatgccactatgacagcagtatgccaagctttgtgttcatctcctaataaacgttaagacctttggtgtaataaaaaaaaaaaaaaaaaaaaaaa

SEQ ID NO: 223894 - DNA, 1000 bp, Homo Sapiens
aggcactgtggcccagcaggtgactggttcttcaggaactgtgaaggtggtggttgtggactcggtcactgcggtggtttccccacttctgggaggtcagcagagggaaggcttggccttgatgatgcagctggcccgagagctgaagaccctggcccgggaccttggcatggcagtggtggtgaccaaccacataactcgagacagggacagcgggaggctcaaacctgccctcggacgctcctggagctttgtgcccagcactcggattctcctggacaccatcgagggagcaggagcatcaggcggccggcgcatggcgtgtctggccaaatcttcccgacagccaacaggtttccaggagatggtagacattgggacctgggggacctcagagcagagtgccacattacagggtgatcagacatgacctgtgctgttgtttgggaaacagggaagcattggggacccctcccaacttttcttcccagtaacgcctgctgtttactgccacctggcactggtgactacagacgttctcaggctggccagaagagacatcttgggttccttggcctcactctctgtaagcatataaaccacaggcgaaagaggatgctgcattgcgaggacccagaaattcatactggtgccacgtttccttcccttatttctaacgtgtatgtttctggtggaaaccaagttcaccctggctgggagcatctctgatgaggcatgctggcgactggatggataatcctgtgcatcaccattgtgtcctgtgctccctcctagcgcagtggccaagccgggaaagcctctaacttgcctttgctgctgctgccttttttttcttttgtctctgcctttccatttgttagatgggggcccactcttccttagctctgtctctgagttactgggtggaaataagcttataaatgaaatactcttcttcatctctgttttgctcttaaaaatataaaaaggcaattccccg

SEQ ID NO: 223895 - DNA, 1000 bp, Homo Sapiens; identical to SEQ ID NO: 222433

SEQ ID NO: 223896 - DNA, 1000 bp, Homo Sapiens
aagacactatttataagtctgaagaagaggtccaatataattttcatattacaaagttgggacgtgcttcatttaagggaactatagatttagcttattgtgacattctgtacagagacttgaagaaaggtcttgaaggacttgtgcttgaaagccttcttcatctaatctacctaacaaccccctatgatctggtttcacagtgtaaccctgattggatgatatacttcaggcagtttagccaactcagtccagcagaacaaaatgtagctgccattcttggagtctctgaaagctttattgggaagaaagcatcaggccaagccatcggaaagaaggtggacaagaacgttgtcaacaggctatatctgtcttttgttctttataccttgctcaaagagaccaacatttggactgtatctgaaaaatttaatatgcctcgaggatatatacaaaatcttctcactggaactgcctcattctcatcttgtgtgttacatttctgtgaggagcttgaggagttttgggtttacagagcccttttggtagaacttaccaagaagctgacttactgtgtaaaggcagaattaatccctctcatggaagttactggagttttagagggtcgagcaaaacagttatacagtgcaggttacaaaagtctaatgcacttagctaatgcaaatcctgaagtgctcgtaaggacaattgatcatttatcaagacgccaagccaagcaaattgtttcatcagcaaagatgctgttgcatgaaaaagcagaagccctgcaagaagaggtagaagagttactaagattgccttctgatttccctggtgctgtggcttcttccactgacaaagcatgaagctatctgatgagaattttcatatatgaattatttattgtacatgtgtgttattaaagataacttatactttataaatgaaaaaatacatttcagttatacagcaaaaaaaaaaaaaaaaaaaaaaaaaaaaa

SEQ ID NO: 223897 - DNA, 1000 bp, Homo Sapiens
gctcacagctgcccctgggtttacccgtcctccactcagtgcagaagaagctgccctgcgtcgggccctggaacacacggatggtgaccacagttctctgatccaggtgtatgaagcctttatacaaagtggagcagatgaggcttggtgccaggctcgaggtctgaattgggcagcattgtgccaagcccataaacttcggggagaactcctagaactcatgcaacgaattgaacttcccttgtccctaccagcctttggctctgagcagaatcgcagagaccttcagaaagcactggtgtcagaatactttctcaaggtggccagagacacagacgggactggaaattaccttctcctaacccataagcatgtggcccagctctcctcatactgctgctaccgaagccgcagagctcctgccagacccccaccatgggtgctctaccacaatttcaccatatccaaagacaactgcctctccattgtttctgagattcaaccacagatgctggtggaattggcccctccatacttcctgagtaacttgcctcccagtgagagcagagaccttctgaaccagctaagggaaggaatggcagattctacagcagggagcaaatcatcctcagcccaggagttcagagatccctgtgtcctgcagtgacctgcctgcctatggaatggagctgggttcatctcatcacattagattatccctcagggtgacaccaaagcacccagacagatttagaagcccaaagtttagggtcaaatgtaaaccctggaacctgagtcccaagaaatggtagactgggaatggaaagaatggggtaaaccacagtctacatagggaaggactctttccttagccttctcttattgattggagagggactgacatgctcctcattctcttaactttgccaaacccattcttgtactcccttgtgatctataaaagatttttctatgatgccaaaaaaaaaaaaaaaaaaaa

SEQ ID NO: 223898 - DNA, 1000 bp, Homo Sapiens
cataatgaacctcatgctgttgaacaggtttttagagaatgtattatgaatttggttcagatttatagacatccataggaaaaattctgctgtaattataaccttattttgatatggaaaagaaaagtcaaaatagagactttgatcatgttcatgaacatgtacttgaacacaagtattgtaacaatgaaacactgtaatgatttacactgaatcacaattgcactgttgatatagtgtagagaaatcgttagaaatggtgacatcttacaaaaaatgtgtattattttaacatgttatcactagattttagctttttttaaatatttttaacaaagaaaacattgatccacccatttccctgtatctttttagcagatttattaaagagtatagtacttagcctcacgaatcataattagaaaatttactagtatttctcagccttttccctaggaacaaggaaaaacagaaagcatataatacggtggtcgtttcattgtgtttttcttccttttaaaaattaaaaagttttacaattatgtgaaacgttcaaaagccagcttaaaatttttcttgtgagaaaatattatacatgattcacatgatttcttagatttttcaataaaatatgtaaaacttcccactgagagacaattcttcatagacttgtcacatatccacatgtctgatgaacaaaggtactgtctacttttgttctggagtatcttctagaggatgtttatagagtgaactgccttggaagatagtatgtctcttgggagcaaagggcaaacatacttctcattataaaagtttcaggttccctaaaattggggtttctttactataagacaatccaatgtatgttctgaggtcacctggctctcttcatgtcaccctttgggaaatggggctcaacgagccagtacaggaaaagctgattccctggctactactatcgctgtgagtaataaagtcctttgtctttaatgaaaaa

SEQ ID NO: 223899 - DNA, 1000 bp, Homo Sapiens
gcggcgtagcgcgcccccagagctgggcatcaagtgcgtgctggtgggcgacggcgccgtgggcaagagcagcctcatcgtcagctacacctgcaatgggtaccccgcgcgctaccggcccactgcgctggacaccttctctgtgcaagtcctggtggatggagctccggtgcgcattgagctctgggacacagcgggacaggaggattttgaccgacttcgttccctttgctacccggataccgatgtcttcctggcgtgcttcagcgtggtgcagcccagctcctttcaaaacatcacagagaaatggctgcccgagatccgcacgcacaacccccaggcgcctgtgctgctggtgggcacccaggccgacctgagggacgatgtcaacgtactaattcagctggaccaggggggccgggagggccccgtgccccaaccccaggctcagggtctggccgagaggatccgagcctgctgctaccttgagtgctcagccttgacgcagaagaacttgaaggaagtatttgactcggctattctcagtgccattgagcacaaagcccggctggagaagaaactgaatgccaaaggtgtgcgcaccctctcccgctgccgctggaagaagttcttctgcttcgtttgagcagctatggctgcatagcaagtagtaggcaggaggccaaagacttctgagacctggggcacccgggcctttgcggcagctactggcagggcctggccacctcataggactcagttcccttctgaacactcgggggacatgggcctctaactgcccactctgatatgcctgggtgagcctaggagggaaggctctgatttggatttctccagtcaaagctcacagaaaaaaacctggcactttgattttcatgggatggtcctaacagggtcagtcacctccgagcagtttgggaacccagtttcttgtcctgggccctcaggtcagcctggctgaattaggacccttccttgg

SEQ ID NO: 223900 - DNA, 1000 bp, Homo Sapiens
agtcggaagcctgtgtccatcgtgtccccggagccagggaccacccgtgacgtgctggagaccccagtcgacctggccggatttcctgtgctgctgagcgacacggctgggttgcgggagggcgtggggcccgtggagcaggagggcgtgcggcgcgcccgggagaggctagagcaggctgacctcattctggccatgctggatgcttctgacctggcctctccctccagttgcaacttcctggccaccgtcgtagcctctgtgggagcccagagccccagtgacagcagccagcgcctcctcctggtgctgaacaagtcggacctgctgtccccggagggcccaggtcccggtcctgacctgcccccgcacctgctgctgtcctgtctgacgggagaggggctggacggcctcctggaggcgctgaggaaggagctagctgcagtgtgtggggacccgtccacagatcccccgctgctgacccgagcaaggcaccagcaccacctccagggttgcctggatgccctcggccactacaagcagtcaaaagacctggccctggcggcagaggcgctgcgggtggcccggggtcacctgacccggctcacaggtggagggggtaccgaggagatcctggacatcatcttccaggacttctgtgtgggcaagtgacgggatccagggaagtcgcacccaagctgcgtggagacccaggagcctcgggggatctggaaacagtttaggccaattgggattctcattcgcctgggaaagaacttgattctcaaatagtgaagcaacacagctgagaggtagtgagatccctgcagggactccctggagattcaggccctggaatggggctgaatggaggtcccgttcgacccttgatgctggggcatccgggttgggatggagataggaggatctcagtatatttgtttcgtagttttttatttattttgcaaataccaaaggaatgtaaaaaaaaaaaaaaaaa

SEQ ID NO: 223901 - DNA, 1000 bp, Homo Sapiens
aaagggagttcagcaagatgaagctctccaactgccaaaagacctagattatttgactatcagggatgtgtctttgtcccatgaagttcgagagaaactacattttagtcgtccacagacgatcggggctgctagtcgcatacccggagtaacacctgccgccatcatcaatctgctgagatttgtgaagaccactcaacgaagacagtcggctatgaatgaatcatccaagactgatcaatacttatgtgatgcagacagacttcaagagagagagttatagctttcaattcataaaagatttttaaagagcatataaataatttgatcaatacaacagtatagataaaagaattatttagcacatgttaaaatagctttattaggttactatgggtttgccattaatttctgagtgggacagaaattataattgtgctttttcgtgtatatgaaaaaactagtcgtaaacaatttgtactctttctttaaggagctgtaatacaaataactttgtgcagtgttcatcaaagagagagacagtgaacctaaaactgaacctggaataaaactcaacatgcagatttgcctactcatagggactttgcctattaagtctaccaaattaaaagtcttatcattcagcgtgttttgagagttaataatcttttgcttggttatactaggctaggaagcaatatcaaagcccttaaattctcaagactaaagacttgagattatataaaattatccagaatcattcagctaatactattggaatatagtatgtagggtgaaagttgacagaaatctgtacttcttcaggaaatcctcactggtaattgttttgaacattaatgaaagccctataaaatagaaagattggaaatcaccattgtttcctattatccacagtgtggatggatacttatttggtgacctagttatgggagaattgagtaacgttagttattttatatcataccataaaaatattttc

SEQ ID NO: 223902 - DNA, 1000 bp, Homo Sapiens; identical to SEQ ID NO: 222448

SEQ ID NO: 223903 - DNA, 1000 bp, Homo Sapiens; identical to SEQ ID NO: 118489

SEQ ID NO: 223904 - DNA, 1000 bp, Homo Sapiens
gggcccactcttcttagcttttctactcactgttagagagagacctagctgagcggctggcaggaagcgggacaggtctaggagtcccttagggaataaaccagccccgtttctatcagcccggccagcatgcaggtctccacatcaccatctagagtatcacgcacacatctaccatatatacagatatattctatatacgagctatatataaatatatatatacatatatatatacacacatacatatctagaatgtgtatccgcggcgcccagaagcctcggtttggcccacctgtgagtggggcagggaggggttccggttgtgcagagaacagagtgttctggcaaagaggaaatcccacagcagcgcagaggacctgggcctggaggggcagggctggggcaacccggcttggcggcaaagcccagccccttctcagaccagctccccacattcctgaattccacttccaggcagaaaggagtgggctccccctactccctcagaggaactgactcaccggctgtcctagaatgggcaggggcagagcgaagttctgggtgggatgaccgcactgggggaggggcctcagtccagaaacctcgaccgctagctccacctgccttggccaccagggcagccccgggggatccgggctgctgggcagcaggtcggcgggaccacatgcctgggtctcaccctcagctccgagggccgagggctttccccaccccaccctcctcctggccggcagtcggccctgtctattcatctgcgtcaggcttgccaggggggccccccgtgtgtgccccttggtcacgtgtgtcgtcttcaaggatgttttgctgctgtggctcctgctgtgtcccctcctggcccatcctcatcctcatcttcatcctcatcctcatctgtgcaaccgcccgtcctccttttctagtttctgatgtttgtaaccagacccagctgtgtcattaaacagacccgttcttgctg

SEQ ID NO: 223905 - DNA, 1000 bp, Homo Sapiens
aggcgctcggagaatggcagtggcagcaccatgatgcaaaccaagaccttctcctcttcctcctcatccaagaagatgggcagcatcttcgaccgcgaggaccaggccagcccacgggccggcagcctggcggcgctcgagaaacggcaggccgagaagaagaaagagctgatgaaggcgcagagtctgcccaagacctcagcctcccaggcgcgcaaggccatgattgagaagctggagaaggagggcgcggccggcagccctggcggaccccgcgcagccgtgcagcgatccaccagcttcggggtccccaacgccaacagcatcaagcagatgctgctggactggtgtcgagccaagactcgcggctacgagcacgtcgacatccagaacttctcctccagctggagtgatgggatggccttctgtgccctggtgcacaacttcttccctgaggccttcgactatgggcagcttagccctcagaaccgacgccagaacttcgaggtggccttctcatctgcggagacccatgcggactgcccgcagctcctggatacagaggacatggtgcggcttcgagagcctgactggaagtgcgtgtacacgtacatccaggaattctaccgctgtctggtccagaaggggctggtaaaaaccaaaaagtcctaacccctgctcggggccccacggatgctggtggactgtgtgcccctggtggaggtggacgacatgatgatcatgggcaagaagcctgaccccaagtgtgtcttcacctatgtgcagtcgctctacaaccacctgcgacgccacgaactgcgcctgcgcggcaagaatgtctagcctgcccgcccgcatggccagccagtggcaagctgccgcccccactctccgggcaccgtctcctgcctgtgcgtccgcccaccgctgccctgtctgttgcgacaccctcccccccacatacacacgcagcgttttgataaattattggttttcaacg

SEQ ID NO: 223906 - DNA, 1000 bp, Homo Sapiens
ccaactcatatccctggatcaagtccacatccctgaagctgtcagacagctggaccgggatctccatggctcaggagggacatagcacaggactggataaagggccttagaaccagttagtgatctgcctacacctgaatccctgaaacatctgaactgttttgtaaatcatcttatccccaacctcagtaccaccggatcttcacttctcagtgggattttgtcctttgcatgaccctactttcagcagggctttgaggctgggaaactgatctgctgggtgactttcattccagttgctgggacggaaggctgaatgtagggtcattttgtatgggatatgcagagctctgggtttttttgttttttgttttttgagacggagtctcgctctgtcgccaggctggagtgcagtggtgcgatctcggctcactgcaacctccgcctcccggttcaagccattcttctgcctcagcctcagcgagtagctgagactaccggcgcacgccaccacgcccagctaattgttttgtatttttagtagagacggggtttcaccatgttggccaggatggtctcgatctcttgacctcgtgatctgcccgcctcggcctcccaaagtgccgagattacaggtgtgagccaccgcgctcggccagagctctgggttttaatcctactttagctgtagaaccttgggcaaataacttcatctttttgggtcctaattttcctcctgtctaactggagggactgtgatccttccaccttggatggaagaggcttacctgacagccagcctgcctgctgggagccaggagagtcagctcattaaatcttgaagaaccgctgtatgccctttttccttctaagtcatgtctgctgcctgtgagcctgggaaggagtgctttcaaaacctgtatttttgccctctttagtaaatttagaactgtagaggctaataaactgcgatgagacatttaaaaaaaaaaaaaaaaaa

SEQ ID NO: 223907 - DNA, 1000 bp, Homo Sapiens; identical to SEQ ID NO: 223863

SEQ ID NO: 223908 - DNA, 1000 bp, Homo Sapiens; identical to SEQ ID NO: 220475

SEQ ID NO: 223909 - DNA, 1000 bp, Homo Sapiens; identical to SEQ ID NO: 118494

SEQ ID NO: 223910 - DNA, 1000 bp, Homo Sapiens
gcacaataaacttgtggatccactattcagtatgaaagatggaaactgaaggagactggagcaaaattcagcttgaatgaacagagcactttttactaagtagtagatgaattttcagctatgcaatatgacaaaacatggggaattttgaagattgtcattttttcattcgagtctctatgttaaacattccatattttgaatatttatatcttgtacttgggtttaagagaagtagctggctctcaagattgactggctatttattataaagtactgaagtcacatagccacctataaaacagcatagaaatgtctgcctgtttaaaaagtcattttaaaggtagagtgtccacatcaggcaccatttgtgatatgactccagtggcatatatttcattttttaatgacaagacactccaaacctttcagataacaaactatcattgcagaccttcacttttggaatgcaatctttatattttctgtgcatcacacacatgcttttctgcacgtggttgccttagtcatcttcctacagcaccatctagacatcaaaaattgtgctatatatcattggtaaaggaaatttgaagagatgacagtgcctaaaagtacagtttacatccttttggaaagtatgtgtaagtgcatgttttttgtgcaccttcttctatagcacttttttacaaatatcttatttttatttaacgacttgggttcatgtccctaatataagtatcttgacaattatgagctttatacctagcaagccacttcaggaaattcttttggagaatattttctgattattgttaaacttaatatacaattagctttattccttataaaatgtctaaaagaataatacgaagtatatataaaaggaattactgtaaactacattgccatagcaatttacataaaagtatattgttttctatctttaactcaaataaagcgtgtaataaataagttaaaaaaaaaaaaaaaaaaaaaa

SEQ ID NO: 223911 - DNA, 1000 bp, Homo Sapiens
cagcttcgccgttctatggaaaacattgagctcgggctgagtgaggcccaggtgatgctggctctagccagccacctgagcacagtggagtcggagaaacagaagctgcgggctcaggtgcggcggctatgccaggagaaccagtggctgcgggatgagctggctggcacccagcagcggctacagcgcagtgaacaggctgtggctcagctggaggaggaaaagaagcacctggagttcctggggcagctgcggcagtatgatgaggatggacatacctcggaggagaaagaaggcgatgccaccaaggattccctggatgacctctttcctaatgaggaggaagaggaccccagcaatggcttgtcccgtggtcaaggtgctacagcagctcagcagggtggatatgagatcccagcaaggttgcggacgttgcacaacctggtgatccagtacgcagcccaaggtcgctatgaggtggccgtgccactctgtaagcaggcactagaggacctggagcgcacatcaggccgtggccaccctgatgtcgccaccatgctcaacatccttgctttggtgtatcgtgaccagaataagtataaggaagctgcccacctgctgaatgatgcccttagcatccgggagagcaccttgggacctgaccatcctgctgtcagtattccttgccctccccaccccacgccccgcaccccccaccattgctgttttggcctctcttagctcatccatctgctgccctcagtccactcactaagggtgctgaggaaggaggcataagaagtcctttcttccaggcactgtccagtgatcctaatgattctcaattctctgagactcagtgactcctttttataacaaatattttgcttgaatttaattaatagataagtcataggtaaatccacatatgatttctacaaaacttaatatgctactctaataaatataaaagaaaaacaagaaaaaaaaaaaaaaaaaa

SEQ ID NO: 223912 - DNA, 1000 bp, Homo Sapiens
gccccatcagtgtggacagacactacttgcctttgtggtttagtgttggaagctttaattattctacagttccatagattcacaattttatagccaaacagtttgtatccacctgctttcagaggaggaaccaaaggccaaattactttgaggtagggcttagctggacctgggttttcctatgctcttttcatgctgtgttggagggtgtgtccactgccagatctgtgtaacccgtctgggtcaggggatgagtgacagcaaaccatcttaaaatttttcatgagtacatttaagcggaagcatacgggaatatgagtgcaaaagtgtggctgagccgcgtatgcccttgattggttttgggaagcctgagggaggcagccttcctggctatgagccatcgcctgcccaatcaggctaagggtggtgactggggtggtgaaggggcagctctgctgagcatggtctgccttatggcctgaattgtcctcaaggggtgtggactgcagatggtgttcacatgaaccggagacatcactctttaggattctactggcagcccctgaattggctcaacgtttgtggaggtggtatttccctgaagtactgagctttgttttataataattaaaatccttatttggtccaatttaatatagtttagaagctattttttttgaggcaaaccgtttttgaaaatgtaaattttgtttttaattaaaaataaagtcttagttaagaaaactcaggatgcacaaaactattcagactgttactttagctttctcccattacctcatcagtaatattcaccacattttgctaaatatttattgattagagtgttgaaatcaaattctgctctaaatgtgtgtgaatatgttggagaggctttgtgttcttcactgtgaaatgcaattgtgccttgaataagaaggtacctagaagccaaattaaagtaataatgacttcttaaaaaaaaaaaaaaaaaaaaaaaaaa

SEQ ID NO: 223913 - DNA, 1000 bp, Homo Sapiens
accagaataattttattgctaatctgctttgtgtgacagcattccaggccagccagatgggactgccttgtctggaggctttgttcatctcgaaggacacacacttccacactgtttgtgagccctcccacctccacaacttcagttgtaaatcaagtgtgtggatctcaaagggtgcaatttatctttatataggaatacatttctagggcttccttcaagcccactctcttcaccctattttttcttatcttaaattgagagaaagagaattaatcttatactttgtcaaaacattttctaccatatttccagatgacatctgcgcttgaagagtcaaaggaatctgtgtctaatatcctgtttttaactgctgtaggggcaggatggaaaggatgatgggggctgccacaccactgattggccttttctttcacgtgattcatccttcctcattgtggcaaggagtttctttctctttttcttcctcctttgggatcattgtgtatgaaaagaaaaactttaaatgacaaacccagactccaggtgccttgcaaaggttgaaggccagccaggattgctgctgctgctgctactcctgccaacacccctttcattggcatgacggaatgaaaggatgcatgtctccacttcctgaccctccgcccacttccttctccctccaccacccccagtcgtcagctccttccctcatttatttttgttaagttgtgtgaattatttttaacccatttatcctgtttgtgcatagggtttttaagaagaaacagcacagtgcaacgagcaaatctttttggggtgtgtgggaagcaagggagggaggacatggagaaaagttctttaaacaaatagcaaactattgaacatgtgtaaaatcctgtatcatttatgaaatatgtataaaaagcaatgtaccttctggaacaataaatacttattcaatttttgaaaaaaaaaaaaaaaaaaaaaaaaaaaaaaa

SEQ ID NO: 223914 - DNA, 1000 bp, Homo Sapiens
cagcagccaagggttcacggtgttgcccttcccgggttggaaagagccaagggttggagcttcgatgggaaacgagagggcccaggcccagaccaggagggcagcacccaggcctggcagaaacggcgctcttcagacgacgcagggcctggatcctggaagcccccaccaccgccccaaagcaccaaaccaagcttcagcgccatgcgcagagcagaggccacatggcacatagctgaagagagtgcccccaaccacagctgccagagtcccagcccagcctcccaagatggggaagaggagaaggaggggaccctcttcccagagaggacacttccagctaggaatgccaagctacaggaccccgctctagctccatggcctcccaagccagtggctgtgcccaggggccgccagcctccccaggagccaggggtcagggaggaggctgaggctggagatgcagctccaggagtcaacaaaccccggctgaggctgagctcacagcaagaccaagaggagcccgaagtccaagggccccctgatccaggccggcggactgcccccctgaagcccaagaggacacggcgggcacagtcctgtgacaagctggaacctgatagaagacggcctcctgaccccacaggaaccagtgagccaggaacagactgacaactgccacaacaccctcctcagccctcgacatgtgcctcgcaaggactcagacccctatccacccccagtccccagggccccctgccagcccctgtcctacaggggcaagacggcaggaccaggcatgggggagctggaggcagggactagaacagagggagccacctggagagacggaggctgtcagtgcctgcctcgatacctctctctgcagagagcttctgggtgggggcttatctcctcccccaggagggtggatctctgtccctctatccccagggactctctcccctcttgtatagaataaaaaaacaaaatcatcgcc

SEQ ID NO: 223915 - DNA, 1000 bp, Homo Sapiens; identical to SEQ ID NO: 118499

SEQ ID NO: 223916 - DNA, 1000 bp, Homo Sapiens
tcaccaaagtgttgggattactggtgtgagcccccacacctggccgagccagcgcttctcaactcccaaggtttgcaagctccctgccccagggagctcacgccaggcaggccagtgggcctaagccagaaacagaaagacagcagtggccaggtggagagcttcccaagctgtgccgattagagccagctctaggaagggcctgctaataaggtctagggtctgagaccaagttttttctaatctcagcccctaagaaacctaatttgtgcttaggaatcttcccaggtaagaagaactagttcctctagttgttgtttttttttcccaaacatgcaaacactgaggattgagctgtgtggggtcagctgtgctgccaggcacatgtacgttgcctcatttcatccttgcaacagctctgcagggccccgcagatgaggaaatccgtaggcaggagcggttgagtgattttcctaaggtcacccagctgtttggtaatagtgttttgtcatctggtagcaggtttccattaccatgccatcagagcagacctcagccagggccacagaggtcccaaccgtctctgccctcttctgctgcccctgcctcatgggctcccagccacaggttccccatgggccagctttacgcctcctgatccttccgattggggcagactaggagaggaaagacgggcctgggctgggtgcggtggctcatgcctgtaatcccagcactttgagaggctgaggcgggtggatcacctgaggccaggtgtttgagatcagcctggccagcatggcgaaaccctgtgtctaataaaaatacaaaaattagccgggcgtggtggcgggcgcctgtaatcccagctacttgggaggctgaggcaggagaattacttgaacctgggaggcagaagttgcagtgagccgagatcacgccactgcactccagcctgggcgacagagcaaggctctgtctcaaaaaaaaaaaaaaaaaa

SEQ ID NO: 223917 - DNA, 1000 bp, Homo Sapiens; identical to SEQ ID NO: 118501

SEQ ID NO: 223918 - DNA, 1000 bp, Homo Sapiens
gtaaacataacttcgatgtactggacttgcatttccacttccgccacgcgagggagaacctgcactgggacggggtgcactggaatggacgtgtgcaccgctgcctctcccagctgctgctggcccacgtggccgacgcctggggtgtggagctgccccaccgccaccccgtgggcgagtggatcaagaagaaaaaacctggcccgagagtcgaagggccgccccaggccaacagaaatcacccggccttacctctgtccccacccttaccttcccccacataccgccccctgcttgggttcccaccccagcgcttgccgctgctcccgctcctgtccccacagcctcctcctcccattctccatcaccagggaatgccccggttcccacagggtcccccagatgcctgtttttcctcagaccatactttccagtcggatcaattctattgccattcagatgtcccctcatcagcccatgcaggtttcttcgtcgaagacaattttatggttggtcctcagctgcctatgcccttcttccccacaccccgttatcagcggcctgccccagtggtacataggggttttggcaggtatcgtccccgtggcccctatacgccctggggacagcggcctcgaccttcaaagagaagggccccagccaatcctgagccaaggcctcaatagacggacctaggccttatttcctctttatgaacatggattggacagatctgacacttcctttccattgcttggcctgaacagactgaccttgttaacttaagcctggagtccatgcctcgtcttccttttgttcattgctgttaccaagaaagccaaggaagagcagcctgactcattcttcttggctgcagcctcttccccacttcctgggagtgacccagcgttattcctgcctcctcactcctattctctttgcctttgtgtaaaaataaaatggaaataaacaagttgcacagaaaaaaaaaaaaaaaaaa

SEQ ID NO: 223919 - DNA, 1000 bp, Homo Sapiens; identical to SEQ ID NO: 118502

SEQ ID NO: 223920 - DNA, 1000 bp, Homo Sapiens
gccatggcctgtgctgctgttatgattcctgggttgttgcggtgctctgttggagccatccgtattgaggctgcgtcactgagattgacactcagcactttgcgccaccttactctaaccagcataatgaaatccaaaaggaaaactgatcacatggagagaactgcaagtgtccttcgacgggagattgtgtcagcagctaaggtgtgtggagctgccagtgagtcaccgtcagtgaagagcctccgcttgcttgttgctgatcaagacttttcctttaaagctggccagtgggttgatttctttattccaggagtctctgtggttggtgggttttcaatatgctccagtcccagactgctagaacaagagagagtgatagaattggcagtgaaatatacgaaccaccctcctgccctctgggttcacaatacgtgtacacttgactgtgaagtggctgtgagagtgggtggagagttcttctttgaccctcagcctgcggatgcctctagaaacctcgtgttgattgcaggaggagtcggaattaaccctctgctttccatcctgcggcacgcagcagatctcctcagagagcaggcaaacaaaagaaatggatatgagataggaacaataaaactattctacagtgcaaaaaataccagcgaactcctgtttaagaaaaatatccttgatttagtaaatgaatttcctgagaagattgcatgcagtttgcatgttacaaaacagactacacaaatcaatgcggaactcaagccatacatcacggaaggaagaataacggagaaggagataagagatcatatttcaaaagagactttgttctatatttgtggcccacctccaatgacagactttttctccaagcaactggaaaacaaccatgtacccaaagaacacatttgctttgagaagtggtggtaggaggcagacaaaggcagaaaaaataaagaggtgagatctaaaaaaaaaaaaaaaaaaa

SEQ ID NO: 223921 - DNA, 1000 bp, Homo Sapiens
gaccccagttgcaggggccaagcaggtgggagtggacaccaggcttcccagtggacgtccctgagcagctccgcatgcttggttctcccggagcttcctgctcaggcctcttgagaaatggatgctgtctcagaaggagttaaagctataacctgtaacctttaaaatctccagttaaagggcctgtttcttactggcctgtgaggtgcaccgtagtgccttgggcctgtgtgttaaagctgctctcaccagtggaacctaagaaatgagcaggttggcagctagggtttgtgttggaggctttcggtccagtgtcttgcagtcctacaacaagtgagaggcttgctgccatcagagaggtttatttcacacttacaggcacacacagacacagaccagagactcccagcagcagagcccaagcactggcttcgcccctcagtgccctggggcatgttcagggcagggttgagggggacgccctgcacatggctttgctgtgcaatgactggaaggccgcccggcatgggcggtagagacccctggcctctgagcaccttctagctcacgggtagtgggattctgcattagtggggctgagagatgtgggggcccctccagccccattatagtgcacctgaaggggtccacagcctgtgtcctagaagagggaagaggaaggaaggtgggtggggctggtagtatggactaaggtgctgcaggacctggggccagggacatcctgtgcagaagctctggctgcctctttgcggtggtggcctgaccgtcccacagcagcctccaccagggccctggtgctcagtggcccctctttgctggctggctgcctctgctgccccataccccacacactcatcagcctgaagttagcccctgagtgccacctgcatcgtgccataaccctgaccgcctggggcaggaagtattcaggttggctgtgtcagatgctaatgtgctgaatcaacagtcattgcagatc

SEQ ID NO: 223922 - DNA, 1000 bp, Homo Sapiens
tttcctgctggtgggggcagatcctgcacacacagacacagcgtctgcccccgagccattccctggagaccctgggtctaccccaggtggtcgtcatctgggccatttgccttacttctctggagcatacccaccctcagttacgtgccagacctggaccgcattctcctgccctgtcctggagctggcccctggctgcctggaggaccctgggtaggtcctgagggtgggatggagaagagggcactgctgtggtgtgggagcagtcctggggcttcctggtggctgtgaccagttgaggggctgttcctgggtggggtggcaatgggaggacaggtcagagcgccctcatttgtggggctgcccctccgggtttctcatcctgtccttggtgcctttttctgcccaacaagtccagggaaggccgaggtctcagactcctgggtaggggtgggggtttgagttgaggaccaaagtgccatagcgacatccagaacacaagcccaccaggggtccagcccaggctacccactcccctagggtctcccaggctcagaaggggatgcacgccccctgtggtcaagcctctggtgggcgtcttgcccagttcctgatggttcaaggggaggggggatgttggccaggccccagggcacagccctgacacaggtgtggctactggaggggccttcatacctgcggccccaaagcccctgggcttggctgtttgaggcagaggtgatggactccgggggcctgacacttgggatttgggaggcttcctagagcgctcagcaggtgaaggcagcaggggccatggccgggagccaggcctagctttgaactgagtttcaagggctgccaaagaggggcagtgggttggggttgtttttactacaaaataagttacttagttttataaagacaaaccgattgtagccaaatgacaccatatttaataaaatttagtctgaagtgaaaaaaaaaaaaaaaaaaaaaa

SEQ ID NO: 223923 - DNA, 1000 bp, Homo Sapiens
atttttagcatcacttgatggagagaagctggaactcttaaaaaatgacctaatttccattaaagacatctttgcagccaaagaattagagaatgaagaaaatcaagaagaacaaggcttagaagaaaagggagaagaatttgctcgcatgcttacagagcttctctttgaattacatgtggcggccacacctgacaaactcaataaggccatgaagagggctcatgactgggtggaagaggatcaaaccgtggtgtcagtagatgtggcaaaagtgtccgaagaagaaacaaagaaggaagaaaaggaagagaaatctcaagaccctcaagaagacaaaaaggaggaaaagaaaactaagaccatagaggaagtatacatgtcgtccattgaaagtctggcggaggtaacagcgcgctgtattgagcagcttcataaagtagcagaattaattcttcatggacaagaagaggaaaaaccagctcaggaccaagcaaaagttctaataaaattaactactgcaatgtgcaatgaagtggcctctttatcaaagaagtttacgaattctttaaccactgttgggagcaacaagaaggccgaggtccttaaccccatgatcagtagtgtattgttagagggctgcaacagtacaacgtacatacaggatgccttccagctgctgctgcctgttctgcaggtctcacatatccagaccagttgtttgaaagcacagccgtgacctggccagactccatctagttaaaggagacagctggccgccttgcctcaatatgtaccatttaaggggatgttctctgtgcgcctggccacagacatccatttgaggacactacaagcaattttgcacagacaatattgagaatgcaaatttagagagagttatcatttctctcaatgtgtataattgtttttacaaacaattgtgttttctttatgttaatttaaacttacacagcttatattgaaaaaaaaaaaaaaa

SEQ ID NO: 223924 - DNA, 1000 bp, Homo Sapiens
atcttggtaggcaagtcagaatctttgcctcacaatgatcatttaaatacattcagaacccccaaactgctaatatggttttatttatttatttattcattcatttgtttattcatttatttatttaggcctgaatcttacacagagaatttatatatagatattagctacatatactttgaatatgctatacatcgatattagcacctcacgtactttgcaattaagcttctgtaatgtcatgtgatttgtttttggaaaggaatagtggacaggagagtacaatttataatagtagcataactctttgtcctggtggtggaggtgggacgaggtggtgatatttaacctagattaaagaccaggaagggaggaattgcatctgccaaagtttcctccaacagcgatcagtagccctaagtacaaagaagccagatttagccttctgttgtttggcaaaacctcactcagagctttactccctcagacctttctgagtttaaccacagacatgatctttgctgtgctgagaaacttgtgtctacctggcctgtagggagtgtaaactagattaatacagattaacagactctgaacttaaaaaaaaaaatcactcctaagggtgtccttctaatttcaaaatatcaactcctaagaggtcagcagaatttggagatttgggtccttataagaatagctggtgctcttttcttgttcatgtctcaaaacaaagctgttgagagaactgctgcgatgaatcaaaccagaggagtttgtcatgctccccacagagagcccaggacatttgcctgatgtatggtgctgagctccaccttcagaggaactctctctttttttttttttttaaataactattattagcttgacaagaaaaaaaaagtgcccaacagttttagtgttaatcttggtgctctatggtgcattagcagagatatgaacaattaaatgaagacaaagaaaataaaaataaagtctgatt

SEQ ID NO: 223925 - DNA, 1000 bp, Homo Sapiens
gagatagaggaaagggtcgccagagacaagccattttgggagaacacccttcttcgtttagacatgatggctatggatcccatggtccattattgcctttaccaagtcgttacagaatgggctctcgagatacacctgaacttgttgcttatccattaccacaggcttcttcctcttacatgcatggaggaaatccctctggttcagttgtaatggttagtggattacatcaactaaaaatgaattgttcaagagtcttcaacctgttctgcttatatggaaatattgagaaggtaaaatttatgaagaccattcctggtacagcactggtagaaatgggtgatgagtatgctgtagaaagagctgtcacacaccttaataatgtcaaattatttgggaaaagacttaatgtttgcgtgtctaaacaacattcagttgttccaagtcaaatatttgagctggaggatggtaccagcagctacaaagattttgcaatgagcaaaaataatcgctttacaagtgctggccaagcatctaagaatataatccagccaccctcctgtgttttgcattattataatgttccattgtgtgtcacagaagagaccttcacaaagttgtgtaatgaccatgaagttcttacattcatcaaatataaagtgtttgatgcaaaaccttcagccaaaacactttctgggctattagaatgggagtgcaaaactgatgcagtagaagcccttacggcactgaatcactatcagataagagtgccgaatggttccaatccctatacattgaagctttgcttttctacatcatcccatttataagaagagaagagcatgttagaatttatgttcacctttattacaatttcaaagctacacttcattaaaaaaaaatctaaaatggttgatctcatgttgccttgcttactttaagatcctgttctgtaataaacatattttgccttgagtaaaaaaaaaaaaaaaaaaaaaaa

SEQ ID NO: 223926 - DNA, 1000 bp, Homo Sapiens
tgtcttcaggggaaagatgggtaagagacagtgttgctaatgctgttccttctttgtgcctccttccaaaccacagttatttgcccaaactacctctcgtggctggtttttcattggcctggcctctgcttctcaggctaattagtgactcctttctttgagggtcagggttggaggccccttactggtggttttacagggggatcctactttgttacacatgttgggtttcctgataaaaagagagtattttattaaacccttgaaccagtgtcctagaccagatgatttttgcccatgtgtatccccatttaaattcctacaactaagtctccctgctttgttaatagtccaacagttgggttgtgtaacatcacacttcaaccggtagatggctctaatctcacacatttacttactaaagattgaggattcggaatatttagaataaattagttttctgctttctaattttgcagatctttacatttttattgcttttcttaaaataagggatagctttgcaaccactattgttttaatggaaagcaaaaaacccccccaaacttatcagaatcctcgttctttttcagactactgaaaaatgacatttactctgttaaatgtttaataagtgaataagtaaatgtatcaagttgtttatataataaattataaaactcttgaggcacttggtatgttaaaaattttaaactttagtaacattaggttacaggtatgatttaaaaatttgtaaatagttcaaaagggcaatgttttctttatatttcttatagtcttaattttgttatccatgtgcataatttacctcatgatttcttttggtcaatcaggatctttaatacaatatagaaattgtgtaatagttattataaatgttaatacacaactttcaggtaattttaactgattatttcttttgctcttttaacttaagttattaaagtttaaaagttcgtaagtaaaaaaaaaaaaaaaa

SEQ ID NO: 223927 - DNA, 1000 bp, Homo Sapiens
ctcacggaccaagaggatccctggctgcctgtgaatggcccacatttgagtggtgctaacttgatgtgagtaggcattaattatgggtgcggctactaagatgggaaaaactatcacgacagtggcaccacctgatttcatgatgtaccatatgcagtaacccatgtttgaggtacagaattgaagctgatttttctgcaaaagatgaatttctataaacaatcccatttttatattttattattaaaacaaaaatacctctctttgctagagagttatatgtatgacttaaattattagctatggtttgcatttagtacatggcagattgcctgtaagtctgttcattttaacaacatacagggctgggcacggtggctcacgcctgtaatcccagcactttgggaggttgcgggtggatcacttgaggtcaggagttcgagaccagcctggccaacatggcaaaaccccgtctctatgaaaaatataaaaattagctgggcatggtggcaggcacctgtaatcccagctactcgggaggctgaggcaggagaatcgcttgaacctgggaggcggatgttgcagtgagcagagatcgtgccattgcactccagcctgggaacaagagtgaaactctcaaaagcagaaacaaaaacccaacatatatgggctgttagatagtaattgtaatttcgtataaatagtaaatgagtacatcttgattaaaagctatgaattcagaattgcttttaaatatatagggggttttttgaaatttattacagtgcaattgaaaatacacttaaaatactgcaggatgcttagtgctcagtgttatgtatgaacttgtggactttacaatgcaggttgagaactgctaatgtatagaatgactaaacagctgtctttcagggtatcatttttaaaggtataaggaacaaactttaatgtattgaaatgcataaataaaatttattttttatattttgtttagaaaaaa

SEQ ID NO: 223928 - DNA, 1000 bp, Homo Sapiens
cccccaagtggaggggtttgtacaagacatgcgcctcatcttccagaaccacagggcctcttacaagtataaggattttggccaaatgggacttagactggaggctgaatttgagaaggatttcaaggaagtgtttgctattcaggaaacaaatgggaacagttgactggtttagtggatgctgaaggccttcaggaaatatgctactggttgccactgacttcaaactgagagcacttgggaaatagcacatgcagggagaggcttttctctgagcctccctcatctgcccaaaaacaaatcctcaaaagaaatttgatcatcatgaatcccatccccaagaatctcatcaaccagggaagaggaactgagatcacagggaaggagattggaggtgataccagcacagacagactctcacctcttctcctgaggtctgctccagacaacatttattactcacaagacctttttcctccgttttttttttgagatggagtctcacacagtcacccgggattggaatgcaatggcgcgatctcagctcactgcaacctctgcctcccggattcaagtgattctcctgtctcagcctcccaagtagctgggattacagtgcctgccaccatgcccagctaattttttgcatttttagtagagacggggtttcactatgttggccaggctggtctcgaactcctgacctcatgagccgcccgccttggcctcccaaagtgctgggacgtgacaggagtgagccaccacacctggccactcgcaagaccttttatctgaaaaccagccaagctttattcacgacacacttcttcccttcactctcccacttctgtggtcaactccctgcagaactcccaaactgccgttcttttcgatagctcacgatggtgtatgagtgtcaatcatctgacccttcttggagtctcatatttcgtggaactcctgtgcaaacatatattattaaattttttttcctcctgtc

SEQ ID NO: 223929 - DNA, 1000 bp, Homo Sapiens
acaggcacgcccatgcatatctcctattctaacggcccctgacctctcccttttggatcctaaactgtgtctctggtctgaagactgggaaggagcaatttctcaatttatctttctactgtggatgctttcctacgccctgaggcacatgaagtcagaaaggaagggcagaggggcaagtaggcacagtaagggaattttcttttcttttttttttttttttgagacagagtttcactctgtcacccaggctggagtgcaatggcatgatctcgcctcctgggttcaagcgattctcctgcctcagcctcccgagtagctgggattacaggcgcctgccaccacgcccagctaatttttgtatttttagcagagatggggtttcaccgtgttggccaggctggtcttgaactcctgacctcaggtgatccaactgcctcggcctcccaaagtgctgggattacagctgtgagccactgcacccggccgggaatttatcaaaggggggactacttagatttggggcttcaaacctgagtctagcacaatgcagctggaggccagggctactcctacaaacccaagttctgactccttccagggaagtatcagcttaagaaacttgatcaggaaagtgacactggtctttcaaagagccctctttaccctcccatccctgccctctacactgcaagctgcattccagccacaacgcccttttctaaatctattttcattcatctcctattctggtctgtagccttgattccaaccattgaatgcacggagacagcccagtggcttgtcagattggtaaataatgacacctggtggataaatgttacattctagaagactattctggtcagcctaggtctgaaacactaaggagacttggcctgagatagggccatccacttgcctacaggcactctgcttttattattaaaaatagtcactttgttactataataaaatttaacagaaaaaaaaaaaaaaa

SEQ ID NO: 223930 - DNA, 1000 bp, Homo Sapiens
aatagctgcccttgaaaatgagctgacttttcttcgctctcagattgcagcaattgtggaaatgcaggaactgaaaaatagtacaaattctagttcctttggcttgagtgacgagcgcattagtttgggtcagctgtcatcatcgcgggctgcccatctgagtgtggacccagatcagcttccaggttcagtgctttctcctcctcctcctccaccacttcctcctcagttttcatctctccagccaccgtgttttcctcccgtacaaccaggatctaataatatttgtgactcagataatccagcaactgaaatgagcaaacagaacccggctgctaataagaccaattatagtcatcattcaaaaagccagagaaataaagatattccaaacatgttggacgttctaaaggatatgaataaggttaagcttcgtgcaattgagcggtcacctggcggtagacccattcataagaggaaaagacagaattcacattgggatccagtttctttaatatctcatgcacttaaacagaaatttgcatttcaagaagatgattcttttgagaaagagaatagatcttgggaatcttccccattttctagtccagaaacttcaaggtttggacatcacatttcacagtcagaaggacagcgaactaaagaagaaatggtcaacacaaaagctgttgaccaaggtatcagcaacacaagccttctaaactcaaggatttaaactcaacttaaggttgagctttaaacttccaaaacttcttcctggatgataaattattcttagaaactgatttggactgttaaaggctaaaagtagatgtatttaaagactcttcttgacacattttgcctacacttgctatgtaaatatgtatgcctgtcatttttgtttcctttgttcctttttacgtttatactctgttcttctgtacatagagcttaaaataaacattctttttgaacttgaaaaaaaaaaaaaaaaaaa

SEQ ID NO: 223931 - DNA, 1000 bp, Homo Sapiens
ttcctggtgcccgtgcccgcccggccgcctctgaccaggggccagttcgaggaggcccgggcccactggcccacgtccttccacgaggacaagcaggtgaccagcgccctggctgggcggctcttctccacgcaggagcgcgccgccatgcagagccacatggagcgggcggtgtgggcggcccggcgggcagcagcgcggggcttgcgggccgtgggggccgtggtagtggacccggcctcggaccgcgtgctggccaccggccacgactgcagctgcgcggacaaccccctcctgcacgccgtcatggtgtgcgtggacctcgtggcgcgcggccagggccgcggcacctacgacttcagacccttccccgcctgctccttcgccccggccgctgccccccaggccgtccgcgcaggcgccgtgcgtaaactggacgcagacgaggacggcctcccctacctgtgcactggctacgacctgtacgtgacccgcgagccctgcgccatgtgcgccatggccctggtgcacgcacgcatcctgcgcgtcttctacggtgcgccctcgcccgacggcgccctgggcacccgcttccgcatccacgcacggcccgacctcaaccaccgcttccaggtgttccgcggggtgctggaggagcagtgccgctggctggaccccgacacgtaggcgccgccctcctgcctccggacccttcccgctcccggccgtggggcgcccctcctggacttccgggcctcgatttcttccgcacaagcctgaccgtggatttcagggacacataccgcctccagcggggagcacgggtgctgccttccgtgcggatcgagctttcctggactcggtcattggggccaccccgtgccagcggtgcccttctgcggccgcccttgctgcgtttgtgtcccctctgtctcgcgggccgggaaactgctctgatgggaaaataaacagcccaaaaccaaaaaaaaaaaaaaaaaaa

SEQ ID NO: 223932 - DNA, 1000 bp, Homo Sapiens
acggctcagtgcaaccttgacctcctgggctcaagtgatcctctcacttcagctcctcaagtagatgggactacaggagtatgccaccatgcccagctaatttttttatttttttgtagaaccaggtctcactatgttgcccaggctagtctcaaactcctgggctcaagtgatcctccggccttggcctgtagtttcttttttctttttttttggagatggactctcattctgtcacccgggctggagtgcagtggcgtgatcttggctgactgcaacttctgcctcctgggttcaagcgattctcctacctcagcttcctaagtagctgggattacaggcgtgcgccatcgtgcctggctagtttttgtgtttttagtaaagacaggggtttcaccatcttggccaggctggtctcgaactcctgacctcaagcgatcccatctgcctcggcctcccaaagtgctgggattacaggtgtgaggcaccgtgcctggcagtctgtagtttttttttgttgttgttgttgttgttgttttaaatatggagtctcgctgtattgcccaggctggagtgcagtggcgcgatcttggttcactgcaacctccacctcttgggttcaagcgattctcctgcctcagcctcctgagtagctgggattacaggtgtgcgccgctacgcctggctaatttttgtatttttagtagagacagggtttcaccatgttggtcaggctggtctcaaacttctgaccttgtgatctgcctgccttggcctcctaaagtgctgggattacaggcgtgagccaccgtgcctggctgtagttgtttataatagcaacataattgtctatcaagtgggagtatgacataagtttatcctggacaatttccatattgctggacatttgaattgtttctggttggtcactcgtttagatactgcaacgaatatcttatatgaagcttttcctgcgttttggaataaacagtaaaaatag

SEQ ID NO: 223933 - DNA, 1000 bp, Homo Sapiens
acagtgggaggcgggcggcaacccggaggggcaggaggagggcgccagcggtggcgagtcggcctggcgcctggagagcttcctgaaagacctggttacggtggagcaggtgctgccccccgtggagcccatccccttgggagagctgagccagaaggatggcaggatggtctctcacatgcacagagacctgaagcccaaatcccgagaggcacccagccgaaacggcatgggagaagcggcccggggggaggccgcccccgccaggcgcttcagcagcaggctcttcagtcgccgagccaagaggcctgcggcgcccaatggcatggccagctctgtctccaccgagacctctgaagtggagtttctgacggggaagaggcccaacgagaattccagtgctgacatctcaggtaaaacaagtcccagttctgccaagcctagcaactgtgtgatttcctgagctgcgggatggtggtgggcaggacgtgtggatgcctgcctgccctgccctgtgctgtggagagcgcaggtcgcacactgcaccagtttgcacatcagacgccaactggccttctgccctgcagcctccgtcctggcctcagggacgctggatcccaaatgagagggtccgaagcatctcagtcacacgcctccaccggactgtcggtggctgggcaggggtcagtgccacggcctccttgtttacatgaagtggaagcttgaccagtgtctgctcgcctttgtgccccaccccctccgctgattgccagatggggtgagggcccattctttaaacctttatggggtggggtgtctggggcagctgcagtggcttctcctttcccaggcttcctggtgcttctggttccccacgccactccccacccaagagattggtggaataaaagggaagagggcagggccctgagcctggaaaaaaaaaaaaaaaaaaaaaaaaaaaaaaaaaaaaaaaaaaaaaaaaaaaaaaaaaaaaaaa

SEQ ID NO: 223934 - DNA, 1000 bp, Homo Sapiens
cacacggtcatcatctcgcgagggaagcccgtggacgcacactacctggggctactgcactttgtgaaggatttctccaaactcctggccttctccagcagctttgtgacaccacttctctaccgctacatgaaccagagcttccccagcaagctccaacggctgatgaaaaagctgccctgcggggaccggcactgctccccggaccacatgggggtgcagcaggtgctggcgtaggcggcccagccctcctggggagacgtgactctggtggacgcagagcacttagttaccctggacgctccccacatccttccagaaggagacgagctgctggaagagaagcaggaggggtgtttttcttgaagtttcctttttcccacaaatgccactcttgggccaaggctgtggtccccgtggctggcatctggcttgagtctccccgaggcctgtgcgtctcccaaacacgcagctcaaggtccacatctgcaaaagcctcctcgccttcagcctcctcagcattcagtttgtcaatgaagtgatgaaagcttagagccagtatttatactttgtggttaaaatacttgattcccccttgtttgttttacaaaaacagatgtttcctagaaaaatgacaaatagtaaaatgaacaaaaccctacgaaagaatggcaacagccagggtggccgggccctgccagtgggcggcgtgtgctagcaaggcctgccgggtgtgccgcagtcaccacagggttctgagaacatttcacagaagtgcctgagacgcggagacatggctggtgttaaatggagctattcaatagcagtgacgcgctctcctcagccaccaaatgtccctgacaccctccccagcccccacagataacatcagctgaggtttttttcagtatgaacctgtcctaaatcaattcctcaaagtgtgcacaaaactaaagaatataaataaacaaaagaaaggtgaaaaaaaaaaaaaaaaaaa

SEQ ID NO: 223935 - DNA, 1000 bp, Homo Sapiens
ttatttcaacctcacagttgacctgagaaatcgagattatcactccactttttcagacaaggaaactgaggctcagggaagccaagtgacaagtccaaggtcacgaagactttcttggagcccgaaacaccaccctctgctcctccttctcctgtcctggcccaggcatcctaggggctgaaatcctggaaaccgtgggctggtgtgagaaggtttgcatgctcagagcagagaagggctctccccactgcttcgtgattccagggccagagccatgcagtcccagaaaccccaacctagctggggcaggtccagagtccaagccctggtgggtagaggccaagcagaagccctgaagtggactcttgcttcccctagtagtgttttcagtgccaagaagctgaaactgtgagctggagttggggagaggtctggaagaggaccatctgggatttctacagcctgggtacccatagccacaccaaggcttctgggagattctgcagggtcagctttccaggctgttcccaaatagctccctgcctccccactgcccctaaagccacagcagaagagccattcatctcataaacaaaaaggaagaggaaagaatgaggaaggaccctgtgcaaggttatttgcaggcagggatgggcttgtacctgacagcacccacccctgtgtggcccccaggccctcatcaccctcagacccctcctaagcagttccctcattgctctttggactaggctgacagcaggaagagcagggcccatgaccgggtggaagttcagttttggtgtctgcttcaagagggggttttacactctgattccaggacaagcactctgaggcgggtgggggagagaaaccctggctcttcacccaggtttcacacacatgtaaatgaaacactatgttagtatctaacacactcctggatacagaacacaagtcttggcacatatgtgatggaaataaagtgttttgcaatctttaa

SEQ ID NO: 223936 - DNA, 1000 bp, Homo Sapiens; identical to SEQ ID NO: 115378

SEQ ID NO: 223937 - DNA, 1000 bp, Homo Sapiens
gatatttgcctatgcctttgacaagaaccgaggaaggggctctgggagactccttcatgagctgctgtgggagcggcaccgggggggcgtggccccgggcttccaggtggtgcacctcaacgctgtgaccgtggacaatcgcctggacaacctgcaactggtgccgtggggctggcggcccaaggctgaagagacctccagcaagcagagggagcaaagcttgtattggcttgcaattcagcagctgcctacagaccctatagaagaacagtttcctgtcctaaatgtgacccggtattataatgccaacggggatgtagtggaagaggaggagaactcttgcacctactatgagtgccactaccctccctgcacagtgattgagaagcagctccgggagttcaacatctgtgggcgctgccaggtggcccggtactgcggctcccagtgccagcagaaggactggcctgcccacaagaagcactgtcgggagaggaagcgtcccttccagcatgagcttgagccagagcgatgacgggcaggggagccacacatactcacagcccccgggctctaccctgggcacagcagagacagactggtggttgaacctggaggtgccaaaaaagccagctgcgggcccaggacagctgccgtgagactcccgatgtcacaggcagtctgtgtggttacagcgcccctcagtgttcatctccagcagagacaacggaggaggctcccaccaggacggttctcattatttatatgttaatatgtttgtaaactcatgtacagttttttttgggggggaggcaatgggaagggtagaaattacaaatagaatcatttgctgtaatccttaaatggcaaacggtcaggccacgtgactaaaaactgtcctgttgtcgaagcttctcccctgggccgccgggagccccgtggagcgcggcctgcacgggagttgtgtccacaaaggcaaagtaaaggggtggaatcatca

SEQ ID NO: 223938 - DNA, 1000 bp, Homo Sapiens
cgagggggcgggcggggcgctgcgcagcctcctgaggagccttccccgcagggcccggtgcagcgccggcttcgggcctgaatccagcgcggagcggccggcgggccagccgcctggggccgtcccttgcgcccagccgcggggcgcctggcgcgtgacgctcgtgcagcaagcagcggccgggcccgagggtgcgcccgagcgggctgccgagctgggagtcaacttcggtcggagccggcagggcagcgcgcggggggccaagccgcacaggtgcgaggcctgcggcaagagtttcaagtataactcgctgctcctgaagcaccagcgcatccacacgggcgagaagccctacgcctgccacgagtgcggcaagcgcttccgcggctggtcgggcttcatccagcaccaccgcatccacacgggcgagaagccctacgagtgcggccagtgcggccgcgccttcagccacagctcgcacttcacgcagcacctgcgcatccacaacggcgagaagccctacaagtgcggcgagtgcggccaggccttcagccagagctccaacctggtgcgccaccagcggctgcacacgggtgagaagccctacgcctgcagccagtgcggcaaggccttcatctggagctccgtgctcatcgagcaccagcgcatccacactggcgagaagccctacgagtgctccgactgcggcaaagccttccgcggccgctcgcacttcttccggcacctgcggacccacacgggcgagaagcccttcgcgtgtggcgcctgcggcaaggccttcggccagagctcccagctcatccagcaccagcgggtgcactaccgcgagtagccgggcgggggctcggggctcggcctcctacctgcccccaacccaccctccaccccgtcccccacggtgggcactgcccagcaccgcatgccacgtgtccggaataaattctttttgattgttggaaaaaaaaaaaaaaaaaaaaaa

SEQ ID NO: 223939 - DNA, 1000 bp, Homo Sapiens
caggagaatggcgtgaacccgggaggcggagcttgcagtgagctgagatggcgccactgcactccagcctaggcaacagagcaagactccgtctcaaaaaaaaaaaaaaaaaaaaaaaagacattttaactaagttattcacagtagcttccatgtgctcttagttctattctaaacaggcttatttagaaaaggattgcttgtaatgtttgtcatggtacatagaaaacattggaccagagtaggtaaaatgcagtccatgtcccatccatagccatctacaatagtaactgcccacaggctctccagaaaactactacaatggccaagtacagtataggctggaaagaccttatctgaaggtcagaaacattgactcagaaaaaaggtatgaagtctttccataaaatcttttcacaatattactcctatttcttttagattttaatgagccattacttatctcttcagaagacttaagtcttcctttatactcagtgaaatttcccagaatgtaatactgtcactgttctgccaagttccaatcaccaagatcatgattacgaatcccaatctgaattctatacccatggtgactctgatgctctcaacttttgagtgcctcaaaaaatgctaaaactttggctgggcatggtggctcacgcctgtaatcccagcactttgggaggccatggcgggtggaacatttgagggcatgagttcgagaccagcctggccaacatggtgaaaccctgtctctactaaaaatacaaaaattagccaggtgtggaggtacatgcctgtaatcccagctactcaggaggctgaggcagaagaattgcttgaacccaggcggcagaggttgcagtgagtcgagattgcaccactacactccagcctgggcaacagagagcgactctctcaaaaaaaaaaaaaaaaaaaaaaaaaaaaaaaaaaaaaaaaaaaaaaaaaaaaaaaaaaaaaaaaaaaaaaaaaaaaa

SEQ ID NO: 223940 - DNA, 1000 bp, Homo Sapiens
agttggtgcagccaaaccggggcactgtgctggcccagagctagggctgagaagtggccctgccttgggcattgcaccagaaccctggacccccgcctcacgaggaggcccaagtgcccaatgcagaccctcactggttggggtgtagctgggtctacagtcagacttcctgctctaagggtgtcactgcctggcatcccaccacgcgaatcctagaggaaggagagttggcctgatttgggattatggcagaaaagtccagagatgccagtcctggagtagaagaggtggtgtttgtttatctcttggatactaaatgaaatgaggtgtgtgggcttgtcaacacagaattcaagcctcatttgctatcccagcatctcttaaaactttgtagtcttggaattcatgacagaggcaaatgactcctgcttaacttatgaagaaagttaaaacatgaatcttgggagtctacattttcttatcaccaggagctggactgccatctccttataaatgcctaacacaggccgggtctggtggctcatgcctgtaatcccagcactttgagaggcctgaggtcggcggactgcctgaggtcaggaattcaagaccagcctggccaacatggcaaaaccccatctctactaaaaataaaaaaattattagctgggcatggtggtgtgtgcctgtaatcccagctactcaggaggatgaggcaggagacctgcttgaacctggaggtggaggttgcagtgagccgaggtcgcaccactgcactccagtctgggtaacagagcgagactttctagaaaaagcctaacaaacagataaggtaggactcaaccaactgaaacctgactttccccctgtaccttcagcccctgtgcaggtagtaacctcttgagacctctccctgaccagggaccaagcacagggcatttagagctttttagaataaactggttttctttaaaaaaaaaaaaaaaaaaaaaaaaaaaaa

SEQ ID NO: 223941 - DNA, 1000 bp, Homo Sapiens
ggagctttaggtggtgtttgcttgttctttaatttttaatgcttataagacaatgaggctgcttatgattttgtacttctgtacctgtttcctacagacacccatcgggtgggtaggaggaacagatttgagaaatgggcaggagatgtaggaggggaactaggttaccgcttatcagatggcataaattttcaaggagaatcaaaatgcaaaacttgggaataaatcatagcaatatcataattaatgtagtagtaatattgctgtttattaatgctgaagtgtggttttcctaactgtctgacttataatttgcataccattaaataatgcataatatggcacgccgaatcctgtttttcaaatatatgcttttggtggctaccatgcaggatttgaatttgtcttttaatttagcttaggaaagaacatcactgggcgagcggtaaatcctaaagaaggtgataaatgtcagtagtttcttattaaatattctaattttaggttcccaaaccttcaggaaatatatcttaatgcagacaaacaaacataaaacttctttagtacttacatcaggaaatttggggcagattttagaggggggaaattataggaggaaagaagttcacatcagaacagacaatcacagcaatgctctattccttagaaattagtgccacaaataagttacatctacaaacaggtggtaaaaattctttctggcccagttaatttgcacagaacttttctcagtttggtattttttactgcttggagatccagaagagaattagaaacaacatagcaaattaaaataggtttgtcaataatagagctcagacacctgtgtgctgtagattcacatacaggccgtgaacctaagtggggaaaatcctacctatccaccttctggctagattacctagcttagtgaaaagatagccaaataattggcatgtgaattatttcctgcttattcataataaataatgactgtcta

SEQ ID NO: 223942 - DNA, 1000 bp, Homo Sapiens
agttggtgtctctcttcaatttccacaactatgacaacctgaggcactgtgctcggaagttagacccacggcgtgaaggggcagaaattcggaacaagactgtggtcaacctgttatttgctgcctatagtggcgatgtctcagctcttcgaaggtttgccttgtcagccatggatatggaacagaaagactatgactcgcgcacagctctgcatgttgctgcagctgaaggacacatcgaagttgttaaattcctgatcgaggcttgcaaagtgaatccttttgccaaggacaggtggggcaacattcccctggatgatgctgtgcagttcaaccatctggaggtggtcaaactgcttcaagattaccaggactcctacacactctctgaaactcaggctgaggcagcagctgaggccctgtccaaagagaacttagaaagcatggtatgagcacaggtcatggacagcccctgctcaagaaaaagcatgagctggccacacatgtaatccataaccaccaaaaatactatggagagctacactgcttcagtggggaccaagcagtcatttggtgacttaggctagtgctttctatgggagtcaaaataccccattccctcagcagacagagtacagagaagggcctcagaggacacctgcagtacagctatccagagagactgggcttcaaggtacagcctaatggcttgccccactcaaaaccatcccagctcttcacccaggtctcctcttcctctccctgaagaaaccatcatgagagagatactctggtggagggactctagctaccatgcacatgtacatatccacagaatatgggaagtgggaatggctatatacatggctttagtagtctggagaaatctactccccttggccaggacatgctgctgctactgctaacagccaattttatagacagagaaagtattttgtgttcaaataaactttaattaccaaatcaaaaaaaaaaaaaa

SEQ ID NO: 223943 - DNA, 1000 bp, Homo Sapiens
cctgggggcaccgtggacccctatgcccgggtcagcgtctccacccaggccggacacagacatgagacaaaagtgcaccgaggcacgctctgccccgtgtttgacgagacctgctgcttccacgtgagtcagggatggtcggctgggtgggcctggacggctggatgggcctgggctgggtgggcctgggcagctgggtgggcctgggcagctgggtgggcctgagctagggcagcagggcctggctcacgccgctgcctcagatcccgcaggcggagctgccaggggccaccctgcaggtgcagcttttcaacttcaagcgcttctcggggcatgagcccctgggtgagctccgtctgccactgggcaccgtggatctgcagcatgttctggagcactggtacctgctgggcccgccggctgccactcagcccgagcaggtcggggagctgtgcttctctctccggtacgtgcccagctcaggccggctgaccgtggtggtgctggaggctcgaggcctgcgtccaggacttgcagagccctacgtgaaggtccagctcatgctgaaccagaggaagtggaagaagagaaagacagccaccaaaaagggcacggcggccccctacttcaatgaggccttcaccttcctggtgcccttcagccaggtccagaatgtggacctggtgctggctgtctgggaccgcagcctgccgctccgaactgagcccgtaggcaaggtgcacctgggtgcccgggcctcggggcagcccctgcagcactgggcagacatgctggcccacgcccggcggcccattgcccagcggcaccccctgcggccagccagggaggtggaccgcatgctggccctgcagccccgccttcgcctgcgcctgcccttgccccactcctgaatgcaccacatgcctctgtctccccgctgagcccaggcacttgcccaggccgccctgcaggaccactgcaataaacgccttctcctgcc

SEQ ID NO: 223944 - DNA, 1000 bp, Homo Sapiens; identical to SEQ ID NO: 118512

SEQ ID NO: 223945 - DNA, 1000 bp, Homo Sapiens
gcctcatgacaggcccaactagggataggaaggaaaatgaagagagccagtatttccccttctccagaagcaggtactcagctttctgggaaaagcgtgcctccagccgtggggacaggccatcctactgactacctcttgcttggcatgaaataaactgctatcctccccttggaatctaccgccactctacatcctactgctttggcctccctctcctctcaccagatggcatgtggtgtggcacctgtggctggacacaggaggcctcaggatcacaaatgttacactagacatatgtcctaatgtgctgcccagaaacctcaactgttccccagctactgaggggcactgtcagcgagatgttgggtctggaggtgatgagatcgggccacacttgagctgagtcaccagaccctattgcttcaacagtgcttggcccccgccagcttgtcccagccactctagctgctggatgtgatcctgggacatgtactccaagcctccgtcacaaaaaaaaaatcaccagctgccatagacacgggggaagcttgcggagcccaggtgaacaagctcagcaatcggacatctctggggaaaggaaggtggcacagaccatgttccctggttcctccctgccccttgccaggcttccttattccttactatgggaagaggtcatatcccttccctgcccctcgctgtctttagcaagcaggtttcactgcttcattagaagaggacaagtcaaaagtgaatcatttttcactacttaaggaataaatccaagagctttccagagactggctgctgcagccctgggaatgtctgtggaattactatgtggaaatggaactttgtgttatgctctagacattacagttatttgagtgttactcgttactgttgaggtcagtgcttcgtggcaaatggctgtactggatatcccagctctgctgcccttgttttgctgcatgttaaataaaaccattttcactgt

SEQ ID NO: 223946 - DNA, 1000 bp, Homo Sapiens
tacctcctactattcagggttctgatgcagctcatgaaaatggattggaacaaactctttttgatcgactttgcttaatgggtcacaagccaattctattgagaactcaataccgttgtcatcctgcaatcagtgctattgctaatgatctgttttacaaaggagccctcatgaatggtgtaacagaaatagagcggagccctttattggaatggctaccaaccctgtgtttttataatgttaaaggactagaacagatagaaagagataacagctttcataatgtggcagaagctacgtttacactcaagctgattcaatcactgattgcaagtggaatagcaggctctatgattggtgtgataacattatacaaatcccagatgtacaagctttgtcatttactcagtgctgtggactttcaccatcctgatattaaaactgtgcaggtgtccacagtagatgcttttcagggagctgaaaaggagatcattattctgtcctgtgtaaggacaagacaagtaggattcattgattcagaaaaaagaatgaatgttgcattgactagaggaaagaggcatttgttgattgtgggaaatttagcctgtttgaggaaaaatcaactttggggacgagtgatccaacactgcgaaggaagggaagatggattgcaacatgcaaaccagtatgaaccacagctgaaccatctccttaaagattattttgaaaaacaagtggaagaaaaacagaagaaaaagagtgaaaaagagaaatctaaagataaatctcattcataaaaagacatggtgtaaatattttgtatttatgtaaattcagactcattttacatgatatattttttatatttttattactctaaaccctcttattaaaaatatgatatttaaataacatagtaaacacatgtaaaaattttgttcttcaaaaaagtgtacaaaaggtagtataaaatcctactaataaaaataagcttttttct

SEQ ID NO: 223947 - DNA, 1000 bp, Homo Sapiens
gtttttctgctccccagcattggccctaatcatcctgatcatgctgtcacaaacttaagaggaaataaggaaaaggagagaaaaaagaaattggttatgaataaaagtgacaataaaacatgagatataaatcaagcttaaaaaaaaaaagcagcacctgtgggccatactaaaagatcccctacttacgttctggttgtcatgtttccctgtatttgataaaacacataattttgagaaaaataaagttttaaatgtatctatgtctcgacttttctgatgaagttataccagaaaagttaattatttgatgggcctgccatgtgaaaaccagaaaataacctcgtactcacaagccagtggaagggattcctgattttactaaaaaaaaaaaaaaaaaagagagggcggggacaaatatcaaattaagcaagtaaagaaaaagaacaggtaagagtgtgtgtgtgtgtgtgtgtgtgtaacactttgacaatactaaactctcataagcatttaacacttcagatgtttaacatttctgcccctttctcaatttttatgacgtgcaggcaaattatcattttctgtgaacacagctcagattttggctggaatggctatggctatgcagtggcacttcttgttgtagtctttttgcaaactctgattcttcagcaatatcaacgttttaacatgctcacctcagcaaaagttaagacagctgtaaatggactgatctacaaaaaggccttacttttatcaaatgtttctcgacaaaagttttccactggggaaattattaacttgatgtcagcaactcatggacttgacagcaaacctcaatctcctctggtctgccccttttcaaatcctaatggccgtatatctcctttggcaagagctgggtccagcagtgttagcaggggtggcagtccttgtgtttgttataccaataaatgctttagctgcaactaaaataaaaaagttaaaggtaagaaaa

SEQ ID NO: 223948 - DNA, 1000 bp, Homo Sapiens
acattttatatgtactattcttaaagatcacaattatttttaaactttctattttcaaatacttgtgattaataaggcattctatgatgaaatagccatggcttatatatttttgtcttttcacatatgatgtgtttggaacccaaattttttactgattttattgtgttgttggtaactagtatttacagctaacctatctattcatattttacatatatatatatatatatacatgcacacacactgatacatttaccttttaaaaaatgatttataagtgaactgttaggctccagtgatttcagtgttttgttcatgttttattggaaatgcacgtggtttcttaggcttttaaacaaatacatggaatggttgaaagatttattttgctcgtgcttagctaaatatgtcatctctagaaaagatgtggtttgttttggcactgttttaaaaactcaaatattttaaacatttgttaagttggagcttgcacatttaaaccagcagcatacgttccagaagagcatctcaagttaccaaattttttgtaatccttttactagtaaaatcttttttgaagagtttttcttgtgcttgcttcggcagcatatatactgaaattagaaaaagaaaacttttcttttttattatatattttagtgtaagttaagttaaacttctaaaagttgaattatttaatgtaggacttcataaatagtatttgacaatgataaatgtgtatttttgagaatcattaaaatgtatacaatgatattcctttgcagaagtcttaatatgcataatttttaatctaattgtcttctaaatatagttttggtgtatgctggtattttagaagccaccaatttctggactatctgattattaacaaagatgtattttaatgcacaaactcaaatgtttaaaatatatatttactttgtactcaaataaaatcccctattgcaaatcctaaaaaaaaaaaaaaaaaaaaaaa

SEQ ID NO: 223949 - DNA, 1000 bp, Homo Sapiens
gggagggcccgggaggagggtgccaccctctccctgccaggggcctggggaccctctccctggctgcctcaggcttctcttacgaagaggaaacgcaaaaaaagaaaaggaaaaaccccgtgctcgcccccttcctcctgccgtccactgcgcggcctcgtcagtcccggggctgactgtccctctcagctctgcgcctgccaggcagggcacgtgctcacagccctgggttgatttatttttttaagggggtagttttattttggtggggttgggtgggaaggaaggctgggggttttgtaaagtgtccactgctcgtcctgttaattttcctcaatttttcttcttcttccttctgtccctcctgccttccttctcttcccaagccctccaatccccatcccaggcttgctgtgtctcactgtccccaccctccttccctacttctttttttgtgtgtctggtttctcccttcctttcctccctttgggtttccagagtcggtgggagaagggcgggagggtgggcccgagtggcccagtgggtgggtggggtggggtggggcaagtgccccaactcccctcaccaggagaggcacctgcttggtgccgcccagggaaggggctcaggcctgacggaaggcctgttctgtgtgtgccgccgggcgacgtgcattgatggggaagctgctggaggagcaggggtggggggtgggagggaggggaaaggcaaatgcagatatatattacagacaaatactctagattccacgagcagcagcctgtggcacccgctgggcgcgggcagcagggaagagggagcaaggcattgtccacagactgctggggtcacttctttgcccacgggctccctgctcccccagttttttttctctctttgttaacaaatgtgtctgagtcttggaaaacaccccaaccccggaaatgtgtgggaaaaagaaaacaaaaactttccaaattccaaaaaaaaaaaaaaaaaa

SEQ ID NO: 223950 - DNA, 1000 bp, Homo Sapiens
tcttgaaatgggtagcagccactgtccattacctatcgtaaacattggggcaatttaataacagcattaaaatagttgtaaactctaatcttatacttattgaagaataaaagatatttttatgatgagagtaacaataaagtattcatgatttttcacatacatgaatgttcatttaaaagtttaatcctttgagtgtctatgctatcaggaaagcacattatttccatatttgggttaattttgcttttattatattggtctaggaggaagggactttggagaatggaactcttgaggactttagccaggtgtatataataaaggtacttttgtgctgcattaaattgcttggaaagtgttaacattatattatataagagtatcctttatgaaattttgaatttgtataacagatgcattagatattcattttatataatggccacttaaaataagaacatttaaaatataaactatgaagattgactatcttttcaggaaaaaagctgtatatagcacagggaaccctaatcttgggtaattctagtataaaacaaattatacttttatttaaatttcccttgtagcaaatctaattgccacatggtgccctatatttcatagtatttattctctatagtaactgcttaagtgcagctagcttctagatttagactatatagaatttagatattgtattgttcgtcattataatatgctaccacatgtagcaataattacaatattttattaaaataaatatgtgaaatattgtttcatgaaagacagatttccaaatctctcttctcttctctgtactgtctacctttatgtgaagaaattaattatatgccattgccaggtagaagtttggaataattgtttagtctctcctattagatgtggacaattttgtttttgtttttgttttcagggrtgaaataaaatatattatttctcccttaaaaaaaaaaaaaaaaaaaaaaaaaaaaaaaaa

SEQ ID NO: 223951 - DNA, 1000 bp, Homo Sapiens; identical to SEQ ID NO: 118517

SEQ ID NO: 223952 - DNA, 1000 bp, Homo Sapiens
acttccctgtccctgatcattttcccaactacatgcacaactccaaactcatggactacttcgggatgtatgccacacactttggcctcctgaattacattcgttttaagactgaagtgcaaagtgtgaggaagcacccagatttttctatcaatggacaatgggatgttgttgtggagactgaagagaaacaagagactttggtctttgatggggtcttagtttgcagtggacaccacacagatccctacttaccacttcagtccttcccaggcattgagaaatttgaaggctgttatttccatagtcgggaatacaaaagtcccgaggacttttcagggaaaagaatcatagtgatcggcattggaaattctggagtggatattgcggtggagctcagtcgtgtagcaaaacagatttgaccagtaggaactgagattcaacgtccccaagactgcaaaagtacctacaatcaaacaaattaatatatttcctaattggatcagcatgcagacaagtttacaaatatattacagaaagatttgaagagggattctggttacgttcagttaagcaggacactaatcctgaacaatctgatgtattaaagtttctaatgtttgtatctttggtttgatgcatacaatagagtggaagtctgtagtagttaatatgatgataattcgcttctaaatttaaatccttatttatatatgaagcatagctatgtcaatgtccagggaagcatttttaaatagtaaatcagaaacatgtaaactagtgaatacaattttctatttttcattcagaaatttgttgtcatagatgcagcctttatctggaaatcagtgggcagctctggtcaagcacagcatggcgaccactgtgtagtattttaccacctaatccttagtagccaacactgttaaatctgcataatgggtagcatatgaataaaataatatcttgtaaaaaaaaaaaaaaaaaaaaaaaaaaaaaa

SEQ ID NO: 223953 - DNA, 1000 bp, Homo Sapiens
gaacctcctagatgatctagctcagagtgaccctgagggctatgagaagtttattcagcagcagctgaaagaagggaaacagctctgtgctgccccagaaccacagctttgtctacagaccaggattctgaaaccaaaagaaaaaatactttttatcaacctgtgtcagtggacaaggatcccagctccccaatcaaccactcatccagtacctctaactgttggcaaaccagaagatacaactgagatatcagatgcttacacagtcattgatgttgcctacaatcctgatgttcttcatgcagcagaaaaggaccaagtgaaaaaaaatcagttaattcagatggccatgaaatgcattgaggagaaattccagttcaccctctcacactcttaccatattaccaaatttagaataaaaggaagcattcaaagaatgaaacaaaatctgatgggaatccaaactgattccatagatttaagagaaaaaatgagaagggaactaactcttggacagatacgaagcagtactatgagcaatccagatcactttcctcaactgttactgccaaaagaccaagtttcaggcaaagcagtgtgtctgatagaagagatttccagtactgaaatccaggtggagatgaagatgccagcctatgaactaaaaattgtgcatgatcacagtgagaaacctctgaaaattgagttgaaagttgaattacctggtattaattctgtctctctctgtgaccttagtgtttctgaggatgatttattgattgaagtatctgagaagtacagattacatctgaatcttccaaaacttattgatactgaaatgaccacagcaaaatttatcaaagaaaaatccacgctaatcatcacaatgcctttggtgtgaaagaagagcatcatatgttttgggttttcagtgctaaagtcatgtgaattaaaggaccttcattttggccaaaaaaaaaaaaaaaaaaaaaaaaaaaaa

SEQ ID NO: 223954 - DNA, 1000 bp, Homo Sapiens; identical to SEQ ID NO: 118519

SEQ ID NO: 223955 - DNA, 1000 bp, Homo Sapiens; identical to SEQ ID NO: 118520

SEQ ID NO: 223956 - DNA, 1000 bp, Homo Sapiens; identical to SEQ ID NO: 118522

SEQ ID NO: 223957 - DNA, 1000 bp, Homo Sapiens
ttaaagggcaagaatggagctgtctatcccaagcactccggtttctgcctggagactcagaactggcctgatgcagtcaatcagccccgcttccctcctgtgctgctgaggcctggtgaggagtatgaccacaccacctggttcaagttttctgtggcttaaggaagtgtgaagatatgatccagtccagggctaggctcagccacctgtctcctgtccagaaaaaaggtgaagattaagaagctttcagaatgattctatggattaaaatcatacaaatggtggctgttctgagaatcagtctgggtattgatttccttttccagtgactggctccaggccatgtctaatgaccagctcgattccctgtgcagttcagagagcaagtgaacccaaccaacaatgtcgtcatctaagccctgaccctagccagggactcccatgctgctgttggctccatctctccacactgcctctttcttttcaactttttgcccttcctttctttaaagctattctcacattgcttttatttcctcctccttcacctccaaccactgtcagcagcactctggagttttcaaatgtcacattagcctcaccctgcatgctaggagatggacctgtctctatacagcagtagatgattgataagtgaggaaactgaggcttacagaggttgaagaccaacaagctaataaataaaaagttgaggccgggcacggtggctcacgcctgtaatcccagcactttggaaggccgaggcaggcggatcacgaggtcaggagatcgagaccatcctggctaacacggtgaaaccccgtctctacataaaaaattagctgggtgtggtagcacgcacccgtagttccagctacttgggaggctgaagcaggagaatcgcttgaacctgggaggtggaggttgcagtgagccgagatcatgccactgcactgggcaacagagcaaaactcgatctcaaaaaaaaaaaaaaaaaaaa

SEQ ID NO: 223958 - DNA, 1000 bp, Homo Sapiens
tttgacatgtacatcgaatcataatttaaaaacaaggtctgaccaggtgtagtgcctcatgcctgtaattccagcactttgggaggccaaagtgggtggatcacctgaggtcaggagtttgagaccagcctggccaacatggtgagaccccatctctacaaaaaatacaaaaattagcctggtgtggtggtgcacacctgtagtcccagctacttgggaggctgaggcacaggaatcaatagaaccccaggaggtggagactgcagtgagccaagattgtgccactactgtactctagcctgggcagcagagtgagaccctgtctcaaaaataaataagtaaataaataaataaataaaataaaaaccaggtcagtacctggagaatttgaatgatagagaatgatagagtaataccctaattattagttaaaacctacaggccgggtgyggtggctcacgcctgtaatcccagcactttgggaggccgaggtgggtggatcacttgaggtcaggagttcaagaccagcctggccaacatggtgaaaccccatctctactaaaaatataaaaatcagccgggcatggtggcatgtgcctgtaatcccagctactcaggagtctgaggaggagaatcacttgaacctggaggcagaggttgcagtgagtcgaggttgcgctactgcactccagcctggacaacagagggagactctgtctcaaaaaaaaaaaacctacagctgttcaaggaccagctgacaggtcaagtgtggccttttctggtctttgaacacatcatagaaagtgacaaatgctgcaaagccatgaagaacatgaactataaacgggtagactaactgcccagcttagacacttatctatgccacaaaacagctgaatttgtcacatttatatattgcaatatgggaagtattgagatcaaaacaggattccattgacctaattatattaagctaataaactaattttttgaatttttg

SEQ ID NO: 223959 - DNA, 1000 bp, Homo Sapiens
gaggcagcttcgagcccaaaagagtcacagtgacacctcaggaagatgtccttcctggggaagaagaagcaccagccacaggggcaggtgtcctcccaggaagtacagctcccccctacacctagctcatcattttctatggatagacaatccgctcttcatccagaaaaccaacctgccctccccaaatatgtgctcaccagcagcaacaggctatctgagtctttccaagagcaattgccaagggcacaggagaggtcattgtcacccaagcagaggccaccttctcctgagaagttgctgttgaccaaggagaggtcacattcttttcaggagaaatcactgttgcacagagaaagccagctgtcgtcatttgagagccagccacagcctctggggagccagtcatttctttcaggccagctgacgttggagagccagccagactcctcggaggagaagtcagcatttttgaagccctccacaccgttccggaagagctggcaaaaggagcctcacacccccaaggaggggacggtgccacttccagacaagacccacaaatctcaggtggagactctgccaccaagtctggaagaatcgtccacgtccacgagcgagcagcctatggaggtggagctgtggcccgcggagaagcagtcatcatcatccatggagtggctgctggtgcccggggaggagcagctatccttgcccccagaggagcagtcattgccctctgcggaggggaccagggttcagcagtgacgtagcatctgaatccctagacccatctgatgaagaggcatcttcgagcccaaaggagtcacgctggcatatcaggaagatgtccttcctgggaagaagaagctccagccagttctgctgcaagtcaaccagcatgcagggggccttcctctaaagacaaggactccacatgcttttctttttctaataaaccagggtccatctgaccccagcgctaaaaaaaaaaaaaaaa

SEQ ID NO: 223960 - DNA, 1000 bp, Homo Sapiens
cggaaagccttgagaacttattcctcgacccggacatggcacaggagaaaatgaaactaggtttcaagtcgctgccgagttccactaccgcagacggcaacattctgagaagagtcaacagtgcccctttgatcaatggacttggttttaattcacaggtgttgcaagctgacatgttaagaattaggacaaacagaacaacatttaggaatcgacgctctctgttgttgccacctcctccctttcatggttccatcagccgccttcatcaaatcaaacaggaagaagccatggatttaataaatagagaaacaatgtctgaatggaagctacaaagtgagatacagataagtcactcttgggaagaaggcttgaaactgaatgacaatggcttacagaaatcatcctctctaaagtgcattgatttaactccagtatcctcaatggcttcttccatcaagaagactgggaagtctacttccagctacttttgatggaaacgacagcaatgctggatcttctggtaattcgtcagctgaaatcggcactgtcacaaactctcctgtgtcaccttctgatactggttctcatttgttctagtagacaaactttcaactaaatgattcacccatcccaagactttctcaccagtggagaaacacacacatcaagcaaaccaagtcagagcaatgagaattgtactgtataatttaaactatctcctatttatcttttttcctcaatttcctaaaattctatttatctacagaacttgcgtgtataattcttgtgtacatccttaaatttaatgtaataacatgttaaagatgttttccaaatcagaaccatgttgaagatacaagcgtaaattgttaggctgctattttctagaaaatgctgtaccttgactttttaaaataatcttatgaaacataattctgataaaatataattgttcaattaacaaaggaaaaaaaaaaaaaaaaaaaaaaaaaaaaaa

SEQ ID NO: 223961 - DNA, 1000 bp, Homo Sapiens
atattcccagtgccactccagaaaagcaggtaacacaggaaggtgaagatggagatggtgatcttgcagatgaagaggaaggaactgtacaacagcctcaagccagtgtcctgtatgaggatttgcttatgtctgaaggagaagatgatgaggaagatgctgggagtgatgaagaaggagacaatcctttctctgctatccagctgagtgaaagtggaagtgactctgatgtgggatctggtggaataagacccaaacaaccccgcatgcttcaggagaacacaaggatggacatggaaaatgaagaaagcatgatgtcctatgagggagacggtggggaggcttcccatggtttggaggatagcaacatcagttatgggagctatgaggagcctgatcccaagtcgaacacccaagacacaagcttcagcagcatcggtgggtatgaggtatcagaggaggaagaagatgaggaggaggaagagcagcgctctgggccgagcgtactaagccaggtccacctgtcagaggacgaggaggacagtgaggatttccactccattgctggggacagtgacttggactctgatgaatgaggcttcctttgggcctccttggtcagccttccctgttctccagcctaggtggttcacctttccccaatttgttcatatttgtacagtatctgatcctgaaatcatgaaattaactaacaccttagcctttttaaaagtagtaagtaaatgataataaatcacctctcctaatcttcctggggcaatgtcaccctttgatttaaaacaaagcaaccccctttcccctaccactacggaaaagagcaagctcatttttccgtgtcctcctttatttaactccatttattgcttttggtataatttttccctggggaaggaggggaaattatgaaagaactagtaactttatgtcctcttgatgtattaggaaatttccggccaggcgtggtggctcacacctgtaa

SEQ ID NO: 223962 - DNA, 1000 bp, Homo Sapiens; identical to SEQ ID NO: 118526

SEQ ID NO: 223963 - DNA, 1000 bp, Homo Sapiens
tgctgcaaggagagtatacctactctttgggccaagtttatgatcccaccacaacctaccttggagctcctgtcttctatgccccccagacctatgcagcaattcccagtcttcatttcccagccaccaaaggacatctcagcaacagagccattatccgagccccttctgttagagaaatttacatgaatgtacctgtaggggctgcgggagtgagaggactgggcggccgtggctatttggcatacacaggcctgggtcgaggataccaggtcaaaggagacaaaagagaagacaaactctatgacattttacctgggatggagctcaccccaatgaatcctgtcacattaaaaccccaaggaattaaactcgctccccagatattagaagagatttgtcagaaaaataactggggacagccagtgtaccagctgcactctgctattggacaagaccaaagacagctattcttgtacaaaataactattcctgctctagccagccagaatcctgcaatccaccctttcacacctccaaagctgagtgcctttgtggatgaagcaaagacgtatgcagccgaatacaccctgcagaccctgggcatccccactgatggaggcgatggcaccatggctactgctgctgctgctgctactgctttcccaggatatgctgtccctaatgcaactgcacccgtgtctgcagcccagctcaagcaagcggtaacccttggacaagacttagcagcatatacaacctatgaggtctacccaacttttgcagtgactgcccgaggggatggatatggcaccttctgaagatgcttttttaaatttaagaataagacacacaaaactctattaaaaaaaaaaaagaaataaacctctaactcggtccccaatgatcataaataatatgtttcctaaagaaatgcctttccagagactgtatagcttataccaattatagaatcatgaagtaaaaaaaaaaaaaaaaa

SEQ ID NO: 223964 - DNA, 1000 bp, Homo Sapiens; identical to SEQ ID NO: 115530

SEQ ID NO: 223965 - DNA, 1000 bp, Homo Sapiens
gaacggcgagtaaagaagcggaaagcaaggctggtggttgcagtggaagaggccttcatccacattcagcgtctccaggctgaggagcagcagaaagccccaggggaggtgatggaccctagggaggccgcccaggccattttcccctccatggccagggctctccagaagtacctgcgcatcacccggcagcagaactaccacagcatggagagcatcctgcagcacctggccttctgcatcaccaacggcatgacccccaaggccttcctagaacggtacctcagtgcgggccccaccctgcaatatgacaaggaccgctggctctctacacagtggaggcttgtcagtgatgaggctgtgactaatggattacgggatggaattgtgttcgtccttaagtgcttggacttcagcctcgtagtcaatgtgaagaaaattccattcatcatactctctgaagagttcatagaccccaaatctcacaaatttgtccttcgcttacagtctgagacatccgtttaaaagttctatatttgtggctttattaaaaaaaaaagaaaaatatatagagagatatatatctatgccagaggggtgtcttttttaaaaattcttcttcattgctgactgaaactggcagatgattgaccagtatcctttgaccatctgcactttatttggaaggaagcaggggctgtccaccctgaaaaagagtgactgatgacatctgacttttgtcgatgggacttctcaagaagccattccttggagcttctgttacagctgtaaaccaaagtggagctggtgcttcttgggagcctcgccttacaactaattcctgcctttcgtccagtaccaagtcccccgttgcttctggtcagcccacttgtagacttccaggggacacatctttattctgtttcaggaaaccagtcacgacacgtccacatatgtatttgtgtatgttaatgtccagtatcacatcacccatgaaagt

SEQ ID NO: 223966 - DNA, 1000 bp, Homo Sapiens; identical to SEQ ID NO: 118530

SEQ ID NO: 223967 - DNA, 1000 bp, Homo Sapiens
aaagagaacacacaattgaagaatggaaagaacttatctacaaggaagtaatgaattcagaagaaaagactaaaaatggtgtagtaaaaggacagccttctccttcaggtgcagcagtgaacagcagtgagagtctccctccatcctcgtctgtcaatgacatctcctccatgtccaccgaccagaccctggcatctgacactgacagcagcctggaagcctcggcaggacccctgggttgttgcaggtgactagccgcctgcctgcgaaacccagcgttcttcaggagatgatgtgatggaacacacacacacgcagacacacacacacacacaaatgcagacacacaacatcaagaaaacagcaagggagagaatccaagcctaaaattaaataaatctttcagcctgcttcttccccagggttctgtattgcagctaagctcaaatgtatatttaacttctagttgctcttgctttggtcttcttccaatgatgcttactacagaaagcaaatcagacacaattagagaagccttttccataaagtgtaattttaatggctgcaaaaccggcaacctgtaactgcccttttaaatggcatgacaaggtgtgcagtggccccatccagcatgtgtgtgtctctatcttgcatctacctgctccttggcctagtcagatggatgtagatacagatccgcatgtgtctgtattcatacagcactacttacttagagatgctactgtcagtgtcctcagggctctaccaagacataatgcactggggtaccacatggtccatttcatgtgatctattactctgacataaacccatctgtaatatattgccagtatataagctgtttagtttgttaattgattaaactgtatgtcttataagaaaacatgtaaagggggaatatatggggggagtgagctctctcagacccttgaagatgtagcttccaaatttgaatggattaaatggcacctgtatacca

SEQ ID NO: 223968 - DNA, 1000 bp, Homo Sapiens
ttcctatcaagttacttttcaatccattcagaatctgccccagtggagacccaggagttcctttcctgcactcttctccatcctcccacctttgctgggcttttctatcactcccacctcccccagagtcagggctccattgctgagtgccccatcctggaggattggccccaagatctcctagaacaggataattgcctgtgtttaggcagataggcctaaatctttcagattctttctacaaggcaaataacccctctcttgttaattatgatgctgagaaagcctctgtctctttatttcaccttgccaagacacccacactactttggtgatgaaaagaaaggaatgagagggaaagtttggacctgtcactttggtgacagggaaagtccaggtcactttattctgtaactctccattcactggtcaaataactccatgaggctatcagtggctacagtggaaggacctgatcttgtccatctttgtgtgcacagagcctagcacagggcttggtagagggtatatctagtgaatggagaatacatggagaaacttaactaagttacacaagcatatctgacaggaatgttaccttcaattgtatgttacatatgattagtcacttttcatacactataacctctgatttttcactcaagtttgggctgattatattgtaatgatgttagataatactcaacatgattcagtatgacaaacttttttgagcacctactttatataaaacatgacaaattgcagtgtgatgtaatcaaaaacaaagaagccctataagaccatttctctagaacagatgttcttaatatttttcttactctaaaatatgtggtagatagtatgcaagaaaagccgggtgcggtggctcaggcctgtaatcccagcactttgggaggccaagatgggcggatcatgaagtcaggagttcgagaccagcctgaccaacatggtgaaaccccgtctctactaaaaaaaa

SEQ ID NO: 223969 - DNA, 1000 bp, Homo Sapiens
aggtggaagtggaatatgtcaccatggcttccttgccgaaggaggacatttcctatgcatctctgaccttgggtgctgaggatcaggaaccgacctactgcaacatgggccacctcagtagccacctccccggcaggggccctgaggagcccacggaatacagcaccatcagcaggccttagcctgcactccaggctccttcttggaccccaggctgtgagcacactcctgcctcatcgaccgtctgccccctgctcccctcatcaggaccaacccggggactggtgcctctgcctgatcagccagcattgcccctagctctgggttgggcttggggccaagtctcagggggcttctaggagttggggttttctaaacgtcccctcctctcctacatagttgaggagggggctagggatatgctctggggctttcatgggaatgatgaagatgataatgagaaaaatgttatcattattatcatgaagtaccattatcgtaatacaatgaacctttatttattgcctaccacatgttatgggctgaataatggcccccaaagatatctgtgtcctaatcctcagaacctgtgactgttaccttctgtggcagaaagggacagtgcagatgtatgtaagttaaggactttgagatagagaggttattcttgctgattcaggtgggcccaaaatatcaccacaagggtcctcataagaaagaggccagaaggtcaaagaggtagagacaaagtgatgatggaagtggacgtgggtgtgacgtgagcaggggccatgaatgccgcagccttcagatgccagaaagggaaaggaatggattcccctgcctggagcctccaaaagaaaccagccctgcccacgccttgacttgagcccattgaaactgatcttgagctcctggcctccagaattgcaggagaataaatttgtgttgtttttaatgagccaaaaaaaaaaaaaaaaaaaaaaaaaaaaaaaaaaaa

SEQ ID NO: 223970 - DNA, 1000 bp, Homo Sapiens
agaggccttggacctccttaggcgactcctggtgttcgccccggacaagcggttaagcgcgacccaggcactgcagcacccctacgtgcagagatgatcctggagtgtggaggcagcagcggcacctcgagagagaagggcccggagggtgtctccccaagccaggcacacctgcacaaacccagagccgaccctcagctgccttctaggacacctgtgcagggtcccagacccaggccccagagcagcccaggccatgaccctgccgagcacgagtccccccgtgcagccaagaacgttcccaggcagaactccgctcccctgctccaaactgctctcctagggaatggggaaaggccccctggggcgaaggaagcgccccccttgacactctcgctggtgaagccaagcgggaggggagctgcgccctccctgacctcccaggctgcggctcaggtggccaaccaggccctgatccggggtgactggaaccggggcggtggggtgagggtggccagcgtacaacaggtccctccccggcttcctccggaggcccggcccggccggaggatgttcagcacctctgccttgcagggtgcccaggggggtgccagggctttgcttggaggctactcccaagcctacgggactgtctgccactcggcactgggccacctgcccctgctggaggggcaccatgtgtgagccgccctactcccttcacctggccctctgttcctgccccagccccttccccagacccctctccagtctcctgcaccccttagccctccctgctttgcctggcccgttgaagttccagggagcttgcccgggtctcctcgggggagcagatgagggccctgcccccgccccactgacttcctccaataaagtcatgtctgcccccaaaaaaaaaaaaaaaaaaaaaaaaaaaaaaaaaaaaaaaaaaaaaaaaaaaaaaaaaaaaaaaaaaaaaaaaaaaaaaaaaaaaaaaaaa

SEQ ID NO: 223971 - DNA, 1000 bp, Homo Sapiens
ctagccgggccgactggacaggcgatgagcccctgccctaccaacccacattctcagatgactggcaacttccagagccctccagccaagcacccttaggataccaggaccctgtttcccttcggcggggaagtcataggttagggagcacctcacactttcctcaggagaagacacacaaccatgaccctcagcctggggaccccaactccaggccctccagccccaaacctgcccagccagccctgaaaatgcaagtcttgtacgagtttgaagctaggaacccacgggaactgactgtggtccagggagagaagctggaggttctggaccacagcaagcggtggtggctggtgaagaatgaggcgggacggagcggctacattccaagcaacatcctggagcccctacagccggggacccctgggacccagggccagtcaccctctcgggttccaatgcttcgacttagctcgaggcctgaagaggtcacagactggctgcaggcagagaacttctccactgccacggtgaggacacttgggtccctgacggggagccagctacttcgcataagacctggggagctacagatgctatgtccacaggaggccccacgaatcctgtcccggctggaggctgtcagaaggatgctggggataagcccttaggcaccagcttagacacctccaagaaccaggccccgctgatgcaagatggcagatctgatacccattagagccccgagaattcctcttctggatcccagtttgcagcaaaccccacaccccagctcacacagcaaaaacaatggacaggcccagaggctgaagcaaacagtgtcccttctggctgtgttggagcctccccagtaaccacctatttattttacctctttcccaaacctggagcatttatgcctaggcttgtcaagaatctgttcagtccctctccttctcaataaaagcatcttcaagcttgtaaaaaaaaaaaaaaaaaa

SEQ ID NO: 223972 - DNA, 1000 bp, Homo Sapiens
catctgccgagccaatggcactggctacttctatgtgctggcacccaaggtggtggacggcacgctgtgctctcctgactccacctccgtctgtgtccaaggcaagtgcatcaaggctggctgtgatgggaacctgggctccaagaagagattcgacaagtgtggggtgtgtgggggagacaataagagctgcaagaaggtgactggactcttcaccaagcccatgcatggctacaatttcgtggtggccatccccgcaggcgcctcaagcatcgacatccgccagcgcggttacaaagggctgatcggggatgacaactacctggctctgaagaacagccaaggcaagtacctgctcaacgggcatttcgtggtgtcggcggtggagcgggacctggtggtgaagggcagtctgctgcggtacagcggcacgggcacagcggtggagagcctgcaggcttcccggcccatcctggagccgctgaccgtggaggtcctctccgtggggaagatgacaccgccccgggtccgctactccttctatctgcccaaagagcctcgggaggacaagtcctctcatcccaaggacccccggggaccctctgtcttgcacaacagcgtcctcagcctctccaaccaggtggagcagccggacgacaggccccctgcacgctgggtggctggcagctgggggccgtgctccgcgagctgcggcagtggcctgcagaagcgggcggtggactgccggggctccgccgggcagcgcacggtccctgcctgtgatgcagcccatcggcccgtggagacacaagcctgcggggagccctgccccacctgggagctcagcgcctggtcaccctgctccaagagctgcggccggggatttcagaggcgctcactcaagtgtgtgggccacggaggccggctgctggcccgggaccagtgcaacttgcaccgcaagccccaggagctggacttctgcgtcctgaggccgtgctga

SEQ ID NO: 223973 - DNA, 1000 bp, Homo Sapiens
cagcctgcacgattcacaggggtctctacaccaagcaccaccacaccaaccagtattatcacatggtcaccattccttctggagcccggagtatccgcatctatgaaatgaacgtctctacctcctacatttctgtgcgcaatgccctcagaaggtactacctgaatgggcactggaccgtggactggcccggccggtacaaattttcgggcactactttcgactacagacggtcctataatgagcccgagaacttaatcgctactggaccaaccaacgagacactgattgtggagctgctgtttcagggaaggaacccgggtgttgcctgggaatactccatgcctcgcttggggaccgagaagcagccccctgcccagcccagctacacttgggccatcgtgcgctctgagtgctccgtgtcctgcggagggggacagatgaccgtgagagagggctgctacagagacctgaagtttcaagtaaatatgtccttctgcaatcccaagacacgacctgtcacggggctggtgccttgcaaagtatctgcctgtcctcccagctggtccgtggggaactggagtgcctgcagtcggacgtgtggcgggggtgcccagagccgccccgtgcagtgcacacggcgggtgcactatgactcggagccagtcccggccagcctgtgccctcagcctgctccctccagcaggcaggcctgcaactctcagagctgcccacctgcatggagcgccgggccctgggcagagtgctcacacacctgtgggaaggggtggaggaagcgggcagtggcctgtaagagcaccaacccctcggccagagcgcagctgctgcccgacgctgtctgcacctccgagcccaagcccaggatgcatgaagcctgtctgcttcagcgctgccacaagcccaagaagctgcagtggctggtgtccgcctggtcccaggtaggtgcactggtctcgcgggagcgaggttgactagctct

SEQ ID NO: 223974 - DNA, 1000 bp, Homo Sapiens
gtggccctgctggtggagacccagatgaaaaagttggagatcaaacttcggcactttgaggagctggagactatcatggaccgggagcgagaagcactggagtatcagaggcagcagctcctggccgacagacaagccttccacatggagcagctgaagtatgcggagatgagggctcggcagcagcacttccaacagatgcaccaacagcagcagcagccaccaccagccctgcccccaggctcccagcctatccccccaacaggggctgctgggccacccgcagtccatggcttggctgtggctccagcctctgtagtccctgctcctgctggcagtggggcccctccaggaagtttgggcccttctgaacagattgggcaggcagggtcaactgcagggccacagcagcagcaaccagctggagccccccagcctggggcagtcccaccaggggttcccccccctggaccccatggcccctcaccgttccccaaccaacaaactcctccctcaatgatgccaggggcagtgccaggcagcgggcacccaggcgtggcggacccaggcacccccctgcctccagaccccacagccccgagcccaggcacggtcacccctgtgccacctccacagtgaggagccagccagacatctctccccctcaccccctgtggacatcacggttccaggaacagcccttcccccaccactgggaccctccccagcctggagagttcatcactacgtaaggaaagctccttccgcccctccaaagccctcaccatgcctaacagaggcatgcatttttatatcagattattcaaggacttctgtttaaaagatgtttataatgtctgggagagaggataggatgggaatgctgccctaaaggaagggctggtgaaaggtgtttatacaaggttctattaaccacttctaagggtacacctccctccaaactactgcattttctatggattaaaaaaaaaaaaaaaaa

SEQ ID NO: 223975 - DNA, 1000 bp, Homo Sapiens; identical to SEQ ID NO: 118535

SEQ ID NO: 223976 - DNA, 1000 bp, Homo Sapiens
tgacaaacccttggtcacactgattaaaactaaagatttgtaatctttttttggattatttttcaaaaagatgagatactacactcatttaaatatttttaagaaaataaaaagcttaagaaatttaaaatgctagctgctcaagagttttcagtagaatatttaagaactaattttctgcagcttttagtttggaaaaaatattttaaaaacaaaatttgtgaaacctatagacgatgttttaatgtaccttcagctctctaaactgtgtgcttctactagtgtgtgctcttttcactgtagacactatcacgagacccagattaatttctgtggttgttacagaataagtctaatcaaggagaagtttctgtttgacgtttgagtgccggctttctgagtagagttaggaaaaccacgtaacgtagcatatgatgtataatagagtatacccgttacttaaaaagaagtctgaaatgttcgttttgtgtaaaagaaactagttaaatttactattcctaacccgaatgaaattagcctttgccttattctgtgcatgggtaagtaacttatttctgcactgttttgttgaactttgtggaaacattctttcgagtttgtttttgtcattttcgtaacagtcgtcgaactaggcctcaaaaacatacgtaacgaaaaggcctagcgaggcaaattctgattgatttgaatctatatttttttttaaaaagtcaagggttctatattgtgagtaaattaaatttacatttgagttgtttgttgctaagaggtagtaaatgtaagagagtactggttccttcagtagtgagtatttctcatagtgcagctttatttatctccaggatgtttttgtggctgtatttgattgatatgtgcttcttctgattcttgctaatttccaaccatattgaataaatgtgatcaagtcaaaaaaaaaaaaaaaaaaaaaaaaaaaaaaaaaaaaaaaaaaaaaaaaaaa

SEQ ID NO: 223977 - DNA, 1000 bp, Homo Sapiens; identical to SEQ ID NO: 118536

SEQ ID NO: 223978 - DNA, 1000 bp, Homo Sapiens
tgccagataaaatgctggatatcatgcaataaatttgcaaaacatcatctaaaatttaaatttgtcctacatttgtacttgctaaatctggcagccttaattattacacaactataacacaacacaaacagtaatctctcccctagtttagagtcctttgcatgaaatttagcaaatctatcattttgaatacagtacaagcctggtaatccagtgtatttgggataggccagtggaactcagaactgatacatatatacatgtatgtctatcatattcaatgtctattaggtgtaaatcatctcttcatgtaaaagacactactggtttgagggtagactcgtctaggaatattttgtccttctgtgacagcaccactatccatcccaatgtaacatttctacaaagggaagatatcttaaccaggcatacttatatttgctagttggaaaatcattctgaacagttttaattccattctattgaatggattattgtatgagctatttggggatcagatataaatgacaatcacacagaaccacttttattcaacatagataaaatgtgatgagtgttaacattttaaataagcaatctgcttaatggacattggtatgaaggggaagtgtcattctttacctcactcctcaaacacttttctatccaaaggttggtttgagtcagtattggcatcatacaaccacttactgtaaaataagtttattagtggtaacgtgatagaatttattcccgatatctgatgttacaaactttagggtccttgagatatgcaggatccttgtatgtaactggcataaaccctgtaaagagataattaaagttcttgacaaaacataatgagcaaaatttcagctagctcaattcagttgttgaggtattctttcttacccattatttgagctctcttaattgcttttgtgatttctttctgtttcttcccacaaagacctgtaaaataaaaagctttcttattcat

SEQ ID NO: 223979 - DNA, 1000 bp, Homo Sapiens; identical to SEQ ID NO: 118537

SEQ ID NO: 223980 - DNA, 1000 bp, Homo Sapiens
cagctgctatttcggcttcatcaccaaacaccccctgctgagccgcttcgcctgccacgtctttgtctcccaggagtccatgaggccggtggcgcagagtgtgggccgcgccttcctggagtactaccaagagcacctggcgtacgcctgccccacggaggacatctacctggagtagcctgcccaccgctctgtctcctggccgtctgctccaggcgcagctggggctgaggatgtctcaagaggccaccatggctttggcaaggactggattggggggacatgggaccttacgcttgtgggggtctgcgggctgggaactctcgtcctcggtccccagggcgcagctgttggggctgcgggggagtggagcccccgtgcccctgcttttcctcagatccgttctttctctgtgttgtcctcctccttcccttcccagtctcccttttctctctcctggtgtctctgcccctctctgtgcctgcaaaccttatcctctattcttcactttggggtcagaacttcgggggtgtggaggaggtgcggctctagggacaggtaatgtcggcttccaagtgatgccctcctgccactcccctgcgatttataagggaattttaatttttatagtgaatctcaagggatcatcccatccttgaccacagggacaagaggggccccctcgccccagccccaccccacatggagctcagggggaagcagggaggggttcccaaaagagccctgcggaggctaggagtggttcttgatgctcacctgaagcccctagacgctgctaggagggggggccctcctgggcccccaatacccctccgcttgccgctgctagcgcacccctgcagtccagcgtgcatccaccccacgcacgccccgtgctgtgttcctgggccctgcccatggcctcaataaactctctgcttggtgtgaaaaaaaaaaaaaaaaaaaaaaaaaaaaaaaaaaaaaaaaaaaaaaaaaaaaa

SEQ ID NO: 223981 - DNA, 1000 bp, Homo Sapiens; identical to SEQ ID NO: 118540

SEQ ID NO: 223982 - DNA, 1000 bp, Homo Sapiens
cgtcgcaggtgcccctggccggagatgcggtaggaggggcgagcgcgagaagccccttcctcggcgctgccaacccgccacccagcccatggcgaaccccgggctggggctgcttctggcgctgggcctgccgttcctgctggcccgctggggccgagcctgggggcaaatacagaccacttctgcaaatgagaatagcactgttttgccttcatccaccagctccagctccgatggcaacctgcgtccagaagccatcactgctatcatcgtggtcttctccctcttggctgccttgctcctggctgtggggctggcactgttggtgcggaagcttcgggagaagcggcagacggagggcacctaccggcccagtagcgaggagcaggtgggtgcccgcgtgccaccgacccccaacctcaagttgccgccggaagagcggctcatctgaacgctggggcctgctgcagccaccaacactgcccaggactgcgggttgctggcttgtacaccgcagctgccaccgagacaccagcctctgatggctcaggaggacttgtggggagaggctgggggcacccatgtggtgggctctgtgcagcatgttgcctctgcttggctgtgcctgcagctcagggtgctggggctcgggacccacccccctgcttgcggaaccaacttttctctgtgtgtccagcaggccccacaaccccctctcctttctttcagttctcccatgcagccgaggcccgggcccctcaggactccaaggagacggtgcagggctgcctgcccatctaggtcccctctcctgcatctgtctcccttcattgctgtgtgaccttggggaaaggcagtgccctctctgggcagtcagatccacccagtgcttaatagcagggaagaaggtacttcaaagactctgcccctgaggtcaagagaggatggggctattcacttttatatatttatataaaattagtagtgagatgtaacaaaa

SEQ ID NO: 223983 - DNA, 1000 bp, Homo Sapiens; identical to SEQ ID NO: 118543

SEQ ID NO: 223984 - DNA, 1000 bp, Homo Sapiens; identical to SEQ ID NO: 118547

SEQ ID NO: 223985 - DNA, 1000 bp, Homo Sapiens
agactttaccgtgccattggaaatataattccgttgcagacgctctggatggcgaataccattaaacttctggatttggtagaagttaacagttcagtccttgctgatccaaaattaacgggacaggctcttattccaggatcagtaatataccacaaacagtcacaaatactattggtttattgcaaggatggttggattggtgttcgatcagtgatgctcaagaaatcactaacagctactgacttctacaatggatatttgcacccctggtaccagaaaaattcccaagctcaaccaagccaatgcagatttcagactctcagacttccaacaaagaagaagcagaaaaaaactgttgctatgcaacaatgcattgagtagttaggaagaagatggataaaaacctattacatatttgtaatttattaaaaaccttatttacaaggaattatctggactttttttttttttttttttttttgagacagagtctcactctgtcacccaggctggaatccagtggcactatctcagctcactgcaacctccgcctcccaggttcaagcaattctcctgcctcagcctcctgagtagctgggattacaggcacacgccaccacacgcagctaatttttgtatttttagtagagatggggtttcaccatgttggtcaggctggtctcgaactcctgaccttgtgatctgcccacctcagcctcccaaagtgctatgattacagacgtgagccaccgtgcctggcctggaattatctggactttcaaagaagatggcattattataagaagagaagattattgccgaaaagatggattgcctcactttccactttttatgtaacagtagttaaaaaacagctttttttttacttgaattacaaaaaagtttaaataaaacttgtatttatgatacgaaaaaaaaaaaaaaaaaaaaaaaaaaaaaaaaaaaaaaaaaaaaaaaaaaaaaaaaaaaaaaaaaa

SEQ ID NO: 223986 - DNA, 1000 bp, Homo Sapiens
ctgccttacagttcagtgcgcaggccttcaccttttcatcaccagcctctctgctcagtgctctggagttcttgaccttgtcctttatcatgagatttgctgaaatcactaatgaaaataactcccaaaagcaacaaacaaaaatattagtttaactggcactgtggtatattaaaaggcacaagggcattgtggcttaacacttttgctggatcccaagagacgcacatgatgttaaaaagagatctggcagcagtactaatactacatttcagtgtaatcatcttggggtggtttggccaggatttcccaattccttgatatctggagtttcttcaccattgtccggcatcctgcggaggcttaatatacaggcgtaaggtcagcagcaatttgtctaataagtgatgagatcagtagctgaagtctctaagctgggccattactaaataccatagccatgttgatctggaaatttatccctctagtgtcttacctcacataagccatttgcccactgtgcaatatagaaaggtgttttcaaaagtatttggccgtagattttcacatccatcataaggttggcattcaataaggaaaaagttctaactccagtattaaattgtacataaatcccaaatgttcttaaagaacactcagggacatgtttgttgcctggcattggtaatgaaaggttggtttttgaaacttgaaatttcaccattggtttttttcctatcatttctgcatatccagcaaaaggaatctcatgttgactcctggcagagttcagtggcttcagtctgtctatctgttctgaggggaaaattgtgttctggatccagtaatcaatttggcaactttaatcgaggttttcaaaattccaaggagggttaataaagaatgataatcagttttatttgctaatagctaagacaaatttgtaataaagtgttttataatacttcaaaaaaaaaaaaaaaaaaaaaaaaaaaaaaaa

SEQ ID NO: 223987 - DNA, 1000 bp, Homo Sapiens
tcagaacctgcctggagaaatgcgcatgggggtgggcctggtaagtcccaggaaccacaggaagtgagctaaggctcacccagagcagctgggtctccaggctgcctgggctttttgtcctcatgaacaactctggagcagctgtctgtccctcagagggcacctggaggcagcaaagattatcttatttattttattttgttttctgctatatttagagtggcaaaaaaatagagcagagggtttctgctgtctccagactgtctaccaaagagaaggcgacagatgcctcctgggtttggaagggggatgcactgtggatctgccatccattctgcagtctccagcagagcaggcagtcaggccccagcgtgcctccatcccagtgccccgatgaccatctggtcagccctcccaacctcccttccagggggcttaccagcaaagccatattcggctaggaatttggaattcacaacctttattaacccctggcaaaacttcccgtttgcatgtcaaatcacattgaagcctgaagattagcttttcttactggtttttccaataagtaatagcaaagcccacttatcatacttaaactacagtaaagaaaagaggtggttctctgcagtgatcgtttagtgtggccctcaaacattaaatatccccaggtctccttggtgggtggcaggatttaaattcaatcaaatcctgtcctagtgtgtgcagtgtcttcggccctgtggacacaggtgaatgagggaccagccctgccctgggctgttgagaagagatcagtccacccagagttagacattgtttttgtagaaaacaggcatttattatgtctagggttttgtgttttttttttttccttacaggataaaagcctttatacagaaacaaaatggaacctttcatataaaaccttttctttaaaaaaaaaaaaaaaaaaaaaaaaaaaaaaaaaaaaaaaaaaaaaaaaaaaaaaaaaaaaaaa

SEQ ID NO: 223988 - DNA, 1000 bp, Homo Sapiens
tgacctatgaagtcaaatttgactttacctttcctcaaagatatatttaaaccaacctcatgccctgttgataaaccaatcaaattggtaaagacctaaaaccaaaacaaataaagaaacacaaaaccctcagtgctggagaagagtcagtgagaccagcactctcaaacactggaactggacgttcgtacagtctttacggaagacacttggtcaacgtacaccgagacccttattcaccacctttgacccagtaactctaatcttaggaagaacctactgaaacaaaaaaaatccaaaatgtagaacaagacttgaatttaccatgatattatttatcacagaaatgaagtgaaaccatcaaacatgttccaaaagtaccagatggcttaaataatagtctggcttggcacaacgatgttttttttctttgagacagagtctctgttgcttgggctgcaatgcagtgatgcaatcttggctcactgcaacctccgcctcctgggttcaagtgattctcgtgcttcagcctcccaagtacctgggactacaggtgtgcaccaccacaccaggctaattttttgtgtatttttactagagacagggtttcaccatgttggccagcgtggtcttgaacgcctgacctcagatgatccacccaccttggcctcccaaagtgctgggattacaggcatgagccaccacggccagcccacaatgatattacaaacctattaaaaatgatacttagacagaattgtcagtattattcaagaacatttaggctataggatgttaaatgacaaaaggaaggacaaaaatatatatgtatgtgaccctacccataaaaaatgaaatattcacagaatcagatctgaaaacacatgtcccagactgcatactggggtcgtcatgaggtgtctccttccttctgtgtacttttccttgaatgtgcacttttataacatgaaaaataaaggtggggaaaaaagtctgaaga

SEQ ID NO: 223989 - DNA, 1000 bp, Homo Sapiens
gtggagtgaataccaaatgtttgccctggtggttcctatctcttcaggcaaacatggtcagtattctgtaaagttcccctggcctaaatgattacttgctctgggcaagtggatatttattaggctatttcaaagccacagcataagaatgtcagcctagccacagagtctgagattctgagttcagcctagccacagagtctaagattctgtatcctctgacattttggaaatgatacactactggcttaagtgatgactctttcagattttcagtattttatacaactactgccacatccttatactttattgcttttctgtcttcttcaacctgggagagaccctgaatttgagtgtgttctctaatcaatagtggtttagctttcttttctatttcactcgtttctagggttttttatttgcagtttaggaactattaggaatgtcaggactttatcagcaggggtaaaactaccacctggcctagcctaagtaggaagtgaaaagataattcaccaaacaatgattaatcagatagaagttctagtcaagagggatattgttgaagttacctcttttagcctagatacatggattcttttcaaatcaggaaagattagaaaaggaacccaaaaaaccctttaacagtgtgaatctttatagtatttgaaaatgagaagaagcagcagattgtaatttggtttattggatgtgatggacgttctgtaatagaaaacctgaaacgatgattgaatgggaaaaagagactacaaaatttgtcgtaggatgtatacagacttattttctttattacagtattataagaaaacatatgtatttgtaaaaatggtttcctgtgtcaagtatttgtgcagtcagagctgacttgtaaactattcttgtaatagctcattattttgaaagatttatatatgatgaattctggatatatgaccaataaaactgatgaagcaaaaaaaaaaaaaaaaaaaaaaaa

SEQ ID NO: 223990 - DNA, 1000 bp, Homo Sapiens
tgttaattttctttttcctctcatttttctattgaatgatttgtccttttatctcatggatttgttaggagttctcttgtattttctgtattttatgtctgttgccaatgttttctcctacttagccatttggctttaattttacatggtgtctgtttaaataaatgttttatatttgtatacaatcaaattgattaattttcatgacttatttcaggatataaagcaaattattttctaagacatttacagtgtatgttttcctatgtttacatgtgctcatttcacgtcatgtattttcctctacgacatgtttctgtgtgagtagttaacatgtagatctttagaattgatttttctgaagagtgaaacagcgctgcttccaatatctgttcaaaattcatttattgaaaagtccactcatatgtctgatttgaaatgctgtttcattatgtgttaaattctttcactgagctcttccatattcctagtaaatgatgcattactttggtatgttctcagatttgggtaaagccttcctcatgttctataaaaattggttaactgctggtgagcacatctcttgaagttttgatatgggttgcacaacatttataggactgatttggagagaccgacaataccgagtgcagtcctcccttggtatctagttccaggacccctgtggataccaaaatccaagcaatgccctgcagatcatgggacctatgcatatgaaaagtcggtccttgtatttgagggttttgcatccctcaaataccatatgttttatttgtgtttggttgaaaaaagtttgcatataagtgaaacttagcatttcaaacctgtgttgttcaaagatcatttgtatttctcttcaagaacaatgaatgtcttcattaaatcatcttttgtgggagagcttttggtttcatagattttcatatatatatatgatataataaacactttttgacattcaaaaaaaaaaaaaaaaaaa

SEQ ID NO: 223991 - DNA, 1000 bp, Homo Sapiens
catggtcatgcgctgggacggctccatgtttcgtctgctgcagcaacttccctcgcgcggtgcccacgtcttccagccactgctcatcgccagggaccaactggccatcctaggcagcgacttcgccttcagccaggtcctccgccttgagcctgacaaggggctcctggagccactgcaggagctggggcctccggccctggtggccccccgtgcctttgcccacatcactatggccggcagacgcttcctctttgctgcttgctttaagggccccacacagatctaccagcatcacgagatcgacctcagtgcctgagaccaccaacgggactctgggcatggctggggcccctggacggccccttggctggctcctggccctacttggggtgatggcccgcctgtgagctgctgaccgtgggccacgttcatcagccacacgtctaggccttaagcccacttcttaaaggatctgcacccatggggggacatagagggtcccagcctactggacctcccgagctgcccttcaggtctaaagcaacatctggacatctcggctggggcagattccccatcaaaggcaacctggggggtgcaggctggtgcactgcatggagtcgaggtggaggtcacgtgcagagctccatgaggtcccggagcccccctctcaacccgctcctaccccgctggtccctctgaaagcaccgaggggttgatggcattcctttcccattctaaactccacgcagccaatcgctttcctggaggagcgccaacctcgaagacaactcagcactgggcgggttcccctctgctgcttgtgcgcatgcgtgcggccgcccagcaagctgtgccttttgcgcctcttgcgcgtgcgccggggcacagggagggacagcgggaggtgtcgcggggagcctggtgcccttctagatgggcgacggaggcaaggacaagacgagtccgagctcaataaatgcgctgtgcaccctca

SEQ ID NO: 223992 - DNA, 1000 bp, Homo Sapiens
tgtgctgagcaacattgaccggattggagcagaccatgtgcagagcctcctgctgaaacactgtgctcctgttctggcaaagctgcgcccaccgcctgacaatcaggacgcctatcgggcagaattcgggtcccttgggcccctcctctgctcccaggtggtcaaggctcgggcccaggctgctctgcaggctcagcaggtcaacaggaccactctgaccatcacgcagccccggcccacgctgaccctctcgcaggccccacagcctggccctcgcacccctggcttgctgaaggttcctggctccatcgcacttcctgtccagacactggtgtctgcacgagcggctgccccaccacagccttcccctcctccaaccaagtttattgtaatgtcatcgtcctccagcgccccatccacccagcaggtcctgtccctcagcacctcggcccccggctcaggttccaccaccacttcgcccgtcaccaccaccgtccccagcgtgcagcccatcgtcaagttggtctccaccgccaccaccgcaccccccagcactgctccctctggtcctgggagtgtccagaagtacatcgtggtctcacttcccccaacaggggagggcaaaggaggccccacctcccatccttctccagttcctcccccggcatcgtccccgtccccactcagcggcagtgccctttgtggggggaagcaggaggctggggacagtccccctccagctccagggactccaaaagccaatggctcccagcccaactccggctcccctcagcctgctccgtgatgctccacctgccagcccccggattcccacacatgcagacatgtacacacgtgcacgtacacacatgcatgctcgctaagcggaaggaagttgtagattgcttccttcatgtcactttctttttagatattgtacagccagtttctcagaataaaagtttggtttgtaagttctgaaaaaaaaaaaaaaaaaaaa

SEQ ID NO: 223993 - DNA, 1000 bp, Homo Sapiens
tatcaatggagcatgtgtgcaaaaaaatgtaagaggaaaaaaagtaaattaaggaaaaaatcctcactcattcccatgttgtcaataacaggtttgtttgtgctttgtccaagctgtggagactcttgtacttgatcccctcccaccaattctaaagtagctttctccagatcagactttaatttctctgcatcaggtgtatcgtattgagtggctgccctgcagaagatgtgatgaattatcctgtagtacaagattatcttattcccctgcccaggtgtgagcacgtgctctcgctccctttcaggtttactatgtttaaaactaaactgctgcaaaagttctcaatgttcttttccaacacatctatatatatatggacacacagtcacgcaagctagttcccatgactcctggatctatgtgtatgcagaaggctacatatacatagttgcttctttcctttccattgtagctctttgcctctcaattgtcattgatacatgcattgctcttattctgtctggcattacaattgcagttttgcctaatggcaaaaccagccatcccattggcaaaagagtcaacagtatctgtgtttgtactgtgcagttttcaggatgagatgacagatagcacgactacactgaggcaccctcagagaaggcagggcctgatttatctagctgtccagccgctgtggctggaggtaggctagttgggatgggcagctaagcagtcttctcttctgcctttatgagattgggtagaaagatggggcatattcatctacccccaaaagaacactataaaaacagctcctctatatttccacctctttctatttatgcaactcatcttcacagattgttctaaagtaaaatagatggtgtatgctgtatccacaaatcatctgtaacaattatgttttcagtgctgtgtcattccaaataaacctttggtaatcttcaacgattaccctaaaaaaaaaaaaaaaaaa

SEQ ID NO: 223994 - DNA, 1000 bp, Homo Sapiens
acacaccccgtccaaggaagtcaagcaggagcagatcctcagcctgtttgaggacacgtttgtccctgagatcagcgtgaccaccccctcccagccagcagaggcctcggaggtggcgggtgggacccaacctgcggctggagcccaggagccaggggagacggcggcaagtgaagcagcctccagctctcttcctgctgtcgtggtggagaccttcccagcaactgtgaatggcaccgtggagggcggcagtggggccgggcgcttggacctgcccccaggtttcatgttcaaggtacaggcccagcacgactacacggccactgacacagacgagctgcagctcaaggctggtgatgtggtgctggtgatccccttccagaaccctgaagagcaggatgaaggctggctcatgggcgtgaaggagagcgactggaaccagcacaaggagctggagaagtgccgtggcgtcttccccgagaacttcactgagagggtcccatgacggcggggcccaggcagcctccgggcgtgtgaagaacacctcctcccgaaaaatgtgtggttcttttttttgttttgttttcgtttttcatcttttgaagagcaaagggaaatcaagaggagacccccaggcagaggggcgttctcccaaagattaggtcgttttccaaagagccgcgtcccggcaagtccggcggaattcaccagtgttcctgaagctgctgtgtcctctagttgagtttctggcgcccctgcctgtgcccgcatgtgtgcctggccgcagggcggggctgggggctgccgagccaccatgcttgcctgaagcttcggccgcgccacccgggcaagggtcctcttttcctggcagctgctgtgggtggggcccagacaccagcctagcctggctctgccccgcagacggtctgtgtgctgtttgaaaataaatcttagtgttcaaaacaaaatgaaacaaaaaaaaaatgataaaaactctcag

SEQ ID NO: 223995 - DNA, 1000 bp, Homo Sapiens; identical to SEQ ID NO: 118552

SEQ ID NO: 223996 - DNA, 1000 bp, Homo Sapiens
agaagaaaatgaatgctgctgctgagactgaagaccagtatttcagaactttgagaattggagagcaggcacatcaactgatctcatttctagagagcccctgacaatcctgaggcttcatcaggagctagagccatttaacatttcctctttccaagaccaacctacaattttcccttgataaccatataaattctgatttaaggtcctaaattcttaacctggaactggagttggcaatacctagttctgcttctgaaactggagtatcattctttacatatttatatgtatgttttaagtagtcctcctgtatctattgtatatttttttcttaatgtttaaggaaatgtgcaggatactacatgctttttgtatcacacagtatatgatggggcatgtgccatagtgcaggcttggggagctttaagcctcagttatataacccacgaaaaacagagcctcctagatgtaacattcctgatcaaggtacaattctttaaaattcactaatgattgaggtccatatttagtggtactctgaaattggtcactttcctattacacggagtgtgctaaaactaaaaagcattttgaaacatacagaatgttctattgtcattgggaaatttttctttctaacccagtggaggttagaaagaagttatattctggtagcaaattaactttacatcctttttcctacttgttatggttgtttggaccgataagtgtgcttaatcctgaggcaaagtagtgaatatgttttatatgttatgaagaaaagaattgttgtaagtttttgattctactcttatatgctggactgcattcacacatggcatgaaataagtcaggttctttacaaatggtattttgatagatactggattgtgtttgtgccatatttgtgccattcttttaagaacaatgttgcaacacattcatttggataagttgtgatttgacgactgatttaaataaaatatttgcttcactt

SEQ ID NO: 223997 - DNA, 1000 bp, Homo Sapiens; identical to SEQ ID NO: 118555

SEQ ID NO: 223998 - DNA, 1000 bp, Homo Sapiens; identical to SEQ ID NO: 118556

SEQ ID NO: 223999 - DNA, 1000 bp, Homo Sapiens
tgctgcccgctgtgagggaaaagctccagaaggtcctgagcctcggccacatcagcaccgactacccgctggccgaaaccatcctcctgctgggcttcttcatgaccgtcttcctggagcagctgatcctgaccttccgcaaggagaagccgtccttcatcgacctggagaccttcaacgccggatcggacgtgggcagcgactcggagtatgagagccccttcatggggggcgcgcggggccacgcgctgtacgtggagccccacggccacggccccagcctgagcgtgcagggcctctcgcgcgccagccccgtgcgcctgctcagcctggccttcgcgctgtcggcccactcggtctttgagggcctggccctgggcctgcaggaggagggggagaaagtggtgagcctgttcgtgggggtggccgtccacgagacactggtggccgtggccctgggcatcagcatggcccggagtgccatgcccctgcgggacgcggccaagctggcggtcaccgtaagcgccatgatccccctgggcatcggcctgggcctgggcattgagagcgcccagggcgtgccgggcagcgtggcgtccgtgctgctgcagggcctggcgggcggcaccttcctcttcatcaccttcctggagatcctggccaaggagctggaggagaagagtgaccgtctgctcaaggtcctcttcctggtgctgggctacaccgtcctggccgggatggtcttcctcaagtggtgagcggcctcgccattgtccctgccgccggagcccgccgggagccccgggccggacacaggccgcgtcccccggccgcgcgtcccccaagagcgagcactgtggccctgggccaccacctgtgcacaaggggcctcccgggaccaggctgtgcccccgatcctacaccctgagcctcagagcactgctactttttaaaatacttctttctcttaaaagtctttaccaaaaaaaaaaaaaaaaaa

SEQ ID NO: 224000 - DNA, 1000 bp, Homo Sapiens
gcctgctctactcatacctcaatgataggcagcgccacgggctggcctctgtggagcacatggggatggtcctgctgcccctgcctgccttccagcccctgcccaccaggctgcgccctttggggggcccaggcctttgggctcttcctgtctcccctctcctttccccaggtctggaggtcactcactcaagtctgttgctggctgtgctgctccccaaggaagggcttccagacacagcagggtccagcccctggttggggaaggttcaaaagatggtctccttcaacagtaaggtggagaagagatactatcagccagatgacaggaggccgaatgtgcccctgaagggcacccctcccccaggaggtgcctggcagcagagccagggcaggggcagtatagctccaaggggaatctctgcttggcagaggccccccagaggcagggggaggctctggccagagcctgaaaactggcagcatcctgggcgagggcagtggcccccagagccaggcttgcgccagtcccagcatccctattcagtagcaccagctggtcatggctttggccgtggccagcacttccacagggactcctgtccccaccaagccctgctccggcacctcgaatccctggcgaccatgagtcaccagctccaagccttactgtgcccccagaccaagagctccatcccccgccctctgcagcgtttgtctagcgcccttgcagctccagagccccctggcccagcccgtgactcctctttggggcctacagatgaagctggctctgagtgtcccttccctagaaaggcctgaccctccttacccaccagaacaggggttttgatgccctcactagtgttgaagcctgttccagagagaggtgggactgcaaggagaggatggtcagccctacccacctgccctgtttgagcttcctgtttgacaatgtttgctgttgattttttgttcaataaagaatttggtaaaattgg

SEQ ID NO: 224001 - DNA, 1000 bp, Homo Sapiens
tgcgcatgcaagccctgctgtgtggctgtcgtttacatttgggaggtgtcctgtatgtctgtacgttggggactgcctgtatttggaagatttaaaaacctagcatcctgttctcaccctctaagctgcattgagaaatgactcgtctctgtatttgtattaagccttaacacttttcttaagtgcattcggtgccaacattttttagagctgtaccaaaacaaaaagcctgtactcacatcacaatgtcattttgataggagcgttttgttatttttacaaggcagaatggggtgtaacagttgaattaaacttagcaatcacgtgctcagagcttttgcctgtcagttgtgtgtgtcccttatagtcccttcccccacagctcttgctgaaagagtttgccttgttttgttttgttgttttgtatttagccagaggatgccaaaattagtcttctcaaagctttgagtagagtaagtgtgggaataagccagtttttttttttctgtttctgtaacttaaatgaacgggtttttttcccttgtatgccacttgtcctaacatgtccttaaggtgtttaacctgcctctgacctggcttgcaatgcataggtgaggagaagcagagagcttgtcatatgcaagtcctgtcaagaaaacaggtgggcatggtggctcaggtctgtagtctttgggtctttgggaggccagggtgggaggatcacttgagctcaggagtttgagaccagcctagacaacatactacgaccctgtctatacaaaaaaaaacttctctaaattagccggatgtggtggtgcatgcctgtagtcccagctactcgggaggctgagtgaggcaggaggatcacttgagaccaggaggttgtggctgtagtgagtgatgatcatgccactgcacttcagcctggaccacagagcaagaccctgtgtaaaaaaataaaataaaaaacagattggaaaaaaaaaaaaaaaaaaaaaaa

SEQ ID NO: 224002 - DNA, 1000 bp, Homo Sapiens
agcaaatttgcaacactttcactacatgaccggaaggagaggcaccacgagaaagatcacaagcgaaatcatagcatgggacacatttctagcaagagcagtgacaaactgaatctagttaccaaaaccaaaacggaccctgctaaaactctgggaacgcccctgtgtcctcgaatggaagatgttcccttgttagagccgctgatatgtaaaaagatagcacatgagagactgactgtactaatatttcttgaagactgtatagtcactgcttgtcaggagggatttatttgcacatggggaaggcctggtaaagtggtaagttttaatccttaatgctgcaccagatctagaacttgaataggtagtgacttttttctttttcgtgggaggggtggggtgtacaatgaatgtgaatgacacttcttattcttaatgtaaatctcaatgcatcagagccataattttggatactgcatgccatgtaattctgaatcatttgataatttaccttagagcatttaaaaaaatataatcaaactaattgccagccaagtcagtcatcctcctgggagtatatagagtcccaaggttagcgctcctgtattagactatttcaattttaggaaaatcatgaccatgtggggaaacaatgactttaaaatgctgaaattaaaatttatgctttaactggaatattttttgcttaactactcaattagaatattgtacacctgatcaatgtgtgttcagcacagatggccatgaattgtcatttatagtccaattttttatcttaatcataaaatgtttaggaatctatgaaatttaactttaggaacaaaacgtttagcagggttgattgatattatttttacattgttctggcaatccacagaaagagaagagccttaatttttaaaacccattttagtcattttatgacaattaaagttgtttaataaacatcttttttcaaagaagcaaaaaaaaaaaaaaa

SEQ ID NO: 224003 - DNA, 1000 bp, Homo Sapiens
tttcaacagatatgctcagcagaggctggacattgatgccacccagcttcagggccttctcaaccaggagcttctaacaggacctccaggggacatgttctccttagatgagtgccgcagcttggtggctctgatggaactgaaagtgaatgggcggctagaccaagaggagtttgcgcgactgtggaagcgccttgttcactaccagcatgttttccagaaggttcagacaagccctggagtcctcctgagctcggacttgtggaaggccatagagaatacagacttcctcagagggatcttcatcagccgtgagctgctgcatctggtgaccctcaggtacagcgacagcgtcggcagggtcagcttccccagcctggtctgcttcctgatgcggcttgaagccatggcaaagaccttccgcaacctctctaaggatggaaaaggactctacctgacagaaatggagtggatgagcctggtcatgtacaactgaagcaaagaggaaagcagacccatggctcaggacaagctcccagtgatcactcaagaatctggctctcattctaagaggctgtgctgcccagtatggtggttgtgataaatctaaaccagccctgcatgaaacagagtccaagctgtctcccaacagcctgggttcggtccttggctggcccaggcccagttaagcctgtggccaccaagcagctcatctgagcactttgggatgtattcagcctacgttgccctggaaaaggaagcaggagatgtctccctgtgggaaaggagaagagaagttgtctctgagtcccctgtcaccagttggattcatttcttggaagagccagaatgagccactttgaccaccctcgggtgctatgggtgacacaagagctgtccactgggtgtttgcagaataattacactatcttatgtctggatcctgatgatttcacagctaaatggcaaaaataaaacatgtttcccataaaaaaaaaaa

SEQ ID NO: 224004 - DNA, 1000 bp, Homo Sapiens
aagcccagctggaggttggctttccacctgtcatggaacgttacacctctgcagtttccatggtcaaacctcacatggtcaaggctgtttgtactgatggcaagctcttcaaccacttagagactatttggcgattcagccctggtattcctgcctatcctcgaacctgcactgtggacttttcgatttcctttgaatttcgttctctgctgcgctcccagctggccaccatgttttttgatgaggctgtcaaacagaatgttgctgcctttgagcgtcgggcagccaccaagtttggtccagaaacagccatcccccgtgaactgatgttccatgaggtgcaccagacttgaggcaagggattgctccctgacctcccttctaccccacttccctacacaattctcttatttatttggtttggctcctgttccaatttgaaaggagtctgtgttcataatactgtttctcctctcaatttcccagaaattgggttctatgctggctggaaatgttgggggaaagagaaggcaaaggatgtggaaatgagatgtgcttaggaaagggtcaggcccatcgtaggagcaccatatgcctgcagccttttcactacgaattagaataaggactatgtggttgtctctggaccttatcaagacaccttagtgtctgaccaggggacgatagtaacttttctaaggattgaataaattgagcttttcttctggcacagaggtactgagtggtaagtaacttttaccctgcctgagattcctcaggagaaaaggcaacctgcctccagcctgaaatacataaagcctcattttaagactgtaagtccatgctgcctggctactagagagcaaggggctttcttaccaccagtgctgaggagaaaagtactgaacggaaacggagttgtctttgtactcttgagttgtaccttattcttccacttggcctgagtttttataaaatttcaataaattgtgacagtgtg

SEQ ID NO: 224005 - DNA, 1000 bp, Homo Sapiens
cgcgaagctggacggcaccctgagcgtggacctggccagcacccagagggccggctccagtaccgtcctggtgcccaccaggcacccccatgccatccccgggtccattttgagccacaagactagcagagaccgtggctctcttggccacgtcacttttggcggcctcagctccagcactgggcatttgcccagccacatcacgcacggtgaccccaacactggccacgtgaccttcggctccaccagtgcctcgagtgggggccacgtgaccttcagacccgtcagcgccagcagctacctgggctccactggatacgtggggtccagcaggggcggagaaaacacagagggtggtgtggagagcggaggcacagcgtctgattcgagcggaggcctcgggtccagcagagaccacgtctccagcaccggccctgcctccagcactggcccgggctcctccaccagcaaagactcccggggctaacacgaggggcacgcagcccccaccctgccctggctctctgtggggtctttttttgtgtctctacttcccctgtttgccttgtgggtctctgtctttttctcccagtggcaggcctctgtctttttgccccttcaactgttttcatctgcccttcatcaccgcctcacctgtgtctcccggttcctttctctctgctcctgacactgcttttccctctgactcctgatctcctgttctctgggcttcctggtcagtgtctgtccgtcttgtctccatatctgccccttccctgtctgctgagccctggccccctgtggatcccccacctcctgtttccggctctctctcctcatctccatctcccaggctctccacgcatcctgtgtccctgtctctgtagctccttactccccaagagccccccagtgctgacaggtgtgggaaaagtcagggcgaagacgccaggttcagcatgggaaaatgggactgtggaaataaagtatatgtgtggag

SEQ ID NO: 224006 - DNA, 1000 bp, Homo Sapiens
ttccaggtccagccgaccagcccaaccccctcgcctcctgcacacagcagacacctgtcagctagaggtggccctgattggagcctctccccggggaaaccgttccctgtttgggctggaggtagccacattgggccagggccctgactgcccctcaatgcaggagcagcactccatcgacgatgaatatgcaccggccgtcttccagttggaccagctactgtggggctccctcccatcaggctttgcacagtggcgaccagtggcttactcccagaagccggggggccgagaatcagccctgccctgccaagcttcccctcttcatcctgccttagcatactctcttccccagtcacccattgtccgagccttctttgggtcccagaataacttctgtgccttcaatctgacgttcggggcttccacaggccctggctattgggaccaacactacctcagctggtcgatgctcctgggtgtgggcttccctccagtggacggcttgtccccactagtcctgggcatcatggcagtggccctgggtgccccagggctcatgctgctagggggcggcttggttctgctgctgcaccacaagaagtactcagagtaccagtccataaattaaggcccgctctctggagggaaggacattactgaacctgtcttgctgtgcctcgaaactctggaggttggagcatcaagttccagccggccccttcactcccccatcttgcttttctgtggaacctcagaggccagcctcgacttcctggagacccccaggtggggcttccttcatactttgttgggggactttggaggcgggcaggggacagggctattgataaggtccccttggtgttgccttcttgcatctccacacatttcccttggatgggacttgcaggcctaaatgagaggcattctgactggttggctgccctggaaggcaagaaaatagatttattttttttcaaaaaaaaaaaaaaaaaaa

SEQ ID NO: 224007 - DNA, 1000 bp, Homo Sapiens
gctttggacttcgggcttgtgccggcgccccctgcgggcacccgcgaggcccgcgtcaatatccactgcccctgcgggctggtgaccgccttcgtggcatgcgaggacggccgcagccacggaccggtgcgcttccacagcgtcccggccttcgtgctggccacagatctcatggtggatgttcctggacatggaaaggtgatggtggacattgcatatggcggtgcattttatgcatttgttactgctgaaaagttaggactagacatttgttctgcaaagaccagggaccttgtggatgcagcgagtgcagtgacagaggcagtgaaagctcagtttaaaattaatcatcctgatagtgaagaccttgcctttttatatggaactatattaacagatggaaaagatgcttataccaaggaaccaaccaccaacatttgtgtttttgcagatgaacaggttgacagaagtcccactggctcaggagtgacagcccgaattgccttacagtatcacaaagggcttctggaactgaaccagatgagagccttcaaaagcagtgcaactggctcagtattcacagggaaagctgtgagggaagcgaaatgtggtgattttaaagctgttatagtggaagtatcaggacaagcccattacacgggtacagcaagctttataatagaagatgacgacccattgagggatggatttcttctcaagtgacttcttccatgattttaagggctttctttttaaagtaatcattatccttaaggactgttttctctaaattatatgaaaacaaataaattatacatataaactaactctcattctttgtaaaatactaccctgtggctaaatataaagtcattatacctcgtatttgcaactgtatttgtataaatatcacttatgtctagcatacaaaatgccagaaattcagagtctttttctagtgattaacgtatcaggtaaaattaaaacagtagttactttt

SEQ ID NO: 224008 - DNA, 1000 bp, Homo Sapiens; identical to SEQ ID NO: 118558

SEQ ID NO: 224009 - DNA, 1000 bp, Homo Sapiens
tcacgtgacctgtcactgcctcccgccgcctcctgcccgcgccatgacccagccggtgccccggctctccgtgcccgccgcgctggccctgggctcagccgcactgggcgccgccttcgccactggcctcttcctggggaggcggtgccccccatggcgaggccggcgagagcagtgcctgcttccccccgaggacagccgcctgtggcagtatcttctgagccgctccatgcgggagcacccggcgctgcgaagcctgaggctgctgaccctggagcagccgcagggggattctatgatgacctgcgagcaggcccagctcttggccaacctggcgcggctcatccaggccaagaaggcgctggacctgggcaccttcacgggctactccgccctggccctggccctggcgctgcccgcggacgggcgcgtggtgacctgcgaggtggacgcgcagcccccggagctgggacggcccctgtggaggcaggccgaggcggagcacaagatcgacctccggctgaagcccgccttggagaccctggacgagctgctggcggcgggcgaggccggcaccttcgacgtggccgtggtggatgcggacaaggagaactgctccgcctactacgagcgctgcctgcagctgctgcgacccggaggcatcctcgccgtcctcagagtcctgtggcgcgggaaggtgctgcaacctccgaaaggggacgtggcggccgagtgtgtgcgaaacctaaacgaacgcatccggcgggacgtcagggtctacatcagcctcctgcccctgggcgatggactcaccttggccttcaagatctagggctggcccctagtgagtgggctcgagggagggttgcctgggaaccccaggaattgaccctgagttttaaattcgaaaataaagtggggctgggacacacgaaaaaaaaaaaaaaaaaaaaaaaaaaaaaaaaaaaaaaaaaaaaaaaaaaaaaaaaaaaaaaaaaaa

SEQ ID NO: 224010 - DNA, 1000 bp, Homo Sapiens; identical to SEQ ID NO: 118560

SEQ ID NO: 224011 - DNA, 1000 bp, Homo Sapiens; identical to SEQ ID NO: 118563

SEQ ID NO: 224012 - DNA, 1000 bp, Homo Sapiens
gaagtgatgtcggctgctagcttccttcagatgactgatgtcataagtgtatgtaagacttttattaaatcttccttagacattagtgagaaagaaaaagatcgctatttcagtctctcagataaagatgccaattctaatggtgtagaacgttcctctttttatagtggtggctggcaagaaggaagcagttctccacgttctcacctaagcccagagcaaggaacaggtataataagtggaaaatcttggaataagtataattatcatccagcctcccagaagaatactcaacaacccttggccaagcatgaaccaaggaaagagtccattaaaaagaccaaacatttgagattgtcacagccttctgaagttactcattataagtcaagcaaacgagaagtacgaacatctgattcttccagccatgtttcccagtctgaagaacaagcacagattgatgctgaaatggactctactcctgttggctatcagtacggtcaaggatctgatgtcacatccaaaagctttccagatgatctgcctcggatgcgattcaagtgcccgtactgcacacatgtggtgaagcggaaggcagacctaaagcgccaccttcgttgtcatacaggagaaaggccctatccatgtcaagcttgtggaaaaagatttagcaggctagaccatctaagtagccattttcgaacaattcaccaggcatgtaaactcatctgcagaaaatgtaaacgtcatgtgacagatctaacagggcaagtggtacaggagggaaccaggcgctacagactgtgtaatgagtgtcttgcagaatttggcatagacagcctccccattgacttggaagctgaacaacatcttatgtccccatcagatggagataaggattccagatggcacttgagtgaagatgagaatagatcctatgtggagattgtagaagatgggtctgctgatctggtcatccaacaggttgatgatagtgaag

SEQ ID NO: 224013 - DNA, 1000 bp, Homo Sapiens; identical to SEQ ID NO: 118564

SEQ ID NO: 224014 - DNA, 1000 bp, Homo Sapiens
ctcgggaggccgctgcccaacagcaagctgagaggacggcagcctctactttcaaagactttgagctggcatcagcccagcagaggcctgatatggtgctgcggcagcggtttcggggacttctgcggcctgaagatcgaacaaaagatgtcctgaccaagccaaggaccaaccgctttgtgaaattggcagtgatggggctgacagtggcacttggagcggctgcactggctgtggtgaaaagtgccctggaatgggcccctaagtttcagctgcagctgtttccctgaaagccagagaagaccttcctcttacatcacattaaggcacccactcactaccttggcgtcgttttttgggtctgacttgactcgtcaactgctggtctctcccacctggttggaaatgtcgttggaaacttgcaaagactctccagaccttagggaacaagaggcatcactcagtccttctgggacagcttccctgcctcagaaaacggaatctctgtctgtgaccttctcctgccccatttcacttgctcaacaccagactttaatctgactgtagctcataagaccctcattccagagagggtgctgccccatacccggaaggaggaacgctgcacagagaggccaagaagcatctggacagacaggccttgctgggtttagaccttatgctttttgtccagtttcatctcaacacagctgccatgcttcagccatgcctatccaatgacgtctccataaaaggcccaggaacacgggagcttctgaagagctgaacatgtggagggaggggaacgagaacttgtccatgtgccaagagggtggcgcacccccactccatggggacagaagctccagcatttgcccaggacccgtccagacctcaccctgtgtgtatcttcatctggctgtttacttatttgtatccttttctaataatgtttgtaataaactggtaaacataaaaaaaaaaaaaaaaaaaaaaaaaa

SEQ ID NO: 224015 - DNA, 1000 bp, Homo Sapiens
cggggctgtggacaagagctggaggagggtgagggtagtcggctgggagctgccatgtgtgggcgctgcatgcgaggagaggctggagggggtgccagtggggggccccagggccccagtgacaaaggctttgcctgtagcctctgcccctttgccactcactatcccaaccacctggcccggcacatgaagacacacagtggtgagaagcccttccgctgcgcccgctgtccttatgcctctgctcatctggataacctgaaacggcaccagcgcgtccatacaggagagaagccctacaagtgccccctctgcccttatgcctgtggcaatctggccaacctcaagcgtcatggtcgcatccactctggtgacaaaccttttcggtgtagcctttgcaactacagctgcaaccagagcatgaacctcaaacgtcacatgctgcggcacacaggcgagaagcccttccgctgtgccacctgcgcctataccacgggccactgggacaactacaagcgccaccagaaggtgcatggccacggtggggcaggagggcctggtctctctgcctctgagggctgggccccacctcatagcccaccctctgttttgagctctcggggcccaccagccctggggactgctggcagccgggctgtccacacagactcatcctgaactaggtccttcttccccatgttttatacagacggaccagaagccacctttttctcccccgctggccaggggctccacacagactaacgtaggcactataaggaccagcccaaccccatgggcgggggggcccatatggaccaggggaccttgccttgactgaggcacttcacgagctcagtgagaagggccctgtattcacctccactgcccccaggggctgtggacaaaccggctgggggactgcccagcctcccacctgtttatttaacttatttcagtgctttataataaaggaaacactaacaaaaaaaaaaaaaaa

SEQ ID NO: 224016 - DNA, 1000 bp, Homo Sapiens
ttttatatccttggtatgaaatatgtatttaaactatttaaatatttataaagaaatgaatgttttcttttcattttggtaaaaaaaaagcttgctgttttaacaagaaatgcactactgttgtgtatagtagatcaaaaattatttattactaagaggatgtagtttccaaaggaatcccccattttttctgcatgcagtttgcaacaaatgtattctcatgcttctggattataaaagaaaagtgaagtcatattttgttaatgaaataaaaacatggactgagtgtcaactacatgagctttggcatggggatagagaggctccatctaggctctgccaactcatgtcaatgacatgatttaaggtcgttgtgccagcagaaatgtctctcctctaggtatcgtattttgttgctcaagaatccaaaatgggtctgtggacatagggcaatttggggctcaaagtgagggagaaaacctgggtgtgtcctttcccagtgcttttcttttacaagaggtagtagactagtggaaatccccaaatggagccaagacttctgagctataacttgtgggagtaataccagcttgcaatgggtcagcactttaccttttttctttaaggctcccaacaatgctatacagcgcagttgtttccattcctatttttaataaatctcaggggaagcctcagagattacacagttaggatgctgacacagtctagaatccataatgctccctacatctcacactaacaggcaaattcagatgctgggattggcaatgatttaagcaccttcactaaagtcttattttatgttttagaacagttacagtctaattgtcttggacattttgggaagatatattgggttcacattctggagttctctttattttccaccacaaaaaataatctgagaattgtatcattaaaagtatctaaacacacaaaaaaaaaaaaaaaaaaaaaaaaaaaaaaaaaaaaaaaaaaa

SEQ ID NO: 224017 - DNA, 981 bp, Homo Sapiens
gcaggcaacatggccgagaggccggggcctccgggcggcgccgtgtccgcgaccgcgtaccctgacacccccgcggaattccctccgcacctccaggcgggtgcgatgcggcgccgcttttggggcgtattcaactgtctgtgcgccggcgcgttcggggccctggccgccgcctccgccaagctggccttcggcagcgaggtgagcatgggtttatgcgtcttaggcattattgtgatggcgagcaccaattctctgatgtggaccttctttagccggggcctcagtttctccatgtcttcagccattgcatctgtcacagtgactttttcaaatatcctcagctcggccttcctgggctatgtgctgtatggagagtgccaggaggtcttgtggtggggaggagtgttccttattctctgcggactcaccctaatccacaggaagctcccacccacctggaagccccttccacacaagcagcagtagcaccacttggctagacggaccagctggaaagatcatgatggtggcccagccttgggatgtcatgtgggactgtgtcctagggcgatccagttgtgcagccttctgaccatcagccaagggaagcaggcctctgatggagcaggctctggctctgtaaggagaggtgcagctgcagcagtgttctaccggaagtgttttgatcatctgtacagtgctttggattcttcctcccaggcctaccccagtgagccttcgcagatgctggagatcctggggttggtctgctttgtgtatggtacttgaaaccacgctgtaattattgtcctgttgccaaacaaaagccagtcatgtaactctagaagcagtgactggtggggctttctgacagttccatgctgatgtatcaggccatctgtgtcatgcttatgtattatggcaagaagaggaaaactggattaataaatacgttttttgtaagttaaaaaaaaaaaa

SEQ ID NO: 224018 - DNA, 1000 bp, Homo Sapiens
agtgagttctcctaaggtctggccttgcccctttgctctgcccctgaagtctatctgcaggatggtcttcacaggttcccaaagctggcccagatgctgatacacagcacacagggaaaggaagacagtctcacagaggaagggcaggtgtcctacgatgacgtctctgtgttcgtgattcccttgcacagtcagggccaagagagcagtgaccactgaggattcagacactgtatcccagaactgctctagtgcccgggtgtggtctgggcatccctccagtgtgaccaagagcaaatcctgcctgccctatccctagccaccgcccagtgctctcactatccacctcaacacacatccatctcaagaggaacatttataccaggcagtcagagctggaagtgtatggagagcccagcccaccaggtcctgccttttgcggtgataaccttctctggcagagtgactttacaacttaactaggaaacccatgtgaggctcctcagacaggatcttgaacagcccaaagtatcattctcagataggggcacccaagctaagggtattagccaaagatgccaggatgggtagctagcccatgtttagatccaggtctccaattcatggttatcagggcatgtgttcaacaacccccaaagtccacgcaggtggcttgtagaaacctttgggcagcctcatgtctgctaaaacagccatcttcaagacagcccctgaaaagagaccagttcaggtcctgccctgctgttctttgctggagatgaggaacaggtgctggggctaaagtttggggtagagcacaagggacaagaggaactcttggagttggctgggtgagagggctctccatttgctacctgtagtagcctgcctcttaactggttgcttctccctagttccagccctgccctggtctgatgccccaacactgcccttgctttgttttccctgtcacctccctattattaaatgttttctacag

SEQ ID NO: 224019 - DNA, 1000 bp, Homo Sapiens
gaaatgagtgtgattacagaaaactggaagaaatgcaccaaagattcctggtttcagagcgttcaaaagatgatcttcagctaagacttacgagagcagaaaatagaataaaacaacttgaaactgactcctcagaagaaatatcacgttaccaagaaatgattcagaaacttcaaaatgtattggagtctgagagagagaactgtgggcttgtcagtgaacaaaggctaaaacttcagcaagaaaataaacagttacggaaagagactgagagtttaaggaagattgccctggaggctcaaaaaaaagccaaagtaaagatcagtacaatggaacatgaattttcaataaaggaacgtggatttgaagttcaattgagagagatggaagacagtaatagaaattccattgttgaactgaggcatctcctagcgactcaacagaaggcagccaataggtggaaagaagaaacgaagaaacttactgaaagtgcagaaattagaatcaataatctaaagagtgagctgagtcgacagaaacttcatacccaagagctgctttctcagctggaaatggcaaatgaaaaggtagctgagaatgaaaagctaattctagagcatcaagaaaaagccaacagacttcaaaggcgtctaagtcaggcagaagagagagctgcttcagcttcccagcagctcagtgtgattacagtgcagagaagaaaagcagcctccctgatgaatctggaaaatatttaaaaatattcatagttcactcacagaactttagagttgggaaagcagttggactagaagtgtattgaaatggtaaagcctgcaaagtataatagttaaggcttgtgttatttcgcgtaagcattgttgttctgttttgagggttattggaaaacagagcagtgaccacttcctgtaagtaaagaaaatataatcctatattgagcttcagtggagaataaaccagctgagaagaactcattgccttc

SEQ ID NO: 224020 - DNA, 1000 bp, Homo Sapiens
tggacctttatattaaaattaatcagaattttccgggatattttgatgaggtaatcaatgcagatgatctggatgttgcctaccaaaaactgagtcagctcattagagaataccttggattgactgaggaacctgccaagagtttggctacaactgcagatgttaagacatcccacctgaaacctgaagcgcatcctacaaagtatatttcttcgaatatgggtgatttcctgcattctacagacagaaactacctcattaaattttgggccaaactttcagccaaaaaaacaccagcggaaagagattctatacacagacagcacgaggcagcccggcaagctctaatgggaaggatacgccctgatcacacactcctatttcaaaggggtccagtaccagcacctctcaccagtggtctacactattatacaactttagaagaactctggaaaagttttgatctttgtgaagactattttaaacctccatttggaccatatcctgaaaagagtgggaaggattccttggtttccatgaaatgttcattgtttcggttctgtccgtggtcaaaagaattgcctttccagcctccggaggggagcatttcttcacacctaggatcaggagccagtgacagtgagaccgaagagacccggaaagcactacctatacaatcattttcacatgaaaaagagtctcaccaacacagacaacactcggtcccagtcatcagtcgcccaggttccaacgtcaaacccaccctccctccaatccctcagggccgcaggtagactagcacttgatgtctgatcctaacatggaaaacctgctctgctgatgtcgaattccttgccttacctggccatgggtccagctgtttctcactcaacccattacccacggaagaatgttctacctgccttaattctatcagccagtttctcttgtgattctttggctggtgtcttttagttttttaattaaaaaattgtttctt

SEQ ID NO: 224021 - DNA, 1000 bp, Homo Sapiens
tcgatgaatgtcctccatctgaatatctggaaattgtccaacttgcagtctacttggaatcaagtgttttattggaagggagtaagcgagtaatggagaaaaagccattttagtttgactatgtgattttaaaatgatctcagtttttccatcaaaattataatatgctcatgaaaataatattaatttgccttccctttgcaaacaccggcagttgaaaggaaaaggacggggaatgtgatggaaaagagaccgcctggaataaatgtccccctatgattctttaaggcagtggttctcgagcttgaattttcattaggaaattctgtgaggagcttgtaaccagatttctgggtctgccacatgcacctatctcttgctgaattgctttaatagaataatgagagcaagtttgtctaactaataccaacctgacaacttgaataacaataaatgcaatttgtacataaaatataatgctgcaaaagtttgtcattcacctcagtggagtgacttgatattaggtggtaaccgtagatgatggttaatatgaaaatggacaggaaagaagcattttctgaaagttatattcttttgaaccacgttctaaaccaagtttttaatcttcttggggctcgtaattacctttcactttaatgtcacttaaagatataacacagaaaaatgccttgagggcaaaatataggcaaaacaccaatgcgctttcaaatgcatgaaaatggtgcagttgtacccttgagccttgactcaagggctgtagatgttccctttccaccccccacacttggtgcgtgttcacaaagcaaatatggcctgtaattcaaatttgttctatgtgatactctctgagtaaaaactcatacatgcagaaaattgtctttgctcgaaatgataatgccaaaatataactttatatataatttgcatttagtacatttttggttaaaaaataaactaataaataagtgaagtcatcagc

SEQ ID NO: 224022 - DNA, 1000 bp, Homo Sapiens; identical to SEQ ID NO: 118567

SEQ ID NO: 224023 - DNA, 1000 bp, Homo Sapiens
attctgaagtagaacaagtaaactctttcttggattataagaatgaagaagtcaaattcattgaaaatgagctcgagattcaaaagcaaaaatactttaaacttcagacttttgttagaagcttgatattagcaatgaaagctgatgataaggaacaacagcaggcactgctgtcagatttacctcctgaattagaggaaatggatttcaatcatgcctcactggagcctgatgatacctcattcagtgtatcttctttgtcagagaaaaatgtctcagaaagtttgtgatttcagttggagggaatatatgatacagtcttttggcttcgtaacaggtgtgcatttcaagataactgcattctgttgccctggtattctttagttgggaaaacacattgttgaaacggacgtattctgtgaagaatgtacaagatataatggctacagtgcaacaaaaatgtaggtgaaatttaaaagcattgtttgagagagtatttttttaactgatggaactctggaaaaaaattatatttaagtttcagcagtttaaccctgaaattcattatgtctaatttctaaccagagacaaaataactaaagacatttcagcattgcttatcaagttgctacagcttgattagtcttgtttttgtagccattacatcttctttcttcttctctccttttcctatcatccacttacactttttctcaggaaagtggactgaacatttaaaacaaaactttaaaaaattatttaactcattatttaatgagttctctgatttagtttttaacccctatgaaaatttgacttaaactaatgactgaaaattaaatgattacaggtatgtaattgtaaattgctggtgttcttctattatctaacccaaatatttgtgtgggggtggggaagcacaatggaaaggtaatttaaccaacataacgtcaaataaattacgaagtgtacagaaacgaaaaaaaaaaaaaaaaaaaca

SEQ ID NO: 224024 - DNA, 1000 bp, Homo Sapiens
gctattgtggaagtgaagatgctatctgggttcagtcccatggagggcaccaatcagttacttctccagcaacccctggtgaagaaggttgaatttggaactgacacacttaacatttacttggatgagctcattaagaacactcagacttacaccttcaccatcagccaaagtgtgctggtcaccaacttgaaaccagcaaccatcaaggtctatgactactacctaccagatgaacaggcaacaattcagtattctgatccctgtgaatgaggataggagctggaaactcaattagtcctctgtgacatttactggagggtggaacattcttctgtcgcttgaagcagaactcattcaatcaaataatttaatttctctgactagtatatgggtaacaaatgaatatgtctgaacctcagctataatactttctactacctttgcaaggagatgggataggaacaatcactcagaggaggcgttgcatgggcagggtcatagggggaagaaaggtggtttagctgttttatttagccattcagggggctctccagagaggagacggtggtagagggtgaactagagaagataagaatgtcttcctaggccggatgcggtggctcacgcctgtaatcccagcactttgggattgcgaggtgggcggatcacttgaggtcaggagttcaagaccagcctggccaacatggtaaaacccgtctctactaacaatacaaagattagcctggtgtggtggcacgggcctgtaatcgcagccccttggaaggccaaggcaggagaatcgcctcaacactggaggtggaggttgcagtgagctgagattgtgccactgcactccagcctgggcaatgaggcaagaccctgtctcaaaaaataataaataataataataataatgtttttctagagtttcagtctaagggaaaatgtgatttagggctttggaaattggctaaaaaaataaaaatggaaaagaaaa

SEQ ID NO: 224025 - DNA, 1000 bp, Homo Sapiens; identical to SEQ ID NO: 118569

SEQ ID NO: 224026 - DNA, 1000 bp, Homo Sapiens
aggagaagagagagacctcccagaaggggcagccaagagcccccatggcccagaagctccccacctgcagggagtgtgggaagaccttttataggaattctcagcttatttttcaccaaagaactcacaccggagagacatactttcagtgcaccatctgcaaaaaagcctttctgcggagttcagactttgtgaagcatcagagaactcacacgggagagaagccctgtaaatgtgattactgtgggaaaggctttagtgacttctcaggattgcgccaccacgagaaaatccacacaggagagaaaccctataaatgtcctatctgtgagaaaagtttcattcagagatcaaactttaatagacatcagagggttcacactggagagaaaccttataaatgttcgcactgtgggaaaagtttcagctggagctcgagccttgacaaacatcaaagatcccacttaggaaagaagccctttcaatagccagtaaccaaactctctttccccatttctatctcccagcccagtcacaaaaatactcagctccatcaagaggaattgtgtctaagaggatacccctgttaatctccttttttcttggattggagaggagagaatctggacatggctttggacttggaggatatcttggattggattgcacaatggcttaaattcttgattctgcctcaggagaaagaatagtcttcatgtttccactcatccttcctttggacccatcggggaaaaagtctaaattggagatccagttttagaagtgctttctgggaagcatttaatgggattagctgtagtcactgcttatgggaagaacctcagatcagccccttaaaatgagttctagagcaggtcttctgttcctgaaggggagaagcatagagggcctgtgagctcacgtgtgttctttgtcataggggtgaaaaaccaacttcaagtgtcccttgtttgaaataaacttagcagagtcactttct

SEQ ID NO: 224027 - DNA, 1000 bp, Homo Sapiens
gaaaaattctaaacaaaattttagcaaacaaaatccaacaatttgtaaaagtgataatacaccacgaccaaggtggttcaagtcaggaattcaacgttgattttggcgttaaaaaatcaatcatcaggcccagtgaggtggctcactcctgtaatcccagactttctggaggctgaaggaggaaagatccttcaggccagaagtttgagtctgcactgagctgtgactgcatcaccgcactctagcctgggtgccagtttgagaccctgtctccaagaaaaaaaaattaatcagtgtaattcaccacagattaagagttcaaaagagaaaaatcacatgatcatctgaatagaggaaaaagcttttgataaagttcaacatccattcataataaggactctcagcaacttagaagtataaaaacacttttggaaatcaacaaagggaatttacagcatgaacaaacagcaagccagcatggtggctcacacccgtaatctcagcacttccagaggccaaggcaggagaatcacttgagcccaggggttagagacaagccttggcaacatagcaagatcctggctctacaaaaaataaaataaaatgaaataaaatttaaaaattagctgggtttggtggtgtgtgcctgtagtcccagctactgggaggctgaggtgagaggatcactggagcccaggaggtgaaggctgcagtgggctaaaaacaaccagaacaaccccccaaccccctccccgcaaaacactataaagaatagcaacacaaggttcaatgtaaaccttgatatggtgttttacctctgaggagaggcttattgttaatattctttagccgtgtaaggggttcacagatgttcatacttttgttctttataccttatatgtattctataaatattgtttctactcaatagttaataaaaacataatttaaaagttcaaaaaaaaaaaaaaaaaaaaaaaaaaaaaaaaaaaaaaaaaaa

SEQ ID NO: 224028 - DNA, 1000 bp, Homo Sapiens
ttaaactaaataacttctgcacagcaaaagaagctatttgcagactacagaatgggagaaaatgtttacaaactgcatctgacaaagatctaatccagaatctataaagaactcaaacaaatcaacaatgagaaaaacaaccccattaaaaactgggcaaaggccatgaatagacctttctcaaaagaatacatacatgtggcaataagcatatgaaaaaaatggttaatatcgctaatcattaaggaaatgcaatcaaagccacaatgagataccatctcagacctgtctgaatgggtattatcagaatgggtattattaaaaaatcaaaacatagatgctagtgaggctgcagagaaaagcaaatacttatacactgctggtgggaatgtaaattaattcagccattgtggaaagcactgcagcgatttctcaaagacataaaagcacatagcattcaacccagcatcccattactgggtgtatacctaaaggaatataatcattccaccataaagacaaacacttgtatgttcattgcagcactattctcaatagcaaagatgtggaatcaacgtaaatgcccatcagcagtagaccagataaagaaaatttggtacatatacaccatggaatactatgcagccataaaaaagaacaagactgtgtcctttacagcaacatagatggagctgaggctcttatcctaagtgaattaatgcaggaacagaaaatgaaatatcccatgttctcacttataagtgggagctaaacattgattacacatggactcaaagaagggaacagtagacacgggcttatgggtggaggttgggaagaggatgaagattgaataactgcctgttgggtactatgctgattacctggggacaaaattaactgtacaccaaactcctgcaacatgcagttgacccatgtacacatactccttgaacctaaaataaaacatgaaaaaaagcaaaaaaaaaaaaaaaaaaaa

SEQ ID NO: 224029 - DNA, 1000 bp, Homo Sapiens
tggcaaggcctttagtcatggctctcagcttactctacatcagagaatccatactggtgagaagccctatgaatgcagagaatgtagaaaggcctttactcagagttcacatctttctcggcatcagagaattcatactggtgagaaaccatatcaatgtaaggaatgtgggaaggcctttactcgtggttcacagctaactcaacatcagagaattcatatcagtgagaaatcttttgaatataaggaatgtgggattgactttagtcatggctcacaagtttacatgtgaattgtctgattatttgagatcactatgaagaggttctctggttgttagcagcaaagaattctcacaaatgtgaatatgggcgcacatttgcctcataaagcacagcatcagataatttatgtgagagaaaatggtagtgtcattcatatagaaaaacatcattactggaaacctattaaacattagcaaattggagaatagttttaatatagtaaatgtaggaagccctttagccatattgaaaacaaatatctttttcaacgttatcttagctctactagttgatctttttgttatatgtatcatgatacttaacctctaccttggtttaatcattttaagatagacctaagtatattacctttattgtaagattcttggaagtattatgtaagttattacatgtaaaagctcttagaatggtgccttgaacgtagcataccacaaatattagctaccattttcactagtgttattttagagaatttgcatgagaggagagtacttatgagtataatgaatattgagaaatcttttatcaacacatccaagatgacttggttggggggcactgtatgccataatgaatgtgagaaagctgtcatttaaatctcatccattattgctataagaggaaattcatactgttaaaaaaaaaaaaacccagtggatataatcagtgtattattaaaaaaaaaaaaaaaaaaa

SEQ ID NO: 224030 - DNA, 1000 bp, Homo Sapiens; identical to SEQ ID NO: 118570

SEQ ID NO: 224031 - DNA, 1000 bp, Homo Sapiens
aagttgaagaaacacttccactacttaaaaaggtacctgcaaattactttcacatttgttcagctatcctaatgggattttcacttagtaaatctgctactcaggtatctgctatacatatggattcaaaagtggatgatcacttaatacgagggactgaaaaaagcaggttggaaccagcgactcagttatttcaaaacaccaagaaaataagattagaagacacaaatcaagaaaactttacaaggattgaagggactggcacaggatctctttctgggaaagccttgggttcagtggtatatgtcaaagaaagtgatggactagaaatgacagatgtggaatgaagcaatttgtacgtattaccaaagaaaccaaaaactgcctttgactaaggggggtgttgaaagagaacttaaccttattaggaaaccctgacaaaatgatggaagactattgccttattttgcactatttgtgaatcatcttacactgcatttttttatgatgcttattcaaaaggcagttgctttagggtgaaaaagccttccaagattcaaagcagatttctctggtattatattatatccttcttaaaaaccagagtttttaagtaacagtatttgaatggcatcaaaacattttcattttaatgtatttctttaacaagtggttaaaaaaagtgtccaagcagccgggcgcagtggctcacacctgtaatcccagcactttgggaggccaaggcgggtcaatcacctgaggtcaggagttcgcaaccagcctggccaatatggtgagaccccatctctactaaaaatgcaaaaagttagccaggcatggtggtgggcacctgtgatcccagctacctgggaggctgaggaaggagaatcgcttgaagcctggaggcggaggctgcactgagctgaggtcatgccattgtactccagcctgggcaacaagagcaaaactccgtctcaaaaaaaaaaaaaaaaaaaaaaaa

SEQ ID NO: 224032 - DNA, 1000 bp, Homo Sapiens
tcacttccctgagacttggttctgggtccttaaaaccaggtttcctaggctgggaccctgtacatagttggtgtttaatgagtgtttatggagaggagagttctaaggtcacctctggctgcaggcatccagggattattccagcaatctgcaggtagggagtgggtcccagcctgggagcctgctgtcaggagcaggcagacctggactcacagcctggctgtgatgcttgttcgctcagcttctccatttatgagatggggagaatagtcacagcctcctcaaagggttgtgaaaatcaaatgtgataatttgtggaaagcccttagcagtggcctggcacaaaacaaatgctcagtggatggaagctgcctattattattgtcgttgttgttgtttgccatgactgctctgggccgggggtagagctagcatccgggcatgtacgagggaagagggaggcaggcctctattcaaaggcagaaattcctttaagattgtggtctgctgggtttcagggagtgtctgtgttgtttgtttttgtttgtttgtttgttttgagacggggtctcgctctgtcacccaggctggagtgtagtggtgcagtcttggctcactgcagcctccacctcctgggctcaagcgattctcatgcctcagcctcccgagtagctgggactgcaggtgtgtgccactatgcctggctaatttttgtgttttttgtagagacggggttttgccatgttgcccaggctggaagtgtctatgtttaactgcatcttataaaccagcaacaagttttctactgggaattagaatggtgcatacacaatgtattattatcactgtcagatgagcatgcttgaatgtagcatgactgcctctttttgcttttcctagaggttttttttttgcttgttactcatctgttgacctacctgggggaagtagcacccttgcatttcaaaaataaaattgatggcattacaaatggaataga

SEQ ID NO: 224033 - DNA, 1000 bp, Homo Sapiens
agttttataaaaaaagaatgcagggtttgaagttccttacctgataattgtgtctggcacatgataggggatcagtaaattgtaattcctaaccctactgtactcccaaacatggtgattcatggtcaagaaaaatcttatatatatatatacacacacatatatatgtgttcatatatatgtatacatatatgtgtatatatacgcatgtatgtatacatatatgtgtatatatacgcatgtatgtatgcatatgtgtgtatatatacgtatgtatgtatacatatgtgtatatatacgtatgtatgtatacatatatgtgtatatatgcgtatgtatgtatacatatatgtgtatatatacgtatgtatgtatacatatatgtgtatatatacgtatgtatgtatacatatatgtgtatatatacgtatgtatgtatacatatatgtgtgtatatacgtgtgtatgtatacatatatgtgtatatatacgtgtgtatgtatacatatatgtgtatatatgcgtgtgtatgtatacatatatgtgtatatatacgtgtgtatgtatacatatatgtgtatatatacgtgtgtatgtatacatatatgtgtatatatgcgtgtgtatatatatacacatatatacgtatatatgtatatatatatacacagttgaatcagtgggattaatacctataatctctggttttcaaaggtaatatggaatatttgacacttggtaaaaggtgaactacctttgtagtgaatcttttcctcttggtagcatcaacactggggataaatcagaaccattctgtggaatgaaatgtttctcaagagcctataatatagtagatagtgcatattaagatgtctggctgggcatggtggctcatgcctgtaatcccagcactttgggaggctgaggcgggaggatcacttgagcctagaagttggagactaacctggcgagaccctgtctcaaaaaaaaaaaaaaaaaa

SEQ ID NO: 224034 - DNA, 1000 bp, Homo Sapiens
atgatagataaagacgagctgcaggaagcttgtgaccaggccaacttgagtttagatgacaagctcctggaccagctatttgactactgtgatgtggataatgatggcttcattaactatctggaattcgcaaattttcttaactggaaagacaaaatgcttcttaaagagtatgaagagagggtcattattaaaggtagaaaaccagattgtgtaaaccctactgaggctaatgttgaagaacctgaacaaactctcctcataaagccagaagatattgtcttaaaagaagcaggaagcacagaaaagactctccggacacttctgagaccaagtgataaagtttccaactactataagacaacttcttctgagatcaatgcaattgtaggagccattccttctacttgttaccccatttgtggtgttccaaccattcgatctgacattcctgctccccgaattcgtcgcatcagtgacagaactaattatggtgaagaaggtagtgcatattcactactatatcctaccatttttgcccggaaaggagtgtttgaaagagacttcttcaagaccagatcaaaagaagagattgcagagatattgtgtaacattggtgtcaaactgtctgatgaagaatttgaaaatgtatggaatcttgcatcaaaaaagcatcacagaggagaagtttgtgttgagaacatcagaaatgttctagatgagctacggcatgcagaccggatcaagtgtaaaacactcatgtgatatttttggacttcattcattcaagcaaaagaattattaactctgtgtttatctaaaatgttgaatccattctggttttagatattatgttagagttcacagtggtaagactcatatgcctgtatgtgttgctaataaattagattttggattttaaaaaaaaaaaaaaaaaaaaaaaaaaaaaaaaaaaaaaaaaaaaaaaaaaaaaaaaaaaaaaaaaaaaaaaaaaaaaaaa

SEQ ID NO: 224035 - DNA, 1000 bp, Homo Sapiens; identical to SEQ ID NO: 118578

SEQ ID NO: 224036 - DNA, 1000 bp, Homo Sapiens
tagttacttaattttgagttcataaatggccaccctaatggaaagtttgggtatgatcttaggttttatggagatgttttcaatagagattatttttccctcaccctatttgtgaatatataaattaaagtaagacaatggagtaagtaagagggtagatccaaacacagtatgtctaaattctagcactctactggctgcttagaatacaccaaacctggaagacctttccaagagtaaaatcccagtctgccactatcaaaattgccacagtcacttttactacttgtgttcatagtagactcagcacttctttttcactggacctagtataactgagaaataaataactgtgtgcaaaatattggtatcattaaggacccagagctgcccattttctctttgttctaatagggaagcaattactgatagaaatgtgagattaaaaatagggtcctccctgctgctccaaacaaatgcctaaacacagtatgtatctcagtcctctgttcccagagattccaccctagcccaggaaagaactggcctgtgtaaagcaaaacccaagtcatccccctccagaaatttctctggcagccaagcctgaccctaagggttccactttgctttaaaagctaggagtggcctctagagccaggaacacattaatacaacagttcaacctcagcaccaagtcaggtacgaagcgcttgatacgtggaatttttctctatatcaagtttaaatttctggaaatagactttggttgctaatgacaattacagttataccatagtctgtaatttgagaaaaggtgaaatgtatttaatatatatttagttttaataaaaagataaaattattacagaaataattgagagagagaaaatctattataatttatttgaaaaataaaacattttatccagtaaaaaaaaaaaaaaaaaaaaaaaaaaaaaaaaaaaaaaaaaaaaaaaaaagaaaaaaaaaaaaaaaaaaa

SEQ ID NO: 224037 - DNA, 1000 bp, Homo Sapiens
aatctaaataatagactttttttacaggcaaaatgaaagaggaggaagtctgggttttatgaatagcatagattcaaacaatcttttattcaaagattgaaataaaaagtatcgggtgccaactgtgatttttagaagaactgttgtaaagcctttgagattagacagactagagctacattactgaaattgccaactactaactgtgtgaccttaggtgaccagttcattaagggctaatagatttccatttttcaattaatggaaagggaatgctactatacctacttcatttaaaataacatgagttaaacacttagctgagtgcacttcatgttggatgcatataatacatatccatttctttcctcaccatcctactctccccatcccactccatctcacccttagaagtaaaggtgtaacaatcatagcttttggatagaaattttgagtggatcaacagcaatggaatgaggagtgaggctttttattagaaaaattacaaaatgagtcccggaaggtcagtaagtgcaacatgaaaaaaatctatgaaaagattatttgacctaattattcactgatagtacatactcaacaaaggtttgtgggacaaagggtgaataaaatgaatgaattacaatgaacaaagaaaagtgcaaaataacactaacaagtaaatattacaagaagataaccttgtggttaaaagataaggaaaaatatgagattatgagaaattaaatgtatactatattttaattaaatgaatctgtatttgtagcactaagagaattattattaaggattgactagaaccttaaaagatatatgtggatgtttgttttgtacggttgtaaaatatactagacctattacatccacctaaagtataatgccatgtaagaaaatgctttgacagtatcaacctgtgttaaggtatttctttccattgtaaattaaaagtcattttatttgacagaaaaaaaaaaaaaaaaaa

SEQ ID NO: 224038 - DNA, 1000 bp, Homo Sapiens; identical to SEQ ID NO: 222007

SEQ ID NO: 224039 - DNA, 1000 bp, Homo Sapiens; identical to SEQ ID NO: 222005

SEQ ID NO: 224040 - DNA, 1000 bp, Homo Sapiens
ccatcaaataaacaatgtcatggctatcttgtcttttgaaatatgtagtaataagacttatctctggtttgctgttcaatttttgccttgaacgacaaaagctttctaaaaatagtataatgtaccactttttgtatttgtcatgatatttttgacccattggcaacaaatagactattgtcattttattagtaccaatgatgaaatttcaccaaactattaatcaaaagtcacttattgaacacattgataaagcatcatgttccctttgattatcccctataaccaacactcaactacaaataggctgggattcaatgtggagtggtggatttcctgaaagaaagtagtgcagatatttaaggattgcatattgttcctaatgaggatgtaataaacaggcattagtacccctttcttttagtacctaaatatgttgtttctgagccatattcttcttcaggtttattttataaagtgaggacatatgataatgataccaaaggaaagataattatcatgaaaccaacttttggatcattccctttttatacaattgtgtatttatagggataccttcctcttctcacatattaattgtatgtcattaaaatcagttggctatgtcagtgtgtattattcacctcttttgctagcaaggtttgagatgctatattaacatttaaatcatgaaaatgagcaagtaaatagaataatattttattaatgtatgatatgtaatacttattgtctaaatcaagtttcctatttttggtttatttattttagaagaaaaataaaattatttgggcatttttgtttatagctcattacaaactagagtgatgaatatatatatttactaaagctaattgaaagagtcatgcaactcagttgggaattaaccactcaattcaatagtaaaagccatgcttggatgtttcttttgcatgttgcctagcattttatagatatttattatttaaaaaaataaagatat

SEQ ID NO: 224041 - DNA, 1000 bp, Homo Sapiens
tgcaagcctcactcccagccctggcaggcagccctgttcgagaagacgcggctactctgtggggcgacgctcatcgcccccagatggctcctgacagcagcccactgcctcaagccccgctacatagttcacctggggcagcacaacctccagaaggaggagggctgtgagcagacccggacagccactgagtccttcccccaccccggcttcaacaacagcctccccaacaaagaccaccgcaatgacatcatgctggtgaagatggcatcgccagtctccatcacctgggctgtgcgacccctcaccctctcctcacgctgtgtcactgctggcaccagctgcctcatttccggctggggcagcacgtccagcccccagttacgcctgcctcacaccttgcgatgcgccaacatcaccatcattgagcaccagaagtgtgagaacgcctaccccggcaacatcacagacaccatggtgtgtgccagcgtgcaggaagggggcaaggactcctgccagggtgactccgggggccctctggtctgtaaccagtctcttcaaggcattatctcctggggccaggatccgtgtgcgatcacccgaaagcctggtgtctacacgaaagtctgcaaatatgtggactggatccaggagacgatgaagaacaattagactggacccacccaccacagcccatcaccctccatttccacttggtgtttggttcctgttcactctgttaataagaaaccctaagccaagaccctctacgaacattctttgggcctcctggactacaggagatgctgtcacttaataatcaacctggggttcgaaatcagtgagacctggattcaaattctgccttgaaatattgtgactctgggaatgacaacacctggtttgttctctgttgtatccccagccccaaagacagctcctggccatatatcaaggtttcaataaatatttgctaaatgagtgaaaaaaaaaaaaaaaa

SEQ ID NO: 224042 - DNA, 1000 bp, Homo Sapiens
cataattatatatactgtggaacagtatctgtagttactgcaaattactgtacagtttaggttataacagaaaactgacagagaagtaataaacctattgatttctctgcttataaatgaaagattgaaactatccaatgacatattatagtaaatgagtatctgtaacctcccactgcatcagaagcaggttaaatgaagtcttgtgaatttgtaatagatcagtaccatttattggtttggggaccatcttaattaaaaataaatgcccaaaatgtagaactttaaccaaagacttgtcccttttaaagcaaaatggggattgaagggacttataatttctgttgtttctaattaaagtccctgaagatcatataccaaagtgtttgagaacttcatccaaacctactttaaagcattatgtgcaattaagttgttatgacataattatattgcctaattgttgggtcttttttcttgagcttataatgtacctggaaaataaacctcttgagaaaaagaaaagttcatactgattattggaaaaggactatatatgtgagcaagattgtgttttagagaggaaacttgaaactccaagaaagcacttgatgtttttatatgcttgtagcaaattgatgttctaactgtagttttatagaaagtattaatgcttttatgtatttcaaaactttcatatgttaaatggaaattgttttaaatgtgtttgagtttatgtaagcatgtatacactgtgctaaaagtcacatgtttcagtttgtgtataatattaatatgcaatttttggtttaaatttttgtcttaaaatattagtggcttacattttaaaaaagaaaaatcaccagcatgaacttgcacctaagtctatattcactgtgtccttttctgaatcccattgtagcctgtcaactaaatttgagtgttaacggtctttttaaagtgcatttaaatacaaaccaggaatttctttagaagttga

SEQ ID NO: 224043 - DNA, 1000 bp, Homo Sapiens
ccttgaccagacctcttcagcctccagcatgagcttcaggaccacaggcacctcagagactgagatgtcggctatctgccaggaatacaggagcacctcagccaccgccgtgacattctctgactcgtcactgttgaagacgcaatcctcggactctgggaacaacagggaggcactaagccatggtcccagaaaaatcaaggccacccagggccagaggcagagccttagcaagactgagcccacccagagccagaggcggaactccagcaagaccaaggccactatacacaagaggaactccagcaagaccaaggccacccaaagccagaggcggaactccagcaagaccagggccacccagggccaggggcagagctccagcaagactgaggccactcagggccagaggcagagctccagcgagattgaggccacccagggcccaaggcaggagcccagcaagaccaagaccacccggagcccaaggcagaggcccagaaaggtcaaggctgctcgtggccggagctggagacccagcaaggttgatgccacccagggccgaagcaggggactgctccgaagttccaccaagactgaggctttctatgactcaaactggagcctcagcaaaactgagtatgcccaaggccagggccagaggtccagcaaggctgagggtgcccagggcaagagccagggcatgagctcaacttccagcaaggccgagtccacctggggacccagcccaagtctcagcaaaactgaggttgatcaggacctcacctactatgaagctgtctgaagggaccatccagaccctcccttcttgctggggaggggacgagttctacccacctccccacactggcactcagccagctgcctccttccagagcaattaaaagtcttagcaacagtcctctggtcccacagctgagtttattatacttgttttcttttacaaaattaaaaacatctaaaaccaggcccaagtggc

SEQ ID NO: 224044 - DNA, 1000 bp, Homo Sapiens
aatggatggtaaaaaaccacaactcaaatttgcttcccagagaaatgatattcaggagaagtgtgtaaagcttttgcctctaatgacagagcagctacagtggatgccatttgtgaatatcaaacttcacgagccttttgtaaaatttatatattggtccctaaggcagctagatgctggagcacagcactcgactatgacatcaacattgaggagattgggtgaagacatttttaaaggagtggtaactaaaggaattcaggataattctccacagcattctgtggagaataaaccaaagacagctgctttctttaagagctccaatttgccattgagatttttatcaaccttaattgttctcaaaacagtcactcaagctgattacctggctcaggcatttgattctctttgtttggacttgaagacagaagaaggaaaaaccttgtttttggagtatcaggctgttccagtaatattaagtcatctaagaatatccagtaaaggactcctgtctaatgttattgatagtttgctccagatgacggtggaatctaaatccttgcagcctttcctggaagcctgtagcaactctttattttttcgtacttgctctgtgctgcttcgagcccctaagcttgatcttcaaatactagaaaaactcagtattattttacagaaactttccaaaatcaagagtaataagaagctctttgaactttttacgattcatctgatgcttcaagaaatacaaaggacaacaaacccagagcatgcatttctctgtattaatctaaattcaactctgttcaatctgggtttaacaaaatgtaactccctggtctccagtgcaagcccttagactggctaattttttaatatagtatatgtggtgcttatttataaacatgtagaaattaccaaagtaactacaattctaccaagtaaagttatcagtagcatcatttatcatgaaaaataaataatttttttgaactgt

SEQ ID NO: 224045 - DNA, 1000 bp, Homo Sapiens
gcaaaggaactggcagcccagtttacattacttcatttggactacaatttccatcgcagctcaataaatagtctttcccctgttagtgctaccctctcttctgggactcccagcgtgcttccttatacttcaaggccttattcttatccaggctatcctttgtcaccaacaatatcacttgctaatggcagccatgttggacagcggctatgtatctccaatcaggcctccttcttctgaagaaaatactaacattagtatgaaaatttgtgtaaatttgtagtatgaaaacttgcaaattaaaatattgttttattttagaatcgggtttgcatatttggttttaaaaaggtatttattccaaagtactaaacatcagctataattcagaataacatggagttgtagaatttataaaaatgcaaagtttaaaaagttattcagtggtttctcttgataaaggtacagcaaactactattctttttaaacttctaggattttcttctactttctgagtgggcaatagaacctagtcatttatgttttttttttttttgcataattttactaaatagtatttcacaaatattaaagcacttgaagacaatggttatagtagatttgattaccaaggatcactatctgtactggagattagaacaattatatgaccagaagcatctaaccattatgtaaaaagaaatgatgagacaaaaagattaagatacaaattttgtgcagtactaaagaaaaagcagtctaccattgtggtccttgaaaataactatagatatttttgttatttgttagacacaaattataattttgttgttaatgtatttaagcattttatagttatgctttgtgtttttgatattctttgtattgttaataacaagtgttatgggtttttaatgttgaaatcatgtgttaatttttgtacttgaattcaaattttttgacattaaatatgtgatgcttctaaaaaaaaaaaaaaaa

SEQ ID NO: 224046 - DNA, 1000 bp, Homo Sapiens
agctcttggtcactgagtgattgagttagggctccgcaagagactttggggagtgaagtggatctcttcctcatcttctggtcctctgaaatgtgtgttctgaagccatggggctcgtcttctggggtgttcccctgcaggtgctggtgaaggtaacctggggcttaatgatggagtccctgatcatttttgcacaagacaggttgctgaggggtcggcaagcatctgacttgcccaatcccctggatatggtgagccccgccatgcttttattctgtatcgcttttgtctttattgctgctttcaacatttacgtttggttacagttaactattttcggagtgtggtgattgaagacaatttcatcatcccactgtacttttttttttgagagggagtttcactcttgttgcccaggctggagtgcaatggcacgatcttggctcactgcaacctctgcctcctgggttcaagcaattctcctgcctcagcctccagagtagctggaactacaggtgcccgccactatgcccagctaatttttgtattttttagtagagacggggtttcaccgtgttggccgggctggtctcaaactcctgacctcaggtgatccacccacctcagcctcccaaagtgctgggattacaagcgtgagccactgtgcctggcccttttttttttttttttttttttttttaaagagatggcatcttgctatgtcgtccaggctggtcttgaactcctgagttcaagcagtcctcctgcttcaacatacagctacaggtaccccccactatacatttttaataaggattcatggctcagagggattttctgatggttttgctgatttgtttctagtttttttgtgtttatatttaacatgaagaccaagtttatataactaggtatctgtataatgcaacaacattggaacacaataaagatgtatttttgtaaaaaaaaaaaaaaaaaaaaaaaaaaaaaaaaaaaaaaa

SEQ ID NO: 224047 - DNA, 863 bp, Homo Sapiens
gcggggttccggtgggcgcgcgttgaggctgcggtcatggagggagcaggagctggatccggcttccggaaggagctggtgagcaggctgctgcacctgcacttcaaggatgacaagaccaaagaagcagcagtccgcggcgtgcggcaggcccaggcagaagacgcgctccgtgtggacgtggaccagctggagaaggtgcttccgcagctgctcctggacttctagggatctcagccgtggctgaggccacccccagaggagcccctggtccacagaagcaggccttgtgtttccagcggcctctgataagaggcagggaaggacctgaaggatttggagttgattcaaacaagatctctgggagtctccagcctgtgcagaaggggcaggactgcagtgcactgcgggccttggagtgtccagtggggacactggtgtgggaaggggcagcacctggggagtccctgcctctcctccctgggacaatagtgtgcatgccacccggggtcctacaggcaggtgctgggaaaggcctggccagcaggtagcctgtgtgtttgacaaacagcagctggcagcgctgcctcctgcccacattcctgccacccgacatcaaagctggcgtgtgacctttccagccatgcgatattccccttggaagatgcttccccaggctataaatttgttctcacaaagcaacatcaataaatcaaaactgtctctcccaaaaaaaaaaaaaaaaaaaaaaaaaaaaaaaaaaaaaaaaaaaaaaaaaaaaaaaaaaaaaaaaaaaaaaaaaaaaaaaaaaaaaaaaaaaaaaaaaaaaaaaaaaaaaaaaaaaaaaaaaaaaaaaaaaaaaa

SEQ ID NO: 224048 - DNA, 1000 bp, Homo Sapiens
aggagctgagccgagtgaaagcagcggcactcagcgagcgtggccaggctgaggaggagctgatcaaggccaagagccaggcccgcctggaggagcaacagcgcctggctcacctggaggacaagctgagactgctggcgcaggcacgggacgaggcgcagggcgcttgcctacagcagaagcaggtggtggccgaggcccagacccgggtcagccagctgggcctgcaagttgagggcctgcggcggcgcctggaagagctgcagcaggagctgagcctcaaggaccaggaaagggtggccgaggtgagcagggtgcgcgtggagctgcaggagcagaacggccggctgcaggcggagctggcggctcaggaggcgctgagggagaaggcggcggccctggagcgccagctgaaagtgatggcgagcgaccaccgagaggcgctgctggacagggagagcgagaacgcgtctctccgggagaagctgcggctccgggaggcggagatcgcccgcatccgggacgaggaggcccagagggcgagcttcctgcagaacgccgtcctggcttacgtgcaggcgtcccccgtgaggaccctgagccccccaaagtgagacaggccgggaggacccgggcgcagtaggagtgcatcaggcggcgcccgagatggaccaggggctgcgtcccgcccgcgccgcctctttgagacccgggtcgtctgttccacgcggcggttgcggcgactgttggtggtgtcgcggctgcgggggaaccccgtgggaggcgcctgggaagggctccctaccggccccttcttcccggtcgacgccacgtgggagcacaccgggaaggggtcccgcgggcgcgtctccccctcgccttttgcgatgtcaccgtgaacgctgcggccgcctgcgcgcggcggggtttggaaatacagcgcgtttgcactttgtgataaaaaaaaaaaaaaaaaaaaaaaaaaaaaaaaaaaaaaaaa

SEQ ID NO: 224049 - DNA, 1000 bp, Homo Sapiens
agattcaaagagcaaaccacaaaaatgtacgaataacagctactgatttagaagactatagcatcaaaatatttttaattcaggccagtgcccaagatacagcatatttgtatgcagcaatacatcatcgtcttgttgcacttcaaagcttcaataagcagagagatgtcaatcaagctgaaagcctgtcagaaacagcccaacaattgaactgcgaaagctgtgatgagaatgaggatgatttcatccaagtcactaaaaatggatcagatccttctagttggactcacagacagtcggttgcctgttcatgaatactacctactataaacatgacatctacaaaaagaggggtcaccctactgaaaatactaaaccaccctaactaatgagaagattctattcattccttgaagagtttttatagaaaagtttaagaaatgtaatttgttgcaattaacatttttatgttttacattttacattttgattattgtgcagaaactgacagaatttaaaaaaatggacttcagaagttcaaaatttatcatttttgaagaagtttatttagaataggattttataactaatttggactcttcatcacattgatggatataatacttagaattataaattgctagatttgataaatacctaacaaaatgtttatttttttcagtcatacttgaccacaaaacaaatattttactaaatttccagagtcatttctctgaaaaatagtataatggcatgataacatttcacgaaatcctatttatcttctgggaaatattttaatttagcttttggatttcctaatatgataagcttatatattcatggtatgaattcctttaaaaagagcatctgctcttggacttgtatctgttgcatcttgtcaatgtttgactcatggtcagcatccaatagttgttaaatgaataaataaaatataatacattaaaaaaaaaaaaaaaaaagaaaaaaaaaaaaaaaa

SEQ ID NO: 224050 - DNA, 1000 bp, Homo Sapiens
cactgggctggaaatatgagcaagcttttgagacgagccagaagtacaaggaagggaaatacatcattgaaatgtcacacatggtgaaggacaacggctgggactgaggggctcaggcagggtgtgcccttcctccgcatgcccctccctccccacggccctgccaagcagtctataccagcatgagtactgccccacccctgggggaaacctggctccaaccaacccctcccctgcctccaccatatccactaccaggcaccctttagaacaggggtctgggggtaccccaggggtgttaaggctcaggagtgggcagcagtcagggagagacagaactgggggaaagggatggttgtgggtctttctgttcccaagatcctgaacatggaagcgatggcagggcatagactcaggcagagaggattgtgggaggaatccgtttttgctccacctctttttgagtgaacagaggacaaaccttgggtcacagggcaagtagatcatggaccacagaacagcagatgagaaaagacttgggttggagtgaaattctggtctcagacaccaggagaccagagtctctgaggatgaagtttcctacccctatttgtagggaaaaggacttgagtgcagggaaaactcaaatcccaggccctgggaaatagtaaaataatcaaagggttttccatttcactccacttgttagtttatcttggcactgaagaggcactttcgagtatctaacttttgccattgggtggggtggggacagctgctcgcggaacagcccctagtcggctgcttccagagtaagcagtctttatgggctttctctgaggcccagtcactgctcctgggacccagtcccctggaggggaggtggaaaatcagtgctacggggccagtctttcccgtggctgccaccagcgaatgaaacttttgtatgatacataaagtgcttgagtctatttttaataaaaagggaaaaagcaacttg

SEQ ID NO: 224051 - DNA, 1000 bp, Homo Sapiens
gttcttcaccaactttttcttcctcatagaagcaacatggcatagttaagggtgtggactctgggctcctgctgcctgggccccgattccagcatggggcatgctacttaatatctctgtgcctcagttcccatcccataaaagagtagtgatagtgacaacatcttaggattgctttgaggtctaaatgagttaacattttcaaagcacttagaatagtgtctgagacacaagagctatatgttagaggttatcatcattatttgtattttgtgaattacgctgcaaaaaaaaaaaaaatgttggctacccaacattcattccccaccttcttgctgccagtgccttgatttggttgtttgttgtttgtttgttttcctacaagtgatttaggggcagatcctgactacactaagtcagggtttgacaaatgacagtccatcagacagatctggcccactacccatttttgtatcctgcaagctaagaatggttttatatttctaaatggttgaaagaatcaaagaatattgtgacacatgaaaattatatgatattcaaatttcagtgtccataaataaagttttgaaaacatgaatacaaacaaaaaacacctatttatgtttgacctgtggctgtctttgcactaccccagcagagttgagtagttgtagcagacaccacatgcccttgagcctaagatctagcactttacaaagtaagtttttctgttacttagagctgaaaataaaagcaatgtagagttacgcttttataagtatttcatgtttcagaaatgatgcatacagcaatttgtaggtgggtggttttttgcagtatatttattttgtgcattatatttatatgttaagagcctgagcttagaagtatttttttcaaagaaatgtgttttttacttgctaaattgtcataacatcaaaacaagaaatttcttgatggaatgtagcagtaaacatatgaaataaacattgtctaaatt

SEQ ID NO: 224052 - DNA, 1000 bp, Homo Sapiens
tgggtttgtttttgttttttctttccttttcttttttacgcatagctccgtcaagctgcctggatgagcgcccatgcagcaaggcttggaggaagcgtcagtgccctggagatcccagctcgctctccccactgtcagcaacagcacttccttcgtggaggaagtggactcgaatcctggaggaggaaataaagggaaagggaagtcgtggagaggcagggaaaatggttaagcagcccggccctctggagtccccatgggggcggtagctgaagttggcgagcgcagcggtggatgcagagctggctgcacccagggctgggccagtgtgtcctgtaagacttcttgcattccttctgctgcttttttgggatgggggtatttttgttcatttgtttttgccctgttttgattttggtcccacagagcaggggatgtagtttgtacccaccatggcgcagacttccaaataaatagtactggtcatttctctccgcactatttctgcgcgctgtcttctgagctttcttcctcaccagtgggctgtgcttgttccatttctgtacacccttattttataccgtttttcttcaacaatggcgaaattgactgtagtgctgaaccaaaagtatccctttccctccttattcctcaccccaagaacattctagatcacatgggtgcttgtgccttccgattttcttgcatttgtttttttcctgacctgaagttgttgttacaaaatcagtcagactttgtgggctgaaggacacggtgcagcagagggtgtccctgtgagagttctgcagagtgctgggcatgtgcctggaactaccgagtaggagccatttctttgtacccctgcctaatccattcctctccttccaagtccattgttgcaagcaatattcttctcaatttttatatgtttactttaaatcaaagttagtctatttgtataaaatttttaaaaaatctaaaagaaaaaaaaaaaaaaaaa

SEQ ID NO: 224053 - DNA, 1000 bp, Homo Sapiens
agccgctcagggtggtcttccagcgggccctgcgggacggcgctgagctgggggaggccgggggcagcacgcccaacacagtcaccatggagatgcagtgtcccccggggaacgcctcctgagactccagcgcctggaggaggcaggggcaggaagcggcctccaagacccttcgccttgggacaggaatgggcacctgcttctgagtccatacaggagaagaaagatctgtttcctctcctcgggcctccttctccctgggctggggactccaggggtggctgggagactgggcagccaccagcaaacagacctgtggcccctgcccggctcccccacccattctgctcccctagagacctcttgtacagaagttgcccccaggtggtggggcccctccttgccctaggctggttggtaaaagagaggaggtcaacacccagcctagccacctctgcctcttgggtcagccctccttgactgtgtcccagccagcaccaggccagcagcctcatccctgccattcagggctgttccagagattcgatcctcttaaggcattatcagtgagcaaatgtgaaggaaatggtgtctggaagaaagttctggttcacatgccttgtagctaagtctttctgcaaacaacctcccttccccccgtcgagtcatttggtgactttgatggggggatttctggttatgtcaaggctctggagacaggaagggcctttggccgccttgggtagttgacctgccttttctgactccgggacgagccagtcctaggctgcctccgggagcacttgaggtatcccgcaggccatgaggacccactgggcagctcctggacagcctcttggctccagcccccacccgaaagtggacactggctccgccctggccacctggggactggcactgtggtgcacagtggcccaatgtggccaacggaagttttataaaagacaaaatgtatatcaataaacattttataacttgc

SEQ ID NO: 224054 - DNA, 1000 bp, Homo Sapiens
aggagcacgggcctcaggccatcacggggctggagcccagggaagtgcctctgctccgccagcagcagggccaggacccgctggagcgggagaacttccgacatggcccacgcttcatgacgtcggagtacaattccaagtatctcagggaccctctagaccagccagatttcttgcagaagaaatcgatcggcgcaaaggaggggagtggcttcaccaaacagtcccaccagagccccattgtcttccaaccgccctcacaggccctccctggggaccctgccctcctcccaggccagagtgtcaccaagtcagacttcctccccaagactcacctacatggagatgagttcctacctgtgttggccagaggctccaagcgggaaacagccttcagccgagggaatgaaaggattctgaaccccagagtgccccctccctgcccagaacccagcagcgtgagtcaccagcagtttcagccacttcatcggatgcaacagacaaacgttgccctgcttggccgggagactgtggggaaaaaggagcccacagggttcagccttaacaaccccatgtatgtccggagcccctgtgatcctgacagggatcagcgatacctgaccacctacaaccaagggtactttgagaacatccccaagggtctagaccaggaaggctggactcgaggtggcatccagccccagatgccaggaggctacgccctcagccagccggtcagctgcatggaggccacccccaaccccatggagagcctgcggcacctgcatccccacgtgggaagaaccctgacctcagctgaccccttctaccagaacacacctcacagcagccgctgcgtggcacacagctgagccctgagcccttggtttgtcaatcctaggggacaggagccaggctactgtctgtacccccactccatcccccaggggaacacccctgcccagctactttcctaatgaaataaagagcattgaagcag

SEQ ID NO: 224055 - DNA, 1000 bp, Homo Sapiens; identical to SEQ ID NO: 118588

SEQ ID NO: 224056 - DNA, 1000 bp, Homo Sapiens
ggtgattgttttttatttgattcagctaaattttatgtgttgaatacttactctagaataactacttttggaactggaagggggaaatctgtaaatggaaatttatttttatgttctgaaatttgagggtttaggaattgacttttgtgtaaagaatgctacggtattataaagctgtggaagttttttccactagtttcaggtgtttttttttttgttgttgttgttgttgttattttgaactacttaccaaaattagaagttaaaatctaattagaaattaataagatactaaaattcatgacagttttttgtttgtttgtttgtttgttttttggtatttcttgatttgggcataaaaggcacacccattctctcatgcttggaagaagctgctattcctactggctatctaagaagaatggaattattaattttatttgacttattaattttaaacgagtttaatttgggatcatttagtaagtactcttttctttttgagctgtgatagattatagtctagtttaagttgctcctaagtagacagatgaagaaactagggaggctttagagaggaagacagatgcttgaagtatgaacaatatatacccttagaagaatgggtcaaataatttgggtttttaatttaaaataggagggccccagatcttactttcctgtccttgaggaacaccttcaagtttttaaagtattttagggggaaagaagatttttaattgtttctgagcctaatgaggtaataaaatatattaaaatagtttaattttaatggtccttacgctttacagtacctaaggatcacttgtagtatctgacaaaaatgcagaattaaagagtcatggcagggtgtggtagctcaagcctgtaatcccagcactttgggaggccaggcaggaggattgcttgaggccaggagtttgagaccagcctgggcaacatagtaagacctcatctccacaaaaaaaaaaaaaaaaaa

SEQ ID NO: 224057 - DNA, 1000 bp, Homo Sapiens; identical to SEQ ID NO: 118589

SEQ ID NO: 224058 - DNA, 1000 bp, Homo Sapiens
gaatcacttgaaaccggaaggcagaggttgcagtgagccaagatcgtgcaactgcactccagcctgggcaaaagagcaaaactttgtctcaaaaaaagactcttttcaagttttctaccctctgataagaaaatttggggatatccagtgccatctccaaggactttcaggggatcatagatgcttttctgtgcctatctgctttgaccatgtgaaaaagtgatagtctgcttctctctggtaacttgtctgccacccatctgatagtaagattagccaaggccctttagccctctgtcctttctggttattgactgtccctggttcctaggaagacagagttgttctccagctaaagcgtctcctctctataaagtagttttactattcttttcatagcaggagccaaaatagtagaggaggggagagaggcacctggcactctgcgggcctgcacaggaaaaacagagccaaagacagaatcattgtataagatatttattaaaggagagcctctaagtccacatcctgagcccatgtgagtggacacaggtaggtaaaacggtgggtccagctgctgtcatctgaaagccttcaggagatgaagctatcagtatccagctgaaggctgctgggttctgttccaccaccaccttagcaccagggccctctctggtcccagaggcctcatctctccttgggctttgacaatgtggagcagcacatcagcagggactggtctagaccctccctttcctgtcacttagctggagctaagctccagataacccctaggttcccactggctcctagtagaaatagtttctgtactttagcagaacaggaaggatatttgttcattaaaggtggcttggtcttacagctgggtgcagtggtatatacctgtagtcccagctactcaggaagctgaggtgagaggatctctagagcccaggaattcaagtttaacatgagcagcaacattagcaagaccccgttt

SEQ ID NO: 224059 - DNA, 1000 bp, Homo Sapiens
accatcctgcagcaagtggacgagactttgcggcagctgacagaaatatatggtggtctctctgcaggggagttccagctgatccggcagacactcctcatcttcttccaagacctgcacatccgagtatccatgtttctaaaggacaaagttcagaataataacggtcgctttgtgttgccggtgtccgggcctgttccttggggaactgaagttccaggactcatcagaatgttcaacaacaaaggtgaagaagtgaagaggatagaattcaagcatggtggaaactatgtccctgcacccaaagaaggttcttttgaactttatggagaccgagtcctgaaactgggaactaacatgtacagcgtgaatcagcctgtggaaactcatgtgtctggatcatcaaagaacttagcctcatggacccaggaaagcattgctccaaaccctcttgctaaagaagagctgaatttcttggccaggctgatgggagggatggagattaagaaacccagtggccctgagcccggattccggttgaatctctttaccaccgatgaagaagaggaacaagcagcgctaaccaggccagaagagttatcctatgaagttatcaacatacaagccacccaggaccagcaacggagcgaggagctggctcgaatcatgggggagtttgagatcacggagcagccaaggctgagcaccagcaaaggggacgatttgctcgccatgatggatgagttatagctgttctgaccaggcgtcctctgcccccagggagaggctgctggatggtgacccctggggaatgccccatggcccagaatgatgctgctagttttctactgagtgaagccattacgtctatttcttatttatgttgtaaggaactgtgtgagtctcccttgaggagcactcactcttgaaggcacacacatacacatattttcagtgaaatatattctgacttttaaacttgaaaaaaaaaaaaaaaaaa

SEQ ID NO: 224060 - DNA, 1000 bp, Homo Sapiens
gttttttctacctgttgacgtgtcaagcactaactgtgggtactcatttattttattcttttgtaaatcacagccaccattcattatttactaggttaagatgaatagacactgaatcaaagttattcatcaacaaaaaagaacagttactaatggaaagttattaaaataagttctataagagtacaattttgaggtttattttttgtatttttattatttgtgcgaagaaccattattgagtttgcaagataagatgtatttgtattttctagtgtctttttatttataacacttttttggcaatcagtttgtagctgtgcccttatttttatagatagtttgccatttcttgggtttaatgtttaacaaggctatagaagtttaaaatagtggacaaatgtttgtgaatacacttttaaaaaattgttttaaaagagaaaagcggtcttgctttgttgcccagactggagtgcagtggcataatcatagctcaccgcaagcctcaaatttttgtgctcagatgatccttttcatctcagcctcctgattagctgggactataggcgtgtgccaccatgcccagctaattttgaaatttgcttgtagagatgggatctcactctgttgtccaggctggtctcagaattctggtgagtgatcctcccacagtggacttccaaagtgctgggattacaggtgtgagccaccatgcctggccccatgaatacactactaatattatttgtaaatatgtattttataatgtacaatgcttggaaaattttcagagtattctagtttaaaaaattttttctaattctgtaaattctattacaagtatgttgtttattacaactcattacaactacctaaattttaggtgttaactgtatttaagtaaatgtgttatttttgcatttcatagccagaaaatactgatgttcacttaaagatattcagcaattaaaatgttaaaacttgtaaaaaaaaaaaaaaa

SEQ ID NO: 224061 - DNA, 1000 bp, Homo Sapiens
tactgcttatacttggtcttccagttttttgtaagtttaattttatattttttgaagatgatagcaatatgctaaaaaatgcttgtcccctatatgaatattctgttacgcttgaaaaatattttctccagcgttggttactgaccaccccaccctcccaccacacacacacacacacacacacacacacacacacacacacacacacacaaagtggagaaaaatgtatactcaacaatgtcattttgtgactttggaaacaagttatgttttgtgtttttgtctcattgtgttattgtctgactaaatctaaaaccaaacccatgttgaaactagtacttttccctttaaaaacaaaccaaaaaaaaaaaacaaaaaaaaactttttaattaaagaacctagtttgctatgcttaaaattaccaagaattttttatttctttgtcatagacacaatttctcttctgtatgccactagttacatttctaaattctgagcggtctcagttaggcctgtatgtgtgtacatgtccaagtaaagctggaaaatgtcagtcttgacacagctgtgtcttagtatgagaaacagaagactgaagaataaaaactaaggaacaagaatgagtctctttttggtggctaagtagaatcttcctaaaaccattgtcataaaagcagttaaaggcaataaatttttaaaagggacatatcactgattcattcctaaaaagcatgaacaaaaagtttttgttctgttccagctatatcttgtctaagtgctaacactgtttcagtgaaaatatctagccataagattaaaaaaatatattatttgcaatgcttaagcctgcagatacgtaatgtgaccactgttttgtgttgacaatattgctttatacagttcttgtatttgaaaggaattgatccttttaaagaaacatggtgtatattgttcttacaggactaatttcagtggtgtaaataataaatatcttttctg

SEQ ID NO: 224062 - DNA, 1000 bp, Homo Sapiens
aattgctgctctccagtaattgtcttttcattttgatggtaggggccagactgaatgaataatgcattcttttttattcaatttatttcattcagtttattcttggcaatcaaacatcccataaactttgcttttattatcaattatgaatatgaattgtctggtttactaatgtagtcatttgttcatctttacttttagcagattagcaccataactaacttaaaactaagtttgttacctgctttttatactgtcacaaaggtttttgaaaaagctggggacactattttgtcttttagttttaaacttttttaaggcaaagcaagctccccaatccctgttctccaatatgtgtatgatgtgacttccatgtagatataaaaatgattgtgccctaaccaaacttcctcagattgtgcactgtttgtttaaaataatcacgtattttagtctgatgctgttgtattttttcattttatttaaaacactacttacttcttattctcttaacaaattttaaaaggtagtgatcttaaaaaaaaatcactggataactaggaaatatttttgttgttgttttgtttcttaaagagtacagaggccattgaagccttttgctcctcttaccgtgaaaatgaaatgttagccattgtatggctaggaaccaatgcacttggcagttaatggatctgctgttgctggagtgtgagcgtggacttgatgcagtgatgacaaatcattgcttagaattaatgttttcaaatgtgcaactctagtttttaaaacaaaatttggttctttacattcattatttcgtttttgtttccctttagtatttaatggtctttggagaaaaaataataaaacagagtgttatatatatattttttggtgcaagataagattttctgttttttgaaataagtctgtagcataaaggttaaactattttaagacaaaataaaatagagtgtatttaaaaaaaaaaaaaaaaaaa

SEQ ID NO: 224063 - DNA, 1000 bp, Homo Sapiens
gtggtgcagaatgcccacagcctggtacggcaaactgaggagtgtgctgaaggcttccgccaaggaagcctgcctctgctgggccagtgcctgacctcgtactgggagcagaagaagctcatggctccaggctgtgagcccctgactgtgcggcgtatgatggatgtcctggccccccacgtgcatggccagagcctggctggggcaggcggtggaggctttctctatctgttgaccaaggagccacagcaaaaggaggccttggaggcggtgctggccaagaccgagggccttgggaattacagcatccacctggttgaagtggacactcagggcctgagcctgaagctgctggggaccgaggcctcaacctgttgccctttcccatgaagctggcttctctctgcaacaggagaaaacctggagctacagtgtcccccaccttccttgccccatgggaacctccacctcctactccccacccacctctgcgaatctgctcccaaaggaagctgaccagagcaagatctgggcaagcagagagtgcctgggacaggactgtgacctggtggacaggggcctagatgtagcctctgttcctcctggacataggaaggtcccaagcttagtatcccacgtggcctttacaaatcctatggctggccttctcattccacaagggccctggaaagggttgacagccagccttggcatatggctgggagtcccttagcaaggccaaccctgaagaggccctttgaggcattccctatggcttagagttgtagacttacactcaaccctcatgtgagcgtgggagtgagggtggcggtcccttgccaagttggtagcagtgacccagtgattcactgccatcccaggccttaactagcaaaactacggagcgtgccaagtgacctggtgcctgtgggaagtgggttctcaggactggcattcttggaataaattcactctgtccttgcaaaaaaaaaaaaaaaaa

SEQ ID NO: 224064 - DNA, 1000 bp, Homo Sapiens
ggaaccaggaactctgctgtcaggttgagagttttgtttctcttccagcttttcactgtgtgggggtcttttctcttatgtcagctctttctatcacatggcagctgacctctcacgctccactctgcagcttggacacccagtagaccctgaatttcactctctctaaaaggttctgagggctcatcctgggccaggggccctcctgtgcactgttagctatggccacgggagcctccagagctgcctggtagcttcaggttgacctgcttatcaggcctacgatccttctgatttaagtacagctggaaagtattatctaattaagttcatgatagtgcttttggagaacttgtcaaattacagccaatgagaaaataaggacctagcatactgtggagaaccattaaaaatttgagaagaaacaacaagtattatgtcaacttacttcaaaggcgtagttttgggaatttgatgcagtaaagattaccctgttttatgattgttccttgaaagtcaaatgggggacctgtccattgtgctctattaatcttgtcagaaaactgtcaccaaaacaaaacttgagtttgtccttgttctaggagttactgggtagttgtaagtattatttttattaaatataatgtaaaataaaatgttaagatacttagttttgtttttcaaagtaaagctgtagtcagccttatgtatgccattgactctgaaatgtataccagcctttcactgtgtaccgtgtgtatataaatccacagaaccggatgagctgcttagggagggaatatattcaaagtgtaccaaggaccaaatcctggagttctcccaactttagaggatggaaaggggcagagtaatctagcaaaggagactgaggccagtgaagtaggaagaaagtatttcaaggagagtgatgattctgtgaatattgctgagaattcaaataaaaagaggactgagaactgaaaaaaaaaaaaaaaaaaaa

SEQ ID NO: 224065 - DNA, 1000 bp, Homo Sapiens; identical to SEQ ID NO: 118594

SEQ ID NO: 224066 - DNA, 1000 bp, Homo Sapiens
attgtgccatcacttaagggtttcatttctgtttaaagttctggaagctgcataactagcgtggactgactgctgtgtcattgtgctgtgcctttgaaccctggctgagtgagtgagtttgtcctttgttgatagtgtcctataattgcaaaatgtggtttgtcttctgatgcctcttaataccagattcttttactgagatttttttttttcattttccattgtaaataaggtaaatggtaatgactaacacaaagctgtattactcagcccactttgaaacgtggttttatcacctgttcttgttaggcagcatggtgtctaattttggcttagcaaatgacgctccttggtcttcctggctcattagctgtgcccacgaggctgcactgactgggtcgtaaatgtatctgagatgtccacacggggctgctgctgctcctctgtaatactgaggtccacatgcaaaatcagctttttttcccccgtaattatcagagcagctaggcagggctgacagccaggcagactcagtgggaggcttctggcctgagtgtggccttccccagagggtggttttccaaaggcaggtggggactggggaggcctcggggggctgcttgtcattacctgaatcacagatgctcttttgtcatacacagccagcattcctctgggtttcagcaagttggcatatcttaagcttcagaaggagctgggccttgctgactttcctatctggcctcttccctatctcctgtggggccaagagcttaggacagtgtctcagaaaagcctctaagtagggggtttttcccatgggattgtggtagtctgatttttcatatctattcaaatgttaagaaatattttgttttctgtatttttctattctttagaaatttttttataatagataatttcaaacctatataaataaatccttatgtatttatcatttgactttattataaactcataatcaatcttaaaaaaaaaa

SEQ ID NO: 224067 - DNA, 1000 bp, Homo Sapiens; identical to SEQ ID NO: 118596

SEQ ID NO: 224068 - DNA, 1000 bp, Homo Sapiens
gctgtaaaggtcatactactagatattacactggaacttcagaagcaaattatgtctgaattggaaattctttataagtgcgattcatcatatatcattggattttatggagcattttttgtagaaaacaggatttcaatatgtacagaattcatggatgggggatctttggatgtatataggaaaatgccagaacatgtccttggaagaattgcagtagcagttgttaaaggccttacttatttgtggagtttaaagattttacatagagacgtgaagccctccaatatgctagtaaacacaagaggacaggttaagctgtgtgattttggagttagcactcagctggtgaattctatagccaagacgtatgttggaacaaatgcttatatggcgcctgaaaggatttcaggggagcagtatggaattcattctgatgtctggagcttaggaatctcttttatggagattcagaaaaaccagggatctttaatgcctctccagcttctgcagtgcattgttgatgaggattcgcccgtccttccagttggagagttctcggagccatttgtacatttcatcactcagtgtatgcgaaaacagccaaaagaaaggccagcacctgaagaattgatgggccacccgttcatcgtgcagttcaatgatggaaatgccgccgtggtgtccatgtgggtgtgccgggcgctggaggagaggcggagcctggcttccctgccctcgccttcacctctgtcagcaggtggccttgcctggggagccccatgtgtggcccaccccaccaggccatccccataccttctggtttgaaggcgctgacactggcagagaggtaaagggtggggcattgagaatggaggctcccagggtccctgcccacttctgttttcctaatgtttttctctataaagggtcaggcccgtcagcatcactgatgggaataaaagtattaatgctttgtgacaaaaaaaaaaaaaaaaaa

SEQ ID NO: 224069 - DNA, 1000 bp, Homo Sapiens; identical to SEQ ID NO: 118597

SEQ ID NO: 224070 - DNA, 1000 bp, Homo Sapiens; identical to SEQ ID NO: 118598

SEQ ID NO: 224071 - DNA, 1000 bp, Homo Sapiens
gtggagtttttccctgggaattgctgcattcctgccacagctcatcttgctttcagctgtgtctttcgcctattacagagacctcgttttttgttgttttcttcatacgtccatttttgtgacttttaacaaagtctgcacctcccagtactttctttggtacctctgcttactgcctcttgtgatgccactagtcagaatgccttggaaaagagctgtagttctcctaatgttatggtttatagggcaggccatgtggctggctcctgcctatgttctagagtttcaaggaaagaacacctttctgtttatttggttagctggtttgttctttcttcttatcaattgttccatcctgattcaaattatttcccattacaaagaagaacccctgacagagagaatcaaatatgactagtgtatgttccacaccctctgctactgtgttacattctgattgtcttgtatggaccagaagagagctttgggacattttttctgaacattctaagcattctagtgaaagttcccatgttccaacagaacttaaaagcaatgtttgccttatatataaaagggacacaataattgaggtccaccttctaggaaatcctaggactcgtttatttgggacatggtgggaataaaggtcacatattggaaaatggaaaggctgatgaaactatcagatactaaaacattcttaaaatagaggaatatagttagagacatcaggtttaagccagtatttgttcctgttttacaatgcttctgtcttaagctgtgtcttaacttttaacacccatcttttctttctaaagctttcctgacagctgtgaaaatccaaaaaatattcttaaactgtgtatggtggcccttgcctgtagtctcagcactttgggaggctgaggtgggagggtcgcttgagttcaggagttctagacccacctggggcaagatggtgagacctagtctcaaaaaaaaaaaaaaaaaaaaaaaa

SEQ ID NO: 224072 - DNA, 1000 bp, Homo Sapiens
catccgccacctgtctgacgtagagaaagccttccaggatgcagacgtcacttgtgtgttccatattgcctcttatggtatgtcagggcgggagcaactcaatcgaaacctgatcaaagaagtcaacgtcaggggcacagacaacatcctccaggtttgccaaaggagaagggtgcccaggttagtttacaccagcactttcaatgtcatctttggaggtcaagttatcagaaatggggatgaatctctgccctacctgcctcttcacctccaccctgatcactactctcggacaaagtcaattgcagagcagaaggtgctggaggcgaatgctacacccctggacagaggcgacggtgtcttaagaacctgcgctctgaggccagctggcatctatgggcctggagaacaaagacaccttcccaggatagtcagctacatcgagaagggtctgttcaagtttgtctacggggaccccaggagcctggttgagtttgtccacgtggataacttggtgcaggctcacattctggcctcagaagccctgagagctgacaagggccatattgcctctgggcagccctacttcatctcagatggcagacccgtgaacaactttgagttcttccggcctctggttgagggcctgggctacacattcccgtctacccgcctgccattgaccttggtctactgctttgcttttctaacagagatggttcacttcattttgggtcgactctacaacttccagcccttcctcactcgcactgaagtttacaaaactggtgtcacacattattttagcttagagaaagccaagaaagagctaggttataaggctcagccatttgacctccaggaagcagtggaatggtttaaagcccatggtcatggcagaagttctggaagtcgtgactcggagtgttttgtttgggatgggctattggtcttcctcctgattatagcagttctcatgtgaaaaaaaaaaaaaaaaaaa

SEQ ID NO: 224073 - DNA, 1000 bp, Homo Sapiens; identical to SEQ ID NO: 118600

SEQ ID NO: 224074 - DNA, 1000 bp, Homo Sapiens
gcagaggtctcatctgaaggcctgatcggggaaggatttgcttcttagaagctcatgtggttgttgcagcattcagttccttgctgttgcaagactgaaggcctcagttcctcgctggctgttggctggaagctgccctttgttctgtaccatgtgggtctctccacagcggggctcggagcatggcagctaagttagtgagggaaggtgagatggaggttttggtcttattgggtgtgaggaagcaacgtgtgtgtgtgcgcacgcccttttgtgcagtgagagagagagagagattgcacacatgtgtctctgtagtcatgtggccaggtgggactatgtaggtaacagattgctcgtgtctgatttggtacaagcatgtttgttttcctctgtgttcgtgtgagtgtttactcaacaaatgtttattggacacactcagagagagggagtgtgcacacgtgcgtgtgtgttgctatccagcacgtggaccgggctcccagaagagctggcattgtgtctgagcagagctgggtccccccaaaacttgggctggcccagggcccaccagcagctgatgttgcctcctctcctgtcctggcagtagcttctgggttctgaaggtgccggagagagtggggctgggcaggggtctgcggccctttctcagggacacaccctgatagcacaatctccttggggccctgcccacctccaggcctctcccacctcaggccctgcccgaccctggggagagagggcatctgcaataggaggggacccgagcctgtcctggctgctggcccatcctgcctgggcatccctggtgctggggactgtgccaggccatgcttgctgtgactccgcccctgccccctctccccccgcatgtgggtgcccccactcccccatcgtggggtctgtgtagccttcgctctagacatagtcttcctgcaataaaaaagtggatcctgcattccccaccaaaaaaaaaaaaaaa

SEQ ID NO: 224075 - DNA, 1000 bp, Homo Sapiens
agctcctctgtggatgcgtccccagatcgcaggatttccaagaaatcgagcctgtcccttgtgcacttgggaataattccccaagacagcacttcgggattccgggttatcctgaggctgcccgggacttttccagctctccagccccaggtctcctgacattgtgttccaggctgcgggctaagccagacagtgtttgcctccggttctttccaccgtgggaagcgaacgccacccccacccgcctttgcctgcgagtctccctcgctggcagaagggaagccggcccggtcccgggaggaagatggcgctgcgaattcggtgaggacagccggccccgcccccgacaaggagctcgctcgttcacctggtgtctgggaacttgaatgtgtgaagggcgcttattgttctgaacccttgattgctccctcctcgggctgcatttcaaaaatagtcatatttttaaaggagttggaggagagggagggggaggacatggcaccattccagaaaccagcattgttacaacaccatagccagtatatttagtttggcttttcctaacatagaaatcttcaaagctggggaagtggaaataaagttttaaaaatgagagagcagttttccaactatgtcaacaaagcctatcgtgttgatgtttttattgaccattttagcaacaggctaataaaatttcaaattgaaatttttattttcatggctttaatccatgatagtttaaatactgggggccattaagagtggatgtagctaagagcttagctaacattgccttttcactctatttttctcagatattgtaagcattctgtttttcaatattgtagttaattttttggctttcaacagcagccctagtaatggtggagttgttaattaatgtgtatattgtactgaatttctgtcagttaaggggttcactgctttggtggaaattggtggaaattgctagcaggttccacgatgtttatttttttct

SEQ ID NO: 224076 - DNA, 1000 bp, Homo Sapiens
tgaactggggcatcaatctcctcatctcgctgacatttttgactgtaactgatcttattggcctgccatgggtgtgctttatatatacaatcatgagtctagcatccctgctttttgttgttatgtttatacctgagacaaagggatgctctttggaacaaatatcaatggagctagcaaaagtgaactatgtgaaaaacaacatttgttttatgagtcatcaccaagaagaattagtgccaaaacagcctcaaaaaagaaaaccccaggagcagctcttggagtgtaacaagctgtgtggtaggggccaatccaggcagctttctccagagacctaatggcctcaacaccttctgaacgtggatagtgccagaacacttaggagggtgtctttggaccaatgcatagttgcgactcctgtgctctcttttcagtgtcatggaactggttttgaagagacactctgaaatgataaagacagcctttaatccccctcctccccagaaggaacctcaaaaggtagatgaggtacaaggtcctaagtgatctctttttctgagcaggatatcaggttaaaaaaaaaaagttactggctggtttaatactttctaccttcttcacagagcagcctttgaatagactatgtcctagtgaagacatcaacctccgccttaagctatgtatgtatggaggccagtcgcagctttattatgcagacacacaagtggtctggacatgagggtacagtttctgcctaccaagacactacttgcactggatcttacgcaaaaaagaaccagaacacacagtgtggacaactgcccatatattctatctagattaggagagggtcctggctaggattttagtggtaattcctagttacattcaacaagtataaagattatagagcttattttatgaactataaactataatttaatgcaaaatatccttttatgaatttcatgttaatattgtgaaatattaaaataattcc

SEQ ID NO: 224077 - DNA, 763 bp, Homo Sapiens
gagggcgcgatcctggcgtcccccgacggcctggggccccaatccagaggcctgggtgggaggggaccaagggtgtagtaaggaagcgccttttgctggagggcaacggaccggggcggggagtcgggagaccagagtgggaggaaggcggggagtccaggttccgccccggagccgacttcctcctggtcggcggctgcagcggggtgagcggcggcagcggccggggatcctggagccatggggcgcgcgcgcgacgccatcctggatgcgctggagaacctgaccgccgaggagctcaagaagttcaagctgcaggcggccacgcaccagggctctggagccgcgccagctgggatccaggcccctcctcagtcggcagccaagccaggcctgcactttatagaccagcaccgggctgcgcttatcgcgagggtcacaaacgttgagtggctgctggatgctctgtacgggaaggtcctgacggatgagcagtaccaggcagtgcgggccgagcccaccaacccaagcaagatgcggaagctcttcagtttcacaccagcctggaactggacctgcaaggacttgctcctccaggccctaagggagtcccagtcctacctggtggaggacctggagcggagctgaggctccttcccagcaacactccggtcagcccctggcaatcccaccaaatcatcctgaatctgatctttttatacacaatatacgaaaagccagcttgaaaaaaaaaaaaaaaaaa

SEQ ID NO: 224078 - DNA, 1000 bp, Homo Sapiens
tcaaagatcattctccttgatgaagccaccgcctctatggactccaagactgacaccctggttcagaacaccatcaaagatgccttcaagggctgcactgtgctgaccatcgcccaccgcctcaacacagttctcaactgcgatcacgtcctggttatggaaaatgggaaggtgattgagtttgacaagcctgaagtccttgcagagaagccagattctgcatttgcgatgttactagcagcagaagtcagattgtagaggtcctggcggctgattctagaggaggaagaggctctgtgagatgaataggaggagtcttcaggaggaggggctgtcctctccgcaggcagccctggtcttcagcccctcccatccacggagtgagctggggctgaagttgtccccactgccatactcagtccatgtcaccccacttggtgggcttggggttggttctgggtggtgaaccggggcagacccagctaatggattaaaaaactgcccttcacctcccaaatccccaagggttcctcatgtgttttcaccaaaaccaccccagtgcctgagattgaaaatattgtaactttcagttagaaatcagccacaataaacaacatgggaaaatgccttaggatggagtttgcaaggtttccttgcccattatcagaaggaaaaagagcagaattttcttctcgtttaaccccactcacttccatcttgactgggtgacaagtggtaatgacacagatttgtagcgtgaaagactgaatacagtgtttggccaaaaatttttttaaaaatcatattatatgtttcaattgatctgttagaataaccaagaaaacaaaatgctggagtttctctataaatgacacttttatatcttctttattcgtcgttaaaacgcggtaggaaattaccctgaaatgtcgccttgcaattatttcactgaagatattccaatttccatactatttcctccaatagacccttgttgcct

SEQ ID NO: 224079 - DNA, 1000 bp, Homo Sapiens; identical to SEQ ID NO: 118602

SEQ ID NO: 224080 - DNA, 1000 bp, Homo Sapiens
aggatgtgaccattttggcagctactaaccgtccagataggatagacaaggctttgatgcggcctggaagaattgatagaatcatctatgtgcctttaccggatgcagcaacaagaagggaaatatttaagctgcagttccactccatgcctgtcagtaatgaagttgacctggatgaactcatccttcaaaccgacgcatactcaggagcagagattgtagctgtctgcagagaggcagctcttctggctctggaagaaggcattcaagccaatctcatcatgaaaagacatttcactcaggccttgagcactgtgacacctagaattcctgagtcattgagacgtttttatgaagattatcaagagaagagtgggctgcgtacactctgagaaaatatatatattcaagatgctgaaaatcctttccagagaaaatttgtttctttttaaaattttttgagagtgttaaaaaaaattttactaggcaaaatgtttgaagtatgttcagtagaatttaggggctttggttcttacagattttcaagtcatgtaagtacagtgaagatatctctgagcataagtttcaatcagttttacctggaaatttgtggtgtggtttaaaaaacaaatgtttagctttttcatttgcgacctagtctgttcatcccatgaagcaatttctttttccagaatctgtttgagtgtctttctaaaatgccaaacatgttggcatcaattttatacagggatataaaaaagtatatgtggataaattttttgtaatctttagggatataaaaaagtgtatgtggataaattttttgtaatctttatttttgaaggccagccagtaaaatggcccaatgtgccagccatgcttatgtggccttgttttcaaatatacatatatgtgttatcattaaaattcatatatgtatttttgttttagccctcttaatctctacctatggccaaaaaaaaaaaaaaaaaaaaaaaaa

SEQ ID NO: 224081 - DNA, 1000 bp, Homo Sapiens
cagtgcccagtcagcagctctgccaccatcctgctgggaactgggggggcctctattgggttataggcaaggccttttctctggcatggaattgttaattttctgacacgtctagatgtgaaatttctgaaaatgttgaagcagagaaacattcacacacaaaaagcaacatagtcatgtgggtccagatggcctcagtcctagatgttggcaccctttgctgtgtctcctcagagtatcctgttccgcctcctgccacctggacctccctcagtggatgtcttccctcccccgaccccagcctgtcagtccgagcacagtgcaggtttggctctgacttgggcttttggctgcagtgggggtggatttcagagcctctcatggcagcatctaagtgaccagagctgggatgagagaggggaaggggcaatgtgagtggcgctatgggacgggccagccctgctcctgagccagccccgccctctgccccctggccctgggctctgtgctagggatggtgaagaatgggggcgtgccagcctggcaggagtgggaagcaacacgcaggggtcccggacctctccagccttgccctcacgcttacccgagctcccagtgtggttagcacagagctcacccaccttgcctggctcccagctggggcctgtcctcactggtgctccaggggaagaaacgacagcctcacttctgtatggactgctgatgtggcctgccatcctgttcagcgggcattgtctttggagcagcaggagaataggatgcctctcactcacatgccagttcctggctggccagctgctcagggctcaggctggggcctcccattgacatcctccccctacactccctctctgagcctccgtcgcccctcctgttgggtaagggtgttgagtgtgacttgtgctgaaaacctggttcatatataataaataatggtgatgaaaagattaaaaaaaaaaaaaaaaaaaaaaaaaaaaaa

SEQ ID NO: 224082 - DNA, 1000 bp, Homo Sapiens
aaaaaacatataaagacttctctaagataatgtccctgagtccaaatcatcactgtaaagtggtcccagggcactgtctgtgcaagacaaagaaatcggcttgggctaacacgagcaagccctctcgggctatatacagaggaagaacagggtgatgagggtactgggggcaagagacatgtttgcagaaccctttaggatggtctaggcttgggagtctcactgcggagaagcaagccttgagctgctcagctgccctctgctccataccccctggtttctagcagtcacgtcctgcacccagacacttagccatgtgtgttcacgttccccatgccttgcctgtcctgctgggctccagtaactgctatactggagcaagaacagcaatgctggacactcagcatttagtgaaggtaattccaaaatactggtatcagtactcttatttataagtgtacggaatgcataacatgaacattagtcaaagaacttttaatataattcactttttaagtgttaaaatttaaaggtcaagtaaaattgtaaatttgtaatatggaaacattaagcgtcattatcatacaaattattagcagataaccttaataaaaataaacgtttgcgggttttttttgagacagggtctcgctttgtcacctaagctggagtgcagtgcgcgatctcggctcactgcaacttccgcctcctgggatcaagtgattctcctgccttagcctcctgagtatctgggtttacaggtgtgtaccgccacacccgtctctactaaaaatacaaaaaacaaaaaaagattagctgggcgtggtggcaggtgcctgtggtcccagctgctcgggaggctgaggcaggagaatagcatggacctgggaggcggagcttgcagtgagctgaaatggtgccactgcactccagtctgggcaacagagcgagactccctcttaaaaaaaaaaaaaaaaaaaaaaaaaaaaaaaaaaaaaaa

SEQ ID NO: 224083 - DNA, 1000 bp, Homo Sapiens
cgcccggcgcggtggtggccgtgggcgcctcgggcggcaaggactccacggtgctggcgcacgtgaggcgcgcgctggcgccgcgcctgggcatctcactgcagctcgtggccgtcgatgagggcatcggtggctaccgggacgcggcgttggcggccgtgcggcgccaggcggtgcgctgggagctgccgctcacggtcgtggcctacgaagacctctttgggggctggacgatggacgccgtggcccgcagcacagccggctccggccgcagccgctcctgctgcaccttctgtggagtgctgcggcgccgggcgctggaggaaggggcgcgccgcgtgggagccacgcacatcgtgacaggtcacaacgccgacgacatggcggagaccgtgctcatgaacttcctacggggcgacgcggggcggctggcccggggcgggggcctgggctctcccggcgaggggggcgccctgccgcgctgccgcccgctgcagttcgcctcgcagaaggaggtggtgctgtacgcgcacttccgccgcctcgactacttctccgaggagtgcgtctacgcgcccgaggccttccgcggccacgcccgggacctgctcaagcgcctggaggcggcgcggccgtccgcggtgctggacctcgtgcactcggccgagcgcctggcgctggccccggccgcgcggcccccgcgccccggcgcctgctcccgctgtggggcgctggccagccgcgcgctctgccaggcctgcgcgctcctggacggcctgaaccgcggccggccccgcctggccatcggcaagggccgccggggtctggacgaggaggcgacgccggggacgcccggggatccggcccggccccccgcctccaaggccgtccccaccttctagcgacttcgggcctcccgccgggatctgatgccgcggggtgggggctgcctgtaaatgacactgtgaataaacccgttaccttaaaaaaaaaaaaaaaa

SEQ ID NO: 224084 - DNA, 1000 bp, Homo Sapiens
tctcagatcaattgggttattcatgtggttgattccccaattattaatgccttcgtgcttccaaatggacaaatgtttgttttcactggatttttaaatagtgtaaccgatattcatcaactttctttccttctgggccatgaaatagcacatgcagtacttgggcatgctgcagaaaaggctggcatggttcatttgttggatttcctaggtatgattttcctcacaatgatttgggccatttgtcctcgagatagcttggcacttttgtgccagtggatacagtctaaattgcaggagtatatgtttaatagaccatacagcagaaaattggaggccgaagctgacaaaattggactactgcttgctgcaaaggcttgtgcagacataagagccagttcagtgttttggcagcaaatggagttcgttgatagcctgcatggccaacccaagatgccagaatggttatctacacacccttctcatggcaatcgagttgagtacttggatagacttatacctcaggctctcaaaattagagagatgtgtaattgtccaccactgtctaatccagaccctcgattactattcaaactcagcacgaagcattttcttgaagaatcagagaaagaagacctaaatatcacgaagaaacagaaaatggatactcttcctattcaaaaacaggagcaaataccattaacatacatagttgagaaaagaacgggcagttgaattaaaatttatgagacacaagatatatgaagaatgttgcagtccttatcattttatgttactttttaaaaaatgatgtttgaagtgaaaaaaaaaaggatattcagggtcaaatcatgtacattacagatattatctaaattcttctagaatttatttttcatgaaatattgatgtattttaatctatgttaaaatatcttcaatgaggaaaatgtcacagaataaatttatattacacattttaaaaaaaaaaaaaaaaaaaa

SEQ ID NO: 224085 - DNA, 1000 bp, Homo Sapiens
gaagcttcctaaacaaagattaaacgctgaaaaagccaaattggtgaagcaggttcaggagaaagaagaccttcttcggaggctaaaactagtcaaaatgtatagatcaaagaatgatctgtctcagttacagttgttaataaagaagtggagaagctgtagccagctcttgctttatgagttgcagtcagctgtgtctgaagagaacaagaaactaagccttactcaattgatagaccactatgggttagatgataaattactacactataacagaagtgaagaagaatttatagatgtttaattcctgatttttgctccagaatatctttgagaatgacaacttaattaaaagatacttaggcactttttttttttttttgagactgagtttcgctcttgtcatcctggctggagtgtgatggtgcgatcttgactcactgcaacctctgcctctcgggttccagcaattctcctgcctcagcctcccgagtagctgagattacaggcgcccgccaccatgcccggctaatttttgcatttttagtagagactgggtttcaccacgttggccaggctggtctcgaactcctgacctcaggtgatccaccgcctaggcctcccaaaaccattagggctcagaggaaggtatcccaatgaatatcaattaagggcactttaatatataaattataaactaagttctaaaaggaaaattagtattttggatagatttgtcaaaacgacatttaagtcatgtttaaaaagtcatttgggcagttctggaaactagttttaatacatttgttttttatgacaaaaagttttattttaaatgttaaaaattgtccaatctggtgaatgtctaaccctaaagtttaaaaatttctgcctcctaagtttatgtaccttgtttccatccatttaccacatatttccatctgatagtctagcaggtaattaaacttatatgtccaaaaccataaaaaaaaaaaaaaaa

SEQ ID NO: 224086 - DNA, 1000 bp, Homo Sapiens
cacctgtgacatctgccacaaagccttccggaggcaagaccacctgcgagaccacagatatattcactccaaagagaagcccttcaagtgtcaagagtgtgggaaaggattctgccagtccaggactctcgctgtccacaagacgctacactcacaggtgaaggagctcaaaacctccaagatcaaatgctaaatagaacctgtgggtcacaaggaccctaggcccagcggccctctcctccatagggaccagaagcctgactctggcgggcagcgggagaggcgctcgctcgggaccttccacctctccaacattgtcccctgggtccctggcgcacgcggcacttcagagccccgcccggggccgcgaccccgaccgtccctgctgctcccctaggacgcggctaaactcttggccaaaaggcggtactcacgtggcggaagggaaactgcattaaaaaaagaacgaaagctccgcggagccgcagcggcgcctctcccagaagtattactttttctattgttattttatacgttttcttttttatttttgtctttgaccatataagcttgtaactctgactgcggagagtgagtggagagaggagaggcaacgaagtccttagcactggcagctcccacctcctcctcccgcccctgcccccacccccggagcctgcaaaagtgtaatccctgtatctgcttcagcctcctgccctagggaccgcggggcagccccctcccagctcttgcagctcagctggcggccgtgggctccgggactaggagagcgggacggggacctcgggcctggggtctgcagggggcccggcctccgctgccgcgacactgcgagggagcagccagccaagagccgggcgttatattgcgattggcactttatgctgaccatcggtaacggacatttatcactggagttttttttttttttaactattaaataaacggttattttacaggcaaaaaaaaaaaaaaaaaa

SEQ ID NO: 224087 - DNA, 1000 bp, Homo Sapiens; identical to SEQ ID NO: 118612

SEQ ID NO: 224088 - DNA, 1000 bp, Homo Sapiens
cggatctgaagcccagcacaaaataatctccccgtccaaggagcttgtggaacttgaattgggaactttggagtcttgtctcccatcccagcacattgaggatgtagttggtgaatggactcttccaggcatggagatcctccatcctaaaagtacctgcctccttcccagccatccctgacacattccagccagttggatctcacagcacagctatccacagggagactgggatgttcacgcagcactccattactcagtacctccatacccagccctatacgcagacccacaggtggggaaactgaggcaggaacagggttctgccctcccagagcctccactctgggatgccagaatggaaagccagagggaacctgagaatcatccagtcttactgtctcaatgtacatacggggaaactgaagccaggagaagaagagggagaaactgtccagggcctcacagggaggcattcatggagctggagaaaccagggatcctgaccgcagggcccatcaattgctacatagagatacacatggaaagagggtttaacagaccctctctaggacacaactgtttctgctttgagcaataatttctaacctgaggccaacatgtcccactgccccttgggttggctggggttgtttcctgagccaagcatccaatatcatgccccactcaatggcctagaagctgcctgtactttggggaaacagatggagctcttgggcccagccagctgggcctgggacttctgcctctgccgcctccagagtggcctggcagctttgccagaggctgtggagcgagggtagtaggagcttttcccagagtgctgtgacttgcatgatggattctaggctgtggcaagggctgatttctgggatagggggagggttggaaaatttatttttatgaaacagagggaagactttattgttgttatttttggtaaaataaaaggcaaactaaagcaaaaaaaaaaaaaaaa

SEQ ID NO: 224089 - DNA, 1000 bp, Homo Sapiens
tgaaaaagatgtacatatttacgaagcacagaagagaaaccagaaggaggacttataattggctataatttataagaatgttgtcattgagtgtgtcacttaaggtcttagactgcaaatctaaccatatttaatgaaatgtcttactgtacaaaaagtctaagccaaaggttctcaggggagaaagcacatgtgcagttttaaaacaaagcagtgctttgtcccattgctgtgatttttagtcagactttactcagtctgaaatgcaattaacattaaaggattaagtgtgagatttcgatttatgctatttgtgtatcccatactcctcccttttaataaacagtttccactgatgatatgaagggccggtataaagaagtctttaaatgagtaagctttcttggtaagattaaatcttacaaattatttttaaaaccttgtgatatatacaatgtttagctgagttttctaattttctggatgtaaaacaaaaggtttaacctatacattccttgagctgttagtgctatttaaatcttttgccctgtttaggtcctaaacacttttagttgagtaggatatgagcttttttgggtctcatatcatgctttttgccttaatttcaggtatatatatatataagtaaaggaattaagtaaaaataaaatttcagttactttttaaaagcacctgaaatctggccggatgcggtggctcatgcctgtaatcccaccactttgggaggccgaggcgggcagatcacctgaggtcgggagttcaagaccagcctggccaacatggtgaaaccccatctctactaaaaatacaaaaattagccgggcgtggtgtcgggcgcctgtagtcccagctgctcgggaggctgaggcaggggaatcgcttgaacctgggaggcggaggttgcagtgagctgagattgcgccattgtactccagcctgggggacaggagcgagactccatctcaaaaaaaaaaaaaaa

SEQ ID NO: 224090 - DNA, 1000 bp, Homo Sapiens
tctgcgacttctatacggcgctggtggccgaggcgcggcggcccgcgcccttcgaagtggtcttcgtgtcagccgacggcagctgccaggagatgctggacttcatgcgcgagctgcatggcgcctggctggcgctgcccttccacgacccctaccggcaacggagtctcgctctgttgcccaggctggagtgcagtggcgtgatcttagctcactgcaacctttgcctcctgggttcaagtgattctctagccttagcctcctgagcatctgggactacagccattgctgtgaattacgtgagggaaagatattgaagaggagttggacactccgagagtgcagctgttctccccccgcaccatccgtgtcctgcattctgcgagtctgtgctcattaacaatgtgctgtgaccatgtgactcagcaatcctgctgctgggtatatacccgaaagaaaggaaaaggaagccagtatattgaagaggtatctgcacccccatgtttattgcagcactgttcacaacagccaagatttggaagcaacctaagtgtccatcaacagatgaatggataaagaaaacgtggtacatatacacaatggagtactcttcagccattaaaaaaatgagattctgtcatttgcaataatatagatggaaaaggaggcccttatgtgaagtgaaataagccaggcacagaaagacaaacatcacatgttctcacttatttgtgggatctaatgatcaaaacaattgaactcttggacatagagagtagaaggttggttaccagaagctggaaaggaaagtggggttgggaggaaggtgggaatggttaataggtacaaaaaaatacaaagaataaataagacctaatatttgatagcacaacagtgtgactactgtcaataatcatttaattgtacatttaaaaataactataattgcattgtttgtaacacaaaagataaatgcttgaggagaaaaaaaaaaaaaaaa

SEQ ID NO: 224091 - DNA, 1000 bp, Homo Sapiens; identical to SEQ ID NO: 118614

SEQ ID NO: 224092 - DNA, 1000 bp, Homo Sapiens
cagcgacggacacaagaggaaagaggaattcttcatctgaccctatccccaccccaggcctaggcctgggcctgggctggggtcccccccactgccagctgcaaggaaccagcaaagacatttaccagagtctgggatggtgggcttctccccccaccactaacacctcagacgcttgggcagggatgggggtgttggatgcctggatctctgtaagggccagaagtgagggcccagaggtctgggtcccccagggggcaggggccaaaggtccagaccccccaagtccagtgagggcagtagggattgggttgggggaagataactgggggaaggccagggcccctaggctacaaaaccaggtcttgtggggagggggtcagtttctgggaagggtggggggggcagggaaggggaacacagatttctttgggggtcctagaccccatgccagccattgtaagagttccacagagctctgggcacttctttgcaaagccatgtttgcacggtggggggatgggtggggggagggcgtggaaatagggattctgtgtctttgtgtcataactttgatgggggcagtgagggagacagccccaacccttttctccaatcccccttccccaggttcctgggctccccttctctctaccttctcccccaacgtctgtcccatccatatttgtctctctgtccacccactcctgggggggccttccccatctctcctccaggccccccggggagggggaaaggagtttggggaggattcgtggtcttcatggttttatatataatatattaaaaaatcaaaagtctgtatgaaaatatcagattgcacccccctctccccattcctggcttttgccccctttttcttgttaaaaaacaaaaaacaaaaaacaaaaaaccacacacacattttgtacggggtggggaggggaatggggagggggtttggcaatctcactaaccaccattaaactgaggagagaac

SEQ ID NO: 224093 - DNA, 1000 bp, Homo Sapiens; identical to SEQ ID NO: 118618

SEQ ID NO: 224094 - DNA, 1000 bp, Homo Sapiens
tggtgagaagccatatcagtgtaatgaatgtggaaaagcctttaggaagagctcaactcttattagtcaccaaagaatgcatactggggagaaaccctatcactgcagtaaatgtggaaaatctttcaggtatagctcatcctttgctggtcatcagaaaactcacagtggaaataaaccgtatcagtgtcgtgactgtgggaaggcctttacaaagagctcaacccttactggacatcagagaattcatactggagaaaaaccctatcactgtaagaaatgtgggaaagcctttcggcacagctcaggccttgttgaacatcagagactccatactggggaaaaaccttataaatgtaatgaatgtgggaaagcttttccccgaagttcagcccttaagcaacataagaaaattcataataaagaaagagccatgaaatgtagttagtgtggcaaattgtgcagagtagtttattccttctgaccatcatagaggagacattaaataaattatgcatttaacagaaatactctgtacttctgagagaacacatcacttgtgaggatattcattgtgaggttctactagtgaaatatttgaagaaactaaatgtatgtcagtatggaagtacttatagcatactgtgtgctaattgaaaagaatgaggtggagctgtaaatactgtacaaagccaggcatggtggcatatgcctgtagtcccagttacttgggaggctgagacaggattgcttaagcccaggagtttgagtctgtaatgcactatgattgtgcatgtgaatagccactgcactccagcctgggcaacatagcaagactccatctctaagtaaaaaaatacaacagtagaagtatacccatgataatatacccaatatacccttgttaaagaagcaagtttcaggaaatctatattatatgcattcaaaaagacctggacaaataaagaccaatcttaacagcaaaaaaaaaaaaaaaaaa

SEQ ID NO: 224095 - DNA, 1000 bp, Homo Sapiens
tgactatttggaactatcaaagaattttgatacaatatttttacgaaacattccgcaatttactctggcaaacaggactcaaggtcgaagattcataactctcatcgataacttttatgatctcaaggtgcgtataatttgctctgcgtcgactcctatatcaagcttatttttgcatcaacatcatgacagtgagttggagcaaagcagaatactgatggatgatttggggctgagccaggattcagcagaaggactctccatgtttaccggagaagaggaaatctttgcatttcagcgcacaatttcccgactcacggaaatgcagactgaacagtactggaatgaaggagacagaaccaagaagtaactgccacttttgcataaataaaactctagacaaatggttaacgcaggcagaactccttattgtgggacttgaaggaatcattttctcatcattaattatgcactttgtcctctggaccattttaatctaaaattgctctcaaggatctagtggattagtaagttaaacacttaacattttttaggtctgctttttcttatttggccttatttctgcaccatgaaattaaaatcatctcattcctgaagatgaatgtaggaccagacattttagcttcacattaaaccacctgaatgaaccttgaatgcacaagtaaatgcaagacgtctggataccttcaagctttggctgcatggtggtggcatgttagaaatacatcttttataatgggggaagaatgccctatgtttcaattcaaaacaaagacagttttccaatctgatataaactaaaagggataatattttagaatatgggcttatatgtggtttttttttttggttatgaattacagtaaatctcccaggccttcagatttctacataatggaagaatatgtttttaaccctgagatcaagtttagtaggcaggacttgatctcaagtggtcacaaagttttctaaaaaaaaa

SEQ ID NO: 224096 - DNA, 1000 bp, Homo Sapiens
tggtattccttgagtcataggtattaataataaaagcctcaatgcagcttctccatgtagttcctctcctacaagccaggtggattctggtcctaactaaagagatgggagttcacctgagggcaagaagtacccaggatgcccaaacagccgcacaggtgtcctgtgcttcctgtgagacttcctgggggaaatatacaaactaatatattttttaatgtttacgtcatttacactgctgcttttctcatattctgcttttaattacttgtagtaaatcatttgtttgggcttcaagcactgtcttccatctgcatcttccagatttatcatgagtgatcttgttctactgttaaagatgtcaagcctaaaaagtaataaagtttttatttggctgttgaaccttgatgtagcccctactacatacactacaagttatgccttctggctactacagaatctccgcagaccttttagttatgagtagaagcaataagaaggtgtccttatggtcttaggaataatagttccaatgtattggcataatttgtttgaatgtctttattttgatattaacaccggcataaatctatttttgctaccagatgatagctattttcatttgctctattttcctctgcattgtactaatctgttactcagtgttagtcttcatttttctgtgttggaaacctgcgtcatgtaaatatctgcaaatcatgacagtctaaagtgcaaaccattttcagagactttggggaatgcagtgatcagaagtggctaatttattttatttctgattattttatccagagggtacttttttaatggatatttgtaaatcttccacttaaccactgaaaattattttgttttaatcccacccttccatccatacctctgcctccccaaaaagctcctattaatttgcttatccccctcatgtagctagttgaatgtgaataaataacatggaaaaaaaaaaaaaaaaaaaaaaaaa

SEQ ID NO: 224097 - DNA, 991 bp, Homo Sapiens
acggggggcgatgagccgatccttgggcgggtttgccccgccggagtaatccggaagaggcctcttattagggctctggtggcggcggtggcggacacttggggtctggacgcaacggcggcgggagcatgaacgcccctccagccttcgagtcgttcttgctcttcgagggcgagaagatcaccattaacaaggacaccaaggtacccaaggcctgcttattcaccatcaacaaagaagaccacacactgggaaacatcattaaatcacaactcctaaaagacccgcaagtgctatttgctggctacaaagtcccccaccccttggagcacaagatcatcatccgagtgcagaccacgccggactacagcccccaggaagcctttaccaacgccatcaccgacctcatcagtgagctgtccctgctggaggagcgcttccgggtgagggcggggcctggaggggcagacggggtgggctggacactggcccgtgtgcccaggcctgggacagccctggcctgtttcttcggaggtcctcagggagaggcggcggtgatggaagaacagggacttccaccacaggctccaggacatgtggactgaggggctgtggagtctgggcctgtggctcccgtctgccccatgggacttctgtagtgctgcagggtccctcgggtgctgtgggccagatccgggcggggacctactgtcctttgggggtgctcttctacgtcccttgtcggtgattggcaaggcctggtccttccaggcctctgggaggcagctcaccccagggtggcccacacctgttcctagcagggcgcctgggaatctagaacagtttagaggggaaagagccacagcaaagaaaagccgaggcagggtgatcacgaggtcaggagttcaagaccagcctggcaaacatggtgaagccctgtttctactaaaaatacaaaaattagctaggcatggtggcatgtgctgtagtc

SEQ ID NO: 224098 - DNA, 1000 bp, Homo Sapiens; identical to SEQ ID NO: 118619

SEQ ID NO: 224099 - DNA, 1000 bp, Homo Sapiens; identical to SEQ ID NO: 118619

SEQ ID NO: 224100 - DNA, 1000 bp, Homo Sapiens; identical to SEQ ID NO: 118620

SEQ ID NO: 224101 - DNA, 1000 bp, Homo Sapiens
cgggctgcaggacgccgctgaggacccagaggcccccgagggctcggcccagacccccgcggcgcccctcgacggggccaacgtgagctgcagccccaggcctggggctccgccggccgcgattggggcccgggtcttctcgacggtgacggctgtctcggtgctgctgctgctgctcctggggctgctgcgtccgctgcgccgacggtgcggggcgctggggcagggcctgagggcggaccggtggtggggagctggagccccagaagggaacagagctaggaaggaactcctgggttcttaagggagcgaggctttgggtccacgcacaggatcgcgcgcgggatcgcaggtagagcaggacgctgcagcgggattggaccggctcggctgatgtctgctccctctctaggagctgtctgctggctccgggaaaagggcccccggcgctgggggcttccaggggccccaggagaagctgggctgtgtggtaccaacagccccgaggggtggccttgccctgctcccccggggacccccaggctgagggttctgccgcgggctaccggcctctgagtgcctccagccagagctccctgcgctcgctcatctccgctctctgactctgggccccgagggtccgctgggcccgccgccggcgagatggacacctgagatgctgtgctgcgccctgcctcggccttgcgcctgtgtaggggcagctcggcctctggtcgccttggggagaccaaaagtcggacaggaaacatctggtgctattatctgggacttggcctgaccgtgggggtccagatggtccaggccctctccatggacctgtatgtgggggtggtctctggtttcggaggtctttgaacccctctgggggtggtcctggactgccgtcctcagtgagaggtcacaggtcagcaaaaacagtcaaaaaacccccacagattttgaataaaggatctactttggtaaaaaaaaaaaaaaaaaa

SEQ ID NO: 224102 - DNA, 1000 bp, Homo Sapiens
gactttgaagtaaaaccttttttcttgctactgaaaaaaatggagttgttttgggtggtaaagtgttaaggaatagggacagctggtcacacaaggaactcttgaaggccacatgtgaaaacctgtcacttgcacagaggccagtcccactaaggtgaccagagtgggctccaagcacaaactgccattggctatagatgggactgtgtccccccaaaattcatgtgttggagccttaaccctcaatgtgatggtatttgagatggggcctttggtaagggaagtttagatgaggtcacgagggtaggaccctcatgatgggatgagtccccttacaagacctctggcttgggccgggcgtggtggctcacacctgtaatcccaacactttgggaggccaaggcaggtagatcacttgatgccaggagttccagaccaggctggccgacatggtgaaaccccatctctactaaaaaatataaaaattagccgggctttgtggcatgtgcctgtaatcccagctatttggcaggctgaggcatgagaatcgcttgaacccaggaggtggaggttacagtgagctgagagtgccccactgcactccagcctgggtgacagagcgagactttgtcccaaaacaaaataggtgaggggatagcgaatgcactcagggtcagcagtggagtttaaaaattgtctcttttcaacttatttaaatgacagcacctgagaagaggaaccgttttacactggatgtttctcatgtagaacaagaaatctttctggaattgatgtttacatgtctgttgttggtcatctctcctgtgtcttaaatactttaatgttggaagagcatagtgtttgggctagtgggtttctgacagcccatgggaatgccctgaaactactgtatctgatgtttgttttcgatgaggttccatgttttgttttcttgggaataaattaatatattgttttccaaaaaaaaaaaaaaaaaaaa

SEQ ID NO: 224103 - DNA, 1000 bp, Homo Sapiens
gcaaatggtgtttcattggaattaccaagtgcttagaacttgctggctttcccataggtggtaaaggggtctgagctcacaccgagttgtgcttggcttgcttgtgcagctccaggcacccggtgggcactctggtggtgtttgtggtgaactgaattgaatccattgttgggcttaagttactgaaattggaacaccctttgtccttctcggcgggggcttcctggtctgtgctttacttggcttttttccttcccgtcttagcctcacccccttgtcaaccagattgagttgctatagcttgatgcagggacccagtgaagtttctccgttaaagattgggagtcgtcgaaatgtttagattcttttaggaaaggaattattttccccccttttacagggtagtaacttctccacagaagtgccaatatggcaaaattacacaagaaaacagtattgcaatgacaccattacataaggaacattgaactgttagaggagtgctcttccaaacaaaacaaaaatgtctctaggtttagtcagagctttcacaagtaataacctttctgtattaaaatcagagtaaccctttctgtattgagtgcagtgttttttactcttttctcatgcacatgttacgttggagaaaatgtttacaaaaatggttttgttacactaatgcgcaccacatatttatggtttattttaagtgactttttatgggttatttaggttttcgtcttagttgtagcacacttaccctaattttgccaattattaatttgctaaatagtaatacaaatgacaaactgcattaaatttactaattataaaagctgcaaagcagactggtggcaagtacacagcccttttttttgcagtgctaacttgtctactgtgtattatgaaaattactgttgtccccccacccttttttccttaaataaagtaaaaatgacacctaaaaaaaaaaaaaaaaaaaaaaaaaaaaaaaaaaaaa

SEQ ID NO: 224104 - DNA, 1000 bp, Homo Sapiens
tttctggacaccgacaccatctgctacagggtggaggagcccgagacattagtggaacttcaaaggaatgagtgggatccaatcatcgaatgggctgagaaaagatacggcgtggagatcagctcctccaccagcataatgggacccagcatccctgccaaaactcgggaggtgctcgtcagccacctggcatcttacaacacatgggctttacaagggattgagtttgtagctgcccagctcaagtccatggtgctaaccttgggcctgattgacctgcgcctgacagtggagcaggccgtgctgctgtcacgcctggaggaggagtaccagatccagaagtggggcaacattgagtgggcccatgactatgagctgcaggagctgcgggcccgcaccgccgccggcaccctcttcatccatctctgctccgagagcaccacagtcaagcacaagctcctgaaggagtgaggcctgggcagagcacactcagcaggatagaggcagtgcagccacagctcccccggccttcagggctccccagcctgtggggctggcttccttggcttttggggactcggcctcagcgtcaccctgagattccccccgagacacagtgcgctagtacggctgtccggaggtcagcctgatttcaacccaggtgcccctggcctggccagcagtgaatgtaggagatgaattgtgcaagtgactttctctcgactctgattttattaaatatttctccaccctggaaatgtgctgagccctgttttcacgtatgcctctgcacttctccattcttcctgttttgtctaggttccagagggttaaacagcttatctcccatggcgtgtttggatatctgctgcctgtggtcaggaaccttgcactggggaaacaatcatgtaatccacagacaactctatttgtgttcttcagcctcagcctgaaggcttttttttggctggcttttaatcaaacaatcttttgaaacaat

SEQ ID NO: 224105 - DNA, 1000 bp, Homo Sapiens
agatgatggcagaataattgtgaagtatttgccaccaaatgtcacaagtctgattcaaccaatgagccagggagttctagccactgtaaaaagatactatcgagcaggacttctccagaaatacatggatgaaggaaatgacccaaaaatattttggaagaacttgacagtgttggatgcaatttatgaagtgtcaagagcttggaacatggtaaaatcaagtaccataaccaaagcatggaaaaaacttttccctggcaatgaagagaattcaggtatgaacattgatgaaggagccattttagcagctaatttagcaacagttttacagaacacagaagaatgtgaacatgttgacattgagaatattgatcagtggttcgactctcggagcagtgactcaagctgtcaggtgctgactgacagtgaaagtgctgaggaccagaccaaggctgctgagcaaaagccttccagtaagagtagaaaaacagaactgaatccagagaagcatattagccataaagcggcacttgaatggactgaaaatttactggattatcttgaacaacaagatgacatgcttctgtctgataaattggtattaaggaggcttcggaccataataagaaaaaaacagaagatccaaaataacaaaaatcattaataaggctcttaagtatttcagtgtatctgcatctttgtgactatctgcagtgaaactttgcttgtttgaagtcctgtggattccaaagccaaatacattttataaatgattttggaattagatgtcagtttggattacttaaattacaactctttaatgttgactctagtcattgggcattgacgtgtaacttgtctttctactgtttctaatatctattaattagatcataaggtacctgaggccagggatcttgtgtctgttgtgcctgaatttggcgtgtctaataaaggcccatgcacactataggcactcaataaaacttacatttttatg

SEQ ID NO: 224106 - DNA, 1000 bp, Homo Sapiens
ggctcagagaaacttcctttgcttgtcattggaaaaaagagaactccacattgtttcaaaggtttaaaatcattgcctgtgtgttatgaagctaacagaatggcatggatgacctccgatgtatttgaacaatggatgcgaaagcttgatgaggaatttcaagcccagcaacgaagagtggtgatttttgttgagtcttttccagcacatccagaggtaaagaacctaaaatccattgagttagcattctttccatcatgtttatcttccaaatgtatagctatgaaacaaggtgttattaaaagccttaaaatcaaatatcgacactgtcttatcaagaaatttttaagctctgttgaaggtagcaaagaatttacattttcactactagatgcagttgatacattgcatctttgctggagggctgtaaccccagagactattgttaaaagctatgaagaggcaggattcaaatctcaaaagggagaaagtgacataacaaatgcagagaaggatactggtctggatttggttgctgatgctctgggggcaggagtagaatttcctgaaggtttatctatagaagaatatgctgccctggatgatgatttggagacatgtgaagcagcaccaaatggtgattccatatgcaccaaagaaagtaaatcggatgaaactggattttacacttctgatgaagaggatgatgatggatctccaggaactgaactccctttaccatcaaaatctgaggcaataactgctttagatactctgaaaaaatttctcagaagtcaagatatgaatgacggacttcaaaattctttagcagaccttgaaaattttattaactctttatcacctaagtaactatgtattgtacatctaaagagtaatagcttttcctgatacattttattatataaggtatgtaaaggagttgtaccacaccacttaaacataaaaaatggaaaactgctaaaaaaaaaaaaaaaaaaaa

SEQ ID NO: 224107 - DNA, 1000 bp, Homo Sapiens
cttccaggtcctggagaccgccagctacaatggagtgctcatctggaagattcgcgactacaagcggcggaagcaggaggccgtcatggggaagaccctgtccctttacagccagcctttctacactggttactttggctataagatgtgtgccagggtctacctgaacggggacgggatggggaaggggacgcacttgtcgctgttttttgtcatcatgcgtggagaatatgatgccctgcttccttggccgtttaagcagaaagtgacactcatgctgatggatcaggggtcctctcgacgtcatttgggagatgcattcaagcccgaccccaacagcagcagcttcaagaagcccactggagagatgaatatcgcctctggctgcccagtctttgtggcccaaactgttctagaaaatgggacatatattaaagatgatacaatttttattaaagtcatagtggatacttcggatctgcccgatccctgataagtagctggggaggtggatttagcagaaggcaactcctctgggggatttgaaccggtctgtcttcactgaggtcctcgcgctcagaaaaggaccttgtgagacggaggaagcggcagaaggcggacgcgtgccggcgggaggagccacgcgtgagcacacctgacacgttttataatagactagccacacttcactctgaagaattatttatccttcaacaagataaatattgctgtcagagaaggttttcattttcatttttaaagatctagttaattaaggtggaaaacatatatgctaaacaaaagaaacatgatttttcttccttaaacttgaacaccaaaaaaacacacacacacacacacgtggggatagctggacatgtcagcatgttaagtaaaaggagaatttatgaaatagtaatgcaattctgatatcttctttctaaaattcaagagtgcaattttgtttcaaatacagtatattgtctatttttaaggcctc

SEQ ID NO: 224108 - DNA, 1000 bp, Homo Sapiens; identical to SEQ ID NO: 118624

SEQ ID NO: 224109 - DNA, 1000 bp, Homo Sapiens
actgcagaggtatctactgctggcacatagggcagcccaacgaagccttaaagttcctgaacaaggcacgcaaggacagcacttggggccagagcgccatctaccacatggtgcagatctgtctgaatccagacaacgaggttgtgggcggagaggcttttgagaaccagggagctgagagcaactacacagagaagaaggagttggagcagcagggtgtgagcaccgccgagaaactgctgcgtgagttttacccacattcagactccagccagacccagctgcggctgctgcagggcctctgccggctggccaccagggagaaggctaacatggaggctgcgctgggcagcttcatccagatagcgcaggctgagaaggacagcgtccctgccctgctggccttggcacaagcctacgtgttcctgaagcagatccccaaggcgcgtatgcagttgaagcgcctggccaagaccccctgggtgctgagtgaggctgaggacctggagaagagctggctcctgctggctgacatttactgccagggcagcaagttcgacctcgccttagaactgctgcggcgctgtgtgcaatacaacaagtcctgctacaaggcctatgagtacatgggcttcatcatggagaaggagcagtcctacaaggatgcagtcaccaactacaaactggcctggaagtacagtcatcacgccaaccctgccattggtttcaaacttgctttcaactacctgaaggacaagaaatttgtggaggccatcgaaatctgcaacgatgtcctcagggagcaccccgactaccccaagatcagggaggaaattttggaaaaggcccgaaagtccctgaggccctagctggggtcaaggggcctagaccagtagaagccatcaacctactgaagttgtgtggagggatggaaagtgggtcagtggagaagggattcagaaaatgacacattcttccccaaaaaaaaaaaaaaaaaaaa

SEQ ID NO: 224110 - DNA, 1000 bp, Homo Sapiens
agtgatctgcccgcctcggcctcccaaagtgctgagattacaggcatgacccaccgcgtcaagcctctgacaactattgaatttgtaagctgctatgcaaatgggcatttatataaacttgtgatgtttcttgtcagaattctgagtactctgtgaagaacagaaatgatcatattcttatgcatctatctgtatgggtctgaaggtgtatatacaaactgagatgagtccttatgactcttgataagcctgagtttaacaacaacaaaaatgccaagttgtcctgagcccttctgcgttgttatgccacttccctactgctcatatgcacgctggctcccctgggcacgcaaggatgagtatgggccatgggcccctgtagagctgcttacctggtgatgaccatgcaccttacaatttctgaacagttaaccctatagaagcatgctttatatgagtgtcttctgggaagaggaaccttcttaatctcttctgtgggattttcaaaatgctaaagactcacactgcagcaatcatcccagatgattaaattcaaagaaataggttcacaacaggaatatactgaagaactagagtgtcactgctggtgaactgtggcacggttgctcaacacatcacctcggacaaattcaggaagcatttctttagcccacaagtccagacccaggtgctctgtatgtttgtttttaatattcatcatatccaagttcactctgtcttcctgagcagtggaagatcatattgctgtaacttcttttaagtagttgatgtggaaaacattttaaagtgaatttgtcaaaatgctggttttgtgttttatccaacttttgtgcatatatataaagtatgtcatggcatggtttgcttaggagttcagagttccttcatcatcgaaatagtgattaagtgatcccagaacaaggaatactagagtaaaaagcacctctttttcacaaaaaaaaaaaaaaaaaaaaaaaaa

SEQ ID NO: 224111 - DNA, 1000 bp, Homo Sapiens
ctggaggctgcgggccgagccaggctatgggaacatggatggggccgtgctctggtagccctggccccgggggcaggaggctctggttcctcactcctcctgcctccaccccctaccatggacacatgggtgaggccgggctccccgcctcactgcccttgagaccaaaggggcagccctggccctccctcccctctgctggccagagggtctgcatctcagcccacccccaaccccaccgtttggggtgagaagcagaatctgtgcttccccagtctccttgccccagacaaccagcatgtaagacccttcccgcttcaccattccgattcctgtcccctttggggtacttgggggagactctggctcccaggatctgttccctatttcagtgccttcctaggacacaggggactccttgacgctccccaggctttctgtgcccaggcctctgtccccagcggtgaggttgcagtgagtgaaggagaggaggtgatctgttctccctccccttctgcccatctccagcatcttcttccccttccctggccctgcagggccttctccagctccctttggttagtccctggccatccctcctgtcctggatcccttctccctaactgcaaaatgcctgcagcttccagctccttcgtccctgatcctcaagcggttccctcccgtctcagctcagcggatcccccagagtggaggaggcctctccatgaggaggggagcagcccaaggcacctgtcctctgacccaccggcagcgagtgcgcaggtgtgagtgtaagttcatgtaggagagtgtatgcgtgtgcgcctgtgccctgcttgcaggcaagcagggctccctcatgtagccccgccttccccctgctgggggtccaccacatcgctgctctttctcacagtctgcctctgatgagggcgaattgctatgacattccaagctccaataaagactgtcccagactttgaaaaaaaaaaaaaaaaaa

SEQ ID NO: 224112 - DNA, 1000 bp, Homo Sapiens; identical to SEQ ID NO: 118625

SEQ ID NO: 224113 - DNA, 1000 bp, Homo Sapiens
ctaagtctaaaggagaagactgccattatagaagagttagggttccatattgtctcaaatcagaaatcaaccaatttcctctcccctcaaactgcaagcacacacacatacaccacaccactcaacaagtgttcatgtgtccctgtgtccaggcaagaagctctcttcctgactcacatggtattttaaatggaagtgtcttgtcctaactaacaaggcaggaaaagaaccatcagagctggaaaatggacgaaatgtaacctcagagaaacaactacaggaccactcacccaagtgtaagtgactggggcaggacacctcagctgtgggtatgaaagtactgttctgttcacaaggttttgtttgagttttatgtttttcttttaaacatttctctggttcgatgggttgactgtctacagccactgttaaacatttctgaatatgcaagagaaagtcaagtgacatttgtatcttcttcagcattcgcagaccttctatagattccagcaaagggggaaaatgtatccactatctaacacttaggtagagaagggagggggtttaagcttagtgagggcaaaattactccattccaccttccgagaccagttagggttttgagagaggtttctgctcaacctgggatctggagggagagctttgatgttggtaaatctgccttgaattcattggtttaacttgcatcaaaataccatgtgagtgtgctcattctcatatatcccctaccaccatcaccaccattctgctgttcagtgtctcttgagagagcctctttgcatgttttccagaatctgtgtgtgtttttcctttcttctcctttgttctttttgctcaaaggtgtgaccagtcattgcccctctggggctttcattctccaggagaaacatcccagaaccagcactgtttagcctgatacctttctaatgtccatgtcaattttcaataaaattcaaagaaatgctaaaaaaaaaaaaaa

SEQ ID NO: 224114 - DNA, 1000 bp, Homo Sapiens
tgtgaacatgaagaccaacaaccaagatgaggagacgcccttgcacacggctgcccacttcggcctttcggagctggtggccttctacgtggaacacggggccatagtggacagcgtgaatgcccacatggagacccccctggccatcgccgcctactgggccctccgctttaaggagcaggagtacagcacggagcaccacctggtctgccgcatgctgcttgactacaaagccgaagtcaatgcccgagatgacgactttaaatctcccctccacaaggcagcctggaactgtgaccacgtgctcatgcacatgatgctggaagctggcgccgaagccaatctcatggatatcaacggctgtgctgccatccagtacgtgctgaaggtcacctccgtgcgccctgctgcccagcctgagatctgctaccagctcctgttgaaccatggggctgcccgaatataccctccacagttccataaggtgaggctctgcccagtggtcagcaggttgaggaagattcaaatggcagccttgtctgaaatctccaagtaactcaagcttgcttgaggcttgagtcctgggctaactacctctgatcctctttgaccttccattacatacctaatcctagctgtctcctcatctcatcctagtctaggtttgcttgaaattgggtgtgagagctagaatgagaaaaagagtagcaaataatttgttttgccttgtgtgaacaccagtgcactggtggcttcctgagggactgaggtaagtctgccagaaaggtgaatagtgttagacaggcatacatttgccatcttttaaacagaatgactgatctaaagatgactcagcctgctttgaaattagcttgtagccatgaaagggccacccgattttccagtttaatgaaagctaacgtttattaagtactaaaattatatttattatgtataataaataagcacactgttataagcaaaaaaaaaaaaaaaaaaa

SEQ ID NO: 224115 - DNA, 1000 bp, Homo Sapiens
tcactgttccctctggcttcccatagtggggcctgggagggttcccctggccttaaaaggggcccaagccccatctcatcctggcacgccctactccactgccctggcagcagcaggtgtggccaatggaggggggtgctggcccccaggattcccccagccaaactgtctttgtcaccacgtggggctcacttttcatccttccccaacttccctagtccccgtactaggttggacagcccccttcggctacaggaaggcaggaggggtgagtcccctactccctcttcactgtggccacagcccccttgccctccgcctgggatctgagtacatattgtggtgatggagatgcagtcacttattgtccaggtgaggcccaagagccctgtggccgccacctgaggtgggctggggctgctcccctaaccctactttgcttccgccactcagccatttccccctcctcagatggggcaccaataacaaggagctcaccctgcccgctcccaacccccctcctgctcctccctgccccccaaggttctggttccatttttcctctgttcacaaactacctctggacagttgtgttgttttttgttcaatgttccattcttcgacatccgtcattgctgctgctaccagcgccaaatgttcatcctcattgcctcctgttctgcccacgatcccctcccccaagatactctttgtggggaagaggggctggggcatggcaggctgggtgaccgactaccccagtcccagggaaggtggggccctgcccctaggatgctgcagcagagtgagcaagggggcccgaatcgaccataaagggtgtaggggccacctcctccccctgttctgttggggaggggtagccatgatttgtcccagcctggggctccctctctggtttcctatttgcagttacttgaataaaaaaaatatccttttctggaaaaaaaaaaaaaaaaaaaaaaaaaaaaaaaaaaaaaaa

SEQ ID NO: 224116 - DNA, 1000 bp, Homo Sapiens; identical to SEQ ID NO: 118631

SEQ ID NO: 224117 - DNA, 1000 bp, Homo Sapiens
tagccctgcaccgtggccagaaacccatccacaggcaggcagtggctggggtccgggtgccccgggctgttgggctctgcttcctccctctgctcccccatgtctccctgagttctcccacctttgctcatttgtaaaatgggcaggtcaatcttcccaccccaccgtgtgggctgccccaaccccaaatgtgcccagggaggggggggaacccaaggcacaggccccgcccctgcccccaagcagcactgggctactggctcacagaagcacctttggttctgcaggtcatgcccctccctgcagggaagggaaagctggtggtagaggctgggcacagactgacgtccagaagaagtcccttggccctgctagggtggcaccagacttctctggtcccacaggacagccagtggcctcccaacttggttctgggcccccgcctgcaagcacacatggcaaggagggctttagcaggctcacataaccgagtggcaaggcccctgctcccagaggctggatttgaatgaactccgggcctgtttggggaggtgaagctgccaggtgtgcacaggggcctcccaggctcctggctccaccagccaaggaggtgggggcaagggtcagggcaatgggggacaatgccgctcagggtgcagtgagctcccctgggaaaaccgaagccagcaagaccaggagagggccacctcactgggcctgcctcccccacctcctgggcctctctgacctcagctcctagaccctggacccttggctgggactcagcattttccagtctttttcaggggtagacaggggagcctgggttaaactttaccactgtgccctggcccaggcatcaccaacacggcctccctgcagctgccctgccaccgacagaccccgattaaacccacacctggccttggcctcccctgctctataccttgcatggtttttgcctcacttggaataaaattccaactcctcaaaaaaaaaa

SEQ ID NO: 224118 - DNA, 1000 bp, Homo Sapiens
gtttattgccctgggcttggatatgtctcaagacactcatgtgaatcatgccaccccaaatcctggcttatcaagtcccagactataaattatgaactcccattagcttggtactaacatatacttgatgtaggtatttatggacttgatgatccaagaatattatattcttcaaaatggttaagctccatggagttagatgactacacttaatgctattaagttgaacttttgaatgtcaactaatttgcaatcaattaaagatacatatgcctagaaattttgaaatttcggtatatttatccagttaaagggctaaattatataagcaaacactactttttttaaaacgtctggactcaaaaaatgctttgttccatgttttaaaatttttaagtagcagtctcaaagttgcttagctgtttattttgctatgttcctagctaagagtttggttataggagttcatcaataacttattttttgtacagttcccacattagatactgtttaaaagttcttttttaaactcaattttttttagaaacataagagaaatatttagatacatacaaatgtttttatgattaaataattttatgcttattttctgatacgtgttatttaggtaatcatgccctgtacatttagaggttgctaactgacaatgttaagaaatttaaaaaaaaaaaaagcctgggcatgatggctcatgcttgtaatctgaacatttgggaggctgaggcaggaagatcgcttgaggtccagagtttaagtccagcctggaaacatagttagacctcatctctacaaaaataaaaaataaaaataaaaaaaacttagctaggcatgttgccacatacttgtagtcccagttattagggaagctgaggtgggaggatagcttaagcccaggatttcaaggctgcattgagctatgattacaccactgcactccagcctgggtaacagagtgaaatcttgtctctgggaaaaaaaa

SEQ ID NO: 224119 - DNA, 1000 bp, Homo Sapiens
tgcacccaaacctggggagagagctagactcttgtctcaaaaaaaaaaaaaaaaaaaaaaaaaaagctccaaagtcacctctgtcaaagccacagtctgttccttccacagccacaagatggcgacatgagcctaagtcaagtcctgtccctcaacccacgcccctcgctggcttccccacctctctcaggatgaaagcccaagtcatcagggtggcacgtcaggccctgcacgatgtgccccgtcacctccctgccctcccgtcatttgccctgggtctcccccaccagaatgggagccaggagtcccagccaggcacaggaccgagcctggctctcggtcagcaggtgatgagctgggagcagctccttggccagaggcttacaggcaacaagcggccaggcagggtctggccccgggctgctgggctcacaaagtcacactagaccacagtgacgatctctgtaagcacaaagggactccgatgtgggtggggtgaggagagaggcagccccggcctgaccggccccccgccccgcccccaccccgcccccaggcctaaatgtgcacagcatgctcaagcaccagacgctggtcctgacgctgcccaccgtcgccttcctggaggacaagctgctctggcaggactcacgttacagacccctctaccccttcagcctgccctacagcgacttcccccgacccctaccccacgctacccagggcccagcggccaccccgtaccactgttgatgtgaagcacctcttctgagccaggccgagcccctggccgacttgggagcctcaggcccacgcccacccttcgaggaaggtgtcacctggaccccttcattccacggaggaagctgaggccacagggagcggccatcgccattgggaaggggcgactccacggaaagcccagacgggcttctgcatccattccctctttttgtttttaaaataaattgtatttttgaatcaaggaggataaagataa

SEQ ID NO: 224120 - DNA, 1000 bp, Homo Sapiens
cacgcatgtttatagcagcacaattcacaattgcaaaaatgtggaaccagcccaactgcccatcagtcaacaagtggataaagaaattgtggtgtatctatacgtaccatggaatactactcagccaggaacgaaataatggcattcacagcaacctggatggatttggagaccattattctaagtgaagtaactcaggaatggaaaaccaaacatcgtatgttctcaattataagagggagctaagctatgaggacgcaaaggcatgagaatgatacaatggactttggggactctggggaaaggacgggaggcgggtgagggataaaaaactacacactgggtccgagcacggtggctcatgcctataatcccagcactttgggaggccaaggcaggtagattatgaggtcgggagttcgaaaccagcctggccaacaaggtgagaccccccccatctctactaaaataattagccgggcctggtggcgcatccctgtaatcccagctactttacttgggaggctgaggcaggagaattgcttgaactcgggaggcggatgttgcagtgagccaatatcgcaccactgcactccagcctgggcaacagagcaagactccgtctcgaaaaaaaaaataaattttaaaaactacacattgggtacaatgtacactcctcgggtgatgggtgcaccaaaatctcaaaaatcactactaaggaacttatccatgtaaccaaacaccacctgttccccaagaactattgaaataagaaaaaagaaaaaaaaaaaatcactgattgcaggtcaccctaacagatataataatgaaaaagtctgagatgttgcgagaattaccaaaatgtgatgcagacacgaaatgagcatgtgctgttggaaaagtggaacagatagacttgctggagacagggttgccacaaagtttcaatttgtaaaaaatgtgatatctatgaaatgcaataaagtgaagtccaataaaa

SEQ ID NO: 224121 - DNA, 1000 bp, Homo Sapiens
ccatttctccctatcactcaatttcattttaatcattggacacctttgcgttttgctgctaacagtgtgtgtatgtcaccctctttatatctggttttcccacttgtctgaagctctcctgatcttagaacctggagctgcagattcctccatgtcagctcccatcacggccccaaagacagagtcacttggttgctgagtcacttggttgctggaaaaatctttggggaaagctggtataagctacacactgacctgtccccagtgtttccaggtaatgacttggcactccagagaaagtttcatgctgttgcgtgtggtggctccaagccaagcacctggcatgcaggtcagcccttcccagcgggcgtggcgtcgtcctcttcacagatgccacgttgcagccccaaggcctcaccattttgcgttttttagaaacccattttcttggtcatttataaagctgctttatagatatctttgatcctggcatgccttggtttcctctcccttccctctttccaatcctggtttcctaacctcctcttgtagtaattctcaactcaactcaaagtcccaagaatttggaatggtaggatgctgtgcggggagctcgaggctgaggcataatcactgcttcggttctgctcatcaggggacacgctcccttactcatggcagccatgtttgattgtcacagagccccccgaatactctgtctatagtgacacactgtaggtgtcataaattttaagaaacctgcttttaagtactatttataggtttttctgttatacttgcaacctagttttaaaatacatgaggattttatgaaagctttatacagacatttataggaaactcattctttgattttaggtgccatttaaattgataacacttactttataaaaagatgctttttgtctggatagagccttatagtttaaaatatcttcatatattgccatttgatcaaataaatttcttacttagaaaa

SEQ ID NO: 224122 - DNA, 1000 bp, Homo Sapiens
tggagtcccagccagatcagcggtttacccacccgctacctcacctcctacaggaagaagacagtcctaggagctgatagccagaggaggagtccatccacagggccctggccatgcccacaggatcccctaggggctgcccgctgtgttgtccacggggctgagttctggagccagtaccggattaatgtgactgaggtgaacccactgggtgccagcacacgcctgctggatgtgagcttgcagagcatcttgcgccctgacccaccccagggcctgcgggtagagtcagtaccaggttacccccgacgcctgcgagccagctggacataccctgcctcctggccgtgccagccccacttcctgctcaagttccgtttgcagtaccgtccggcgcagcatccagcctggtccacggtggagccagctggactggaggaggtgatcacagatgctgtggctgggctgccccatgctgtacgagtcagtgcccgggactttctagatgctggcacctggagcacctggagcccggaggcctggggaactccgagcactgggaccataccaaaggagataccagcatggggccagctacacacgcagccagaggtggagcctcaggtggacagccctgctcctccaaggccctccctccaaccacaccctcggctacttgatcacagggactctgtggagcaggtagctgtgctggcgtctttgggaatcctttctttcctgggactggtggctggggccctggcactggggctctggtaagtgactgccattggtccctcagcctctgatcctcacacatgctctgatgcccatagaccacattcatctccacccttcatgactgcccgctgaacctgtctgattctggaactacctccccatacctccatcccccatgccccacttgattttaactgattcctctcctgaccctttactaataaaccctttggcggagactgagataacccacaaaaaa

SEQ ID NO: 224123 - DNA, 1000 bp, Homo Sapiens
gaaggctagccagttattcaatagcaccttgataatgtgggcaaacccttctacaaagtttttgttttgaaaagagcaaaagtaaaaagtgttctgtagtgaggttacatatcaggaacatatgagttgagcagagtaatttggtagtgtaagtcgatgcaaaaatacttctatggtacctattacaagctgaccaagataaaaagaagtatgtaacccactgtgctgtcaagcatcatgattccgggcagttttcattttactgtggattttgctatacttatgcaaggacttacactaacctcctggctgtaaatcaaacaaggtgactgaaagtggcatttatgttttcacaagggacatgcttagaagtgtgaccataaagtcacatcttgtacaatctgctcatgtgtttcatctgtagtaatatagccacaaactggacaagaagctgggtatttgggtttaaaatagattttcttgactctgagcttgtatcagtatttctagcttttgttttgtctgacagtattgcagtcttgaaaatcctgagagctaaaaaactgaaaggaatttttccacaccttgaagtcacagtgttttagagtaaaactattttgtgtacaattgtgtttttaaaatagttagtagatcactatggtatttcaattttctttagttttaattgaaaatgtttgcttttaaaactgataggtattgttggaaagcaggatgaagcctgagccagtggaaaagcttgttacagaaaaaacattttgtgttattgctgtggtgtgcatgatttgcaaagattaagtgcattttctctgtctatactgattattgtatatagaggatgttataaatatacatatacatttttgccattatgtaaatcccatgatttcaactgtaaacatctgtccattggtgtagctttacaaaccattcactgattttgtgtaatttaacaatagatatgaaataaagtttaaattac

SEQ ID NO: 224124 - DNA, 1000 bp, Homo Sapiens
tcaaaggtctttccattttgctccgggggacagtacaagaaaaactcaattgggcatttaatctgtatgacataaataaagatggctacatcactaaagaggaaatgcttgatataatgaaagcaatatacgatatgatgggtaaatgtacatatcctgtcctcaaagaagatgctcccagacaacacgttgaaacattttttcagaaaatggacaaaaataaagatggggttgttaccatagatgagttcattgaaagctgccaaaaagatgaaaacataatgcgctccatgcagctctttgaaaatgtgatttaacttgtcaaatagatcctgaatccaacagacaaatgtgaactattctaccacccttaaagttggagctaccacttttagcatagattgctcagcttgacactgaagcatattatgcaaacaagctttgttttaatataaagcaatccccaaaagatttgagctttcagttataaatttgcatccttttcataatgccactgagttcaggggatggtctaactcatttcatactctgtgaatattcaaaagtaatagaatctggcatatagttttattggttccttagccatgggattattgaggctttcacatatcagtgattttaaaatatcagtgttttttgctactcatttgtatgtattcagtcctaggattttgaatggttttctaatatagtgacatctgcatttaatttccagaaattaaattaattttcatgtttgaatgctgtaattccatttaaattccatttatatactttaaggaaacaagattacaacaattaaaaaaacacatagttccagtttctatggccttcccaccttctgttagaaattagttttatctggcatttttaaacatttaaaaattattaaacatttaaaaattagtttattatcagatatcagcatatgcctaataaaacttattttaataagcaaaaaaaaaaaaaaaaaaaaaaa

SEQ ID NO: 224125 - DNA, 1000 bp, Homo Sapiens
atttatgcaggtagtcattccaggagtttttggtcttttctgtctcaaggcattgtgtgttttgttccgggactggtttgggtgggacaaagttagaattgcctgaagatcacacattcagactgttgtgtctgtggagttttaggagtggggggtgacctttctggtctttgcacttccatcctctcccacttccatctggcatcccacgcgttgtcccctgcacttctggaaggcacagggtgctgctgcctcctggtctttgcctttgctgggccttctgtgcaggacgctcagcctcagggctcagaaggtgccagtccggtcccaggtcccttgtcccttccacagaggccttcctagaagatgcatctagagtgtcagccttatcagtgtttaagatttgtcttttatttttaatttttttgagacagaatctcactctctcgcccaggctggagtgcaacggtacgatcttggctcagtgcaacctccgcctcctgggttcaagcgattctcgtgcctcagcctccggagtagctgggattgcaggcacccgccaccacgcctggctaatttttgtatttttagtagagacggggtttcaccatgttggtcaggctggtctcgaactcctgacctcaggtgatccaccttggcctccgaaagtgctgggattacaggcgtgagccaccagccaggccaagctattcttttaaagtaagcttcctgacgacatgaaataattgggggttttgttgtttagttacattaggctttgctatatccccaggccaaatagcatgtgacacaggacagccatagtatagtgtgtcactcgtggttggtgtcctttcatgcttctgccctgtcaaaggtccctatttgaaatgtgttataatacaaacaaggaagcacattgtgtacaaaatacttatgtatttatgaatccatgaccaaattaaatatgaaaccttatataaaaaaaaaaaaaaaaaaa

SEQ ID NO: 224126 - DNA, 1000 bp, Homo Sapiens
accaaacatagaaccaggctgggttttctgtggaataaagtggtgagcctgacgttaatcgtttacatgttgaaattctcttgccacttagtgaagcagtcattggggtaacaatgctacgttttgtgtccgattcagtgtgtaaacgttggtggttctatgtaatactgaccccaaggaaagacgatcagatacaaagaaagatggttaaatctaggaggttgggtgtttgggggttttgttgatgttgttctgattgggataattcagaaattcctaatattatctttcgacagaatgaccaccctaaaacaaatactgaatgcctttaaaaaaaaaaaagttgtggttttttgtttttttttttttttttttttggtcgagaactactaatttcatgctatttctttctctctccctttgttgttatttgatttgggggaagggagtgaggcttgtgcagatttgagctatctgaagacatgaacagaagtcaaataccagccatatcagtagagccttccattcaaaagtgaacacacttggtagctgaaccatatctgagcagcgtgattctgttgtcttgcatatgttattctctcaggctgtggatctttgttacagctctaggaaactgtagaaatacaatgctatgtagcttttccaccccatggtctctagtgctgcctatcaacttgtccccttttttcccaataacctgtcttccaggtggtacagttagctgtcactcagctgacaccatgatgtggcagcagagagggaaacctacaagtggtttgcctcattgcctttgccacatctgaagttctcagcagcactaccttagacttcatgagctaataggaaactttttatggtgtaaatgctgtaagactttgtacatacttcagttgttatgaaatctttaaagaaaaaaagaaaaagttacgctaataaattgctgtggtgcaggcaaaaaaaaaaaaaaaaaaaaaaaaaa

SEQ ID NO: 224127 - DNA, 1000 bp, Homo Sapiens
catagccctggtttagaaacatgttatagcagttcttggtatagagcaaactagaagaaccagcaatcattccactgtcctgccaaggtacacctcagtactccccttcccaactgaagtggtatgaggctagctctttccaaaagcattcaagtttggcttctgatgtgactcagaatttaggaaccagatgctagatcaaataagctctgaaaatctgaggaacattgtaggaaaggtttgttaagcatctcttaagtgccatgatgagcataacagccggccgtcgtggctcacgcctgtaatcccagcactttgggaggccaaggtgggaggatgacaaggtcaggagttcaagaccagcctggccaacatgctgaaacctcacctctactaaaaatacaaaaattagctgggcatggtggcacatgcctgtaatcccagctacttgggaggctgaggcaggagaatcgcttgaacccgggaggcggaggttgcagtgagccaagacagtgccagtgcactccagcctcggtgacagcgcaaggctccgtctcaataattaaaaaaaaaaaaaaaaaaaaaaaggccgggcgcagtggctcaagcctgtaatcccagcactttgggaggctgaggcgggcagatcacctgaggtcaggagttttgagatcagccttggcaacacggtgaaaccccatctctactaaaaatacaaaattagccaagcatgctggcacatgcctgtaatcccagctactcgggaggctgaggtacgagaatcgcttgaacctgggaggcagaggatgcagtgagccgagatcacgccattgcactccagcctgggggacaagagtgaatctgtgtctcaccaaaaaaaaaaagaaaaagaaagatgcttaacaaaggttaccataagccacaaattcataaccacttatccttccagtttcaagtagaatatattcataacctcaataaagttctccctgctcccaaa

SEQ ID NO: 224128 - DNA, 1000 bp, Homo Sapiens
ccattcctacacatcttgccagcccaccagcagccccactcacagctgctgcaccaccaccttccgcaggatgcacagagtggctcgggtcagcgcagccagcccagctccctgcagcccaagtctcaagcctccaaacctgcctacggcaactctccatactggacaaactaaacccagaagagaggggtgggctggggcaaggcttatcctgggcaggagagaacacacgagcacgtatttgggagcccagtgccctttcctagaattcccgacatgtgtcagccatgcctctgtggggagtctgcctcccagactggctactgtatgtaatgtatttatgtatgtatttgtaaatgtgatagaagtctgggggggagttgggggatggcggcagatgttagccaggtctgccctccccattcaagccccttctccactgtagcaaaataagcacccccaccccatctgccttcaggtcttcttcacagcctgcactgcccagtgggccactaggggcagtctctggaagggctggttcaaggctgtttgggtataggggtcaggtaccaatgaagaatcacgacttgtctcactcctttggaaattgttttctttcctgtgtaattacttcatacctctgtttttgagaaactgttccgtttgtcatctgtcatggtctccttccaccaaatcttcatctgggaatagcagcggtatccctccacccaagtatggccacctgtttgtcttcatatagaacaggggcttctggtctggtcatgtccctagagacttactagagactggctgaccatgaaaaaaaaaaaaataatctgagttattcagccagtcagctcccctttaaaaatctaaggtatctccaagcaacacatctccattctagttgtcttgaaccacgtgggcaactgtttcaggggttttctcttgcccaatccccacctaataaagttctgagagcatgaaaaaaaaaaaaaaa

SEQ ID NO: 224129 - DNA, 1000 bp, Homo Sapiens
ttggctgcagcggccggcaagaccctggaagagaccgtggctatggaaacggccaaggctgtcttggaatgtcctgagcagccctccgagtcgagcctctgcccccgagtttctgagtgacctgggttgatatagattgaccttgtgggcagcgagagtcacagacaagacagcaagcaggatggagcactaccggaaagctggctctgtagagctcccagcgccttccccaatgccccagctacctcctgatacccttgagatgcgggtccgagatggcagcaaaattcgcaacctgctggggttggctctgggtcggttggagggcggcagtgctcggcatgtagtgttctcaggttctggcagggctgcaggaaaggctgtcagctgcgctgagattgtcaagcggcgggtcccaggcctgcaccagctcaccaagctacgtttccttcagactgaggacagctgggtcccagcctcacctgacacagggctagaccccctcacagtgcgccgccatgtgcctgcagtgtgggtgctgctcagccgggaccccctggaccccaatgagtgtggttaccaacccccaggagcaccccctggcctgggttccatgcccagctccagctgtggccctcgttcccgaagaagggctcgagacacccgatcgtgaagacctgctgagccagcctgttctccgggcctgaatgtctggggtgcttgtgccttttctgagaagcgttgtgactgctcaacatccccatcaaggtttgagtccacaaaagtggacctccctatcatgcttccccttccctctagcatgtgggaagggactgctgtgaagaatgacagatgtggggcctctgccaagttctgcattgctaaataagggcttcctctgccttctacctacagtgcatttgaactgccttctgaaagaggtccagggagggatttaggaaataaagtttctacctatttgaaaaaaaaaaaaaaaaaa

SEQ ID NO: 224130 - DNA, 1000 bp, Homo Sapiens
atgtctcaatctcaattgatcaaatctacaagaagctctgcagaaacaacagcgcccaagcatttcttagcccagagaaccctgaagaaccttacttggagggaattagctataactgtgtggccccaggcaaacggtttatgccaatggacaatttgtcagggggagaaaagtgtgtggcagccttggctctcctgtttgctgtgcacagttttcgtcctgccccattctttgttttagatgaagtggatgcagccctagacaatactaacataggcaaagtgtcaagttacatcaaagagcaaactcaagaccagtttcagatgatagtcatctccctaaaagaagagttctattccagagccgacgcgctgatcggcatctatcctgagtacgatgactgcatgttcagccgagttttgaccctagatctttctcagtatccagacactgaaggccaagaaagcagcaagagacacggagagtcccgctaggggcagtcctgcagcagtcacctgatcactgttcagttcccactctaatactcacacagctcctccacaggagacttctggagcaagcaggaccagcctggtgcaccctttaagagaaaccttagtcgttctagccaaagaggctgtggctcactttagttgagtgttcagacctcattctagtagggaaagttttcagtgagagctggtgtcaaatgagtttttaaaaaacaaacaaaaggtacaattttgtactataattctaacttctattttgaaataagctagtttggttggaaaaattttgaattcagcttcatcttcactctgatcttgccttgcacccaagtaatcttgaagggaacttctcttggtttttaaacatactagttataagattgttaataaactgttgaacctggcttttgggaaattgtttcagagaaactatgttagtattgaaaatatcaataaaaaatgttctaatttcaaaaaaaaaaaaaaaa

SEQ ID NO: 224131 - DNA, 1000 bp, Homo Sapiens
tattttgtggttttaggccaaagaaaaagaagagaggcttttaagaaggcaaatcaatagagaaaaacttgaagaaaaacgaaaacagaaagcagaaaagacaaagtcttcaaaaaccaagggtcaaggcaggagtagtgtggacttagaagaatcatcaacaaagagtttggaacctaaagccgccagaattaaagaagtccttaaagaacggaaagttttagaaaaaaaagtagccttaagcaaaaagagaaaaaaagattcaaggaatgttgaagagaactccaaaaagaaacagcaatatgaagaagattccaaagaaacccttaaaacaagtgagcattgtgaaaaggaaaaaatttcttcttcaaaggagctgaagcatgttcatgcaaaaagtgaaccaagtaaacctgcccggagactttcagagtctttgcatgtagttgacgaaaacaaaaatgaatccaaattagaaagagaacataaaagacggacatctacccctgttatcatggagggggtacaggaagagactgacacaagagatgtaaaaaggcaagtagaacgctcagaaatttgcaccgaagagccccagaaacagaaaagcacacttaaaaacgaaaagcatctaaagaaagatgattctgaaacaccacatttgaaaagcctacttaagaaagaggtgaaatcctccaaggagaagcctgaaagagagaaaactccatcggaagacaaattgtctgtgaaacataaatataaaggtgattgtatgcataaaacaggtgatgagactgagcttcactcttctgagaaaggtttaaaagtagaggaaaatattcaaaagcaaagtcaacaaacaaagctttcttcagatgataaaaccgaacgaaaaagtaaacataggaatgaaaggaaattatcagtattaggcaaagatggaaagccagtttctgaatatattataaaaacagatgagaatgttcgtaaagaaaaaaaa

SEQ ID NO: 224132 - DNA, 1000 bp, Homo Sapiens; identical to SEQ ID NO: 118551

SEQ ID NO: 224133 - DNA, 1000 bp, Homo Sapiens
tttggctacccctttgtgataatcgctggcaagagggccctggaggaccctgcacattttgaggtttggtgtcagaacactggtgaggtggccttcctcaccaaagatggagtcatggatttactgaccccagtgcagactgtctaaatgcccccagcccacccctgcccccatttgcagccttggtgttcgttctaacactgcattttcctacacccctttcctggactgctctctccagaaacagcacagctcatggagggtgagatcatgttagggaaatcaatttttatctagtcatttgttcagattatttgtatttaaagtcattaacttgatccctttctccagactggccatgccgccatatacctttccttttgtattccattgtggaagcttctaggaggctgagaagcaggagatccaagctccagtcctgggtgttaccctgaggggggaagtcacttcccttctctcagctgagtttttcacgtgtaagatgagaatggctgatggctgagagcccaccaaccttccccaccccgtatcagtttgaccacgggccttttgctacattctatccagagagcaggcctgccagcccctctccactgagaagttgggctgagagtatggggaaaagaatcaagagacctgactgccgccaactcactagtgacttagatacatcccctccccctgctggggcctcagtttccccatctgtaacttgagaaaatagaactagatctgtaaagtctggaactagatctgtaacgtccttataggtgtcactagggggttccatgagaggtgtgtgacaggcagtctgattcctctcattctccatagtctgtttcctggaaagtcgatgtaattaactgatggcccaaaaactacctcaagagacctggccctgttaagacggcttaaccactgagatcccgttctattgatttaataaagtcaaactattggaaaaaaaaaaaaaaaaaaa

SEQ ID NO: 224134 - DNA, 1000 bp, Homo Sapiens
tggtggggctctgatctgctaaggttggtgtccttatagggagagaccccagagagcttgttccctccctccctgtgcatgcaaacaagagggcatgggagcacacagagagatggcagccacctacaagccaagaggagaagcctcacaatcaaactctcgctgctggcgagagtcttggactctgtcttggacttccagcctccagactgtgagaaacaaatttctgttgtttcagcttctcagtctctggtgttttgttattgcagcctgagaacacagctgtacgattatttgtcaaacagaaaacactgatacttaacaatgctaatgcaattatttatttgcttttcagtctctacaaaacgttctaaaacactaatctaaatattaacagtaaaatatttgcataactaatggaaactaagaaatcatatgaccaatatttcacttattggtaatcttactctactgatttccccccagactgtgatttttgaacttccttgcctttctcctgtctttctgtgtttattcatggaatcccagttatctgggcttgaaattgcaggctctcctaacttaagcaaaatctgacagatcagcaaaatgagataaatgtttcttttttctttctgactgcattaaatcagatacaactcagcattaaaaagctatctttgtaaatgttgttactaataaattagtcttataagatccctggactttggagttgttgcaatgtctttgagagtaattctttaaaagtctaatttcgactggttgtatctctttatgatttattgccccactaacaacatttgaaacaatataatattttaaaatgtataaataattatgaatttttgtttagaacaaagaggattactgatatttgtttccctatgaatggcaaaggtttagcttactactgcatttctgttttaaataaaaagttgagagtttgtgtctcattaaactaaaaaaaaaaaaaaaaaaa

SEQ ID NO: 224135 - DNA, 1000 bp, Homo Sapiens
gaatgtgtgtcgaacctctacattgtgaagttgcactatgtaccatactctaaaatgaaataagaactctttatgtctgtgagagagtgtgtgtgtgtgtgtgcgtgcgtgtgtgcttgtgggggttgggtagtgtgtgtgtattttctctggctttaaaattttaaaacaaacaaacaaaaaagccatagagagcagaacttgccgagggtcatttattgcccaagtttacaagagtagcgatacaagtttttgcaaattgaatttgcctcagatatatctgtcctaatgcttatatttgcacaagtatgtaaaatatcgtgttgaggatcattctttgttggaaatactgctcttgctgaactgtcttgaccattgactatgacacagtttcttatttatgtaaatacttgcatcacagtggccgacaggcattggatgcagaacctagagccagttttcaggaacaattgtaaacctgacatggtactgtgcatctattcataaaacactcaaaactgtgaaaatatggtttacatttaattgtacataaaggtaaagggagaactcaattcagtaccagttagtttgtacattttagggggcttttcacattaactgcccatttgtgtaatttatagtttgacatgatgtgtttgttttaaaaaaaaatgcatagtataaacccattaaggatctgggaaaagagaagaagtttaatatagaactaagcttttaaagtttgtttttgtttttaattctggtctcggtgcaaatgttagttatgccttattcatatcacagttagatcaccatgctgcaacatggtttatattcatgctgccctagaaacttttgtaattatttgttgcaaatttgtgactgtccttattaactttcttttatgtaagtaatttgtaaaagtttcttaaaatttttgcttttgcttatttaattttgaataaaagctaaattcctaataaaaaaaaaaaaaaaaaaa

SEQ ID NO: 224136 - DNA, 1000 bp, Homo Sapiens; identical to SEQ ID NO: 118654

SEQ ID NO: 224137 - DNA, 1000 bp, Homo Sapiens
ggttggcaaactttttctgtaaagggccagattgtaaatatttcagactgtgtggaccaaaaggccacatacagtctctgtcataactactcaactctgtttctgaagcaggaaagccaccacagacagtacataaaggaatatgtgtagctgggttcccaggccagacaaaacagatggtgaccagacttggcccctgggctgtagtttgctgacccctcatctaaaaaataggctatactacaattgcacttccagcactttgagaacgagttgaataccaagaattattcaatggttcctccagtaacttctgctagaaacacagaatttggtctgtatctgacactagaacaaaacttgagggtaaataaacattgaattagaatgaatcatagaaaactgattagaagaatacttgatgtttatgatgattgtggtacaagatagttttaagtatgttctaaatatttgtctgctgtagtctatttgctgtatatgctgaaatttttgtatgccatttagtatttttatagtttaggaaaatattttctaagaccagttttagatgactcttattcctgtagtaatattcaatttgctgtacctgcttggtggttagaaggaggctagaagatgaattcaggcactttcttccaataaaactaattatggctcattccctttgacaagctgtagaactggattcatttttaaaccattttcatcagtttcaaatggtaaattctgattgatttttaaatgcgtttttggaagaactttgctattaggtagtttacagatctttataaggtgttttatatattagaagcaattataattacatctgtgatttctgaactaatggtgctaattcagagaaatggaaagtgaaagtgagattctctgttgtcatcggcattccaactttttctctttgtttttgtccagtgttgcatttgaatatgtctgtttctataaataaattttttaagaataa

SEQ ID NO: 224138 - DNA, 1000 bp, Homo Sapiens
ctttttcgggcaccgaggtattaactgcagcagaaaaagacgagcttttgttatcagttccacggggttgccctagagagaaaacaggcaaactcacaggttagaagacatacagaaacagggctggtgtgtcccccatagtctgcatgctgtgccggaacattctttggcagaaggagcctccggctggggggagctcccctggaggtgggactggcccttgcacctgcctgacccttgagctccaggctcctgccagctggaggtgaaactgtgcttgtatccccagccacgaagagctggaccagcttcaagtacatgtccacagcaacatgcaggaaggcctcttccctgatggccgcgtcttcatggaagtaggagagaagactagaggtaaagacatagtgacaaatggctacagactgctggaaaggtagcaggtgatgccaagggatactgctcatctgtggagcagaggcacagacaacccttcccatctggcgggacccagaggtgctgagatgggggtctgggaaacactgcccagccctgaccagccctgtgggtggaggtacctgtaaaaagcgaaaggcagcagcctggtgtgctgatccggggccacacggaggaggagccgccccagcctgaggtctgcaacaccaagaagtggctcaggcaactctggacatctctgcctattatcagtgctggggacacccctgggggtcgggacgtgtaccctgggaggcctggctgtggggatagtgtggggcgaacagcctgagctgaggatacccaggtacctgtcagcagctgggagaggatgggggggtcgacctcttgcaggagggtgggtgtggtgcagagagaggcagtccccatgataggcccattggtcctggggttgaccagtgagccagtaaattatcttattgctttaaacaagtttgtgcttaatctgtcccaactaaaatggagcttataaacttacttagcaagg

SEQ ID NO: 224139 - DNA, 1000 bp, Homo Sapiens
ctgggctgggccttggggcagctcccacattcccagggattttccccatcagtctgtcccttgggttttgcaagctactctgcacctgggctggcctcagttgaaggatcatgcagtagatagaggggaggcagggagagcttgtgggaccttcagtgctgactttagccaccatttccattcctatacaggatgtgaaggtcagaaggcagccaattgttggtttaattttttttttttttgagacagtctgtttcccaggctggagtgtagtgatacagtcacagctcactgtagcctcgaccttccaggctcaaaagatgctcccaccacagcctcccaggtagtgagtagctggtactacaggtgtgtgctgccacacccgactaatttttttgtagagacggggtttcgctgttcccaggctggtctcaaactcctgggctcaagtgaacctcccgcctcggcctcccaaagtgctgggattcctttctttatttctgtagaatctattttatggttggcattttgggggaagatttcgatgggttccacattcttgctttagttgttgtagagggatttgggtgtttctacccaaggcattggtctagcttttcctacaatgaacctatctttggaggtttaagctccccaccttcccccactgtggtgacctgtggccacttgcagaagggatggtgcctgacccactgccctagccccacgctatgcaccaaacttgttctccccgtcctggtccagggctggggtctttagagactgacagcctctgccccaggcctgagtccttagcaagggttgggtaaggaggttttaagggagaaggtccagtccttagcccttgaaatacaaagctcttctgacactgaatttggatgcaccttgttttatataataaatcgtgtttcacagaaaaaaaaaaaaaaaaaaaaaaaaaaaaaaaaaaaaaaaaaaaaaaaaaaaaaaaaaaaaaaaa

SEQ ID NO: 224140 - DNA, 1000 bp, Homo Sapiens
aggtctccttttgcatttttgctgagaccagctgggtcatggagaccctgacccagcagctctagaggaattaagacaaagacacagaaatagagtgcagagtgggaatcggggctcacagccttcagagctgagagccttgaacagagtttgacccacatatttattgacagtaagcctgtgataaacattatttctatagattatagattagctaaaagtattccttacaagaaagaaagggacaggctctggcttgttatctgcaacaggaacatgtccttaaggcacaaatcactcatggtattgtttgtggtttaggaatgcctgagcagttttccagttttccaccgtgggtgggccaggtgttccttgccctcattcgggtaaaccagcaacctccagcatgggtgtcatagccatcacgagcatgtcacagtgccgcagagattttgtttatgggcagtttctcatggcctgtttatgtccaaatttggggggcctgttctgagcacattttcctgtaagcactcaggaagaatgaagcttcctgtgtcctttaacactttaagtacagatcttagtgatacataaccagttttatctctctcaagctctaccttccgcaaagtgctagaatacagttctgccaagttcttcactacttcgtatcaagggttgtattttctttatttcccaatagcatgttcctcattccccaatgacacctcaccaggatcacccttaccaaccttacttccagcttgcacatcagaatttttccagcctcatttgtcagtttcaaatctgcttcacatttttagtttttttgtttgtttgtttttaatctgccttaatgagctcaggccactatcacaaaataccacagaccaaatggcttacaaatttgttaattttaaataaatgaggttaaaaacaaaaaaaaaaaaaaaaaaaaaaaaaaaaaaaaaaaaaaaaaaaaaaaaaaaaaaaaaaaaaa

SEQ ID NO: 224141 - DNA, 1000 bp, Homo Sapiens; identical to SEQ ID NO: 118655

SEQ ID NO: 224142 - DNA, 1000 bp, Homo Sapiens
agacccctggcagagcctggacccctttgactccttggagtctaagcccttcaagaaaggtaggccttactctgtgcccccctgtgtggaggaggctctgggacagaagcgcaagaggaagggcgctgccaagctgcaggacttccaccagtggtacctggctgcctatgcagaccatgccgacagcaggcggcttcggcgaaagggtccgtcctttgcagacatggaggtcctgtactggacacacgtgaaggagcagttggaaactctccggaagctgcagaggagggaggtggctgagcagtggctgcggcctgcagaggaggaccacctggaggattccctggaagacctgggggcagcagatgactttctagagcctgaggagtacatggagcccgagggagcagaccccagggaagccgctgaccttgacgcagtgccgatgtccctgagctacgaggagctggttcgaaggaatgtggagctcttcatcgccacctcccagaagtttgtccaggagacagagctgagccagcgcatcagggactgggaggacacagtgcagcctctgctccaggagcaggagcagcatgtgccctttgacatccacacctatggggaccagctggtctcacggttcccccagctcaatgagtggtgtccctttgcggagctggtggctggccagccggccttcgaggtgtgtcgttccatgctggcctccctgcagctggccaatgactacacagtggagataacccagcagcccgggctggagatggccgtggacaccatgtccctgagactgctcacgcaccagcgagcgcacaagcgcttccagacctacgctgccccctccatggcccagccctgagtggggagcaccgaggcaggggtgggggaatgtgtactgaggagccgtgcgtctgctcctggctggcccggcctaataaagcagtgttgccatctcaaaaaaaaaaaaaaaaaaaaaaaaaaa

SEQ ID NO: 224143 - DNA, 1000 bp, Homo Sapiens
ctctgtcttcattctcttacagcttatctttccttaggttgatggtgcctcatttaataagtagatctctacttaagctaaaggattatgatcatatggtgttggagactattagctattagatttttctcaaaatatgagttttgtacaatggaatgaaaaagtgacttcatatacgtaagactggtgcctaagaatgacttgaatgttatcagtactaccacagaactataatatacattgccttttctcagcagcatttgaattcaacttatttatttcctctatttgtagctttttgttctagagtcagaacaggtggactttgctttgaatattttagatgggacaaaaattgttcatcttcggaatttatttaaagaaagatctactggtacagggtgtaaaaatacttacaagaatatgatttttttgtttgttcatgcaaacagatcctttacccaatatatattctggaggtaggtatactggtgcaacccatttgccagctgtgtgactttgagtaagttcttaatttctcagagtttcagtgttctcatctataaaattatgtctccaattgtgagtacctagcactgtacctgatacatagtaaactcacaataaatatttcttaaacatagattttgttaggaatacaggcttgataacacagtccttacccttacaatgtaatgttagagataaaggagcaaatagagtcacgcatcacttaatgacagagatatgttctgagaaatgcatcgttaggtgatattgtcattgtgtaaacatcatgttgtttacttccacaaacctagatggtatagcctaccagtacacctaggctatatggtatagtctgttgctcctaggctacaaacccgtatagcatgttactgtcctgcatgctatagacagttggaacatgtagacttgtataaacactgcacacttaacctatactaaatttattgaaaatatttttcttggccaggcg

SEQ ID NO: 224144 - DNA, 1000 bp, Homo Sapiens
gtgggaaatccttctgccagagctcttacctgatcttgcacaagaggacacacaccggagagaagccctacgaatgcagtgaatgtggaaaggccttcagtgaccgttcctctctcaaccagcacgagcgaactcacacgggcgagaacccctatgaatgtaagcagtgtgggagagccttcagccagaggtcttcccttgtgaggcacgagagaactcacactggagagaaaccctacaggtgtcaggaatgtgggaaagccttcagccagagctcatcccttgtcacacatcagaaaactcacagcagccagaaaacctataaaatcattgactgcgggaaagcgttctaccagaacagacatcttattggatattagcaattgcacgctgctttgtaagccactttttagtactctgacacatacatgtggttatcttttgccctgttgtgatggataatttgaaaagaagtgggtttatgtcaccttctcaccttcttataagaaagctctgagaatgggcatttttgtattttgttgttgttgttgagatggagtctgccacccaggctggagtccagtggcgtgatcatacctcactgcagcttcaacttcctgggctcaagtaatcctcccaccccagcctcccaggtagctagtactataggtgtgcaccaccacgcccagcaaatttttaaatttattatagagtgggaggcagggtgcggtggctcatgcctataatcctaacactttaggaggccgaggcgggtggatcatgaggtcaggagatcgagaccatcctggctaacacagtgaaaccctgtctctactaaaaatacaaaaaagtagccgggcgtggtggtgggcgcctgtagtcccaactactcaggaggctgaggcaggagaatggtgtgaacccgggaggtggagcttgcagtgagccaagatcgcaccactgcactccagcctgggagacagagcgagactccgtctcg

SEQ ID NO: 224145 - DNA, 1000 bp, Homo Sapiens; identical to SEQ ID NO: 118656

SEQ ID NO: 224146 - DNA, 1000 bp, Homo Sapiens
atttcgtcgaggcctcaccagtgcttgctgcccggcaggacgtggcctaccatgtggtgtaccgtgaggggcccctataccccgtcaaccagcttcgcaacgtggccttggcccaggccctcacgccttacgtcttcctcagtgacattgacttcctgcctgcctattctctctacgactacctcagggcctccattgagcagctggggctgggcagccggcgcaaggcagcactggtggtgccggcatttgagaccctgcgctaccgcttcagcttcccccattccaaggtggagctgttggccttgctggatgcgggcactctctacaccttcaggtaccacgagtggccccgaggccacgcacccacagactatgcccgctggcgggaggctcaggccccgtaccgtgtgcaatgggcggccaactatgaaccctacgtggtggtgccacgagactgtccccgctatgatcctcgctttgtgggcttcggctggaacaaagtggcccacattgtggagctggatgcccaggaatatgagctcctggtgctgcccgaggccttcaccatccatctgccccacgctccaagcctggacatctcccgcttccgctccagccccacctatcgtgactgcctccaggccctcaaggacgaattccaccaggacttgtcccgccaccatggggctgctgccctcaaatacctcccagccctgcagcagccccagagccctgcccgaggctgaggctgggccggcgctgcccctcatcttagcattgggcagacaccagggcaacctgccctccgccatccctgctatttaaattatttaaggtctctgggaagggctggggcagagcatctgtggggtggggtcttccccttgctgctattgtatggctggggactggtctctctctgccccagccagtttggggctggttcccccatcttgaattgtttatccctttttcataattaaagttttaaaacatc

SEQ ID NO: 224147 - DNA, 1000 bp, Homo Sapiens
taggtacatatataactgttgaagaaattatttatcctactcccaaagttgtagctggcactccacagagtccttttctaaatttgaattcaacatgcttaacatctggtttgaaatagtaaaagcagaatcatgagtcttctatttttgtcccatttctgaaaattatcaagataactagtaaaatacattgctatatacataaaaatggtaacaaactctgttttctttggcacgatattaatattttggaagtaatcataactctttaccagtagtggtaaacctatggaaaatccttgcttttaagtgttagcaatagttcaaaaaattaagttctgaaaattgaaaaaattaaaatgtaaaaaaattaaagaataaaaatacttctattattcttttatctcagtaagaaataccttaaccaagttatctctcttttatgctactcttttgccactcacttgagaacagaataggatttcaacaataagagaataaaataagaacatgtataacaaaaagctctctccagatcatccctgtgaatgccaaagtaaactttatgtacagtgtaaaaaaaaaaaatctcagttatgtttttattagccaaattctaatgattggctcctggaagtatagaaaactcccattaacataatataagcatcagaaaattgcaaacactagaattaattttacactctaatggtagttgatcttcatagtcaagaggcactgttcaagatcatgacttagtgtttcaatgaaatttgaaaagggactttaaaacttatccagtgcaactcccttgtttttcgtcagaggaaaaggaggcctagaaaggttaagtaacttggtcgagaccactcagccttgagatcaagaaaacctaatcttttgactcccaggccaggatgttttatttctcacatcatgtccaagaaaaagaataaattatgttcagcttaaaaaaaaaaaaaaaaaaaaaaaaaaaaaa

SEQ ID NO: 224148 - DNA, 1000 bp, Homo Sapiens
attactttagaagatatgcagttgctctgattctgcaggtttaaaaaaaatgggaagtttgtgatatggcagaatctgtctccattggtcaaaccatacttcagtgagagccattataagtgaaatctaaaaattgatcgttttcattctctgactttggtcagacttttgcaaattatggagagaggccatcaacatattttacataaattactgtggccccatcttatttctcctcatttcttccttatgtttaaacacgcccccatctcacacacaaactgagaaaagatttgtatcaaacagaatcagaggcatatgaatggactggaaattgtgaaaaaggtataaatatcctagaccttgatcaactcactttaaactggtctctgattcctcatctgtcaaatgagtataagaccctctgtacttcccatggtgattttgaggagcacatgcataatgtatctgaaaatggcttgacaagcacttgaagccattcttactaaattattagttttgtaattcggttttatccaggaaaatattttagctcctcctatctgctgaattaatttatacagtcacatgttccatgacaccatgttttgccaaggaaaaataaagaaattcctaaatttgaaattgcccacaagatctagcctcatctggagttgctgttattgtccttgttgtctatgatttggaggatatgtaagtacttgtacatgtgctttaactctgggtgaaaaaccccaaccggtgagtctttaaaaccatattagacacattgggcaaagtactgagcagaagctttgaatgtagctgttgttattttaatgcttcgctttctaatgaactttgtacgtccttagcctctgccgggaacagagtgttcatatgctgttagaattttttattgtaaaataaaatgacaaaggctttcataccccaaaaaaaaaaaaaaaaaaaaaaaaaaaaaaaaaaaaaaaaaaaaaaa

SEQ ID NO: 224149 - DNA, 1000 bp, Homo Sapiens
gtgagacactggctgacccacactggggagaagcccttccagtgccctcgctgtgagaagagctttggccgaaaacatcacctggacaggcacctgctcacccaccagggacaaagtccccggaacagctgggacagaggaacatctgtcttctgaaatctgtttccactacagctatggtcaagtctatcagccggtgctaccaggagtcactgccagggctgccgttctcctgaaccccagtggccagaatcataagccctgaccccatccctagaaagatgaggtcccagcaatggccagagcatttctcaccagttctgtgagatagcacataaaaatagagttctttgggcaaaacttttgggaagcaatgcatcctacatgggctgatattcagcctgagctgttctcaagaggagagtggtactggcagtttatggctgaaatccattctgattggttggagtctatgctataccagttgttaaacattttgagtatcactcttgcatactgttactattatattttctctatatatagacagaaaggccattttagaatattaaaggctctgaaaatttctgcagtagacccaactgaagtttctattaaggcagtgtttcctaaatgtatttgacctcagtatcctttctatttacatcccacagaactggtgactatgaaacactctggtgaacactgggttagagagtaacaaggaaacaagagatagtgatcaggcatccagagcccccttttttatccatatgaaagccaggggggccagaccttgttcatgtgtgggtctgtcttccttatgccaatcagcagtatatacatcacctctcaccctcacctgctgaaaaaataacctttttacccattattcctactcccttcatcctgcacatacatatatccagctgagagatcacactacaaggctaagagatgatctaatacccccaaatagccctggcccacacagaaaaac

SEQ ID NO: 224150 - DNA, 1000 bp, Homo Sapiens
tggcgcggacggcgggcccgaggcctcgggcgcggcgcgctcgcgagcgcagaagcagtgccgcaagtcgtcgttcgccttctaccaggcggtgcgcgacctgctacccgtgtggctgctggaggatatgcgcgccagcgaggccttccactgggacgagcgcgggcgcgccgccgcctactcgccctctgaggcgctgctctacgcgctcgtgcacgaccaccaagcgtacgcgcattacctgctggccacgttcccgcggcgcgcgctcgcaccgcccagtgccggcttccgctgctgcgcggctcccgggccgcacgtggcgctggcagtgcgctacaaccgcgtgggcattctgcgccgcatcctgcgcaccttgcgcgacttcccggccgaggagcgggcgcgcgtgctggaccggcgtggctgcagccgcgtggagggcggtggcacgtcgctgcacgtggcctgtgagctggcgcgccccgagtgcctcttcctgctgctgggccacggcgcctcgcccggtctgcgggacggcggcggcctcacgcctctcgagctgctgctgcgccagctgggccgcgacgccggggccactccctccgccgccggagcccccgcctcagctcccggggagccgcgccagcgccgcctgctgctgctggacctcctggcgctgtacacccccgtgggtgccgccggctcggcccgccaggagctgctgggcgaccggccgcgctggcagcggctgctgggtgaggacaagttccagtggctggcgggcctggcgccgccctcgctcttcgcgcgcgccatgcaggtgctggtcaccgccatctctccaggccgcttccccgaggccctggacgagctgccgctgcccccattcctgcagccgttggacctcactggcaaaggctaggcccggagcaccctaggcgctggattttgggacaaaactatttttcagagcgttgtaccggcactttatatatat

SEQ ID NO: 224151 - DNA, 1000 bp, Homo Sapiens
gccgccaggacctggacccttcccagggatcattgacatctttggtattggagggggcctcttggaatatcgagccagcctccttgctggccatggctttgccacgttggctctagcttattataactttgaagatctccccaataacatggacaacatatccctggagtacttcgaagaagccgtatgctacatgcttcaacatccccaggtaaaaggcccaggcattgggcttttgggcatttctctaggagctgatatttgtctctcaatggcctcattcttgaagaatgtctcagccacagtttccatcaatggatctgggatcagtgggaacacagccatcaactataagcacagtagcattccaccattgggctatgacctgaggagaatcaaggtagctttctcaggcctcgtggacatcgtggatataaggaatgctctcgtaggagggtacaagaaccccagcatgattccaatagagaaggcccaggggcccatcctgctcattgttggtcaggatgaccataactggagaagtgagttgtatgcccaaacagtctctgaacggttacaggcccatggaaaggaaaaaccccagatcatctgttaccctgggactgggcattacatcgagcctccttacttccccctgtgcccagcttcccttcacagattactgaacaaacatgttatatggggtggggagcccagggctcattctaaggcccaggaagatgcctggaagcaaattctagccttcttctgcaaacacctgggaggtacccagaaaacagctgtccctaaattgtaatgcatttgtctgttgttgacatgagagattcaagatcagattctagtgttcagtaaccctatgtgaatcagatgtctcctggataacattaaagccatgtctttgtcattaaaaaaaaaaaaaaaaaaaaaaaaaaaaaaaaaaaaaaaaaaaaaaaaaaaaaaaaaaaaaaaaaaaaaaaaa

SEQ ID NO: 224152 - DNA, 1000 bp, Homo Sapiens
ctggtttctctgttctattaatgctttgaatttccaaatttaatatatgtagtcatgcatttaacttaatatttaattatttgatttatttaattttctatattcttacaatgtatgtatgatgtataatttaagggaaagctatgacttctcagtttcttagaatcctaggtaaataaaacaataaaaagaaaacccttacatttaaaagagctttcaggtacagaagtattgatacaactaagatcctaaatgttttaattagtgtttacttaagcctttttcaggtgaggaggtactaatgctggttatttccttgaagctttatgtggacctataaataaaaatccaatctcctgctaataggtatgcatattgtgagaaaaacgttaggagctggtagtaaaaaatgagattctatgccaaaataacttctcttcatatttgcctaggcatttcttgacctttacccacttacgcaaggagaaggaaatcataatgatgtcatgtgatcagaggaaaccatggaagggttcacgctgatagctgatagcttttacagtgctcattcctaacagtggatttacttgtaagctttcagatcaacacaaatagctgcagcctgggttaaaatataacatcactatttggcttttgttttgcatgatttttaaaagcagtactcctagggaaatggcctctgaagtatatcagtttcatctcttaccaagactgttaagaagaaactagtgggattttgaacaagttatataattgtggtctgaaaagaccctaaactgaagttctgtttaaatatagttacatgaatttctctgatactaatgtactcaacagccaggtataaactatatctcctagtaacattttccatttttgtttaatcaaatacttgcttatgaaggatttcagaaatttgtaataaatgtcagcttttgatagcatagcagtaattgacatttcaagaaaaaaaaaaaaaaaa

SEQ ID NO: 224153 - DNA, 1000 bp, Homo Sapiens
cttgggagacagctcccgtggtgcttctctttgctggggaggggtctgggcctctggttgccttgtccctgggggagtcctgggcacagcagggggatggagagtccaggccaacccttgctggaggtgggactctctgtatatggaaggctccaagggcagcaggcctaagccggccagcaggagcctttccacatttccccaccctcggaacccagacgcatgcccacatgtgctgggtagaggggtccagcctgttccagccagtgcctgaacctgtccctgagaaggaccctgtgccccaaggcccgtggctcctggcctgctccctgcagtacggagtacggggctcaggagttgggggtcctccacgtgtcccagggattctccacacgagtgtcctcaagggcctgttggtgacaccgagctccccccaccccaagctctgctggagccaatctgcggggctctgccgggtgcacggctgacctggcttcgggggcgccggccctccccttgggtgtcacagcagctgggcccacagacaggaaatgacctgacctcaaaccagatgtggaggtgcacgagaggcgcaggaacgggcagtggctgacagctgggaaggccctgagcgtcactgctgctgggcggaagggcctgtggacagcccacccaggcggcggggtcttggtgggtccagtggtaatggtgcccctcccctccattccctgtgggtgcagcccacaggctggcgaggaggtgcctctgccctaccctcgggtctggcgagggagggggcaaggtgcatccactgtgacagcccctctgggcccacaactccctgaccctggaagctgagcctgctttcctgaccctccgccccaccccctcctccccagaacactcagagggacggtcaacatcagagcacattaaacgctggtgaaaccaaaaaaaaaaaaaaaaaaaaaaaaaaaaaaaaaaaaaaaaaaaaaaaaaa

SEQ ID NO: 224154 - DNA, 1000 bp, Homo Sapiens
tctgccgccccccggggacccggggcctggggtctctgtggtgcctgcagcaggagccaggaacgcccggcaggcaggcgctctcccgccagtgtctggattctgcctcttgccaaagcagagggggctgccatcccctgcctgccacctgcccctcggctgcatgcccacagccgtacctgcctgaggacaaaggcttgcactgtctcgcccgcgcctggcccccaccccctccccggccagcctgaggctgcctgaggaaggaaggacccgcttcctgttgtcggtgctaattcctttgtaattccagccccctgtcgcctgtccagggcctgcccacccgttggaggccggtggagaagccccacctggcttatgccctggagagggtttagcgggctgggtggacccctcgcctcctccccgagggccaatgccgcggacacgttttcactgtcaccctcgttctgtctgccacctgaagggaatttgaggaccgccgccagggcaccccgtacatacacacagctgcttttgtggaggtggacgaaaggctgtggccggcagacgtggaggtccaggccggggtggggacgtgggtgggtccgaggggtgtgtggggtcggggtgggctctaggagttagcccttatccccactgaccaggcgggagccgccaggcctgcagctgggccagtgcccaggagccatcctggcgtggggccaggagcttgtccaaggccacaggcccacagcaccccctgccggcgggctccgtggggccctggagctgatgacgggggaggcccgtccgcctggcccaccaacccgcccaccttgactgcccccagaagtgtgtcttgagacctcctgggcgtgcttagaggggtgagttgtgtttggatttttagttattttctcttcagttttattagacttcttttttataaagcaataaatccattttcctccgggtaaaaaaaaaaaaaaaaaaaaaaaaa

SEQ ID NO: 224155 - DNA, 1000 bp, Homo Sapiens
ctgccgtggctgaggctcatggatcactcttttgtggtagggccacatctgccagagcctggagtctgcgaaggccgggacccggttccccggcccacagtgggggtgtgcaaacccgagagaactggattgcgtacccactgcagagtgctgaagacggggtagccacgaggttgcaaattcgtgaagaatcagcatcatgtttggcagctgagtattggagccaggagcctgccatgaggttttgagaacagagtgctgttttagagctggcagcagcatctcagcccaagagaaggttatattcccagaggatgtcagtcccaaggaccagtagctgccatcagtttggattctgaaaactaactggcatcaacactgggtgtagaaacatgcttgccttatgtatcagaggacatgctcagcagatccaagagatatatttggcaactttttctagaaaaggcacattgggtatcattcattacattcttgagtttttttgggttttttttttttttttttgagacagtcttgctgtattgcccaggctggagtgtggtggcacaatcacagctcattgcatcctcaatcacccaggcctaagcaatcctcccaccttgtagctgggactacagctcacagcacacctggctaaaattttttttttgttgagacggattctctatgttgcccaggctggtctcaggctcctgggctcagatggtcctcctgcctcagcttccaaaggcacaggccaagttgtagctttgtcccttgccatcatgcccaacaagaggttctataccttttaatgaattgactttcataaattggttatgttggtgggcaagttctttaagctggaaattgtaaattcctcctgaaatgttttttcatgcagttaccatgaactaatactacaataaaggatggtcttgggtgtcaattcttgaaaaaaaaaaaaaaaaaaaaaaaaaaaaaaaaaaaaaaaaaaaaa

SEQ ID NO: 224156 - DNA, 1000 bp, Homo Sapiens
tttcaacatcagaaaactcatactggcgagaaaccctatgaatgcaaggaatgcggaaaggcctttagcttgtatggctaccttaaacaacatcagaaaattcatactggcatgaaacactttgaatgtaaggagtgtaaaaaaacctttactttgtatagaaatcttactcgacatcagaatattcacactggtaagaaactttttgaatgtcaggaatgtgggaaggcctatagtactggctcaaaccttattcaacatcggaaaactcatactggtgagaaaccctataaatgtaaggaatgtggcaagacctttagcttgcatggatatcttaatcaacatcagaaaattcatactggtgtgaaaccctatgaatgtaaggtatgtagaaaaacctttactttctatagaaatcttactctacatcaaagtattcatactgatgagaaaccttttgaatgtaaggaatgtgggaagacctttagacgtagttcacaccttactgcacatcagagcattcatgctgataaaaaaccctatgaatgtaaagaatgtggaaaggcctttaaaatgtatggctaccttacccaacatcagaaaattcatactggtggaaaaccttatgaatgtaaagaatgtgggaaggccttcagtcgtgcttcaaaccttgttcaacatgagagaattcatactggtgagaaaccctatgtgtgtaagcagtgtgggaaaaccttcagatatggttcagcccttaaagcccatcagagaattcataggagcataaaagtgtaagaccgtaaagagtatgagcgcgccattcatcatcagacagcccacactggtgagaaatgatggaatgttagtcttataggtatggctttagcaattgagagagttcaaaatgcagatcttgccacattagaaagcattcaatgtcagtcctgttttaatggaatatctgactattcaatggtaaattaagaaaaaaaaaaaaaaa

SEQ ID NO: 224157 - DNA, 1000 bp, Homo Sapiens; identical to SEQ ID NO: 118661

SEQ ID NO: 224158 - DNA, 1000 bp, Homo Sapiens; identical to SEQ ID NO: 118662

SEQ ID NO: 224159 - DNA, 1000 bp, Homo Sapiens
tctggtttcagaaggggtgtgtgtgtgtgtgtgtgtgtgtgtttgtgtgtgtgtgtgtgtgtgtgtgtagggagcacccaggcagatctcccccaggctgagagaggactttgttacagatggtactgctggagaggtagtaagtagtgagctccccatcgtgggaggaggacaagaagggaagcagaaggtgctttggaacagtccggtgcttctgtaagaggcgtttgaacctgggcaactccccctggaataggagctgggtaaaatgaggctgaaacctactgggctgcattcccagatggttaaagcattctaagtcacgggatcaggtaggaggtcagcacaagataacgggtcataaagaacctgctgataaaacaggttgcagtaaagaagccggccaaaacccaccaataccaagatggcgacaagagtgacctctggtcgtcctcattgctacactcccaccagcgccatgacagtttacaaatgccatggctggccaggcgcggtggctcacgcctgtaatcctagcattttgggaggccaaggagggcagatcacctaaggtcaggagttcaagaccagcgtggccaacgtggcgaaaccctatctctactaaaaataacaaaattagctgggcatggtggcgcgtgcctgtaatcccagctactaggggggctgaggcaggaggatcgcttgaacccgggaggtggaggttgcagtgagctgagattgtaccattgcactccagcctgggcaacagagcgagagtctgtctcaaacaaacaaacaaaaaaacaaatgccacgtcaacatcaggacgttaacctttagaccctatatggtctaaaaaggggaggcatgaataatccaccccttgtttagcatatcatcaagaaataaccataaaaatgggcaaccagcagccctgccctgtctatggagtagccattcttttattcctttagtttcttaataaatttgctttcactgt

SEQ ID NO: 224160 - DNA, 1000 bp, Homo Sapiens
ggccctagcattggaccctaggagacctgactggaactggctccctccccatcagctcccagctgtcactctctcccacccccgggcagctgttttgcccaagaccactgctacctgtttacccaccctggtccctcccagacaagcaaggcctctgatttctttgaagcatttacttagctcaagtctgaagctgtagatactggaagacaatgcaccttggagggtgggcaggacacagttgattgtctctacagagctgtgacgggggcactgagccccgctggtgtctgtggagggggctccggtccaggtactgcactggacactgctcatccctgggtgtcaggcaggtggctgcaccctaggccaggcgcagaggcctggcaggcaggcttggcatggttggccggggcgggacgtacactgggtcgccgctagctgcaccttcgcacagatgcctccgagcagcgggtgggcgtgggccgcacagcgcggcagggccttggctaccacacgcggcatcgctccttggggtgcatgggggtgccccgggcacagtggaacgtgtctgcgaaggcggccaggttctgcagcgaccccagtaccctgtgggtgggtgggtgtgacagcaggagcattgccatcttggacaaacatggccattttaagttctccgtgattaaaaaccagcccaaaacatcagcctaatggctcatgtcagtatgagcagaaacatttcaaccatgagataaacccccatctgaccagaaacatgccaatcctgagaataacctcccctccagccagagatattccaactctgcaataaaactctccttcacacagaaacattcgcagcctgcggtaggctccccattcctaaacccttaaatgcccttagtctgtaagagaatgtccctgaccgaaatcggccagaagcccctctcaggtttattcccaaaataaacctgtctctgttggaaaaaaaaaaaaaaaa

SEQ ID NO: 224161 - DNA, 1000 bp, Homo Sapiens; identical to SEQ ID NO: 118663

SEQ ID NO: 224162 - DNA, 1000 bp, Homo Sapiens
tggaccgctgggactttgccccgccgctccccagtgacacgttcgccctggcgcacacggccacggtgcgtgccaaggaaatcttcgtcaccggcggctcgctgcgcttcctgctgttccgcttctctgcgcaggagcagcgctggtgggccggccccaccgggggcagcaaggaccgcacggccgagatggtggcggtcaacggctttctctaccgctttgacctcaaccgcagcctgggcatcgccgtgtaccgctgcagcgccagcacccggctctggtacgagtgcgccacgtaccggacgccttacccggatgccttccagtgcgccgtggtggacaacctcatctactgcgtgggacgccggagcaccctctgcttcctagcagactctgtctcacccaggtttgtgcccaaggagctgcggagtttcccggccccgcagggcaccctcctgcccaccgtcctgaccttgcccacccccgatttgcctcagaccagggtctagcagtccctcaactgagctcctcatgcaaagctgggggccaccgggctccactgccagccgtccctctgggggccatttctaggcaatcaggcaacccaggaatgtggccatcaagaggtgaattccggtcctttctcctcccctagctggggagagagggatcttagatgagtcttacccttcatgggctgcagaggccccactgcagaaaagaggaccaggagctggtgttccaaggcagaaggcattcatgtcttcagggatgaccgcccttgcttcaactctgaattcttggggggatacaccgggaccccaccaaagcttagggggcatagtctttttgcaatcacaattctaggagccagttgaccccagcagcccctcgctagttgctctggagaggggttggctctctgagccatcagtgccccttcctaaacatcagccactgggccccacctccacagttcccagaagcaccgggacacacc

SEQ ID NO: 224163 - DNA, 1000 bp, Homo Sapiens
accggcatgaagtacatcagcctgtcttagcctgagctgctttgaagaccatggggtcttgtgtttccaacttcgaagtgctgatgtggacagtttgccaatgttctcttctattgcaagttcagccagactccatgactcatctgatcccttttatggccaaatcatccttcagagtagggaacactcagacattctgtgcatgttgttcccccaaagcatggtcatcacaaagtcctgagttctggtgtgtgctcccgcctcctgggtatacagagagaaggcaggaatcaggagttccagaagcatatacatgtggctaccccagcaacaagcgcatcctgtgctcagataagctgcatggttgggagtgttttttctcgcacgttgaggcttagtggagatgggcaccactgccatttgctcagaagaaggctggtctggtcctaactgcatcccacactgcccagatcattctagaataggttatttctgaatgttttatagaatttcttaataccatcctggtttggtcagccattcctttgattggaaaggtcagctggggccagtggtgcctcaggcaggcccacacaactggccacctcttcccgttaatgaccacagcagacagaatttgagcccagcacctaaaagtacaggaatttcacttcccaccaggacttgagcacataactctatgtctgatctaggaggctgggggaagagcctcccataaaatcacacctactctgtggtaagaataaaatcccacccacctgggacttggtaatttctccaaacaggaaagctttagaaaacttgagtgaaatggagcaagcttgaaggagttagaatcttctgtgcttagggtttgctgctgctggtgagcttagaattttggggttgggaaaaagtggaaggcataagcatagaaatattttaggatattttaggatatgtgaataaagctagactcaaaccaaaaaaaaaaaaaaaa

SEQ ID NO: 224164 - DNA, 1000 bp, Homo Sapiens
tggtgaatatgaaaaggcagcttgttatgcagcaaacagtcctagaagaattcttcgaaacattggtacaatgaatacatttaaggctgttggaaaaattagaggaaagcctcttccattactcttattttttgaggccctctttatcacaagtcatgcttttccatgtcctgttgatgcagctctaaccctggaaggaatcaaatgtggattatcagaaaaacggttagatttagttaccaattgggttacacaggaaagactgacattttctgaggaggctggggatgtgatttgtgattatggggagcaggatacttataacaaggccaagtgcctggctttagctcagattatctacagtgaatgtggcctgcacaagaaagctattctttgcttgtgtaaacagggtcagactcatagggtcatggagtacatacagcagttgaaggactttactaccgatgacctgttgcagctattaatgtcatgtccccaagttgaattaattcagtgtctcactaaagagttgaatgagaaacaaccatctttatcttttggtcttgctatacttcatctgttctctgtagacatgaaaaaagttggcattaagctacttcaagaaatcaataaaggtgggatagatgcagtagaaagtcttatgataaatgattccttttgctccatagaaaagtggcaagaagtggcaaatatatgttcacagaatggctttgacaaattatctaatgacatcacgtctattcttcgatctcaggctgcagttacagaaatttctgaagaggatgacgcagtcaacctaatggaacatgtgttttggtagttctatatcttaaccagctgagggagcttgtacaacaccttatgtatgctggttgggaaaaactgattttaacgtaactaacttataaataaatctagagtaagaagatctcagaaataaatcacacttttgttatgatgaaaaaaaaaaaaaaaaaaa

SEQ ID NO: 224165 - DNA, 1000 bp, Homo Sapiens
tttcaatggttaaggctccatttctcattttcccaacttttatatgattgtctatgggcagtttgaatttctggttttcaatttattttttaatgattaattcgtattaaggcaacaagacagtacaacaaataatctctagagaggtccactttgttgctgaagtaaacgttacttgttgcaacccgaggatgggcatgaggtttggccttaggtattcctgtctgggaaaatggagggggtgatattagtggttccctgtactatatcacagccaagagagattagagagagaaaatgtagatcaaggcgagctgcctacaaattactctgtctccaaaggcaacgtgaaaagaaatgatggggaggaaaaaaccccatagattgaattagcactttgactctcacttaattcaacgattttctttcctagattggcttttcttactcttttctgttagtagatttatttataaacaccacaagaagatctcttgggatcagaattatataatatctttgaagtaaattattaaaatatcctatttaatttgaatagtgaagttttgaaaatactttgaaaaagagaagtaaaagtttaactttttaactaaagttagtatttgtttttcagaaatgaccactgaagattcattctgattatacaatatgatttttatgcataaaatttccatgtaacttgaatttaatatttttaaacagaatattttgactaatcctctattttttcatgactattcagttgtgtgtgtttattcgtaaatgttatgttttgtaattggatcacatatttctactttcagtgagagtatgccttcactatgttaaaaaataagctcataaaacagggtactttttattcaaatgcttatcattgtactttcattgctttgaaagagtaaagtaagtatactcaaaacattacgttttacaaaatcaaataaaacttttccataaaaaaaaaaaaaaaaaaaaaaaa

SEQ ID NO: 224166 - DNA, 1000 bp, Homo Sapiens; identical to SEQ ID NO: 118666

SEQ ID NO: 224167 - DNA, 1000 bp, Homo Sapiens
tttatattgaaatacgcatttctttaaatattctttgaaaatggagaatggctttagtgatattttgggttttgttagagaacctaaaatctttacactttcatctcaaagattataaaggaaaggggggtagttaagatttagaattcaagttaaatttcagaaattggggcagtcaggcatttgtatctttggtagggcaacaagtaaaacatgtagagtgcttgctatcccacttcataaagcttttacccaatcttatttctaaacctctgtgcattcttagtgtcttctcattctgaaacagaaaataaggaaaaacatttaacttagttttctaaaatcagataatcctaaacaaaaatgttagtcagggtcactaaaaagtattgcacatttatataaatacagtccttttaaaatttgacttttaaaaaacaaaagactttgtacgatattgtgtttttattgcgtttgcaatatttttatagtagcctttatgaactcagtataagtgcaagttgtttgaaaaggtgtttttattagtgcacaatagaattgtgaggttttcaatagatgtcatgagattttgtatatctacataaaatatcagtacatttttttctaatgctactggaaattttacttttcctttgcaacacataaatgatatgatgtacaaaataacagctctggttccaccagtacctaatgttgaaaacatttttaaagtaatttttaatactaactatttagtatactgtcagtactgtacatctgcacactggtgttaatagggtatatattaaattatataaagaaataagatattttgctgttattctttctacatatattattggtcagtacatcaaataatatttggctttgatatgggaaaaaacaaactttgcctatgtaatggaaataaaatattttcttttatgaaatatattagaatgcagattatactaatatcctgaaataaaactggtaattt

SEQ ID NO: 224168 - DNA, 1000 bp, Homo Sapiens
cagtaaatcaagtcccttacctatgttctgacactgaggctcttggagctatgggttagaaatccaggaggcaatatgtctttattctaatgaagtcctcatcttgcactcagaggcccactagtttgcccttctatatattaagtaaaaccaagagaaattaagaggatgatggcttctttctgtcacatgggtgctaaaccttttacaaacacttgatacttctatagagggaccaaggacctcaagtcctgggcagtctccttactgtgctactcactactgtctcaacactgtagtgagtctgtctttaacacatttccttccaataaagataaaaccacttaactcttaagtgccagtgcttagctcaagaggaaagaaggaaaatcccagaataaccgtggccactttgctataggggttacatattttaacccacctaaggttttacagactttagcctcactcaaactttatcaccctctgaggtagctggagaccacagcaggaaaaataacctgaccagtaatcacccactgattagtggcagagcgtaggacttaggggttataagcccagatccagatagggctaggtttgagccatgcctctaatgaccagctgggtgaccttgggaaagtcacttgattgctctgattcttgttttccttatctgtgaaatgggactaacaattgttacttttctcccaagattgttgggaagatttaataagataatatatagtaggcatcttgcatagtgtctgagaaataagaaatgctcagtcaatagtggctctcattagccaggcatggtggtactcgcctgtagtcccagctactcaggaggctgaggcaggaggaccgcttgagcccaggagtttgagactgtagtgcactatgatcacgcctgtgaattgccactgcactccagcctaagcaaatagcaagaccccatctattaaaaaaaaaaagtggctattattagctatatcag

SEQ ID NO: 224169 - DNA, 1000 bp, Homo Sapiens; identical to SEQ ID NO: 118669

SEQ ID NO: 224170 - DNA, 1000 bp, Homo Sapiens; identical to SEQ ID NO: 118670

SEQ ID NO: 224171 - DNA, 1000 bp, Homo Sapiens; identical to SEQ ID NO: 118671

SEQ ID NO: 224172 - DNA, 1000 bp, Homo Sapiens
gaatgatttcctttccattcttttagaagagctacctttttttttttttttccctgacagggtctggcttgcccaggctggagtgcggtggctagtcacaggtgtaataataggcactgcagtctccaactcctggcctcaagggatcctcacatcttagcctccagaatagctaggagtaggagtagctgggactacaagcatgcacagctgcacttggcttagaagtgctactttatttttatttttgagacagggtcttgtgtcatccagactggagcagtggtgcaattatggctcactgcggcctcgactttccagtctcaagtgatcctctgcctcagcctccggagtagccaggactacaggggtgtgccactagaagtgctactttttaacgaaatggtgactaatgttctggaactttcccattaaccttctgcatttagaaggaattatagatgttgagtgctccagtaaacagtgattctctttatatctgattttttttttttaaacagctaaaatgtaagtatgtatctcagagtcattttgaccattatggaagttatatctctctgtttcatgtaactaattattaatatatttcatttttagtgtgatgtaatgagagactgtgtgtgtatgttaggtgctcaataaaaactgtatggttagatttaaagaagtggcaaggcaatggaaattctacctgcatttgatctacttccaagtacaccttgaattaagttcttaaacacatcttgaattgctgggaaaagacagaaactaagaagttgacataaagcaagagtcacaaactggcagccacctggccttatcattgttctatttgatttgcaccctggttctctttctttttcccttcctccccaccttcctcccatccattgttgaatctgtggatgcagagcccacggatgtggaggggcaactatatatatgtttttccattatatatataaatgtgtgtgtatgt

SEQ ID NO: 224173 - DNA, 1000 bp, Homo Sapiens
cagattgcttgaaagttttcatgactggagcactcaacaaatggtacaagtacaatcatgatttgccagcacggataattgtgtaccgtgctggtgtaggggatggtcagctggaaacacttattgaatatgaagtcccacagctgctgagcagtgtggcagaatccggctcaaataccagctcaagactgtcggtgattgtggtcaggaagaagtgcatgccacgattctttaccgaaatgaaccgcactgtacagaaccccccacttggcactgttgtggattcagaagcaacacgtaacgaatggtatgacttttatctgatcagccaggtggcctgccggggaactgttagtcctacctactataatgtcatctatgatgacaacggcttgaagcccgaccatatgcagagacttacattcaaattgtgccacctgtactacaactggccgggcatagtcagtgtcccagcaccatgtcagtatgctcacaagctgacctttctggtggcacaaagcattcataaagaacccagtctggaattagccaaccatctcttctacctgtgatggcatgaactactggcatcactagatggacaatccaagaagaaattggtatactttgtgcaaatctgccataagctcaaggctgtgactggggaaaaagattgagcttagttttcatgtctaggaaaaaaagcaaaacaacttaatctgaaacagttttaaaaaatgtgtgttattttgttttaaagagttgtatgcttggggtaaattttcattgtcatatgtggaatttaaatataccatcatctacaaagaattccacagagttaaatatcttaagttaaacacttaaaataagtgtttgcgtgatattttgatgatagataaacagagtctaattcccaccccaaattctgctgaggttttcttaatgttgtagagcattttgtagagtggtttaaatagttgaaaataaagttcagaacatc

SEQ ID NO: 224174 - DNA, 1000 bp, Homo Sapiens
accatggccttttttgtgcattgttttttatattttaagactttaagtagaataaaccctggaaaaaagatcaagagtaaaaatatatagtcactttcacttggcttttttagacggagtctcactttgtcactcaggctcaagtgcagtggtgcaatctctgctcactgcaacatctgcctcccaggtccaagcgattctcctgcctcagcctcccgtgcagctgggattgcaggtgcgtgccaccatgcctggctaatttctggtattttgtagagacagggtttcgccatgttggccagggtggtcttgaactcctggcctcaagtgatctgcccacctcggcctcccaaagtgctgggattacagacttgagccactgcgcccaacctggagtgtttttacatattgtaaaattttatttcctaacctcaaattgttctgattttcagatgtgattttttattttgcagtgtgctgcaggaaagaatttaatggaagtgatgccaaatatttctgtattatctgacatagaacagtatcctccactgccaagacagcctgagtttggagtggaataaggtggaagacaaatgtctctgttctttggccctttaagagttagctttttacctgcacaaatggactaaaaaatctggcacaaaacattgttatgtaatgtcttatgatgtgtgcctctccctcccccaaacctgtttacagtcaattataacctgacaaacgagacttttgtaacatattattgttacatctttctgaaaccttcaaaccgtaaggaagtgttaactggcaagcagttgtactttagactttgtgagaaattcataaaggtggctgagtggatttgcatgctttagaactgtgaatagagttctaactgaaaccagaattaatttggctcttgtagcttagtaatgagtcatagctacccacaataacctaataaaaactcaagttcatcccaaaaaaaaaaaaaaaa

SEQ ID NO: 224175 - DNA, 1000 bp, Homo Sapiens
aaaaaagcaaatgtaatttgttattttacatgagtatgttacaaataataacatctctattcttacagcaatttggcccagattatctaacagacatacctgcagctttggctctttggtattgccaaacattgacaaaagtgacaatactgttggtccttgtgaatggtaaaccaatccaaataatatcagatcatgaatgatgtgcagctaatttatttgcaacttatactagcacagaaagaatgatattttttcactttgtattttcctttttcaagtgtggtcagtcacattttcccaaccaaaatttggatttctaattgaggccttttaaaaattactggctaaaaagaaggaaaatgagtttcccttgaggcaaaagttgccagcactttagattcagggagcatttatatacaactgattttttgaaaaattttctccctaataaattatcatgtgttataacatgtggagatgtgcatatataacattagacagtccactttataaatgctcaggacttttatatctatcatcttaacagtccacaactgcataccgtagctgaaaattatttccaatcatccatttttaatagcaataaagaattcataaatgatatctgaactgtagagcactgtaaagaattcatagcacaatttatttatttgtctttttgtggccaaatatcctactgtgatcacttcagtcatatcctggaccgtctttggtttactgtgactaaaatcatagcaccaaactcctttgtccatgagatttatatataatcttgtataatttggtcctatctgcttctaccatcccaacttttttcatcaaagtgtctaagaacgtattccctttacacgctgatctcctagtggagaaggatttatattaaatgctaagtaatagtaaactttcaggaactgaatcctattgggtcatggattctgcatagacaagggcaataaagcaatacctttgtaatatg

SEQ ID NO: 224176 - DNA, 1000 bp, Homo Sapiens
ttggaaggagctcttgctggccagtgtttggaggggaggatgagtgcctgtcactgaggcctcactatggttggcgtctgaagctgggcggtcgtcaggcctgtgctgagagccgcagcccctgtgcacacctaacacagggcgctccccctgctgcttccctggctcagttcttcggagctccagagtgagaaggccgcttcgtcctttttctctgggtgatgcccttagaataacactatatgcaatgtaactcacaatgttccaggaccaaagacttgatggaggggctagaggcgacccttgttgtaaaaggcgatcagaacacctgagggaggaaggggcttgcagttttcccagcccttctcgctgccaaggcagcagtggtgctgtggatgggctggggactgcgggacagagcctgctactacttgggagttggtgctgccctgtggcatggaggggtgggaggggctgagatggctgctggcccggcctccaagagttctggacaggaggcagacactgcccagatgctcggtggagggacagtgatggcctttgactcatgaggcctggagaaaagtatcaaaggtctcaccatgtaagagtgatttccgatttctctcctttcagttgtgtgaaaaaacagctggcctgggttccattagcaaattaaatcatcttcaatcttaaattagagaccagaatgatcttcaggataaaaagaacttctgaatctctgcaataggaaatgtttcgatcatgcaagtgctttcccagccaaatgtctgtgctctctgtgtcactgagggccacaggttcctctaacatctgtcactgtcacttcaccaggcaggccttggagttccatgacaaaatcacttttgtcagacaaagaatgtatcctttacttttctcaaatggaataaaattatttcttctgtggaggaaaaaaaaaaaaaaaaaaaaaaaaaaaaaaaaaaaaaaaaaaaaaaaa

SEQ ID NO: 224177 - DNA, 1000 bp, Homo Sapiens
taaatggaaacttatttagataacgtaaggctcaatatctgcgttgaccacctagatattacaggttttaatatttaaaactatttttgaattatccacaacctgtatagtgatagccatatatttaataatggaatggtggttaacagtctatttactgcacaattaattgttcactaatcaaatagaatgtggtaatttttcagactttatgatctgtttccaaaattggcacaaagtgctagggtttatatacacttatcgtaactgtatttttgtgccttggttttatcatgtcaatgcactgtactctgtaaaagttttgcagacaaaatagaaagtatgataatccgtcagaagtatgatgtaaaactggaatcctctgtattttttaaatgttctaaaaattttatcgctgttaaggtattaatcattcagtattactaatggaatagaaattcatacttttgtatggacaacaattcaaattgatattgcatttatagcactgtaagaaactttcatcttgagcaactttgtagatgatgggtgttttattttcaatcgccatatttgatcagtcattgaaaattggccccggtgctgtttgttcatctctgtatgtaaaaactgacagtgagacacaacgttctgaactgtgagggtgtcccaggaaaaagaaaaacaggaatactttaacaattaaaaagaaaaaaatgttttttgtttgccgaggactcaggaaaataaaaagcattttctatttttaggacaaatcacaaatgaagtgtctaactggctattactgtttacccatataaaatatgctgctaaagtacatattttgctgtcaatggcttgacaattttttttttcaaatttggacatgagaggttatatagggactatattatccaacacatattttcttattttgccacaaatttccacttaacaaataaaaaaaggcgaatgctgttttgcaaaaaaaaaaaaaaaa

SEQ ID NO: 224178 - DNA, 1000 bp, Homo Sapiens
tgaagctcagaagcaagctgaggaagcagacgaggccacagaggaagattctgatgatgatgaagaggatactgagatacccccaggggctgtcataacccgtgctccagtgttattccaaagcccccgtggttttgaagctggatttgagaatgaagataattcaaaacgggatatttctgaggaagtacaactgcataggacattacttgcaagatctgaaaggaaaattccccggtatcttcatcagggtaaaggcaatgagagtgactgtagatcaggaagacagtgggcaaagacctcaggggagaaaagaggaaaactgacactcccggagaagagcttaagtgaagtcctaagtcaacagagaccttgcttgggagagagaccctataaatatctcaaatacagcaaaagctttggtccaaactcccttctcatgcatcaggtatcccaccaggtggaaaatccatataaatgtgctgattgtgggaaaagcttcagtcggagtgcacgactcattagacaccggagaatccacactggagagaaaccttataaatgtcttgactgtggaaaaagtttccgtgacagttcaaatttcatcacccataggagaatccacacaggagagaaaccttatcaatgtggtgagtgtgggaaatgcttcaatcagagctcaagccttatcattcaccagagaacccacacaggagaaaagccctatcaatgtgaagagtgtggaaaaagcttcaataacagttctcattttagtgcacatcggaggatacacacaggagagagaccccatgtgtgtcctgactgtggaaagagtttcagtaagagttctgacttacgtgcacatcatagaacccacacaggagagaaaccctatgggtgtcatgactgtggtaagtgcttcagtaaaagctctgcccttaataagcacggagaaatccatgcacgggaaaagcttctgacacagtcagctcccaagtaa

SEQ ID NO: 224179 - DNA, 1000 bp, Homo Sapiens
gcggtatctgtgggtcttggtgagcctcagtgccactgagtcggtgcaggacgtgctgctcgagggccacccatcctggaagtacctgcaggaggtgcagacgctgctgctgaatgtccagcagggcctcacggatgtggaggtcagccccaaggtggaatccgtgttgtccctcttgaatgccccagggccaaacctgaagctggtgcggcccaaagccctgctggacaactgcttccgggtcatggagctgctgtactgctcctgctgtaaacaaagctccgtcctaaactggcaggactgtgaggtgccaagtcctcagtcttgcagcccagagccctcattgcagtatgcggccacccagctgtaccctccgcccccgtggtcccccagctccccgcctcactccacgggctcggtgaggccggtcagggcacagggcgagggcctcttgccctgagcaccctggatggtgactgcggataggggcagccagaccagctcccacaggagttcaactgggtctgagacttcaaggggtggtggtgggagccccccttgggagaggacccctgggaagggtgtttttcctttgagggggattctgtgccacagcagggctcagcttcctgccttccatagctgtcatggcctcacctggagcggaggggacctggggacctgaaggtggatggggacacagctcctggcttctcctggtgctgccctcactgtccccccgcctaaagggggtactgagcctcctgtggcccgcagcagtgagggcacagctgtgggttgcaggggagacagccagcacggcgtggccattctatgaccccccagcctggcagactggggagctgggggcagagggcggtgccaagtgccacatcttgccatagtggatgctcttccagtttcttttttctattaaacaccccacttcctttgaaaaaaaaaaaaaaaaaaaaaaaaaaaaaaaaaaaaaaaaaaaaaa

SEQ ID NO: 224180 - DNA, 1000 bp, Homo Sapiens; identical to SEQ ID NO: 118679

SEQ ID NO: 224181 - DNA, 1000 bp, Homo Sapiens
tggtaagtcctcctcctgctcaactcaagggactcagaccctttcttgactgagacgcatgagtgccttctggggtgagagcagccccagggtttaagttgggcgtcctagcagctgcagcagctgtgccgccgcgggtccaccgaggacgccaatcaatcaacccaacaccacaagcttggttgggtgcaagcagagggtgagcaggggctgcccctccacctggccaggacccccttcggcacccagttgcccttggccaccacctgtggcaggactcaagctcctcttctgcaaatgttcccagcctccgtgcaagtattcttaactctttacgcctaatgaacaagcacagtttttcaatggtgaagaaaaaagcaccagactttttttctttttttcctaaagaaatcccctaagccccccgcctgtaggcgggacaaacactccctgcgtggggctgtagcaacgtctgtcaggcccccttgtgtttcatctcctgcgcgcgtagagcaaatgctagagcgatttcagctgatagaaaaacaaaaatgaaaaaaaaaacacaaaaaacaaaaaacatggcacgttgctagtttacagggttttgtgagtttaaatgccttatatttaacaatcataatttatgactaacttgtagatatcgtgggttcttatttaattatttttatagttgttttgcatttttaattataatttatttatttagaaaggatactaattttttttattactcctattacctcattttggcgttgtttctgggagtggaatgctttgcatgcattggtacgatgacaaacaactacgaatacaaaaaaaaaatttaaataaaattctgcaaactttatttcgtccgaactatcagggtgtgtgattgcaagctgtcctaccgtggtgctggcctctttggatacattccatacgaaatgcaaacctttgattctgtatgctgtgatctagtgaaaaactccaatat

SEQ ID NO: 224182 - DNA, 1000 bp, Homo Sapiens
ttgcaaatcattggagaatccataatgaagagagatcttccgagtgtaataaatgtggcaaatttttcagacatcgttcataccttgcagttcatcagtgaactcatactggagagaaaccttacaaatgtcatgactgtggcaaggtcttcagtcaagcttcatcctatgcaaaacataggagaattcatgcaggagagaaatgtcacaagtgtgatgagtgttgcaaagcctttacttcatgttcacacctcattagacatcagagaatccctactggagagaaatcttacaaatgtcatcagtgtggcaaggtcttcagtccgaggtcactccttgcagaacatcagaaaattcatttttgagataactgttcccaatgcagtgagtatagcaaaccatcaagcattaattgacattggagtcaattcagcattgacttgagtttgtgttgacttaacattgagttcaagccttaattgacatgcaggtgtttatgataagaggattgggccaggtgcagtggatcacgcctgtaatcccagcacattgggaggccaaggcacataggtcacttgaggtcaagagtttgaaacaagcatggccaagagatgtgagccagttttcccagcctgtttattattattttttgagatggagtgttgctcttgctgcccaggctagagtgcaatggtgcgatcttgactcgcagcaacctccgcctcctgggttcaagcgattcctctgcctcagcactttgggaggccaaggcaggcagataacaaagtcaggagattgagaccgtcctggctaacacggtgaaacctcgtctctactaaaaatacaaaaacttagccgggcatggtggtgggcacctgtggtctcagctactcagggggctgaggctggacaatggtgtgaacccaggaggcggtgcttgcagggagccgagatcgtgccactgcactccaggctgggcgacagagtgagagtctgtctc

SEQ ID NO: 224183 - DNA, 1000 bp, Homo Sapiens; identical to SEQ ID NO: 118680

SEQ ID NO: 224184 - DNA, 1000 bp, Homo Sapiens
tggtatcaaaccttacgaatgtagagagtgtgggcaggcatttattcttggctcacaactcattgaacactacagaattcatactggttagaaagccttgagtgtaagggataaagataagcctttatgtggagttcacatctggctcagtactaggtaatttttaatgtagtgtaattaatgtcagaaaacacctgtcacttccatcatagaacatcagaaaactcacacccaaagaaaattaaataaatgtgggaattctttttgcctcactcactgtttcctaagcatcagataatctatgctaaaaaaaaaatgaatatagaaaagctgcttcttgccattcaaaatatgttaaatttctgacaattcctaatacaaaaatgacccgattaaaagattctgtggccaccgtgcctggactttccattattttttgttctttcaaacaatcccataatatttcccttgcacgtaaattattttgtacatgtgtaatatatctttaaggtaaattcctagaagtggaaatgctagataaaaatgtaaatttttggctgggcgcagcggctcacacctgtaatccctaatcccagcactttgggaggctgaggcagggggatcacgaggtcaggagataaagaccatcctggccaacatggtgaaacctcatctctactaaaaatacaaaaaattagcaacagagcgagattccgtctcaaaaaaaaagtaactttttaaaactttctatcatgaaaaaatttgaacatatacaaaaatacacagaatcttatattgaactccagcggcctcatcaccagcttcaagaattatcagctcatggccaatcttgctttgtctgtgtacccacttctctcatctctgttatttttgaagtaaataccagatatattatttcatccacagacatttcatacatatctttaaagcacatgacaacattagaaaatattttcactccttaaaaaaaaaaaaaaaa

SEQ ID NO: 224185 - DNA, 1000 bp, Homo Sapiens
aaactaaaattaaaatttagttttcatcccaagatgtcttttctgcctttcttttgccttatttacaagcatggataaaaatcttaaaggtttaaataaaaatgatcaatataatggtgaatcttttgagaaatctcttaactgcattggtattttttctctgtgaaagatgactatgataatctggtacaaatggttttatgtcaccaattttgctgcaagaatgggaactgcttttaaatctgtaaatagctcttaacatttgttgtatgcactcttttcttactatggctgtcaacacttgtgtagggtttaatttctaaattgttggcatgttctttttctcaggctattcagaagtaacaacatttttcatttcagacatgcaatcacctattaatgatgaaatattttaccactttgggaatatttaattagtttagtcatggagaatacttcccacattttaagatttttcaaatatcactgtcatttctattttagcattttatcaaattattgcttttttattttataataaggcttaagacagattatagacctccttaagagatgagtttcttcttctaaaaatgcatgttgatagaggactatttaggctaatcggaggaatcattaagaaagaaagttttaacactgtttatccctatctgctttccttgcactttttctgtgaaaaatattttctgtttgcaaaatcttccctgagttctgaacccagcaccatcagtaccaaagtcttatgcaatatgtatttattatgctcctgaaataggcctcttcttgatgagacccaaactattacaaaaatatcagtattcatattttactcacaattcatacccgtgcttacttagttggcattttagtgctttgaatttctatcttaaagcacagaaaaaaaaaggtaatttaatccaagtattctatcatcaaaattattgtctgattatatgaagataaatgactggcgactctg

SEQ ID NO: 224186 - DNA, 1000 bp, Homo Sapiens
gccctcccctgctgccctgaagaccaccccagtctacctcggtgctggccaggaaacctttcggctacctctcccaccatcccagactgtgggcagggggatggggagggagtgggcctggatctgggacctccctccagaatttcctccagatgggggcagtgcccagggaggggttatttgtcttccctgccatggagtgggaatccccagccgaggccctaggcccctcagcagggaagggatccccggggaggcaggtcccaggagcagaccctgcccccagcccccacagacacaccccaatctgaaagccatgcgtgtcggtgtatataggaaccatgtacagagcccagagaagccccctacatccccccgggaaaaaaaagaaaactagacagaaactcatctatatattctgtatctggagttccgttttgaatattaactgtgttatttttatacactttttaagccttaactcgccattgatttaccagtttaacgtttcctggggtttctttgcccatggggttctctgcccccacccccggccctttgtttgacttgcgtcgtctgatactcagtattgtagctttttgtccgcatgttactccctgtaaatacgctgttatacatactgttaacacccctttgctttttctatgggacctccaggccaccatatttagaactagttaccttattaaaaaagaaaaaacagtctgttggcttctcagtctgcatcttggaggcagggaggtgagggcaggtgcccctcagacacttcaggaaggtagtttgcattctatttaaaaaagggagtggggagcaaatgaaaatcaaatgtggggggaaaacactaaagggggcaagaaacaaaggaattacaaaccctctgctctttgtatttctctgttgtgaagaataaactgtacctgcacccggaaaaaaaaaaaaaaaaaaaaaaaaaaaaaaaaaaaaaaaaaaaaaaaaaaaa

SEQ ID NO: 224187 - DNA, 1000 bp, Homo Sapiens
cgttccctcctgctctctggtgctcctcacgccattggccccactgcctctcactgcccgtgagtccctgtgcccgtgtcctccttcttgaacccctcagccctcagttaaccctcagaaagctggctcggagaagtccttgtgtggtatctgggaggcagagtttgccgtgagctgagattgtgccactgcacgcactccagcctgggcgacagagcgagaccccatctcaaaaaaaaaaaaaaaggcctcacgggactagaagcgtcttaccctgacctcacacctgctggacatcaggctggggagagaatcggggaagagggcattttccaacaggactggaaggccagtcgtggtccttggtggtgagagctagccaggccgccggccttctccccggaagcctgcagggtcccctctgatccctgcacctctggggggtcacaccaactgcgggtgtttcctcaccacgctgggcgcttggtgagcacgttctgccttgagacctggcatttctttgataacatttcttctcgtttcctgctcattctggaactcctgtcagtcagatgttgggccttttggatagattctgtgagtccttctttctacctttgcttgtagataagattttccttgaatccaaacacacacactctctctgctttttaaaaaattagttttggggctggatgtagtggcttacacctgtagtcccaggcactttgggaggccgaggcaggcagatcacttgaggtcaggagttccagaccagcctggccaacatggtgaaaccccgtctctactaaaaatacaaaaagtagctgaatgtggtggtgtgcacctgtaatcccagctactcaggaggctgaggcaggagactggcttgaacccgggtggcagaggttgcagtgagccgaaatcacaccactgtactccagcctggtgacagagccagactgttttaaaataaataaaaataaaaaattggttttgg

SEQ ID NO: 224188 - DNA, 1000 bp, Homo Sapiens
agagccttaagcatcatggtacctcttgcgcttcttacagtgagtgccaatctactagataaatggccttcaggcagtgctccaggaatcctggggggtcccaggccacctctgcttccaccttcactataagtggcccagttctggttttctagattgtacttatgcataagatagtttttaaagaaagcattccactgtgtaaatttttttttgtctttttttgaaactgtcctgctctgtcacccatcctggagtgcagtagtgtgatcatggctcactgtagccacaacctctcaggctcaagtgatcctcttaccttagcctcctgcgtggctgggactacagatgtttgccaccatgcccgcctcattttttttctttttttatagagatgagattttactatgtcgcccagactggtctcaaactcctggcctcaagcaatcctcacgcctcagcctcccaaagtgttgatgagccactgtaccccgataccactgtataaaaaatttaaaaaaaattgtgagtgctattgtacatggcaaagtttcaaagagctcttggccatccctcaccaaactttggcaaaagatggtgttagtccccttctccagggcacatgagaaaaacaggcctaacatcaggtctcagcggttcctctcacaggccttggcttggaaggctggagcttcggaccaaggcccagccctgtcacctcctcttcatgtgatgtggacccctgggagcatcagtgtcctcatctgtccaatgacagcccttttctcacagagttattgtgaagattcaacaatttcttggcatagtgcctggcacatggtgtgtgcttagcgcaaatggcagctctcatcatgaatgatagactctttcaccctgctggtcccaggtcggcacacacatccccataatggcatttctcctttctgtgcacagcactttattgttacaaagtactcttccaaaaagttaccctgtgtgt

SEQ ID NO: 224189 - DNA, 1000 bp, Homo Sapiens
cattggggtttcaaacccctgaatcataatttcttgatgctttttttaaaaaaggtgtttcagaaccaacataagacaagaaatattcttgtccaagtgacctggaaaaaaagagaggcatcatggatgcagattatggacgctcaggacttaagtaattcactgggcttactctcaaattttctctccccatggaaaatctttgctttatgtgtttaagaccagtttgccagttttacagtatacataaatttcaaacttttgaatatttaccctacaactatgataaatatttatactttattgatctactttaatcccaacatagttttttatatcagaaggttggtcccacaatataatgggacttttctttctgcatccaccttagcagagggcaagttctttcatcgtggaagatctgaactttgacgctagcttgacaggctgaatggaccttgacagatggccaagtcaaaacccctcattttacagatgagtttatgctagctgtgcctttgctcagagatcataaatttatgtgtgatctttgactttcatcacagtatccttgtaaatgagagagaattcttgttttttctatgccaggtctcctcagatgaaacacaatcctgaattggcgtggtcgtctagcttttatattcaaacctagttttgcatttgttactcagaaacacttcaagtaacaaaaggggggcaggggagaggggtggggagtggacacttgcttcttcagttctttgctcagctagggtatagctggcctgagaaggcagtgcaagccccagagactgttgtaggttgctttttcttcctcctgggcaactatttgtggaaaggttttaccttagtcattatgtaaatataattgtgtagaaaaacctagtcaacacattttaaattttagctttcttaatatttaagtattatcttaaaacaacattaaatttctattagttcccgaaaaaaaaaaaaaaaa

SEQ ID NO: 224190 - DNA, 1000 bp, Homo Sapiens; identical to SEQ ID NO: 118682

SEQ ID NO: 224191 - DNA, 1000 bp, Homo Sapiens
ggaagaaataaaagaaggagagtgtcaggttaaaaaggtaaataaaatgacatctaagtcaaagaaaaggaagacctccatagatccttctccagagagccatgaagtaatggaaagaatacttgacagcgttcagggaaagtctactgtatctgaacaagctgataaggaaaacaatttggagaatgagaaaatggtcaaaaataagccagacttttacacaaaggcatttagatctttgtctgagatacattcacctaacatacaagattcttcctttgacagtgttcgtgaaggtttagtacctttgagcgtttcttctggtaaaaatgtgataataaaagaaaattttgccttggagtgctccccagcctttcaagtaagtgatgatgagcatgagaagatgaacaagatgaaatttaaagtcaaccggagaacccaaaaatcaggaataggtgatagaccattacaggacttgtcaaataccagttttgtttcaaataacactgctgaatctgaaaataagtcagaagatctatcttcagaacggacaagcagaagaagaaggtgtactcctttctattttaaagagccaagcctcagagacaagatgagaagatgaagtgaatttatggattctggtttttctgaattttcaaagcataaggaatcaaaacagaaatatagtatcaagaagatgaaatgcttaatgaaaaggttttttttttgtttctttggcctttcatggagtgttgatttgtccattcttaatgtttattaataggtatatgtgcataaaatagctattttgtaacattaaaccttttgagtcattttggtcatcatataacttaccttcctgtttatttaagcttctttttacctagtagcctttaaccaaacaataaccttttaaccaaataaaatgtgttaataaataaaaaaaaaaaaaaaaaaaaaaaaaaaaaaaaaaaaaaaaaaaaaaaaaaaaaaaaaaaaa

SEQ ID NO: 224192 - DNA, 1000 bp, Homo Sapiens
tacccatatcttaggttttgaattaaaatataaaagtacactgagtgggcactgtgctcctgttctggcttgtgctttttcccatgatgggcagatgctagtctcagggtcagtggataagtctgtcatagtatatgatactaatactgagaatatacttcacacattgactcagcacaccaggtatgtcacaacttgtgcttttgcacctaatacccttttacttgctactggttcaatggacaaaacagtgaacatctggcaatttgacctggaaacactttgccaagcaaggagcacagaacatcagctgaagcaatttaccgaagattggtcagaggaggatgtctcaacatggctttgtgcacaagatttaaaagatcttgttggtattttcaagatgaataacattgatggaaaagaactgttgaatcttacaaaagaaagtctggctgatgatttgaaaattgaatctctaggactgcgtagtaaagtgctgaggaaaattgaagagctcaggaccaaggttaaatccctttcttcaggaattcctgatgaatttatatgtccaataactagagaacttatgaaagatccggtcatcgcatcagatggctattcatatgaaaaggaagcaatggaaaattggatcagcaaaaagaaacgtacaagtcccatgacaaatcttgttcttccttcagcggtacttacaccaaataggactctgaaaatggccatcaatagatggctggagacacaccaaaagtaaaattgttgatattgtattatttatattttcagtgatctcatttgaatgatttataggtaaatactaatcagacattattaaaagcaaaacaggaaaaaggtaaacttcttaaatttagttacctataaaaattgtcaattttcattctttaaaaacacatggacttactataaaagcctttttgtactagtgaaaagaatcttcagctatatagaaataaagttatacttt

SEQ ID NO: 224193 - DNA, 1000 bp, Homo Sapiens
ataagacctactcaagctggaaatgccgatgcaattttctgccaccactccaaatactcctccacaaccagcgtccctgtcactaattgcgagaatgatggaattctgcctgaagggtcttgatacctactcagtgaggtactttgcttggattgctgtgattcttaaaaaaaaaaaaaaaaagtttttttattttcctgaaggcgacagtctgtcttttggcgagtccaattagtgatcgtttccatttatccttaaccctctgtttgtgatcttcctgattccacctacaagttcattagttctaaataaaagcctgttggcaagtgttggtagattacaactctttttatttgaagttgctcgagaagttagacatgctttagaattatgagtgtggggaaaatttgatgttccttaggattatataactgaggagggaacattgcaaatagggtctgaggctttgtttctctcttgctctgaaacatttctgaaaaggcaaggaagggaggggtagtgtctggggcagtgctggtagcctgcatgtgttgtaaatcatcctgccataacaaaggactgcattgttctagctggcccactgggcaggtctgccaggctacttggaactgtagtgggaaggtggttgattggagggttatctgtatataaaaggttttctcccctccaaagaaagactccagtacaagatacctggtcccagggagtctaaattgtaacagcaacccctgtggactttgtgggtatgagttttgattgaaatataaagctttcttttctgtaagtttaagttttccatctgaccatagcagaaaaacctagacccacctagtgaaactttgtaagaactccagggcaaaaacgaaccacttgcaacccacatgtttgtaggtgtatggtcgatggaagtttctggcatccatgttggtaataaagagataaaactgaaaaaaaaaaaaaaaaaaaaaaaaaaaaaaaa

SEQ ID NO: 224194 - DNA, 1000 bp, Homo Sapiens
gaccaagtggttttgcaagtagcgaatttactgttaggtggaaagcaattaaacacaagaagttctcgaaatgggagtttgaagacctggaatgggggagagagcctatctctggcagaagtagccaacgagctggacacggagaccctgcggaggctgaagcgggagtgtgggggcctgcagacgctgctccggaacagccaccaggtgttccaagttgtgaatgggagagttcacatccgcgactggcgagaggagacactgtggaagacaaagcaaccggaagcgaaacagagactgctctctgaagcctgcaaaacccgcctctgctggttcttcatgcatcaccctgatggctgcgctctgtccacggactgctgcccgtttgcccatgggcctgcggagctgcggccaccccggaccaccccgaggaagaagatttcatgagctgcatccttgccagccgaggcctggttggggaggccaaaccaaggagagcttccccagcagtcgtcagtgctgtggtctctgctctggctgtgtttcagcccacctcctcccagctttctccacatcctcacagtgatgaaccgtatttcataaacatcacacgccagagaagccacagttactcggaagcccccagctgactgcctggcttgtttcagatgcagccgcttgaaacgtgcgcagcatcttcatatcataaagattgtgcacggatccttacaatgtctcctgggggagagcggctgaggctgccttgcacaggcccttcccagggcgctgtccgacgcctgccccaccatgtccacatctgtgaagaggatggggctcctcgagaagtaagaccgtatctgccagcgtttctcaccacactggagagcagctgctctggagcagggatccaccagattggtatttttaaaaaaggtgtcaggcttgctatgttgaggttgtttttagagttacagagaataaaaacactcataatttcctg

SEQ ID NO: 224195 - DNA, 1000 bp, Homo Sapiens
atgaataatgacaggagagattataacacactgaataaaaacataatccatgagttcatgctgatactcaaatttctttttaaaaaggagaaacaggaaggtttcttttggaggtgaaatctaattattggtgagagtcttggagaacaggctgtttccagtctcaaagcagtaaccttatacactacttataagtttgaaaggggaaaggttacctttacaatggagacatctaccagatcatccaagtgattaaatttaacatcatcaatgatgggaccaaggacattattagtttgacaactggggaaagaagtgttcttcaccccctacccccaagacattctctctgtcggccaggctggagtgcagcctcaacctcctgggcccaagtgatcctcccacctcagcacacaacaccatgcccaattttaagtgcgttatagagacgggggtctcactttgttacccaggctggtctcaaactcctgcgctcaagcaatcctcccacctgggcctcccaaaatgctgggtgtacaggcatgagccgctgtgcctggcttcattttcagagtgagacatttgtactgtggctatgtaggagaacattcttgttcttagcaaacatactgaagtttttagatattaattaccacagtgtctgccactgaatttccagtgactaagtggaaaaatataaaacatatgaatataaagaaagaaagagacaagtcaaatgtagtaaaatgacaacacttggtgactctaggtgactggtcgacagatgttcattgtactatcaatgtggctttgctgtgggtttgaaattttgcaaactaagagttgggtggcggggagaaggatacaccaaaaaactaagtgattatctttggatgggaaaatgtttggtaattgcattcttaaaatgtcttctttgtattttttaatgttcaataatgtatatgtatcagttctgtaataaaggggaaaacacttttca

SEQ ID NO: 224196 - DNA, 1000 bp, Homo Sapiens; identical to SEQ ID NO: 118684

SEQ ID NO: 224197 - DNA, 1000 bp, Homo Sapiens
taatttttgttaccgatgtggtgagagataccgccagctccgattttttggagaccacacatcaaacctcagtatatttggatgcaaatatcgctacctcccagagagacctcatttaaggagattagtgcgagggtcagtctgtgctggaaaattattcattgcacctctaattatggttttgggattggcactaggggccatagcggttgtaatcgttgaggaaattaagacttactggaacctcataagtggtagaaccaggaatcaaacccaacatttggctccacagcctgtgttgttaagtgatatgctatactgcctgaaacaagtgtttatttgtatttcctatctattgcctttgtaaaaaacagagaaaacgatcacggacaggtatgcactggtaacatgcagatgatttcatccagctaagctggttggagtaggagcgataccaaagggtacacccatctgtgagtcacatcttgaaaaacactgagaggaaccttctaccatctcatctcccagtgattctccgtgggccacaatgcctctagctatggtgcactcccaacatggtatcctgtcctttccctaaacaaattgctgctgcttttaaaaaatggtcactttcataaactataaacatctatatcataactctgacctttgtggttcttggaagaagatattttaagaaccagttatcctaagaattctgagcacgcctcttctgagaattgcttggactgtctttgaactctgcacctccttccaggccatcttgtgagacttggtgttaatagctgaagtcctatctgtaccaacaagcaaggccacttttcagaagataagagttcactgaatgcacctattataatctgtggccccagcagtataattcttttatctttcaaatgttataattgcaaaaaatctcaatgtccaaaagggaatgagtgaaactaaattaatgagaagaataaaaaaaaaaaaaaaa

SEQ ID NO: 224198 - DNA, 1000 bp, Homo Sapiens
ccaaaagtgctggccccaacttttctctattttgggccatctgtggtacccgtcccaagggcacttggtggtgtcccctagtgtgtgactccctggcctcataaggacgagttgtctgaaatcccagcgttaggtctggggagatggagaagctgaaactggggagctgcaccacaaacgtctagctctcagcagagctgggagcaaagcctggccgcccaccccaacctggggctgcctcccactccgtgagatgcttctgtctcctgttcactttgtgtggtagtttcttattttcaaaatgcatctcatttgatcattactgtgaccttgggaagcagcaggacagggatttctttttagaggtgcaaactgctcagaggggacacacctcagcctctcactgtgggtacacgtggcgtgccatgagtggggaagagcaacaggcgagatgcctcattctactggaacatcactgtgggtgaacagagatttccaggttttccctcttaaaatatttgtcccacaccgacaagagtccagtcaccaggcctcaaaggaacttctgcttgtagcagccgcctcccctgtgccccagcctccttaatgtgtgcactctcagagggcacagctcgcgaggctgggtttgggggccaagtggcttgttcattccagcatctaacatcataaaggtgggcccagatttcttgattcgaccacagtgctgttcctaccacacaaatatccattcctgttttgttgaagcagccactggtcctcttgtttcccctgcagacggagggacctggcagtgcccattcattcagccccctcatgcatacttttattaggcgatagactagttaagaaaattgtttctatgtactgtatattttgtacctgtttacacttctaatattgatataactgatattttgaaaaataagagaaaacatcctgttaaaataaaacctaaccagcaccaaaaaaaaaaaaaaaa

SEQ ID NO: 224199 - DNA, 1000 bp, Homo Sapiens
gcccgggccaggcacagtgctaccggtaaaagaaccaccaccgcagcttctaccaggaggagatcggcttcagccacacacggggacgcctcctccccacccttcctcgcagctcttcctgacccctctccctcagggccacaggccttggcacctctacctggggatgacgtcaactccgatgattccgacgatattgtcattgcaccgtctctgcccacgaagaactttccagtttaggtccccgtcactgtctccacgccgtgatggcagcgctgccgaggacataggaaccacgactggaaagataatttatcgtgttaggagaagaacgatgatacctacttaacacctcagcatctgcgtcgtgtctctttgtgcttttgtttgtggaaggagacccaaatgcctttactttattctctggggagggccagcggctcgcatccccctcatctccagctgcagctcggatggtggattttcagtgccaacagacacatctgccgtgaactcgcagatgccagggagccctgtagtgacacgttctctgacagcaccttgccgcctgcccacgaccttgaccgtgaggagctgctatccgcaaccagcgccgacaccatgccccctcttcctggtgacaccctcaacaaccaggatttgctcgatctcagcccagcaggccaggcagacacaccccgctgtgccttaggaaggtgtgagaccggcttcccccatccccacagcaaaacacggcctgtcccaagccagtgaggagctaaagacacccaggtccccaaatgatcttactccatgccccacccgctcacaccgtcctttcccgtcacccttgctatcccctggagcactgccctccagagctgcccttcccaggaaggaatttggttggattctgtcactgtggagaccaagattttttaaaattcccaattacaaaagcagcatcacacttgcttctgagaaaaaaaaaaaaaaaaaa

SEQ ID NO: 224200 - DNA, 1000 bp, Homo Sapiens
tttaaaatttcaccagatttaaacataaagtgtgaaagaaaggatgacttcttaggagctgcagaaggaaaactgcaatgcaatcgtttaatgcctaattcacaaaaagactgtcattgtttaggagatgtcttaattgaaaatacgaaagaatctaaaagccagagtgaggatttgggaagaaaacccatggaaagtagcagtgttgtgagttgcagagacaggaaagatagaagacgttccatgtgttattctgatggtcgaagtttacatttggaaaaaaatggaaatcacacaccatcctccagtgtgggcagctctgtagaaattagtttagaaaattctgaactgtttaaagatttgtctgatgccattgagcaaacctttcagaggagaaatagtgaaaccaaagtgcgacgtagcacgaggctacagaaggatttagaaaacgaaggtcttgtatggatttcacttccacttccttccacttcccaaaaagccaaaagaagaacaatatgtacatttgacagcagtggatttgaaagtatgtctcccataaaagaaactgtgtcctccagacaaaaaccgcagatggcacctcccgtctcagatccagaaaacagccagggccctgctgctggttcttccgatgaacctggtaagaggaggaagagcttttgtatatctacacttgcaaatactaaagccacttcccagttcaaaggctaccggagaagatcctctcttaatgggaagggagagagctctctgactgccttggaaaggattgaacataatggagaaagaaagcagtaattgacatttcctgcagagtctgtggcaagagggaaagtaaccatctatgctgaaatgatctgtctagttcccattctctgttcaacctcagtgtttcaaaagttcctaataaataaactcatttgagttgaacctacttttatgtagaaataaataagtttcttcatcattaaaaaaaaaaaaa

SEQ ID NO: 224201 - DNA, 1000 bp, Homo Sapiens; identical to SEQ ID NO: 118686

SEQ ID NO: 224202 - DNA, 1000 bp, Homo Sapiens
gggtctgttagtgaaggcagcattgttagttcatcaagaaagcccatctcagcactctcgccccagacagacctggtagatgacaacgctaaatcttttagctcacagaaggcttacaagattgtacttgctggggacgctgcagtggggaagtctagtttcctcatgagactttgcaagaatgaatttcgagaaaatataagcgccaccctgggagttgatttccaaatgaaaaccctcattgtggatggagaacgaacagttctgcagctctgggatacagctggtcaggagagattcagaagtattgccaagtcttacttcagaaaggcagatggtgttttgctgctgtatgatgttacatgtgagaaaagctttcttaacatacgagaatgggtagatatgattgaggatgcagcccatgagactgttcccattatgctggtaggaaacaaggctgacattcgtgacactgctgctacagagggacaaaaatgtgtcccagggcactttggagagaaactggccatgacgtatggggcattattctgtgaaacaagtgccaaagatggttctaacatagtggaggctgttctgcaccttgctcgagaagtgaaaaagagaactgacaaggatgacagcagatccattaccaatctaaccgggaccaattccaaaaagtcaccacagatgaagaattgttgcaatggctaaatcccaaacatccttggcctgtgaagtcttcatttccagaatactgaatttgtgtgacttatttggctcttaacagagtggcacatcctactgacactgtcctatggagagttacagtgcaggaaacctgaacccagctctcaggtccctctggaactttggctcttctttgttttgtctcagtgagtgatttgggccctctggctaaatagactagtcatgtccttacaggtcttaaaagataacatgtaaatgtttttaaaatggtaaaaaaaaaaaaaaaaaa

SEQ ID NO: 224203 - DNA, 1000 bp, Homo Sapiens
gcagagaattgccgggaaatctatccctactgagaagtttgctgtgaggaaggctcggcgttactccgcctccttacctgcacctgtgaagctcatcttacctgccctggaaatgatgtatgtctggaatggtttttcaatagtgagcaaaagaaaagacctttctgaaaatctgttagtaactgttgaaaaagctgaggcagctttacaaagtcaaaattttaacagcttctctgtggatgatgagtgcttagtgaagttacttaaaggatgttgcctcaagaacttacagcggcccttgcaagctgaactatgttacaatcatgttgtggaaagtgaaaagctactgaagtatgaccactacctagtgccgttcactctatttgaattggcatctttgtataaaagccagggggaaattgacaaggccataaagttcctagaaactgcaaggaacaactacaaagattactccctggagtccagactacacttcagaattcaggcagctcttcacctctggagaaaaccttcctcagattgatcagaacttgaaggatggaatttttccccaattagcatcggcatctgctatagattcaaccttatattaaagtggaaaaatgatcttgtgaataagagacaaaaaaacagtttttttggtcaatattttctatcatctgagagatttactgttggtctacataattttttttcctatggaatggcattctatattatctagaaaattcttatattttgcctcccccaaaagaatttcatattatttgaattagggggcgaagaagtcttttgaaagacttgcagatgtaatagtctaattagattatttatttttttaatgtgaaaattaatattgtttagcaaatagcttacaagttgagccaattttggatttgttgggtagttaaacttcagagatattttgttgcctgtatttaaatttcagaagataaataaatatcattgcatttaaaat

SEQ ID NO: 224204 - DNA, 1000 bp, Homo Sapiens
cagtattcttttggaatgtaaaccgatttaatgccaaaccaccttaacctttgtttctcagtgttccttaacagcctgccttttattaatctcaggtttttttatgaacactctcatttcagtagaatttggaaaactaagcgtggttggaatttctttgaattctgttagtaatgcccaaaagaaaagtctcaagcagtccccctatccagtcatttttatggagtttcatgttgtccactatagctggacactgaaccttttgcctaatttattataaaggcctgaccctctattgtcccatcttcacccccattccagagcagaggagtctctgtggaccatgaattgcactgtctccctcctcatttctaaatgaaaggtattagatataaatttttttgaaaggttagttgtttgagatgctaagcaggataataaatttagattttaaaatgttccctgtaaaagtcagcccatgacaaggaaatttacaaaatactagagtatctagaagggtgaaaacaaaaaaaaataaaaagaaacacagacgcccaggtgtcagctctccgtttaaagaatgaaaaatgtaactcatgatgatctgtgaaaccttcaaactaggaccaattgacttacttgatattctgcctttgatatggtagtacccacccggtattcctaaaatcctaaaaagatacaccttgcagtagcagaggcaatgacatgagtttgttttctcattaatatgaccagtttgggtctatgttggttcacatgtacatctactttatatgaaagaaaaaacagttgtctgcctgtaaaatgttgagtttcgattgagccatgtttggagattttattactattctgaagggtagtgttgttggttttcatcttcaagaagttgattccaaaactgagttatgaagaatgatataacagttccttcaaaattggcctaggaaataaaaccttaaaaggaaaaaaaaaaaaaaaa

SEQ ID NO: 224205 - DNA, 1000 bp, Homo Sapiens
ccttctgtgtttctcctcggtccccaactctaccttccccaaccacagttcctgtccccagatgtcctgatgcccaccatggcaggggagcccaatagactcccaggaacttcaaggagtgtccagcagtttctggctatgtgtgacaggggtgaaacttcccaaggggccaagtacacaggaaggactttgaactaccagagcctcccccatcgctccagaacagacaactcctgggcaccctggtcagagaccaaccagcatattgggaccagattcctgactactccagggtgcaatcctcaactaacctacactgccacactaccagaaagaagcaagggccttcaggttcctcacactcagtcctggagtgatcttttccattcaccctcccaccctcccattgttcatcctgtgtacccaccatctagcagtcttcatgtacccctgaggtcagcttggaattcagatcctgttccagggtcccgaacccctggtcctcgaagagtagatatgcccccagatgatgactggaggcaaagcagttatgcctcccactctggacacaggagaacagtgggagaggggtttctgtttgttctatcagatgctcccagaagagagcagatcagggctagagtcctgcagcacagtcaatggtaaaggttattcctttcctttcctggagctacacctttctttgtaaaactgtactgtgggccgggcgcggtggctcacacctgtaatcccagcgctttgggaggctgaggcgggtggatcacgaggtcaggagattgagaccatcctggccaacatggtgaaaccccgtctctaccaaaatacaaaaaattagccaggcgtgacggtgcgtgcctgtagtcccaactactcggaaggctgaggcaggagaattgcttgaacccgggaggcagaggttgcagtgagccgagatcgcaccactgcactccagcttggcaatagagtgagactccatctc

SEQ ID NO: 224206 - DNA, 1000 bp, Homo Sapiens
acaggttattagacaaaagggaaggtgttttgtgcttctcagatgttgctggtttaggagtgtgtgatgatgcttgccagtgattttgtgttttggaaagggtaggtatcgaatgttaatcactttctaatgggtacctaaacagcaatgctgataaatgttcaaggaattattttcatcttagtttgttcttctcaaaaggcatcaaaaacaacttatttgaagctgcaatagagtgtagcattagcctgcatgtttctaggtcttctgccaagtgcttttctcagttgaaaactatttttcactagcaaaattggtattttatttcattacctgttagtaactacttcaatgatcatttcacaagaaaaagactataaattaagtagagaacaacatttttattgaacatttttggcttgcaatcaaactttgccactaaaaattaacttcataaaacactagtccgttatcaacttcttcacagagaaagtagctatactataccctacatatttatttatttattattctactatagcagaataacaaaacttgatgcattaagccagttctttgcaactgaaaattacctgtttctccttccctttcacactccatgtatatatgatcagcctctccattaaaaagaagctggacatgcaaatacatcatattatgttttctccatattttatgtttttctatgtatctgaatacagtgggataaataattgaaagtagtgttcctatggcattagtgtttttgtgagaagggtaaatgtagtgagaaaggttttttcatggcattaataagaaagcccttctgtaatatatatattattttgtaaacatttcactgaagggccaaaagttaaattataactaaatcactgtgttttcagaatgatatttaacaacaaacccgtggtcaaaccaaaatagtgggttgaagtgtattattcatcttttagtgcattggcaaaaaaaaaaaaaaaaa

SEQ ID NO: 224207 - DNA, 1000 bp, Homo Sapiens
ctccagagaatacaatagcagatgagcaggagactaaagatgcagcagaagaatgtaaagaaccctaatcaaggacttgctgggtgtgcttttcagaaagttggtaatgaagttaaattaaatttcttattgaattatttgaattcaatgaatgcactgcagagactattctttattgattttgacatttggagtcgctctttgtggattatatttccttgatatttttgagacttggggtgtaattgttcagtggtttttgctcattaaaatttctgggaccattgtttataaatttattgctaatcttacagtattaggattcattataaaaaccaacattttaatgtatacgtgttagggtaaaactcgttgaagtgctgtgattgtcctgtattcaattttgtatgtttcacctctactgtgattcagacagatcatggtggtcactgggaatttttgctgtggccctgcttttccttcttcccacttgtctcatgtctgtgaaactggtacaacctgccataagatgaaatgaattgtctcaacaaagcaatattagaagagcctttactatcttattggtgatgacacgtttcttaagtaggagtttgagtgaattatttgatatattactttgttaataatagttaacaatagtttcttattttctttcagagtttgggccttttagattgcatcaaataaaaatgagctactttaaaagacagtctgcggtactattttaagagagatggtttagttacaagtcagtaacttagattcatgagaaaattttgtgttgacattccataagatgagttggcattagaattggaagtccagtttatttctgaatcaaaaaatgagcgggctattgtgctgcctttaataaaatttgagtgatgtatacataaaaaaaaaaaaaaaaaaaaaaaaaaaaaaaaaaaaaaaaaaaaaaaaaaaaaaaaaaaaaaaaaaaagaaaaaaaaaaaaaaaa

SEQ ID NO: 224208 - DNA, 1000 bp, Homo Sapiens
ggcgacgccgccccggctcggccccccgccggggagccccgcttctggtgcccagagtgcggcaaaggtttcaggcgccgggcgcacctgcggcagcacggggtgacccactcgggagcgcgccccttccagtgcgtgcgctgccagcgggagttcaagcgcctggccgacctggcgcgccacgcacaggtgcacgcggggggcccagccccgcacccgtgcccccgctgcccgcgccgcttctcgcgcgcctacagcctcctgcgccaccagcgctgccaccgcgcagagctggagagggccgccgcgctgcaggcactgcaggcccaggccccgacgtcgccgccaccgcccccgccgcccctgaaggccgagcaggaggaagaagggctcccgctgcccctcgcaaacattaaggaagagccgccctctccggggaccccaccccagtccccgccggctccccctgtcttcctcagcgcctcctgtttcgacagccaagaccactcagccttcgagatggaggaggaagaggtagacagcaaggctcacctgcgcgggctggggggcctggcctcctgaccttcgccgccctgccctccgccgctccgcctgagctccccggtttgcagaatggaggagggaagttgaaggagccacctcctctgtctacccacccgtccccttcacgcccttgacactaaggagtggggggccctggactgccccttcctcccccatcgcccgcccccagaacccctgatgctggttaggaaccgctcaccccaacatgtgtcttaaggcaggacgacttggaaaaaaaggcggcggacagttggccagagggatggagactggtggggacgcccccgcctccctgtcccccgtttcacacactggacaccatcacctctttggaactgccagaccctgggggtccccagtgagcaaaggtctgtccttgtccctttgtctgtctgtgaataaatgtgagttcgtg

SEQ ID NO: 224209 - DNA, 1000 bp, Homo Sapiens
caacatcaaaatattcatactggtgagaaaccctatgagtttaaggaatgtgggaaggcctttgcttgtttcctaccttaatagaaatcagagaattcacactagtgagaaaccatatcagtgtaaaaaatgtagaaaatcctttattgattgttcaactcttaacaccagagaattcacactggtgagaaaccctttgaatgtcaggaatgtaggaaggcctttaggcagagggcgcatcttactcaacatcaaagaattcctactggtgagaaaccctatgaatgtaatgaatgtgagaaggcctcttcttgtctttcataggtgaaaaagcaccagagaatacatacatgaagggacaaatcttatgtatttgaatagcgtctttttatttaacaatccttatctaacatcaccaaattcacattgcagagaaacttcagaaatataagaaatgtgggaaacacttttacctgtccctcagctatactttttcataacagaatttgtacaggtgagaagcctaatgaaagcccgatatgtgtaaagatctactctcacaatatactcaacattatataatgtatagtgtgattaatataggaaatccttgattttgaaattatcaattatggaatagcaaacaatttgtaagtgaagaaaatccagtgactgtaaatttttttacctcataattcacaatttattaagcatcagaatttatatggaaaaaatagaatatcaattattaataaaaacattaccactaaaattttatttgacttatagagaatagcatatagagaataatcatgttgactttgtgaatgtagaaaagcttttatctattacacgaatctttttcagcatcattatactttcaccagtttccacgtctgttttattaccaagtaatttaaactgtatacttcagattacaaatttcttacattgtgataaggttattgtgaagattaaatgagtttatccaaagaaaaaa

SEQ ID NO: 224210 - DNA, 1000 bp, Homo Sapiens
ttaggccaggtgtggtggctcatgcctgtaatccagcatgagattacatgctgagattacagctgtaatctgtaatttgagaggctgaggtgggaggatcatttcgagaccagcctgggcaatgtatagtgagaccatgtctctaagaaaaacaatatgtaatttgaattgttgggttaatatgttttgtaatatcgatgagattaagtggttgatagtattgttcagatcttctatgtctttactgatccttttgtttatttctatcaggtgctgagaaaggatgttaaaatcttcaattatgattgtggaattgtctatttcttaaattctaccagtttttgtatgaagctctaataacttatgtcttcctaatgtattgaccattttatcattatgaaatttccctctgtctctggtaatttgggtttgaaatctactttatcttatgtgaatatagccactgcagccttcttaagcttagtgtttgcacagtatacctctttctattaatttactttgtgcttctgtgcctatttaaagtagtttctttaaacaacatatacttgagacttgcatttttatctgttctctctgtatcttttaataagtttaacattaaatgtaattattaataggtttctaatttacatgtttcctgtttagataagattattttataattgtattttaatttattggctctttagctatactgttttaataatttttttaagttggatgttctagtgattacaatatacattcttaatttttcagtctacctagagttgatgtgccacttcacataaaatgtagaaatcttgtaagtatgtacatccatttatcatacctgtcttttatgctgtagttgtcatacatattaaatctacatatttaaatattgtaagtcctgtcataagttacaatttctgctttaaataatgatatgtattttaaagaaattaagaggaaaaaataaaatcttttgtatttattc

SEQ ID NO: 224211 - DNA, 1000 bp, Homo Sapiens
cagatatcccttggagttggagaacaaggtgcagattcttcaatagagtcccctatgccatggttatgtgcctgtggtgccgaatggtaccatgaaggaaacgtcaaaacaagaccaagcaatcatgggaaagagttatgtgtcttaagtcacgagcgacctaaaaccagagttccctactcgaaagaaactgcagttatgccttgtggcagaacagaaagtgggtgcgcccccacatcaggggtgacacagacaaatggaaacaacacaggtgagacagaaaatgaagagtcgtgcctactgatcagtaaggagatttccaaaagaaaaaaccaagaatcttcctttgaagcagtcaaggatccatgcttttctgcaaaaagaagaaaagtgtcccccgaatcttccccagatcaagaggaaacagaaataaactttacccaaaaactgatagatttggagcatctactgtttgagagacataaacaagaagaacaggacaggttattggcattacaacttcagaaggaggtggataaagagcaaatggtgccaaaccggcaaaaaggatccccagatgagtatcacttacgcgctacatcctcccctccagacaaagtgctaaatggacagaggaagaatcccaaagatgggaacttcaaaaggcaaactcacacaaagcatccaacaccagagagaggctcaagggacaaaaataggcaagtgtctttaaagatgcagttgaagcagtcagttaatagaagaaagatgccaaattctactagagatcactgtaaggtatccaaaagtgctcactccctacagcctagcatttcacagaaaagtgtttttcagatgtttcagagatgcacaaagtaaggcctggtaaagggagtgctttgtgatctagtaaagctggaatgtgaagctctttcctatcaaaaaaaaaaaaaaaaaaaaaaaaaaaaaaaaaaaaaaaaaaaaaaaaaaaaaaaaaaaa

SEQ ID NO: 224212 - DNA, 1000 bp, Homo Sapiens
ataattactggacatggacacacacagataaattcacaggaattaacgggctttctatttttgtagtgttactggctaagtctttggaaaataatttttcataatatgtcatgctaataataaatatattgatagccaagtcatggtgcctaaaatgccagctattgccaagaagaaaatagttgatgtctgtcaataactgtgcatggtctgagattttaccctacttataagctaacaagttagcctgttactgtttcgtgggatgctacagaatgcataagacacctgggtcagaaacaaaggacttatcgctcacagcaaaagctgtagccagagcttcatgttggttttattcagttcctcatttttctagttcccacaggaggaacacaaagggcccatgatgaaagcctgcacacagtgggttatgttgtaagcttgggttattaactgcttttatagtaagcaaaaaaatcctggtctttgtccaaagggagttattaccccatacttgaagatagcttagtgtaaacacaagcctaggacatggactaggtaaagacaaagtccttgcattcttgacatacccagtaagtatgcagggacactcagagcccatagtggatagtctcttccaacagtctgctcctcagcctgagatgttcttggccaaacttgaattttcacatgagtatgccactctatcagctactctgattaacctgacagtcgggttgtttagtcagtaccaaatttgttcatttggtctcatatagcaattaatgcaggctattatcagacacagcagcaggatgaagccaacctgcagtattaacctcagtcctgtcccccaaggtcttgactcaatcaactctaagttccaagggaggaccaataggtctttttattaggcagccagaatgtagtgaaggacaatttattatactttatgacccaataaagggagctttgactgacgtaaaaaaaaaaaaaaaaa

SEQ ID NO: 224213 - DNA, 1000 bp, Homo Sapiens; identical to SEQ ID NO: 118689

SEQ ID NO: 224214 - DNA, 1000 bp, Homo Sapiens
gattatgtttccacattaaaacatctactgagggaggtagagggcaagtctgtgcagtcaaacctggaattactgacacaagctaagagtatgcaccacaagtatcaaaacctaaaatgccctgaactcttttcatttagattaacaaaatatggtttcagtcttcctcctcaatattctggcttggacagaattatcaagccatttcaagtagatgtgattctagatctcaacacagcacatcctcaacttcttgtctctgaggatagaaaagctgtgcgatatgaaagaaaaaaacgaaacatttgttatgacccaaggagattttatgtctgccctgctgtcctaggctctcagagatttagttctggccgacattactgggaagtagaagtgggaaacaaacctaaatggatattgggtgtgtgtcaagactgtcttcttaggaactggcaggatcagccatcagttctgggcggattctgggcaattgggcgatacatgaagagtggttatgttgcgtcaggtcctaagacaacccagcttctgccagtagtaaaacccagtaaaattggtatttttctggactatgaattgggtgatctttccttttataatatgaatgataggtctattctctatacttttaacgattgtttcacagaagccgtttggccttatttctatactggaacagattccgaacctcttaaaatctgctcagtatcagattctgaaagataaggaactggtaaatgggtctgtttcagtttttgtaggtaacttagccagtaaatttaatctcatttctggactctttaagttttaccactgaaaaccagagtcgatttttctcctaaatttttggcaactataagatgttcataatgccactttcatatattctatgaatatcaattgtcaggtgctttgatttctaagataaaatattttagaattatgttacttaacatgtccaataaaatgttttcaaattgcc

SEQ ID NO: 224215 - DNA, 1000 bp, Homo Sapiens
attacaatgtatgttactactctacctgtgcctggaatgcatttccagtgtgctccaaagctcaatggagactctcaggcaaaagttcaacggattctacgattgatttctggtggtggattgtccataactggatcacatatcttatgtggagacttcctcttcagcggtcacacggttacgctgacactgacttatttgttcatcaaagaatattcgcctcgtcacttctggtggtatcatttaatctgctggctgctgagtgctgccgggatcatctgcattcttgtagcacacgaacactacactatcgatgtgatcattgcttattatatcacaacacgactgttttggtggtaccattcaatggccaatgaaaagaacttgaaggtctcttcacagactaatttcttatctcgagcatggtggttccccatcttttatttttttgagaaaaatgtacaaggctcaattccttgctgcttctcctggccgctgtcttggcctcctggctgcttcaaatcatcatgcaaaaagtattcacgggttcagaagattggtgaagacaatgagaaatcgacctgaggagcaaaacaaaggcatcagctcttacaccaaaagagttaacgctgtaaccaaaggtatagttttgttttttattttaggagaactgactggtaaatgaagaaatggaccaaattttgtgtaaacgattagaaagatgaacaaagtattgccctttgactggttttcttcttcatcctgagaaagatacattctcttgcagctcttcattcattggtgacaagcccccaccccgggactttactaatgagcttgttaaagaggtgccaaagaacatattcctcctttctttattctttctccaccaaaaccctctacttcagaattttttcaggatatttttcagcccaaggtcagaagaatgtgttaatattttaaataaaatatctggacatctacaaaaaaaaaaaaaaaa

SEQ ID NO: 224216 - DNA, 1000 bp, Homo Sapiens
ccccctcctcttcttcctcccattcttacccctttctagagattcattttcactactttattcagaataacatctatagcaaagatttctacttctttcccgtatgacttttctccccagctccaaacctcatatttctgattgcctcaggatagttcccttttgagatactttcctgtctttagctcaatctcaacacattgaaaacacaactcattcacttgaaaaacacttactaaaatctcactatatgctaggcagtatgttaagcatgcatattgctctctctaaaaatcagttctgtaggaatccctttcccctcctgatggtctcatccttatcctggtctcccactcagggaacctcctgattattctgctctgtgcttcctcagttcaccctttgctctcttttcttttgcttcacctagtcacatcctgtgtgcctgacagccagtctgctgtaattgtcttagaactgatcctcttgactccacaccactgctaggttgaacatctaaaagtcctgtgctgatcctctcagtcccctgctcatcaactctcaaggacaacctattaccaaacacctttgacctcaacctctggagtcctcagcccaggacttgaagttaggagatctttttttgccttggctctgccataaatacaccctgtaaccttggatgtgttgcaacatctgcaaggataggaatttgatcactgctaaggttccttcaaacttgatcagttcgctgttctgtcttttggatgttaattcacattcatctcctatattaagactttggctaagtcttgtgatttcttgccttattggagcttttcttctaatctgaattcttgcttctctctccttttcctttacacacccacacaagtcctaacctctccaggaagtgttttgaaatgatgttacctgggtttgagttcttggcattagcctgtatcatctatttggtattattatactattatagctgttt

SEQ ID NO: 224217 - DNA, 1000 bp, Homo Sapiens
agatcacatttgtatattcaacaatctttcacctatttcataagtcattttttcaccctgtatagtatgggaattattttttatgttaaatagaaactgaatgtactgggttgaatggtgtcctctccaaaattcatgtacttcctggagcctcagtatgtgaccttatttggaaatactgtggttgtggttgtaagtagctaagatgaggtcatactggagcagggcaggcccttaatccaatatgactggtgttccttataagagaagatagggcgggcatggtggctcacgcctgtaatcccagcactgtgggaggccaagccaggcaaatcgcttgaggctgaggagttcaagaccagcctggccaacatggcgaaaacccatctctactaaaaataaaattagccatgcgtggtgcttgtaatgtcagctacccaggagtctgaggcacaagaatcactcgaacctgggaggtggaggttgcgagatcacaccactgcactccagtgtgagcaacagaacgagactctgtctcaaaaaaaaaaaaaaaaaagggaagaaagagaagatagagacacaggggagaatgccacatgaagctggaggcagagattggagtgatacattgtgggaaccctcagaagataggaaaaaagcatggaatagattctccctcagagttccagtagttgccaaccctgctaacatggttttgcacatctagcatccagaacagtgagaatgtatttctgctgttttaaggtacccagttcatggtaatttgttacagcaatcctaggaagctaatactctgacagaaaaaaatcttggataatatgcatgagaaaaatccttcaataaacacaaaattggtttcaaaatgttttcatgtaaaaataaattaacttttctgtaattagattgtgttttatagtaattcttgcctgcttcttagtctttgttgtaggatgcataataaaatacatgaatgagtttt

SEQ ID NO: 224218 - DNA, 1000 bp, Homo Sapiens
caaagagcatggctgagaacaggcacctccaatatgagcggtttgtggtggctcctggagaggacatgagacagctggctgatggctccatggatgtggtggtctgcactctggtgctgtgctctgtgcagagcccaaggaaggtcctgcaggaggtccggagagtactgagaccgggaggtgtgctctttttctgggagcatgtggcagaaccatatggaagctgggccttcatgtggcagcaagttttcgagcccacctggaaacacattggggatggctgctgcctcaccagagagacctggaaggatcttgagaacgcccagttctccgaaatccaaatggaacgacagccccctcccttgaagtggctacctgttgggccccacatcatgggaaaggctgtcaaataatctttcccaagctccaaggcactcatttgctccttccccagcctccaattagaacaagccacccaccagcctatctatcttccactgagagggacctagcagaatgagagaagacattcatgtaccacctactagtccctctctccccaacctctgccagggcaatctctaacttcaatcccgccttcgacagtgaaaaagctctacttctacgctgacccagggaggaaacactaggaccctgttgtatcctcaactgcaagtttctggactagtctcccaacgtttgcctcccaatgttgtccctttccttcgttcccatggtaaagctcctctcgctttcctcctgaggctacacccatgcgtctctaggaactggtcacaaaagtcatggtgcctgcatccctgccaagcccccctgaccctctctccccactaccaccttcttcctgagctgggggcaccagggagaatcagagatgctggggatgccagagcaagactcaaagaggcagaggttttgttctcaaatattttttaataaatagacgaaaccacgaaaaaaaaaaaaaaaaaaaaaaaaaaaa

SEQ ID NO: 224219 - DNA, 1000 bp, Homo Sapiens; identical to SEQ ID NO: 118690

SEQ ID NO: 224220 - DNA, 1000 bp, Homo Sapiens; identical to SEQ ID NO: 118691

SEQ ID NO: 224221 - DNA, 1000 bp, Homo Sapiens
tggagccccaggacttcagcttcccaggctatcccctacccgctctgatccccagcccacccccacctcctctgggcaccagccccccgctgacacctcgaagtccctcacactcgggtgagccttttggcctgcctggcttggagccagagcctgggggcccacaggctggggagccacccccaccactggcgggcgacaagccccacaagtgccctgagtgtggcaagggcttccgccgaagctctgacctggtgaaacaccatcgtgtgcacacaggggagaaaccctacctctgtcctgaatgcggcaagggttttgctgacagctcagcccgagtcaagcacctccgcacccaccgtggtgaacgggcccggccaccaccaccatccactctgctgcggccacataacccacctggcccagtacccatggcccctcgaccccgagttcgggcccagccttctggacccagccagccccacgtgtgtggcttctgtgggaaggagttcccccggagctcagatctggtcaaacacaggcgtacacacacgggggagaagccatacaagtgtgcagagtgtggcaagggttttggtgacagttctgcccgcatcaagcaccagcgtgggcacctggtcctgacgccctttgggataggggatggtagggcaaggcccctcaagcaggaggcagcaacaggactggaatgacgcggtccagggagggtggaggcccaggagaccaaagggaggggctctgccgcttagcagagaagaaagggcctgggaggtggtgggagggagaaggaagggaagaaaggggaggaagaatagatagaaatagggattggagacagtaaccttgaagctcaggaaactgtcctggctgggctgagtcaggaccttgccgggacgggctgtacccctggcttctagaagactgcctagcacacagtaggcattcaatacttgttgaataaataaactggctttcacct

SEQ ID NO: 224222 - DNA, 1000 bp, Homo Sapiens
agcggaggacccgaagcacccagaagccagtctcgccgccgcctcccctacagaagaatacacccctgccccagagccctgccatcccagtctctggcccagtgcgcctagtggtgctgggccccacatcggggagccccaagactgtggccaccatgctcctgacccccctggcccctgcgccaactcctgagcggtcacaacctgaagtccctgcccaacaggcccagaccgggctgggcccagtgctgggagcactgcaacgccgggtgcggaggctgcaacggtgccaggagcggcaccaggcgcagctgcaggccctggaacggctggcacagcagctacacggggagagcctgctggcacgggcacgccggggtctgcagcgcctgacaacagcccagacccttggacctgaggaatcccaaaccttcaccatcatctgtggagggcctgacatagccatggtccttgcccaggaccctgcacctgccacagtggatgccaagccggagctcctggacactcggatccccagtgcataaggatcaagacagacaatgtcgagggacaaaagatagaagatggaggaggaaagacattatacgtgggcttggcccagccccaccgcccacgcctgggtagtagcagtgcctccctcaagggcctgggttctaccaccccactcctagggatctcttgaaccttaggggtgacctgggcccaagtctctcatcagcccccaatcccctgggtaccaggcttctgccacccccggctcagatctttgcaaatcagtacgacagcctcagagcagagcaagggttgtttgggagaatcatacctggttctaaggagtcccacgctttttgccaagcctggtactgagttcatgataccatggtggacacagctgagaaaatccctgccctcatggtgctcattctacttgagtagacgatgaactagtaaacaaataaacaagaacactgcagacatg

SEQ ID NO: 224223 - DNA, 1000 bp, Homo Sapiens
cgacatgaacctcagcatcatcatgaccatctcctccacgcttctggccctcgtcttgatgcccctgtgcctgtggatctacagctgggcttggatcaacacccctatcgtgcagttactacccctagggaccgtgaccctgactctctgcagcactctcatacctatcgggttgggcgtcttcattcgctacaaatacagccgggtggctgactacattgtgaaggtttccctgtggtctctgctagtgactctggtggtccttttcataatgaccggcactatgttaggacctgaactgctggcaagtatccctgcagctgtttatgtgatagcaatttttatgcctttggcaggctacgcttcaggttatggtttagctactctcttccatcttccacccaactgcaagaggactgtatgtctggaaacaggtagtcagaatgtgcagctctgtacagccattctaaaactggcctttccaccgcaattcataggaagcatgtacatgtttcctttgctgtatgcacttttccagtctgcagaagcggggatttttgttttaatctataaaatgtatggaagtgaaatgttgcacaagcgagatcctctagatgaagatgaagatacagatatttcttataaaaaactaaaagaagaggaaatggcagacacttcctatggcacagtgaaagcagaaaatataataatgatggaaaccgctcagacttctctctaaatgtggagatacacaggagcttctatcttgctgaaatattgcttcatatttatagcctgtggtagtgcacatggttaacataaaagataacactggttcacatcatacatgtaacaattctgatctttttaaggttcactggtgtattaaccaaacgttgtcacaaattacaaatcaatgctgtaatataatttgcacctggaatggcaaaaaaaaaaaaaaaaaaaaaaaaaaaaaaaaaaaaaaaaaaaaaaaaaaaaa

SEQ ID NO: 224224 - DNA, 1000 bp, Homo Sapiens; identical to SEQ ID NO: 118693

SEQ ID NO: 224225 - DNA, 1000 bp, Homo Sapiens
ggaaattatttaactgcttggtttatcctaggatcagaggctaaacaactccatagtcaacacttttccacctgacattagaaccctgtaatgatttcattatggataggggaagtctaacaagacaatcgattttaaacagggttttaatcaaataagttcttcccacttttaagctgatgaaagaagtcattatttcttgtgaatattttttcctggagagccttatcatgtattttatatgcttatgtggtgttggatgacatcatggaccatatagcttttatagagaatttttctcaccataggactgaggtctcaccaggtgatctactatgcaaattcctacagttttctattcttaagaaataagggccgggcacggcggatcatgaggtcaggaaattgagaccatcctggctaacacggtgaaaccctgtctctactaaaaatacaaaaaaaattagccgagcatggtggcgggcacctgtagtcccagccacctgggaggctgaggcaggagaatggtgtggacccaggaggcagagcttgcagtgagccgagatcacgccactgcactccagcctgggcgacagagcgagactccgtctcaaaaaaacaaaaaagaaaaagaaaagaaataagatatgatgattgattacttggaccagtgttagaccgacctgtgttagacgaacctgtgttgcctattatattggcagcaccttccattagcaatagctgaaaaattcagagaagaatttagaactttcactttatttttgccattcttcaagaagttgctgtatatttcagtctggttataccttcaattgatcaataacttcaattataggaaaggcatcttctataattttaaattactgtaaaaaaaagataccttttaaagccttggattatacttaaaaattgtaatggaagaaatgcatattaagttatatgcagatattaaacatatctgattctgaagataaaactg

SEQ ID NO: 224226 - DNA, 1000 bp, Homo Sapiens
cctatttatctgctgttgtgtgcttttagttgttggataactgaggtctcctaaatggttcaacataaaaccacatttcaagtcttgtttctttttggagtgtcttttcaagtattcaaatgtatttctcaacctgagcatctttttaatcatatacatgggagtcttttaaatgctgaactgttacacatgcttgatttaaaaataataataatagaggaaactattggtctagttgtgccaagaaaagtttctgatgtttatgtgtgatgtacagtgattttgtatatgcgcccagctttaagaacacataaaactattacgtctggtaggaagattgttagtgcctcaagttacacctgtgcagcttgggtctgagttttgatagaacagtaaacatttaaagaagttaagagcagtttgagctgtatccgcggtttttactcgttaactgacttcagctaaatagtttgaattatagagtaagtataattacagcaaaggagttaatctcattttcaaagctgtttctcattttatttcttgaattaatgtagagcaaaacatgttaaaattcaggaccactggaatatggcaacttatgtttcagggttgtgtgtgggtagtatttgtggttgtattggtttgttttttgtttttggagaaacatctgctagtggaataaaatactttgttttgctctgaagagactgaaattgttcaggcttattatggctcatagattacagagaatgatgctagttacatgccaatgaactatttttactctttttatatgaaatgtaaaaatttgtaggggttctggtgatggtggtacctcttattaccttatgtaaaacacttgaacagcctcatcaatattgccgtcatctgtttaacactcccagtatattttctcaatgtctgttacttaaaattttgtggagtgacataattaataagcaataaagtctgaattatacacaaaaaaaaaaaaaaa

SEQ ID NO: 224227 - DNA, 1000 bp, Homo Sapiens
agcgggttacgtgattgcaaacgagcaagtttaaaacggagtgggctttgggctgcagagccgcctggcattctgacagctgagcaggaggcagaggtgagagtccaagatggactaaaaatgtcccagcagctgggagcccaacctcggcccaacctcgttgaaaggaggaacattcggtgcagccgtcggaaccttattatttatgaaaggggacagctcacaggattacatttttctaagccaatcctgtgaccatcctccatgaaattctctattttggttgcatgtggtcaaaactgagcctcactgaaacaattgaaaacaaatactcccgacaaatcttaagaatcgttttgaaaatcaaaaggtggggaaaatgttgtggcttctgagctttcttcagcccatattctattattctctgatgttttatggtgtaaaatcatacccattccattatgtattgattgtcaagaaggaagtaggcttttattgctatttttatgtcagtttccatttactgtctcaccacatttattgggttattgcctttgcctttgactcaacaggagctggaagggtaggaatcccaaattctgttgcctaaggcagccagttgtcagaatggactttcctcattttctattatgaggcctgaggaaagacattcagttccaaaggctgtgcctatccttttaaatagaagagagagggcccggcacggtggctcacgcctgtaatcccagcactttgggaggccgaagggggcgaatcacgaggtcaggagttccagaccagcctggccaacatagtgaaaccccgtgtctactaaagatacaaatattagccgggcgtaatggcgggcgcctgtattcccagctactcgggaggctgaggcaggagaatggcttgaatccgggaggcggaggttgcagtgaaccgaaccgagatcgcgtcgctggactccagcccgggcgacagagtgagactccgtccc

SEQ ID NO: 224228 - DNA, 1000 bp, Homo Sapiens; identical to SEQ ID NO: 118695

SEQ ID NO: 224229 - DNA, 1000 bp, Homo Sapiens
atgatgaaataatctgtacaccaaacccccaagtcacaagtgttcctacataacaaacctgaacatgtacccctgaacataaaattataattaaaatattaaaaataattcactgtgatttttatggtactgatgccattcttaatcaagttctgataagtggatggtctctgcctatctccacctttctgaatcctatgtgtatcactgtggattaattctagatatcttctccaccctccttgcaccagactaaatctgtattatgtgatattgattcttccttctaaatattacccgttatctctttcctttatttctaccattatctttatctggctcagaattattgtcataggctcctaactgttcctcctgcttctagtttctacccactcaatcaattaccgatggtgttgccagatttatcttcagaaaatattcctaacagccacattatttctttcacttaaaatgttttaatgccccctctttgcaaaagacataatacccataatttgaactccaaaatttatggttttccacaattggttccaattcacttttccagtgacttctcttactatctctcatttctttgccttcagcagaatcatcttaaaacctgccaaacttatccttccttcacagctttgcttttctgcctcttctctcaagcctgcttcagatcataagttcttccacacatctcctgaatcactccaaacccgcatttacctttttattttctgatataagctttgatgcctcttcaattcttaggacatttaaacatatgaatgttgccacagcattttattacctagcttcatatgaaaatgtcttaaattcccacctaaatgaaaagaaactgcccaaatgcctagaacatcacataaggcactaaatgcctcatgttttactgacgggaattgaattgtacattttgctgagtagttttgagaaaaaaatctaataaattcatctgttattcatccat

SEQ ID NO: 224230 - DNA, 1000 bp, Homo Sapiens
atgacacccaccccagttcctttccgtggcagtaaatgaggcattgagagaagaggaggagataccccgtgcccgagatggcagctgccgttggtgacgtgacaagtgccagtgttagtgccagttccagttccagggcctatgccatggctgaagcaagcatcagcaccagcaccaatgcaagtgccagttgccagtgccagggctagagccatggctggagcaagtatcagtacctgggacagtgccagtgtggttgcaatctcaggctagtgtcagggactcctcctgccagcagtgaaggctggggctgagtcttcactttgttttgctgtgggtagtcaaaagggccccacagcagtgggtgctggggtcctgacttttcaagagtcgaggggtagagtggggttagggagaacctgccgcccatggtatctgtgttccagttctatttgtctttctcagtgatttagctttcaatttgcatactgcaaagttttgtttgccttaattaacttttttttataatgatgatcattttacaggaaataaactggttaaaactacatgatgacagaattatatcagagttgaaacaaacgccatacctaagcattttttcaaaatcctttgttccatagacacttgattgagtacttaagttgaacatctaggtctatgaatgacgttggtcaaatgttttattgttctctgtttcggttttagcaggagagatttgctgtttcataaaagaaattgggagagtatatcattttatgcctgtaacttattatagcattggaataagctgttctttggaggtttgagagactttaccagtacaaccattccccccctcccccaaatataaaaagataaaataaaaagccggtcagtgtctgttgcacaaaattacaaccgctctctgcttgtatttgcctagttctccagaatgtagggaaaaataaaaattcaatgaattagaaaaaaaaaaaaaaaa

SEQ ID NO: 224231 - DNA, 1000 bp, Homo Sapiens
cttataattacatacacacacacactgctacttatataaatgttctcatgtaatcatggtaacagctcaaattcccaaagcaagggaagacttctcattgtcagttaaacctgttaaaacatgaaaatattcattgagcctagttccttgttataaaatacaagaaataagacattcaggcattttccctttatgaagatgttcagtcatcctttccttgaactacaattaggaaaagtatatgtctttattccattgaagttctcgagagtgatataaatactttggggggtatctactatgtgcctaactagtcctgttctaggcttagtggaagctagtaaagaaatataattcatggatcaggctcataaagattttataatatttttagttaaacaagagttgggaaacaggtggagaataatgcaagagagtttgtaattaagtgccaattataccaattgctagacccaggatgtatctttaattcttgtcatccaggtcaacatatgatgctgctataagtctggggctcaaattgatatcccagtagcaataaacatataatataggaggagtctgaatgtagagatgaaaaatacagaatgtaatggcttctcttttctctcttgtggaattgcattcaaaccagaacagtgccttagaatggatgtgcccaactgctctgtatttatgcaatatttgaataaagcggaaatgtatgtgctcttcctgcttcacttgcactaattaattatttgaacaacttagagcttcttccctgaacagtggcaacaagcatggcaattgactctgtcctcatcccaagttggaatcgcttttctctctgcaaccatggcactgtgattatgcatcatttttagcatttaatacagtccatttttggctagtagggttagttgcaatcataatatgagttgcatcctccctctcatttatatcaaatatacttgactagatttttacaagttagaga

SEQ ID NO: 224232 - DNA, 1000 bp, Homo Sapiens; identical to SEQ ID NO: 118697

SEQ ID NO: 224233 - DNA, 1000 bp, Homo Sapiens; identical to SEQ ID NO: 118698

SEQ ID NO: 224234 - DNA, 1000 bp, Homo Sapiens
tatgcctacccgcagagcttggcacaaagtggagtcaatcttttaatgttttaaatatgcattttcagactcaaataattaagaagtttcattgatatccactggtcacatcataactgtctatagggcaataaaatctgtgttaaactcaattgcttttataagttttctaaattatttcttcactgtgacagcaaagatttaaataagatgaatgtaaaagagaaagcttattggactcaaacccacagatccacaccagagttctatttacctcatcttggtatcaataaaaacttatgtggaaggtaaatatattgttccccatccaccacataacactctccccaacacacacacacacacacacacacacacacacacacacacacactccttgtaccccttgcccttctcccagctcattgctccaggagagagaagagttcaaaaaataaagtaatcataaacttgaactctctccattctcttgttcccatttacaggtgaatctcttcctttaagccatttttgtctcctgtgaatacagccttatctccacctgtttcttagatcccatctcccctggcttattttttccattcattaccctctttgttccctttacttctcaacctgtgctatatacatgctgttctctctgttgagattgccttatttccatctaacattctctctcctgctattctgatttgtcattcacaactgatttcaagagtcaccttcaccaggaagtcttccttgaccaccatcattcctgcctgattagagggcttcctcatggtaatatgtgttctcaagttttcagtgtcaaggaatgccatcccagaagctcattctcagatgcacaacagccagaacagtctcaagcagcattctagagcttggaatttaagaactacgcattgcctataaagtgaaacataggctaatatagattaaattgaatattgaataaaaaatatatttatttatccac

SEQ ID NO: 224235 - DNA, 1000 bp, Homo Sapiens
gagccactggtattttagtacttgattattttttctttagtcacaaatcagaactgcttaccatactttttgatgccaaacattataccttagaacattgaagaaaatattcctaagctgatgctggctaaaccgctttaaagttttatttggaagtagaactagctttaaaacggggttcaagaggttgccattagctttgtcatgctgttcaaagtttttaattgttatcatggtttttaaaagactgacagtgtttattattattaaaataaacagggttggttatattgcaatagaataatgagaattgaatttttaagttctatgaaacagccagcattgacattttatttttgttatctctcttctcacaattatgctccactggataataggaaaaacacttctttccttcattttttaaataaaattaatgttgtatttaaaaggtagccatgtagagacacaaaaataaatgaagaagctggacatggtgggatgggcatgtggtcccagctactctggaagctgaggtgagaggatcacttgagccctggaattccatgccagcctatgcaacatcatgaaaccccacttaataaatgaatgaacgactaagtcttgctcaaatgttattatgaggtactatgagtgacttacatgtgttttaaaatgtcagtgtgtttcccagaggcagaaataaaaatactgaatatctttgctcttaaaaaaaaagtaacactatagatttgtttttgttagatgatttgctctatagtagaatatttaagtagactgtgaaatatttattaatatagatgtgaatatcaaaaaatgtttctaaggtattatgatgcatcaactagttcttccatgtaaaataattttagtgcaatatgaagacgtagaaatgtaaaatatgatttgaattgttatcctttatattaagaaaatgttttaaaatgtaagaattccatttaaaaaaaaaaaaaaaaaa

SEQ ID NO: 224236 - DNA, 1000 bp, Homo Sapiens
agggaaatcatttaggaaaacaaaaagtgattgagagatctctgaccgagtacaacagcacaatggagagggttgagtctcaggtgcttaaaagaaatgaatgctacaaacccactgggctgcatgctaccccaggtgaaagccaagaacctaacctctctgctgaaagttgtggcctaaattcaggggcccagtttggttttaactacgaagaagaacccagtgttgctaaatgtgtacaggcctcagcacctgctgatgaaagaatctttgattactatagcgcaagaaaagccagttttgaagctgaagtcatacaagacactattggtgacacaggaaagaagccagctagctggagtcagagtcctcagaatcaggaaatgagaaaacatttcccacaaaagttccaacttttcaacacttcacatatgccagtgttggctcaggatgtccaatatgaacacagtcacttggaagggacagaaaatcacagcatggcaggagatagtggaatagattctccacggacacagagtctgggatctaataattcagtcattttggatggactaaaaagaagacagaattttctgcaaaatgtcgaaggcacaaagagcagtcaaccactcacatctaattccttactaccgctaactccagtcataaacgtttaattttcttttggaaacctacttttttctttataaaaaggtagagcattattacagaatctttcaatcatgtaagaattgagtatataagaattgtctaaaggcaagcatatctatactattaaccacattacacattttgttctaattactggctttttttcctcttttggtgtcttaaggctttttgaagcttattttactgtgagtttattgggagtatatagattattttcgattaaaaagtggaattattggtccccttccaattgtaattatcttgaatttttatacattagtttctcaaatatatagaatgccaattt

SEQ ID NO: 224237 - DNA, 1000 bp, Homo Sapiens
tgaacttgttatcctatcctgctatttatgagcttgtaaggaatcaagatcttcctaataaaacagaatattctcttcgtgaagtcccaacatgtgttattgatattattgatagacttataattttgaattctgaagctaagattcgttctttattcaactatgaacaatcacatatctttggtctaagggactttataattgatggcttatcagtggagagaaatcatgttcttgttagaataaatcttgttggtgggccattggaacggattttgcctccgaggttactcgaaaagagtgataatccatatccttggccaatgttttcatcacatccattgccaaactgctatctgtcagacattacaagaaatgctggtataaaacaagacaatgatcttgacaagcttttattatgcctcaaaatatctgataaacaaactgaatggatagaaaactgccaaagacaattttgcaaaatgatgaaagccaaacctgatataatcagtggagaggccttaatagaattacttgaaaaatttgtgcttcatctcactgaaagcccatctgaatgctacttcccttcagtggagtatacagctactgatgcaaatgtgaagaatgaaagtctttcatctgtgcagcagcttggcattaaaatgactgtcaggtatggcaaattcctcagtctcttaaaagatggtgcagaaaatgatcttacctgggttttaaagcattgtgagagattcctgaaacagcagcaaacttccataaaatcttctcttctctgcctgcaagggaattatgctggccatgactggtttgtatcttctctgctaacaatactgaaattagctgggtgcagtgatgcgcctgtagtccctgctacttgggaggctgaggcaggagaatcgcttgaacccgggaggcggaggttgcagtgagccaagattgtgccactgtactccagccaggccacagagtgagactctgtctc

SEQ ID NO: 224238 - DNA, 1000 bp, Homo Sapiens
gagctgaaatcagccttattagatggtgatactcaaaattatgatttggatcatggattttcaaggcacccaattgatgatgactgccgttccggcatcgagattaagctaggtcagccatccgttatcaatcacatacggatactcttgtgggaccgagatagccggtcttactcatacttcattgaagtgtcaatggatgaacttgattgggtcagagtgatagatcattcacaatatctgtgtcgttcttggcagaaattatattttccagcccgtgtctgcaggtatattcgaattgttgggactcacaacacagtgaacaagatttttcacattgtggcttttgaatgtatgtttacaaacaaaaccttcactcttgagaaggggctgatagttcccatggagaatgttgcaacaattgctgattgtgccagtgtgattgaaggagtcagtcggagccgaaatgccttgctgaatggggacactaagaattatgactgggattctggctacacatgtcaccagctaggaagtggtgcgattgtggttcagttggcacaaccgtacatgattgggtcaatacggttactactttgggattgtgatgatcgaagctatagctactacgttgaggtttctaccaaccagcaacagtggaccatggttgctgacagaactaaagtctcctgcaagtcctggcagtcagtaacttttgaaaggcagcctgcctccttcatccgtatcgttgggacacacaacacagcaaatgaggtgttccactgtgtccactttgagtgtccagagcagcagagcagccagaaggaggaaaatagtgaggaatcggggacaggggacaccagcctggccggtcagcagctcgactcccatgcgctgcgggcgcctagtggcagctcactaccctccagcccaggctccaactcacgctcccccaaccggcagcaccaataaaggaggcagcgggcctggtgtgacttgg

SEQ ID NO: 224239 - DNA, 1000 bp, Homo Sapiens
agccctgcttgaaaagacccttcaaggaagtaaaatggcaggggcagagtgcagcttaacatgttgctatccctgttgtttttgagttggttttggaatggattcaagttcttacacaatttattttgaatacaagcataatctaggtgatttgagttaatgaacttcttttcatgatgtagggaaagttgaatgtatatatttctaagaagaatttgtttagcagattacaagttggcaaaatagactgttcacagaaactaggcaaaaatttaagaaaacattctagtctctaaaacccattactaatgattaacattaaaatatttgtaactcttagaaagggggcattactaagacgactttaacttgttatgaaatctttgttgtgtgatgcaggtacagtgcgcccattccaactggaatagcagtttgattttaatcgtaaaactaaacttcgggaatatgtatgcccaaagtaagtaggatgagaatagtatacatgggatatggtccaatgaatttaagccccaagatacagctaaatacatttatgatttcataaaatctagtttagatagcattgtgatgcaatttccagaaatccatttgtgtttagagtaaataccatgtttagaagatgttttgtggtttggatttatatatttgtaaggtttttttaaaaaaatgttcgttttgtttgaaatgtaacattgagtaaattggtgagttatataatgagatttctagaaagctctggacatgggtacgatgtgttttgcttctctgtataatgtctacagtgataaacttgtgtctccgtgtattgtggcagtctttttttctagttaatttggctttagagagcaatctttgtatgacaccagaaaactcttcatgctattgaatgataaaaaaataatgctttaatattttattcactgtgatactattttgtttgtctattaaattgttattatttccaaaaaaaaaaaaaaaa

SEQ ID NO: 224240 - DNA, 1000 bp, Homo Sapiens; identical to SEQ ID NO: 118702

SEQ ID NO: 224241 - DNA, 1000 bp, Homo Sapiens
gcggctctggagggggacagcagtatgcagatgactggatggctggggctgtggctcccccagcccggcctcctcggcctccataccctcctagaagggatggttctgggggcaaaggaggaggtggcagtgcccgctacaaccagggccggagcaggagtgggggggcatctattggttttcacacccaaaccatcctcattctctccctctcagccctggccctgcttggacctcgataacgggggaggggtgccctagcatcagaagggttcatggccctttcccctcctcccccctcagctgggcctggggaggagtcgaagggggctgcagagagggtagagaagggactttgcaggtgaatggctggggccccaaatccaggagattttcatcagaggtgggtgggtgttcacaatatttattttttcatttggtaatgggaggggggcctgggggtatttatttaggagggagtgtggtttccttagaaggtatagtctccagccctctaaggctggggctggtgatcagccccaacagagaaaatgaggagtttagagttgcagctggggaaggggtttgaaggaagttggaagtggggaggggtgggggcatctggtctcagaaatggaccagctggatgcagggcaggggactgagggtgcttgagtaggatgtgagacttcatgggcctgggttctgttgagttttttcagtatcaatttcttaaaccaaattttaaaaaaaacaaggtgggggggtgctcatctcgtgacctctgccacccacatccttcacaaactccatgtttcagtgtttgagtccatgtttattctgcaaataaatggtaatgtattggaaaaaaaaaaaaaaaaaaaaaaaaaaaaaaaaaaaaaaaaaaaaaaaaaaaaaaaaaaaaaaaaaaaaaaaaaaaaaaaaaaaaaaaaaaaaaaaaaaaaaaaaaaaaaaaaaaaaaaaaaaaaaaaaaaaaaaa

SEQ ID NO: 224242 - DNA, 1000 bp, Homo Sapiens
gagagttatgtccgagcgagtgcagtgaccgccatggggcagctgtccagccagggcctgcacgcccccaccagccctgagcatgcagaggcccggcagagcctgttcctggagctcctgcacatcctctccgtagactcggagggcttcccacggcgggcggtcatgcaagtcttcactgagtggctgcgggacggccacgccgacgcggcccaggacacggagcagttcgtggccactgtgctgcaggcggcgagccgagacctggactgggaggtccgcgcccagggcctggagctggccctcgtgttcctgggccagactttggggccgccgcgtacccactgcccctatgccgtggccctacccgaggtggccccagcccagccactcaccgaggcactgagggctctctgccacgtggggctctttgacttcgccttttgtgccttgtttgactgcgaccgccctgtggcgcagaagtcttgtgacctccttctcttcctgagggacaagattgcttcctacagcagcctgcgggaggccaggggcagccccaacactgcctccgcagaggccaccctgccgaggtggcgggcgggtgagcaggcccagcccccaggggaccaggagcctgaggctgtgctggccatgctcaggtccctagacctggagggcctgcggagcacgctggccgagagcagcgaccacgtggaaaagagtccccagtccctcctgcaggacatgctggccacgggaggcttcctgcagggggacgaggccgactgctactgagcagaaccagagtctgccactggggctcaggaccaagggaggcagcaccatgtccttctgtgggacactgccagccccagggctccagcccagcccggtggatcctctggggaagccaggaccaggagagaagcaaggtcaagaaatcccacagtttgatgtattaaagaaatgacttatttctactcaaaaaaaaaaaaaaaaa

SEQ ID NO: 224243 - DNA, 1000 bp, Homo Sapiens
gcatgacttccatgagattgagggagcctgcaagagaggatttcaggaaaccttgtatgtgtggaatgaacctaaatggtgcattaaaggaatttctttgcctgagaaaaagttggcaacctgtgaaacggttgacttttggctgaaggtgggagccggtgtgggagcttttactgccgttttgctggtggctctgacctgctacttctggaaaaagaatcaaaaactggaatacaaatattccaagttagtaatgacgactaactcaaaagagtgtgaactcccggctgcagacagttgtgctatcatggaaggagaagataatgaagaggaagttgtatattccaataaacagtcactactaggaaaactcaaatctttggcaaccaaggaaaaagaagaccattttgaatctgttcaactgaaaacctcaagatccccaaatatatgaagagacagtgctgtagccttgagactaatgaacaaagaaacctgctctagttttacaggaccatattttagggtctgtcctcatacctgtcacattggtgatctcacagaggagggccatgccgctgaaaagggaaggagattgaaacatttgattgccttatcacatggtcaagtaccttgccaaataaaggaaagcaaatgatttgggtctcaactgaagatgaagctcaactcaggaagagatttatctgtatatacacataactgaaaaccaagtttaagcccaccaatgcactgctgatgcatgccatataattaatgggtaacttttattctttatgatgtctacataacaagtgtgatttggaaggcacatgtgagcatatgcattatgatccaatttatgttttttctttgtttatattttggggaaaattaaaatttttttaaggtatatttttcccattatttattttcctgaccttaaaacagcttttctactaaaaaatggtgagcaatgaagacaataaatttttcatttttccat

SEQ ID NO: 224244 - DNA, 1000 bp, Homo Sapiens
agctcaaaacactacatccacattattgacttttggaaaccaaccaaattacttaagaaatggaaaagtagtcacagagaaatttagtaatttgcaaaagccacaacagtagtggaagaattaaaattcataaagtctcatcattctgttggctaaaataatgctctttacaatatgctggctacaaaatggtcttactcttgaattttgcttttggttcatattttggttcttcatattctagtatgttttgttcctgctgaattttacagactcagctaaacaataagttattagtagtcacttgttttcattatcataattgaatttccaagaacaacttgatatcattcagctgtccaaaaaataataagagcattcattaaatactgattttcttaaacttaaatgttgtatttcatatttatttatataatacaaatggaaatcaaaactgaaatagcctccctttagaatgtcacatttttcttagaaaacattttggaattggttaaccttattgggaatggataatttagaaacaaaccaaaaaaaaaaaaagatatttgaagtgtttttataggagatgtatttttatcatagtaaatgatcacaattttaaataattcatcttacaagtcaggtaaaataaaatcgattcccagattccatacattaggagtgcaaagacaggatcatacacatgacttatacctctcatttaaatattttatagtataaagtatttatggaaagggtttgagatagatgatttttgggaaagggcaaaatgtgtcagatgccctagttaatcatgtaatttaattctggtattgtgagtggttagcaatcaattttgaatttataattctgctattttaaaagaaatgtagtcttgtagtatgaaataattaaaaattgttaaatgtatattttggttgtattataataaaatgcaaacatgactgttctatgattataaaaaaaaaaaaaaaaaaaa

SEQ ID NO: 224245 - DNA, 1000 bp, Homo Sapiens
gtcacatacctcaagaagcagtgtgagaccatgttggaggagtttgaagacattgtgggagactggtacttccaccatcaggagcagcccctacaaaattttctctgtgaaggtcatgtgctcccagctgctgaaactgcatgtctacaggaaacttggactggaaaggagatcacagatggggaagagaaaacagaaggggaggaagagcaggaggaggaggaggaagaggaggaagaggaagggggagacaagatgaccaagacaggaagccaccccaaacttgaccgagaagatctttgacccttgcctttgagcccccaggaggggaagggatcatggagagccctctaaagcctgcactctccctgctccacagctttcagggtgtgtttatgagtgactccacccaagcttgtagctgttctctcccatctaacctcaggcaagatcctggtgaaacagcatgacatggcttctggggtggagggtgggggtggaggtcctgctcctagagatgaactctatccagccccttaattggcaggtgtatgtgctgacagtactgaaagctttcctctttaactgatcccacccccacccaaaagtcagcagtggcactggagctgtgggctttggggaagtcacttagctccttaaggtctgtttttagacccttccaaggaagaggccagaacggacattctctgcgatctatatacattgcctgtatccaggaggctacacaccagcaaaccgtgaaggagaatgggacactgggtcatggcctggagttgctgataatttaggtgggatagatacttggtctacttaagctcaatgtaacccagagcccaccatatagttttataggtgctcaattttctatatcgctattaaacttttttctttttttctaaaaaaaaaaaaaaaaaaaaaaaaaaaaaaaaaaaaaaaaaaaaaaaaaaaaaaaaaaaaaaaaaaaaaaaaaaaaaaaaaa

SEQ ID NO: 224246 - DNA, 1000 bp, Homo Sapiens
atcccaaacactaaacatgattgatgggtagaggctgcccgaagtactgtgtaaagatggaatctgagatagaagaatgctgtggtcaattagtaattcttgcccatggagggattagtgacacatgccttgtatatttgtcatctgtggcctaaactctgcccctgaaggtttgttttctaattcagaggtttaaattaatctagcccacttaataaaaccagagatcctatgggaaatttagcctaagacagtgctggaaattgccatatgttgatacaaagaagtgtttggccacattacaggtctcagactcaactgctatgtgtgactgccgctctgtgcctatgtcttgcttttttgctgagttccctatttccatatctccaggtgaatccatgagaagcgagagggtggctgagaggcctgggcctctgggattccaccttgctatctctgctcttcaaccattgttttagactctgaacaccagatcctcatatctgaaagtgatttggagacctgggcatcaagtgctcttttaagaaggggctatcccagaggactgttcaaaagtctcattcaatagagatgttggagtccagaacaaagttagggagcaaaccagtaacctatgctggtcgtaacagaggatcctacaattacgtttgtttttaagacaggattttgctgtgttgcccagactggtctcaaactcctgggttcaagagatccatcctcccacctcagtctcctgaaagctgggatgacaggcacatgccaccacacctagctccttacaaccatttattttaacttatttcatttataactggtatctttcatttgtatgtggcagctagagatttatataggatggaagtaatttatttttaatttaaatatttcatgttgaactgtttgccttgtatggaacattttacttggccaattcaaataaaaataaagtcagctttgtttgtgaaaaaaaaaaaaaaaa

SEQ ID NO: 224247 - DNA, 672 bp, Homo Sapiens
gcgggcttcagcgaggcgggagggcggccctgttgccctggagacgctttccctgctgccggccgcgaccgcaacccgctaggccttcatcgcgagctacgcccggaccgagaagccccggcatggccacgtccatcggagtgtccttctcggtgggcgacggggtgcctgaggctgagaagaacgcaggggagcccgagaacacctatattctgcggcctgttttccagcagaggttcaggccctctgtggttaaagactgtatccatgctgtgctcaaggagggactggcaaatgctgaatattctccagaagaaatgcctcagcttacaaaacatttatcagaaaacattaaagataaattaaaagaaatgggatttgaccgatacaaaatggtggtgcaagtagtgattggagaacaaagaggtgaaggagtattcatggcttctcgctgtttctgggatgctgacactgacaactatactcatgatgttttcatgaatgacagtttattctgcgttgtagcagcatttggctgtttctactactgaatgaatctttgaaaagctggtaaaagacatgaccatgaagaaatctgaactttttaatattgttaaatatcttgacaaaataaagatgttagtagtttgaaaaaaaaaaaaaaaaaaaaaa

SEQ ID NO: 224248 - DNA, 1000 bp, Homo Sapiens
ggaaatagccttcaacagactactggaggcttttatccattaattgggtggaagattgggcaagaagtcgtatgcttagctgaaagcaatgcaggagacactggtactgccataaaatgggctcagcagttagggttttttgttgtttgtttgtttttgcagaccttttcacagatgctgctgagactgaaaaaatggccaaaagtttggaggattctgaaggagtttgttttgttccatcttttagtggattacaggctccattaaatgacccctgggcatgtgcctcttttatgggtttgaagccttctaccagtaaataccatcttgtacgagcaatattggagtcaatagctttcagaaacaaacagttatatgagatgatgaagaaagagattcatattcctgtaaggaaaatccgggcagatggaggagtttgtaagaatggttttgtcatgcagatgacttcagacctgattaatgagaatatagacagacctgccgacattgacatgtcatgcctgggtgcagcttctctagctggccttgctgttgggttttggactgacaaggaggaactaaagaaactgagacaaagtgaagtggttttcaagccacagaagaaatgtcaagaatatgaaatgagtctggaaaactgggccaaagcagtgaaacgctccatgaattgggtcttgctgtgttgcccggggtagtctttaattcctggcctcaagtgatcctcccaccttggcctcccaaagtgctgggattgcagccgtgaaccactgcacccagccaatgggtgtaatttcataggaaataattctttttgtcagaatgtactgaattgtaatattaatacctgaaaatttgttagttcacttcttttccacgttcttctttcccaacatataaccacaaaataaaggataaatacttaaaaaaaaaaaaaaaaaaaaaaaaaaaaaaaaaaaaaaaaaaaaaaaaaaaaaaaaaaaaa

SEQ ID NO: 224249 - DNA, 1000 bp, Homo Sapiens; identical to SEQ ID NO: 118707

SEQ ID NO: 224250 - DNA, 1000 bp, Homo Sapiens
atgtgctgactcccaaaagaggagaaatgcaatggcttgagcttgcatgtgtcacaggtttgtggagccttcagccaggtgatggtcttcagctaaagagccagctgcatcttggtatctcttcctctgctaacttcctacttttagcaaaattctttcacttggaactctagctgatccttggccaggatcagatcctcaaaaggaaatattcagttagcagtggatattgtacaagatgtaacatggcttagaggaaagagtgtagacccagcgacagatcatcagtcactcaaatcctggttctctctcttcctccatctgtgactttgaacatgctacttggaggctcagcttcttcaccatcaacaggaggattacatctaatgcaggcaatcatctattacagatgccgaataaatgatatcaaagagcatagagaaacaaaaatcttttatgatgtacggaaaaaaaccatgctgatacagctggctattcagggtcacccagcagtcctccagcaaggtagaaacaccaaatcaatgagtttatgctagaatttttcacatggccactggaccattgtggaagtagactggttgaaatattcttagtatgacatagtaagttatatttgtttgaaccttatcctgtgaaagcattatctgtcccaaacagtatatgccttttatcagggacacattaaatataaatgtttaaccaaagaaagttgttcttataatgtaattataacagggatttataagagggaattataagagggattatgaaagggaattacttttgagcaaggggagccatttgggagtgcttcaagatacccaatatgatatacacaattatgatttgtcagtcaaaaataatattaagaacaaaaaaagagttaaaaaattctgatatgagtgtaatatacttaatatgtaggatgtctcaaatttccagtaaataaattttaatgtcccaaaaaaaaaaaaaaaaa

SEQ ID NO: 224251 - DNA, 1000 bp, Homo Sapiens; identical to SEQ ID NO: 118709

SEQ ID NO: 224252 - DNA, 1000 bp, Homo Sapiens; identical to SEQ ID NO: 118712

SEQ ID NO: 224253 - DNA, 1000 bp, Homo Sapiens
ggctgattttctttttaatatatttagccaagtgatgcactttatgataattaaactcttttgtgccaagtttaattggtggatttttttagtaagtagagttaggagaaagaattatgtagtgcctttactatttcactttctacaaaagtctcctagggtctttgagtcagctttatgaaaaaatgtttgtttatttcagctttgtgtacagtcattaaaagtgccttgtttcatttttataggatgaagttatttattttctattttcactgttttgcatattgctgttaataagcattgtaatcatgctggcattttgcaatcccagtcggtatgctttctaaaaactgagggaaacttactggggaaatagaataacaatctccatttttttctttactatctaaaagtttatcggtatcttgatgtatatatatattaaggtgtggctgtttaaaattctaatgacatatatcaacacattcaatggctgttgttaacctttgaagtaaaaaggagatcactttttaccaaataaccaaaaatttttagtctttgtcaaagtgcacaggtatgttctcagaacatttttcacaatgtgtatcagaaatatgtttgctatccttagagacagaaatgaatataacaaattgatctgcttatttattaaaattattattctagacttacaaaaggcttaaaaagaacaatcatttaatcagtaccattctgtatcttatataacagatctttgccaaattctagatattatagtgttgcctgtctgttctaaagcgaaccagccactttttcaatctggctttttggaagattgtatttaaagttcttcaaggatgaagaaaaaaatctgttaattaggtaaaccactattatttatatttataatttacttttttttacttttataatgcattttactcccagtattatgttcatttaataaattattttttcactacaaaaaaaaaaaaaaaaa

SEQ ID NO: 224254 - DNA, 1000 bp, Homo Sapiens; identical to SEQ ID NO: 224253

SEQ ID NO: 224255 - DNA, 1000 bp, Homo Sapiens
tgctttgtatggtatgaaggatttgtaaagctttgctcaaagttgtgtgcatttgtaaacactatcatgatattttcaattttatgtgtaaattttattgtctgtttttggtgactctgacattaatggaagagaatattttccattagatttaattttttttcctctcccttctgattttttttttattggtgttcatttttcttttgatttaaaggattagagaaatctacaaatgtatgtcataaataagcaaatttgtaaacttttctgaactttagtgaaacatttagttcacaagcataatttggaggtgtgttctgtgtttacacagtagtttggatgtacaattattattagtggctttttaaaaaatgaaacagtgttaagtgaaatgtagttcctagctttgtactccaagttgtcaaagcatcaacaatgaaaattcgattaggaaactttatttaaaatttcaggtagtaatattcagtgtagttaaggccagtcttaacccactggatgaaaatctaggactgtatggaagtaagcaaacattacatttttaggtggaaatagtcagccttgcataaaaacaaggatgcgtgaaagccttaaattccagctcccttttactggagtctgtggttgtgtacaggtatgggccaagtgtaaaatctcatcaattttaagaacactcgggaaatgagtaaagaaaatgtaaaattgctgctagtcaaatcttttggaaagaatttctggaagtggtcactttaaaaattattttccacccttgcaaaattgccacatttaaattgttttactggcagttctatagtagtccagactttagaaaccaaacacaacaaaatggcttgttgccaatatggccacaacattgccagcaaatactgccttggcatcactcagcagaggtttttgtttataaagatgaagtcttgaatactgttcaataaacttgtcaaaaaataaaaaaaaaaaa

SEQ ID NO: 224256 - DNA, 1000 bp, Homo Sapiens
cctcatggccacacagaccttctactccacaggccaccagcctgtctttccagccatccattggcatgcagccttcgtgggattcccagagggtcatggctcctgtacttggctgcctgctttgctagtgggagccaacacctttgcctcccacctcctctttgcagtaggttgcccactgctcctgctctggcctttcctgtgtgagagtcaagggctgcggaagagacagcagcccccagggaatgaagctgatgccagagtcagacccgaggaggaagaggagccactgatggagatgcggctccgggatgcgcctcagcacttctatgcagcactgctgcagctgggcctcaagtacctctttatccttggtattcagattctggcctgtgccttggcagcctccatccttcgcaggcatctcatggtctggaaagtgtttgcccctaagttcatatttgaggctgtgggcttcattgtgagcagcgtgggacttctcctgggcatagctttggtgatgagagtggatggtgctgtgagctcctggttcaggcagctatttctggcccagcagaggtagcctagtctgtgattactggcacttggctacagagagtgctggagaacagtgtagcctggcctgtacaggtactggatgatctgcaagacaggctcagccatactcttactatcatgcagccaggggccgctgacatctaggacttcattattctataattcaggaccacagtggagtatgatccctaactcctgatttggatgcatctgagggacaaggggggcggtctccgaagtggaataaaataggccgggcgtggtgacttgcacctataatcccagcactttgggaggcagaggtgggaggattgcttggtcccaggagttcaagaccagcctgtggaacataacaagaccccgtctctactatttaaaaaaaagtgtaataaaatgataatataaaaaaaaaaaaaaaaaa

SEQ ID NO: 224257 - DNA, 1000 bp, Homo Sapiens
tttacccaagtgacttctacactgttgaactctgcttacccattcataggaccctttttttttatcatctctggctctctatcaatcgccacagagaaaaggttaaccaagcttttggtgcatagcagcctggttggaagcattctgagtgctctgtctgccctggtgggtttcattatcctgtctgtcaaacaggccaccttaaatcctgcctcactgcagtggaactctctctctgatgctgatttgcactctgctggaattctgcctagctgtgctcactgctgtgctgcggtggaaacaggcttactctgacttccctgggagtgtacttttcctgcctcacagttacattggtaattctggcatgtcctcaaaaatgactcatgactgtggatatgaagaactattgacttcttaagaaaaaagggagaaatattaatcagaaagttgattcttatgataatatggaaaagttaaccattatagaaaagcaaagcttgagtttcctaaatgtaagcttttaaagtaatgaacattaaaaaaaaccattatttcactgtcatttaagatatgtgttcattggggatctcttgatttgcctgacattgacttcagcaaaagcacggggctgtaaattaccatttactagattagccaaatagtctgaatttccagaaaacaaggcagaatgatcattcccagaaacatttcccagaaaatgtttcccagaaaactagacagcatgatcattcaatggatcacagtgaagcaaaggacacaactttttattgtaccccttaattgtcaacaggagttaactgatttgttgtggtgctcagacttttttatacaggtgctagtgttttatcctatgtattttaactcattagtgcataaaggcaagccccatataatgaagtctcagggtatatgaaagtagctggcttcaaaataaaatttttgagtgcaaaaaaaaaaaaaaaaaaaaaaaaaaaaa

SEQ ID NO: 224258 - DNA, 1000 bp, Homo Sapiens
gcctttgggtgctcccctctcgtggtcgttctggcccgaggcccttagagtatggaggctgagccaggccttgggtttccccagcacagcctcctgtcgctgcatgcgacgtgttgggatttttggatgaaagactctcccacgctctgttggtggacttagctgcctcactggaagtgatgtgggtggaaggtggttgtatgttaccttttccacctctcattgttttccccagaacattgtagatgggggttggcagagggagaaataagccagccacggcagtcgcttggtttcccaggtggaatgggctaacacaggagatgatgggaacctgtcccgcagtccctgcatgaccattggccctgctggcctggcgatgtgggcatcctggggttcttagggtcccagaacaagccccaggcaagctggaacttgggtggggaggggacatgaggaggataaacagctgactgtggcttcaaggacatcagggccaccccaagtcctcagtgtcctactcctggcaaggagttgggtttggatcaaaagtgtttaaaattaatatgttgtcagtgattagaacaacactgtttacataaaaaccatttttctaattctaacaagttagaatgtgaggaaggaatgaacatgagtgtttaggaacctgccctttggtgctgggctggcgtcccgcactggggtgtcctcgctgtctgggggctgctctgctgccccggcccaggtccccttgtggtgttgccagacgggcctcatggtctgctgtgcagagagaggcaggaaggatccctgaagagtcttggagaaaaggttctgtgccctcaggtggggcttaccccctcgtatttataatcttaatttatatagtgaccaccgtggaaacaaacgcctcttgtattgtcatgtacatagtccatacctgagtgctgtacataagttgttctgtgtataaataaaacaagcctgtttttgatcttcc

SEQ ID NO: 224259 - DNA, 1000 bp, Homo Sapiens
atgtacacaggcactcacatggcacacacatacactcctgcgtgtgcacaagcacacacatgcaagccatatacatggacaccgacacaggcacatgtacgtgcacaggtgtgctacacatgtgcacacatgcacagttgcacagacacacacacacaggtgcacacacacgatgccgaacaaggcagaagggcgactctcacctctcatgtgcttctggccagtaggtctttgttctggtccaacgacaggagtaggcttgtatttaaaagcggcccctcctctcctgtggccacagaacacaggcgtgcttggactcttgacaagcagacctgctcctgcagaggagacagccacatttggaattgggcaccgagaagacctgagaaaaacccactctctctttttttttttttttgagacggagtcttgctctgtcacccaggctggagtgcagtggcacgatctcggctcactgcaacctccgcctcccaagttcaagcaattctcctgccccagcctcctgattagctgggattacaggcgtgtgccaccatgcccagctaatttttgtgtttttagtagagacggggtttcaccatgttggtcaggctggtcttgaactcctgacgtggtgatccacctgcctcggcctcccaaagtgctgggattacaggcgtgagccaccacgcctggccgaaaaacccactctcataacagaagtgcagactcattgctagattcagtgcccttgagtgtgccagaggtcctctgtgtttgagacaatcctgtgtgtgccaggaggctccgtgtgcaccaggggctctcagaatcccgcttacccagctggagaccatgcctctggcagccccatctcagccagccctgctctctccctcttccctccaggtgaggcaaacttcataggaatctgtacctgaatgtgagctccggataataaaactctgaggctttggtgagcgtaaaaaaaaaaaaaaaa

SEQ ID NO: 224260 - DNA, 1000 bp, Homo Sapiens
tttttttgtttgtttttgagacagagtcttgctctgtcacccaggctggagtgcagtgctgtgatcttggctcactgcaagctccgcctcccaggttcatgccattctcctgcctcaccctcccgagtagctgggactacaggtgcctgccaccacgcctggctaatttttttgtatttttagtagagacggggtttcaccgtgttagccaggatggtcctgatctcctgaccttgtgatctgcctgccttggcctctcaaagtgctgggattacgggcgtgagccaccgcgcctggccaggatttctatttttaatatttttgggaaaatttttccatagtacctgtgccattttacattcccaccagcagtgcacaaggattgcaatctatatacatcctcaccaacattgttcattttctatttctgtttttggggttttttgtagtgccttttgttttggatagcagctatcttgttggatgtgaggtggaatctatagtgtctttcatttttattttgtgaatgattaatgatgttgaggatcttttcatgtgcttgttaggcatttgtgtatctggaaaaatattcaagtcttttttttccatttttaatgggactatttgctttttgttgttgagttgtagttctttatacattctggatattaactccttaccaaatatatgctttttacatattacctcccagtccataggttgctttttcgctctgttgattgtgtcctttgatgaaattttaagttttgatgtactgttgactctttctgtctgtgggttctgtattcatggatcgaagcaaccatggatcaaaagtatttggagcatccatggattgcagtgatcattaatcaaaaatatttggaaaacaaaaagggtagttgcatctgtactaaacatgaacagacattttttcttgtcattattccctaaactatatagtataataaatatttacatagcaaaaaaaaaaaaaaaa

SEQ ID NO: 224261 - DNA, 1000 bp, Homo Sapiens
aaagccaacccaaggtgcccggagagtcttacaagagacactgccactgaaatagccatcaatgtgaaggcgctgtataatgaaacagaatctttgctagttggcagggttcctttgcagctggaatcgccacatgaagagcgagtatccaatgccttacactctgtggaggtggaattacagaaactgacagagattccttggctttattatatcttacacccaaatgaggatgaggaacctcctatggattgcaccaaaaggaacaacagaagcaccgtatttcgaatagtgccaaagtttaaaaaggaaaaggttcagaagcagaagacaagttcacagcctggatctggggataccgaaagtgggtcatgtgaagcgaattctccagggaattaaagagcttggaaggagcactccacagtcggaggtgtaatcatattggtgctatttcttggaagagaagttattgccacttaatacaaagtccttggaagcaagtggctgttcttgtagttttctgcatagataagtaagcaccactgaagcacctctgtggcttgatattttgctgtgggtgaaattttgatttgaggtattagaaaatatttttgtgccgaacaatacattccacaaagccattttctttttgtgcaaacctgacatgttcaaatatattcacaatggtaataaggtaggaggaatctgagacgattgcattgtctaaacagtggaattgcaaaatgtttactttccatagatctggtctgatggaatgttcctactgtgcaactgcataacaatatgtggttaaaacttcctaggtttcattacgggggggcattggccattttcttaaaatcataggttaggagactaaaatataaattaagttgtgatttgaatgtagattggtatcacctccaactcctagtgcttagtggtcaaatatgttgaaaacctttccaatactatgaatgaatgcaaatcttaatgcacg

SEQ ID NO: 224262 - DNA, 1000 bp, Homo Sapiens; identical to SEQ ID NO: 118717

SEQ ID NO: 224263 - DNA, 1000 bp, Homo Sapiens
ccctcggtgggcccagggcctagggcccaggatcaagtcactcatctcagaatgtccccaccaatccccgccacagcaggcgcctcgggtcccagatgtctgcagccctcagcagctgcagaccgcccctcaccaacccagagaacctgctttactttgcccagggacttcctccccatgtgaacatggggaacttcgggccctgcctggagtccttgaccgctctctgtgggccccacccactctgtcctgggaaatgaagaagcatcttccttaggtctgccctgcttgcaaatccactagcaccgaccccaccacctggttccggctctgcacgctttggggtgtggatgtcgagaggcaccacggcctcacccaggcatctgctttactctggaccataggaaacaagaccgtttggaggtttcatcaggattttgggtttttcacatttcacgctaaggagtagtggccctgacttccggtcggctggccagctgactccctagggccttcagacgtgtatgcaaatgagtgatggataaggatgagtcttggagttgcgggcagcctggagactcgtggacttaccgcctggaggcaggcccgggaaggctgctgtttactcatcgggcagccacgtgctctctggaggaagtgatagtttctgaaaccgctcagatgttttggggaaagttggagaagccgtggccttgcgagaggtggttacaccagaacctggacattggccagaagaagcttaagtgggcagacactgtttgcccagtgtttgtgcaaggatggagtgggtgtctctgcatcacccacagccgcagctgtaaggcacgctggaaggcacacgcctgccaggcagggcagtctggcgcccatgatgggagggattgacatgtttcaacaaaataatgcacttccttacctagtggcccttcacacaacttttgaatctctaaaaatccataaaatccttaaagaactgtaa

SEQ ID NO: 224264 - DNA, 1000 bp, Homo Sapiens; identical to SEQ ID NO: 118718

SEQ ID NO: 224265 - DNA, 1000 bp, Homo Sapiens; identical to SEQ ID NO: 118720

SEQ ID NO: 224266 - DNA, 1000 bp, Homo Sapiens
ttcccatagtgtatcagttgttatgccacaataacaacaataataatgttcttaatgtccaaagtgctttgtcatttagagtcctttaacatctgttataccatgtgatgcccttgaacaccccattgggctattgtctgtgtattctgccctctttagcagatgatctgtaatttggtcattgttctgttatattccagattgctctacttgctaatatttgtatagaatagaatttatgtaaactagtaaccagttgatctctgtgccaaatacattatatcaggattacacaaaaagcatcacaaaggatggtcttggccatatgctagggcccctgtgaaaataagtagttttgagaagtttttctatatacgtatatatacacgtgtggttctatttaggtggggaaaaaatgaaaaagcagggacaacaggaggaaatgaaggcagagaaatatagtttcctttcctaggattgagacaattctatttttcatatactcgttgctcattaaatagtaaagggttgatttgctgcaagagtagctgagaattcaaaaacatccttgcagaatgattcaaaagacaaaagccaggctcaacttatagaatgttttggaaactggaagtaatgatacatttcacttcagaagcacttgtaggtctttactagtgctaagtattatggtgagctatcattaaagtgtgccatcttggataaaggccttttgcctactctcttctgcaattttgacacctcaatattcacacccataaacattactaagccccagttctatcgttggaaggagttgttattcttttgttgttcccttatgcaatttttaattctatgaatgttaagtttttttgagctaatgatagatagaaatgcccactcaaagaaaaataaacagagacaaatgttaaaattgccatacagactgtttttccccctgttgtttcactttaaaataaaaagaaatccttgattaatc

SEQ ID NO: 224267 - DNA, 1000 bp, Homo Sapiens
aaaattatgagagggatatggacataattatgaaattgaaggaagaggacatggccatgaatgcccaacaagataatattctataccagactgttacaggattgaagaaagatttgtcaggagttcagaaggtccctgcactcctagaaaatcaagtggaggaaaggacttgttctgattcagaagatattggaagctctgagtgctctgacacagactctgaagagcagggagaccatgcccgccccaagaaacacaccacggaccctgacattgataaaaaagaaagaaaaaagatggtcaaggaagcccagagagagaaaagaaaaaacaaaattcctaaacatgtgaaaaaaagaaaggagaagacagccaagacgaaaaaaggcaaatagaatgagaaccatattatgtacagtcattttcctcagttccttttctcgcctgaactcttaagctgcatctggaagatggcttattggttttaaccagattgtcatcgtggcactgtctgtgaagacggattcaaatgttttcatgtaactatgtaaaaagctctaagctctagagtctagatccagtcactgactctgtctggtgttgacagaggatttatttaagctattattttaataaagaactttgtacatttttatttttatatttttttctcttacaaatatgtttttggaagcatgataaatgtttaaatgtagtcaacatctgtaactcttacatgagtgtccagaggcactcatgggaaaattggttttgctttctttgtacacaccagagacccatctgaggtcatctgattataaggccatgtttatataaagggaatttcacccacagttcagctggctgttgattttcactgcaactctgcctttgtgtgtattggcgatcatttgtaatgctcttacacttcgtctttaatgttctttttggagttaggacctctcagttcataaagttttttacaattcaaaaaaaaaaa

SEQ ID NO: 224268 - DNA, 1000 bp, Homo Sapiens
agcaacaaggggtccgggaccctgttcaagaacgccgagcgaatgctacgggtgcgcagcctggacaagctggaccagggccgtctagtggacctggtcaacgccagcttcggcaagaagctcagggacgactacctggcctcgctgcgcccgcggctgcactccatctacgtctccgaggggtacaacgccgccgccattctgaccatggagcccgtcctggggggcaccccgtacctggacaaatttgtggtgagctccagccgccagggccaaggctccggccagatgctgtgggagtgcctgcggcgggaccttcagacacttttctggcgctcccgggtcaccaaccccatcaatccctggtacttcaaacacagtgatggcagcttctccaacaagcagtggatcttcttctggtttggcctggctgatatccgggactcctatgagttggtcaaccacgccaagggactgccagactcctttcacaagccagcttctgacccaggcagctgaccctcaccatggacactacaggccctggaatggccagggtggaccaaaagccatgccagctgggcatgaccccaggcagccagccacaggctgaagggggcttgttggctgagtgatctgcagaggagaaagcagccccagctctgcccagaggaggcgctgaagtgggacaagcacaggaaagaaggggaccagtctaggaccccaactcgactcactctaaagctacaaccaaatggccttcgattttcaacctggggattaggggaggggagggtgccttccagggctctactcaggactaaccctaagggtgagctagtttctgtgcctctgtgctatgttttgaggctcccttacccaaaataatacccctgcctgcgtgatattctaccattcattttaattcctttgggtcttgcagtttttcaggaggccttgattaaaatgcaaatacttgtctgagaaaaaaaaaaaaaaa

SEQ ID NO: 224269 - DNA, 1000 bp, Homo Sapiens
agacatattagaattcatactggtgagaagccctatgtatgtaaggaatgtgggaaggccttcagggggaactcagaacttcttagacatgagagaattcacactggagagaaaccctatgaatgctttgagtgtggaaaggctttcaggcggacctctcaccttattgtccaccagagaattcatactggagagaaaccccatcaatgtaatgagtgtgcaagaaccttttgggataattctgagctgcttctccaccagaaaattcatattggagagaaaccttatgaatgtagcgagtgtgagaaaacatttagccagcattcccaacttatcatacatcagagaattcacactggagagaagccttatgagtgccaagaatgtcagaagacttttagtcggagctctcacctcctccgacatcaaagtgttcactgtatggagtaatctgcaaaataggaaagcttttagtggaaaagctaaagtccaacttattcatttgttcataatatgcaaatatgcaccccaagtattcaaatccaatgaatggacagaacctcctctgtcctcccactgattttaaatagttggttgaagaagatgaggcacttgtatcttattaggtacatatacgcaaatccttaacctcaattctctgtcctcttcatgtcttacccagatatctcaggaagatttctcttttccttctgtttgcctccctcttcgacttacttgggagtcagcatctgaccacagtcgtgactggtaatgatgatttgtgcaaatactatcaaggaaaggacatgaattgtcttaattttagacccattaaaaaaccgcacaggcctcaatcttaaaagtcctatctaaatacccagaaatacccttcagaatttttgaagctatgcccatgtacaaaattttcttccttccctaattttaatggtatactaacaccttaggtaaataaaatatttctttactattttattgatat

SEQ ID NO: 224270 - DNA, 1000 bp, Homo Sapiens
tcttggaatcaccttcagtctttggagacccagctgcctttgtggaagggaggagacggtcatgacacaaagctttatcctacacagaaacacccgtgacccactatgagatggcccagatgtgggacccggtaccatgctctaaagcgagtgattaggcagcagctgaagccacccctgctgatgatgagcaagtgcctgctgcaggtccaaacacagcatccagggctttgcagttcctaaggagtgatgaggttagaggatcacttctgcatttgattttcaaggatgccgtcaagacggggttgacacaatgctgcacgtgtctggtcacacttagaaattgagctcttactctcttctgtaatactgggggacctacagctgccgtggggctgaccacggtgttccctggcatcgtctgtgtccacacagatgctaactggtagtgcaaatgtcatcctgcaaggttcctcttcctgcaagcaaagtggagagaaagaagatgcatctgtcaccttcatcagggtcctcagtgcagagcaacttacgcatcctcaagaatccactgcttttcaggcaaggagggagaaatcctgctgcacactggctttgtcccggagtcggattccctcctgcctgcacgccttcagtaactccgagcagaaatcacatcttgcccacatgctgtaacctaagaaactgctatgcaaggctgggtgctgtggctcatgcctgtaatcccagcactttgggaggccaaggcaggtggatcacctgaggtcaggagttcgagacaagcgtggccaatatggcaaagcccagtctctactaataatacaaaaattagctgggcatggtggcgcatgcctgtaatcccagctactgggaaggctgaggtaggagaatcttttgaatctgggaagcggaggttgcagtgagctgagatcgcaccactgcactccagcctgggagatacagcgagactgtctccaaaaac

SEQ ID NO: 224271 - DNA, 1000 bp, Homo Sapiens; identical to SEQ ID NO: 118723

SEQ ID NO: 224272 - DNA, 1000 bp, Homo Sapiens
tagaaagtcccgctccgacaatgccctgaatcttgttacagaaagaaaatactctcccaaggacagactgcggctgtacacccccgataactatgagaaatttatacagaataaaagtgcccgggagatccaagcatacatccagaatgctgatctctacggacagtacgcccatgccactcccgattatggcctgcagaacccaggaatgaatcggtttctgggactctacggcgaggatgatgattcctggtgttcttcctcctcctcctcttccgactcggaagaagaaggatattttcttggacaaccaatccctcaaccccggccacagagatttgcctactatacagatgacctttctagtccaccatctgcacttcccacccctcagtttggtcagaggacaacaaaatccaagaagaaaaagggacacaagggcaaaaattgtattatttcttaaccaagtagtgatgcagagcatttgtttaaaacttagccattaaccgtctgaatcgtttccttttcttccgtaggaaagttgtgaaaatagtttaaagtgctttctttgcccatgtaaatgagaactcaactgctgtttacagtgtcagattaacatttgaaaggtgtgatttctccaatttaccctctttggatggtgccaggtggacgtgacatctcgtgcctgcccggtgcgggtgcgttacagatggacgtagctgccttggttttccagtcctcaagggaatactgaagatgctgactgaaggggattggatgttgattttagaagatggagaactccagccacctttgtaaagcactagtgtttgtcatttatgtaagtcaggtcggctcaggtcttgatagtccgtcttggtgtgaggcatgcctgtcacgatgacctagctaacactgtgcatcttattgtgaggccagcttgtcccctcgaaccctctttggccaggtaaacattgtattgtatcagcgccagctacag

SEQ ID NO: 224273 - DNA, 1000 bp, Homo Sapiens
atggagttcagatcttaataagcacttaacaacacaccaaggaataaaaccatataaatgttcatggtgtgggaaaagcttcagtcaaaatacaaatttacatacacaccaaagaactcatacaggagaaaagcccttcacatgtcatgaatgtggaaaaaaattcagtcagaactcccaccttattaaacaccggagaacccacacaggtgagcagccatatacttgtagcatatgcaggagaaacttcagcaggcggtcaagccttcttagacaccagaaactccacctgtgaagagaagcttgtccagtgtcctcattctgaagacattcaccaaatggagcttggcactaaaatttatgtaaaagaaaaatcacaaaccttgaaaaattttacatcagaaaatgggataaacatacatttcacagaaaataatcaagacttgctctgcagccactcagtagtcttctgtggtcacagaagtaaacattgttggctttgtattgatctctccagtcatttttggacacatccaatagaaacattggcagcatggtcttccaaaacaaaaagcagtaacatgcatgtttaattgcataccattctcttcacagtagcaggcttaccaatttccatagtctcatgaggccgaaatgaattacaatgtaaagtgttccaggaaccaaattggattttctttcttttgtcattgggcacggtttgcaaagttggacatcacttgagttccttcttaaacttttcggcaacttctcttggatcctgttatcacagttttttactgtgatgaaatcttgttaaccaccactagggaatctccagatgaactattaatgcactgtcttatgcctctcattggtgatgtttggaaagtagaagacatctctaatggaatcatgggggaaacgggttggaatttgtagccatggaatatatattagatgtaaagaattttctgcaataaaagaaactagacttgtt

SEQ ID NO: 224274 - DNA, 1000 bp, Homo Sapiens
gtggtggagagggcagctggtgttaagaatgtaggttaccgggcatgacccggcagatgcttgcccagtagttctggaggaaggcccgggaatctgcaaatgagcgcattccccaggcagttcccatgcaggtgatccacggaccacatgttgagaaactgcagtcacccttagggccacaccgtccctctcctcgctgtcccctctctgtagtgactggccctgaccttcaggagtgcactttccactctaccaggaagccctatgacatcctcaggctccccagacctgcagcttgcatggggcccctcccttcttccacacccaccctccgtatggtcccctgctctgccctcgtgctttgctggcccctgcccgctactcccactctcagacacccaggggtggtgggccctaactggctggcccctcccagcgctgccctctgccgtccagatgctgcagtgtggccagatttaccttccagtaacatacttctagtcacccctcctcctgcgaagtgatctgcagtggctgtttgaccagaccacaaagttcacatctcctgagcttagtgtccgtggctgtccacctcccagccatacttgactgtccccaaactctccctgcagccacatgtttcccatgacctgtgggctctgcagatggacctctctccgctagagatgcccttctcccaaatggcttccctcctggaaggcccagcctgagtcctcgtctcctttccagtgcttctgccagaagcatccccatgatgttgtgaccgcacagcactttgtgtctcgctttgagcacttgccactctggctggtgctgctgccactgattgtgtactgtcttgctgccctttctagactgtgagctcctcgtgggcagggaccgcctgtgttctctgtatttcccacggcgcctagcacagtgccttgcacttgataggtgcttaataaatgtctgctcaactgaaaaaaaaaaaaaaaaa

SEQ ID NO: 224275 - DNA, 1000 bp, Homo Sapiens
gggagtgcttcctggaggagctgatacctgtgttcagtcttaaagggcaggagtttggataggggaatgttagttaatagaatgaaaatttcaaaattaaagggcaggagtaattaattgggtggttgagatgcatgcctggcagagcaagcagagtatggaaaaacccagaagtggagatatctggaaggtgattggtatggctggagtagaggacactggcaggagagtagctggagatgaggcaggagaggaaggcaaggaccaggatcaggtttgaagggtcttgagcatcaggtgaaggcgttagactgatttgaagcaggaactggtcacttttgtgttaataggctatgtggaagagaagctggggtagggagacaggaagtagcaagcttcatgtttaaagaaccaaagagttctgctaacttaggaacccagagtaagttgaaaacaaattgctctctggctgaaagccttcagtggtgatagttggaaagtagaatgattgcagagatgtgctttggagatttggaaagcaggctgtgttatttgtggctgttttctccttgatgcatgtgcagaatttccatgaacgctaatggagctattctgagcatttgctgaagggaaggaagcttgcagacatccctcccaatcttgcccacacactgagaagtaactcggagctacagtctgttaaaaatgaaaaggttgaggccgggtgcattggttcatgcctataatcccagcgctttgggaggtcgaggcaggcagatcacctgaggtcaggagtttgaaaccagcctggccaacatggcgaaaccctgtctgtactaaaaatacaaaaattagccagatatgatggcaggcgcctgtaatcccagctacttggaaggctgaggtatgagaatcgcttgaacctgggagatggaggctgcagtaagccaagattgtaccactgcactccagcctgggcaacagagtgagactctgtctc

SEQ ID NO: 224276 - DNA, 1000 bp, Homo Sapiens
aaacacatatttagtttatctcctattatcaagaaagaaatattaaaacttcactgttgaggatcactctgaatatgaaagtgctcaagacaatcaatcaggtctcgagatctagaaattagtataagtactgagtgctaggggaaaaaaattatactcttcaaactacatccctgggagtgttagtgatgtcataattcactgaggatctagaaactacaggatggatacttataaaagataagggaagtatagtgcataggttgctgagaggtggagagaaagttgcttacttttcctgagcctcaactttctgaaaacatagaaacacaattagatgatgagttatgaggtgaaggaggggatgactcagcagcaatgtgccagctccatagtgacttctccaccaagctggagaaggatttgcagcaatggttccagaaccaactgtgtgtatctacaggatgaagatcatttagactatgatcatttagactgtatcacttttgattctttctatgttgcccaggctgatctcagattcctgggctgaagtgatcctcctgcttcagcctccagagcagctgggattacagcagcttcagtgctgaggctaatggcaaaggaaacaccaggggatcagtgagtaagaacttgtcaagggaacaaagtctgaagatggaacggaggaagaggagaaaatcttccaccaaaaaaaatattaaaatctgatcttcaaggaaatactgaatccacatagcactcccctccgctcccttcttaggcacagcattactcaccatctcacagaggagaaacagaaatataaaataaaaagtggaaacaatcattaaaaatacttagccactcccacgtgtcctgggaaactgagaacacagtaactaccaaacaaattacatgatgtcacatgccagatacctaaaggataacatcaccccatcttcagaaacagaagaaaataaaatagcaaaagcaagag

SEQ ID NO: 224277 - DNA, 1000 bp, Homo Sapiens
ttaaaagcactgattcaattgctaggaatatttttgcagatttttctttacagtattccataggcaggtccactggaaaactgcagaaaaatgtgagctctcctggtaaatagtatacattttataagctatattttaaaggcctaagaacatggcaagtatttacttttatcttttttttaaaaacactcatgacagaaaacagtttaataatatctcattctaaaataaaacactggttgcagggtcttcaggatgcctattttgccaagaaacttcagtatacaggttagaaatatgcttttgtttttgaacaataatatactggtttgctttaaagaagggactaaatatgactttaaagagacttcaaaatattgagtattttaaaaatttaaaagtaggtcagtttataacgagtaaatacctaacacaccaagaatgtgcagtgaacctcaggcatttaagacacctcccccaccgcccgccccccgccccccccaatcaaagtgtggtcccaaaacaagccaacagctgtatatctcaaaagttaacccaagacaactctgatatttaggttatttgttgagactcattggtactgactggcaagtattctgctttaaagtatcatgtattaaaatgtttagacagcatgtgttttaaagtgataaatgcaaaatgttaagtttgaaatggttaacagtaaattattatgttagtttccaggcacttgaactgtgctacaagtaggggaaaacctactttaaagtatggtaaatgtgtgttttaaacttcctatcaagtgacatacttcatttgattttttgtttaagaagccatggtacttttttcttgagttactttggatatgttttttcaatgccatctgaagattttgtaattgagtagcagtaaatatacagatttacaatgttttaactacagttcatgaatagctggttgtgtaaaactaataaaaaactagactttcacatgt

SEQ ID NO: 224278 - DNA, 1000 bp, Homo Sapiens
ggtgcacagcgtcctgcacgtggatgtgtaccagtactcaggggtccaggatgccatcaacataagagacgtcctcatccagcagggctatgccgagctcacggaggagtcctacgagtccaaggttaatattctcagggctgctattaacaagctagtctgtgatggaccaaatggatgcaagtgtcttgggccagagagagttgcgcagcttcaagacattgcccgtcagaagcttttaggtttgttctgtcagtcaaaaccaagggagaagattgttcccaagtggcatgaaaagccctacgagtggaatcaggttgatccaaagctggtcatggagcaggccgaccgtgagagcagcagagggaagaacacctttctctaccagctccacaaactggttgtgctcggcacctgagcatgtccacaggtggcctccagcacacccctcgggaagctgtggaggctggattccaggctccctccgcagactgactttcctctgtgtctgggtgttacagtctgtgcccactgcatcctaaaggccttttctttcttcttttctctttgggtgatagtcagagagtggtgtttttgttcaggtgggaaggattggaaactctagtcttttctagaaacagaaaatcactgtattaaatattttggaaagattgttctgaaagaagtctgtttggataaagagctgtattttgctttaaatttattaaggtaaatataagtagttaatcttagatgtaaggttccagaatgtgcttacatattctgttctgttacagtgatttaaaccagtagtataggaaaaaacttaaaaaacaaaaaaaccatgtagtattttctgatttttttttccatgagggaaaatatctaatttttataagactaagttgagttatacttcttggttcacattttggaaatcagagattacagattacatggccatagcttatctgtgttaaaacaataaaagcattaaatg

SEQ ID NO: 224279 - DNA, 1000 bp, Homo Sapiens; identical to SEQ ID NO: 118728

SEQ ID NO: 224280 - DNA, 1000 bp, Homo Sapiens
tgatgtggatggggcacagattgtctttaaagaagttcagaaactcttcaaaaggaaaaacaatcagattgaacagttctcggtgaaaaaggcagagcgatttcggaagcaaaccccaaccaaagcgctctgtgtgttggcgtctattgaagtgttgtacttgtggaaagctcttccaaactgttccttccccaacctgcagaggatgagtcaagcttgccatgaagtggatgactcatctgttgttggattaaagtatttgcttcttggtgccatacacaaatgtctaggaaactcagaagatgctgttcagtacttccagcgagctgttaaagatgaattgtgtcgtcagaataatttatatgttcagccgtatgcctgttatgaacttggctgtcttctattagacaaaccagagactgtaggaagaggcagagctctacttcttcaagcaaaggaggatttctctggctacgactttgaaaacagattgcatgtccgcatccatgctgctctggcctctctgagggaattggttcctcagtgacagacccggaacacccgctccgtccctccccacccagggtccgcactttaaaataaaagcagaggacaaagctcttgtgaagatgggcttttcttctgaaaaccacctgtgccagggacacattttcccagttaagctgacatattaaagatctcctcttttaaacatgtagctgaaaagtaataatgatgttgaggaggatgatgatggtaataataactaaccacctggggagagggttaagtgaccttgctcaaacgttttagttttgtgatttattatttttaaaataaaatcaaacggaacatccaacccaagatcctgtaggaacacctaccttaagcacatatctgaatgggtaacatgatgaggtacctgtaaaattattaacaatatcatgacatagcatttatatttgtgttttgaaaaaataaaagtgctttctagtgtttt

SEQ ID NO: 224281 - DNA, 1000 bp, Homo Sapiens
ctagggaagtttgccgttttcgtccatgccaagatggctgagctgcaggtgcgggacctgagcctgaagctgcagggcatccccggccacgtgttcctcctccagctcctccacgggcagcacatgaagcaccagttcctgctgcgggcccggacggaaagtgagaagcagcgatggatctcagccttgtgcccctccagcccccaggaggacaaggaggtcatcagtgagggggaagattgcccccaggttcagtgtgttaggacatacaaggcactgcacccagatgagctgaccttggagaagactgacatcctgtcagtgaggacctggaccagtgacggctggctggaaggggtccgcctggcagatggtgagaaggggtgggtgccccaggcctatgtggaagagatcagcagcctcagcgcccgcctccgaaacctccgggagaataagcgagtcacaagtgccaccagcaaactgggggaggctcctgtgtgatgggcagccatggcctaggaccccacctccatgcctggctcctggatggtcctggaggggcctgcagtgtctccattccccaagctgctcctgctggcacttcgcttctgtggccttggcattgagggcacaggctggacacaggaatgggggcgcctccagagggtctctccgtcctcatgctcctcagtgtccacacttcaaggccaaggatagtttcttcctctgacatggggaccataacaggtgatcactgatacctggcaaagactggggccctctcctttctatgtcctcaatcctgcctgactcttggtccttctggcagggacctggctggggaacgttctggtgctgatggtgctgggacctatatgtatatttatatatatctggggtcttgtctaccacctcccctggtcagagcctgagtgggtgctggttgctgtgtcttgtctgtaaataaactcctatcatgccttttaaaaaaaaaaaaaaa

SEQ ID NO: 224282 - DNA, 1000 bp, Homo Sapiens
cgatcccgccttcaagcgtaacggcttccgcatcaacctcgccaagcccaggccaggtgaccccgccgaggccaatgggcctgtgtacccgtggcgcagcctgcgggaatgccagggggccccggtgactgccagccacttccgcttcgccagggtggaggcggacaagtacgagtacaacgtggtccccttccgagagggcacacctgcctcctggactggcgatctcctggcctggtggcccaacccgcaggagttccgggcctgcttcctcaaggtgaagatccagggtccccaggagtatatggtccgctcccacaacgcagggggcagccacccacgcacccgcggccagctctacggacttcgggatgcccggagtgtgcgagaccccgagcgtccgggcacctcggcagcctgcgtggagttcaagtgcagcgggatgctgttcgaccagcggcaggtggacaggacgctggtgaccattatgccccagggcagctgccggcgcgtggccgtcaacggactccttcgggattacctgacccggcaccccccaccggtgcccgcggaggacccagctgccttctccatgctggcccccctagaccctctgggccacaactatggcgtctacactgtcactgaccagagcccacgcttggccaaggagatcgccattggccgctgctttgatggttcctctgacggcttctccagagagatgaaggctgatgccggcacagccgtcaccttccagtgccgggagccaccggccggacgacccagcctcttccagaggctgctggagtccccggcgacagcacttggtgacatccgcagggagatgagcgaggcggcgcaggcacaggcccgggcctcaggtcccctccgcacccgccggggtagggtccggcagtgacctgggcaggggcctcgctttcccacctccctccagactcctttgaccccaggaagttttgcccctccttcttctcca

SEQ ID NO: 224283 - DNA, 1000 bp, Homo Sapiens
gcttcaccggggactgctgcttcgactacgacagggcgtgcccagctcgcccgtgcttcgtgggggaatggagcccctggagtggttgtgcagaccagtgcaagcctacaacccgtgtgcggaggcgctcggtgcagcaggagcctcagaacggcggggcgccctgcccacccctggaagagagagctggctgcctggagtactccaccccgcagggccaggactgcgggcacacctatgttcctgcctttataactacctctgcattcaacaaggagagaacacgacaagctacgtctccacactggtctacacacacagaggatgctggatactgtatggagtttaagacagagtccttgactcctcactgtgctctggaaaactggcccttgactagatggatgcagtatctccgagagggatacacggtgtgtgtggattgtcagcctccagctatgaactctgtgagccttcgttgttctggagatggcctggactccgatggaaatcagactctccattggcaagcaattggtaatcctcggtgtcaaggaacttggaaaaaagttcggcgagtagaccagtgttcttgtccagctgttcacagttttatttttatatagatggtgatataaatatttccaaatgcatttgtaaacattctaaatattctcaagtcatgttcaatgtttcctaaaccttcaattttggccaaagtccccaaacacatcattgccacactctgaagtagagaaagaaaatttaggggccagttctcaaggaacacaggtcctttatttttattttaactaagttgaagacccactcaaaaagctcttgtggttttatgttcttgacctttcaactggagtcctctcattcagcaggtggcccgtgagacacagaatacatgtctgtttgctaaagtaaaattactgtaactcaaaaaaaaaaaaaaaaaaaaaaaaaaaaaaaaaaaaaaaaaaaaaaaaaaaaa

SEQ ID NO: 224284 - DNA, 1000 bp, Homo Sapiens
ttcaagccaaggaacacacggggctaccagaagccgagatagaagcatggaacatatgttctagtaagaagtgtctgggttgttttggttttttttctttggagtttttgtggtattaaattatttttaaattatgttttattgtagacctcacaattcttttttttctttttcactcaaactacagcaaaatattatatttctatcctatatttcatgggcttacctctagccaattgtttttaactgccatgtaatattttacatcatgaagctttcatccttgattcaaatcctctgattatggacatgtatttcctccattttcctgctatgaaatatatcaccaccagcttgattcaaccttaaaaataaggtcatcagtattatgttctaaataaacttatggccatacatgagaaatgtaccttgcagctgaatggctaggtcatatggtgatctagtatgtaactggaattatgttatacattgcccttcctctcccataagatggacaaaagtgtttctgtatcactgtgtcccagacaatatttagaattacccagctttccagtttttactttagaagtttaaagtgatatagaatatatctggtatttctcatattgaaatacatttgaacattagttcatatcctttcattgccttttgtttttcctcttctgtcaatggtctactcatatgttggcctgtctttatttgtatcttgactttttattgtgtattttgtttatggtggggtactttattggtgattaatacgattttcaagtatattatatgggctagtcccttgatactattgacactgtatttatcttcagtctcttgttggtatctaactttggttctgaagtttatggaatggaagtatttaattggaaagattaaacatattgattttaattaaaaaaaaaaaaaaaaaaaaaaaaaaaaaaaaaaaaaaaaaaaaaaaaaaaaaaaaaaaaaaaaaaaaaaa

SEQ ID NO: 224285 - DNA, 1000 bp, Homo Sapiens
gatagctgcaacaatgaaacaggaaagaagagagggagagagaggaaagggaaggaagaaaggaaggagggagaagggaagaaagaaacaatgtctaacccaaccctatcttgaaagttgaactcaagtagaaaaatggatagaaacaaaattctctagtactcatccaggaaaccattcttcaatgttgcatgtggctgtttgccaaggcacacaaagtgcttgtaggcagcaaccatatgctacaagaattgtaaactgcatacagtttgtttgaagtagacagtgaggataataacaaaattgctaggcaggaaaaaaaatcaggaaaaaagcttgtcgctatttgagaatctgtatatttttaaaggcttaaaatattataaccacagggtatccagccaaattcaacattactgcaagtcttagagatttaaacattcatttgattcagagctaaatattcaccataatccaggagggtctccttccccactgcagaggcagaacgtccaagaatggagtaagattagtcatagtaaagtctcagtctgaatatttagcaagagaaacaggcagcagaggaacccaaaggcagtaaatcaaatattctaaaacccaaagttcattattttcatccaaaagactttcacagaaacacattattcacagccatgtatatcttggacagagtttcagatggaatgacttgtctgaaatttgtaaagcttaatataggttttgggggaattattttaatattcaaagaatgttttattatagtcctttgtgttaaaatttagccttactaattataacaataactcataaagttctaaattcagaaggaatgtctgttctttatcaagtgtatgtaactattttttagaaatgccatctactttctagaaacactaaagttattgttttctaagttaaataactataatttatatatctattaaaaaggtacttctcttcccaaaaaaaaaaaaaaaaa

SEQ ID NO: 224286 - DNA, 1000 bp, Homo Sapiens
gctccctggcccagtacagctgtgcggacccccagtggcatgtcctccgagtggcagcggacatggtatgcccggatgcccccgcgagccccagcgccctggcagtcagcagggatggccgcctgctggcctttgtgggaccctccaggtgcacagtgacagtcatgggctcggcctcccttgatgagctgctgcgagttgacatcggcactctggacctggccagcagccgcctggactcagccatggctgtgtgctttggccctgcagctctgggccacctgctggtgtccacctcgtccaacagagtcgtggtgctggatgctgtgtcgggccgcatcatccgggagctgcccggtgtccaccctgagccctgcccctccttgacgctcagtgaggacgcccgcttcctgctgattgccgccggccggaccatcaaggtgtgggactacgccacacaggccagcccaggcccccaggtgtacatcggccactcggaacccgtgcaggctgtggccttctctcctgaccagcagcaggtcctcagcgcaggggacgccgtcttcctctgggatgtcctggcccctactgagagcgaccaaagcttccccggggcccccccagcctgcaagacaggcccgggcgcaggaccgctggaggacgcagcgtccagggccagcgagctcccccggcagcaggtccccaagccatgtcaggcatctccaccacggctgggcgtctgtgccaggcctcccgaaggtggcgatggcgccagggacaccaggaattcgggggccccacgcaccacctacctggcttcctgcaaggccttcacgcctgccagggtcagctgcagcccccactctgccaagggcacttgcccgcctcccgccagcggtgggtggctgcgtctgaaggctgtcgtcggttacagcgggaatgggcgggccaacatggtctggaggccggacacaggcttctttgcctacacgtgcggccg

SEQ ID NO: 224287 - DNA, 1000 bp, Homo Sapiens
aaggagttcaaaaattccatgaatcttggccaggcatggtggctcatgcctgtaatcccaccactttgggagggtgatgcaggaggatcacttgaggccaggagttggagaccagcctggccaacatggtgaaaccctgtctctactaaaaatacaaaaaaaaattagctggacctggtggcgcatgcctgtaatcctagctactcaggaggctgaggcatgagaatcgcttgaactcagcaagtggaggttgctatgagctgagattgtgccagttcattccaccctgggcaacagggtgagactctgtctcaaaaaaaaaaaaaaaaaaaaaaagaattccatgattcttttgagctctcaagagctactttagccttgccattcctcttgcttttcagcagtagtctggcccaattctctacctcaaaggaaagtttcaaggattaaagggttaatgtttatgaacgattcaaattgtcttcagtgaaacacattagtcacaagaatccctgattgctgcactttaaaaaattctttaccttttccttgagcagattggtccagtccctctgctttctgttctgtctacattgtgtattatttattactatatagtatatgtatctgcataatgtctgaagtcattaatgcagtaacaggtcaagctctttagcattctttgacttttcccaaaatatagatatgacattctcctttatcttccttcttagatggcctaaatctgtctcttcatttacctcaaactcaaattagtatgccattttcatactgaaaattaaatatttttatggattttataaatattgcaacattttagatattgttttggaccatttgtgtatttatatataataaaatcatcaatttaatacttgtaagatcctaacatgtattgattgtaaaagtgaaatatgtaatagccacacttcactgttttaaaataaaagtgcaatttcaagttaaaaaaaaaaaaaaa

SEQ ID NO: 224288 - DNA, 1000 bp, Homo Sapiens
taaacctgatcgggcgcatcactgctcagcctgtgactcatgtattcttaagatggatcatcactgtccttgggtgaataactgtgtgggattttctaattacaaattcttcctgctgtttttattgtattccctattatattgccttttcgtggctgcaacagttttagagtactttataaaattttggacgaatgaactgacagatacacgtgcaaaattccacgtactttttcttttctttgtgtctgcaatgttcttcatcagcgtcctctcacttttcagctaccactgctggctagttggaaaaaatagaacaacaatagaatcattccgcgcacccacgttttcatacggacctgatggaaatggtttctctcttggatgcagtaaaaattggagacaagtctttggtgatgaaaagaaatattggctacttccaatattttcaagcttgggtgatggttgcagttttccaactcgccttgtggggatggatccagaacaagcttctgttacaaaccagaatgagtatgccagaagtggctcaaatcaaccttttcctatcaaaccacttagtgaatcaaaaaaccgcttgttggacagtgaatctcagtggctggagaatggagctgaagaaggcatcgtcaaatcaggtgtatgaaaacattatagactggtattttcaattttcatttgcaagaaaatgatcagtggaatgaaataactgaagtataacagaagatatattttttaaaacggaaagcctttgtacagttcctgggattcacagaagcactactccagagcagaatgatgccttaatcttaagtgtccatttgtgcagcattgacttagagctacaaaagtgacttaatgttattctggaaataatacttacctgttatgagttgctataatatgagctgtcatcacattttaaaaaaaaaaaaaaaaaaaaaaaaaaaaaaaaaaaaaaaaaaaaaaaaaaaaaaaaaaa

SEQ ID NO: 224289 - DNA, 1000 bp, Homo Sapiens
agttaggatccagtttaagttctgaaagtacctgtggttctgactctgactctgaatcaacttccagaacagatcaagattacgtagatggagaccatgattatagcaaattcatacaaaccagacctaaaagaaaactcagaaagcaacatggcaatggaaaaagaaattggaagaccagaggcacaggaggaagaggcagatggggaagatggggtagatggagtagaggaggcagaggaagaggaggcaggggacgagggagtcgaggaagaggtggaggtggcactagggggaggggaagagggagaggaggaagaggtgcttctagaggagctaccagagccaaacgagcacgtattgcagatgatgaatttgataccatgttttcaggacgtttcagtagactgcctcgaattaaaacaagaaaccaaggcaggaggactgttttatataatgatgattctgataatgacaattttgtgtccactgaggatcctctgaatcttggtacatccagatcaggcagagtgcgtaaaatgacagaaaaagccagggttagccatctcatgggatggaattattaacagttaataaatttagaataacttaaaaaattcaatggccttctactgcagggaatttaccaggaaatctacaaagcaagttgtgtggggacttctgcttcctttcacattggtgcttttccatttatgccagtatacatttgtttcaagacttttgatctccacacttcatttgttcaaataagccttactcattaggccttaaattaaaagaaattctgcccacacacacacaaacacatacacacacatacacacacacagacacacacacacgaaacacaacacagacactacagatttactacattaaaggagcattcagcttcttaagagtagcatgacatttttatctcaatagaatagccctcttttgcttttgtatcacagaagtatagcaccttcttacagag

SEQ ID NO: 224290 - DNA, 1000 bp, Homo Sapiens
tgtcttgattaaaagtgcactttggcctgggcatggtggctcatgcctataatcccagcactttgggaggccaaggcgggtggctcacttgaggctaggagttcaagactagcgtggccaacgtgaggaaaccctgtctctactaaaaatacaaaaattagctgggtgtgttggtgcatgcttataatcccagctacttgggaggctgaggcaggagaatcgcttgaacccaggaggtggaggttgcagtgagccgagattatgccactgtactccagcgtgggtgacagagtgagactctgtctcaaattaaaaaaataaaaaataattttttttttttaaagtacgctttgttggctgggcacggcgactcacgcctgtaatcccagcacattgggaggccaaggcaggcagatcacgaggttaggagttcgagaccagcctggccaacatggtgaaaccctgtctctactgaaaatacaaaaattagctgggcgtggtggtgggtacctgtaatcccagctacttgggaggctgaggcaggagaattgcttgaacccaggaggcagaggttgcagtgagccgagatcatgccattgcactccgactctgggcaacagagcaagactctgtctcgggggaaacaaaaaaaaagtgtgctttgtcaagagaagcaccagcagacctctaagaactgctctctaaggctgcggtagcaaattatctactattgcaggtgccttattggtagagggctctgaagagccaaaactgtatatgcaacacttgtaagataaaagggactttaataatcaagattttcttgaagatttgttagaaataatgtcttatttctggtaacctttccctttttgtatttataactctactaaccaaattacctatcaataaaccattactataatattttaaaacaacctatgtttatcaagcttactctctgagtgacagaatatactaaataaagaattttttaatg

SEQ ID NO: 224291 - DNA, 1000 bp, Homo Sapiens
attgctttaataattttcttttttttttttttttttttagacggagtctcgctctgttgccaggctggagggcagtggcacgatcttggctttctgcaacctctgcctcccaggttcaagcgattctcctgcttcagccttccgagtagctgggactacaggcgcatgccaccatgcccagctaatttttttgtatttttagtagagacggggtttcaccacgttggccaggatggtttcgatctcctgacctcgtgatcctcctgcctcatcctcccaaaatgctgggattacaggcataagccaccgtgcctggcctctttaataatttttaaaataccctaaaggcttgtgaatatacaagtctactgataaattatgtattgtctgggaatttgatagtcattgttttagataactggattttacgctgtggtagacaggctgtgacactagtgttgcacaggtgtaattggtcatcctatgccttcaccagaataacttgggagtggtgccagaaactagagtctacaattctcactgtttagagagtgttaatgacatactgtgtatgcataatagccgcatgtactataatagcccttaaaattaaactattgggattgctgtaaatattttaaagtactggaggtgccttttacctgtttattagattttgaaaaggtttaaattatttcatgagcaatcttttaaatttcatttaacataaagctgaaaattcaataacaggataaaaaagctttttaacaaggctgccatttaacttaaatgtgttcatcttagctttcacttgtataaaatttgattctttgaactgcagcaataaaaccctcagctcctaagaagtcttaagagggtattctatatattctgctttgttttattttctgtaaattttgtaggtaaatatgtgcattaaaaataaatactttatatataactcgtgaaaaaaaaaaaaaaaaaaaaaaaaaaaaaaaaa

SEQ ID NO: 224292 - DNA, 1000 bp, Homo Sapiens; identical to SEQ ID NO: 221892

SEQ ID NO: 224293 - DNA, 1000 bp, Homo Sapiens
cctgaaatagggcccagcccagcacccccctatgggctcttcgttgggggccgtttccaggctcctggggcccgaagctccaggcccatccgggattcgtctggcaacctccatggctacgtggctgagggtggagccaaggacatccgaggtgctgtggaggccgctcaccaggctttccctggctgggcgggccagtccccaggagcccgggcagccctgctgtgggccctggcggctgcactggagcgccggaagtctaccctggcctcgaggctggagaggcagggagcggagctcaaggctgcggaggcggaggtggagctgagcgcaagacgacttcgggcgtggggggcccgggtgcaggcccaaggccacaccctgcaggtagccgggctgagaggccctgtgctgcgcctgcgggagccgctgggtgtgctggctgtggtgtgtccggacgagtggcccctgcttgccttcgtgtccctgctggctcccgccctggcctacggcaacactgtggtcatggtgcccagtgcggcctgtcctctgctggccctggaggtctgccaggacatggccaccgtgttcccagcaggcctggccaacgtggtgacaggagaccgggaccatctgacccgctgcctggccttgcaccaagacgtccaggccatgtggtatttcggatcagcccagggttcccagtttgtcgagtgggcctcggcaggaaacctcaaaccggtgtgggcgagcaggggctgcccgcgggcctgggaccaggaggccgagggggcaggcccagagctggggctgcgagtggcgcggaccaaggccctgtggctgcctatgggggactgatgcctgagcgccacctactgcattttggacacctcacaccaaggggagatgcaccccacggacacctgggactttccccttctggttcctgtgtctcccaataaactctctgaccaaccctaaaaaaaaaaaaaaaaaaaaa

SEQ ID NO: 224294 - DNA, 1000 bp, Homo Sapiens
atcaccactaaggtccattccttactagaaggcatctcaaattattttaccaagtggaataagcacatgatggacaccagagactgccaggtttcctttacttttggaccctgtgattatcaccaggaagtttctcttagggtccacctgatggaatacattacaaaacaaggtttcacgatccgcaacacccgggtgcatcacatgagtgagcgggccaatgaaaacacagtggagcacaactggactttctgtaggctagcccggaagacagacgactgatctccgaccctgccacaggttcctggaaagactctccaggaaatggaagatactgattttttttaaatcacagtgtgagatattttttttcttttaaatagttgtatttatttgaaggcagtgaggaccagaaggaagttttgtgctttggcagactcctccatgttttgttcccttccccctgagtatgcatgtgcctgttcagagtctccagataccttttttataaaaagaagtctgaaaatcattatggtatataatctacccttaacagagcttttcttattacagtgctaaaatgatttctgataaaatggtccctaactcaactagaaggctaaaaatacaagaatgaaagaataagcagagtactcatgatgcctttgagaaaaatcaaaacatcatgtagggtgacctagtttccaaaccaataaataagtagtattgtaatattaaaggaaaactgttccaatcatttaaaagtacttattaagtactgctttttacagttatgacaactgtttctttctatgcatataaatcaaggaaccaaatatctgtagccatggaaatgtctgactagaaatatttatattgaattctgaatacaaaatgtccctgtggtagaaaacttactctttatgcctggtgcagtataattcccaagtgtactgtctaccagaaaaaaaaaaacaaaactaataaaaaatgaaatatg

SEQ ID NO: 224295 - DNA, 1000 bp, Homo Sapiens; identical to SEQ ID NO: 118739

SEQ ID NO: 224296 - DNA, 1000 bp, Homo Sapiens
acacagggcgacccccatctctacaaaacataaaagatttttaaaaaattagccaggcatggtggcacatgcctgtggtctcagctacttgggaggctgaggcaggagaatcatttgagcccaggaggtcaaggctgcagtgagctttgatcacaccactgcactccagcctgggcaacagagcaagaccccatcctccacccccccaaaaaatagaaagaaaaaaaaagtttgcactaattgaggtacatctgcaagtgagactttttgtcaggaaaaggcaatatatcaggtctcctcaggacgatggaggccttatatggtgtgttaccttgaaaactgaatatcaacgttcaccttgattcaggaaagctgggtgctgtctccatgccatgaatcatgagagcaaaggatcactgcttaaaaatactgaatttaccttcacaaaagatttctaaagatttatgtaatgtgttttaaaagcgccagtaaaccatcggatcaattggaaagaaggcaactcttcagcctttgttatctagctgaaaacaaatgacaactttcaaaacattggcagtagttgttgaaaaagacgtctattgttcaaagtttctttctccttaaaggacggtgttccaatgaattcagtagagcccactttcctccactgtggaggaagaatccctaagagatactcaaatgattaaattaaaattggatcatcaaactcaagagaggcataaacttagacacagtcttgcatttttgtctttcctgaactcttctgccattttcctccttcactcgtcctgaaaatctgcaagttacataataaaactttagatatttgtctgacaaagtgtaattactcaactgaataaatgactgagaacaagttacaaaaggaatcatgaatcctggtaaacaataaagaagattcagacactgagggaaaaaaaataaagctttttacttaaataatgcaaaaaaaaaaaaaaaa

SEQ ID NO: 224297 - DNA, 1000 bp, Homo Sapiens
gggaaggtgttcatttttcctagtgcgttacgaacacatgaaagaactcacactggagagaaaccctatgaatgtaaacaatgtggaaaagcctttagttgttctagttacattcggatacataaaagaactcacactggggagaaaccttatgaatgtaaggaatgcgggaaggcctttatttatcccacaagctttcaaggacacatgagaatgcatactggagagaaaccctataaatgtaaagaatgtgggaaggcctttagtcttcacagttcctttcaaagacatacaagaattcacaattatgagaaacctcttgaatgtaagcaatgtggaaaagccttcagtgtgtccacatccttaaaaaaacatatgagaatgcacaatcgatagaaactctataaatgtgagaaataggagaaagttttcaattctaacagatgctttcaaagttgtgaaaattcccactgaagagagaaatcctgtcaatgtaagtaatatagaaagcgagatacaagatgattcatgtatagtcaggtaccacataatcatgtttcagtcagcaatgggccatataggttggtagccccataagattatataacacctaaaacatttctatcaaccgcaatttagtagcagtagtaacaccatagtgcagcacattatttaagtgtttatggtgctggtgtaaacgtgctgcactttcagttgtataaaagtacaagacagcggccggggacggtggctcacgcctgtaatcccagcactttgggaggccaaggcgggcggatcacgaggccaggagatcaagaccatcctggctaacacggtaaaaccccatctctactaaaaatacaaaaaattagccgggcgtggtggtgggcgcctgtagtcccagctacttgggaggctgaggcaggagaatggcataaacccaggaggccgagctgacaaagtgagctgagatccggccaacagagcgagactctgtctc

SEQ ID NO: 224298 - DNA, 1000 bp, Homo Sapiens
ctctgcctagggacgaggcctacagttctgccatgtctgtaggttgttgtttaaagattattaattcgaatttagcaatacgatctctaagtggtgccatgaattaaagatgccacttcgggctttcagtgcttctcagcttttgggcaaagggcttgtgtcttcaggggcagctcagctttcctgagtcctgactgctggcactcgtctgcatttgcctgtgcttctgcgagtcggacctcaagctgccaacactgcatgtggataaatccagttttcccgggccagcatgcaaaatgaagaggactccatctaagctgagaagcatggcctccccagagcagcctgcggcctccaagccttcctggcccaggcaaatgccagtgtgcaccaggctggctgctgggggcaggtctttggaggggagcagcatttccagccttctgaacatagttaatagtaatgacagccgtaacactaacgcgctctgcaattcgccctgcccagccatcctcggttgccaagattgcctgtgcctgcctgacaaaggaagagaatctccgaatgtgtatctttgggcccaccctagggagaggtcggggtcaccaggctacatggcgacatctaggcagctccgccttgcccagcctccttgccataatcctaatatattggtgtcctctgctcagaggggactgtcatcatggtgggaacaggctgtgcctccccagggactctgcccatgttcccagggcctcatctgtacactgtgaaattaactggcatcctggtgggcccaagggttttcaggactgggggccaatgactcaccccctccttcctcctcctgatccctatctctagctcttatcacagattttgaacaattgtctgtgaggttaatgatggtttcagagggaagcccttttcctccctgagactgtgtggggttcagtcagcctgctgaaattgcttccacttattacccatccttcctctt

SEQ ID NO: 224299 - DNA, 1000 bp, Homo Sapiens
tgcagcctgcaggggcctggcaatcttttttgctacctgtttacagcctggaaccatgattgtgttgagcaacattggcagcctgacttcatctttatttctggtgctttttgacaagaacccaatttgtctctggatagcaacttcagtgtatggggcttcaatggcaaccacatttccgagtggtgtttcttggattgagcagtacacgaccatccatgggaaatctgcagcattttttgtaattggtgcttccctgggagaaatggctattcctgcagtcattggaattcttcaaggaaaataccctgatttgcctgtagttctgtatacctctttgggagcatcaatagctactggtattttatttcctgtgctatataaattagccacttcacctcttgatcgccagcgaaaagaagacagaaagagtgaggaccagaaagctctgctctctagctccgggctaaatgaatatgaggaagagaatgaagaggaggatgcagaaaaatggaatgaaatggattttgaaatgattgaaacgaatgatacaatgaggcattctataatagagacatctagaagtagtctgacggagcccacagctgaagtctataatcaatacccatcaaatgcactggtgtttgagtcttctccttttaatactggcagtgcccatgtgaagcacttgccagaaaccaggacaaaagggactaacgtttagagaagatggattactcactgacatctttgaataactgccacttctaaggacgccattcagagcagagcattagcagaatttcaccatgctttggggattaaaatttttaggtccatattatagcaaatgctaaaaatttttgaaatgttctgtaattcccagagtcttccataaataaccaaatggtctcaaaaaaaaaaaaaaaaaaaaaaaaaaaaaaaaaaaaaaaaaaaaaaaaaaaaaaaaaaaaaaaaaaaaaaaaaaaaaaaaaaaaaa

SEQ ID NO: 224300 - DNA, 1000 bp, Homo Sapiens
atatctttaccttattaatattatacatacttgaaaaaaatttcatttagaaacctagttcagaatctgagcaaatttacaagtgacctctgtaataaatggtattgataatcagagaatgtatttcagaatactacagtacaatatattatgaagcatgaccactttattttgaaacttagcaattgtattgctggggtttattgtatctgtagcatgtcactgattatttcagttagttttataatgatttttaaaaaacatatctatttggaataagatacagcaacaatcattgctactgacttgttcaaccccttagttacactgtatgatcaacatataacaagatacagtggaatggcccatacagtatattactgttgtgtgatgattggctttggaagcagtttgattttgaaatgctttgatattctaattgacatggaacaagttttttccctgctccccaaatagaattttgtaaccaactttgctatttttttaaagtttgtaagaatgtgtcatttcttggggagtagccatccatcaacaaatatcctgactgctactttgttatatacaaaatacttacattgaacctggtggcataatgagtattttgaaagaagaaatttcttcactctcatttttatagaaatcttggaatcagcttaagctgtagcttttatgacaaaagacagtcatttttggtcagagtgatatttggtgacggaaacttgttcataatttattgttactatagaactatttggattttctcatttttagttctgatagttaaatattttggtttgttctgtgccttcagtttaaattatttcaggatttttcagatgtttaaataatggtgtgaatcattcaggatggaaataaaagtcatcctttctgtaaaaaaaaaaaaaaaaaaaaaaaaaaaaaaaaaaaaaaaaaaaaaaaaaaaaaaaaaaaaaaaaaaaaaaaaaaaaaaaaaaaaaaa

SEQ ID NO: 224301 - DNA, 1000 bp, Homo Sapiens
gtccagcatggtgccctcagcagtgacaggcgtcccgggctccagtctcaacagcctgaataacttgaacaacctgagtagcccgtcgctgaattccgcggtgccgacgcctgcctgtccttacgcgccgccgactcctccgtatgtttatagggacacgtgtaactcgagcctggccagcctgagactgaaagcaaagcagcactccagcttcggctacgccagcgtgcagaacccggcctccaacctgagtgcttgccagtatgcagtggaccggcccgtgtgagccgcacccacagcgccgggatcctaggaccttgccggatggggcaactccgcccttgaaagactgggaattatgctagaaggtcgtgggcactaaagaaagggagagaaagagaagctatatagagaaaaggaaaccactgaatcaaagagagagctcctttgatttcaaagggatgtcctcagtgtctgacatctttcactacaagtatttctaacagttgcaaggacacatacacaaacaaatgtttgactggatatgacattttaacattactataagcttgttattttttaagtttagcattgttaacatttaaatgactgaaaggatgtatatatatcgaaatgtcaaattaattttataaaagcagttgttagtaatatcacaacagtgtttttaaaggttaggctttaaaataaagcatgttatacagaagcgattaggatttttcgcttgcgagcaagggagtgtatatactaaatgccacactgtatgtttctaacatattattattattataaaaaatgtgtgaatatcagttttagaatagtttctctggtggatgcaatgatgtttctgaaactgctatgtacaacctaccctgtgtataacatttcgtacaatattattgttttacttttcagcaaatatgaaacaaatgtgttttatttcatgggagtaaaatatactgcatacaaaaaaaaaaaaaaa

SEQ ID NO: 224302 - DNA, 1000 bp, Homo Sapiens
gggaaaccacagtcacagactgcccagcatatcgactcggcatctgctccagctcggctgtgcaggcaggtgccctaggacaaggggagacctcatggtacatgcactgctctgagccacagagatacacatttttctacagtggtattgtgagtgatgttcatgtgactgagcgtccagccagagtgggcatcctgctggactacaacaaccagagacttatcttcatcaacgcagagagcgagcagttgctcttcatcatcaggcacaggtttaatgagggtgtccaccctgcctttgccctggagaaacctggaaaatgtactttgcacctggggatagagcccccggattctgtaaggcacaagtgatccttggctttcagaatttgcaagaacagcgatttgaattttgggggggtctgctgttcattcctttaggtgctatacattattcaaaaagtctcccgcgcatttgcactaatgatggctgcatgcatagcaatcagcatgtgagcaaaatcgacaagaaaaccttgactttacagagcagtgtgtgagtaaacagaatgaaaacaacaacctccactctttagtttatataagtttgagttctttcctaaattaaaagatctacacttgagttgggaaccgaaagagaaaaatggacttccatctgttttactggtaaaggaaatcctctgatggacaggtcagagtgaaggaaggttgtgctggtaagacatctctgacgaagagccatggatgctttccacaaaatgtcacctcgctgcactaaaggatgatgaatcctaatcattaaaggaattgtttcagctgatttaaatttataatgaactcttttgtaataatgtatactgtagaacatgagtctctcctccctaaaattttaaatgtagaaatgtgctatatattagaaatttccattttgttaaataaatggttagagtctataaagccaaaaaaaaaaaaaaaaaaaa

SEQ ID NO: 224303 - DNA, 1000 bp, Homo Sapiens; identical to SEQ ID NO: 118750

SEQ ID NO: 224304 - DNA, 1000 bp, Homo Sapiens
gcttgggctgcatctggggccaaggacatctgaaggggaatgagcacatggcacccacagttcgtgccaccatcgcacacttcaacaggctcaccaactgcatcaccacctcctgcctcggggaccacagcatgagggcccgggacagggccagggtggtggagcactggatcaaggtggccagggagtgcctaagcctcaacaacttctcctcggtgcacgtcatcgtctctgctctgtgcagcaacccaataggtcagctacacaagacgtgggcaggagtgtccagcaaaagcatgaaagagctaaaagaactctgcaaaaaagacactgcagtgaagagggacctactgatcaaggcggggagctttaaggtggccacccaggagaggaacccccagagagtccagatgaggctgcggaggcagaagaagggtgtggtccccttcctgggggattttctgactgagttacagaggctggattcggccatcccggacgacctggatggcaacaccaacaagaggagcaaggaggtccgagttctgcaggaaatgcagctgctccaagtggctgccatgaattacaggcttcggcctcttgagaaatttgtcacctatttcacaagaatggagcagctcagtgacaaagagagctacaagctgtcctgccagctggagcccgaaaacccgtaggctggcaacatcctgcagtggctgggaacccaccgggatgctggccagaacaccggctctgcaccatccctcacccagaccgtagacaccagggaaccacatctaggaggctggcagctcagctgcatcttgccctggatcctcatcaccaactgctcctgctggccaggatcaggccatgggacttttgtgagtcaggcgggagaccattttatgtttattttctttagtgtataagtaagggttttttcttaactttcgttaaaataaaattttaaaaaactattcaaaataaaaaaaaaaaa

SEQ ID NO: 224305 - DNA, 1000 bp, Homo Sapiens
tgcaataaaaccagagaagatccagcttttgaaaacagtgatttaggtttgtaacatccggcaaaactgaaaaaaaaaatctgtaaacgcgaaaaatactagatttgttttgagagttcttcattccttgctgctcacattctgagaaacaaaaagaaataaagtttttattctgaataatatccgtgttaagaaggggttctttggccgaagacgtgggtctgcgtggaattcaggccgaggcgagccggcagagcaggccggacgcagcagccctctggctccagcatggggcctggccaggctattcgcctggaagctcggcgaattctcaggatggcggctggggctccaggcggctgcggcagctctggtaacgccgtgcggcgggccagctgggctgcccggttcccagctgctgcggaggcaggctgagggcgcaggggctgccgagtgctgtgcacggaagaaacaaagacatcccggcccaaggcgcagcgggagcgcacaggtgccccgcggcccagccgggggataacgcagggcggtcttctgctccatgctcttcctcgggtcaaagcggaccaactaacgcctaaacctcggtattagccagccgcgcagaggatgccgagcactttccgggagcaatcggactcctggtctcctccggggatgcttcgcggtctgttatcgcgtcaggaggaaagaattgctccaaaaatctgcacgcggagcgaaacagtttgaaagggactgaggctcacccaggtctccagcaaacggaggactgaactggggagagtcaccctgagccagcccttccctggactgccggaatcccagcattagcttcctgctgaatgtagtatttggcattctctgaatttatttcctctccttcccccacccagctttctttttatggccccagggggagggggagagagcaaggagatcggtatctttgtaataaaactgcaattttataaatttttca

SEQ ID NO: 224306 - DNA, 1000 bp, Homo Sapiens
ggtagcgtatataaagagaagttcctgtcacattatattcccactagaattattatccacagtaaataaatattattttgttatgccaaaaatatagcgagcagcttcatggttaataatacatttatgttgacacctccctaatccaggaaacattcacaaacaaggactcccatatacaaatactttaggaagagagatttcccaggcagatatcaccaaaaatgttttcactgtaggaatcacaaaataagtttttgtcaaaataactgttgttgaacgttatactggtcttcctcactggtgattgataagctcctttctagccagtttgtggtacttccttcattttccctagaaatgttacttgttaaatgtgtcctcaggcggtttcatctttgttgattctgcccatctaagtcataagcttctcaaatgcaagctactagctagttacacttgtaagttttccataatgacatgattttaaacataaagagttcataagaatcacttggagagactatttaaaaatgagattcctaggcccacctcagattgtgataaatctgtgtgactgactgatgcacactttttctggactataataactgatgctgctctactgctttaatacaggccaaagtaacgtggaagcgcacagcagaaaatcttcagaaagacatcaggtttgttctgattttgacaagggtaacttcttctttattaaagcaaataactggacataatcttaaaggattccacctccatcgtctttcctaacttagatcttcattgagaaattgggcaaggttaagtttacttttttctagtgctgcggttttggctcgtcttggtagtctcatcttcatttctgattctggttctggaacttcatgatcactaaatagatgttgaaaatacacgaatttagatacaagctttaaaaccagtttatttataaataaaacttttttgtttctgaaaaaaaaaaaaaaaa

SEQ ID NO: 224307 - DNA, 1000 bp, Homo Sapiens; identical to SEQ ID NO: 118753

SEQ ID NO: 224308 - DNA, 1000 bp, Homo Sapiens
gcagacgagccccactcgggctgagctcctccgcgcgtcgccggcgctccaccgtggctacccatccgtggtcccgacaacctccctgtcccttgcccgcccccaggaagggggaaatggggcatttggggcccagacctacacttggagcccaggtccagcgttcccccgaccgctttcccctacctcccggcccccgctcccgccccagcacttttggctctgttgcgcgtggggatgcggggagatttgagaggggaaaaccccgccaggagggagagagaggcacccctctgggatgcgggtgagggaaggttggctgaagttcctagtctcaggccgtaggtgcctggccagtttcctgtttgtggggcagctggggcctgaggaggaggggttcacttcctcctcccaccccctgggagcggccctgcgctgtcactgacatctcattaaaaaaaaaaaaaaatttgctctcaaggtgtttgaggctttaatgcaaccctttagcccttggttctttttggtgcaagaattctggctgtttacctcagactcagacccctgaaatgttgccaaattcttcaaataactgtttggggggtggggggagatgaaagagagtcgcgttttgtttacagttaaagacatccaatatcttaaaaaggagttttcctttagaaacacacacacccttcctcttgctcaaaagatctcactccatgatactgtgtaaaatatttttgcactgttgtgaagtatttttgacttttttctgtacataactgtgttctcagagctgaatgtttatatcttttgctgtgcaaaagaaacatgtaaaatgttgttcagttgtatatacagaaatgtgtataaaacattttgttattttttaaaagtagcactgttctggttctgtttgcacgccagtggggagagaataaagaggaaaatttaacagaaaaaaaaaaaaaaaaaaaaaaaaaaaaaaaaaaaaaaa

SEQ ID NO: 224309 - DNA, 1000 bp, Homo Sapiens
tgaaattattccattgaaattatactttttttacctgaaaaaattatagattttttgaaaagcaaattcaactctaaaattacttcatactgattcaacttattgtttatatgaaagcatgtgatgaattgttgcatcagaggtatgagtgattctttttaggtgggcatcattcatgaactttttttttttttttgagacggagtctcgctctgtcgcccaggctggagtgcagtggcgggatctcggctcactgcaagctctgcctccccctgggttcacgccattctcctgcctcagcctcccaagtagctgggactacaggcgcccgccactacgcccggctaattttttgtatttttagtagagacggggtttcaccgttttagccgggatggtctcgatctcctgacctcgtgatccgcccgcctcggcctcccaaagtgctgggattacaggcgtattcatgaacttttacatgaatgagtaaggacattgaaagatgcatgagatgatgcatacatctttgtggttgacttatcattgcatgatgcatgacgtacatgttcagagtaatattcttctgcattatagtgagagaaaaatcttgaattttagtaataaattgcttttaccagttgcacatttatgtaataaaatacagtaaattttaaaattctcttttaagattgtgtgtgaaccttactcaagggtgtaggtaaaaaatggtaacagtatacttttagtaacatagtttaatgacatttctagtaatttctttttccagtggctttaaacaccaaataagttgaagaatattgttctcatgttaaatttttattattttttatatttaaatttatttttaaaaatttatgtgggtacatggtatgtgtatacattcatggcatagatgggttactttgatacagacatgcaacatgtaatcacatcagagtaaatgagttattcatcacctcaaaaaaaaaaaaaaaaaaaa

SEQ ID NO: 224310 - DNA, 1000 bp, Homo Sapiens; identical to SEQ ID NO: 118756

SEQ ID NO: 224311 - DNA, 1000 bp, Homo Sapiens
attgcagagatggagctctcagactttgaggactgcctgacattatttgcaggagacccaggacttgggcctgaggaactgcgggcagccatgggcaaagcaaaacagttgtggggtcccccccggggatttcgtcctgagcagatcctgcagcttggtaggctcttaataggtctaggagatcgggaactacaggagctgatcctagtggactggggagtgctgagcaccctggggcagatagatggctggagcaccactcagctccgcattgtggtctccagtttcctacggcagagtggtcggcatgtgagccacctggacttcgttcatctgacagcgctgggttatactctctgtggactgcggccagaggagctccagcacatcagcagttgggagttcagccaagcagctctcttcctcggcaccctgcatctccagtgctctgaggaacaactggaggttctggcccacctacttgtactgcctggtgggtttggcccaatcagtaactgggggcctgagatcttcactgaaattggcaccatagcagctgggatcccagacctggctctttcagcactgctgcggggacagatccagggcgttactcctcttgccatttctgtcatccctcctcctaaatttgctgtggtgtttagtcccatccaactatctagtctcaccagtgctcaggctgtggctgtcactcctgagcaaatggcctttctgagtcctgagcagcgacgagcagttgcatgggcccaacatgagggaaaggagagcccagaacagcaaggtcgaagtacagcctggggcctccaggactggtcacgaccttcctggtccctggtattgactatcagcttccttggccacctgctatgagcctgtctctacagtagaaggagattgtggggagagaaatcttaagtcataatgaataaagtgcaaacagaagtgcatcctgattattttcagaagctgatgaggaata

SEQ ID NO: 224312 - DNA, 1000 bp, Homo Sapiens
gttttaaaatatgcatgaagatgtgcttactgcagataactggttataaacagctgtatttggatgtagaaagtgtgaggaaaaggccatatgattctgataacctacagcatgaagagctactcatgaagctttggaatcttctaatgcccacgaagaagttaaacgctagaatctccaagcagtgggctgaaattggttttcagggtgatgatcccaagacagacttcagaggcatgggcatacttgggttaatcaatcttgtgtatttcagtgaaaattacactagtgaagctcatcagattctttcccgttcaaatcatccaaaattagggtattcttatgcaatagttggaatcaatcttacagagatggcttatagcttactgaagagtgaagctttgaagtttcatctctataaccttgttcctggtataccaacaatggaacactttcatcagttttactgttatcttgtctatgaatttgacaagttttggtttgaagaagaaccagaaagcattatgtatttcaatttgtatagagagaagtttcatgaaaagattaaaggacttttactggattgtaatgtagcacttactttaaaagtataaatcatccactgtatcttctatttctaccacattttgcacattcaacagaatttatatgttgtaataggaattatctgatcaattacactcttatatataatttcctacaaaaatatttcagaaattctatttaagaaagctagtggacaatcagtgtatgtttacaattgtttatacactgttctccaaaggtaccttatccttccaaagatcccctctgtagagtcatgcgaactacagtttggaacttgggacttagcccgttggtgtaaaagtataaatcaggtatttgtattaaattgattaaaatgtgtaaaaaaaaaaaaaaaaaaaaaaaaaaaaaaaaaaaaaaaaaaaaaaaaaaaaaaaaaaaaaaaaaaaaaaaa

SEQ ID NO: 224313 - DNA, 1000 bp, Homo Sapiens
caagggcttttgatgaggacaagtgacagtaggaagatgcaagagcctttagtaccaaggttctcaacactgactacatgctggaatgactgtgaagcttttaaaaaatgttagtgcccactcttcccctgtacccccggacagttaaatcagaacctcagacagcaatatgccttgagatgccttgaaccatgcttgagaaggaaggacaaacacattattatcttggaagaattgcataaggcttatgacttaaaaaaaaaaattctttttggaaacacaagcatttctttaaggatgaccggatgttgccgtatgtatttatggcacaagcaggtgttgtctaagcagtttctctgtttgcttgtcatagcagcatttggaaactcaaacatgctttcatttacataaatagtttatgaagctttgacaacaaatgtaaacagacacgaaattataaatctgctaaatatgtattaagggtattaattattgaaagtccctttccccaaaactcaactcctatggcaattatgaactccattttaccaagaacatttaagtgcctcagcatctgtatgatatagtggagcaggtgctgacataggtaccagctgacatgatgtgtcactagctctgtgggatgattgccacatacatggaacacctgggagtgctggaaatgtactgggatcgaagtgacaaagtgtgttttcattcacagtggaggctacatcaagcaaggggaggtccagccctcttgcaagtgtggtgagaggctttactagcaaagacatgggcaccggagtaggtcccgtgtagcatgcgggtgctgtagagaaaattcagtgacgtacatggctctggttctggacacaaaatctgtactggagaggaaatgactgctgaaataaggcgattgtatgaatatttaaaatgcctggaacactaaagtaaagtaatgatatttcaaaaaaaaaaaaaaaaaaaaaaaaaaaaa

SEQ ID NO: 224314 - DNA, 1000 bp, Homo Sapiens; identical to SEQ ID NO: 118760

SEQ ID NO: 224315 - DNA, 1000 bp, Homo Sapiens; identical to SEQ ID NO: 118762

SEQ ID NO: 224316 - DNA, 1000 bp, Homo Sapiens
tagaatgtttaaaagaaccaggaaaaacatctgtagaatctaaagtacctacccagatggaaaaatctacagacacagacgaggacaatgtaaccagaacagaatatagtgacaaaaccacccagtttccatcagtttatgctgtgccaggcactgagcaaacggaagcagttggtggtctttcttccaaaccagccacccctaagactactaccccaccctcatcaccacctccaacagctgtctcaccagagtttgcctacgtcccagctgacccagctcagcttgctgctcagatgttagcaatggcaacaagtgaacgaggacaaccaccaccatgttctaacatgtggaccctttattgtctaactgataagaatcaacaaggtcacccatcaccgccacctgcacctgggccttttccccaagcaaccctctatttacctaatcctaaggatccacagtttcagcagcatccaccaaaagtcacttttccaacttatgtgatgggcgacaccaagaagaccagtgccccaccttttatcttagtaggctcaaatgttcaggaagcacagggatggaaacctcttcctggacatgctgtcgtttcacagtcagatgtcttgagatatgttgcaatgcaagtgcccattgctgttcctgcagatgagaaataccagaaacataccctaagtccccagaatgctaatcctccaagtggacaagatgtccccaggccaaaaagccctgttttcctttctgttgctttcccagtagaagatgtagctaaaaaaagttcaggatctggtgacaaatgtgctccctttggaagttacggtattgctggggaggtaaccgtgactactgctcacaaacgtcgcaaagcagaaactgaaaactgatccagaaatgacgctgtctgggtcaacatttcagggaggagtctgccaccagtgtaatgtatcaataaacttcatgcaagcataaaaaaaaaaaaaaa

SEQ ID NO: 224317 - DNA, 1000 bp, Homo Sapiens; identical to SEQ ID NO: 118763

SEQ ID NO: 224318 - DNA, 1000 bp, Homo Sapiens
tgcggtgctcccaagacttccatagaccatctggaccagtagcccatcccgcagttttcttgggggcagaggaaaacgcttctttctcctccagctgaatcagctggatcccagtgtcctggctgtttggtgattgggcaagattgaatttgcccaggtaggcgtgagagtgtgggttttaaattcgaagctcaggccatagtttcagagaatcacccttaccccagaccttcatgagacagtgctcatgaagccagtgcgtttcccagaacgaacactaggcggcaccgttggtccacactcagaggcccttggcgccaagactgcatctagaatcgctcaaacacctgtttgcagaccccatgcaccagctggaggggccgtaactgcaggactgcgcctactgagtgacccatttcctccaggaggaaaggcaagacacgcttacacggccatttgtctcttttcccaatgcggcggtgcactttcgctcttgggggctgcaccccagacatagctggcaccagagcagggtgctcaggtggtgggtgctcagggccctgccccaggccactgggccgttttgatgacctcgaaggtcacaggcagaaaataggagcaggatttcccctggggaaaagttctcctgggacatcttctgctcttctgtacatttctagatgcaaataactccttcaccaggcagtgagtggcgtaggctctggagccaggctgcctgggctccaatgccagctctgccacttgctagctgtgagactgtggacaaaccactcagcctctgtgtgcctcagttttcctatttgtaaaatagaggccatagtggtacctattttgaagactaagtaaaagaattcaaataaagagacttggcacagagtaagtgctcagtaaaaaaaaaaaaaaaaaaaaaaaaaaaaaaaaaaaaaaaaaaaaaaaaaaaaaaaaaaaaaaaaaaaaaaaaaaaaaaaaaaaaaaaaaa

SEQ ID NO: 224319 - DNA, 1000 bp, Homo Sapiens
gtgccaaatgatgttggatatcaggaacgaagtgaaatgccgctgtaactacaccagtgtggtgatgtctttttccattctcatgtcctccaaatcgatgaccgacaaagttctggactacatcacctgcattgggctcagcgtctcaatcctaagcttggttctttgcctgatcattgaagccacagtgtggtcccgggtggttgtgacggagatatcatacatgcgtcacgtgtgcatcgtgaatatagcagtgtcccttctgactgccaatgtgtggtttatcataggctctcactttaacattaaggcccaggactacaacatgtgtgttgcagtgacatttttcagccactttttctacctctctctgtttttctggatgctcttcaaagcattgctcatcatttatggaatattggtcattttccgtaggatgatgaagtcccgaatgatggtcattggctttgccattggctatgggtgcccattgatcattgctgtcactacagttgctatcacagagccagagaaaggctacatgagacctgaggcctgttggcttaactgggacaataccaaagcccttttagcatttgccatcccggcgttcgtcattgtggctgtaaatctgattgtggttttggttgttgctgtcaacactcagaggccctctattggcagttccaagtctcaggatgtggtcataattatgaggatcagcaaaaatgttgccatcctcactccactgctgggactgacctggggttttggaatagccactctcatagaaggcacttccttgacgttccatataatttttgccttgctcaatgctttccagggttttttcatcctgctgtttggaaccattatggatcacaagataagagatgctttgaggatgaggatgtcttcactgaaggggaaatcgagggcagctgagaatgcatcactaggcccaaccaatggatctaaattaatgaatcgtcaaggataa

SEQ ID NO: 224320 - DNA, 1000 bp, Homo Sapiens
tccctcttgattgctgatgtctggtttattgttggtgccacagtggacaccacggtgaacccttctggagtctgcacagctgctgtgttctttacacacttcttctacctctctttgttcttctggatgctcatgcttggcatcctgctggcttaccggatcatcctcgtgttccatcacatggcccagcatttgatgatggctgttggattttgcctgggttatgggtgccctctcattatatctgtcattaccattgctgtcacgcaacctagcaatacctacaaaaggaaagatgtgtgttggcttaactggtccaatggaagcaaaccactcctggcttttgttgtccctgcactggctattgtggctgtgaacttcgttgtggtgctgctagttctcacaaagctctggaggccgactgttggggaaagactgagtcgggatgacaaggccaccatcatccgcgtggggaagagcctcctcattctgacccctctgctagggctcacctggggctttggaataggaacaatagtggacagccagaatctggcttggcatgttatttttgctttactcaatgcattccagggattttttatcttatgctttggaatactcttggacagtaagctgcgacaacttctgttcaacaagttgtctgccttaagttcttggaagcaaacagaaaagcaaaactcatcagatttatctgccaaacccaaattctcaaagcctttcaacccactgcaaaacaaaggccattatgcattttctcatactggagattcctccgacaacatcatgctaactcagtttgtctcaaatgaataaggcaaggaatcataaaatcaagaaaaaatttccagaacaacttgacatttagagacaaatgtcaatgaagaaattatgctcagtattcgatcgggttttctgatttaggggtctgggaataaaacaagaatgtctcagtggcttcaaaaaaaaaaaaaaaaaa

SEQ ID NO: 224321 - DNA, 1000 bp, Homo Sapiens
gtgttcgagggtcgactaggggagggggtcctgggcccggtgaccgcaggcctcagcatctccactctgcgtaacaggttcctcctttgggcccagcggccggcgaggccgccagacatacacacgttaccagacgctggagctggagaaggagtttcactacaatcgctacctgacgcggcggcggcgcatcgagatcgcgcacgccctgtgcctgacggagaggcagatcaagatatggttccagaaccgacgcatgaagtggaaaaaggagagcaaactgctcagcgcgtctcagctcagtgccgaggaggaggaagaaaaacaggccgagtgaaggtgctggaaagggagggaggacgcgaggggaaaggcctgtggggagccacgggcgtcagagagacccgggaaggaaggctctcgggtgggggagccaggagacctgctctccggcgcagacaggcggggcccagcgctctcctggacgcccccgcccgcacagctcccggcgggtgctctgaggcctcactactcgagcccacccagcatcccgcgcgcccttccttcccgaggaactcgcctcagcctgatcaggcttcctggtgagaactgaggagcggactcacttgatgtttcctggaagcagagcaaaatgctcttgtccctgtcgcgtctcattttgtccatgtcccccgtgcacggttcaatggtagattcgctgtcccctcagcgggggccttgaagactccctgatcccagacctgtcgtctctcccaccccctccccaaagccactggaaggagcacatactacctagaagtaagaagaggagcctcagaagaaaacaaagttctattttattaattttctatgtgttgtgtttgtagtcttgtcttagctctggacgtgaaatacttcgatgatgatgatgatgatgatgatgataataataataataataacaacaacaacaacaataataaagatgtgaaaactcgaa

SEQ ID NO: 224322 - DNA, 1000 bp, Homo Sapiens
tactgctggctgggctgctcacgggtctggcattgcccacattgccagggctgtggaaccagagtcgccggggttactggtcctgcctcctcgtctacttggctcccaacttctccttcctctccctgcttgccaacctcttgctggtgcacggggagcgctacatggcagtcctgaggccactccagccccctgggagcattcggctggccctgctcctcacctgggctggtcccctgctctttgccagtctgcccgctctggggtggaaccactggacccctggtgccaactgcagctcccaggctatcttcccagccccctacctgtacctcgaagtctatgggctcctgctgcccgccgtgggtgctgctgccttcctctctgtccgcgtgctggccactgcccaccgccagctgcaggacatctgccggctggagcgggcagtgtgccgcgatgagccctccgccctggcccgggcccttacctggaggcaggcaagggcacaggctggagccatgctgctcttcgggctgtgctgggggccctacgtggccacactgctcctctcagtcctggcctatgagcagcgcccgccactggggcctgggacactgttgtccctcctctccctaggaagtgccagtgcagcggcagtgcccgtagccatggggctgggcgatcagcgctacacagccccctggagggcagccgcccaaaggtgcctgcaggggctgtggggaagagcctcccgggacagtcccggccccagcattgcctaccacccaagcagccaaagcagtgtcgacctggacttgaactaaaggaagggcctctgctgactcctaccagagcatccgtccagctcagccatccagcctgtctctactgggccccacttctctggatcagagaccctgcctctgtttgaccccgcactgactgaataaagctcctctggccgttaaaaaaaaaaaaaaaaaaaaaaaaaaaaaaaaaa

SEQ ID NO: 224323 - DNA, 1000 bp, Homo Sapiens
attttccttgaatgtacataggaacaagggggaaagtctcttactgaagtgcctgaaacccaaagctagagcttctagagacgccgttcttcctgtctcagcttggccagcctttcaacaatgttctctagtttcaagctccagcttctcagaaagaattaaagaacttgctgttcaaattaagtagaaagtgagactcaataataactgaactacagcaaaaggcagagaattacagggagaaaaaacttgtacttaccagcccaattctactctcctcaaactgacacacacacacacacacacacacacacacacacacacacactcttttaggggactaagagagagaagcatgttattacattttactcatccaaacagtaatgcaaaaataaaacggtagaatatgaaaagctcaggatctctcccaaggctacctactgcaggagggccaacaggtgagatgggaagaatggaaacagggaccgattttgtagctcatacaattaggacaccttaggaatagcattgtagtaatggtgatgaatatgctctgccaaattcatccagtctgcaccatcttatagctgcccagcacactcgactgttcatgtggtctctttgtagtgtgagtttggagtgtcctattagcctgttctggttaggaatgagttaacggctctttccctcaaccttagtctagtcccagggctgaggattcagctggatccacatggtcttgagggttggcatgaggagggggaagcttttttgaatcgctttttgatcacataatctgccattttaagagtaagatttgctttatggaaatcaattcattaataaaaaatgatattcaagttgcaataccatttcacagtgaaatattttgagtacaattttgttgctagaatagtcatgggcaagagttttatgcaaaatgtttcaattatgttaataaataagacaatgcaaaaaaaaaaaaaaaaaaaaaaaa

SEQ ID NO: 224324 - DNA, 1000 bp, Homo Sapiens
cccacactttgtttacagtcttatggtcaggctgagcagtgatgtggcctagcaggttacgggcaggacttgagtggcttcggacagggcttctcagaccccagccagcagcctccttcctacgggggtccctccgtgccagggtcggggggcccccccgccggcggcagcggctttggacgagggcagaaccacaacgtgcaagggttccacccctaccgacgctagcccgcggcgccgcgacgtctgcacggcccagacccaggattccaaacttgtgaactcgtgacaatcacaaacttggcggcaaagtggcgactcaaccttgggggggggggcggggggagggcgcgaggcttttggagcggctgtgggtgtcgtctggactgaggtttttaaatatttctttctctaacccatcagcacaataaaaaaaagtcactggttcaacaacagggtttaaaaaaaatgtcttcagctttaattcaaaacttcaggtttctttttcttccttttttttggaaattattttcctgagccttttgttttacggtatattgtaaacttttatgttaaagaaaaaatatacatttacaaattgtgagatttttaagagaaattttctacgatgtatactggcttattttttaatttaaaacggggtttccgtcggcactggtggagggggtgcgctgttagtcccctcgctcctggctttgggggttgggacttggtggtccagaaactctgggagcttctagaagaaatctactgagtgtatttctgttttttgtttaattccttgcttttgtcgactgacctgcttggtagtgtctgaggtgaactgtgggggttgcgcacagccagccgcgtggatcccacgcagcgctgaaccgaaccgagtaggaagcctttctccccaggcacgtggcttcagggcgtttcccattgaccagtttgaccctggtttgaataaagagaagtgcgtttggattagaaa

SEQ ID NO: 224325 - DNA, 1000 bp, Homo Sapiens
gcccccggcgccacccagatgagccccctgaggatgaagtcttcgagctcttccccatgttcatgggggggcttctctctgcccacaaccgagctgtgctagctcagcttggctgccccatcaagaacctggatgccctggagaatgcccaggccatcaagaagaagctgggcaagctgggccggcaggtgctgcccccatcagagctccttgaccacctcttcttccactatgagttccagaaccagcgcttctccgctgaggtgctcagctccctgcgtcagctcaacctggcaggtgtgcgcatgacaccagtcaagtgcacagtggtggcagctgtgctgggcagcggaaggcatgccctggatgaggtgaacttggcctcctgccagctagatcctgctgggctgcgcacactcctgcctgtcttcctgcgtgcccggaagctgggcttgcaactcaacagcctgggccctgaggcctgcaaggacctccgagacctgttgctgcatgaccagtgccaaattaccacactgcggctgtccaacaacccgctgacggcggcaggtgttgccgtgctaatggaggggctggcaggaaacacctcagtgacgcacctgtccctgctgcacacgggccttggggacgaaggcctggagctgctggctgcccagctggaccgcaaccggcagctgcaggagctgaacgtggcgtacaacggtgctggtgacacagcggccctggccctggccagagctgcccgggagcacccttccctggaactgctacagggtgtcgccatccagatgtgttggaagcttcccctcctgccttatgctcacctgtggacaccgaggatgccctcacattggtgctttctcctcatcctcatgccccctttgccacaatggtatgatggcttggtagcccctcgaggcagatgcacctgacttgctgctattaaaaagccgtgtgccttctaccaaaaaaaaaaaaaaaa

SEQ ID NO: 224326 - DNA, 1000 bp, Homo Sapiens; identical to SEQ ID NO: 118773

SEQ ID NO: 224327 - DNA, 1000 bp, Homo Sapiens; identical to SEQ ID NO: 118774

SEQ ID NO: 224328 - DNA, 1000 bp, Homo Sapiens
gagaggtttctttctttcttttttttttttttgagacagagtctggttctgtttcccaggctggagtgcagtggtgggatctcagctcactgcaacatccgcctctggggttcaagtgattctcctgtctcagcctcccaagtagctggaattacagggacccgccaccacgcccggctaatttttttgtgtggttttagtagaggtggggtttcaccatcttggccaggctggtcttgaactcctgacctcgtgatccacccgcctaggcctcccaaagtgttgggattacaggcgtgagccactgtgcccagccaaaagagaaatttctacatgaacaaggcaatttcagtgtcttacagcggccaaaccatgacgtgaagaatgagataggagacaggagatcaccataagcgtccctgatatagcagcacacattttcacgtttccacttaaatcgttttgcacaaagtcttgcttcgctcagatgagatgagatatgatttcctagagatgtaaaaataagaatgaatgtggcgcccccttcttccagatgtaatagaaagctctgccctatcacaaggggggtgttgaagcgccccttgtgttttaactgtatttaactgagcacaagatgcacaagctgtggtgggaaaccctcagtttacctttggagtcttccctgcagatcgcagacctgtttccaggctgatgtttctggtgtgtaattgctagcgtttctgaagggttttcccaattgttttagccttgtgaagtattcttaattataacttgcctttcagcgatggtacatgacttgattcaacgtttggttctgaacttacacactgatgcgtttactcatctaacataatctgacagggcctcagcaagggagccatacatttttgtaacattttgatatgttttaatgcatctgacttagatcttactgaaataaagcacttttcaaagagaaaaaaaaaaaaaaaaaaaaaaa

SEQ ID NO: 224329 - DNA, 1000 bp, Homo Sapiens
tataaacacacaaagctgctaaagaagattgaccatgccaaagtgaggaaacaccagaggaagttcctccaagctatccaccagttgaggagcgtcaagatggaacagaggaagctgagtgaccaagccaacactctggtggacctttccaagatgcagaatgtcatgtatgacttaatcacagaactcaatgaccggagcgaagacctggagaagcagattggcagcctggagtcgaagctggagcatctcaccgccagcttcaactccctgccgctgctcatcgccgacaccctgcgccagcagcagcagcagctcctgtctgccatcatcgaggcccggggtgtcagcgtggcagtgggcaccacccacaccccaatctccgatagccccattggggtcagctccacctccttcccgaccccgtacacaagttcaagcagttgctaaataaatctccccactccagaagcattacccataggtcttaagatgcaaatcaactctctcctggtcgctttgccatcaagaaacattcagaccagggaacggaaagaagagagaccgagctaattaactaactcatgttcattcagcgtgcttggtccgacatgccttgaaaccagaaatctaatctctgtttaggtgcctctacttgggagcgggaagaggagatgacaggaagcgacgcctctggcagggcccttgctgcagagttggtggagaacagaaatccacgctcaatctcaggtcttcacgcggggggtgggggtcagatgcactgaagtagccaacagcgaagccagtccagaagaggggtccgctgggagggagggttgtgtcaggcttgggggatgggctcttcgccatgggggtctttgaacacacctctctcctttccttttgtctacggaagcctctgggtgacaaaagtaaaagagagctgcccacaacttgccaaaacagatatactcgaatcagactgaaaaaaaaaaaaaaa

SEQ ID NO: 224330 - DNA, 1000 bp, Homo Sapiens
tcagctaggcaaaagccatacttttcacaattaaaaaaaaaaactattctgactagagtcaggtttctcatatccatcgtgataggaaggcctaagaatggcaaatcgctttgagatataatattgaacttcagtatgaatgtgaccgaatctgaaactttgggaatttgctttagccagaataaagaaaccaaatcatgaaaattatggaagactattctgccacctgtgccccaagttggatgagcaaaccactttggatcagttcacagcattaactacaagtgaactgatcatcttctctatattcatttcacaagagctggcttaggtggggtaattaaattgccaccttcgtggttgtaaaagacaaacaaaacatggcaaatttcattaacacaaaatttcatcaactgctatactgaattatgtttagaagattctgaaagcaagattatccagtgggtaaatgagagtcgactggattctgtcagttcaaaaaaggaaagaaacaaaacttccctacaattttcttcactaaaatttattatatgtacagtattcccactcctggcattttctggcaggtttaaaaatattcagcataaatccagcagaggtggctgagcttaattgcttaaataagttctagaaaatttaaaaatcattttagtagaattcagtaccattgtcactgcaataagtgggttttagaaaataagtgtgaaaagaatcaggtgttaatataatactaaggataaagctttagaagctattttactacataggtaaagaaaagataaactaacttgtaacaaagaccacaactgcatgttggattagattgtctcatatttcagaataaaatgtactgtatacttttcctcactttgttgtgcactgtaatgaaatgtgaaaaatgctttatttagctgtatgtgaatgaaaatatgcttgtatttagtaaaatgattgattatgtgaaaaaaaaaaaaaaaaa

SEQ ID NO: 224331 - DNA, 1000 bp, Homo Sapiens
agatattgaggagtttttctgagggcagagattggacatcaacaaggctagaagggtcagggaagtgggctaaaggaacagattcctagagattaatgaagaggagggaggtttctttggtcttctattccaagggtaaggttgcgattatgggtaagattggccagaggtaggaatgtggggagaaggagaggctgaaaagaaagcagaggagaacccaggtccctgcctcagccttcagcagagttggcttattgcctgcctctataccaataagtcagtcaccttgctcctctccagaggcaaagtggaagagatcctgcaagacacatctatcctttcacagtgttcccaagggaacttggaaaggagagtcaggtattagaggaaagagaagggtatttgtatacaaagccctggccttaaagaatgttacttagtagctactcccaaattgtcagccttcttacctggccaaggtgtccaagccagaaaggaaaaaaggttatggagtctttctcaccctaaggacagggtggaagagggtggtatatagggaagggccagataggcaacttcatttggcttgtgtgcatctggcctggaactggtgttaagccaggcttttgcttgtttgttgccatccctcaccctttgccatttcccttttcagagaatgtaaatgattttcatgttaggccaaaataaacaacttatagggtacatatgttgtcataaaaggtaaaagtgatgcatgccaaaccaaactaaaccaatttggattatctgctattcgggtaatcttcacagaaatgactgagagaagaatctgcagtttactgagggcatttcagttcctcctaccacctcaacaggactttgtccagactctcctcctcttacctttgtgccttgactgtggttctttgtggcaagatactttggttggttaaaataatatggaacaaaggatccactgaagtgaaaaaaaaaaaaaaaa

SEQ ID NO: 224332 - DNA, 1000 bp, Homo Sapiens
ggctaggactggaaggcaaggactaaggtgaaagctgactgcccgcaccgccccaggcgcactgggtaggactgaaaggcagggactaaggtgacagctgactctgccggggcggagtgcgtgtcctcccaccgtgctggcgctgaactgactgtccgctgccaagggaagtgacagccgcagccgggctctcagccagcggccaggcgccccgcggaccatgctctccagtacgcagaacgcggggcgcttgatacacagagtaattactttaggctataagagacctttggaaagagaggatctttttgaactaaaggaaagtgattccttctgcactgcgtgtcccatctttgaaaaacaatggagaaaggaagttttaaggaatcaagagaggcaaaaagtaaaggtatcttgttataaagaggcacatatcaagaaaccatctctactctatgcattgtggaacacctttaaatccatcctgattcaagttgccttattcaaagtgtttgctgatattttgtccttcactagcccactcataatgaagcaaattatcattttctgtgaacacagctcagattttggctggaatggctatggctatgcagtggcacttcttgttgtagtctttttgcaaactctgattcttcagcaatatcaacgttttaacatgctcacctcagcaaaagttaagacagctgtaaatggactgatctacaaaaaggccttacttttatcaaatgtttctcgacaaaagttttccactggggaaattattaacttgatgtcagcaactcatggacttgacagcaaacctcaatctcctctggtctgccccttttcaaatcctaatggccgtatatctcctttggcaagagctgggtccagcagtgttagcaggggtggcagtccttgtgtttgttataccaataaatgctttagctgcaactaaaataaaaaagttaaaggtaagaaaaaaaaaaaaaaaaaaaaa

SEQ ID NO: 224333 - DNA, 1000 bp, Homo Sapiens
aaaattacatttttacatgtaaaaataaactaaacaaatctaatgataaaatataatgtcagatccatgttctaaaaaatttttgtaatgacatgacattacaagagtataaaaatggacattaaatcatggccttgcattaaaatatggaaagcagagcagtacatattcaaatgtattcagaaagtcaaaagattacctatcgttctacaataaaatacatggaaatagcttgctatttttatatacatttccaaaatattaagataactttctgtaagagtcaatgattctgttcgactaaatagctgtcctttccaacacattgctacttttttaaatactgtatcataagttcagcctgtcatactttttgcattgatcgttatgaataccagaccatttgtaagtgtggttgaagagcaaaatgctaattgacatctctagtaaatactgttacaggattcatgaacttgaataattctacagtttgaaactctgatgctatatatacatggtataatgtattcagactttgattactacttatttaaaatggaatgttttatggttgtgcatatggatgtgaagtgaaaatattagccttaactttaaaatttgggtgtttgatagtgtttattttgatattggtgaattagtcaccagtaaattttaaaaaagcacttggttgaaaattgtacttgaatacatacatgcatgctgctaaactagaactttaatttttccccataacttttataagtcccatttataaacccacttttaaaaataacaggtccaagttagagtgatgtgtgtatattattcaaaaaaatgtactggtgtgatatcttgtatgaatgatcatttaaatacagtacattactgtagaagctaaattgatctttataattaagcagaaattacaaaactaggaataatcaacattgtaagatatgttaataaaaacctgctgtcatttggtttgtgaaaggtcctt

SEQ ID NO: 224334 - DNA, 1000 bp, Homo Sapiens
caatcaactatgttttaaaactgcaacatttgatttgaacttaaaatgaatagagccacattattttaatggatgttttgttttacttgtgaactgattgagtcttaaggatagtttatgaattgatcacttgttgctcagaatcattagtataagtaggtaggaaatagtttgaagtcatttttcatagacttaactgtccaatgttgcaaatgtttcttcatgaaaatattgaaaagagtaaggttttttttttttttaattctgctgcacatattctgatgccatgtgtctgtgcttaattaactaagaccctataaaacgtgtttagtggggactgtttgatatagttgccctctccattcctctatttgcctgatttttttcagtttccctttctgtattttactactaaattagaaagcactggttatgtaataagttactacattgctttggttgagtaaaaacaagagtttatatttttcttgtttcttattttcttaacccttaactcctgctgaggtcataacaacctcagtctaagctctgtgtccatcatactgttaacttaaacaaatgggtggtgggggtgggaagggtaatacagtcctgccattgcctaccagtaggagagtccaaacagaacactcttttgagtagcaattatttaatttgcccagtcaaggcaccgtgtttatatactatttcacattgaatttgattatgccctacagacctggctggtcaaggatttgatatacacatattggcttgggattcgagctttcttttttatttaaataaaaatttatatatatattatatatatacatatatacatagctatatctgtatatatattgggtatgttttaaggattttttcgcatgagcgcagctgttgcgataaattgaccgattgggaggtggtagaagcactgaatgaaggtgaggctttttttttttccagttttcttatacatttgtcttcttttttt

SEQ ID NO: 224335 - DNA, 1000 bp, Homo Sapiens
cagacaacagccaagaactgggaactcacagcatccgcctcccaccagccgccaggtgtgtatccacagggccacagcgacaccactgtggctatctccacgtccactgtcctgctgtgtgggctgagcgctgtgtctctcctggcatgctacctcaagtcaaggcaaactcccccgctggccagcgttgaaatggaagccatggaggctctgccggtgacttgggggaccagcagcagagatgaagacttggaaaactgctctcaccacctatgaaactcggggaaaccagcccagctaagtccggagtgaaggagcctctctgctttagctaaagacgactgagaagaggtgcaaggaagcgggctccaggagcaagctcaccaggcctctcagaagtcccagcaggatctcacggactgccgggtcggcgcctcctgcgcgagggagcaggttctccgcattcccatgggcaccacctgcctgcctgtcgtgccttggacccagggcccagcttcccaggagagaccaaaggcttctgagcaggatttttatttcattacagtgtgagctgcctggaatacatgtggtaatgaaataaaaaccctgccccgaatcttccgtccctcatcctaactttcagttcacagagaaaagtgacatacccaaagctctctgtcaattacaaggcttctcctggcgtgggagacgtctacagggaagacaccagcgtttgggcttctaaccaccctgtctccagctgctctgcacacatggacagggacctgggaaaggtgggagagatgctgagcccagcgaatcctctccattgaaggattcaggaagaagaaaactcaactcagtgccattttacgaatatatgcgtttatatttatacttccttgtctattatatctatacattatatattatttgtattttgacattgtaccttgtataaacaaaataaaacatctattttcaatatttttaaaatgca

SEQ ID NO: 224336 - DNA, 1000 bp, Homo Sapiens
ccctgatgccagcaacccttgcacgggccgccccaggggaggcacccccggaattgctctgccttgtgtcccacttctacccttctgggggcctggaggtggagtgggaactccggggtggcccagggggccgctctcagaaggccgaggggcagaggtggctctcggccctgcgccaccattccgatggctctgtcagcctctctgggcacttgcagccgcccccagtcaccactgagcagcatggggcacgctatgcctgtcgaattcaccatcccagcctgcctgcctcggggcgcagcgctgaggtcaccctggaggtagcaggtaagagctgggagctctgcggaatctgagccagcacccaggaagacaggagctcactctcaccccttctgcctgccaggtctttcagggccctcccttgaggacagcgtaggccttttcctgtctgcctttcttctgcttgggctcttcaaggcactgggctgggctggtaagtgtcagccctaccctgaccatgacctgaggttggtggactttccccacctactcccaagagcctgacacccatccctctgccctccacctctaccactccagcatcccatcccttctcaatctttccccacagctgtctacctgtccacctgcaaggattcaaagaaggtacagtgctccacctctctgtatctttcccttgtcactttatctcctcatcctatctcaaaacccatggagggaggctgctggtgtggtaggcagaacctaggcttggaattcacactgatctgggttaaaacctggcactatatcctaactgtaggactctttgagcatgctacttaatctatatgtttccttgggtgtagggattttaaaaagttacttaggcagtgctgtccaatagaaagataatgcaagccacatatgtaaatttaaatactctagtactcacattaaaaaaataagcagaaacaggtaaaaaaaaaaaaaaaaa

SEQ ID NO: 224337 - DNA, 1000 bp, Homo Sapiens
aaggagctaattgaacagctgtttgaggacctttcggacacaccaaacaaccattttactttagaagatatacaggccctaaaaaggcagtatgagctttaaatcaagataattgttagatttcttccatgcatgtatgtgttccaggaatgttaatgagatggtattgtaaaagagttgcatggataaaacttggcctagaaaagtttggtctgcactataaaacattttacttattttcctacatagaacatgtatattctacaatctgctttttattagttgtaaatattttcttatgtaccagaaccaaataagtatatttagaacttgttaaaaatacattttaatttatgatatacatattattttaattacttgttaaaattttgagttaagttgcatttctttgggctatgaaggagtcctcttaagtttgatagaaatgaatttcttgtaacattcttttttaaaagtggaagtcattaacagtgattattatatcacttatatcctgctaagatacacataaatcccattttgtactagtacctgtggattacagtcagttaaaatgaaatgcaacactgaagtctataacatgaaatgattattaaattgtttattaatttagagctataagaggaacttattttttctaatacggaagcattgcctaataattaagaacaaaaattgccaaaaatttctaccactttttactagattttaaaaagctactttcttttatattgcctatataagcaaaaaaccaaccactgtattaaagcaaactaagcctgcatttatatctgaattattacctccatattttaccaaacatttgaatgtcccccttcccccttttttgttttctgcttttatgactgtatttattcctttactgtaaaagaatatgaagaactcatacatgttgaaagctcctttgttgactgggtcaaagtgaaggaatttcaatctcaaaaaaaaaaaaaaaaaa

SEQ ID NO: 224338 - DNA, 1000 bp, Homo Sapiens
taccttctgggccagtagataggaaacacttagaaaatgccaccagtgatatacttgtatctcctggaaatgagcataaaatcgtgcctgaagctttgttgtgtcatcaggaaagttctcactatatcagtcttccaggtgttgtattttctccacaggtctctcaaacaaattctaatgtggagtcagtgctcagtggttcagctagcatggctcaaaatctgcatgatgagtccctctccacaagccctcatggggctctccaccagcacgtgactgatattcagcttcatattcttaaaaataggatgtatggatgtgattctgtaaagcaaccaagaaatatagaggaacccagcaacatacctgtatcagagaaggattctaattctcaggtggatttaagcattcgggttactgatgatgatattggtgaaataattcaagtagatggaagcggtgatacatcttccaatgaagaaataggaagtacaagagatgcagatgagaatgaatttctagggaatattgacgggggagatctgaaggtacctgaagaagaagctgacagtatttcaaatgaggattcagccacaaacagtagtgataatgaagaccctcaagtaaacattgtagaagaggaccctttaaattctggagatgatgttagtgaacaggatgtgccagacctgtttgacacggataatgttattgtctgtcagtatgataagattcatcgaagcaagaacaaatggaaattctatttgaaagatggtgttatgtgttttggagggagagactatgtatttgcaaaagccattggtgatgcagagtggtaaaccttgtgagctcagtacatctattttgtgaacatcagttggattatattgcatattgtgaattcatttttattttgaatatagtccagcacagagctgttcaaatttttagttcactgtatggaatttaataaaattataattcagatgcagatacaatt

SEQ ID NO: 224339 - DNA, 1000 bp, Homo Sapiens; identical to SEQ ID NO: 118783

SEQ ID NO: 224340 - DNA, 1000 bp, Homo Sapiens
gctaaagctgtagagaaacgaggtcaacagggcaccattacactggatgatgttaaatttgttactttgcttttgctacaagatactgagatgcagcggatctgttcttttacaacatttatgaggaataagaatcttgataatttcctcatggcattattgtactacttatcccattacttggaaaaaaactcactggaaaagaaacccaaaagctatatggtaggccttgtagagaaaaaagaaatggaattggttttaagtgaattagaagcagcacagaggtacttggcgcagaagtactgtatccttgtgctgggcttggccgtgccggataagcatcacatgtgctgtggaaaggagaaaatatcagatacacagaaagactggaagttctttgagtccttttatactttctgtacatatgtggcttggattgtcttccgacgtcaacacttgacagagattgaagaagaagtagggagactctttcgtaccaatatgttcaacattcctcgcaggaggcgtgaagatgaggaatcaggaggggaaaagaaacgcatgacttttgttcagttcaggagaatgatggcaaaacgcccagcaattaaaaaagctatcaacatgcgttctccagtcatgtctactctgctgccatctctcagagaaaaagctcaaaacgtctttgagaaaaagtatcatcaagtagacgtcagattcccagccgagatgcaaaagcatgtgggaactctggactctgtgcccatgccggtagttggcatcttgggggagcctcgatgtctattcaacccacatacgcttcacccccttgatccagaagaaaacacaaaatcatttgggagatatccttccttgatggaaaacaataacatgaggattcaggatacactggacttggtcatgaaaacactgtcctctcatacatcatgccctaagtaacctggtacattccatatctcaagtaaactactttgacttt

SEQ ID NO: 224341 - DNA, 1000 bp, Homo Sapiens
ctcgctgtcccagcaaaagttctgctgtcgaaagcttcaagagaaaattccagcagaagccctggactttacaaccaagcttccaagggtgttatctttatacatcttttctttcctggaccctcggagcctttgtcgttgtgcacaggtgtgctggcattggaagaaccttgctgagctggaccagctctggatgctgaaatgtttacggtttaactggtacatcaatttctctccaactccctttgagcaggggatctggaagaagcactatattcaaatggtgaaagaacttcatattaccaagcctaagacacccccaaaggatggatttgtaatcgctgacgttcaactagttacaagcaattctccagaggaaaaacagtcccctttatcagcttttcggtcctcttcctctttaagaaagaagaataactcaggggagaaagcacttccaccctggcgatcttctgataagcacccaacagatatcattcgttttaattacctagacaaccgtgaccccatggagactgtccagcaaggaagaagaaaaagaaaccaaatgaccccagacttcagccgacagtcacatgataagaaaaataaattgcaggacagaactaggctaagaaaagcacaatcaatgatgtcgaggagaaatcccttcccactatgtccctaagtgccagctctcccctaaaagttccagctcatctcgcctggcctccccctgagtcagtgggactcccagacactgccaccacagctgaaattctcatgcagcatcctcacaggcaccctgggccccaagcatgactcatccaggttccagagccaaagtggactgaacatggaaagacttttattatagaaatgacaagatgctttgcacagtggagagctgaatttacttggctcccattagaaactctttcagcttaagtacttattgtggtagtgagtcctacggtatttcagtaaaaaggaattcatggca

SEQ ID NO: 224342 - DNA, 1000 bp, Homo Sapiens
tgtccagatgattgagcccaggagaggaagaacaaacaaactacggagctggggagggctgtggcttggggccagctcccagggaaattcccagacctgtaccgatgttctctctggcaccagccgagctgcttcgtggaggtaacttcaaaaaagtaaaagctatcatcagcatcatcttagacttgtatgaaataaccactccgtttctattcttaaaccttaccatttttgttttgttttgtttttttgagtcggagttttgttctttttgcctaggctggagtgcagtggtacaatctcggctcactgcaacctccacctcccgggttcaagtgattctcctgcctcagcctcccaagtagctgggattacaggcacccgccaccacacctggctaatttttttgtatttttagtagagacggggtttcaccatgttggccaggctggtctcgaactcctgacctcaggtgatccgcccgcctcggcctcccaaagtgctgggattacaggcgtgagccaccgcgcccagccaaaccttactatttttttaaagaattttttccagagtttaatttctgacatagcttaagttttccagtaactctaaactccatctcctttatcgtcattaagtcattcacaaaaagccaggagaagcatttggaaagggcatgataatcagtataataatttgccttgtgtggtcagcacttaactgtttacaaagccctttcacgtgcacagcaggtgggaactgcgcggtgtgggctgggcctgcgctggaagcatatcccgtgaaaagtgttagtgccttaggtgaaagcaacatgtatccctttagactactaacggtatatgttgttcttatgtatttgtatttatttctattttttctatgtttatgtcatatttaaacgatatcctactgcttgttggtattaccctaaactgtttaaataaagagctctatttttaaagaaaaaaggtacaattga

SEQ ID NO: 224343 - DNA, 1000 bp, Homo Sapiens; identical to SEQ ID NO: 118791

SEQ ID NO: 224344 - DNA, 1000 bp, Homo Sapiens
aagcatgaccacaaaaccaataaaaaagatggactgagcacagaagctttcattccacaaactatagaacagatgagcaagagccacacttgtggcttgaaagagtcagaaactgggttcatgttttcagatcctccaggacagaaagttgttatgagaaatgtggccgacaaggagaaagatttattacatgtagataccaggaagagactgagcacaattgatgagctggatgaattattccctagcagggattccaatgtgtttattcagaattttcttgaaagcaaaaaggagtataatagcataggtgtcagtggctttgagatccgctatccagaaaaacaaccagacaaaaaaagtaagaagtcactgataggtggcaaccacagtaaaattgttgtggaacaaaggaagagtgagtattttgaactgaaggcgaaactgcagagttcccctgactacctacaggtccttgaggagcaaacagctttgaacaagatctaggtcatgtaatcttacttcatacagaggacatttatttaatgatgaaagtgccttttgttgacttctaacttccaaatactatattatcaataggcatggaggcaggtgtttccaagggtgtctcattaactgtagctgcaaagatgtgtcaagtagaagagaatttgtttaatagattttactacataaaacctatactgtggagtcctgtggggatactgcaaactctattgccaaagggatgctttatacacataatactgaatttaacctcaagaggcaaatctgttttgtaccccaatgcaaaaccttcgtctctttgtgctttgtaaagcaaactcaagaaaactggtacacctgtaccagctgggtcctttatcttgcacgtagattaagttggtggaactggaataatccttttgatttgtggcattgtaacaactccgtgtaaagattatctgaaaagtaaaaaaaaaaaaaaaaaaaaaaaaaa

SEQ ID NO: 224345 - DNA, 1000 bp, Homo Sapiens
gcctttgaaggagctctgcttacaagaaccaagtgacctacgggctgtactcttaatcaacagtaaatcttacgtttctccaccttcatctatggaagataaatcagatgttggttatggacaaagtatttcttcttcatcttccttaagaagatcaagtaaagaaaagaacaaaaaaaatagttatcattttagtgctggatttggatctcccatagaagacaaatcagagccagcttctggacgaaatactgttctcagcaaaagcgccaccaaagaaaaaggatggaggaaaagcaaaggaaaaaaagaagaggaaaaagtgaaagaggaggaagaggttatggtggtaccaaaatttgttggtgaaggaagctctgacaaagaatggtgtcctccctctgaccctgatttctctatgtatgtgtatgaggtgaccaaatcaatactgccaataaccaatattaaggaacagattgaggatctggcaaagtatgtagcagaaaaaatgggtggtaagattccaaaagagaaactacctgatttcagctgggaacttcacataagtgaactgaaatttcaacttaaatccaatgttataccgattggacatgtcaaaaaaggaatcttctaccatcgagctttgcttttcaaggctctggctgatagaattggcattggttgctccctagttcgcggagagtacggtagagcgtggaatgaagtcatgctgcagaatgactctcggaagggagtgattgggggcctccccgctcctgagatgtacgtgattgacctcatgttccatccaggtggactgatgaagttgagaagtcgagaggctgatctttacagattcatttaagccatcagacgaacacaagagaggctcaaacaagaaattcactgtgtacactctctaagacattctccaaattgattttatctctttaaataaaaactttaaataagaaaaaaaaaaaaaaaaaaaaaaaaaaaa

SEQ ID NO: 224346 - DNA, 1000 bp, Homo Sapiens; identical to SEQ ID NO: 118794

SEQ ID NO: 224347 - DNA, 1000 bp, Homo Sapiens
gaagcgccctggacgccccttgaatattacatctttagttaggttatcttcagctgtgccaaaccaaatttccatttcttgggcatcagaaattgggaagaattactctatgtctgtatatcttgtacggcagcttacatcagccatgttattacagagattaaaaatgaaaggtattagaaaccctgatcattccagagcactaattaaagaaaaacttactgcagatcctgatagtgaaattgctacaactagccttcgggtatccttgatgtgccctttaggaaaaatgaggctgacaatcccatgccgtgcagtgacttgtacacatctgcagtgttttgatgctgccctctatctacaaatgaatgagaaaaagcccacctggatttgtcctgtgtgtgacaaaaaagctgcctatgaaagtctaatattagatgggctttttatggaaattctcaatgactgttctgatgtagatgagatcaaattccaagaagatggttcttggtgtccaatgagaccgaagaaagaagctatgaaagtatccagccaaccgtgtacaaaaatagaaagttcaagcgtcctcagtaagccttgttcagtgactgtagccagtgaggcaagcaagaagaaagtagatgttattgatcttacaatagaaagctcttctgacgaagaggaagaccctcctgccaaaaggaaatgcatctttatgtcagaaacacaaagcagcccaaccaaaggggttctcatgtatcagccatcttctgtaagggtgcccagtgtgacttcggttgatcctgctgctattccgccttcattaacagactactcagtaccattccaccatacgccaatatcaagcatgtcatcagatttgccaggagaacaaagaagaaatgatattaataatgaactgaagcttggaacatcttctgatactgtgcaacagtgaatacaaaataaaacaaataatttgtaaaaaaaaaaaaaaaaa

SEQ ID NO: 224348 - DNA, 1000 bp, Homo Sapiens
tgctccattcttggcactggctggcttctcagaccagccattgagagccctgtgggagggggacaagaatgtatagggagaaatcttgggcctgagtcaatggataggtcctaggaggtggctggggttgagaatagaagggcctggacagattatgattgctcaggcataccaggttatagctccaagttccacaggtctgctaccacaggccatcaaaatataagtttccaggctttgcagaagaccttgtctccttagaaatgccccagaaattttccacaccctcctcggtatccatggagagcctggggccagatatctggctcatctctggcattgcttcctctccttccttcctgcatgtgttggtggtggttgtggtgggggaatgtggatgggggatgtcctggctgatgcctgccaaaatttcatcccaccctccttgcttatcgtccctgttttgagggctatgacttgagtttttgtttcccatgttctctatagacttgggaccttcctgaacttggggcctatcactccccacagtggatgccttagaagggagagggaaggagggaggcaggcatagcatctgaacccagtgtgggggcattcactagaatcttcaatcaacctgggctctccccaccccaccccagataacctcctcagttccctagggtctcttcttgcttgactcaatctacccagagatgccccttagcacacctagagggcagggaccataggacccaggttccaaccccattgtcagcaccccagccatgcggccaccccttagcacacctgctcgtcccatttagcttaccctcccagttggccagaatctgaggggagagcccccagagagcccccttccccatcagaagactgttgactgctttgcattttgggctcttctatatattttgtaaagtaagaaatataccagatctaataaaacacaatggctatgcaaaaaaaaaaaaaaaaaaaa

SEQ ID NO: 224349 - DNA, 1000 bp, Homo Sapiens
tgggagaacaacccatccgcgggggcttttcgcaagacgggggtgcacgatgcagactttgagtctaacgtgacggccaccttggcctccatcaataaaatccggatcttcaaggggagatgacgcagtgaagggctgaggatggacgcactgtcacacctctgcatttccagccccagcatcttgctggagccgttccatcccggagcttggaggggcagcctcaggtgtgtgcctgggcaccgctcacagcctcttgcacccagccgttggcagcatctactcagcaaggtcactaagctctgccagcgtggcagagcatgtcttggaacctgtcttgagtggggacaacgtccccccactgctgccctagagctggggagacgctgggaaaggttcaacctccacacactaaaatcattttggctcctggggcaagcttggggaatgaatgtggaagatgcctatattctgagagacaggacagtttcccaggaagatgggcagagacttgagtggcgattacctccagcacagagacgtgccaggcggtgttggcgctcggggcgagatgctgcccttctttgcacgaagcctggcctcttgcttggcgtgataaccctgtcatcttcccaaagctcatttatgagccaccagaggctcctaccccaaagattttcacagaaacttgaggccaggtgccgtggctcacacctgtaatctgaacactttgggaggccgaggcgggaggatcacttgagcccaggagttcaagaccagcctgggcaacatagtgagactcctgtctctacaaaaataaaagatttaaaaaaattagccaggcacggtggcacacacttgtagccccagctactagggaggctgaggagggaggatctcttgtgcctaggagttcgaggctgcagtgggctgtgatcacaccactgcactccagcctgggcaacagagtgagaccctgtctctgaaaaaaaaaaaaaaa

SEQ ID NO: 224350 - DNA, 1000 bp, Homo Sapiens; identical to SEQ ID NO: 118797

SEQ ID NO: 224351 - DNA, 1000 bp, Homo Sapiens
cccaagtggtgctccaaaggaataaagcaaaggattcacacagtgacagtagacaacggaaatatttatgtgactctttctaatgaaccttttaagtgtgactctgatttttatgccactggagacttcaaagtaattaagagttcttcctgataaaaaatatatagaaatgaaaaatgttgtgtatgcttgaaaacatttttagaataactctgcttcagttttaaaggtgatgaaatttttcaacataggcacaactgtttaaaattcacatacatttgagaggtttaagagcacacatacttagtatgatgtaaggattatcatcaggatcaatagaatacattttatcgaatcttctggattaattagaaacctgaaggttataggtttgggatgttctgtttaagaaggataaaaataaatttggagtaaacaaataataggtaaaaattaaggattagtaagaaaaaattttttaatttaaaaaatttaatttttaaaataggaaaaaatccctgtttgatgtagcagacttaattctggaaaagttttagtatatacaaagtaaacagactatataatgaacttccatcactcagctttaacagttatcagcattcttccattcttgttttatttatacctctgtggatttgctacctctcctatttgattgttatttttacatttttaggaaagtttaaatacattgaaatgttcacctctgaactgtgcaaccttcctaaataacagactttttatacttaaaaaatgcatccaaaaatgagataggtttacctgctgaacttgaaaataagaaacttaaccactgttaagtgatctgtgatcaaggcagatcttgaagtaaggaagccagacacagctgctgcccagccatgagagatgtaaagtctcctattcagtgagccaatgttctttgaatgcctatatgaaattttcaaataaagatttttaaaaacgaaaaaaaaaaaaaaaa

SEQ ID NO: 224352 - DNA, 1000 bp, Homo Sapiens; identical to SEQ ID NO: 118799

SEQ ID NO: 224353 - DNA, 1000 bp, Homo Sapiens
tcatggaatgcgctacctgtggccttttaacattcaagagtatgcccacccagccccaaagccaccggcatgtgaagctgccggaaagtggacaggccagaccagggagatgtgtacctgaggggcacccttgggcctgggctttcccaggaaggagatgaaggtagaagcacctggctcgggcaaggctagaaagatgctacgttgggccttcagtcacctgatcagcagagagactctcagctgtggtactgccctgtaagaacctgcccccgcaaaactctggagtccctgggacacaccctatccaagaagacccaggggtggaacagcggctgctgttgctcctggcctcatcagcctccaaactcaaccacaaccagctgcctctgcagttggacaagacttggcccccggacaagactcgcccagcacttgcggctgggcccggggagcagtgagtggaaatcccccacgagggtctagctctaccacattcaggaggcctcaggaggccagcctgccatgagagcacatgtcctctggccaggagtagtggctgagctctgtgatcgctgtgatgtggacccagctccagggagcagagtgtcggggatggaggggcccagcctggactgactgtacttcctgtctctgtttccattatcacccagagagggacaagataggacatggcctggaccagggaggcaggcctcccactcagagtctgggtctcactggccccaagtctcccacccagaactctggccaaaaatggctctctaggtgggctgtgcaggcaaagcaaagctcagggctggttcccagctggcctgagcagggggcctgccaccagacccacccacgctctgacgagaggcttttccacctccagcaagtgttcccagcaaccagctccatcctggctgcttgccttccatttccgtgtagatggagatcactgtgtgtaataaaccacaagtgcgtgtcaaaaaaa

SEQ ID NO: 224354 - DNA, 1000 bp, Homo Sapiens
agtttatttaggaaattagtgtttgacagctttttttaaattatttcactgaagctgagattattagtgatacaaagttaaaatttcaatatttaatttctctatatattattaatattaaattgttttttacttataaattcatgttctcatctgatttaatattaaatttgtataggtgggcgtttcttaccattttgcacaagtttttgtttttctgaaatacttaattgtgcaggttgtaaaaaagattagtgcattttcattttaaggatgctttgctccttaaattgttcgacagaaatgactttttagggaaagtagtttttttggagctactaacttgtatttattattgtacatgcataaccagggtggtgagggcactaatcttgtaggaaacacttacttgatgttttatttgaacttttcctataggtttaacttttactgcatagaattaacactaggaacagtgtcatgaaatctgggttgaaggagaatacagtatatatgagaacacttaaagttcaaatagaaatcatttctgaagacaaaagcagaggaatattgtcagtgccaagtaatggaagaataagggcggcatttacactgtgcaagtattgagaagagtgcataaagacagggaactactctcatggagacagtttctctcttataatcaagtaactagaaggggaaaaatcatctaagttatgaaatccaacataggcgctatattacaaactgtgccggattatgcaaattgtagttgttactgatcaaagtttaattgcttcatttttgtttaaaaagggatactgatgtcagaaaatctgtaatatgttttattcaaaagatgtaaataatgtatacagacttgtatgtgatgggatgggaaatatttaaattctaggtgtttttttttttttaaagaagaaactcaatgtttataagaaaaaaatgaataaatagttacgtttggccatgaatcctgaaa

SEQ ID NO: 224355 - DNA, 1000 bp, Homo Sapiens
gagttcaagaccagtctggccgacatggtgaaactcagtctctattgaaaatacaaaaattagctcagtgtggtggcacacacttgtaatcccagctactcaggaggctgaggcatgagaatcgcttaaacccaggaggcggaggttgcagtgagctgagatcacaccattgcactctagtctgggtgacagagcgagactctgtctcaaaaaaaaaaaaataaagccgggcgtggtggctcacgcctgtaatcccggcactttgggaggctgaggcaggcggattgcctgagatcgggagttcgagaccagcctggccaacatggtgaaaccttgtctctactaaaactacaaaaaaaattggccaggcgtggtggcgggcgcctgtaatcccagctactcgggaggctgaggcagcagaatcgtttgaacccgggaggcggaggttgcagtgagtggagatcgtgcctgtgtgctccagcctgagcaacaagagcgaaactgtctcaaaaaaaagaagaaaataaataaataaaaatcagagcacaagaagtaccagtccaccaactcacattttctatattaataattcttaactaaaagaagttccatattcgacagcattttagttttttaatagtacttattagcatcaaccatcttgataatcaccaagggaaaaattaaaaatacctagactgcaataaacctttaaattggattttcagtgagaatttagaagcaatcactacctttctcgtttcatttgtgtaaccatgcagcataggcactgtgttacatcatctttacgctttggtatttgaacttattacagaattttttctctaaattggatgtttctttatatgaccttggaaactgaagtgatcttagcattaaacaaaaatgctttttgaaaaaaaaaaaaaaaaaaaaaaaaaaaaaaaaaaaaaaaaaaaaaaaaaaaaaaaaaaaaaaaaaaaaaaaaaaaaaaaaaaaa

SEQ ID NO: 224356 - DNA, 1000 bp, Homo Sapiens
gacgccgagaacatcaccaccgtttccgtcatcaaagatcatcacacaaggtccatcacgtcatgctgctttgaccccgacagccagagggtggcttctgtctcattggacaggtgcatcaagatctgggatgttacatcccaggccacgctgctcaccatcactaaggcacattccaatgcaatctcaaactgctgttttaccttcagtggccatttcctgtgtacaagctcctgggataaaaacttaaaaatatggaacgtccacacaggggagtttcgaaaccgtggagcctgtgtgactctgatgcagggccatgaaggttctgtcagttcctgtcactttgccagagacagctcttttctcatttctggagggtttgataggactgtggctatttgggatgtagcagaaggctaccggaagctctctttgaagggccataatgactgggtgatggatgttgccattagcaacaacaagaaatggatcctgtctgcttccaaggataggaccatgagactgtggaatattgaagaaattgatgaaattcctttggtaatcaagtacaaaaaggccgtgggcttaaagttgaaacagtgcgaaagatgtgacaggcctttctccatcttcaagagtgacacctcttctgaaatgttcacccaatgcgtgttctgccggatagatacaaggggcttgccagcagatacttcatcgtcatcatcatcatcggaaagggagaactcaccgccgccaaggggaagcaaggatgactgacagccacaggcccctttgagtgactccagcacaggctacctagcatgtaggtttcggggctttgcaggggctttctcttgggcccctcccaggctcagcaggcctgtcagactggggcaggacccaagccctggctggactcagcacagtgccacctcctcagctctcagcttggggagtgaacactttccgttttcatgcagaataaatctaattcctttgg

SEQ ID NO: 224357 - DNA, 1000 bp, Homo Sapiens
ccatggccgagttgcgcgtggttgtggcactaacactgctacgtttccgcctgagcgtggaccgaacgcgcaaggtgcggcggaagccggagctcatactgcgcacggagaacgggctctggctcaaggtggagccgctgcctccgcgggcctgagcgtgggcgcgcccctgcggctcccgagggtccaggccccgcccccaaaggaccaggactcgccccaaagatcccgagggcataggccacccccctcgaagttcaggttcagctcctggatgaccaggcaccgctgttgagcagcctggtggtactggccacgcccctcaaggcaaggctccgccccttagggggcctgatcccgccccttgaggcttaggtcccgccccctgacttctcgcacctgtcctgtttgagggaacagggtcgaccctgcccccttgggctcaggccccgcccccaggatcctacggattgaggtcctcaggccacgcccctgcagatccaggtctccaggccttgcccactgagccttcagaggacctaagacccacctatgactcagggcccaccacaccccacccccccccaactggctgaacccctggaaggcttccaaactgaggaaagctggagcctgacgtcagagcttttaactcggacatcaccctcctgaggccctcagctcatacgggcagactgctcaggcgtgaggctggatcgtagggttcgaggctgcttgcttttgttgttgttttgtaaactcagacccttgtaagccccttccttcctcccttgcccaaagatcctttgctgagtgttctgtttttgcagaataaaagcaaaggatgcagacttaccccaccctccacccctagctcagccagatccttacacgtggagcccccagcatgggaatgaggggctctgcaactgagcgaagctgcgggctaggaggctgaaaagccatttatcctaggacataaactcagattttgggggtc

SEQ ID NO: 224358 - DNA, 1000 bp, Homo Sapiens; identical to SEQ ID NO: 118803

SEQ ID NO: 224359 - DNA, 1000 bp, Homo Sapiens
tcctcatccggcgccctctccccttccaggagtgcacagtctgcgggtggaccggggaaagaagacgtacttcatcgtcatgcagagcgtcttctaccccgccggccgcatctccgagaggtatgacatcaaaggctgcgaggtgagccgctgggtggatcccgcccctgagggcagcccccttgttctggtgctgaaggacctcaactttcagggcaagaccatcaacctggggccccagcggagctggttcctccgccagatggaactggataccaccttcctccgggagctcaacgtgctggattacagcctcctgatagccttccaacgtctccacgaggatgagaggggcccgggcagcagcctcatcttccgcacggccaggtctgtgcaaggggcacagagcccggaagagtcgagagcccaaaaccgccggctgctgcccgacgcccccaacgccctacacatcctggacgggcccgagcagcgctatttcctgggcgtcgtggatctcgccacagtctacgggctccgcaagcggctggagcacctgtggaagacactgcgctacccaggccggaccttctccactgtcagcccggctcgctacgcccgtcgcctctgccagtgggtggaggcgcacacggagtgacgggcgcccggccccactctccggatctggacgatgggctcacgccaggaacgccggttcccccgggcccgggcatctcgcctgcgcttcctcctgatggtcgccagagggcagcatcccctaactaataccgtaaccgcgcagtcccgtttgacggtggtgccgtgcccagcatcgtgccaaggactcccctactttagctcatttaatcctcaaaaaatgctattattctctttttacagaccatgaaatggaggctcagggggtgaagggactgatcaagatcattcagcaataaatgctggaaccaggactcaaaaaaaaaaaaaaaaaaaaaaaaaaaaa

SEQ ID NO: 224360 - DNA, 1000 bp, Homo Sapiens
tgatgcaacttggtggcaagcgaaacacgaagctgatgccaaccccagggcaggcttgatcccctcaaagcatttccaggaaaggagattggctttgagacgaccagaaatattggttcagcccctgaaagtttccaacaggaaatcatctggttttagaagaagttttcgtcttagtagaaaagataagaaaacaaataaatccatgtatgaatgcaagaagagtgatcagtacgacacagctgacgtacccacatacgaagaagtgacaccgtatcggcgacaaactaatgaaaaatacagactcgttgtcttggttggtcccgtgggagtagggctgaatgaactgaaacgaaagctgctgatcagtgacacacagcactatggcgtgacagtgccccataccaccagagcaagaagaagccaggagagtgatggtgttgaatacattttcatttccaagcatttgtttgagacagatgtacaaaataacaagtttattgaatatggagaatataaaaacaactactacggcacaagtatagactcagttcggtctgtccttgctaaaaacaaagtttgtttgttggatgttcagcctcatacagtgaagcatttaaggacactagaatttaagccctatgtgatatttataaagcctccatcaatagagcgtttgagagaaacaagaaaaaatgcaaagattatttcaagcagagatgaccaaggtgctgcaaaacccttcacagaagaagattttcaagaaatgattaaatctgcacagataatggaaagtcaatatggtcatctttttgacaaaattataataaatgatgacctcactgtggcatttaatgagctcaaaacaacttttgacaaattagagacagagacccattgggtgccagtgagctggttacattcataactaaaaaaaaaaaaaaaaaaaaaaaaaaaaaaaaaaaaaaaaaaaaaaaaaaaaaaagaaaaaaaaaaaaaa

SEQ ID NO: 224361 - DNA, 1000 bp, Homo Sapiens
ggctgctccagtgggggtcctgtggccctggctggcagaggtgcatgtggctggtgatcgagtctgcactgggatcctcctggccccaggctgggtcctggcagccactcactgtgtcctcaggccaggctctacaacagtgccttacattgaagtgtatctgggccgggcaggggccagctccctcccacagggccaccaggtatcccgcttggtcatcagcatccggctgccccagcacctgggactcaggccccccctggccctcctggagctgagctcccgggtggagccctccccatcagccctgcccatctgtctccacccggcgggtatccccccgggggccagctgctgggtgttgggctggaaagaaccccaggaccgagtccctgtggctgctgctgtctccatcttgacacaacgaatctgtgactgcctctatcagggcatcctgccccctggaaccctctgtgtcctgtatgcagaggggcaggagaacaggtgtgagatgacctcagcaccgcccctcctgtgccagatgacggaagggtcctggatcctcgtgggcatggctgttcaagggagccgggagctgtttgctgccattggtcctgaagaggcctggatctcccagacagtgggagaggccaacttcctgccccccagtggctccccacactggcccactggaggcagcaatctctgccccccagaactggccaaggcctcgggatccccgcatgcagtctacttcctgctcctgctgactctcctgatccagagctgaggggctagggtcccagcaccacttcccccttctccaccctctacttcccgcccagtggggctggaatgtggcccagccggctggaacctcaagggccccacccaccgagattgcagcggctctggctaattgggcctcagtgcccgggctattttgaacccaggaatccttgggggtggtgggaggagcggacaataaaggtgtaaacac

SEQ ID NO: 224362 - DNA, 1000 bp, Homo Sapiens
atggctgacgttcttgacaagccagccatcagggcaagtgttttgaatcttagcaagtgttttgaatcttagcaactgaacatgacattgcacactgtgattatttttcagctatggtaggtcatattttgttttataccagagctgtactcttaattttaaggaatttcaatgaaccaaaagataactgtcaatttatttggatggatggatggagggatggaaggagggagggaaggatgtctgggatgtgaagaggcaaggcagaaatggatgatgaacatcaaaaactgtcagaggacaggtctgtgccaggtaccaggaaggacaagataagtccaagccccggctggcctgctctcacgtgtctgtgtaagatcatgcaagagaaatcacagtgccttctacagaattttcgtctttacctatgtgaagcgaggtgacgtgatacgtcactggcgccgtcttataatttagatgtaaaaatctttagaaacaaataaaactctctatatatgtgtatgtctgtgtacaaaaaaatgacagagctgatggccagtgtatacagagcgtggcccgcggtgtacaatacccatataaggtacattgtgcaggaggggaattgctggctgcttttacttcctgaccaagactgaaaaattatttactgaaatctgtaaacctttttatgaaacttttaagcaccaggctgtttacttacacaatttaggtctgccagaaaattctatctgtgatagatctgtaaagagggtcaggggttagagtttactatttttgaagtttacattgttacatatgaaatggaaacattattttgaaacgttgtcataacccaatggtgcattctgtaaccatggagtcttctgtttcctgggggaaaggggcattcatgacctgaactttttagcaaattattattctcagtttccattacctgtttggccaaacagattaataaaatatttgaaaaagaagcgtt

SEQ ID NO: 224363 - DNA, 1000 bp, Homo Sapiens
caatgggaatataatttaaatttttttaattttataaaaatttatttccattgcattaaaagaaatgggtagcatgtgtctttcagagaaaggagctatttggttattcactttgtcaatcttaggtttttttaaatctttaaacaatttcttctttgtgatgataaaaataatataaatttactgtttctgatcatgactgagtctattacttgtcatggcttttgtacgcaactgtgttttaaaaataccggttttgcctctttggttacatgtggtgagcatggatgtcaagattatttttcaactagattattcaatttgttttatatttcttatacttaatacttatgactacagtccaaatcagtcttttagaaggtgctcttgctaactgtggaatatttgacgacatgaaagtcctttttctttgctttcagtggttggctttcactgaaagaaagtgtaaaaaaagtcagaatttatagctttcactatgtccaagactaggactgggttataaagattttcttttgtgaaggaaaataaaagaaaatttgccactactgcatttactttactattgtaaacttaagattcattccttagtctttggaattttgatgtctcaaaaccagatgagtggaagtgctgaatttgcaaaataaagctaagaatgcttaactctgcactttaagttctactctgaccaaattgaagatgagcagagcagccctgaacagcattttgtttatacagtcttgtttaagaatagaatttttttaactcttcattttttgtctctgtggaagctgtgtaactctttttaaaatgcaatttaaaacattttgttattctaacaattctctcaaaaaacagcatttccaatggtaatcggtattgttacgctgtacttatgtattccctgtacctgaacacttgttgctgcctcacaagaaaatagaacttttatgttaaaaataaagtctgttcttcttga

SEQ ID NO: 224364 - DNA, 1000 bp, Homo Sapiens; identical to SEQ ID NO: 118805

SEQ ID NO: 224365 - DNA, 1000 bp, Homo Sapiens
atatggtgcacagcagactgcatgtaacaaattgtactctcagaaaggtaatttattcactgatcagcaaaaatgtctatcagatgagtctgaaggcctcacatgtgaaagttcaaaagatgagactttctggagagaattaccatctgtccccagtttggatttatttcgtgcttctgattctaatgcaaatcaaaaagaattcaacagcctttatttctaccaaagagctggaaaaagtttaggacagaaaaggcaccatgaatcttcatttaactcaggagacaaggaatcattaacaggttttatgtgctcacaactaccacaattcaaaaaacgacgtctagcatatgaaaaagtccctggtagagttgatgggcagactcggctgaggtttttttgaaggaggagaagagcaatgttacatgccatattccactgtttttgatgctaatccactagcgcaattatttagatttgctcatacactaaagaaaacacaattgttcatatatgtctcagtatttctgtattaaatattcataatatgtattctgccctatggtttgcatctttgtaagttaaatattctaatttatcaattagcagaataattatcataagatccaaaatgtcttccagacacccctgcacacaggccatttaaatgagtctccatcacagtctgaccctttgagtcaggaagtgaagatcatcacagttaaccctcccacatcaagaaagttaaaacctaggacaaaattgaagttagaaaacttccaacttaaagtatcattttctgtaaacacaatttaagaacaaattactaagaggaaatatttgcaacccagataataggaaaaaaagtttacatttctcatatataaagaattcctacaaattgatagaaagaagacaacctgatagaagaatgggcaaaatatatgaacagatatttcctcagaaaaaaacaaaaattgtcattaaacatttgaaacac

SEQ ID NO: 224366 - DNA, 1000 bp, Homo Sapiens
gtttcaccacttcaaaaaatttcttctagtttcacaacacacatttttaataaatatagaaatgatcttattgatttcccattactcccacaagaagagaaagcatacattagaggaaaatcttatgaatatgaatgtagtgaagatggtgaagtttttagagtccctgcaagccttactaaccatcaagtaatccataccgcagagaaaccttacaaatgtactgaatgtggcaaggtcttcagtcgcaattcacaccttgtagaacattggagaattcatactggacagaagccttacaaatgtagtgaatgtgacaaggtgtttaatcgcaattcaaaccttgcacgacatcaaagaattcatactggagagaagcctcacaaatgtaacgaatgtggcaaagcttttagagagtgttcaggacttactacccatcttgtaatccatactggagagaaaccttacaaatgtaatgagtgtggcaagaacttcaggcacaaattttctctaaccaatcatcagagaagtcacacggcggaaaaaccttacaaatgtaatgaatgtggcaaggtctttagtctgctttcataccttgcacggcatcaaataattcatagtacagagaagccctacaaatgtaacgaatgtggaagagcatttcacaagcgtccgggccttatggcccatcttctaatccatactggagagaaaccttacaaatgtaatgaatgtgacaaagtctttgggcgcaaattatacctaaccaaccatcagagaattcatactggagagagaccttacaagtgtaatgcatgtggcaaggtcttcaatcaaaatccacacctttcacgacatcggaaaattcatgctggagagaattcactgcgtaccttacagatggaatgaatgtggcaaaatctttagttagaattcacacctagcacaacattggaggactcaggagaaaaaccttacaaatatcataaatgtggcaaag

SEQ ID NO: 224367 - DNA, 1000 bp, Homo Sapiens
agatgctccatagtaagccataagtattcctgctaaagttagcttgtaacttcagttcagagatggaaaacatcagtggtgaagaaataaaattgattcttcatgtggagaggacatagtttccaggctgcaatgctgaatcttgctgaatttaaagagaagttctgcatcttttatttcttaattatcttcagatttctctgtatttattatgtgtatccccagctatgtatgcagcacagcccatctcctttttctgtgttatggcttcagttttctcactgttgtcttaatgccatttcatttcacatggtactttgtaaattttgacgagaaagttggttgttttttttttttttttttttttgagacagagtctcactcttgttgcccaagctggagtgcagtggtgcaatgtgggctcactgcaacctctgccttccaggttcaagcaattatcctgcctcagcctcccaagtagctgggattacaggcacctgccaccacatctggctgaattttttttttttttttaattttttgtagagacgaagtttcaccatgttggccaggctggtttcaaactcctgacctcatatgatccacctgcctcagcctcccaaagtgcttggattacaggcataagccactgcacccagctgaaagttggtattttttaatgcactgaataattgtttttaactggagagtttggttatcaatataactttcggattagttaagataaaagcatacattgtccacaggtgagaagattaaatcagaatagttgttctttgttaaaaaaaaaattagattcttaaagtgtggcaaacataaaatttgcaagaaaatgtagaaattaaatttttaagagttaatggtaagtgaacaattttaaatttattttttattatgtaacatacttttattaaaatatatacttatataataaaagtataacaattaaaaaaaaaaaaaaaaaaaaaaaaaaaaaaaa

SEQ ID NO: 224368 - DNA, 1000 bp, Homo Sapiens; identical to SEQ ID NO: 118807

SEQ ID NO: 224369 - DNA, 1000 bp, Homo Sapiens
atatgtaagaatcatcagctgtagcgttaacactaaatacaccaaggacaaacatactacaggaatattatgtctgtaatcagtgtggaaaagcctttatttatatttaccactttgctcaacctaaatgaattcaaggtagagagaatccagatgtatttaatgtttatggcacaaacttcagactctaggctgaccatatacaacgtgagagaatgaaactatagatcaaaggaatgtggaggagtcttcatccacagctctgttaaataaatgggagaaatcacatcacgaaaattctgtgcctgtcgtcagtgtgaaaatgcccttgctgataatttatcctctaaacaaatgagtaaaatccacaggcaagcaaccatatgtctgtaattgctgtgcactctcattcagctaagcaccaattttggtgtgtgcaagaaaattcattataaggtaactgataaaaacaggaaatatgtgaaaatattttttattaggtggatgaggcctcttgaacaattccagacattcatagtggagaagttattcaatgaaaactcatgagaaatccttttcttaatacagcagcacttctataatagatcagaattcacatggtgtagaactctcaatgacatgaatggagggtagtcctcagtaaattactcattccttagtcaataccagtatttttccagtgagaaaactatcttgacaggatagtggaaaaaccttcaggcagcttttatgtcaaaaaagtgagacagggatgaaaactctaaaaagccattgatgagatgtatagctgggggacaaaacataaagccatcaagcacgtgcttgagaaaaaaattataattttgaataaagactttctacttaaaatatgtgggttgaaatgtacaattctgaaataacctgggaatattgaatgcagaattatgtaagaagtaataagattaaattagtactgtcaaaaataaaaaaaaaaaaaaaa

SEQ ID NO: 224370 - DNA, 1000 bp, Homo Sapiens
aatgatgaggagtatatgaaatacctggcatacaagcaacctgggggcatcaccaaccaatttcttctggatagtctgaagcatcgggagtggggagtgaatgatcctttgctgcctaactacctcaacggcttcgagtgtttcgtctgtgactacgaactggctcggctggatgccgagaaagcccacgcggcctctcccggggacagccccgtctttgagccccacattgcccagccctcacacatggactgcccagtgcccacacctggctttggcaatgtggaagagattcctgagaatgacagttggaaagagatgtggctgcaagattattggcaaggtctggaccagggggaagctctcactgccatgatccacaacaatgaaacagagcagacgaaattttgggattacctacatgaaatcttcatgaagaggcaacatctctaagtgcccttgcaagagcctttaacttggcggagctaaggagatcttattctaccatgggacataaggagcatccactgcacaaacccttaatgaacactgtcttttcatggattcaaggaattccagttttatctattaagattttatcttaatgatgagtagccaaggtctaacatagggcctctcctcaaggagagatggagggatacaattcttggttcagtgggaaacagaaccctaaaacatccatttgattcaaggtgctggtccaacagagtttttaaactactcacttctttatttcatcctttcgactgtacttgattaccagtgaagtaagatgggtcaggttacgacttacaacttttgttctattccccagactcctcattattcagtacatttcccaataatctctttttctcatctcttgctttataaattgttacgttggtggagaagcaaaacatttggtgagttgtattctggttttccggagttggatttttttatattatatactttcatgtcaaaaaaaaaaaaaaaa

SEQ ID NO: 224371 - DNA, 1000 bp, Homo Sapiens
cttcaaggccctgcgtcagcgctcccatgggggtatcgatgtgaaggtgaccagcatgtcactggccaggatcctgagcctgctggcggccagcggtcccacgtgggaccaggtgcccccgttccagtggagcacctcgcccttcagcggcctgctgcacatgggccagccagacctctggaagttcgcgcctgtcaaggtttcatgggactgaagttctgtccctgctctgctgctttcgcccctgctgaccctcgtcagggtcacccccgtcccaaggccaccggacttctaactccagcccctcctgggggcttcgttctctgatctggggtctgagtcatctcctcctagagtgggtcacgaacctgatggggctcagaactgaccccctctctcccccgaggtgggtgggcaccgtggcgtctcttctgccctgccctaaatctcccactctctgtttctgtctgtttcctactgctgctctctcaacctcattcccacctctggggccccttcctcgtgcttctccttcctgagggtttgggaaggtcctggggcagactctggggctcccatggggtggaaggagcctgttccagcacccttctcccagctgcattcccacgggtggccctggagctggtgagctttgtctgggcgttgtcttcggctggcattgctcctcccagctctggcccctctgctccctcaggaagcagtcccctcgtctccctttctgggcagcttccttgaggacagaaacttgaaaacaaacacaaaccaaagtttctggccatctgtggctggagggttctgaatgtcctctctccatgtcaggcagagggtcagcccccatgcttctgcctcaggccccaccccaccccaccccaggcctgcccctcacctcagggccatacccacagcgccctgatggaggaaccagaccgcaggctgtgccaccattaaacaagagcggctgtgaaaaaaaaaaaaaaaa

SEQ ID NO: 224372 - DNA, 1000 bp, Homo Sapiens
agtgacttggagatctcctccttggaagatcttcctctggacctggaccagagagagaaacccaagcccttgtctcgctcaaagctcccagagaagtttggcactggtccacagagctctggccaacccagggtccctgcctggtgattcaccccagaagctagctggctagagggttagcctggctggggccagctcaggtccacttcaacagaagaggctgctgggcctcttgtcttcacaaacaaccaagagatcatcctcttggagagaagcagtgcagggaatggatatgatctcatccctcctgacctgtgaggggccctgctgtagatggccacaggtgcctgactaggagcccctaggtccccaggcttgagaaagggttaaaatagaacctccaggtagttttcttcctctacctccacatccccccaagactgaaaagagtcactaactctcttttcccaagccttttataaaactgcaggaacactgtggagatggttcctatctggggtccttttggggacatatgcctcagtcagtcattcagtgattgatccaaaattatttactgagtgcctacctactctgcgccaggctctctagcctctcactactgagttagggtgcaggcagaggctggggcagaatgtttacagccagtgccagcacaaggtagtaatctagtgacagagaacagggtgttatggggagcatatgagaggccatctatcccagcctgggtgatcctggagagtttcccagggttgtgatatgtggcaggcctactcatgggtgggaagggaggatggccacttggctggaccttgtatccccaaaggaccacacgtgtaatttttgatattatttccaaaatcaggttttatacatagccattgtatatttttagtgtgaaaaacattaatatattatatgcaaacatttaaatatagtacaatgtttttaaaaaaaaaaaaaaaaaaaaaaaaaaaaa

SEQ ID NO: 224373 - DNA, 1000 bp, Homo Sapiens
ttacttaaactggaacaagaataagataaacatttctctagactataacctattattctgatttttatctcttattgttatttgggaactatttttccccttataatgtccctttagccttggtagtataacaaatctacgaatgtaatatttaacttattctcatccctgccactaacttaatccttgaagtgttacataatctactcctaggtatatacccagaggaattgaaaacatttccacataaaaactgtacacaatgtcaatagaagcattattcttaacagccaaaaagtataaacacccaaagtctatcaactatcaactgggtgaatggataagcaaaacgtggtatatctgtgcaatggaatattatttggtcataaaaaggaataaagtactgatacatgctacaagatagatgaaccttgaaggcaagtaaaagaagccagacacaaaaggccacatactgtatgaactcatttatatgaaatttccaaaacaggcaaatccataaagacagaaagcaaatttgtggttgccagggacttggggaggaagaatggggagtgactgctaatgagtataggatttccttttgagtgataaaaatgttctaagattagatggcagtgatggttgcacaactctgtaaatatattacaaacaatgcattgtacactttcaaagggtagatttcattgcacgtgaactatatatttcaataaatctgtcacaaaaaagtaatgcaaagggtaataccagtcttttagaaggaaaaaaatatttaatatcaaaggatattcttcgtagtaatgtaatagttcatggtagctgcttttaacgatacagttttaatgcaactttcataatcatcctgaagacacttttgagtataactattgtataaataaatgtatagcttaattgaaaaaaaaaaaaaaaaaaaaaaaaaaaaaaaaaaaaaaaaaaaaaaaaaaaaaaaaaaaaaaaaaaa

SEQ ID NO: 224374 - DNA, 1000 bp, Homo Sapiens
agagggcagactttgtggttgggtcccttgggggccacattgtggccattgggggccttggaaaccagccatgtcctttgggctctgtggagagctttagccttgcacggcggcgctgggaggcattgcctgccatgcccactgcccgctgctcctgctctagtctgcaggctgggccccggctgtttgttattgggggtgtggcccagggccccagtcaagccgtggaggcactgtgtctgcgtgatggggtctgaaggcttggtgggagctgtccactggagcagctcattgccagaggcagctatttctatggctccttttgctgctgaggacactcactgtggctctgtgggatgagagaggcatgggggtgagcacttgaaacactgccttggggccttgggttaggggagcctttgtctttagtgcaggacacacatatgcttacacctacctttatcaccattcgttcatgaatcatgcctagctccatccttgccctgggacctactaggccttccatccaactgggaaatggggagaagcaaagctggcctcatgctcttcagggtcagttcctatctggagttgaccaggcctaccccagttgccattcctgaaaaatctcagctgccaggctgcctttagggtccctgtagacccaggagagttgagagggtgggggacacagagagaatagagaggatgtgggaactgccagagggccggagcgcaggagttcaagtggaggaatgctggctttgagccctctacactgctggttgtatgaccttggacaagtcacttcacctctctgtgcctcagcatcctcatctataaatggggatctctgaaaccttcctaccctacctacctcacagggctgttgtgaggacccagggagtttggatgtggaagtaaaagtgctgctaaaacctaaaaaaaaaaaaaaaaaaaaaaaaaaaaaaaaaaaaaaaaaaaaaaaaaaaaaaaaaaa

SEQ ID NO: 224375 - DNA, 1000 bp, Homo Sapiens
ggagcagggacagaggccgagtctctaaaaggaaatgctgaagctcagcctttaggaccagaagccaagggtcagcctttgcaggcagcagtagagaaggactctctcagagcagtggaggtcactgagaatccacaaactgctgcagagatgaagcctctaggaacaactgagaacgttctgactctgcaaatagctggagagctacaacctcagggcacagtgggaaaggatgagcaggccccgcttctagaaacaatttccaaagagaatgaatctccagaaatattggaaggaagtcagtttgtggaaacagctgaagagcagcaacttcaggcaacattgggaaaagaggagcagccccagcttctagaaagaattcccaaagagaatgtaacaccagaagtattggacagaagtcagcttgtggaaaagcctgttatgaatgatccattccataaaactcctgaaggtccaggaaacatggagcagattcaacctgaaggaatagttggaagcatggagcatccagcacgaaatgtagaggcaggagcatatgtggaaatgatcaggagcatccatactaatgaagaggaccaacgcattgaaggtgagacaggggaaaaggtggaaacagacatggagaatgagaaagtgagtgaaggggctgaaaccaaagaagaagaaacaggagaagtggtggacctttcagcagccacatagatagaagagtgaaccgacacagtgtgttatcatagaggagacaaaaatggtagtgaagcttgtggttatgtatcttatctttctacatttacatgttttctgtaaggagtgtggttatagagagactgttggaaccatgagaaggatgtttctgtgttcttgattatattgttctgcaaaactgctaagccatgaacagttttcttagctacttagaatggttatacatttaaaagtataaaaaccaaagccaataaaaatgatgtgattatttaag

SEQ ID NO: 224376 - DNA, 1000 bp, Homo Sapiens
caggctcagcctgggcacgccccagaggagagagatggagtggggcctcaaagggcaggtttaggcagaaaagaaaaagggcattccagctggggcatgtgcaaaggcagcacgtaatgtgtaagttctagatcgtcagggaggaagggtcagttgggtgcctgtttttctgtttttagtcctttaaaatgagtagaagcaacctgttaccctggaaagagcactggacatagacctagtgctgcgtgatgttgagcacgtttcttcttccctttgagtcccagtttcccttttggttacagggggatagtagcccccagggatcatgtgaaagtgagaaagcccttttcacactgtggagcggtgcagatgtgggaaacctcaaagatggttgcccattttaaatcctttcatctctcatctctctttcttctctcccttctgccctgacgtagccatggttgggtgggtgaggccagaagaaactgcctccggcaagaggtagcagccgctcaggtggctctgctggcatcggagcccacagaagtgaggagtggccgatggacctgccctccaaatgtgcctgactctgggtcttgctgtcactggatttcctggcatggcagacagaaagaaagatagtttgaccaagtcgtagaagctgatccagcgggtaaaaagggggcagggaactcgtcccttttattcttgcctcagagctgcctgaagacatgggccaggccggaggctggacaactttggataacgctgacctgtacttccaagtaaatgcctcctgaagagcccgggacccttcctgggagaattctgcagccagaatgaaggtgccatcagcaggaggcactgtgaagcaccatcctgtcgctgtccttgtccattcctagcaagttaatcgtgtcttgttaaccagcagttcctgttcaacgtgtaaagagacctgatgttttccctaataaagctgataacagattttgcagga

SEQ ID NO: 224377 - DNA, 1000 bp, Homo Sapiens
aactatgctttagaatatcataatcgtatatatatttgtgagaacaaagaaaaactccagaaatttttgaggtcgccactgaaatactgggaacagaagcttccacacaagcttcccccattaagggaaccgatacttcttactagtcttcctttgcctggatatctggaacagggtattgcaacttctctaattaaagcaatgaatgcagcgggatgcttaaagcccaagttcccctttttaagtataaggagatctgcactgctatatatagcacttcatctcaaagcatttaatcccaaaggttccgaatacacaagaaaaaagtataagaagaagatggagcagtttatggagagttgtgaactcataacatacttgggtgccaagatgaccagaaaatacaaggaacctcagttcagagccattgactttgatcataagttaaagacctttctctctctcagaaatatagacccaattaatgggtagtttacttaggtgatagcagcctgaatctcaagagttatctgaaagtgatagagggaaactgagagaagtagattgaaaatctgggcctcttggaagtacttttgcctcctgagcaaggtaccatggctgccagacttcaggtgaactcaaaggtctgccagccaggaaggagcactcttatggaaacaagttttaatacaattttaaaatgtattgctctttgcctgaactttgatgctttaacaaaataaacattctatttataattccatatagaaaagttaagtgacttatttaataaatgtattattttcctttttaacattttcagtagaaaagtcagtctctgttaaaattactcattaaatgttagaaagctttaagacatttaacattgttataaatgaaaccaaaatatgggttatacattttacatacaaaactgtttgtgaactttgtgaacataagatactatcattttcccaataaaataaatggattttgcaac

SEQ ID NO: 224378 - DNA, 1000 bp, Homo Sapiens
ggagccaagggcaaactcgaaaacagccctgccctgtggttaggggaggtgggtgtggctttaggagttgagaggggaagagctgagtgcgggctggagcagcgagaatgcttcacggaggatgttggggagagaggatttgatttgccgagtggtttggagatctttaggggcgggtaggggaagagggtggctggacttaaggtaggagccgaaagtgggcatgggagcccatccccgtgggtgtgaggccggggtaggaccaggcttcccggctaggcacgcctggctggctgcctctgcctctactaacttcctttgtctctttatcctcctgcttaggccgtgtcttcctctctctctgccattttctctatcagaaaacattaaagctgagtagaaacttcaagatgatcattctggcccagcccttttatctctttatctccaatggtgtgcgttttaagtttctctgacttggtttttctgtccctgtctcccacagttgttcccgctctgcacctgtgtttcagttactctctctctctgtcttagatctttttgtttctgcctagtctctgtgccctgtctttgtgtgtttctttctctgcctgaaaccctccctcttttcccttcaggcatatgtctctaaaccaatgttatgtatcaaagactgttgaaagagacagggctactctaggaatggatgggtggggatattttccccatggatcaagatccagtttagggttgggaaataaaggatagggataaaagaggcaccccattcagtcagcagatacttattcagcacctactatgtgtttgatactgtatacaaaagacatgaatgggctgggtcctgaacagagaataaagggtttgactccaaaaaaaaaaaaaaaaaaaaaaaaaaaaaaaaaaaaaaaaaaaaaaaaaaaaaaaaaaaaaaaaaaaaaaaaaaaaaaaaaaaaaaaaaaaaaaaaaaaaaaaaaaaaaa

SEQ ID NO: 224379 - DNA, 1000 bp, Homo Sapiens
cctgcccacagagcagccccccagaacagaaagaggctgagccagagaagaggccaaagaaagtctcacagattcgcatccggaaaaccattcctaggccagatcctaatcttacccccatgggccttcctcgacccaaaaggttaaagaagaaggagtttagtttagaagagatatataccaacaagaattataaatctcctcctgcaaacagggacctggattctagctgcccgagcactgacagcgaaaccgggcacttcctggtattcggatatgcgcagcgccaagcgcagccgcacccactgctggcctcacgccgtctgattggctgcagctctccggaggggcggggccatccgagaagctatccatattggaggaggctgctagtcctttgctggtacctgccgggctggagagcggggagggtcacgtggttaagactcgccacgtgggccgggcgcggtgactcaagcctgtaatcccagcactttgggaggcagaggcgggcggatcacttgagacaggcctggccaacctggtgactctactaaaaatacaaaaaattagccgggagtggtggcgcgcgcctgtaatcccagctactcgggaagctgaggcagaagaatcgcttgaactcgggagactgtaggtgccgtgagccgaggtcgcgccactgcactccagcctgggagaaagactcgcctaagcagtttctctcttttcttttgcatttttaatcttagacttttggagatgttgaaatggtcgctgaaacactgcaaacacagggatgggggacagatcccaaagtatagcagctactcatgagtcccagcgcccctcctgtccttcccctactgctgcctaagtggtcttcctaaaacacaagtttgcacttgtcagaaccactccttaagatctctcatgggttgccctcgtctccaaataaagatactaaccactgagctggcaaaaaaaaaaaaaaaaaaaaaaa

SEQ ID NO: 224380 - DNA, 1000 bp, Homo Sapiens
tagtaaaagaggaaggaatgcctcttgcagttgagacaagaggaaggcatctgtctcctgcctgtccctgggcaatggaatgtctcggtataaaacccgattgtatgctccatctactgagatagggaaaaaccgccttagggctggaggtgggacctgcgggcagcaatactgctttgtaaagcattgagatgtttatgtgtatgcatatctaaaagcacagcacttaatcctttacattgtctatgatgcaaagacctttgttcacgtgtttgtctgctgaccctcttcccacaattgtcttgtgaccctgacacatccccctcttcgagaaacacccacagatgatcaataaatactaagggaactcagaggctggcgggatcctccatatgctgaacgctggttccccgggtccccttatttctttctctatactttgtctctgtgtctttttcttttccaaatctctcgtcccaccttacgagaaacacccacaggtgtgtaggggcaacccacccctacaaattagggaagaagtagggggaaaagatgaaaataaaccaagcctgcagcatactcagtattcatcatgaggtcagctgctctctgacctgcttcctcatggctggttggtgcctgttgtcccggagtgacaaagaccctagattatagctgcccttaactgctgtataaataacaacttgaacatgaaatgctaaattttccttttgaagtattccttcagatcctgcatgctgataaaactactgactcaactggtccccatgaggagctggctcaccaaagaatgcggtttccaatcccaattatttcatgccccttgcttaggcaatcaacaatcccaaatttccagccccttgccctccacaatctccttaaaaaattcagtccaaaactccttggggagatggatttgaaggtctcctcccatctccaaacttggtgccctgcaatcattaaactctttctctgctgc

SEQ ID NO: 224381 - DNA, 1000 bp, Homo Sapiens
agagtgaaactccatctcaaaaaaaaaaaaaaaagatatataaacatagaacatatccagactatttcctgcccttggaatctgaccttcagaaggattaatgccaaactaaactgacctgaaacagttttgttactattggcattccttgactaaaaaggaccacctgatgctcagtcccgagagtaggaatcgtggtttattatttttcatatccataccacctagttcagtacctgttatagagtgtttaattgctgatactaggaattaagggattttttaaaagtagcaaatagtttaaggaacaatcaaaaaatgaattttctaattcagttttttcaatgaagtcccatcactgaactttataatgtaatgtttattaagcagacatccccttaaatactcagtttctttggagagagcaaagcatatctctctgtggaaattatatataatgcctggtattttacactcaaagcaaggtgttggccaggaaggtaaagaaatggtgtctatgtagacttaatatcactagtctaagtgtcattttgagcctagtagcactaccttccaagtgagtcacaacaaatttgatcctatttggtatgtttttgtccactgttatgattcatcatgtatcttacaagagccactcaagcaagactctgcttctatgtatggtgaggccttgttgttctaggctagaataaactctttgtatgcctcattgaatatgccaggtaaaatatatgcagtcaagaatgaattatttttctgactaaagtgtgtagcagtagttcaaaattgtgcccttgttttaacagtttctgtcaacatcttctcatttttccctacaaaaacaccagggtgtattataagtactgcctgtgagaatttgcactttatgtatttgtgtgtggatttcttgtggttttagccaaatgaagtgttatcagtaataaacaggtctcttcataggaaaaaaaaaaaaaaaaaa

SEQ ID NO: 224382 - DNA, 1000 bp, Homo Sapiens
gaggagacctttgagtcgggcgggctcgacgtgcagggcacggcgggctctctggatgaggaggaggaagaggaggagcgattccacactgtgctggagcagctgggggtggccccggtcctgggcgagcagcgggctgtgaggacgctctgggccaggctgcagcgcgagcgccccgagctgctgggctctttcgaggatgttctgatacgcgcgtcggcctgcctggaggaggcggcccgggagcgcgacggcctggagcaggcgctgcggaggcgcgagagcgagcacgagagggaggtgcgcgctctgtacgaggagacggagcagcttcgggagcagagccggcgcccgccgagtcagaacttcgcccgcggggagcggagaagccgtctggagctggagctgcagatccgcgagcaggacctggaacgcgcgggcctgcggcagcgggagagacgtggtcgccgtctccaggaacatgcagaaagagaaagtcagcctgctacggcaactggagctgctcagggagctgaatacacggctgcgggatgacagggacgcctgcgaggccaggcgggcgggcagcagctgcaggaaggctctgacaacagcccgcctgcctgggcccacctgctgctgctgctgttgctgggctcggccccccagacgcggctctggccaccttcccagtgcccggtgaccagccccgagtgactcacggaccatgagctagaagctgcccttgcaggaggcttgtcatgggtcgggggtgcccactcaggatgcaggctctccccagggggccccaggctcgcctgactgaagacatgaaggacctagcctaggagtggtcagggtcccgggagtggccagggtcccgtgtgtgccctctgccagtcttcgctctgtccccgttcaatcaaccccatctcagttcagcagaaaaccccctcgtcaaataaaacccactgactgcaaaaaaaaaaaaaaaaaaaaa

SEQ ID NO: 224383 - DNA, 1000 bp, Homo Sapiens
ggtctccacgtccgtgccccgatcagtgccccctgcgccaccaccccctccacctcccacctcgctgtcccagccacccccgctgctgaggccacctttgcccacggctcccactctgctccgacagccacccccactgcagcagggccgcttcctccagccccggctggcccccaaccagcccccaccgcctctcatccgccccgctctggctgccccccgccacagcgcccgccctggccctcagcccccacccaccctgattggagcccctctggagcccccagcaccctcactctgagccctgacgtcctccaccaaccacgggctccaggacccctttgctggccatccccaggcatctctggtgtcactgaggacagaagggactagggctctggcggggtctttgtaagaccagagtttcggacagcccagccccgccctttgggttctgcatgtgttcctggcagctgggcctgtctcctggggccatggccgggctcaggggcctttgagctggcctgagggcactttcgcttcctggccggtactggaatggctgtgtcctagtctgctggggcttggcctctgggtcctgccctttgtgtgtccggggtagtgaccttagcgtggagtggggagagggcagttgggtgtgctggctgttctcattcctctttcccttcttttagcaataagtctggggtgaggtggggagggaggctgcagggggggaggtgggcagaggggccttacagcagcagaggctggaagagaagctctgtcttcaggggccagctgggaaatgctaaggagctgagggtgcccaccaagcccaccttccagaaacttggagaaatgggggttgggaacttatgcagacatggatttatttttcaacattttttaaaaattaaaaaaaataaaatctaaaaaaaaaaaaaaaaaaaaaaaaaaaaaaaaaaaaaaaaaaaaaaaaaaaaaaaaaaaaaaaaaa

SEQ ID NO: 224384 - DNA, 1000 bp, Homo Sapiens
gagggtgcctggcacacagaatcttgtgctgagcccggagcacaatgggagtgggctggcggggtgggttcacagctggactgggagcagcagacatacaggccgtaggcacagacatataaagacagtcatgcagattgcaggatgcctgagagcacagactctcacatgcacaaatacgtgcatgatcgccagtgtgcatccagacagccccacatgcatgcacacgcatgcacacatgtgatgtgtacatagatggacacatgtctatgcccacaaacactgcagagacacagaagtgtctggcaaggaacactattttgtcctcaattttctgccagtgagagtctactgactccatctctgaaatgtctctacttattgtccctcttctccacctgcaccacatccctagtccctgaaactcccaccgagacccctgggcaatagcaaagtctgcacaggattcctgctccgcctctaccccacccttaagcccatcctacatgcaagagcaggagttatctgggtatcaagcaaatctgaccacatcacctccccactgcttaaaaccctttcctacaggatgaagttgaaatcacttgacatcccatataaggcccttgattgtctggcatcagccatagtctggcctcaggccctggcatggagtcccctggactcagtgctctggctgagggcctccaggatgaagataccctgtgcaaagcctcacacttttgctgttgctgggctcactgtgtgaaattccctcctccctccttccaccttccctatgctgaactgccactcctccatcctccatggccagctaagccaacacctccccacttcctcctgacaacccaggcacagccactgacctgtcccatggctgtcacagccctttcttgggctctcaatggtatcattgtcacctgtgtgctcatgagcctctgccactcaactccaagcacatcaaataaagagctcaaaacat

SEQ ID NO: 224385 - DNA, 1000 bp, Homo Sapiens
atcaatggaagtgtataattaattggtcattttggttgaggcagttgcttttttactttctttcctgaaaggcagtagcaggaagctattggcttccccttgtctgtggtgagcagatgacacccttcttattgctatctttcctctgctcatggcatataaagctgctactttttatagaaggttggatacttaaactcttccctagtttatttttgaaaggattataaagcatagtaaaggaattatattaactgtgttttccttttaataatatggtactagtatcatcactgaaagtaagtgagcttaagtttcttaaaagaagcagttcattgagaatccttctctctctttgcagtgatacctggaattatagtttttatatcaatctctgacctcattaaggtcccatgttatatgtacttcatacatttttgaaatgaaatgtgcttaggaatataatcttttattggataatcaattaccaaatcaatggcaatggaaagtccagagttgttattgtataaatggatattaagttaatgaatgtaaggtatgtcgttatatatataaaaaatgttttcctaaaagaacttcttagtgaaatgggtactacatttgttacagaatttgctaaacaaatttaagtgagaaaaaaattaagcctttaagtttcagaaatactctctcagattgtttaaaaataatatattctaggctgggtgtggtggctcatgcctgtaatcccagcactctgggaggccgaggcaggcggatcacgaggtcaggagatcaagaccatcctggctaacacgttgaaaccctgtctccactaaaaatacaaaaaattagctgggcgtggtggcgggtgcctgtagtcccaactactcggggggctgaggcaggagaatggcgtgaacccaggaggcagagcttgcagtgagctgagatcatgccaccgcactccagcctgggcaacagagcaagactccatctc

SEQ ID NO: 224386 - DNA, 1000 bp, Homo Sapiens; identical to SEQ ID NO: 118816

SEQ ID NO: 224387 - DNA, 1000 bp, Homo Sapiens; identical to SEQ ID NO: 118817

SEQ ID NO: 224388 - DNA, 1000 bp, Homo Sapiens
cggtttctggtcagcgtttatcagtggttggaagaacagaacccctaggaaccctgctgtcagcacgcagagtgtaaagtctcagatcaaggattcggagaaaggtctctacaggtccctcctcgttagtatagtggttggttgggatgagtcgggttggacccgtgcggatccaggaaaacagcgatcgaggtaaaagtaatggctgccgtcgtctgcccagcgcgcaattgtgagtgaccttcaccgctagcgcgcgccacccaccccacatgaacctgtagggttatgcccagtctacagacgaggaaaccaagatccagggaagctgagtcaccggcagagctgggattacgtctaagatttgtccagggggcgagaactgcagcgacaccatgatgatttatcatctccagaaaacaaaaaaaaaggcctagacacataaaaatggcttctctgtagagtgagctcaacgagctcaatgtgattccagttaaggaattgggccttaagccaaatgcgcctaaacgcaacttgcctctctattatttatccagaggatgaatttaattcctacgtacatgcgcccacatctcgtcagctggtgcctcagagaaatgcgctgacaaatcttaaaggtggggcttcatgacaaaagtccgcccgttattgctgctcaacagacccatcaagtcacgctgttggacaggcctcgtggcgcaacggtagcgcgtctgactccagatcagaaggttgcgtgttcaaatcacgtcggggtcaaacaaaacattgttttccctaatcaaatagacctacggtgacatttttcaggataggaaaaaaaaaaagcctcctcagtagaaggataggaggggaatgagacaaatatgaacgttattcagaagttgggtgcagactttcaacattatgtgatatatccctgtggcaaaactgcgcatgtatccctaaggtctataaaagtaaaaataaatttaaaaat

SEQ ID NO: 224389 - DNA, 1000 bp, Homo Sapiens
caagggacaggaagctgatagaaagtgaacaggaagcaaacaggaagtgagcaaggggccacttcctacttcctcctttagcctagcagattccttctagctccccctgggggctgagcctatcagggcacaaagccagaatgtggtttgtagaatcccagccccagcatctccaagcataggatggattttgaagccaagagggaattagctctcggccgggttctgagtgatcccatccagctgctcctggacctggtattgagaggtttttcccttggagggcaaacaaagtggcagtggggaccagggtgtcccctgctgagaaatggagagctcttttcccctgtacttctctggggtttgccttgtggaaccaagtgcttgggggaggagctcctggcaggactccagctgttatttgtcagaggacagctaggattggttcacccttgctctgagttggccccaaagcgagctatgctgaactcttctccatctccaagcagacaacctttgtctttacatgcaagagggatccaattatgacaggctgacccagctggtttcatgtttggggtttatctactgagtaaggctgaccttacctgagtttctgtatgtgtatttgcaagacagttaatactaatccatcatccctcacagagatgtagaggatgagatgtagtaacttatagcagtgtcatttggaaaagttgaatttgccctacaaggcatgttctccattcaagggtcttgtgtaaacgtttgcagacacaggtgcagctttggagaactcacctctggctcttgtgcttttatgttgggacagctgcctaaattaggagctctagacctgttattggttcccaactgttggccagaatgaattcttcgaaaaatataggtggtttccagggaatttgaatgattgtattttgtgtccatggaacgtttatagacatggaggcaggcaataaattcctccaataattttttt

SEQ ID NO: 224390 - DNA, 1000 bp, Homo Sapiens
tcctgcttttagtcactggcatcttcttttaacttgggccatctggccgtgcatggttttgggagagtcctccttgactctgcagatgctgagcagtgatctggctgggaaaggggaccaggagtgcagggcacctgctgaggactcacctaagcccaagagtcagagagtcggagctccaaccacatctgcctgcatgcctttcccaggctctccccaggcggacagccagcaccccctccccaaagaccgggcagttcctgaccagcaccccaccaagtcctcagtaaggcctgtctttgggggagcagggtttcaggaggacagtgggggtggtgtagaactcatggctggcggttccgggcctctcaggaagctttgccactgggcttggggttaagtgggtgtggggctccgaaccctaaatgggtgagagttgaaatgaaagcggcacctgtagtccgtttggggtgcaggtgtgtgccaggggtcttcagccccggctgatggccacatgaaccacatgaggagaggcagggcgtgtcagcagcaaacctaagtgtgtgctcatttctgtgggcccttactctgtgacactgcagctctccagagagacgctttgaaaacaaaacaggaaagaacacacggccccgcgtctgttgcctgagtcactgtattccttaaaaggtgaaggaccctggtccttggcttttcgtgcacatgagaaaatgttggccaaggttagcgattatgcttctgtaatctgtaaccagaagtgctcttatgcccaaaccttgatgtgattctgctgtaatgtaacttcggagccagctggatggatgtgactgtgcaggtcctgagccccggcccccgtaaccaagcagtgggccgagacactgagccgggcagtcaaacaggagctctctaaggctgctcccgggctgggacctgggtctaggattctcagtaagacctttgaataaaactaacttgaattctt

SEQ ID NO: 224391 - DNA, 1000 bp, Homo Sapiens
cctaaagttggcttcccagatgccactggagaacaccacggttcagcagatggtttttatgcttctttcaaacctggccttgtcgcatgactgtaaaggagtaattcagaagagtaacttcttacagaacttcctctctctagcattgccaaaaggaggaaataaacatctaagtaatctgactattctttggttgaagttactcctgaatatatcatctggagaagatgggcaacaaatgattctgaggcttgatggctgtctagacttactaacagagatgagcaaatacaagcacaagagcagccctttattgcctcttcttatctttcataatgtttgcttcagtcctgcaaataaacccaagatcctggctaatgaaaaagtcattactgtgcttgctgcctgtctggaaagtgagaatcaaaatgctcagaggattggagcagctgccctttgggctctgatttacaattatcagaaggcaaaaacagctttgaaaagcccatcagtaaaaagaagagtggatgaagcatactccttagcaaagaaaactttcccaaactcagaagcaaaccctctaaatgcctattatttgaaatgtcttgaaaacctcgtgcagctccttaattcttcctgagtgccatgggatgctacaccttgaagctgacagtcatcaacaggggagctaaagttgaagccagctgtgtgtagcagctgttacctgaagacgtgctacctctctacaaagtgttgatccccttctttcccatgagagagagaactggtgatactccaacaccgtccagttgtggcagctctccagaagtaatagcagctgacaactttctgtgccttttcctttctgttgaaaaggcatagaaagttctgggaacataaacatttttacccttttctatgccatttattttgtaaaaatcctatttaacagttatttaataaaacaatatttttagaaactaaaaaaaaaaaaaaaaaa

SEQ ID NO: 224392 - DNA, 1000 bp, Homo Sapiens
acatcatgtagttcacactggaaaaaggccacgtatgtgccttgaatgtagccaaaatgatgaacaacacccagaaatctgtgatttagcactgagaactagtattatatggtttttaaaaaacaatggtgaagtacatgccacataaaatttgccatcttaactattgtaatgtcttgtttaatacttgaagtacattaacattgttgagcaaagaatatcctgaactctttatcttgtaaaatgaaactctataaccaccattaaaaaaacaactcattcccacattcttcagtccctggcgaccaccatatttttaagtcattatgactctgactattcttggtacttctcagaagaagaatcttagagtgtttttcattattttttttcacttaggataatatcctcaaagttcatccattttttagcatgtgtcagaaattttaaggctgagcaatatttcattgtttgcatttaccacatttcctttatttctgacatctattcatggacacttgggttacttctacctctggctattgtgaatattgctactacaagcataagggcacaaatatctctttgagaccctgctttcaattcttattgggtaccccaaaaagtggaactgctggatcacatggtacttctaactttaattctttgatgaactgagaaacttttccataaaacttgcaccgttttacattcctaacattccacaaaagttgtgatttgtcctcattctaatccatagaaggcaacatttctaacaggtttctaggtgattttgttgttgctgatgtagggactacattttgagaactgtcctatcccatttttataacaatgcagagcttctctgtaaataccccttgtttctatgttctatcctgtgagccttttcattttgttaatttttcccagtgtttacaaccaggaaatagcttgtcatctttgatacaaaacagaaatctttgcaaaaaaaaaaaaaaaa

SEQ ID NO: 224393 - DNA, 1000 bp, Homo Sapiens
agcatttctaggtagtgaagcagactgcaacagaatagttgggatatactttttttaaaaaggcatccacaatgattcagtcactatgtctgtgatggacaagcaggtacagaaattttcaggacctccataattatgaatctagtgtagcttaggtcattgtcagactaaatctaaaggttttgtggatttctgtagcctatctgggctgcataccaaaaagccatccctgaattagtaggaggaagaggatagggagaaaggaaatctcttagtccagtgatgtggcctttgcaaccagccagcattccaatttaatcaggtggaaatgatcttcctggctcataagtatttggtatcacacaggctaattgccccccttagggcgtgatgagagttaggagagtcaatgtaaaatcacataacctatttgtcaaaaataatgttaaatccagatagttctttcaaattaaatttttaaagctgtaataagactgggcatggtgactcatgcctgttatcccaacactttgggagtccagggtgggagtattgcttgaggtaagaagtttgagactagcctgggtcccatagtaagaccctgtctcttaaaaaataaatactatctttctctctggcctctccatcctccagacaatcactgaattacaatatttgcttaacagtagattaatgtcaattttctggaattttatatgactgatataacatgtttcctcttttcatacctgagtactctcctgagccctatttatttagatgttcttcttttttctttattattatttttatttcacatagcagggatgcatattttgacattcatcaatcatgatatatgagtagttcattctttttatcttagaatatgacatgctatggaaatcactgtatacgaattcatctgcttatggatatgttattgcttcttatttttgtctgttaggaataaaactgcttgttaagcacatttgaatgc

SEQ ID NO: 224394 - DNA, 1000 bp, Homo Sapiens
aaaacaaactaaagacatgtgacttattcaatgaaagtgaaaaagaagctctaaaacagtgtcattgattaaaaagaatatctggaatgtagccccactctttgagtgggattcatttcttactgcttatgaactttcaatttagtagtcagaaaccatggatttattttactgcacaatgtgaagtttacattttattaacacttgagtagtctgatttagagactagttacttctattttttaaaataatggagtaacaaattacagaatagctaaataattttttaaaaatattttacagttgtaaaaaatatccatcagaaaaatgacacacaaaacaaaatatctggacctttacagaagacgtttgctgacccccactttaaaggattggaacagtcttctagaattgaggaatatttattaaaatacctgtaaagaaaatagtgaatcactgtagcaatggctttgattcagaccttaaaatcacataagaagaattacaacatgttatggatttttaagtggcaggtattgtaactgttttttgtgtgcaaaatactgagtaaccactgggaaaatatttcagatgaaagggatgacaaaagcatgttgcgctttgcatcagcaaggcattgacttctgaaaaaatgatctgaaaaaagtttcaccgtttgtcttcttacctcattttaagaagcatgtgaaaatgggatactatagactactgagaatttcagaaattgagaacaatttcataataaaacggctatatttgaagagagaatacattttatataaacaggaaaatacatttgacactttatggaattttatgagactttttgtgggaacagaaggtcttcaaattgtaaaatgtaaagattgctctttttattaagtctttaacagggatgtatttcattgtatgttttgggtatggctttggaataaatcattttatattttatttgaatatcagaaaaaaaaaaaaaaaa

SEQ ID NO: 224395 - DNA, 1000 bp, Homo Sapiens
ctccatcttcaatggtgaaattcattaaagaaacttacctggatactgttacagaagaaatggcaaaatttcttgaaaatttttgtgagctgcagttcagagaaaatgctgttcgtgtggttaaaacaagcaagagctccagcaagcatagaggagcagtgcatgctttgggttagtgacatttaaaatttttgtttggtttaacttaagtcttttaatatgtttaattttctaagatgttttctatttggttaaatctcactgcaaacatgaaaattagaaaatgaatgtaatgaaattttgcagtatacatttctcatgcatttttttctataattgtagttataaaagtattttctttcttattaaattgttaaagatattggaaatataagccaaaaatactttaaataagagtttaatttctcttgattgcatatgacaaacagtatttgtgaaactgtgtgtatacacacatatatataaatgagtatatatgcttatacacatataagctcctttatctgtttattaaatatacgcatatatataagcacatatactcagttatatatatgtacatttagttatatacataacagaaaagtatgatttttaatccattgtatcttccaaagctaaagcattattaggtaaaaagaatttttgaaaatttgttgaaatttgcagtaaaattggatatttaaaagttgtaatattttagtcagtcaattctaataatgagcaactatgaaatactataattataaaattctgtattgtagttgattaggaaggtataacattttactatagctatttttaaagtttctctactattttttctataaggatgtatacaaataaaagatgatttgaaaatttctattttattcataagataaaggaaaaaaggaaagaagttattgtgatataataaacttttcttattgtggttgtaaaaaaaaaaaaaaaaaaaaaaaaaaaaaaaaaaaaaaaa

SEQ ID NO: 224396 - DNA, 1000 bp, Homo Sapiens
accaataatataagattcctacatcagtttgcagtcctgactttacagtttgaaataagtagcaaaagaaaattatgataatcaagtaatttattattttgtaaaatagtataaaggaataaggaaattttaagtattgtttaggggccaaatttgaactcagctaatatgatttaagcgctctattaattgccctgatttttaaagaggtgcatgtaattttgaaatagcacacattttcatttgtaatcactctggataaatttgtatttttcagtgttcattgaacaggcttattgactctggtaaacttattttattgatgttttcatatggaaaataataagtggaatatgatacaattgttattttcagaacatatttctttagggctatttaatataacctttttaacgagcaaaaactttccatttgagagaaaaaattcttcctgctctgtgggaaaatatttgctgagattttgtatagaataagagacatgtatgtaacatatatgtatattcagcacaagtctactgcaattatgtacacattttggcaagaagaggggattttgtttagtctttgtttatgacttctagagtttcctgtatctagtgttaagttgtaaggaaaaactaaacatgccatttaaaggtaaacttggtaactatttatagagcatacaccaatgattatttctcacagttttcatgatcatttgtttattatttacttggattagactcattaaaaggtataatgctggtcacaattagaatgctaatatttggggaaactatgcagaaaatattttaaaatattaaaagagtgctggcttctattgttgatttatttttggatttaaaaacaaattagggctgggcccattagctcacacctgtaatcccagcactttgggaggctgagatgtgagaattgcttgagcccaggagtttgagaccagcctgggcaatatggtgagactccatctccatac

SEQ ID NO: 224397 - DNA, 1000 bp, Homo Sapiens
tccagcacattatttatttaagactgaattagaactgagtcattccgactctgaaaaaagagtgttgttggattcttatgtatttaatgggtctgccctattgaaaaccattgtgaagtatggtttcccaagcaagaaatgacactttcactgtcagtctttctaggagtctggcagaatccaggaccgggattacccttatttatgaagcgaccttagactaacagtggctctctgggtctccagacaattggccagggactctaaaaaccagaaacaaagttgagagaactccatgctggtggagaaaaacagctggcctttatcaccagaatgtgccccatagaagcagcaaagcagcaagcgacgttcttaaacaagggcctgtgggcctcgtcaagatctggaggaatcatctacgactcactgctgagtgagagggctaggcagtgtctttaaggtcctgccagctttaacattgtatgctttttcttttgttcaatctctcaccacaactggaagtgttgcctcaactacacaggagaaagtttgcagtaacttagagaaaacattattttaatcaccagtgtatgttctcctgctccctggacaaatccatcagcagcggcaacactgaccaggtccagattggggccgctgcggtggatgtgaatccattgaaactaggggtctccagtgctcctgactcctcacagctctgttcctatgacaaggatggtcagcaaagccagcaaccttgaagggggaccttcttctaatctcctccctgcctgctgagagagtgtacagaagcagccacttgtcagctgcgatgaatccaatgataattacataaatcattaacaatacttgatatttgcccatcacatttctcatttcaaagtgctcataaaattgtatctcatgggtggcactgccggcacaacagaattccaaggaaggattacgggctaagtaaataaagcctggaggctgcttt

SEQ ID NO: 224398 - DNA, 1000 bp, Homo Sapiens
tatcaggggagctgtgcctgccccatactacaagctgggtaagacatcgctggaggagtggaagaggcagatgcaggagaacctggctccctggggagagctggccacggacaacatcatcctgacagtgccaaccacaaaccttcaggccctgaaggaccccgagcctgtgctccgcctctgggatgagatgatgcaggctgtggccaggctggcggctgagcccttccctttccgccgtcctgagaggattgtggctgatgtgcagatctcagctggctggatgcattcaggataccccatcatgtgccacctggagtctgtgaaggagatcatcaatgagatggacatgaggagcaggggtgtgtggggccccatccatgagctgggccacaaccaacagcggcatggatgggagttccccccacacactactgaggccacctgtaacctttggtcagtctacgtgcatgaaacagtcctggggatccccagggctcaggcccacgaggctctgagccctccagagcgggagaggagaatcaaggcccacctgggaaagggagcccccctgtgtgactggaatgtatggacagccctggaaacatatctacaggtactgagcagaaattctgggagaaggggatgaccagacccctcagtcatgtagcgacctggatcccagtagccctccacctccttcgccactccaccagcctggacctccacctcccctggaaatgagagggactgggccgcagggtggtgcttcttgggttatacccctctaaggcagagagaatggcacctgtctcactcaccttctgattttgcaatgtaagaggaaatgaaaaatattatgaaaaaaatagaaatatagcatattattcaagggcagaaactctgttagacattcctgcagctgaatcacagctcttgccctcattggttttgttcttggtctcctaataagtgttccataaatggtcattgctttgtt

SEQ ID NO: 224399 - DNA, 1000 bp, Homo Sapiens
aagaaagaagatgaagatctccttcaacgacaaaagcctgcagaccacatttgagtacccttccgagagctccctagagcaggaggaagaggtggaccagcaggaggaggaggaggaggaggaggaggaagaggaagaggaggaagagggatccggctcagaggagaagccctttgcactcttcctgccccgggccacgtttgtgagcagcgtgagacccgagagctctcggctgccagagggtagctcaggcctgtccagctacaccccgaagcactctgtggccttcagcaagtggcaggagcaggcgctggagcaggccccgagggaggcagagcccccgcccgtggaggccatggtgagatgcgggggagtggagcgctggggggagtctgacacccgggcgagcccatgtgtccacattctgtcctctcactttcagctcacacccgccagtcagaatgacctctcggacttccgcagcgagccagccctgtatttctaagcccagcactgccaggaccaaggctgagcccagctgtgggagtcccggaagctgggcagtagccagggactactgcacccgcttctgccttgtttggcctcactgtatcccacccacccctcctggccctggaagcagctagggtgcctcctgccatcggggccaggtctgggtctcactccccggccctggtttgggagggtccaagggggaagtggggtggggaactgcctgtgggtgagtgccaggggcctgctgggtggtggccatctgcgacccggcagggggctgtgcagattctgcacctggccattccctgtcctgtctcctcagcctgcctcacagtggccatggggtgtcggggtgaagggctgtcccagctacttgtcctctgcaggaccctaagcccctgcccgcagcccacatgccctctgtgatgagtggcgtctttcctgcctctgatgatggactcaataaacagcactggacaaggct

SEQ ID NO: 224400 - DNA, 1000 bp, Homo Sapiens
tgtatatgtatcaggaaaggcattctgctgactgtggtgtgtgtgtggtgattgtgctcctgacccacaaatgactgagtgctccatttcttcctttaccccccatttttcctattattcgctccaagaaagatgctaagtctgagctccagaagagactgtgctgggtgtggcttggcacccaggggatgagagccctgagctttgggtctcttggaggctagggttctgtggcagttgcagggcaatgttatggagcagccaacggcctggcagaggagcccaagggactgaagatggccagtagctgggtcctgaggcccctgaagtctgcagacccttctccttgccccaaacactggcctccataattcctgcctgcagatctcccaacttgaactataatccaccagccagcctcagccttgagctttggaaccacattagatcctgcatctgggtgaagaaacgggagctgtggaccacaggccagccagtgaacctcctgggctttcttgcctttgtcctgatcctctcacagaaacactgggccaaacagtggggagagattggagagcgggtgtggctgcccaaccccatccagagcatctgcttccagatgagccagtgcctcgcatgataccagaggaggcgagggacagagacagcaaggcagacagtggctggcaggggggcccaggcccgggacgaggcctccccttcagctcaggcacagcaacttgcccaggactgacactgtcaccctgactgcaggaggcacagggactccgggagactcagagggcgaagagcactggcatttggcatgtccatgacattggagactcccctagcagggtgcctgacgtgtggggaaccctcagtaaatagtggtgcatttgtaaaaaaaaaaaaaaaaaaaaaaaaaaaaaaaaaaaaaaaaaaaaaaaaaaaaaaaaaaaaaaaaaaaaaaaaaaaaaaaaaaaaaaaaaaaaaaaaa

SEQ ID NO: 224401 - DNA, 1000 bp, Homo Sapiens
agctgagacttctgtttgtggagcaactgataggcgaatagacaggacactgaaaaaccttaggctggaaggacaggaaaccctcttaggcctgcctcctcgtgttgatgctgaagctagcaagtcagtcaataaaacaacaggtttgacaaggcatattatcaatactagttctcgtttattaaatttgcgtcaagtctctaaaactcgcctttctgaaccaggaaccgatctcgtagaaccttcaccaaaacacacacccaacacgtcagacaacgaaggcagtgacacggaggtctgtggtccaaacagtccttctaaacggggaaacagcacaggaataaagttagtgagaaaagagggtggtctggatgacagtgttttcattgcagttaaagaaattggtcgtgatctgtacaggggcttgcctacagaggaaaggatccagaaactagagttcatgttggataagctacagaatgaaattgatcaggagttggaacacaataattcccttgttagagaagaaaaagagacaactgatacaaggaaaaaatcacttctttctgctgccttagctaaatcaggtgaaaggctacaagctctaacacttcttatgattcactacagagcaggcattgaagatatagaaactttagaaagtctgtctttagaccagcactccaaaaaaataagcaagtacacagatgatacagaagaagaccttgataatgaaataagccaactaatagactctcagccattcagcagcatatcagatgacttatttggcccatccgagtctgtgtagcagacaggtctatttaaactttcaaatgaacagggtaaagttgcatctaaagtaccacagatacaaccatgtttaaatcctcgtatgcactctggcctgcttctccagttacttgcttgtgtaagaacaaaaatgagaaaggttgttttccagtaaaaacatgaccagcttacaaaaaaaaaaaaaaaa

SEQ ID NO: 224402 - DNA, 1000 bp, Homo Sapiens; identical to SEQ ID NO: 118825

SEQ ID NO: 224403 - DNA, 1000 bp, Homo Sapiens
gctgtcctggttcgctgccctggtcaagtgcctgcctgtcctctgcctggctgggttcctgtgggtcatgtccccaagcgggggctacacccagctcctccagggagcccttgtgtgctcggctgtgggggacgcttgcctcatctggccggcagccttcgtccctggcatggccgcctttgccaccgcccacctcctctacgtctgggccttcggcttctctcccctgcagcccggcctgctgctgctcatcatcctggcccctggcccctacctcagccttgtgctccagcacctcgagccggatatggtcctgccggtggcagcctatgggctgatcctgatggccatgctgtggcgcggcctggcccagggcgggagtgccggctggggcgcgctgctcttcacgctctctgatggcgtgctggcctgggacaccttcgcccagcccctgccccatgcccgcctggtgatcatgaccacctactatgctgcccagctcctcatcacactgtcagccctcaggagcccggtgcccaagactgactgactagggagcttgaagggccggtgttcaggccctctcctcctgcaaggacctgggcctcccagcccagcccagcctgagaaataccctcagcagcgaagcttcctgacgcctgtctgcaggcgctgctgccgccgtcgcttctggctgaagacgtttgaggacgatttgcggaattccaagtccactactgggttccagctgccttcccccggttctgactccagatccctggctcctcagccaggcccacatggagccctcccagccaccagcctgcctccatgttcactgtcggccccacagcctgcccgccccctgctgctgctctgaatccgttttccctgtgggtgtggaaccgtagatgttgctgttaccgtaggagaggcctcggggagggtcatcattgtgataaaccatcgcggttaatgacagcagaaaaaaaaaaaaaaa

SEQ ID NO: 224404 - DNA, 1000 bp, Homo Sapiens
ttcctgaaactccagcagaatatcgctataacatggcccattctgcaactcacagtgtgattgagaagactttccgaaccctctgctcccgattccgctgcctggatggatccaagggggcactgcagtactcaccagagaaatccagccatatcatcttggcctgttgtgtcctccacaacatctccctggagcatgggatggatgtttggtcctctccaatgacaggacccatggaacagcccccggaagaggagtatgagcacatggagtccctggacttagaggctgaccgtattcgtcaggagctaatgctcactcattttagctaatgtagaaggtggagaggagggatacttcccaggagttgtgacagactttcctcctcatcaccttttacacagttccatcatctagcatgactgagtatacagatacttgtcataaactgacatttaatatgtgtgttttggtaaggttggggctatgccagaatatcttgattcatttgcatatgcattaattaaactgaaaccaagacagcggctccctactatccagtgaactctaggttgagtaccactaatttgaaagctcagtggttgcaaacatttatgactgtgcctacaaagtcatagtaaaggtcaggagttcaagacaagaccagcctggccaacatggtgaaaccccgtctctactaaaaatacaaaaattagcggccgggtgcggtggctcacgcctgtaatcccagcactttgggaggccgaggcgggcggatcacctgagttcaggagttaagaccagcctgggcaacatggcaagaccctgtctctactaaaaatacaaaaaattagctgggcgtggtgacaggtgcctgtaatcccagctactcggtaggctgaggcaggagaatcacttgaatcagggaggcggaggttgtggtgagccgagatcgtgccattgcactccagcctaggcaagaagagcgaaactccgtctc

SEQ ID NO: 224405 - DNA, 1000 bp, Homo Sapiens
cccaggggaaggtttcatctgtgccctaccttctaggtgtcaacaacctggaattcaattggctcttgccttataatatcaccaaggagcaggtaccacttgtggtggaggagtacctggacaatgtcaatgagcatgactggaagatgctacgaaaccgtatgatggacatagttcaagatgccactttcgtgtatgccacactgcagactgctcactaccaccgagaaaccccaatgatgggaatctgccctgctggccacgctacaacaaggatgaaaagtacctgcagctggattttaccacaagagtgggcatgaagctcaaggagaagaagatggctttttggatgagtctgtaccagtctcaaagacctgagaagcagaggcaattctaagggtggctatgcaggaaggagccaaagaggggtttgcccccaccatccaggccctggggagactagccatggacatacctggggacaagagttctacccaccccagtttagaactgcaggagctccctgctgcctccaggccaaagctagagcttttgcctgttgtgtgggacctgcactgccctttccagcctgacatcccatgatgcccctctacttcactgttgacatccagttaggccaggccctgtcaacaccacactgtgctcagctctccagcctcaggacaacctctttttttcccttcttcaaatcctcccacccttcaatgtctccttgtgactccttcttatgggaggtcgacccagactgccactgcccctgtcactgcacccagcttggcatttaccatccatcctgctcaaccttgttcctgtctgttcacattggcctggaggcctagggcaggttgtgacatggagcaaacttttggtagtttgggatcttctctcccacccacacttatctcccccagggccactccaaagtctatacacaggggtggtctcttcaataaagaagtgttgattagaaaaaaaaaaa

SEQ ID NO: 224406 - DNA, 1000 bp, Homo Sapiens
tatcttatttaaaaaataaaaataggccaggcgcggtggctcacacctttaatcccaacactttgggaggcgggtggatcacttgatatcaggagtttgagaccagcctggccaacatagggaaaccctgtctctactaaaaatacaaaaattagccaggcctggtggcacgcgcctgtaatcccagctacttgggaggctgaggcaggagaatcacttgaacctgggaggtggaggttgcagtgagtcaagatcgtgtcactgcactccagcctaggtgacagagtgagactccaactaaaagaaaataaataaataaatatataaatatataaataaataataaaagtaaactattgctgatgactccagggtcaatctggaaaaattaacagtattcctcaactccattactttctgcagccaagcttgattccttgaattatagttttctaagaaaaaatagtttttaataatctaaggtaaatttgttgcaattattagcagcagcataataaggctttttgcgcaaatgaatgttattagctagagttattcaaaaaagaatgaagcacaatttttgctaggacttcttgagaactattcataaaaatgcttttagataataaacaagtataaatgtcaaaatatttttttaaaagtataattggccaggtgctggctcacgcctataatcccagcactctaggagactgaggcaggaggatcacttgagctcgggagtttgaggctgcagtgattcatgattgcaccactgccttccagcagcctgatgacagagtgggactccatctctttacatatgtatatcttactctcttgatgggacaagttggtagaaataaagattttttttttctgttgtgaaaaaaaaaaaaaaaaaaaaaaaaaaaaaaaaaaaaaaaaaaaaaaaaaaaaaaaaaaaaaaaaaaaaaaaaaaaaaaaaagaaaaaaaaaaaaaaaaaaaaaaaaaaaaaaa

SEQ ID NO: 224407 - DNA, 1000 bp, Homo Sapiens
tgaaacaaatggtactctgccttctagtttcagctctcataccgtaaacatgtatcctttttgagtctacttagtcccatctcttcctaatttctgttctttttgttggtgattttactgtttaaaatggcctccaaatgccctgctggagtgctttctgatgttcctaagctcaggaaggcttaggagaaaataagtatattagataagcttcattcatgcacaagttataatgctgttggcagagagttcagtgttactgaatcaacaatatgttgcattgttctgttgacaaaaacaaagcttgcagaaacctaaccctgtatgttttctaggagcagtgatttggtattcactacttcagtgtttgtggactttatggaacataagtaccacaaataatgcaaattgactatatttgcagcgtgtacaatcaaggatgcagaggcagaaatgtgtgtgcagcttaggtcatagtaaaaagaggaaagaatttgaggaaaattttgccagttacatattacctctggaataactttgcctttgccgtgtgtgttactgtgtacactcagatatttttctcataatggcctttgccgtgtgtgttactgagtgagtacactcagatatttttctcataatggcatgagggaaatcagtctccttttcccattgtgtttgtcacttttgctgagacgcaaaaaataacgtgctatgatattgtgaaatatgtatttggtctttatccccaatccctgacatccagcggaatctgcagagttaagtgtcttttgtatgctcatgtgatgactggtggctgggggcccctagaaagtttcaggatagggcagatccttgtggccaggagttccagatcagcctgggcaacatagtgagaccttgtctgtacaaaaaagaaagtaggaaaaaacatctttggtttttcctatctccagatacttccttttcaaataaatgaatcttctttcatgtgcataat

SEQ ID NO: 224408 - DNA, 1000 bp, Homo Sapiens
atagactcctgggttgttttacaaatgtgccatattggcatgtcttacagtgatacctcaaacacagaaatttttatttaggaagatagctaaatctttattagaactgatttttattgtattcagtataaattttatgaagcttgtttctatgagtactgtggaaaattttataaatgtgagcatatatatttattttgtctgacataatttgtagttttaaagcaagtttcacactgaacttaacgttttcataaatgaccagtttgggatgtttctctcttttactttagtggcaaactcaagagtaaaaagtgtcaaaaaaagaattgagaattttattctgtactttttaaaatttaagagccagggagttgcatcatgaaagcctttgtataataatggaaattttatatgggtaagcattttcaaacacatattagtagatacgttttttaaatttctattttcacattgatcagtgttactttgcttaatacttaggtagcccttatgtccactaaagtaaatgcttatgttgtagaagcatcgaacatcaaccaatgtcatggcacagcaccaaagattgcaaatacctcactatggtgcgcttagaaattttcaaattgataacctatagatacggctgcaggtgaattcatgatagtgaaatcagctaagtatacttaacctcacaggctagaaaggtttactgattcttgtttcacctggcacccaatgtggataccctcagtaagactcagggagccttataactcctcttaacatatgcttacccatgcttaaattctagggaagctgtatccacagccctctgcattgcagccatgagagctctcacgctttcaacccttccataacctaatttagtcatttgggcctctcaaaaggaaatgcttttgtttaaataggtcttactcatccagttccactgaagaggacacttcaaaacaaaagaaacaaaaatatctgaagaaag

SEQ ID NO: 224409 - DNA, 1000 bp, Homo Sapiens
gctctggcctgacgggggttcctggacacgcctctgagccggcagcccctacccgcacccgtgcaccttccacgcccgtctccagcagcccctgcccccacccgcacccctgcacctgccacgcctgtctccggcagcccctgcccgcacccgcacccctgcacctgccacgcccgtctccggcagcacctgccacgcccgtctccggcagcacctgccacgcccgtctccggcagcacctgccacgcccgtctccggcagcccctgcccgcacccgcacccctgcacctgccacgcccgtctccggcagcccctgcctgcacccgcacccctcacggctgtctccggcagcccctgcccgcgcccgcacctctgcacctcccacgcccctctccggcagcccctgcccacacccgcacccctgcacctcccacgcccgtcttgccctggggcccaggtgcaggtctgtgaggagggcagccccgtgctcccgtggccaccgctcagccaaatggattcagcgagggtttttagtgtttgtgcctgtgtccccgtgtgcctgtttcctggtgaggctggatgcctggcatgtctgaacactcacattccccaggcatgcatgtgcagccgccgccgccacccatgtactgtggcgctgacccctcctgtaacagctgtggtcttggcctctcgtgttggtggcagatgtcccatttcccagttactttctgttgtccaaaagtttaactgtcctgccagccaaagctgctgagcattactctgatagaccatcagtccttggtaagtgtcctgtgcatctgggataagcatccgtttgttttcagctgcgctttctgtgacttgctctgcgtgagtcctcggtccacgtgggccgttgcgctggttcccagcctgcccgacacactcactgcgacgcctcccttgcctactgcttgctggcttctgtgttctctgcagtaaacattgatttctgactcga

SEQ ID NO: 224410 - DNA, 1000 bp, Homo Sapiens
aatggtctttctaatgtgtgaatcagagcacagcagcccctgcacaaagcccttccatgtcgcctctgcattcaggatcaaaccccgaccacctgcccaacctgctctcctcttgccactgcctcttcctccctcattccaccttcccatgccctggatccatcaggccacttgatgacccccaaccaagtggctcccacaccctgttttacaaaaaagaaaagaccagtccatgagggaggtttttaagggtttgtggaaaatgaaaattaggatttcatgatttttttttttcagtccccgtgaaggagagcccttcatttggagattatgttctttcggggagaggctgaggacttaaaatattcctgcatttgtgaaatgatggtgaaagtaagtggtagcttttcccttctttttcttctttttttgtgatgtcccaacttgtaaaaattaaaagttatggtactatgttagccccataattttttttttccttttaaaacacttccataatctggactcctctgtccaggcactgctgcccagcctccaagctccatctccactccagattttttacagctgcctgcagtactttacctcctatcagaagtttctcagctcccaaggctctgagcaaatgtggctcctgggggttctttcttcctctgctgaaggaataaattgctccttgacattgtagagcttctggcacttggagacttgtatgaaagatggctgtgcctctgcctgtctcccccaccgggctgggagctctgcagagcaggaaacatgactcgtatatgtctcaggtccctgcagggccaagcacctagcctcgctcttggcaggtactcagcgaatgaatgctgtatatgttgggtgcaaagttccctacttcctgtgacttcagctctgttttacaataaaatcttgaaaatgcctaaaaaaaaaaaaaaaaaaaaaaaaaaaaaaaaaaaaaaaaaaaaaaaaaaaa

SEQ ID NO: 224411 - DNA, 1000 bp, Homo Sapiens; identical to SEQ ID NO: 118830

SEQ ID NO: 224412 - DNA, 1000 bp, Homo Sapiens
gcacagaattttaaatcatctcaacttttgagaaattttgagttatcaacaccgttcccacaagacagtggcaaaattattggtgagaattaaacagctgtttctcagaggaagcaatggaggcttgctgggataaaggcatttactgagaggctgttacctagtgagagtgatgaattaattaaaatagtcgaatccctttctgactgtctctgaaagcttccgcttttatctttgaagagcagaattgtcactccaaggacatttattaataaaaagaacaactgtccagtgcaatgaaggcaaagtcataggtctcccaagtcttaccccattcctgtgaaatatcaagttcttggcttttctctgtcatgtagcctcaactttctctgaccgggtgcatttctttctctggtttctaaattgccagtggcaaatttggatcacttacttaatatctgttaaattttgtgacccaacaaagtcttttagcactgtggtgtcaaaaagaaaaacacctcccaggcatatacattttatagattcctggagaatgttgctctccagctccatccccacccaatgaaatatgatccagagagtcttgcaaagagacaagcctcattttccacaattagctctaaagtgcctccaggaaatgattttctcagctcatctctctgtattccctgttttggatcacagggcaatctgtttaaatgactaattacagaaatcattaaaggcaccaagcaaatgtcatctctgaatacacacatcccaagctttacaaatcctgcctggcttgacagtgatgaggccacttaacagtccagcgcaggcggatgttaaaaaaaataaaaaggtgaccatctgcggtttagttttttaactttctgatttcacacttaacgtctgtcattctgttactgggcacctgtttaaattctattttaaaatgttaatgtgtgttgtttaaaataaaatcaagaaagagaga

SEQ ID NO: 224413 - DNA, 1000 bp, Homo Sapiens
tcataaatctctccaaaataggatgagatgaacacttttaacaagagaacaggaccctatataaatcgctgtgggctcaccacctctaaggaggagcactgactgaagacagaaaaattgatgaactgaagaagacatggtccattatgccttacaaacttacacagtgctttgggaattccaaagtactcagtggagagaggtgtttcaggagccgtagagccagatcgtcatcatgtctgcattgtggctgctgctgggcctccttgccctgatggacttgtctgaaagcagcaactggggatgctatggaaacatccaaagcctggacacccctggagcatcttgtgggattggaagacgtcacggcctgaactactgtggagttcgtgcttctgaaaggctggctgaaatagacatgccatacctcctgaaatatcaacccatgatgcaaaccattggccaaaagtactgcatggatcctgccgtgatcgctggtgtcttgtccaggaagtctcccggtgacaaaattctggtcaacatgggcgataggactagcatggtgcaggaccctggctctcaagctcccacatcctggattagtgagtctcaggtttcccagacaactgaagttctgactactagaatcaaagaaatccagaggaggtttccaacctggacccctgaccagtacctgagaggtggactctgtgcctacagtgggggtgctggctatgtccgaagcagccaggacctgagctgtgacttctgcaatgatgtccttgcacgagccaagtacctcaagagacatggcttctaacatctcagatgaaacccaagaccatgatcacatatgcagcctcaaatgttacacagataaaactagccaagggcacctgtaactgggaatctgagtttgacctaaaagtcattaaaataacatgaatcacattaaaggaagaattttgacctgcaaaaaaaaaaaaaaaaaaaaaaaaaa

SEQ ID NO: 224414 - DNA, 1000 bp, Homo Sapiens
agcgccggcgacggccctggcgcggaggaggactttctgcggcagctcggcagcctgctgcgggagctgcactgcccggatcgcgcgctctgcggcggggatggcgcggctgcgcttcgggaacccggtgccggactgcgcctgctgcgctttctctgctcagagctccaagccacccgcctcctgtgcctccgctctctgctggatccgagtcctaggccaccccttggtgaaggggtagtggagggagccggcatggtccaagaactggaccttaccctccaagccctggggctgcccagacctgcaccagggacccccgccagccagctgctgcaggagttgcatgctaagatctcagagctgcagccttctctgcccccagggtccctgcagcccctcctcagctgctcgctagatgcacccagatgggaagcgttggagtctctgtcccaaagcctcagagatcagtaccgctgccgccgctgcctcctcctcaagcgccttgacctcactacatctgctttccactggagtgaccgggcagaggcccaaggagaggccatgagggcagtgctgatcccaattcgagaggttctgaccccagaatcggacatctccattgcacacgttctggctgcccgagccgacctgtcgtgcttatgggcaacgttccagaccgggggggccgcccaaatgagctggagcctcccatgcccacctggaggagccgaagagaggatggaggcccccagtgttggggtcgcaagaagaagaagaagaagtaaagggggactggtggtcgggggcggggggtcctccatgagatgctaatgctatcggtaatctctggggagtccgtttaaggctttccttggtatttggcacccaagccccccatctcctattcctgagtccccaaatgccctgctcccattcacgtcaataccaagaaccatgttctccagagaataaatttaatttatgacagcaaaaaaac

SEQ ID NO: 224415 - DNA, 1000 bp, Homo Sapiens
tccagactcctggagcaggtcctgctggtgttggagcccccaagactccagagcctctttgaggagcacttgcaggggcagctgcagaccctggctgcacatcccattgccaacttccctttgcagcgcttactggatgcagtcactacccctgagctgctgtcccctgtgtttgaggagctgagccctgtcttggaagctgtattggcccagggccacccaggggtagtcattgccctggtgggggcctgtcgcagagttggggcctaccaagccaaggtcctacagctcttgttggaggcattccactgtgcagagccctcatcccggcaagtggcctgtgtgcctctctttgccactttgatggcttatgaggtgtactatggactgacggaggaggagggggcagtgcctgcagagcaccaggtggcaatggccgcagccagagccttgggggatgtgacagtccttgggtctctactgctccagcatctgctgcacttctccactcctggtcttgtacttcgaagtctgggtgccttgacgggaccacagcttctgtcccttgcccaaagtcccgctggctctcatgtgctcgatgccatcctgaccagcccctctgtgacgcgcaagctgcgccgccgtgtgctgcagaacctaaagggacaatatgtggctctggcctgtagtcgccatggcagccgtgtgctagatgccatctggagtggagcagccttgagggcccggaaggaaattgctgctgagcttggggagcagaaccaggagctgataagagaccctttcggccaccatgtggctcgaaatgtggccttgactaccttcctaaagcggcgagaggcttgggaacagcagcagggtgcggtggccaagcggaggcgggcattgaactccatacttgaagactgaggctttggatctgggactgggtgttgatgggggagggcaaaatggggtatccaccccatccctttcctggttt

SEQ ID NO: 224416 - DNA, 1000 bp, Homo Sapiens
gacaagtccagcaagcgcgtgctcactgccgacttctgcgccggctgcaaggtcaacgatgtggaggccatcaggagccaggggctggcagtgcatgacatagcagaaaagctcatcaaggcctttgctgagcagatattttacaccggcttcatccactcggacccacatcctggcaacgttctggtgcggaaaggcccggacgggaaagcggagctggtgctgctggaccacgggctctaccagttcctggaggagaaggaccgcgcagccctctgccagctgtggcgggccatcatcctgcgggacgacgccgccatgagggcgcacgcagccgcactgggggtgcaagactacctcctgttcgccgagatgctcatgcagcgccccgtgcgcctggggcagctgtggggctcgcacctactgagccgcgaagaggcggcctacatggtggacatggcccgcgagcgcttcgaggccgtcatggcggtgctcagggagctgccgcggcccatgctgctggtgctgcgcaacatcaacaccgtgcgcgctatcaacgtggccctcggcgcccccgtggaccgctacttccttatggctaaaagggctgtccggggctggagccgcctggcgggcgccacgtatcggggtgtctacggcaccagcctcctgcgccacgccaaggtcgtctgggagatgctcaagtttgaagtggcgctcaggctggagaccttggccatgcggctgaccgccctcctggctcgtgctctggtccacctgagcctcgtgcccccagcggaggagctctaccagtacctggagacctagggtgcagccgcccagggccggcggggcccttttcaccttgggctgacggaggtggcggggctagaggtgtagacaccccgagccccgtgggcactcgcactggggggctgtgacagcagctgggccaggaggccgtgtaatgaccacacactcctctcaagcaaaaaaaaaa

SEQ ID NO: 224417 - DNA, 890 bp, Homo Sapiens; identical to SEQ ID NO: 26228

SEQ ID NO: 224418 - DNA, 1000 bp, Homo Sapiens; identical to SEQ ID NO: 118836

SEQ ID NO: 224419 - DNA, 1000 bp, Homo Sapiens
actagtgtacaacccaagtgccagcctgctccccacccctgtggatgacgatgagattgacatgctctttgactgtccttctaggcttgagttggaaagagaagacacagattcatttgaggatctggaagcagatgaaaacgcctttttgattgctgaagaagaggagctgaaggaggctcgccgtgctttgtcgtggagctacgacattctgactggccatattcgggtgaacccactggtcaagagtttttccaggctccttgtggtgggcctgggactgctgctctttgtatttcccctgctcctcctccttttggagtcaggtattgatctctccttcttatgcgaaatccgccagacaccagagtttgagcagtttcactatgaatactactgtcccctcaaggagtgggtggctgggaaagtccacctcatcctctacatgctgggttgctcatgaagttaatctctcacgtgactaagggctatattcaatgctagtgatttctttttttcagcaaatgcctggttctgaagggtcacggggctgtcaacaggtgttccttactcataattgattattcaaacctttaagttagctttccataattcactgcacttaaataagtttaaatcaaatacagttattttagttacaggttaggaagatggtctttaaataaccaaaaatatgtttattttttattatagtgtagacatacccttcatctattatatcataatacatgttacattggactgaattagattttcccatttctaatagttggcaccattataagctataaggttcagaatcagaattttagtaacaactcaagagaaagttgttgaatataatccttagtgaagacagtgtcctctaaccaatgcctatacaactaaatttatgctgggtttttggttttgtttttttaaaaatatttttatgtgttcaaactattttggtaaatttttagcaaaaaaaaaaaaaaaa

SEQ ID NO: 224420 - DNA, 1000 bp, Homo Sapiens
caggtagctacggacacccgggataccccacactggggccctcctcctgggcctgaccagtcccccagctgtcacctccccattcctggacaggaagggcacttttcctagtgactggccatagatggttttggatggttccatctgttctggcaggagtgggagcaggagccagggcagaacaaactgctggaggccctggtgttgggaacagctgcggggagggtagggaccagacagaactgccttcaagatgagtcccaggagcgcacactcagccctgtcagtggggtctggctttagcagccaggcctccacagacccccatgggcccccagggccgagagggaggacagagcccttcagaacagaggcctcatctcactgcatcccccatcaccccctagttccccaatggtcctaatttgtgttctgagatcccagtttactctgtggccaggccccacctgtgtttccaagtcgggctggagacgcaggatggggtaggccttgtgctctgagcaaccccagctctgcctcacaggcaggcaggcccggtgcaagagtggactctgggttcctaaagcaataaatgcaaacaagccaacagctctgctgcctagcaatttccatcttagccacacttctcccttcaggggcttcggaggagaggtcagggctaaggccggggatgagactgcaggagagagagcagcggagggccacattcggagcctccgtccactccagttttatcagcttttgccttttgcacggagtgctaaacaaattctagctctgtgtttttttcccattcccagatttactatcagttctccttaaaaagtatctaagctgttacagtagctttcccttcacttgattctattgtgtgttttctatgtttggaataattacacccaaatatctagatattttctcttcaccgcattttgtaaataaagagatgtgtatgcctccctgaaaaaaaaaaaaaaaa

SEQ ID NO: 224421 - DNA, 1000 bp, Homo Sapiens
attgccaaattctccagcagcatcttctcatcccaagctcaagtcttcaaaaggcataacgaagaaaccgcaggctccttcaaacaatgcatcatcttcacttgcttcattaaatccagtaggtaaaaacacttcttcaccagctttaccaagaactgcaccttgtatatctgagtcaccgagaaaatgtatttcatcccccaatacccccaaggccaaggttattccagcccagaattcagcagatctgcccgagtccacacttttgccaaataagtgttcaggaaaaactcaacctaagtatttgaaacataatcatatttcttccagagataatgcagtatctcacttagctgcacattcaaattcatcctcaaaatgtcccaagctgcctaaagcaaatatacctgtaagacctaaaccttctttccagtcctctgcaaaaatgacaaaaaccagttccaaaaccatagccacgggtctaggaacacagtctcaaccatccgatggagccccacaagcaaagccagtcccagcacagaaacttaaatcggccttgaatttaaatcagccagtttctgtgtcctcagtttctcctgtaaaagccacacagaaatcaaaagataagaatatagtttcagctaccaaaaagcagcctcagaataaaagtgcatttcagaagacaggacccagctccttgaagtctcctggccgtaccccactgtccatcgtgagcctaccccagtcttctaccaaaacacaaactgcaccgaagtcagcacagactgtcgctaagagccagcattcaactaaagggcctcccagaagtggcaaaaccccagcttcaatcaggaaaccaccctcatctgttaaggatgcagatagtggagataaaaaacctactgcaaagaaaaaggaagatgatgaccattattttgtcatgactggaagtaagaaacctagaaaataaatacatactcattataaaaaaaaaaaaaaa

SEQ ID NO: 224422 - DNA, 1000 bp, Homo Sapiens
cttcctcatgaagcccatcaacaagtgcattgggaggaacatgacctacttctcaggcctcctggtgatcctggcctttgccgcctgggtggcgctggcggagggactgggtgtggccgtgtacgcagcggctgtgctgctgggtgctggctgtgccaccatcctcgtcacctcgctggccatgacggccgacctcatcggtccccacacgaacagcggagcgttcgtgtacggctccatgagcttcttggataaggtggccaatgggctggcagtcatggccatccagagcctgcacccttgcccctcagagctctgctgcagggcctgcgtgagcttttaccactgggcgatggtggctgtgacgggcggcgtgggcgtggccgctgccctgtgtctctgtagcctcctgctgtggccgacccgcctgcgacgctgggaccgtgatgcccggccctgactcctgacagcctcctgcacctgtgcaagggaactgtggggatgcacgaggatgccccccagggccttggggaaaagcccccactgcccctcactcttctctggacccccaccctccatcctcacccagctcccgggggtggggtcgggtgagggcagcagggatgcccgccagggacttgcaaggaccccctgggttttgagggtgtcccattctcaactctaatccatcccagccctctggaggatttggggtgcccctctcggcagggaacaggaagtaggaatcccagaagggtctgggggaaccctaaccctgagctcagtccagttcacccctcacctccagcctggaggagacagccacggggtggtgggctgggcctggaccccaccgtggtgggcagcagggctgcccggcaggcttggtggactctgctggcagcaaataaagagatgacggcaaaaaaaaaaaaaaaaaaaaaaaaaaaaaaaaaaaaaaaaaaaaaaaaaaaaaaaaaaaaaaaaaaaaaaaaaaaaa

SEQ ID NO: 224423 - DNA, 1000 bp, Homo Sapiens
aaattttaaagtattactaaaacctcaaacaaatatttgtctatgatatccttttctgtgcaacatttaaattacatttaccctggaatagaatattataattattgcgtagttgaaagaaaaagtgatcctgtcatagcaacaagattcacacagctttttttggtgaggtgaggggggaggcaaatggcaattttattaaatttaatattccacacaaacttttttcttagtatctcttcttcatactcattagttttgtgtgattttatttgttgtataaagattatgaatattactatggaatgatgtaatagatttatgttaatgttactttttattaataattatctaggagatagtaagaacatagtttagcaagtttatatttgatatcctgagccatatttctttaatttctctttatatgtggtatttgtgtatgttagtatatttgaattttatgtttttttaacataattaagcgtgcatgtttgtttttcattaacggttaaaagatatttgatgaattgtgtgtttgattaacctattaactgaaaaaaactcaacagtagaaatggaattataatcacatcataaatataagcagtttttaatgatcaatttttatatctgtacagtttttttggattgttttagttccttagaaaaattagctaaatgacagaaacatggatattgaaatatgaaatagtacaatataaagatagatagaaaagtatgctgagttgacatgttgaaaaacacagtctcttgaagatatactggaatacattatttttgaatattttgaatattttttgaatatttttaaataaagtcttaaaagcataaataggtaactacttttaaaaaaaaagtcatgagaaatcacactcaagcattatcaagtgaagaaaattcataatagcaaataaaactgcaaacattttaccttaaaaaaaaaaaaaaaaaaaaaaaaaaaaaaaaaaaaaaaaaa

SEQ ID NO: 224424 - DNA, 1000 bp, Homo Sapiens
gtgaagttactagaattgccatgttaactataagcaattgctgtaatcactaatttctattcaacatttgtgacccattagtccggacttaatttactatactgcatgcaaatcatcaagcaattgcttcaaaggaaatgtctacaatgtgagttaataattaaatcaatcctcaagttgaaaaacactttttctccaatttgcctgaatatttcaggaggaagtgtttatattataataattagctatataattgcatcaactttttatttcaaggtatagttgccaagtaaagtgggatctggaaagtctctggataatttctttacaaaaaaagtttaaatcacataaaaagccaatctactcttccctgtgttactttaaaataactttgaagtgactattctgagctttatctgtgttaacatgattaactgaccatactactaatgtgaccctgtatatacatggatagtattgaaatatgctggtaaatctatttcagatactttaagtgaattgccattgattctacgattaagttctgtgaataggacattatatcatttaagctgttttgtcaatttgatttttatgcttttggaacggctgctgtttcagctgttggccttttcaattctatactccattttatagaattgaataatggacacatgtcacttgggaagcaacgtaagtatcacattattttttgccaccctttcatcataaatggaagaatcagagttataatgagataaaccaggtctgttttttacaactttgttcttataaatctgcagttatatggagtatttagttatactgaattttacagttattatagtgtgaaaaaccttacaaaatatgtgcaaatgtttcttcagttttaatacctcaaactgttttttgcacttcaggggtaaggtctgatgacatgtaaaagatgatcgtttaataaaataattgtttaaaatgttaaaaaaaaaaaaaaaaaaaa

SEQ ID NO: 224425 - DNA, 1000 bp, Homo Sapiens
gtttttcctcaccgacagtaccatcatgccttgagtgttcttttctcccaagtgctattccttaaacacgagagtttaccagttgcctaataatgcaataaaaaatgctttgagatagctaactgcccataaaacaaactcaaattgcttataaagtttcttcccatgttcccatttgatgaaaagtcttacatcacatataactgggaagcaggggtccctcctcaattttcagacattttgaaaggatgacagttctgtttgttagatgagtaaacctctatattcataagttctaaaatccttcattatgagggattcaaagtatttataaaaacactgccctctaaaaatttcctcagatctgaagtatggtcttggtcctgaatatacagtgttatcctatgtttaaaagggtgatccagacatgagacgcaactagttggtgcataagaaggccccacttggctatttcatatctacctacaattgaccaaaaaaaattttttaggccagcaattattatttagcttcgctctttctagtgcaagaaactgcaggctggatcagtagttcaacagctaaacagtcataaaatagtcattgtgcatgttaaatttctttcaatgctttcaaagataaattccaatttctatttacttattcattgtgacagtattactaaacaggtaaggatgggaatattttgttatactgtgtatagtgaatgtattgtactgtgtctgtgaaaactgtgctttaaattatattttcatatgttttgttggggacagagcacattaagtctgaaagcaacagaggtttgttttagaactgaaggcaatttaatcaaaattcctgtcaagaaaagctgcttataaatgtaaatgaaatcacatttaaaataaactgcctctgacccaaaaataaaaaaaaaaaaaaaaaaaaaaaaaaaaaaaaaaaaaaaaaaaaaaaaaaaaaagaaaaaaaaaaaaaaaaa

SEQ ID NO: 224426 - DNA, 1000 bp, Homo Sapiens
gggagcctccaaaacttgctcttgaagacatatcggctgaccctgaggacaccgtgggtggccacccatcctggtcaggctgggaggatgacgccaagggctcgaccaagtacaccagcctggccagctctgccaacagctccaggtggagcctgcgcgcggcagggaggctggtgagcatccgacggcagagtaaaggccacctgacagatagcccggaggaggcggagtgaggggggctgcgtggcaagtgtgccccgacatggtggccttttatgagtataccatgtagttgttgagtcttttccgcgttagaaagaatagagagtctactttttgcctatatttgatatttggacctctgtttctttatttaatgaactctcacacacactgtgactccttggtgaacacgtgcagggattgtacatttgattgccttattgcagaaatattcacctatcagtccatgttttgcagaaactggagatgtgaatttatgatgctctcccataatacagcagtaatgatttgcagtttctcacaaaatgattttcatgctgctctgtgttgtagttctgtttcagaacttccgtacctttttcttgtatgtagcacgtataaatgcagctgtcatgcagttcttttcttttgctagaaaattagtcaggaggtaagatgaatcttccaaagttatgttaaattttgtttaacttgacaaattaaactttgttcttattaaacaaatacgtaaacaaatactggaaaagcaaagcttatatttgggagtaaaatgtatcttaaaatgcatgttcatcttttgctgagggaggaatagcttcttgtatgtccactggatagtaacagtggttcttttttggaattttatttttacctcttttgaacttctaaatcggtccctttattttcttaaaacatttgctctcttttttgtttacagattaaagaagtatggatcaattttaaaaaaaaaaaaaaa

SEQ ID NO: 224427 - DNA, 1000 bp, Homo Sapiens
agcctacgggatccgctttgacgtgatggtgaacggcaagggtgctttcttctgcgacctggtactcatctacctcatcaaaaagagagagttttaccgtgacaagaagtacgaggaagtgaggggcctagaagacagttcccaggaggccgaggacgaggcatcggggctggggctatctgagcagctcacatctgggccagggctgctggggatgccggagcagcaggagctgcaggagccacccgaggcgaagcgtggaagcagcagtcagaaggggaacggatctgtgtgcccacagctcctggagccccacaggagcacgtgaattgcctctgcttacgttcaggccctgtcctaaacccagccgtctagcacccagtgatcccatgcctttgggaatcccaggatgctgcccaacgggaaatttgtacattgggtgctatcaatgccacatcacagggaccagccatcacagagcaaagtgacctccacgtctgatgctggggtcatcaggacggacccatcatggctgtctttttgccccaccccctgccgtcagttcttcctttctccgtggctggcttcccgcactagggaacgggttgtaaatggggaacatgacttccttccggagtccttgagcacctcagctaaggaccgcagtgccctgtagagttcctagattacctcactgggaatagcattgtgcgtgtccggaaaagggctccatttggttccagcccactcccctctgcaagtgccgcagcttccctcagagcatactctccagtggatccaagtactctctctcctaaagacaccaccttcctgccagctgtttgcccttaggccagtacacagaattaaagtgggggagatggcagacgctttctgggacctgcccaagatatgtattctctgacactcttatttggtcataaaacaataaatggtgtcaatttcaaaaaaaaaaaaaaaaaaaaaaaaaaaaaaaaaa

SEQ ID NO: 224428 - DNA, 1000 bp, Homo Sapiens
ataaaattattattacctgaagaaaataaggctgcattttgaaatgttaagtgcaaaatgactgatgttaaaaccatctgggggaaatcttgggatgctttttcctaggaaagcatatggttgtgatatgttttggcgcataggagacagaaatagtgattatcaggcgttgagcctttttgtagtatttttagtctttgatactctgtaagtactagttcctaaggcaccaacattgcattccttggtttatactttttctattcatcagggtaggaaatcttaaatccttaggcatccaagaagtatactagctttttgcttctcttttagaaatacttgtggggagagaaaaaaggatggtttgggcatattggtatagtttgagtaaactaaggttaatgttcatataacatttagactttgccataaatatcagaaccaaagatcaagacattcatgtacagtctggaatgtatatatggggcccataaaaattcccagtatgcatgttttatgctcaccattatgaattggggtcttcaaagagagaaggttgaaagtggaaagcacttgaaagggctccccggtttgtaaaatatctttaatcattcacattaggtacctcggagttgcgggtctcagatgtggattcatgcatcatttgtgcaatttgaagatagtccatatttcctatttcagtattaggtcctgcaacacttttcaattcttgtagaaggtttttttcaggagtggtgatgtctgatgctcaattactattttccctataagagtttcagcatgagcttaattaaattttgtgaaaaaacctgtgtttttagttacatacacacacacacacacacacacacacacacccctacttaaatggaatctaaacatttttagcctttaatccattccattttctaaaactgtcataaactatttttaatcattttaaataaatgtaaaagaaaaataaaaaaaaaaaaaaaaa

SEQ ID NO: 224429 - DNA, 1000 bp, Homo Sapiens; identical to SEQ ID NO: 118841

SEQ ID NO: 224430 - DNA, 1000 bp, Homo Sapiens
gctggggcatttacaggcagaatgagttcatgtgaaatttcaggatctgccatgactcagattcactttctgtaaaccagagtcaacattacatttccctttactctgggccattccttgaatttttaggtcaccagttgtttttgtactaactgaagggatttgagtatttcacaagcaccttatttttattagcatttttagggcattaccaatttgggacggatctgtagtgtgagagattgttgtcactcttagctccaaacataggttgactttatatattatttacatgttcagaattatactgtgtagaaattcaaatgaaacttgcaaaatacttttctggcaggaagccctggagaggatcgttcatggaaacaaggatgacgactggggtaagaaatgcaggtgactcgtgagtggtcagggagtggaagagaagacggctggaaggttttagcattcagaaaaaaaatggagacaactagagttgatctgaagattatggcagaattcaatattgggggaaagaaacaagatgggggttagaaattagaaacagcagagctccacaggttggaaaggttggaaaggatttgagcaagagaacaagaaggagcctgctaatagcaccctgggtttacatcaagagaagcacctggagagaattaactcgggaggaggtgggggcatgggaaaccttttcatctccaagagcgggcaggaacagcagctggcctgaacttgaaggtacaccaggtagcttgcgtgggccaggagaaggtgattctcttctatgcctctctccaacgccctgcttctgatgctgctcctctacctgtattgaggggaagatacatccctaagaagttccctgaaccccattctttgttgtggctaactggtccccttggaatttttctactaattttcaattccccctctcacctggtgaaatcttgaatcttactgttcaataaaagttcttctaccgaaa

SEQ ID NO: 224431 - DNA, 1000 bp, Homo Sapiens
cagctaaaagaagcacaaggaaaaattgatgtacttcaagctgaagtagctgcattgaagacacttgtattgtccagttctccaacatcacctacgcaggagcctttgccaggtggaaagacaccttttaaaaaggggcatacaagaaataaaagcacaagcagtgctatgagtggcagtcatcaggacctcagtgtgatacagccaattgtaaaagactgcaaagaggctgacttatccttgtataatgaattccgattgtggaaggatgagcccacaatggacaggacgtgtcctttcttagacaaaatctaccaggaagatatctttccatgtttaacattctcaaaaagtgagttggcttcagctgttctggaggctgtggaaaacaatactctaagcattgaaccagtgggattacaacctatccggtttgtgaaagcttctgcagttgaatgcggaggaccaaaaaaatgtgctctcactggccagagtaagtcctgtaaacacagaattaaattaggggactcaagcaactattattatatttctcctttttgcagatacaggatcacttctgtatgtaacttttttacatacattcgatacattcagcagggactcgtgaaacagcaggatgttgatcagatgttttgggaggttatgcagttgagaaaagagatgtcattggcaaagctgggttatttcaaagaggaactctgatgctctgcgtgggaccatgcctgaactccccgaataactgaaaaatggctgaatatttttatggttacttgatatttatttccaaggagtgagcctaagacttttttccccttttgcaaattgctctaagaagtaccatgatttcttttaaactgatctatgctgtgtttgcttattctttagttgaacacactatgaagaattccaggtgtactagtgaatgtaatttatagttgccaaaaaaaaaaaaaacctgaaataaataaatgttagattg

SEQ ID NO: 224432 - DNA, 1000 bp, Homo Sapiens; identical to SEQ ID NO: 221472

SEQ ID NO: 224433 - DNA, 1000 bp, Homo Sapiens
accgacaagatctttctggaattcgaggagcccttctggggccctgagtgcaacagcctacagtttgtgtgggaggacgaagcagagagccacaccctcacctacccacctgagctctggtaccgcaagatctgcggctttgatgtcctctacccgcctgagcgctacggccatgtgctgagcggctggatctgcggggaggaggccctcgtcatggagaagtgtgatgacgaggcagtggccgagatctgcacggagatgctgcgtcagttcacagggaaccccaacattccaaaacctcggcgaatcttgcgctcggcctggggcagcaacccttacttccgcggctcctattcatacacgcaggtgggctccagcggggcggatgtggagaagctggccaagcccctgccgtacacagagagctcaaagacagcgcatggaagctccacaaagcagcagcctggtcaccttttctcttccaagtgcccagaacagcccctggatgctaacaggggcgccgtaaagcccatgcaggtgctgttttccggtgaggccacccaccgcaagtactattccaccacccacggtgctctgctgtccggccagcgtgaggctgcccgcctcattgagatgtaccgagacctcttccagcaggggacctgagggctgtcctcgctgctgagaagagccactaactcgtgacctccagcctgccccttgctgccgtgtgctcctgccttcctgatcctctgtagaaaggatttttatcttctgtagagctagccgccctgactgccttcagacctggccctgtagcttttctttttctccaggctgggccgtgagcaggtgggccgttgagttacctctgtgctggatcccgtgcccccacttgcctaccctctgtcctgccttgttattgtaagtgccttcaatactttgcattttgggataataaaaaaggctccctcccctgccaaaaaaaaaaaaaaaaaaa

SEQ ID NO: 224434 - DNA, 1000 bp, Homo Sapiens
aggcatgtagctacaggacatttttaagggcccaggatcgttttttcccagggcaagcagaagagaaaatgttgtatatgtcttttacccggcacattccccttgcctaaatacaagggctggagtctgcacgggacctattagagtattttccacaatgatgatgatttcagcagggatgacgtcatcatcacattcagggctattttttcccccacaaacccaagggcaggggccactcttagctaaatccctccccgtgactgcaatagaaccctctggggagctcaggaaggggtgtgctgagttctataatataagctgccatatattttgtagacaagtatggctcctccatatctccctcttccctaggagaggagtgtgaagcaaggagcttagataagacaccccctcaaacccattccctctccaggagacctaccctccacaggcacaggtccccagatgagaagtctgctaccctcatttctcatctttttactaaactcagaggcagtgacagcagtcagggacagacatacatttctcataccttccccacatctgagagatgacagggaaaactgcaaagctcggtgctccctttggagattttttaatccttttttattccataagaagtcgtttttagggagaacgggaattcagacaagctgcatttcagaaatgctgtcataatggtttttaacaccttttactcttcttactggtgctattttgtagaataaggaacaacgttgacaagttttgtggggctttttatacactttttaaaatctcaaacttctatttttatgtttaacgttttcattaaaattttttttgtaactggagccacgacgtaacaaatatggggaaaaaactgtgccttgtttcaacagtttttgctaatttttaggctgaaagatgacggatgcctagagtttaccttatgtttaattaaaatcagtatttgtctaaaaaaaaaaaaaaaaaa

SEQ ID NO: 224435 - DNA, 1000 bp, Homo Sapiens; identical to SEQ ID NO: 118850

SEQ ID NO: 224436 - DNA, 1000 bp, Homo Sapiens
gaggcatcttgacttagttgctgggagcctgtgttggaacttatttgttggagaaatgtcttcagagtcagaaaaggataaagagagactgattcaagctgccaaaatgttcttctttcatgtacaagatcttgcttctgtcataaacacactgactgaattgtttagccgcagtatgaatactcaaatccttttgatggctgtgagaaacaatagttacattaaggatttttttgagcaaatgctcaaaatttttaaggagatgcaatctgtagtggatgcaagacatgacaaaattcaaaaggagtctttatgttccaaggttgcaatggccatgtgctctgtggttcagaagagtaccaatgtagaggagttgcatcagtcagctaaagaagtattcaaaagtgcccatacgccagtcatcatctctgtgctaaacagcagtaacatccttgggagtctggaatcttctctttcacacttgatgaaattccccatcatgaatcttcaattaagtgacttctatacagaagacaccaaagagcaatcagatgtcaccacatctgagagaaccagaagtcctccaggttcttccaaaaccactatgatagacaccttgaaaaaactgcaggatgtactaaaaactgaggattccaaaaatcccacaaagtcagcagcagatttgttggaacaaattgtcaaggctatgggaccaatcttagagatcctccaaaaagcgataaagactatggaaatgaatatttctgtgtttaagaaagccagtgacaagtagggatgcaacagaaatgttcatttctgtcagaaaactacttaaaatcttatggtttttcatagtagtttctaagatcttttggtgccaagcatgtgctatgttagaacataagtacacaaaagtcatctggcaaaacatttacctgtagttttgctttattaaaataaaaagaaataattaaaaaaaaaaaaaaaaaaaaaaaaaaaa

SEQ ID NO: 224437 - DNA, 1000 bp, Homo Sapiens
gccggacgtgagcttgggcgacctggagaagggcgcggaggccgtggagttctttgagctgctggggcccgactacggcgccggcacggaggcggcagtcttgcttgccgccgagcctctcgacgtgttccccgccggagcctccgtactgcggggacccccggagctggagcccggcctctttgagccgccgccggcagtggtgggaaacctactgtaccccgagccctggagcgtcccgggctgctccccgaccaaaaagagccccctgactgccccccgcggcggcttgaccttgaacgagcccttgagccccctgtaccccgccgctgcggattctcccggcggggaggacgggcggggccatttggcctctttcgcccccttctttccagactgcgccctgcccccgccgccgccgccccatcaggtgtcctacgattacagcgcgggctacagccgcaccgcctattccagcctttggagatccgacggggtttgggaaggggcgccgggggaggagggggcgcaccgggactgacttcgaggcacgcttcccttcattagagacggctgtggagagcgccgcgcctccgtgggtttctcctaaatctgaagaacgatgggaaaatgcacgtggagatgaaaccagatttttaaaaattcaattaataaaagcaacttcagaaaaaagagatgaagacgagttggggattgtttaatcacaacctcaagtgttaaaacaaaaacaaacaaacacgtttgtaggttcttactggaccagaggagtcaagaaaccaagatggtttggggtatggggtggggacggcaaaaggggtaagagctggcttctgtagccacctgtcccttctatttttcagcgaaggtcagtgtatttagtgtaattaccccttctaaacagtgtcctagtccctcccttccctctccttgagtgcattttgaattaaagcctatattgaaaagaaaaaaaaaaaaaaaa

SEQ ID NO: 224438 - DNA, 1000 bp, Homo Sapiens
cgacagcggcgatgctggcagctccggcccctggtggaaatcgctcaccaacagcagaaagaaaagcaaggaagccgcagtgggggtgccgcctcccgcccagcccgctcccggggagcccacgccacctgcgccgcccagcccggactggaccagcagctcccgggagaaccagcaccccaatctcctcgggggcgccggcgagccccccaaaccagacaagttatacggggacaaatccggcagcagccgccgcaatttgaagatctcgcgctccggccgctttaaggagaagaggaaagtgcgcgccacgctgctcccggaggcgggcaggtccccggaggaggcaggctttcctggtgacccccacgaggacaagcagtagccccaatagcctgcgcgctccaggactgcctacccagcactaccccaaacccccagttccaaacccgagacttcaggcccgcccccttacgcgttgtctcattccaccaaattcagaatatttacacaatgccttcatgattttatttttctggaaattgaagtgtcaattgggttctcaatatttcatgactccaaggatgcattaaatatttatttgtggtaagagaagatacctgccgcggaggagggtggcataattatttttttttcaaaaagctattctggggccctggccccctggctcctgtcacagctcagcttgaactctgtagcctctcaaatgaagaaggtggctgttatttaggactctgtggaaagcaaatcacagtgctgtttttaatgcctgagaaatgcactttaggggtagacttataccttaagtgaaggagtgggggaggaagaagcattcttaagtagaagcattttaaaataaggcaggattgcttttaatgttaaactacaaaactgtacagcctattttagtgtggactattaaaacccttgcactgtaaggaaaaaaaaaaaaaaaaaaaaaaaaaaaaaaaaaaaaaaa

SEQ ID NO: 224439 - DNA, 1000 bp, Homo Sapiens; identical to SEQ ID NO: 118851

SEQ ID NO: 224440 - DNA, 1000 bp, Homo Sapiens; identical to SEQ ID NO: 118852

SEQ ID NO: 224441 - DNA, 1000 bp, Homo Sapiens; identical to SEQ ID NO: 118853

SEQ ID NO: 224442 - DNA, 1000 bp, Homo Sapiens
ggctatgggcattgcctgcctgatgccagcaccacctgggctgggccctgggcttggctcgagttctcctgctggtgaggctccggatctcaggagcagccctgagtctgcttcccaggctgcccctgccaggcctgcagcctccccagccagggctgctctctgctgtccccattcagtgccctggcccctgcattcatgccccccacaccccctcaggccctgtgcctggactttggggctggcagctgaagccttgagatcctgggccagctgccggcacacagctaggcagactctcccaccaggtgcccctgcccaggcctcctaatcgggggcagacaggcagggagggtgtggctgggctgggctgggcggggcggcctggggcaggggtgtggcccctaaatgtccccaacctcagagggacctagagtcctgagcctccagtagcttctctgggcctggcagaggtaagggggaggcaaccctggagtgtctggaggcccatggctggctgaaccctggatgccttttcttccgcgtccccatgaatgaaagctgtctgggccttcattctgcagacagggacaaacagctccatgctgtttgtcctcccagtgcagccgtgctgggagggtctgggggagcttcctacaaggagagactcctgctgctttggaaaactgagaaaaaataggggtctaaccctctcctcccattttacaagtggggaaatgaggcgtgaaaggagaggcgtctgggttactccgtgggtctggggtccagggaagggcctgtatgggggagggagctgggaggggacggtgtctggctctacccctgtggggtggggaggtggggctcccctgtatcacaggacatcccccctgagaggtccctcatatgtctgggtcctgtgggtgggggactaactgcgcaatgtagttaggtgctcaataaacggagttgccgctgaaaaaaaaaaaaaaaaaaaaaa

SEQ ID NO: 224443 - DNA, 1000 bp, Homo Sapiens; identical to SEQ ID NO: 118857

SEQ ID NO: 224444 - DNA, 1000 bp, Homo Sapiens
gccagatgctgggcaggaaaccccagcggcagatgggcctgtgtgcacccaacgtgatgctatgcatgtctgaccgacgatccctcgaccagaatcagattcaggagctcagtttctttttcacttgggtctctggattcctgtcatagggaaggtatatcaggaggggaagaggcctttctagaattttctttgagcaggtttacaatttagcttacatttttcgactgtgaacgtgaataggctgctttttgctttcttctttccagaccccacagtagagcacttttcacttatttgggggaggcttcaggggactgttctcaccttaactcagccagaaagatgccctagttgtgatcaaaggtaactcgaggtggagggtagccctggggcccctcgacatcaccgtcattgatggagcctgaaccgtgtgctcctcggcagatgctgttgttgttacttccctccaagaggctggaaaagggctcagagctgctgagcaggaaccggagggtgacccatttcaggaggtgccggtaccagcctgactaggtacaggcaagcttgtgtgggcccaacaggcccttggtagagctggtgccagatgtgggctcagatcctgggcatgatgggccgagccacctcggatcccactgattggccagccgagcgagaaccaggctgctgcatggcactgaccgccgcttccagcttcctctgagccgcagggcctgctacgcgggcaagcgtgctgcctctcttctgtgtcgttttgttgccaaggcagaatgaaaagtccttaaccgtggactcttcctttatcccctcctttaccccacatatgcaatgacttttaattttcacttttgtagtttaatcctttgtattacaacatgaaatatagttgcatatatggacaccgacttgggaggacaggtcctgaatgtcctttctccagtgtaacatgttttactcacaaataaaattctttcagcaa

SEQ ID NO: 224445 - DNA, 1000 bp, Homo Sapiens; identical to SEQ ID NO: 118859

SEQ ID NO: 224446 - DNA, 411 bp, Homo Sapiens
atgtggtcgcggttggtgtggctgggccttcgggcccctctgggcgggcgccagggcttcacctccaaggcggatcctcagggcagtggccggatcacggctgcggtgatcgagcacctggagcgtctagcgcttgtggacttcggcagccgcgaggcagtggcgcgactggagaaagctatcgccttcgccgaccggctacgcgccgtggacacagacggggtggagcccatggaatcggtcctggaggacagatgtctatacctgagatccgacaatgtggtagaaggcaactgtgctgatgaattactacaaaactcccatcgcgtcgtggaggagtactttgtggcccccccaggtaatatctctttgccaaagctggatgaacaagagccattcccacacagctga

SEQ ID NO: 224447 - DNA, 1000 bp, Homo Sapiens
atcttcacaactgttgtaaaatttgtcaaatcatataagaaaactgattctcagtgaaattttgtgattaagaggacatgctaatattttgtaaagctgggaccagaacccaagtactggtacttgctttgtgtcctggttactatgtatgttgccagctagtggaaataacctaccaattgttttttctaggagataggattgatttgcaactgatattccttttgcttggtagtgttttatgactctgctgcagtttgtggaaatgctggacttggctcagtgctataaattgtagccaggaaataagaagagcttacacagagtcgggggatcttaattagacatgctgtaaccagtggagctattcagcgtgcttcaagtgaagagtgcagaaatagtgatgccatcttagattttcctacactagtatcttctagatctctttttatcatatatgacattaaggctacagaagttttgtgcattaatcttaattcatatttattaatttcaagggaatattgaaaggttttaaaatggcatacagataatggaaaataagctttatgtttcaagaagggcagactcacgaattttttagaaaacagtgcttcttaatgatatgctattatacttattagttatgtgcaagctttgtatattcttatatttatatataaatataaaaatttgttaaaggcacgtatagttaagagagttttattttaataaggtcatattgtttttactatgtttaaaaaactttacttctgaaaggaacataattatatctaggtcactagaacgtcattgtgttttttgttggttgccacagcttggggaaaaatagaaaaaaattaatgactgtatttgaatattttgtaatgcactgctatttattatatatatcaacagtagttcaaggtgccatcttaaattaattgcatcttcattaggaaaaataaaaagcataaaacacaaaaaaaaaaaaaaaaaa

SEQ ID NO: 224448 - DNA, 1000 bp, Homo Sapiens; identical to SEQ ID NO: 118861

SEQ ID NO: 224449 - DNA, 1000 bp, Homo Sapiens
gaattctccttctgtccagcaaatactctaatgatggttaaacatggcacctactcagcaatgccttcctggaccacaacccctatccccctgccccaccctcctcattaaaaacaaatacttctactgtttgggtgtgtgatagggttctcaatgcagatctcccttttctagttagctatattcttgactgcatccgctaaaaatgttaaagcttcttgagagacagacatgccagattttcttggtatctcccataatacgacctacagtccatggtctacagatgttttaaatagaattgctattctcgatacatacaaagacgtaattgctgacccacaatcagtaacatccatattgagagatttttcaaaggatggtgaccctgcttgtatttatttaccttggtattttttcttgcatccttctgtgattcaaaaaagtaaaatgtggctttctgaaatgatggataagagtctacatcttctagaaaaaatacataaaggagtagttaagctctgtaaatgtgccacgagctccaacacgaccatcgtagggtgaagcccacgttttcttccatggcctcaaaggccctagaacttgcctacctttctggccttacctcctagctacttatccatctcttgaactttatactcttgtataaatttctaactttcagaaaatgccatactctgttttggcaccacacatgtatatttccccctggtacacttggaagactcttatccatctgtgaaaccctatgttgtcatcacttggtccatgaaatattacctggccaatatcccaccatcacctcaaacccaatcaccccctcctctgtatgctgtcacacctatattattaaacttatcacattgcattgtaattacttcctgacctttgtatctactcttttagtaactgatgtatatatctgaaaggagagattgtttcattgtgcaatcaataaatgtttgataaaataaagccc

SEQ ID NO: 224450 - DNA, 1000 bp, Homo Sapiens
gcacagctcagcctccttcaacgagcagactaaggagtaaaggtctggaccccacatgctgggcccgcctcagctcctggcagaagctgtcgtgcctgagaccccctctgctccctccagggtagaagactgagggagcacaggagaagccacaagggaccatggctcattcctccttgctgggtgctcaggcaactcacataaatctctgagtctcaatttgtttatctgtcctgtgggggtgagatgtgccttgccccctgtatcacagtgtggttttgaggaccagaagctgtgcttaaatccagtagctgttgtcaatatgcatttatttacttctttgacaagtttatttttgcgtatctactatgtacgatgcattgaagtccagtgacaaacaaaacacagggactctgccctcctggagccgacatctggtgagggagagacgcagactctagacagatatttccaaatagcaggcagcacagacagggcctagcctggagagggtggacaagatgtcctctcagggtcttcaatggccaagtccaagcccactgcagaatctttctgtctacccgtaagtatcctttcctgagttccaggcaaagctggggatgttagcctatgactgtcatctgacttggaaggtacacctaggggccggggggaggtcagcaggggagtttgggagccacttctccccccacgtggcactggagtgtgaactggctcattctggacaccagcatggagccagcacgggaacaggggggcagcctagagcacaagctctatctgtgtccttcagagctcctgggaaacatgatgcgccctcatgggaatggcattttgcatatcacacaggctgtcctgggagtcaggcagactggattgtcacgtgcggtgtgcatgcagcagcttgtgcactgcagtggacctgtggaccatttctaaaggtgcacaacaaataataaatgtgtccttctttgttttt

SEQ ID NO: 224451 - DNA, 1000 bp, Homo Sapiens
actccagcggtggtgctctacctgcacgctgttgccaagtccaagctaccatactcctgcctgagctatgacaacagcctcctcactgatctcccctttcttccctttgcctcctccagctcatttttcacagtgtagaatgacattttgtttgtttgttttgttttgtttgagatggagtctcgctctgttgcccagggtggagtgcagcggtgcgatctcggctcactgcaacctccacctcccgggttcaagcggattctcgtgcctcagcctcctgagtagctgggattacaggcatgcaccaccatgcccggataatttttgtatttttagtagagatggggtttcactatgttggccaggctggtctcgaacacctgacctcgtggtccacccgcctcggcctcccaaagcactgggattacaggcgtgagccacccggcctggcctagaatgacttttaaaagatcaaattaaatcaggtcactcctttgcttacaacgcagtgcgtttagaggtacaccccatgtctccacagggcatacagcatccgatttaatctggatccattccggcgccttcctctcccagtcacccagagggccccaaccccggcggccctttcttcctcaaatgtcctcggctctataccgtgcctgggtcttttctctttctctctgcctggaagattccttctttccccttttgtcttgcccactcctgtttacccttcaagtttcaagttcatgtcactgtctcagagaggttttcctgtgctcgccctgtttctctcaggaagccttgctcttttccatcatgcctctaatcacagcttataatcggatatttatttctgtgtctacagtcttgccctgccagactgtatgccccatgtgggcaggcgctcatgattgtttctgattgtttcacgcatgctgctaacccagagcctgggcccaaagctagttagtactcaataaacaatgcattgaatgag

SEQ ID NO: 224452 - DNA, 1000 bp, Homo Sapiens
cacagagatccagcgtgagattggcatcagcaaccccctgcacaggctgaagctgaggctggccatccaggagatcatgtcgctgaccagcccgtctgccccgcccacatctagaacgacactcgcctatggggacatgaaccacgagtggatcggcaacgagtggctccccagcctgggcctcccccagtaccgcagctacttcatggagtgccttgtagacgccaggatgctggaccacttgaccaagaaagaccttcgagggcagctgaaaatggtcgacagttttcacagaaacagtttccagtgtggaattatgtgcctgagaaggttaaattatgaccggaaagaactggaaagaaaaagagaagaaagtcagagtgaaataaaagacgtgcttgtttggagcaatgatcgagtgattcgctggatcctgtcaattggccttaaagaatatgcaaacaatcttatagagagtggtgttcacggagcacttctggccttagatgaaaccttcgacttcagtgcactggcactgctgttacagatcccgacgcagaacacacaggctcgtgctgtcttggaaagagaatttaacaaccttttggtcatggggactgatagaaggtttgatgaagatgatgataaaagctttaggagagcaccttcatggagaaaaaagtttagaccaaaggacattcgtggcttagctgctgggtcagcagagactctccctgcaaacttccgggtgacttcttctatgtcttccccctctatgcagccaaagaagatgcagatggacggtatgtgatgggtcacactaacctgtcacttgttgggagcatgagcagctttctgtctggaacattaataatgatctaaaacggcctatttaatatgttacaaggcacttgagtatggttgcatgtccaaatataaatgtttttaaattaactctaacatttgtttataaaagtttaaccataataatagaattttt

SEQ ID NO: 224453 - DNA, 1000 bp, Homo Sapiens; identical to SEQ ID NO: 118862

SEQ ID NO: 224454 - DNA, 971 bp, Homo Sapiens
gattcctgcagggagggaggagagaagggcggcagtgggagggggaggtacctggaactgggagtgatgtcagctcccagctcggtgcctgcccggattcctgacatggtgtagtgcaggcagggtggggaaaggacggggaaggactcgtgtgctgcgagctggcggccgggccggagtgctggggctttgaactccgagaggaggtggaccagaacttttggaactagtgccggcggctctccaccccccagtataaaagaacgtgtggatcactttgctgagtacatccaagatttgaagaactgaaataaatcagctttaaacctgctttttaaaaatatctgggttggaatttgcccctgacaaataataaaatgatgagtgatgcaagtgacatgttggctgcagcgttggagcagatggatggtatcatagcaggttctaaggctctggaatattccaatgggatttttgattgccaatctcccacctctccattcatgggaagtttgcgagctctgcaccttgtggaagacctgcgtggattgttagagatgatggaaacagatgagaaagaaggcttgagatgccagatcccagattcaacagcagaaacgcttgttgaatggcttcagagtcaaatgacaaatggacacctaccagggaacggagatgtgtatcaagaaaggctggcacgtttagaaaatgataaagaatccctcgttcttcaggtaagtgtgttaacagaccaggtggaggctcagggagagaagattcgagatttggagttttgtcttgaagagcacagagagaaggtgaatgccacagaagaaatgctgcagcaggtatgtgcagaggccagaaccaagatgggatttccctgctgaactatgtgagatgctgcatttctatgttgtgtttgctctgatgcagcagtaagtttcttgattcatttagaccagcacatt

SEQ ID NO: 224455 - DNA, 1000 bp, Homo Sapiens
cgcccactgattcccataaattaactccaatggggattgtgtgtctgctgtctcgtgctgtttattcttgcttcttgttgtaaattgcagtacgaacttaagaaaatgagactgagcaatctcatggttcttggacatgtctcaagcagagtaaatggtaattcagtaatcagagagaaagataccaaggaatgctttttctggcctattcatttatttttgggtgatgaatttacagtatctaagttttcaaaatgtaaaatagcttcaagatgttagttatctgaaaatgttgctcagccagccagtttggccttgactctcttaagaataacagtgaaatatatactcctcaagttgcctccaaaaatgttgcctctaccatggtgactaccccatggaacatttagaaacaaaactgacttcaggcatcatattattttaaatgttactattacgtcttcttctgcctatacttaaaaataacttgataaatgacttggactgatgttactctggagttatcacaaagaaaatgttgtttggtctttaaagagcatgtgtattgtatcatcccaaacgtaaatcctacatttatataagatgggcaagaagctacttggtcattagagagggagacaccagctctttggttgtttttggatataactttacaaaataagtaagatgttaatttagaaatttgagaaattaatgctctaatactgagtttttatttaaaaattattttttcttcccctcaacaatgaagcaagcttagctgtcaagggaaactttttacaaatctgaaaaaaacaatctatgactttggtttaaggctcactgatacttttaggctaaattggttttaatatatttcttctattctaaaaacctgaactcagtcacttaaaggctatgaaatttaaaaaaaaagtcgatgtgaaagtttcttttgaacactaaaataaaatatgtgcagataaaaaaaaaaaaaaaa

SEQ ID NO: 224456 - DNA, 1000 bp, Homo Sapiens
aacacctgtatattcttgtctgcacacgggactcctcagctcgcctccttggaaaaaccaaggacactcccaggctgagtctcctcttggtgattctgggcgtcatcttcatgaatggcaaccgtgccagcgaggctgtcctctgggaggcactacgcaagatgggactgcgccctggggtgaggcacccattcctcggcgatctgaggaagctcatcacagatgactttgtgaagcagaagtacctggaatacaagaagatccccaacagcaacccacctgagtatgaattcctctggggcctgcgagcccgccatgagaccagcaagatgagggtcctgagattcatcgcccagaatcagaaccgagacccccgggaatggaaggctcatttcttggaggctgtggatgatgctttcaagacaatggatgtggatatggccgaggaacatgccagggcccagatgagggcccagatgaatatcggggatgaagcgctgattggacggtggagctgggatgacatacaagtcgagctcctgacctgggatgaggacggagattttggcgatgcctgggccaggatcccctttgctttctgggccagataccatcagtacattctgaatagcaaccgtgccaacaggagggccacgtggagagctggcgtcagcagtggcaccaatggaggggccagcaccagcgtcctagatggccccagcaccagctccaccatccggaccagaaatgctgccagagctggcgccagcttcttctcctggatccagcaccgttgacgaactgcagcgatcttactggccaagccagagcgcctcctctcagattccttctcgacacagcaccctaggcggcttcttcctgtcagtcggaggtggcatgcaagatgaagctctctttgctcttcctgctttcattttgtgcttttccttgtgttttcatgttttgggtatcagtgttacattaaagttgcaaaattaaa

SEQ ID NO: 224457 - DNA, 1000 bp, Homo Sapiens
cccactgctggagtgcgagtgggaatcagagcctcctgaagcctctgggaactcctcctgtggccaccaccaaaggatgaggaatctgagttgccaacttcaggacgacacctggcttgccacccacagtgcaccacaggccaacctacgcccttcatcacttggttctgttttaatcgactggccccctgtcccacctctccagtgagcctccttcaactccttggtcccctgttgtctgggtcaacatttgccgagacgccttggctggcaccctctggggtcccccttttctcccaggcaggtcatcttttctgggagatgcttcccctgccatccccaaatagctaggatcacactccaagtatgggcagtgatggcgctctgggggccacagtgggctatctaggccctccctcacctgaggcccagagtggacacagctgttaatttccactggctatgccacttcagagtctttcatgccagcgtttgagctcctctgggtaaaatcttccctttgttgactggccttcacagccatggctggtgacaacagaggatcgttgagattgagcagcgcttggtgatctctcagcaaacaacccctgcccgtgggccaatctacttgaagttactcggacaaagaccccaaagtggggcaacaactccagagaggctgtgggaatcttcagaagcccccctgtaagagacagacatgagagacaagcatcttctttcccccgcaagtccattttatttccttcttgtgctgctctggaagagaggcagtagcaaagagatgagctcctggatggcattttccagggcaggagaaagtatgagagcctcaggaaaccccatcaaggaccgagtatgtgtctggttccttgggtgggacgattcctgaccacactgtccagctcttgctctcattaaatgctctgtctcccgcggaaaaaaaaaaaaaaaaaaaaaaaaaaaaaaaaaaaaaaaaaaa

SEQ ID NO: 224458 - DNA, 1000 bp, Homo Sapiens
gcaggatgtaattgcccttgtgtgtagttaaaatgagtcatcatctggtcctttgtgaaatggaattcatggtattttctgtaacgttttcctgaagctgtttctggagagccacacatttaaatacagacagctttcctgatcatttgatttattgtgcacctgatttttggtctaaaaggaattattgccacaatatattttatttattctttagattttagccttgtaagttaaagtgctttacatgatgatgtgaaaagctgtttgtccctttactgggtttggggggttgttaaaagatagggaatgaagaatgcaaaatggtttatcgttcaaactgtccactctgatccaaccctgtactgatagtacttcccagtatgatattgtgatgtttcatacaatgcagtgaacataaccaacttgttacctaaataaagaattgataaaaacagtgtgacatattactatttggtatgattcagtttttaatgttattttaaacttcttatatggttggcatatttctgaaaatttaattccaaagaggaattaaccaaactgtacaggacaatattaaccccttctgtactctagaaatatttatactccttttaaaaaaacctgcctttggccgggtgcattggctcacacctgtaatcccagcactttgggaggccaaggcgggtggatcacgaggtcaagagatcgtgaccatcctggccaacacggtgaaaccctgcctctactaaaaatacaaagattagctgggcatggtggtgcttgcctgtaatcccagctgcttgggaggctgaggcagaagaattgcttgaacccaggaggcggaggttgcagtgagctaagatcgcgccactgcactccagcctggcgacagagcgagactccgtctcaaaaaaaaaaaaaaagaaaaaaaaaaacttttccggcagggggcagggtgggggttactggtgcttgaaacagaaataatgtatga

SEQ ID NO: 224459 - DNA, 1000 bp, Homo Sapiens
aagcacaaatttcatctcctagatggacttcctggttttctcttactgcagtaacactggccttcccttctctaattccttaccccagctgcggcatccctgtgttaactcaggatgccaagtggccctcagattacacttctccagatagctgaatgagtctgctttcactgtgactgggacctgaatgacctgcagtcagggcccagagttgggactctatactaccctgggctctggtctgtaggtttgtagtagccaccggtaataagccaagggctaggctcttgtttgagtttatggccacctggaattttcagtcatctcatgatacaggcgggaggggcagaacagatagattacgacaggtttggtttttaaattttccaaccaagtggaaaggcaagttggtcttatagaaagcactactgcacttagtagctatgtgattttgagcaaaccacataatctctctaggtccattttcctaaccacaagataaagatgttacattgtcaaagcttgccgtaggatttggggtgaatgaaaattattccttgctttcatcactacctttatagctctcatcactacctttatagctcatcactgtgcctttttttctttcctaagaaagacatcacatccctctcctctcctcctctgtgctcctgtccctccctccccctagcaaggtccaggcaaagctggagatgaggctgagatccagagtttcctagaacgcaacttaggatggctaggaaagggaagcctgactgctcggtcaggagggtgcagtatctcttgctgggaacacagccagtttccacaatgcctagactgtgtatgtctatttgcacaagattgtcttttcctattttggagtggtcagacattttatttttgttcaagattatctggcgttttagacaaatttgcaaaactgtgcttttattgactttttgaataaactttggtattctgaaaaaaaaaaaaaaaa

SEQ ID NO: 224460 - DNA, 1000 bp, Homo Sapiens
gagaaacaagatgtcagagacttgccagggctgccaaggagccgggacccaggagagggctgctattttgatggtgaccggagctggcgggcagcgggtacgcggtggcaccccgttgtgcccccctttggcttaattaagtgtgctgtctgcacctgcaaggggggcactggagaggtgcactgtgagaaggtgcagtgtccccggctggcctgtgcccagcctgtgcgtgtcaaccccaccgactgctgcaaacagtgtccagtggggtcgggggcccacccccagctgggggaccccatgcaggctgatgggccccggggctgccgttttgctgggcagtggttcccagagagtcagagctggcacccctcagtgcccccttttggagagatgagctgtatcacctgcagatgtggggcaggggtgcctcactgtgagcgggatgactgttcactgccactgtcctgtggctcggggaaggagagtcgatgctgttcccgctgcacggcccaccggcggccagccccagagaccagaactgatccagagctggagaaagaagccgaaggctcttagggagcagccagagggccaagtgaccaagaggatggggcctgagctggggaaggggtggcatcgaggaccttcttgcattctcctgtgggaagcccagtgcctttgctcctctgtcctgcctctactcccacccccactacctctgggaaccacagctccacaagggggagaggcagctgggccagaccgaggtcacagccactccaagtcctgccctgccaccctcggcctctgtcctggaagccccacccctttcctcctgtacataatgtcactggcttgttgggatttttaatttatcttcactcagcaccaagggcccccgacactccactcctgctgcccctgagctgagcagagtcattattggagagttttgtatttattaaaacatttctttttcagtcaaaaaaaaaaaaaa

SEQ ID NO: 224461 - DNA, 943 bp, Homo Sapiens
gcaagaatcggcacgaggctgttgagctgtcctgggctgggtgccttgctctttgactgagactggagacagacggcaacagccacaggcagactgaggtggcaataggaaatctgccgagatgttcagtcaggtgcccaggaccccagcctcaggctgctactacctaaattccatgacacctgagggccaggagatgtacttgcgatttgatcagactacaagacgctctccttacaggatgagccggattctagcacgccatcagctagtgactaaaattcaacaagaaattgaggcaaaagaagcatgtgactggctccgtgctgccgggttcccgcaatacgctcagttatatgaggattcacaatttcccatcaacattgtggctgtcaagaatgatcatgattttcttgaaaaggaccttgtagaacctctttgcagacgactaaatacgttgaacaagtgtgcctcaatgaaacttgatgtgaacttccaaaggaaaaagaagagaaaagggaccctttaaggattcgagatgaccttccctgcctctgtaagagtcaggtggaggagtattctcgagcttagctgcacgcctcactggaagactaacaacccagccaagagcatttcaggagacaggacaccagcacttctgccgcctgcagctcgggctctccactcccgcggcattcccagcggcccattcctgcttccaaacaggcaggcccggccacgtagctccagttaacgtctaaatttctatgtgactatggatgcgttgccttttgcagctgtggattcgtgtgggttcctgtttccagtgtaaagatatggccaaattccgtcttttaaaaaaagcccttctttatggaatgtctggttggcatctgtctctgaggaatatataatttcagtgaagaatgttctcatttttaga

SEQ ID NO: 224462 - DNA, 1000 bp, Homo Sapiens; identical to SEQ ID NO: 118872

SEQ ID NO: 224463 - DNA, 1000 bp, Homo Sapiens
gccactctcagccactgggtgtgtgactctcctcttcatctcagcattctccatcacttcccctccagaaaaacggatggaaggaagccctctgtgacactgcttctgagaagaagcatttccgggaccgatatcatctgtctggtctctgtgaacagcaaggaatcttcttgaccgttcttgggcactggaggctggctaggagttcagtaataaacgtggccttcgtgctgtagggcagagtggatgcagtttgtagctttcagagtgtctcattgagtctagatcattgaaccaacacttaaccaaatgtcccactcccatcacactaggacttgtcattccatgcccctctcctagtggtcatggtttcatatgggcatacaactgctactgaagttatatagccttgaaaactcagtgcaggttgcccttaattttccccaaacccctccatcggcaagtctagttgccctttagcacctaaagatctgcaccccaaaccaatgtcaccataaagagggcacgaagaagagtgggtgtgatcccaacggggttttgtaactgaagaagcccagtgtgagcttctcatcttttcatatacctctaacccccggtactcattgaatcattgatgaggtatctcaattgagatttgcaaggactttgataccatttgaaatggaaaaattttgaacgggctttaacatgtttaagaaatatggatggggccggccacagtggctcacgcctgtaatcccagaactctggaaggctgaggcaggcggatcacctgagatcaggagttcgaggccagcctggccaagatggcaaaaaccccgactctactaaaaatacaaaattagccaggcgtggtggcgtacgcctgtaatcccagctactcaggaggcaggagaatcgcttgagcctgggaggcagaggctgcggtgagccgagatcgtgtcactgcactccagcctgggtgacagagactccattt

SEQ ID NO: 224464 - DNA, 812 bp, Homo Sapiens; identical to SEQ ID NO: 31519

SEQ ID NO: 224465 - DNA, 1000 bp, Homo Sapiens
agatgagattgtgctggattattaagcaccctaaatgccatgacaggtgtccttccaagagacagaagaggagacacagacacagagcaggaggacacgtggagacagaggcagactggagtgatgcggccacaagcccagggacacctggagcccccaggagctgggagaggcaggaaggatcctcccctagagcctccagggggaactggaggatgcgtaagagacccagaacttccacagaaggaggaaaattaacctcctgcttctctagactgttccaaagctgaaccctagaaagcaaagctgatacagaagcatccaggctgcaggagtacaggtcgcaagtgctgagcgtgggccttgggtgtgtctcatgggggaaaaaaaactgtgaaaaacctcagagtagcatcttcacagtaacgcacggacgatccctaaactgccttgtaaacaaaaatgagagcttgagtcagaggaagccgagacaatatccttcctcgacaacgtgcgagaaccctgacgtcccccagcaaaggaagacgttgcaagcaggcaaaatgcgtcgatttttttttttgtcagtatgatgatttttgcagccacttggctatggagagcagccgacaccccctcttacagccgtggatgtttcctggaagctgactcagtctgttcactggttgagctttgagtgaaaagataacacaggtctattgactcacacacatgttttaagatggaaaactttacttctgttcttggcaggacatggagagagggagggattccaaaaagtctcagcctccatcaaggcgtggcagctcatgccggtaatctcagcactttgggaggctcaggcgggaggactgattgagtccgggtgttcaagggccaacctaggcaacacagtgagaactcatctctgtaaaaaataaaaataaaacattaaaaaaaaacatgagctttgaagtgcacagggcaaaaaaaaaaaaaa

SEQ ID NO: 224466 - DNA, 1000 bp, Homo Sapiens
atggtacaggagttagttagaaaggtcttattgattttacttctacttttcactacagttacaggtagaatactgtaggaagtcagtgcaaggtgcatgcttgattgatagatattgattgattgtttttcagtctctggggtcagttttgtggtttctgctttcttgcctaaatcaaagactatttcaagtcaacaacactgaaaactgcttttcgcctccactcttacagctgtgcctaataataattaattaataaacgcacagccctatgtgaacagacaggaatttcttgtgcaatgtggagcaaatggaatggtctccttccgcaagtctttttaatcctcatatctggagtacaagggtagacctctggcttaccacatacactatgctaaagtcatcagccactgctactacatcttgccagaaggtttccctcgccaacaaacagttgaaatttaagggaagaagcaaaagctaaactgtctttgaccctaagatagatagaaagctatttatttgtcttcagtgttcaaggcatgactagtatttctaattagcctaataaattcccacactttctgaagtgaacactaatggtattgtcctactaaaactgtcattgtttctttttttttaactggtcagtcattcacaataagctatgagggtaaataaatatgtgttataacaagtaaaccgtagttgcaagaatataccatgaagattaaagtaggctgggtttcatttccatcttcccacacatctcattgaatttgatggttgacttaattggcaccataactttgtatgatattatacattaacctttatttatgtaaagtaaaatgccttatatattaaagagtaagtgcaataatatgaaatagcctgtacattttaaaaatgttgtcaccaagttatataaatccacatctctgtaaacaaccttttttaagtaattttaaaaaaaataaacactctgcttactacttga

SEQ ID NO: 224467 - DNA, 1000 bp, Homo Sapiens
ggaacctggagatatcattggtgtggctggaaatcattgggatggctattctaaaggtgtcaacaggaaattgggaaggacgggcctatatccctcctacaaagttcgagagaagatagaaacggtcaagtaccccacatatcctgaggctgagaaataaagctcagatggaagagataaacgaccaaactcagttcgaccaaactcagttcaaaccatttcagccaaactgtagatgaagagggctctgatctaacaaaataaggttatatgagtagatactctcagcaccaagagcagctgggaactgacataggcttcaattggtggaattcctctttaacaagggctgcaatgccctcatacccatgcacagtacaataatgtactcacatataacatgcaaacaggttgttttctactttgcccctttcagtatgtccccataagacaaacactgccatattgtgtaatttaagtgacacagacattttgtgtgagacttaaaacatggtgcctatatctgagagacctgtgtgaactattgagaagatcggaacagctccttactctgaggaagttgattcttatttgatggtggtattgtgaccactgaattcactccagtcaacagattcagaatgagaatggacgtttggtttttttttgtttttgtttttgttttttcctttataaggttgtctgtttttttttttttaaataattgcatcagttcattgacctcatcattaataagtgaagaatacatcagaaaataaaatattcactctccattagaaaattttgtaaaacaatgccatgaacaaattctttagtactcaatgtttctggacattctctttgataacaaaaaataaattttaaaaaggaattttgtaaagtttctagaattttatatcattggatgatatgttgatcagccttatgtggaagaactgtgataaaaagaggagctttttagtttttcagcttaaaaaaa

SEQ ID NO: 224468 - DNA, 1000 bp, Homo Sapiens
gtggggatgccttcactgtagctattggggcagagagcgaagtgtactcttggggcaaaggggcgcgaggtcgattgggaaggagggatgaggatgccggactccctcggccagtgcagttggatgagacacacccttacacggtgacttccgtgtcctgttgccatggaaacaccctcctggctgttcgatcggtcacagatgagccggtccccccctgaggcacccggattcacctctggaccaccctgatattgcttctcctctgaatgctctgaaaagtgcaggtgcccaaggcatgacttgcagctgtctcctggattgtgtcatcatggggtatcagggctggcaaaacccctgctctgcttttggccttggatatggaaacctcaaccactttgttctcctaccacctctttgcccttcctaccccttcctcccttcagtcagtgtccccagggtccagcctggctagagttagaaggcagacctagcctttggaagcagggtggcctccagagccttgccataaaaaggctgaaggcagccgggcgcagtggctcacgcctgtaatcccagcactttgggaggctgaggcgggcggatcacgaggtcaggagatcgagaccatcctggctaacgtggtgaaaccccatctctactaaaaatacaaaaaaattagctgggcgtggtggcacgcgcctgtagtcccagctgctcaggaggctgaggcaggagaatggcgtaaacccctccagcctgggcgacagaaccagactccgtctcaaaaaaaaaaaaaaaacaaaaaaggctgaaggcagctgtagctccacacagaccctaccctttcccctagcccagttagaaaataagtctgggccggcggcggtggctcacacctgcataggcagtgctttggccaggaggatcccttgatcccttgtggccaggagttgggagaccagcctggggaccatagcgagaccgctgtctccaccaa

SEQ ID NO: 224469 - DNA, 1000 bp, Homo Sapiens
gtgccacatacatcaggcgagccttgggccaagggcagagcgtaaagtacctgattcccgatgctgtcatcacgtacatcaaggaccatggcctctacaccaagggcagtacctggaaaggcaaaagcacccagagcactgagggcaagacaagctagggaggggggactcagcacccacacctcctccaacaagctcctgctggggagagggctgttaaggtttctgttttactttggtttttgcttctccatttttcatttgctttatttctacagtgattctacttctgaggagtcttctgtcccaggaagagataccttctttacaggagaggaaaggtctaaatcacaaggatagacatttatcaaagaagttaaaatggtgtggcaggtcattaggattaggcagaatctctcagagctgctggacaaggaggtctacttattttgtgtggatggtaattatggcatgcacgctgaatgcagttctgagcatggcagcggcccctgagggtcagatcagaattgcccacaatgtgttttttaactaggaccaggtgcagcatgctagtcttgattggaaagatttgacaggatgctaattactgaacagtgggttttgtcaacgccctggtttcagaatatgaactgaggagtcaaacagttggaaacagcacattgctgatttacactggatcttgccttagaaaccattgtctgcctgcctaaccagcctttcataaaatttaaacaaaactctttctacgtagtgatcctcaagcaatatttttgatacagcaagtgtcaaacttgctatagcataaaagccggggctcctgatttccaggtttctaaaaaggaactgaggtaaaacagatgcctgaccgttttaaaggatcttttttaatgttttatgactgcctgtctgtttgaatactggcaaagggataaataataaattgacatcaaaaagtaaaaaaaaaaaaaaaaaaaaaaaa

SEQ ID NO: 224470 - DNA, 1000 bp, Homo Sapiens
ggtgattcccccttggctctttttggcttacatcaactaatagaatatggaaagaagtctgggaaaaaagcaggagattggtatggaccagctgtggttgctcacattttaagaaaagcagttgaagaagcaaggcatcctgatttacaaggaataactatttatgttgcacaagattgtacagtttacaattctgatgtaattgataaacagagtgcttccatgacttctgataatgcagatgacaaagctgttattattctagttcctgttagacttggtggagaaagaaccaacaccgactacttagaatttgtgaagggtattttaagcctggaatattgtgtgggtattattggtggcaaacctaaacagtcatattactttgctggatttcaagatgacagtttgatttacatggatcctcattactgccaatcttttgtagatgtcagcataaaggatttccctcttgagacattccactgcccttctcccaaaaagatgtcttttcgaaaaatggatcccagctgtacaataggattttactgtcgaaatgttcaggacttcaaacgagcttctgaagaaatcaccaagatgctgaaattttcttctaaggagaaatatcccttatttacttttgtaaatggtcattccagagactatgattttacatctactacaaccaatgaagaagaccttttttcagaggatgaaaagaaacaattaaaaagatttagcacggaagagtttgtcttgctttaaagattagcacatttgtgcttgataagaagaattccattgaaaggggaaaaatgaagagaaacaagtatatctgaaatgtttattttcacaaatatcttaattttatatgttctttaaaaaagaacatttgaaaatataacagttaaagatatttttctaaaagagaaatgatttaatgaatcttgctttctaataaataaattgagtgattctggttgcaaaaaaaaaaaaaaaa

SEQ ID NO: 224471 - DNA, 1000 bp, Homo Sapiens
ggactgggcaaggcccagggattctcaccccttccccagctgggaggagcttgcctgcctggccacagacagtgtatcttctaattggctaaagtgggccttgcccagagtccagctgtgtggcttttatcatgcatgacaaacccctggctttcctgccagatggtaggacatggaccttgacctgggaaagccattactcttgtgtctgctactgccctcccacagtcaccccaatattacaagcactgccccagcggcttgatttcccctctgccttccttctctctgcactcccacaaagccagggccaggctccccatccctacctcccactgcatcagcagtgggtgttcctgcccttcctgagtctaggcagctctgctgctgtgatctgcacaccctccaacctgggcagggactggggggatgcagtgtgtgttagtgcccatgtggcattgtggcactgttgccccccatggcggcatgggcaagatgaccttccattagcttcaagtcttgttctcttgtctgtggtctgtttaatatgtgggtcactagggtatttattctttctcccatccttacactctggatcattgtgcagacttaatcagggttttaacgctttcatttttttttttttttttttttttttgagctcaaagagagttctcattttccctattcaaactaatacccatgccgtgttttttaccttggatttaaagtcaccttaggttggggcaacagattctcactcatgtttaagatcttgttatttcagcttcataagatcaaagaggagtctttcccttttctcttttaccctcaggattctcatcccttacagctgactcttccaggcaatttccatagatctgcagtcctgcctctgccacagtctctctgttgtccccacatctacccaacttcctgtactgttgcccttctgatgttaataaaagcagctgttactcccaaaaaaaaaaaaaaaaaa

SEQ ID NO: 224472 - DNA, 1000 bp, Homo Sapiens
caaaaatacacagatcaccttcagtcttatgtcatttactctttaggacaacctcttgaaaaactaaatcatttctttgaaggtgttgaagctcgcgtggcacagggcataagggaggaggaagtaagttaccaacttgcatttaacaaacaagaacttcgtaaagtcattaaggagtaccctggaaaggaagtaaaaaaaggtctagataacctctacaagaaagttgataaacatttatgtgaagaagagaacttacttcaggtggtgtggcactccatgcaagatgaatttatacgccagtataagcactttgaaggtttgatagctcgctgttatcctggatctggtgttacaatggaattcactattcaggacattctggattattgttccagcattgcacagtcccactaaaccttgtgaaagaagaaaagataactgaatgaagcatttgagtataacagacactataccaaaataccaagcaactgttttgagaacccagacttaaaattttatgtattattaaatgttagataaatgggtagtaccatactacaaatatttaaatgcaaaattaccaacctatatagcagttttatttgccctataggttgcatactaacttaagcattcatgtcaccataaaatgcctttagcatttctcaatgactggatgggaaattttcctttattgcctagctgcttgtgtttgagtggttgtcctatgagcaatgcatttggagttcttcagctttcactacttctctgttgcttgctaatcatgtaactactaaaatactgtacaaaattgttttttcacactaacaaatgtgtatatggagaagagggctcatgtgatgatcatttgtgaacttagatttttgaggattatgtgactagtaataaatgtgaaataaattttcaaaaaagttgacatttgataatatttttaggtctatcatatgctgtcttctgtattaaagcaagttcttac

SEQ ID NO: 224473 - DNA, 1000 bp, Homo Sapiens
agattctgagtgtgtagaatcctgggaactcaacttgaaggtctgtcttccatctggcaccataaaaacatgaacttattgcataaaacttttctagtcagcaagtgcctgatatgccaatagcatacaaactcaatagcaatcatgactgagccaatcactgtttctcagaaaaacaaaacaaaacaaaacaaatgacagtaacccttccccggaaagaaatagaacaatcatggagcctaggagcagagagatgaggaggagttcattgcttcccagcttgtgttatatggctacagcaagtcttcagctgctgcaatgaggaaatgggcatctggaagacaaacagcaactctcagcttgcttcaagaaccagcagataagagatggttaagctgttcttcaccctttcagatgtgacctcttttggactaagcagcaatctgttctcttgctcaaataataaagtgactgaatcagggaggaaaaggttcttgttaaattatttgattgtgtagttgaagtaattataatttatatcaaaacgtttgtcaaagaaacgatgtcaaatatacacttcttgatctcccttctgtttgcggggatcttactatttgatgggtcactgtccccattcttactgatacttttgtcagatatcaccctgtccttaaatcatgatcacttaaatcaggggtcagcaaactttttctgtaaagggccagacgggaaatattttgggctttgcaggccatgcggcctctgtcacatctactcaactctgctgttgacatgcaaaagcagcaatagacaatatgcgtgtaaatgagtgtggctgtaatccaagaaaactttatttacaaaagcaggtggagggctgggtttggcctgcaggctgtagcttgccaatcagtgacttaaattgttgatttttgtttgataaattaaaaataaattgtgtttgaagtataaaaaaaaaaaaaaaaaaaaaaaaaaaaaa

SEQ ID NO: 224474 - DNA, 1000 bp, Homo Sapiens
ttaggccagagtcagatttgagctgagccaggggaggccttggcaacctacttctactcagatttcattgctggatgcggaaggggtaggcccaaaatatatacaggatcttactgtcccttgaagcccagccacaagtgttggagctgcagagagaccccaaaggtagtagattgtgccagatacaaatgggtcccatccagtgcttcatactccttcagtcactatcccagacagtgagccccagatctcctagctctggcttctgtgtcccacacggcctgttcccagcttctctcctggttcccttgttaaggattcatttatccattcagtgtttcctgggcctctgctcagaggcaggtcaccactgggccctgtggatcaatgcaagatgacaaaggctttttttttttttttttttttttttttttttgaggagtttcgctcttgttggctaggctggagtaaaatggtgcgatctcggctcactgcacctccgcctcccaggttcaagcgattttcctgcctcagcctcccgagtagctggggttacaggcatgcaccaccatgcctggctaattttctgtatttttagtagagacggggtttctccatgttggtcaggctggtcttgaactcctgacctcaggtgatctgcccgtctcggcctcccaaagtgctgggattaccggcatgagccactgcgcctggccgacaaaggctttgatatcagaatgaactgtcaagggaggtgctggagagggattaacctgtgctgcctgggaccctcagggtcttaggttggggagtgtgaataggagtttgcagatggagaataggaagggcattccaggcagagggaaacctgtgcagagaccaagaggtgtggaaggaaaagtggggttggggctgggtggtctggattatggcctggatgcaataaagtactgtgacagtagccaaaaaaaaaaaaaaaaaaaaaaaaaaaaaaaaaaaa

SEQ ID NO: 224475 - DNA, 1000 bp, Homo Sapiens
acattcagtacagcactagatattgttaatttcagaagctatgacagccagtgaaattttgggcaaaacctgagacatagtcattcctgacattctgatcagctttttttggggtaatttgtttttcaaacagtcttaacttgtttacaagatttgcttttagctatgaacggatcgtaattccacccagaatgtaatgtttcttgtttgtttgttttgttttgttagggtttttttctcaactttaacacacagttcaactgttcctagtaaaagttcaagatggaggaactagcatgaggcttttttcagtatctcgaagtccaaatgccaaaggaacctcacacactgtttgtaatggtgcaatattttatatcacttttttttaaacatccccaacatctttgtgttctcacacacaggcaatttgcaatgttgcaattgtgttggagaatgaagtccccccacctcccagccacacacacatcctttgttctcatgacagtaggtctgagcaaatgttccaccaagcattttcagtgtctttgaaaagcacgtaacttttcaaaggtggtcttaatttgttgcatatctatcaaggacttattcactcacctttccttttctgccctctatcaattgatttcttcttacctttcatcattcattccttcctttagaaaaactgaagattacccataatctcctcttattacttgagggccttgactatttagtttattttgtttactttacaggttaacacagttgttttgtctgattgcattttattaactgtgaagccgttgaaatgaatatcacttaagcaacgttgctaaatttctatgtgtttgaaatgtgttaatgaaggcactgcttatttgtagtcaccttgaactgacttaacctagaagctgtgccttcttgtgaaaaaaaaaaaaaacaaaaacaaaaaacagcctttaaacaagtttccttagtgtcaaaagttaaaaataaa

SEQ ID NO: 224476 - DNA, 1000 bp, Homo Sapiens; identical to SEQ ID NO: 118878

SEQ ID NO: 224477 - DNA, 1000 bp, Homo Sapiens
tggggtggacagtgacaccatttggaatgagctacactcgtccggtgctgcacgcatggctgttggctgtgtcatcgagctggcttccaaagtggcctcaggagagctgaagaatgggtttgctgttgtgaggccccctggccatcacgctgaagaatccacagccatggggttctgcttttttaattcagttgcaattaccgccaaatacttgagagaccaactaaatataagcaagatattgattgtagatctggatgttcaccatggaaacggtacccagcaggccttttatgctgaccccagcatcctgtacatttcactccatcgctatgatgaagggaactttttccctggcagtggagccccaaatgaggttggaacaggccttggagaagggtacaatataaatattgcctggacaggtggccttgatcctcccatgggagatgttgagtaccttgaagcattcaggaccatcgtgaagcctgtggccaaagagtttgatccagacatggtcttagtatctgctggatttgatgcattggaaggccacacccctcctctaggagggtacaaagtgacggcaaaatgttttggtcatttgacgaagcaattgatgacattggctgatggacgtgtggtgttggctctagaaggaggacatgatctcacagccatctgtgatgcatcagaagcctgtgtaaatgcccttctaggaaatgagctggagccacttgcagaagatattctccaccaaagcccgaatatgaatgctgttatttctttacagaagatcattgaaattcaaagcaagtattggaagtcagtaaggatggtggctgtgccaaggggctgtgctctggctggtgctcagttgcaagaggagacagagaccgtttctgccctggcctccctaacagtggatgtggaacagccctttgctcaggaagacagcagaactgctggtgagcctatggaagaggagccagccttgtga

SEQ ID NO: 224478 - DNA, 1000 bp, Homo Sapiens
cctttaccttcctcaggtaacagtcgtagataccagcttttttttttttttttttaaattggctttggccagtagctaaagtgcaagactgaattaatgagaagatatattaaatgtagtcataggggactgaggagcaagggtggccttgaagaggccaaaggaatgtccatttgctgagtttcccttccttatgtctccagtctggtgccaggtagtggagtaaaaaaggagacagtttatttttttattctatgtgcacacttacagtatacatatatatttatatcacaatttacgaaaccaaaaagttgagtttccaatggaacccttgttttttaataatcgactttttaaatgtgatcaggactataatattgtacagttattatagggcttttggggaaggggaggatagcgagaagatgctctgggggttttgtttttgcttttccttcagggttttatttttgactgttttgttttcttgttggccatttctgtattgctggcatctgtgctaagctttacagtggcaaaaataatgacatgtagcaaagattttcaaacaaaatattttttccttttgtaaaatttcttgtgttgtgtgatcttgattgcggctttatcattcctttccagttcataaacaacaggcacccacaaccagaggaatctatagtttaagctccagacatacaaacataaggcacattgtgtctttaatttcaggaatcagaaatcatagggttctgatcacattgcacgcctcccccctcacttgtcctcctgatcctgacacattctgagtaacatcagcaggaatgctctgaccatgaggtgggggttttggggtgggcgttgcctgggttcttgggagagaggggaagagtcgggacttgaaaaccactagggcacatctggatgccttcccccagtatgtccttttctggattaaaatgagtgaaatttaaactgaaaaaaaaaaaaaaaaaaaaaa

SEQ ID NO: 224479 - DNA, 1000 bp, Homo Sapiens
ctcagacgccgtggttgcaacttataataaagaatgggttgggggaagggggagaaataaaagccaagaagaggaaacaagataataaatgtacaaaacatgaaaattaaaatgaacaatataggaaaataattgtaacaggcataagtgaataacactctgctgtaacgaagaagagctttgtggtgataattttgtatcttggttgcagtggtgcttatacaaatctacacaagtgataaaatgacacagaactatatacacacattgtaccaatttcaatttcctggttttgacattatagtataattatgtaagatggaaccattggggaaaactgggtgaagggtacccaggaccactctgtaccatctttgtaacttcctgtgaatttataataatttcaaaataaaacaagttaaaaaaaaacccactatgctataagttaggccatctaaaacagattattaaagaggttcatgttaaaaggcatttataattatttttaattatctaagttttaatacaagaacgatttccctgcataattttagtacttgaataagtatgcagcagaactccaactatcttttttcctgttttttttaaatttgtaagtaattttataaaatccacctcctccaaaaaagcaataaaaaaaaaacaaactataataagcttttctgattcttttcaaaacattcctggtaagttcctaaagacataatttgcttctatgatgtcaactttcttactaataactggttatcatgacaaatgttaggtttatcatatatagtctaggtgtaatcctcagactatcattttcatctgggttccaatttcttaacttcctaaagaattcatctgtttatacaagtctaccactgccgattgactaaaaaatacattatcccatgcataaaatgtcctattttcatttaaacactttatttttgagtaataaaaatatgtaccacaataaattattgttaattaa

SEQ ID NO: 224480 - DNA, 1000 bp, Homo Sapiens
gagcaacttcattgaatgtaattgtcctcaaattagagaacactgggtggtttgaagggtgtctttgacagttttccaagaagaattaaggtttccaaatgttaattttagcatatgtaattatttgaagccttatttaaatcctattaaagaacataccattataattattatttgcactaatctttgccattgtcagaattgcaaagtgtgtttcaatataaattaacaaccactctcgaaattctatcattttttcattttgcccatttctatcagtgaaatgattctttgcatttgcttagttctccttcagttgtggggtcctgctttgccctctttgatattcctggttcctgtcttactgagagaagttgttaaagctttatacatgttgaccccatctaaagctggggaaaatatacacttgatgaagtaggtgtctttgtatttatttcttttggggtcatagaggtaagcttttttgtaaaatctctactcttcctgagagttttgagaaaaactggcaggaagaacttacaatccccaaatagaagataccacgtctgttcaaaagcaggtattgctatagagcagcacccaggaaatatctgtgggtggcagccttggtatagaggtgtcctgtcttcatgagtgaagttacttgcctgattaggtgctggaaggtattggctccttgttttggtgtggactaatggcaagctggtgtttaagaggtcaggaggcctgctgatctttcaaaggacacccatgatgtctactcatagaaagggcaagtaacgtgttcattttggtcttgaatgtccaaactcaagggttggattttggccaattgaaatcagacatatgcgatcttgggtttttgcatggaaattaatgtaatgcttataaatgaaaaatgaaaacatttcaaccatctaagtcaaacacaaaaataataaaaaaagaaacatactggcctcgaaaaaaaaaaaaaaaa

SEQ ID NO: 224481 - DNA, 1000 bp, Homo Sapiens
ctatgagaagtacggcaccattgtcatccagtacgtcttcccgcccggtgtccagggggctgaacacccaaacccaggagttcggtatcctggcaccacacgggtggcctacctcccggactgccctgagggcaacaaggtgctgaccctgttccgcaaggcgtttgaccagcgtctcaccttcactatcggcacgtccatgaccacagggagaccgaatgtcatcacctggaacgacatccaccacaagaccagctgcacagggggaccccagctgtttgggtacccagaccccacctacctgacccgggtgcaagaggagctgagagcgaagggtatcacagatgactgaaggacatcgcctttgccaaggcccctgctgtctgcctctactaggacccagcagaagcctctttctcctctctgccccctgccccccacaccacacctgtaggggacctgtctgactgggaagggagttccgagagggagggggcaatcccttcccccatcccccactggccaagtgtttcaatgcagtgtgagccactcccttctggcagaggccgacctccaaggctctgttctcccctccccgtgtacatatactcccggtttccctgcccctccattgcccttggctttttctggtatgtgctgtgctccacgaccaagccgagaaaggacctagggtggggaagggagggtctcttgattcctaaccgcccccacatactgctccaccgctgaacttcgggtgccggggaggagaaattgggctgatgtgagctccccgtcacccgccatggagccggctgtgtgtgttcatcagatacagttctcccttaaccttgtcctttctctcctgtgtctcagtctccgtcagtctgtctttctccgctcttctctgacccctgtgaggaacctccttaccctgttctggaatcgctgccagactgtagcttttaatttaataaaaataaagtaaaatatgcaactc

SEQ ID NO: 224482 - DNA, 1000 bp, Homo Sapiens
aacacaatgtgcatgtttcaatgatactgtgcggaaacacacctcatgatcatcttgtgggtttcttttgcccttactggatgactctcagaggacatgacttgacatagtaacattagtaaactgtctttatctttgattattcttttaatttttatttgagctgtttcaatagcataatgaaataaaattttgaattggccaataacatgctttataatcttccagtgaagagtctgatacaaatttacttttggcactgttgtagttccactaacaaatagcacttcagaccttatagaaccatatagatatggccaaggaatagcaggattcactattataatactaattgttaactcattatttaattgaacatttccaaagctctggaaaggcatgcatttgtaggtgcacatgctttaagatttctatccatctttcagagttgaatgtaacaatgtttggtatttaattcttgataattcttaaccaacttttcctgttacaggagagaaagaattgcaaatgccaggcgtctgtccactttagccctcctccaatgctaagaaagagggatggtgacgtatactacagagacgcaaatgaaataccaaacagtcttgaattacaagaaaaaaaggggatttttttttttttctaatttcagacttggctttttacttagaggacattctgatttgctctcagaaacatctgatttggggttaaactaggcggctggaggatgtttacagctttgaggcttcaaataagtttccatatgcagggagtaactttaaacaatgtttgaataattaactgctaagtcttatattttatgtgcatctatttcatcctctgtctctttcttactagaataccatataagaatattttctctgcagtatttatatttatactattttgctatgagtggcctttgtattttattatatgcattaaatagtgtgtgcagaaaaaaaaaaaaaaaaaaaaa

SEQ ID NO: 224483 - DNA, 1000 bp, Homo Sapiens; identical to SEQ ID NO: 118884

SEQ ID NO: 224484 - DNA, 1000 bp, Homo Sapiens
agcagcatgtctggcaaactgagtcgccctcctgcctccagctctctgttgagcagagggaaggcatgggggcaggaagagagctgagcattgatggggatgggggtggtttgggaatagaaacttgttcttgcatgagatggctttggttgtcccagtactccagtctctcccttcccttacctggccccttggtgctccttcagcatttgtgctgtctacctctcactgggtcctggtgggggtcgggctcccttctcctggggtgattgatggcctgagcctggggtcctggtagtagagacccagctggcctggggtctgctttccgacattttgcctctctcactggtcatgtatttattccatatttatatggtctacttcctgtggctgggagcagcagctcctgaaggttccgtgggggtgcggggggttggacaggacactccttcttggaaggcaccaattttcccagccccactcccattacacacacacacacacacacacacacacacacacacacacacacacacacacacacactgattcaggccttgagagtcaagcccaagagctcccttggccctgttccccactccctccactggcctctgctgttcctgtctttgctcacaccctcacagctgctctctggcagaggttggcatagcctaggagcagctgcaattgcacctgagggacaggccctagagtttggtggcccaagtcctgaacccctcttagaccaggtgaggtgcagaggtggttgctgcttccagtttcccttcagacttagctgtgtgaaccccactcctatcctttggccttagttttcccatctgtaaaactcagaaacgcagttggaaagtccttattcatttagtaagcgaatatattataatatgtatagagcgccttttgtgtaagtcactggtcagaatcctcactgagctcccagtccagagagaagccagacaattaaaacagtaatgac

SEQ ID NO: 224485 - DNA, 1000 bp, Homo Sapiens
ctaattaaaggagctctagtaccatgttcttggaaacttatccagtcacctgttacaaataaaaagcattcagaatctctagtccctgaagccgaaagaatggaacccagtctttgtttaatcacagctctaaacagaaaacagttaatatttttcttgctgtcaaatataacaactggcctgatcaacctgatggtagatacattacacagcagtaccttgtgggccttatttgtggtcaatctctatatgttttccaactgtttaattgtatatgtactatatttgcaagataagactgtacaattttggtgatcagcaggagtaggatatataagtatttgggcaatatttaatgaggaatattaattgtaaagaaattgtgcttttggcaacagtgttaaccatattttattataaaatagtttcagtcatctaaacagcagtgatgcttaattatttttttttttgagacagagtcttgctctgttacccaggctggagtgtagtggtgccatctcagctcactgcaacctccacctcccgggttcaagcaattctcctgcctcagcctcctgagtagctggcactgtaggcatgtaccaccatgcccagctaatttttatatttttagtagagatggggttttgccatattggccaggctggtctcaaactcctgaactcaagtgataacacccaccttggcctcccaaagtgctgggattacaggtgtgagccaccacactgggccaatgcttaatattttaatgtatctcaacaataaaaccaagaagaaacaaagccttttgacttgttagaatgtattaagtagtattttaaagaaactttatagttgtgacattgaaagactgttggggtggggggaggaaaatttttactttccatcttaatgtaaccttatgctattctgtatttttactgtatattgcttttacaataaatataaaatgaaatgtttatgttgacatttcagtgtg

SEQ ID NO: 224486 - DNA, 1000 bp, Homo Sapiens; identical to SEQ ID NO: 118886

SEQ ID NO: 224487 - DNA, 1000 bp, Homo Sapiens
tataacttttgcagagaccagaagcaaacaatttgtgggccagtgtcaacacatggaccacactttatatagcactgtaacggaaaatgattctgttaatgtaatgaacatgggaaagaccagccttggcctatctttatgatatatataaataatataattctcataattccacctctgcctatgtggtgtttggcaaaacatgcccctgtgccttggtttttaaaatggtaataacagtaccacctaatagtatttttgtgaggatgaaatgctaataaaagataaaacctttaaaagagtatttggcacacagcattttatcaataaatattgctttatttttttcattggggatacatttagtacattcatgtgagaggaaggccctgtgggtgtaagaaatttgtaaaaactgtccattacctttcactccttatttagattggaataattaactggagataatatccagtaaaatagattaaacttccatttataaagtcagaacctatctctgaaaattaatgtgagaaagaaatctctagatttgatgggtgtgaagattatgagagtaaagttttgaagactcagggatagctgtaatgcttttttctttttataacccaaaaagcaggtatgtcagtcgctttttctgcccacaatgataaattaaaaacagccactatccatttggaaaacttaaaagaataatgaacagttatgttctatctagattcagcaattgttaatatgttgtcacatttggtttgcttatacataatatttacatattttgctgtagtatttgagtataaattgcagatactataacacatcacatctaagaataaaggctgcctcctacttaattgctatataacaattgtccaacctgtctgtgccccagggcagctttgaatgcagtccaacagaaattaaaaaaaaaaaaaaaaaaaaaaaaaaaaaaaaaaaaaaaaaaagaaaaaaaaaaaaaaaa

SEQ ID NO: 224488 - DNA, 1000 bp, Homo Sapiens; identical to SEQ ID NO: 118888

SEQ ID NO: 224489 - DNA, 1000 bp, Homo Sapiens
aaatgcaattactgtcaaaagaaatttcagaaaacataacactttaaagtgaagaagcatgtttattttgaagacaaacataacaaatataaggagcataggagggttgtagtacctttacttgtattacaaatcttattgtacgcattttgtactagagaaaaacactgaagcagttgctcaaactttgttcaacatcagggaatttatattggagaaaaatcctgcaaatgtaatgaatttggaaaaacattttttttcaaaaactacggcgtagaaaacatgaatttatattgaaatgtgtttttgcagatgcagtaagtatgaaaaatatttaatccaaaattgagtctatgtaaatattaaataatttacagtagaaataactaaggcactgacactttagacattacactaaaacagagtgttgagtataaaaaaatctataagttgttagattatttgtaaataactttaaaaggagtagaagattctttggagagttataattacattgaaagtatactttttttcttgaaaaaattatggcttatttgaaaagtaaataatgatgaaattcaactctcaaattactttatttcattcctattgtattcacatgtgaaagcatgtgataaattgttgctgtgtcagatataggagagattcttttttattagatgggcattatttatggttttttctgtggaagagtatgggcattaaaatgtaaggtttatgatgaaaatctaagtggagaggccctgttagtttacttttcatattgagtgatgcatgaggtaggtgtttggagtaatattctgcatcatagagaaaagcatttttaattttactttaaattaaatgtaattaaattactagtgaatcattttactaattgtacttttatgctataaatgcagtacatttgaaaatttttagattatgtataagcttaattttataattaaacatttctttaacaaaaaaaaaaaaaaaa

SEQ ID NO: 224490 - DNA, 1000 bp, Homo Sapiens
tttataaactatacagaaaactgtatttgctgaactaaggattgtattggtgatttctagcaaaaacaaagtgatagaatttttgtctagaatcccaaactggcaacgatagtctccaagggacctggccttgccaagggcctggggcaaggtgtcggcgggacggtgaggaagggggaggcagcaagagtcactttgggggaccaatattcttagatatttagagcatcaccttgtttttatatgcaacacaagcctgtctgccaccctggagcgccctgtcacccctgctgtcgtagctgttggcttcagggtgagaagtgagaagcagcttattgtatatgagggagccaggccccgagggtgagcgagatggagaaggggaaggaaggggctttgggatctggaaaccagcaggccaggcagcatccacagtgttagtccaaagggtcggaccgtgtcgtcagcctagcgtttggtcagtgacggcctggacgggccaaggagactccgggcttgagcccaggcctcccgcacggctcagctgctgaatttttccttgaggctgtttggtgtgtgacccagcaagggccctgtgtgggacagcaggagggaggcgtcgggggccttagcagaaggggaacaatgagggcatttcatgaaccatctcaggcacttctgcatcacggaagacctggccctcccagccgtcctggggatgctcagggtgcaggcagaggctcgggaggccggactcaggggtcagaagcagggactggggcaggcgagcccggacagggaagaggggctccgatcaaagccggccgtgctgctggccgggggcccaggtgggtacaagctcctttgtgctttgcacaaacctgaatcccccaccagagaggatgtgtgtgaggagccagaaacgctgaatccaattaagagagaaaaataataataacaataaatgatcttggacaagaaaaaaaaaaaaaaaaaaaaa

SEQ ID NO: 224491 - DNA, 900 bp, Homo Sapiens
cgcggtcaggccaggccgggtccaattaggggactcacagcctgccccgctgtgcaccccgaggaggcccggcccctgtgtccaatccggaagtcgcagggaagtggggaggtcaggatggtggcgcccgcggctcgggtcttcctccgggcagtgcgcgcggctctcacttccacggtcccggacctgctctgcctcctggcccgaggctccccgcgtggcctcgcgtctggtcgcctacccctcgcggtccactccgcccagcatggacctggatccggggcgccttggttgcgaattgccaggagggccctgagatttgtgttgtcaaaacactggggggatgattgttacctgacaaaccgcctctggcaggacctgaagcctcccagtcacgtcgagaacgggcaggagctcaggttggcgccgccggtgcagtgggcattacaggtgcaagggaaccagttgcaaactgcagtgctgtgcttgaggatggctcctcctgagccggcaggctcccgccaaagaatttagaacgagtctacgtggacacgcaagtttcagcgagcggggatttcctgcgaggccgagcgcgaggaacagccggccccggaggctcgggctcggggtctccccggggacgcggccgactgagaaggccggggcgctcgccgggcgcggcgccgtcctccgtgtcgcggggacggaaggaggcgacgcaggccaggagtcgtgcgcgcgggcggcgagggggcgctgtggcccgtgtctgccggcccgagtcccggcaacggtgggcgcgacccacctcctcccccggcggcttaattcggggaagaagaaaaaacggcatcgaggcatttcaataaaacctaagcgactcctgatccaaaaaaaaaa

SEQ ID NO: 224492 - DNA, 1000 bp, Homo Sapiens
ggtttatagagacctagagatacagcatctatgacttcctttattattctaaaatagtatgataagaattaatagcaataataattattgctactattttttaaaattcacgttccaagcactcttagatgctggaaatttcatttcaaatatgttttaatgtatctctaatgcatttgaagacttattacatggcttacttagagcatttaagattatcacagcctatatggtagattcctttccttcttttttcttttcttaccctttcctccccaaagaaaagatttgctgctgaccattattactgtaagtatatcacatttgtgcttcctggaatgaaaattctgtataaccaggtcctaacagtgatcagacatattacagggaaatagcttgtaggccgggagtggtggcttacacctgtgatcccagcactttgggaggccgaggcaggtggatcacttgaggtcaggagttcgagagcagcctggccaatatgatgaaaccccatctctactaaaaatacaaaaattaggccgggtacagtggctcatgcctataattccagcactttgggaggcagaggtgggcggatcacaaggtcaagagatcaagaccatcctcgccaacagggtgaaaccccacctctattaaaaatacaaaaattagccgggagtggtggtgcgtgcctgtagtcccagctacttgggaggctgaggcaggagaatcgcttgaacctgggaggcagaagttgcagtgagctgagattgtgccactgcactccagcctgggcgacagagcgagacttcgtctcaaacaaacaaaaaaattagccgggcatggtggcaggtgcctgtaatcccagctactcagggggctgaggcaggggaatggcttgaacccaggaggcagaggttgcagtgagccaaggtcataccagtgcactccaggcgggtgacagagcaagactgcgtctcaagaaaaaaaaaaaaaaaaa

SEQ ID NO: 224493 - DNA, 1000 bp, Homo Sapiens
agtccataaaaatggaaccttggaaattaggaatgtgaggctttcagattcagccgactttatctgtgtggcccgaaatgaaggtggagagagcgtgttggtagtacagttagaagtactggaaatgctgagaagaccgacatttagaaatccatttaatgaaaaaatagttgcccagctgggaaagtccacagcattgaattgctctgttgatggtaacccaccacctgaaataatctggattttaccaaatggcacacgattttccaatggaccacaaagttatcagtatctgatagcaagcaatggttcttttatcatttctaaaacaactcgggaggatgcaggaaaatatcgctgtgcagctaggaataaagttggctatattgagaaattagtcatattagaaattggccagaagccagttattcttacctatgcaccagggacagtaaaaggcatcagtggagaatctctatcactgcattgtgtgtctgatggaatccctaagccaaatatcaaatggactatgccaagtggttatgtagtagacaggcctcaaattaatgggaaatacatattgcatgacaatggcaccttagtcattaaagaagcaacagcttatgacagaggaaactatatctgtaaggctcaaaatagtgttggtcatacactgattactgttccagtaatgattgtagcctaccctccccgaattacaaatcgtccacccaggagtattgtcaccaggacaggggcagcctttcagctccactgtgtggccttgggagttcccaagccagaaatcacatgggagatgcctgaccactcccttctctcaacggcaagtaaagagaggacacatggaagtgagcagcttcacttacaaggtaccctagtcattcagaatccccaaacctccgattctgggatatacaaatgcacagcaaagaacccacttggtagtgattatgcagcaacgtatattcaagtaatctga

SEQ ID NO: 224494 - DNA, 1000 bp, Homo Sapiens
gccaggtcaccagcaccaagagtaagtcctcagccgaggtcaaggtcaccattaagaggactctggtggggccccgggggagcagctccagcgagggccttggtgcccagatggaccacgcgggcactgtgagcgtgttcaaaagactgggccgcaggaccttctagcccacctgtgggcggggtgcaggcagcagagcctgcgggcatctgccctggccgccccaggctcctggcttcatcacgcctcccaccagctcctggatgacacagcttgtctccctcgggctctagagctaggcccgagcattcgggggatcaccccatttctcctagcctgggatggtcgtcgcagctggcctggcctgctccaggactccccttctctcatgtcctctgtgctttcttctctggctgtggccttggcagaacccacttttctacctctcccaagtgccagggggcttcttcctctcctacattccccttcttcccctgagcagggtctgctgcctcagaccccagctcatcagcctccctgtccccctcaactaagtgggtgtcacctggtgggcctcccttcccccactccccactgacctccctcactcctctgcgcctccccccactgctgtgacttctctctctccctgtcttcactttgttcatttctcttctgttttctgtccccgtggcaaggcccgactgtccgctgcgtcctgcccgaccctcctgtacctccggcctcccagcggccccctcgtcggcggtggcgtcgagcctgttgagactgttagccgccctctactcccaggctggagggacctctccagaccctgggctgcggctgaggcgcatccgttttcctgccctgggcatctgtctctgaaagtgtatggcgggtggtgggcaaggggcactgggaagggaggccagtgcctagagtgaagacagctgctgttttaatatatttttgtgactttcaaaaaaaaaaaaaaaaa

SEQ ID NO: 224495 - DNA, 1000 bp, Homo Sapiens
gtgagcgctcagcctatgggtttaagcagagggctacagaaaacagggaagagacatacccctgggcttggattcccagagaggaaaccttggggccccagatgtgtcctcctgatctccctgagctattaatggtgtgatgcccgagggctgggcccttgagtctctcctcttctccatcttcactggcttccccagccactcacgttcatgtccttaaatatcacctatactctgccacatcccaaagggatctcaagccttcagctctcccctgaactccatcttaacagcccccatggtttgttcaacatctccacctgtaatcctgtggccaacaccaatgccccaaccttcccccacagctatcttcactctctgccttccccatctcagatactgtcaactccatccttctgtcaggccaaaatccttggagccatcctcaactgctctttttgtcttacatcctgtaccctctttggtctcatgtcctacaatctgcattctggccataatggtcttctctgctgttccttgaacattccaggaacattccccccatcccctcgtggcctcaggactggctgcttcctttggtatgctattctgatacacactaagcaccctccctcacctgttataaaaaattcgctgggaggccaataggctgaaatggctcctgcactttgggttcctaagtcagcaaactgaaactcaactcagagtgaaagtgttgtgtgtaacctaggagcaggaaacttcagcttaaccagtcagaaactaccgactaacctctaacaagagatttatggtcagttaacctctaaatatgaactttccactctaaccaatcaaatagtttctttgtcttgctcccagagacaccttgtaagtgtcccctctggtttcctcggtggtggcgccctgaactgctggcggtctgccactgcctgattgataaaattgctgaatgctcaaataaacctgttaaaattgt

SEQ ID NO: 224496 - DNA, 1000 bp, Homo Sapiens
ggatgtttgagtgtgatgtgtgccacaagttcatgaagacccccgaacagctgctggagcataagaaatgccacactgtccccaccggtgggctcaagtaaggaaactcaggacagtggtgagtttcagactcctctaggtgcccattctgcatttattccaccaaccgccccgctgccatggagtgccacctcaagacccactacaagatggagtacaagtgccggatctgccagacggtgaaggccaaccagctggagctggagacgcacacccgggagcaccgcctgggcaaccactacaagtgcgaccagtgcggctacctgtccaagaccgccaacaagctcatcgagcacgtgcgcgtccacaccggggagcggcccttccactgtgaccagtgcagctacagctgcaagcgcaaggacaatctcaacctgcacaagaagctgaagcacgccccacgccagaccttcagctgcgaagagtgcctgttcaagaccacacaccctttcgtcttcagccgccacgtcaagaagcaccagagtggggactgccccgaggaggacaagaagggcctgtgtccagcccccaaggaaccggccggcccgggggccccgctcctggtggtcgggagctcccggaatctcctgtctcccctgtcagttatgtctgcctcccaggctctgcagaccgtggccctgtcggcagcccacggcagcagctcagagcccaacctggcactcaaggctttggccttcaacggctcccctttgcgctttgacaagtaccggaactcagattttgcccatctcattcccttgacaatgttataccccaagaaccacttggatctcacattccaccctccccgacctcagactgcgcctcccagcatcccctcacccaaacactccttcctggcctatctcggactgagagaaagagcagagactgtctgagggcagccatgttctgtaccaaaaacagagagacaaaagac

SEQ ID NO: 224497 - DNA, 1000 bp, Homo Sapiens
tcaggtggctgctggctgaggagaggccaggccttcccaaggaagaccctgagtaaaatctgcatctgtcctcaccacctggcacagtctctcataacggtcagattttgtatgttcatcctatttattcaggggctcgtactagaaagccacaggagaggtcggcttgtagggactggaaaatcagccccaagcagagcagctgcagggcccctggagccggaaggacactgcacagaacagactgcgttattgttatttttaaataaaaatatacatttgaaaccttaaggctaaacaaaaataaacaaaaaatcctttagaattctttccacaacaatatctctttctgagaaattgttacaaacaaggtcagattttctctgtataacatttgcttttatgaggacaatatcatatgcattatatgcataatatgatattataaatcaaaatgcctgcacccactttagggtatagctattgacttattattaatattatattattattattttgctggaagaaggtcacactaagatataattttttatgttttcagttaacggtatgttttcttctttgcttatttggtttttgtctctgtaccaaatatcttcttgcttaaggtagaaaagtatttgtttacctctatctccagttttttttcttatttgaatgttgaaggtaaaattgatataccaattttaactatttctgatacagctgaaagcactaaactacttcataagaagtagatactcatttttgtaacactatttagggcttttgtggttaattttaaaggaaaccactctttctacaggaaacaagggctcaggattcttcagatgaccttataaaaatgcagtccacagtgctatcaatattgtaacagtaatgactacaataaagccaaaagtccagtgtaaaaaaaaaaaaaaaaaaaaaaaaaaaaaaaaaaaaaaaaaaaaaaaaaaaaagaaaaaaaaaaaaaaaa

SEQ ID NO: 224498 - DNA, 1000 bp, Homo Sapiens
tcagtctaggagatggccaatctgaggaggcttctgaaagcagcagcccagtccctgaggacaggcccactccacccccttccccaggtggagacactccccaccaaaggccaggctcccaaacaggcccttcctcctccagagcatcctcttggggcaactgctggcagaaagactcagaaaatgaccatgtacttggagacacaaggagccctgatgccaagtccacggggacccctcatgcagagaggaaggccaccaggatgtacccagaaagttctacttctgagcaagaagaggcccctttgggctcaaggactccagagcagggggccagtgaaggttatgacctacaagaggaccaggcactcggaagtctcgcccccactgaggcagtgggcagggcagacggctttggccaagatgacttagatttctagacaagatcaagctagaaaacaatcacgagcttgggagctctgtttttattcatattttttctacaaaactgagcaacgttcagtccactggagatgtccatagtacatggacaaagaccaaggacttgccaaggacacagcccatgccatgctgtcctgggactcttaagtccagaagtgtcagagagctctgcggcccgtcccacacgcagtgtgaagaaagggggtgtctgcggatctgcccggttatcggaggtcagcccggctcctatttatttgtctgcagagcccgaaagatggaactgattggaaaggctccagtttagcttttgtttgtgggtttgttttctgctagcaagtgttgctctctgtcttttccctgttgatctcctgttacttttctccttggcttctgttggcactcacctcatttgactttgaggtgctttttttctagtctggaatatatttgatgactctgcagaaatacttgggcaaagcaggtaacttcagagtcattggataaagtttgttctcaactccaaaaaaaaaaaaaaaaa

SEQ ID NO: 224499 - DNA, 1000 bp, Homo Sapiens
cttcagatgacaacctacttaagaacatcgagctgttcgacaagctggccctgcgcttccacgggcggctactcttcctcaaggatgtcctgggggacgagatctgttgctggtctttctacgggcagggccgcaaaatcgccgaggtgtgctgcacctccattgtctatgctacggagaagaagcagaccaaggtggaatttccagaggcccggatcttcgaggagaccctgaacatcctcatctacgagactccccggggcccagacccagccctcctggaggccacagggggagcagctggagctggtggggctggccgcggggaggatgaagagaaccgagagcaccgtgtccgcaggatccatgtccggcgccatatcacccacgacgagcgtcctcatggccaacaaattgtcttcaaggactgacctctgaccctccccctgccttcctcttgccttgggacccagtccctctctctttccctccccttcccagacttttgccccggctctgctggccaagtcgtgggtcctcctctgtcccttcattgcatggcacagctcactttggcccttctccacccatcccaaccccattgctaacaacatggtacattccggccccaccactcagagccttccgaagccaacacttgtccccaccctggccctgcgtccttccctctccagctggttaagagggatttagaattccctttctctttttttagtgcatcgtccatgccaaagtgtgcggcccttcctgacatcaccacagtctgagcagcctcccgcgtcctgcagggtagtccgccccctcctccccaccatcctccctacctccttaactttgtactagactggcctgggcctgcccagctcagcgttatcagtctgtttcatattatttattattttaattttctattaaattattgaaataaagttaagttgagaaaaaaaaaaaaaaaaaaaaaagaaaaaaaaaaaaaaaa

SEQ ID NO: 224500 - DNA, 1000 bp, Homo Sapiens
atggaagatgttcccttgttagagccgctgatatgtaaaaagatagcacatgagagactgactgtactaatatttcttgaagactgtatagtcactgcttgtcaggagggatttatttgcacatggggaaggcctggtaaagtgggctcattgtcatccccaagccaggccagttctccaggtggaactgtagtgtagcgacctcactgctgcgcgcacagtctcccgggacttggactcgagggagtgacgaggaggagctccgagctgcgcctgagccgtgccagccggcggacctcaggcggtggacgtcggcgatagccgtgtggacggtgaccggctcactctgcggcgccgtgctcccgctgctcacccaaagaagttgtttccattttaaaccggtcttttggggctgcagtaaaaaataagaaatggagttttcttgctttttactctaaaattcaatgtaattaaatttcatatatatataatatatacatatatacatagtgtaaaataaaatgtttcttggacaagaaatcccctgaaattcagctgttatagtgcttcactgtttttgcactgatttttctataccttaggtggtcagaagacaaccttgaatgcactcatagagaaaactgttactttctgacgtaatgtaattcaggaagacagacgctgcaatcacagattttaaaaaattgtttgcacttaaaaatagttgaatgctggtggaaagttactttgcagatgggtgtaaggactcatggccctctgaggtgcggcgtgaagatgccctttttacccgttgacgtttattttacgtaaaataaactgttgtttccaatgcaatcaactctgtattatatgtataaatattgtaattctgcaattggggaaaatagttacttcactagtaattttcatcatttaagagtgatatttctaattcacaaaagttaatattaaaactatcttgaatataaaaaaaaaaaaa

SEQ ID NO: 224501 - DNA, 1000 bp, Homo Sapiens
atgttcctcggctccattgtgggttattctagaaatccagtcttaaatctctccgctaaagtggacattccccataaaaattgtccagctgcctggctcttttgcaataacaacctttgattactgaatccctacactcaaactatagtgatatatcagtgtttgagagtgacctctagaaaaaagaaaagtgtttttagaaatgcgtacaagtcacccccaaatcctattgcttatcttgggttaaatttgagagtgattctctgtatataaatatgtgaaatattattatctcaacttagcacacgtgaagcaacatttctttcctacagagaggtgtcatggtaagatttcattccgaattcattgtttcatagagctatgatcaggccatttctgcaagcaatgtatgaccccacctgagcaaccacaaataggctctctgtgaaactacaaaggaagttatgtgtggcatccatgttggtttcgtctgtctgtaatgtgaattccagtatttgtttagtatttccagttgtctcctgctagcaatatgtacagtaacgcgtcaggcttgtgacatttgaataaggaaaaacagagttcctgttaagtgaataactttagcttttacaggggattatgatcaaaagtgattttagtacatcttaaatgatatcttatttctacatggaaagaagttatagaatcttcatagagttctatgagaaaaaatatacttgctatctataaaaaagagaaaaaagaaaaaaaatgagaaaaaagtaagaaaaaaaaaaatcctgtcctaggcttttactcttgatcttcaaaggcacgcagggtttaatggttccttgggttattattttgcagttttgttttttattttgccttaagtaatgatagaagatatatatggccggacacatatgtataaacttttcagcagcatttttaataataaaatatcacagtattttctaaaaaaaaaaaaaaaaaa

SEQ ID NO: 224502 - DNA, 1000 bp, Homo Sapiens; identical to SEQ ID NO: 118903

SEQ ID NO: 224503 - DNA, 1000 bp, Homo Sapiens
caaaggtacattttcaattaaaaagcacacttctacaaaagatttggtttttaaattatggttacacatttcagtaactcatagctgctgtgcaaattggtagaccttataagaaggcacttgtttgtaagccagagaagaaactttaattgcatcctatcagattgttgaggtgggtgtgatagtcttcaggtgcagtgcgttcattcactaacgctcactgtcagtgcccatgtttgctagctgcctccatgtgactagtgagctgctggtgaaagtcgtgtgaaatcctgtacactgtgtatagaacaatgtaattttatgttaattgttattactttaaaacatatctaccatctgattggctggtaccgagagctgtgggtaaaatttgaaaattgtatttagaataagaaattttacattttaaaccctattgtcctttatgcattttcaatgaaatggaatgaaggctaatatgcttgctttatttacttttgtaatcttggattttgtagcttttaaaactagaaaccattgttctaacaaagcaggcaactttattctataaacacaactttattaagcagaatacactgtagatgcttttccccaacgtatctggctggcagtctttgtcgttgttcattctggggataaaggggaactaggctagcagttctaatgtgacattctttaagcatatcttaaaatagtatttaagtaaatggtctaatttctacataattattgcactgaacttttttgtttattaaggtgtttaaataagctcagctaattcaagacactgtagtcacttgtgcatcagtgtgcttgaatttagtagcttacagcattatttatgaaggaaaaaatacataaatatgaagtacctcatgttgaatgttattgtactgtatttttaatgtaacagtgcagatcttgttagacacatgaatgtgtataatcatgttaaatgcaaataaaactagttcataga

SEQ ID NO: 224504 - DNA, 1000 bp, Homo Sapiens; identical to SEQ ID NO: 118905

SEQ ID NO: 224505 - DNA, 1000 bp, Homo Sapiens
gcgctatcccttttgattctgttttaaaattatctcgttaaagatctccaaatttgttccgatgacaagtgaaatttaaatgtgagattgaactgaacaaaccctcatctcatgaaggacggggtgtgtgtgtggcgttgatctttagcctgtctcacaccagttcagaaaacactagacccaggattgaaaaagcaaaccacagcagaaccatccttttgtcattaatttgtctcaaagtgggaaggttttgggggagggggaaatacagggatggtccatgttttcaagagtaggggaatgatgtttaaacacaaaaataaattttttttcatttccagaaacactatttatttatggttttttttttttaattttttctttttgggggtgaaattggcagatgcctgaggtcatagctgtgtcctgggtcactgtggctggtgaggacctcaaggaccccatcaagtgtacacagcagcagcaaaatcaagggatgaccctcctctggggccccctgtcctcagcacattccaggcagctgtgccctgacccacagggacccgtggggatgggaggaggtccaggcctgtgttgccagagctggcagtgtgagctgtaggcagggacggggagggactgtcgctgtgatcagagtgggttaagctgaccaggaacacccatttaacccctttttctttttgctttcatttttataaaggaaaagaggacctgtcagataggcagccccatgctacgtgattctttatgttgtgttgttttgttttgtaaattgtataatttttaaatatctgagttttaaaaaaagaaaaaagtacaaaaaaatcttgttatggccttaagaaggggttagtgcatctttcaggggtcactctgccatggggataaaatagctgtttcacaaacagttttatttaaaaaaacaaaaaacaaaaaaaatcaaaaaatcaaaaaaataataaacttcattttaaccttg

SEQ ID NO: 224506 - DNA, 1000 bp, Homo Sapiens
atcttacagccttgcatccaagggtccttaagccgttgtcttcattgattcatcttcaggcaaattctaatccttgggaatgtaactgcaaacttttgggccttcgagactggctagcatcttcagccattactctaaacatctattgtcagaatcccccatccatgcgtggcagagcattacgttatattaacattacaaattgtgttacatcttcaataaatgtatccagagcttgggctgttgtaaaatctcctcatattcatcacaagactactgcgctaatgatggcctggcataaagtaaccacaaatggcagtcctctggaaaatactgagactgagaacattactttctgggaacgaattcctacttcacctgctggtagattttttcaagagaatgcctttggtaatccattagagactacagcagtgttacctgtgcaaatacaacttactacttctgttaccttgaacttggaaaaaaacagtgctctaccgaatgatgctgcttcaatgtcagggaaaacatctctaatttgtacacaagaagttgagaagttgaatgaggcttttgacattttgctagcttttttcatcttagcttgtgttttaatcatttttttgatctacaaagttgttcagtttaaacaaaaactaaaggcatcagaaaactcaagggaaaatagacttgaatactacagcttttatcagtcagcaaggtataatgtaactgcctcaatttgtaacacttccccaaattctctagaaagtcctggcttggagcagattcgacttcataaacaaattgttcctgaaaatgaggcacaggccattctttttgaacattctgctttataactcaactaaatattgtctataagaaacttcagtgccatggacatgatttaaactgaaacctccttatataattatatactttagttggaaatataatgaattatatgaggttagcattattaaaatatgtttttaat

SEQ ID NO: 224507 - DNA, 1000 bp, Homo Sapiens
gcagcagcgccccccgcaggcccagctcgctgcagagccttttcggcctccccgaggccgcgggcgcccgggactcgcgcgacaaccccctgcgcaagaagaaggccgcgaacttgaacagcatcatccaccgcctggagaaggccgccagccgggaggaacctatcgaatgggagttctgaggggccgcggccctggggcgggcagccaggctgggccgcaagggcctggacggggtcggacggggcaggcgctgcggacaccgtggcctgggcttggcccgcggcctgcaccgaccccgggccggacctgagcccgcagcccagaccccctccacggtccgcggcctgcaccgacccgaggcccagatccaaggccgcggcccagacccactctgcggcccgggccgaccctgcggcctccaccaaccccgcggcccagacccagcccgcggcctggacccctggaccgctttgcgcacttaccgccctgcgggccacagggcaaaatcgccataggccaaggtgcatatagaaaacaaaggagcattaagcccaatctatgtcgtgttttcaaggaagaaaacggaaatgtgtggtcgagcttttttgtaccctgaagtgttttttttattgccctaagtgatttccacaggttctggaataactcttacagctttgccttgtgtcctcttgttccgtgtgggctttaaaagaaaaaaaatcaaacccacatattaaaagggggctttttatctgccatctaatggcttcagagcgataatacactattatcttcttaaaccaggaaaaaataaaagggggggtgggatttttcagaaaaattaaaaaagaaagtttttgtagctgttcagttgccactaagagattgcacagtcaaaacgactctaaacacactagtttggattcctaaatattttcaagaaaagaatcttctcgtttgaaactttgaattaaaataaaacacatttactccacat

SEQ ID NO: 224508 - DNA, 1000 bp, Homo Sapiens
tcatagattaccttacagaccattatggcatttgactagacttcccaaataattttaatatatacttttagacccacagtgaaaccacagaaggtcatattttgtaccttaaaccagtagctctcaaattttagtataaaaacaattcctgggagcgttttttaaaaatcagttgtagacaccaccctcagagattctgattaggtagatctggagtagacccagaaatacacagtttaaagaaaactcccagtggttcaaacatcctgatcatcctaggcaaacattgacaaatactgctctgaatcctgttctatagatattggggggatgggtagagtgggaattttttcctaatcatgtttttaacattttaaaataaaatttaatactaagaaattatggcttatagtatctataaattaacaagaagtatgcaggtgcaaaaaagtggtggaacaaataccaacatccatccaaaatgaaaaagaacaggaaattctgaatagaattgcactcagaacttatattaaaaattccatttggttaatgacattaaatttggtacatttcaaaacttctaggtcctccaaagattgaaagcttaataatctcctacctaaaaagataaaattaattgcaatctaccatatcttaagtataggaaatttggtgtccaacctggagatgattatatatttgaaatatttcctagagaatagtaaccaggttttgtttttaactttaaaacctaattacttttgtgcctctcagccgttgattgtaactttaaagtcccatggttttggagtgttattaatagattttgttatcggtgggcatgcactgcaagaattaagtatctcagactgaaataaaaccgttcataattaaagtattattttgttttgccaacatgaaaactgttataaggaaacaattatgtaaaactgtttaattcacgtttgggaatattgaatgaatccattttaacataaaa

SEQ ID NO: 224509 - DNA, 1000 bp, Homo Sapiens; identical to SEQ ID NO: 118908

SEQ ID NO: 224510 - DNA, 1000 bp, Homo Sapiens
ttgaggtaatttacgtccatggtacctgtgtggtggaattactatatatgatggtgtgctactgtgcaccttgtctcaactccactcttcgtgatagcatgttggtagcttgaaatcagcctggtgggagtattaccatggacactggcaaaagctacagatcccggagagccagtggttaaacatttaccagcataccactgctagtaatcaaggctaactggtccagaaatcgcccaggagaatgaaatggatgttccatttttttctactgacattgactagcatataaaaggtatagaaacagcactaagactttctgaaaatacctaatgaaaattttacatctttttttgtttttgtttttgtttttgagacagagtctcactctgttgccaggctggaatgcagtggcgtcatctcggctcactgcaacctccgcctcccagtttcaagcgattctcctgcctcagcctcccaagtagctgtgactacaggcgcatgccatcacgcacagctaattttttgtatttttagtagagacgggatttcaccgtgttagccaggatggtcttgatctcctgacctcatgatctgcccgtctcggcctcccaaagtgctgggattacaggcgtgagccactgcacccagccaaaaattttacatcttttatagagggaaaaaaactctttataccatggcaaggccttttctttcacaaaaagctgggcctactgaacaattcaagctgtgcagtagtagactgaaagcaggatttgttgaggagttacagctcctgtccagagcaaatcctgtagtgatacaaggagaatgtaaacttgccagcttagacagggatcagtcctgagactgctggcagtagcaaatggctattagagtaactgtataatggttttgcctgcactttctctatgtatatacaaatgtacatgtataaatataaaaattaagtgatcatgaaagaaaaaaaaaaaaaaaa

SEQ ID NO: 224511 - DNA, 1000 bp, Homo Sapiens
taacatccttgaaatattccttccagacaaaagaccgtttgtgttttgtgatggaatatgttaatgggggcgagctgtttttccatttgtcgagagagcgggtgttctctgaggaccgcacacgtttctatggtgcagaaattgtctctgccttggactatctacattccggaaagattgtgtaccgtgatctcaagttggagaatctaatgctggacaaagatggccacataaaaattacagattttggactttgcaaagaagggatcacagatgcagccaccatgaagacattctgtggcactccagaatatctggcaccagaggtgttagaagataatgactatggccgagcagtagactggtggggcctaggggttgtcatgtatgaaatgatgtgtgggaggttacctttctacaaccaggaccatgagaaactttttgaattaatattaatggaagacattaaatttcctcgaacactctcttcagatgcaaaatcattgctttcagggctcttgataaaggatccaaataaacgccttggtggaggaccagatgatgcaaaagaaattatgagacacagtttcttctctggagtaaactggcaagatgtatatgataaaaagcttgtacctccttttaaacctcaagtaacatctgagacagatactagatattttgatgaagaatttacagctcagactattacaataacaccacctgaaaaatgtcagcaatcagattgtggcatgctgggtaactggaaaaaataataaaaatcggcttcctacagccagcagcacagtcacccatggaactgttggctttggattaaatgtggaattgaacgactacccagaagtgttctggaaagaagcgagatgtgtggcctgcctcaccgtcctcacccatcaaaagcaccagcaggcacgttaactcgaattctcacaaggaaaaggccattaaagctcaaggtgcatttcaaactccaggctac

SEQ ID NO: 224512 - DNA, 1000 bp, Homo Sapiens
atgttgtataatcatgtgtttactaacaagttgatgacatggatgtattcataagaccatgtaatattgatgtgattgttgtcgcttgagaaaaaaaggcaacagctgattctttcaacaactgtcacagaatggctgggctgagaacgctgcccagggccctgcagctggcgggagaggtgtctggtgggagcggtgtctggtgcgtcagcctgctgcttcgtgtctcactcgagagttgcttctggtttcacactttttaacccctctgtgctttagcagccgtgaccttgccttcattgcttcatccagtgcaggcctgggttattgaagacaccaaagtgtttctcttccagtttgaaaaccaggcaggtttacacgtgggtttcagtgtatttgcctttgaacccttcaaactaaactttagccttttggctggtgttgaatgtctttagctggggtgacctggagtgacctgggacggtgttgtggtttaccgtctccagcttcagcctttccagaaacccttgtggagggcagtgttggctgcaggtttcatcatattgcagtttgaggtcaccactatttggggaacaagcttgcgtcctgctgaggggcaggattttcagcagagcgtcggtggggctgggccgtcgtggaggtggccccaggagtcatatggccatactcagacacaccttgtgtggcctgctcagagctggatgccacctttaggcaatgtttagagtctattttctaaagttttaagtattttaagaggtattgagactaatgaatataatagttcagtaatttaaatgcttatttattttcagtggaaggatttttattaaaaagaagctaattgacatggaaatgtcagtgaaatttcttacctgcaaggaaagtgaacattttgtatttaagtaaactataatgtgcacattttaataaagaaatctgacatttgaaaaaaaaaaaaaaaaaaaaaaaaaaaaaa

SEQ ID NO: 224513 - DNA, 1000 bp, Homo Sapiens
tggctacattctcatcgttttaattaatgaaacttaaatggcttctcttcttccacatgtcctgtccttgacaagatgggcagtatgacaaaaggtcctggcattctaccatctaacactaggaactgtaaaatactgtttaatattcttcttgtttctcttttatctgtgtatctttgccattctattttctcagtgaatagtatgttttctcccattcactgataaattctctcatttgatgatgatacagggtttttaatttttgcaagattctcaatgcaagcattgttatgtatctagaaattatacctagagaaaaatgaaagtcgtttcaaatttgaaatttgcccttttaagagaatgctgaatgtcatcgcagtatataatcactatataaatgtgctgacttacagttattttagtgtctatatgacatattttgaggaaagttggctgacgttatttaaatttaatatatattctatattttagtgttattgaatattttatcactgagcttttttctttaacctgaattccctgctccatttttcattcatattaatttaaataactccagatttctttcttatagtcattattagtagcagatgagattaataattcacatgtttattaaagatagtggcttagaaattttaagatatattgatataggcccgggcgctgtggctcacacctgtagtcccgcactttgggaggctgaggcgggcagatcacaaggtcgggagttcgagaccagcctggccaatgtggtgagaccccatctctgctaaggacacaaaaattagccaggtgtggtggcgggcgcctgtagtcccagctactcgggaggctgaggcaggaaaatcacttgaacccgggaggtggaggttgcagtgaactgagattgtgccactgcactccagcctgggggacagagtgagactctgtctcaaaaaaaaaaaagaaaaaaaaaggaaaaaaaaaaaaaaaa

SEQ ID NO: 224514 - DNA, 1000 bp, Homo Sapiens
tgtcaataaccatgtggattcatctgaatcatggagaccatggcctatgggagttcctggcccatctttcctccctctgccactacctccttgtggagccccaaccctggaagtgttaccgggcagctgcaaggcgtctccgaaagctgggactccatgattttgaccacttccactcccttgccatccgaggtgacatgcccaatcagattgtgcagatcttgacccaggatcatggcatggaattaatatgttgctttggcaacaccagttgggacagaagccttctgctcttcagggcaaaacaaaccatagagactcatccaatccctgaatcactgatagaaaaagggaaagaaaagaacagattaagtttccagaagcagtgagatgggagggcaagaagaccaagaaagatattgaaagggttttatattgagaattatgttcattctccttaattccttaacaatcaggcagccgcaaaacctggcaggagcttttggtaaaatgtccaaggcacataattgaaagaatcagtatctgttccccattgtttggaacaaatcttgaggagaatgaatctgtggagtgatgagctaggatatctggattgagatggcctaggaaaagtggtcctggttatgggttatggagagggctgcttttggggattatttataaagatcagactaggctagtcttaaaatatgtcagttcctgggctctctgaatcctacctggtttcttcaggcttctggacttgctaggcctgcctttgggcaaaaccttagtaattcaggtctggaatggggcttaggaatctattttctgtttttttgtttgtttgtttttgcattcttctattgtaatatatacataaaatttaccattttaaccgtttttaagtacagtttttcagaacgtggaaatcccatcaaaaattggattaaaaaattaaaagataaattgataatttttttaaaaaaaaaaaaaaaaa

SEQ ID NO: 224515 - DNA, 1000 bp, Homo Sapiens
tttccaaaacagccttttcgcacacatgcaggttgcaccgagaggtctggagctgtggctgagccacctctggcggatgttgagccaggaggttgggcaaaggccggatgctgatgccagcgctggaggtggtgatactgggggcggggaaggcctagaaatactttgagccatggccttgccagtgtcccgtgccctccagtgtcaaagatttggggcactgcccgtcgaaatggaaaggttggtgctcagcctctggagcctcacctgcagggcgtccccagctaacacccatccacgcaccacctccaggacgagaacccttgatgtcaaaaccaagtgcccagtggaggcggtgaagctctcggaaatgctgccacctgtgtgaggccgggtctgaactcgagggagtcggagctcagctgtcggtttaaagagacactgaggggaccgggctgccgccctcagcctgcattcctgtgcgcaatcgattccgcaatgacagcaccttactccttcctgcggcaggctcacccctgcctgtgggatgttgtgagaggaacatgagccagacaaagacttggctcagggctccgtggaacaagccaggatgcacggggagctgggggagcccccagcctggggcagcccagcaggccgctgaacaaacaccccagaagccagcactgtggcagggtgctggggagatgcccctctgagccttcctcccccctcagacctgaatgcactccacagttgggggctgcccctgccactcccctggtaatgcataaaaggggaggggaaggttccctggggcttgagctccctctgtggaggtgaggaggggagattccgttcacatccaggaggggcaaaatgactgatgtatttttatgtatctacacagagagtgcattttctctccagagatgctgtctggttaacaaaggaataacttaagaaattgattgattatcttaataaactgtgcaaaccc

SEQ ID NO: 224516 - DNA, 1000 bp, Homo Sapiens
ataattctgctcattaggatgctttgtagtttttgccttaggccaagcctgaaaactacacgggcttcagagcagggttcaaggtgcaaggtgaggggtacgtcggtgtcatccaaacatccaaaacatcttcagccttgaattcctcatgactctaccctctgtaacattgtgtagcaagcaggcaggcaggagcacattagcacattagaaaagcaatactttttacatggaattttacagtgcactatctttctgttttttaagcaagtgtatacaaatatgtcccattgatatgcatgtctatagatgggaggggatttaagccaaccccctggcaagcattctgtaggggaccctagaagaatcaccgtgcagactggtgaaactgaacaagcaccatttgggagctttgtttcgatggggttgacagagaaatcttaaaatctgacagggtagaagaagcactttggcatcaatgccatatgtacagtcttgactatttctgagtcatctagtggctccaatttgctccagggaaattggaattaattaagaaatttattatctagtaagttgctatgtaataaagaaaaaaaagaaattcaatccaatgacacacaccacatgtatttgggcagagtcagattctctcagctattttgagtctgtggaagaaacaaaaaaaagcttcctcctgaggatgggttattgtcatcaagaagccacctgcatagccgtatccattacctcatggtaattcccggtgctttcccctcatatcccctagaagcaaatatctgttctgaggttttttgggacttctggctgcaataggagcaagggacccaggcagggcagagcaataccttccgaagcttccatattccctggggccagcacatgcaaggtttatatggtcagtagctcacgtgaagtcatctgaatctttcttaaatctgctctcttaaaatctcttatgccaaaaaaaaaaaaaaaa

SEQ ID NO: 224517 - DNA, 1000 bp, Homo Sapiens
ctgccttgttgactagagtggatagttttctgtttaaatgcattggtcttttggctgtttgtaattcacttcagcttatagagaagttgatgaccttggatcatgctgggtatgattggtctttaaaaagcaataatataccaccagcccaaggagaaaacattgttaaaatgaagagtggtggaaatagtgtgttgggaagaataaaaaatttagattggcacttattctaaagtgagctgtttttttcaagaatttactagcatttgctcgtagtatgatttctgacgccagtcatatatactgatgaggggaaggagttactgtgttattctgagttcttataaatgcatattattgaatttcattgcatgactatttgtcaagacttacctggttaggtctccaattaaaagatgtaccacctgtcatcttctaaattgtgttcctttcatttattgggaacagaatctctcaaaagtgctaaactatattaaaaagttttcttaatagatttgtatgtctgatatgtataaccatttactataatatgttgcaaatcattctaatatatgtaaaacaatattatttgtaatgcagttattggtaaaatattatgtaatgttaattttgttcctagctgctaatttttctgccaaaagtattctaattttcaggttgttttaaaggcttttaaaactttttagttaagttttttattcacgtcatttaaattagttttttgctttttttctacctgataatctctttaacaagatgcaacaagacagaattattaaaattaaacctaaagttaagttacagatttaaaggcattatgatattaagcattaaaattggagattaaaatgtacaaaacagggttttccttatgaacaaaccttacagggtaaattgtttttttttctaaatgtcattaaatttatttgtactcagaactgttactaataaaaattaaaaatgcaaaaaaaaaaaaaaa

SEQ ID NO: 224518 - DNA, 1000 bp, Homo Sapiens; identical to SEQ ID NO: 118913

SEQ ID NO: 224519 - DNA, 1000 bp, Homo Sapiens
cctgccggcaggcgccacaagcccagctcctgcgtcccgaaggcttctctaggcccggctcgtgcctcgctgcggcctcttgaggcccagcttttcccttgtggtggcctctccaggcccagaacttcctcaagtcggcctcccccggtccagtggctgcctcccggcctcctctccgggcccagctctttgctcgcgtctgcgcccgtgggcccagctcccgtctccaaacagcctccttcgactcggctcctgcccagctcccggcggccttcgtaggcccgaagcctcctccagtccagctctccagggccgcgtcttgcctcgcctcgcctcccctcaccttgcctcacctcgcagcagcctttccaggcccagctcccgcctcccggcggccttcccctgccacgctcgtgccggcctcccggcagcctccaccagcccggctcctgcctcacgctggcccctctgggcccagctcatgcctcgcggtggcctctccgggcccagctcccacccagcctgacggcgcctcccggccccaagctgccttcctcgatgtggcccaaagtggcccaaagcgtcccaaagtaggcctcgccaggcccacctcctgcccggcgtaggccctgaggggcgcggcccctgccccatactggcctcttttgggccctctcttacaccagcccctgtctcaggattgtctcttcacgcccatcttctgcctcatagtggtcactcaaggcctcgcttttgcctgatgattgcgttttctggttttgctcttgccttgtattcccttcttcgggatacagcttttacgtcttccatggtgaacctcatcaaggagactaaatcttccctggtctgtcatttttttcacttcacaccagagtgccttgggaaaaccccatctcttcttttaaccttgagagtggatttctgacgaattgataataaattttttctctgtggtttcagtaaaaaaaaaaaaaaaaaa

SEQ ID NO: 224520 - DNA, 1000 bp, Homo Sapiens
aagttattaaatgtgaaattgatctgcatcagcttatttataaaagtaatgttatttccaagaaaatgttactcttagcattgattttgtatgttagactttttacattgtttatctaatattatttatgacagtaattttaaaatatattattcataagttcaaggatcccatatagtataagaatataatttcacttgctttgaaagttgatttaattgactgactaaatgaaaatgcctacccactcatataacatacctcaggtctattttaccttacactgaatgttcttaatatgatttggtacctaaagtaattgaaaaaaatgcagtttcctttaatccttgactataagttatactatgttgcgtacatggcaaatcctgcaaatatagattaaaaattaaattagcccattgaaatcctttataattctgtcattttcccaaggaagaatagcattgtacatatgcaatctttattttattctttattgcttatcagagtgagtggatgaaaacatttgtaaggctgcaacataatattaaaatgtgaataaataaatgttctgataaaatagaaaagaaagtaaattacagtgatttccatcatattatcactcttgaattttatcatctataaaatgagagataaaaatatctcactgaattgttacttatatcaatttaaaatttgctagtggtttgaaaataataatgtactgactacatgtatgctgttattgtcagtgtttccttctataaactgttctttggaaaaattaagttatacataaaattcatattaaactttttacagaaagcatacatgataaacagtttatggtacttctcagaatcatttcataataagcaatttatttagcttaagttccaacttactgttcttattataaattgcaaagcaacctgtcttacattcttacattatcttaaaataaatatttctgcccttgaaccaaaaaaaaaaaaaaaaa

SEQ ID NO: 224521 - DNA, 1000 bp, Homo Sapiens; identical to SEQ ID NO: 117558

SEQ ID NO: 224522 - DNA, 1000 bp, Homo Sapiens
agaccatcagcaagtccatactggagagaatccctacaaatgtgatgtgtgtgggaaaggcttcagttggagttcacatcttcaagcccatcagagagtccacacaggagagaaaccatacaaatgtgaagaatgtaggaaaggcttcatctggaactcatatcttcatgttcatcagaggatccacacgggagagaaaccctataaatgtggcatgtgtggtaagagcttcagtcagacttcacatcttcaagcccatcagagagtccatactggagagaaaccatacaaatgttttgtgtgtggtaagggctttagtaagagttcgttgtcttcagattcatcagagagtccatgatggtgatgaatctattaatcatgatgagtgtgataggggtgctcttcaagacttagacttcccattttcctcagaaaatccacacagcacagaatatttataaaatgtcatgttttaagaattcatgagctgagtttttatagttatctgaattccattgaagaaaacctatttttgtatgaatatgaccagtttcaagcagagcccaaaatgtcacagttgtcaagagaacacacaacagagaaaccctataaagaatgatacaatatgtttcaatcagaaccttcacatccaataagcaatatgcaggagtgaagccttcaaaatgataagtaaggtcagaatttagcaaaagtataatgagggacatgacaaaatctgtgtccactagaatctaagctccatgcaggaacattgtttactgctgcatgatcgtgaccttgaacaagtacctaagaaatagtggcttccctggaattgtttaacttgataggaaaaatctatcatatataggacatatatttgaatattttagtgagctcagccccaattcgtcattataattgtactgggaaaaggattcttgcaagaagccttaaaatgaattcaaggaaatgacatttaattaaaacacataaaacc

SEQ ID NO: 224523 - DNA, 1000 bp, Homo Sapiens
gttcgcgtacgtcttccatgatgagttcgtggcctcgatgattaagatcccttcggacaccttcaccatcatccctgactttgatatctactatgtctatggttttagcagtggcaactttgtctactttttgaccctccaacctgagatggtgtctccaccaggctccaccaccaaggagcaggtgtatacatccaagctcgtgaggctttgcaaggaggacacagccttcaactcctatgtagaggtgcccattggctgtgagcgcagtggggtggagtaccgcctgctgcaggctgcctacctgtccaaagcgggggccgtgcttggcaggacccttggagtccatccagatgatgacctgctcttcaccgtcttctccaagggccagaagcggaaaatgaaatccctggatgagtcggccctgtgcatcttcatcttgaagcagataaatgaccgcattaaggagcggctgcagtcttgttaccggggcgagggcacgctggacctggcctggctcaaggtgaaggacatcccctgcagcagtgcgctcttaaccattgacgataacttctgtggcctggacatgaatgctcccctgggagtgtccgacatggtgcgtggaattcccgtcttcacggaggacagggaccgcatgacgtctgtcatcgcatatgtctacaagaaccactctctggcctttgtgggcaccaaaagtggcaagctgaagaagtccttcggcacaggtccacaaggcggaatcacccaggagtggattggagtggcgggagacccacctggggcgaacattgcttctcaggaacagatgctgtgtgtgtatcttcagtgctcaagtcacaaagcaatatcagatcagagagtccagcctctgctttgttgcttcctaaatgtacctgggaattcttcctaaaattactctggaaatttgaatccactttaactaaaaataaatattcatagcacaaaaaaaaaaaaaaaa

SEQ ID NO: 224524 - DNA, 1000 bp, Homo Sapiens
aaggtcacaagtttgagaccagtctggccaacatggtgaaaccccatctctactaaaagtacaaatattagccgactatgtggcgggcacctgtaatcccacctactcgggaggctgaggcaggagaattgcttgaatccgggaagcagaggttgtagtgagccaagatcgtgccactgcactctatcctgggtaacagcgagactctgtcttaaaaataataacaataataataataataaagacttacttaaccaatattattgattaccagacttttatgaaagccaaagactgcttgctagtaggaaaaaatttcaaataataaccaaagctgaaaaatggtctgtcataaattatttccccggtaatttttgaaaggaaaaatgtataacaagtactatttacatatctgcatttaaaaaagcaattcttagaatacttcctttacattattctcctattttagacattttgtgaaagagaacaaattgtccagtggcctcctgtcagatcaacaattattatactccttaattccatgcaaatttaaatgaatgctataaaattttaaatctgtagcctgggtgtacgtttcactcaagttctcctactgaggactcttgactaacagcatactggcagtttcaccttaacctgctcgttaaataatgtgttggtgtgagatatcaggaatgtctcatgatatcacgtttaccatttacaccatctgcaaccatatgctattaataaaatggaaaaaaacaaaatggtcattttgcatatacttcactctgacctagtttagtccatgatactataattgtgagagcatatccagatgctgtgttctctatgtaaaacagtattgtccattcagaaatgtgtgacccttcatttatggatattgactatatgtaatgcagtgctatcccaatattttcaataaaggactttatgcattcagtgaaaaaaaaaaaaaaaaaaaaaaaaaaaaaaa

SEQ ID NO: 224525 - DNA, 1000 bp, Homo Sapiens
ttgactaagctttcataaaatatttgaagctattttaatcatcaagtatggaaaacaaattactattgcattttcctatatatgcatatattatggattaaccagaattgtatcatttttggcctaatgtctggatataaaagataattagcctactatagtattaataaatttttcagttggtttgggcaaatttaaacctgaaaaataggttaaaaagtagttacaaattaaacttactaatttatacctgattttttttcttgaattaaagtacattttaaatgagctttataataccttaaaaagttggttctaatttaaaatatgaaagctctggctatcaccctgggatagtaatttctaattatatagtatttcaaaactatatattttttagttcctttgagataactaatttctaattatatatgtttcaaaaaccatatcctgtattttttttaagaattgttttataaataggtcataagatacaaggtctgcattagaagacccactcttactaggttccctaaggatctgccatagatttttttttttttttttttttttttaggtagtttaaagcaagcactgataccagtgggagttggtcttgatctaggagattctgttaagcatccaaaaacaatgcctaatttcagttcttaggttatggcttgtgactccagataaaagatggagaatacctcatgtactgtgacttgaaaatgaattcttaaaattcttaggctctctccatgtatctttcttaaggaaaagtttctgagtgtgatctctcttttgccatagtatcaagtggagggtagttcagaaaagttaataggaaatcttttgtgacagcagactataatagaagtttgagtaatattttaataaatttatataattcaaatgataaaaatgtatcaatgttatccaatgatttttattaaaaaattaccttattattaaaaaaaaaaaaaaaaaaaaaaaaaaa

SEQ ID NO: 224526 - DNA, 1000 bp, Homo Sapiens; identical to SEQ ID NO: 118915

SEQ ID NO: 224527 - DNA, 1000 bp, Homo Sapiens
tctgagctatctgggctcccttacttgtgagtaagggatcatgctcaccactggagaagcttacaccgggactttttttcttttttcttttttttttgctatgacagagtaatgctaacgtaaggacaactgagtttgatcagtgtttaatcgcagtgggtaatcttatctgattgtctttaaaagtgaaaaggattaagattttattctttcttgtaaacattacttgattttttaaagaagttttgggctcactgctaaaatagagtatacaactgaatgtttttaagtcaagatactgttttaggagtttaccctctcatttataaccaaagttgctctaaaacactttccaaatatctgcacttctgatgtcagaatcaaaccagataattctctaattcttctttaatctaaagtagatagcttcccactggaaagtaaacaaaaccatccctcccaacctcaaagctaggccacactctatttcaaggcattttctttcagctgataaggtgtcctcctgaagccaagtaggtggttctggtctccaagtatcgttaagcacaggtgctatgacagaaaaagttctggggtggaagttttaagatgaggagttctgatcttaggcatcttaacagtcacaaggtgaaaagtcaaatgaaacagtacaattcttgatgagtgaggtgtcatcttccaaccacacagaggacgttttggctatgatcatctgatggcaagtgaaggagaaatgagtgatagggctttgcgttttcatccagatgctgtggccctgtgtttcacagcattaagagccataatttccaacctgcacagatcctgaacaacaaatgaataacgatgaatgtctttttggttgtaatttaacaagtcaaataaataatcattgctgagcacaatcaccaaaaaaaaaaaaaaaaaaaaaaaaaaaaaaaaaaaaaaaaaaaaaaaaaaaagaaaaaaaaaaaaaaaaaca

SEQ ID NO: 224528 - DNA, 918 bp, Homo Sapiens
atgcctggccacaatacctccaggaattcctcttgcgatcctatagtgacaccccacttaatcagcctctacttcatagtgcttattggcgggctggtgggtgtcatttccattcttttcctcctggtgaaaatgaacacccggtcagtgaccaccatggcggtcattaacttggtggtggtccacagcgtttttctgctgacagtgccatttcgcttgacctacctcatcaagaagacttggatgtttgggctgcccttctgcaaatttgtgagtgccatgctgcacatccacatgtacctcacgttcctattctatgtggtgatcctggtcaccagatacctcatcttcttcaagtgcaaagacaaagtggaattctacagaaaactgcatgctgtggctgccagtgctggcatgtggacgctggtgattgtcattgtggtacccctggttgtctcccggtatggaatccatgaggaatacaatgaggagcactgttttaaatttcacaaagagcttgcttacacatatgtgaaaatcatcaactatatgatagtcatttttgtcatagccgttgctgtgattctgttggtcttccaggtcttcatcattatgttgatggtgcagaagctacgccactctttactatcccaccaggagttctgggctcagctgaaaaacctattttttataggggtcatccttgtttgtttccttccctaccagttctttaggatctattacttgaatgttgtgacgcattccaatgcctgtaacagcaaggttgcattttataacgaaatcttcttgagtgtaacagcaattagctgctatgatttgcttctctttgtctttgggggaagccattggtttaagcaaaagataattggcttatggaattgtgttttgtgccgttag

SEQ ID NO: 224529 - DNA, 1000 bp, Homo Sapiens
cacaatgagaactccgacaggggtggcagcagcaagcacaataccattaaaaagcctcaagcccaaggcagaagacctatctgcatttgagccctcaaagtaggttgttcccaggtactctctatgtggtgatggtgctgccctctgtgatactaacccgtgcatgagcttgcctgtctctgtcctcgggccacactgagcccttacgagggcaggtggtgcctgggtactggccgcagcatgctttgagtctaaaagtaggcacccaccctgtgaagccagaccagcctccagggccccagaagactgcctcgttccgaagagcatgtcatggggctgtaggaccagccattcttcccatctcgggtcattgttgggctggggaaggttatggcttcttgtccagtcaggtgtgtctaaaagtcctttgtcttggtggcatactcctagcatggaaatggggtcaatctgggcactttggagactggtgtgtttaactcaagatcaagaccttttatgcgttgacagcctctcaagacccatggtcacacctggcagcttctggtagtggggcaaaagggttgcttgtgctggctcattttcctttagagctttccctttctgcacacatcccttttcttttcaaataaagcaaacccagagcacagggtctgatatgtgagtccacggggagtggactgtctgttcatctgtgctcagccacctctgcttcagcttcctctccataggctgagcagagatgtggtcagagtgaactcacattggaacagtacactcacggcaccctggagaggagcggtcactggttgctgagtgaattaaccgaatgtttgctgcttttctcctgcaacagttcattattcctccagcatgcctaggcagtggagagaatgtattttgcccaataataaaatgacatcctgcctctaaaaaaaaaaaaaaaaaaaaaaaaaaaaaaaaaaaaaaaaaaaaaaaaaaa

SEQ ID NO: 224530 - DNA, 1000 bp, Homo Sapiens
ttgaattctctgagtttttccttcttgctcttcatgacagtgtcagggttcctgacacccttaccttcctgagaaataccccctgggagcgcggaaagcagagcggacagttaaactcctatacacaagtctacaccccaggatactcccagcctccagctgggaactcttttaacctgcagctgtctgtctgggactgggatttacgttatagcaatgcacagatactacaattccagaatcctggctatgacccagaacactgtccagattcctggctccctagaccacagccaagcttcatggttcctggaccccccagttctgtgtggctcttctctagaggagcattgacccccctgaatcagctctgtccttggcgggacagtccttccctgctggcagtctcttctcgttggctccctcgacctgctatctcctctgaaagcctggctgaccaggaatggggtctcccctcacattggggagcttgccctttacctccagggctgctgctgcctgggtatctgggaccccagatcaggctctggagacgctgctacctgaggggaaggcctgaggtccagatgggcctctcagctcccacaatctctggcctccaggatgagctatcccatcttcaggagttattacggaaatggacaccaagaatatctcctgaggatcactccaagaaaagagatccacataccattctcaatcccactgaaattgctggcattctcaaaggccaatcccatcccttctggataaccagatgttaaatcatgagatcagagatgctgttcatcagtcccaacaagatggcctagaaatcgcattctcacctcgccttgctgctgctttaattccaagttctatttcttcccttatagttttctatgggaatgaggcggatacaggaaacaccctatctcctctgtatttttgtagtggaatttctatttaaggggctcattaaagcatagtatttatacac

SEQ ID NO: 224531 - DNA, 1000 bp, Homo Sapiens
acaaagtgcatgtgtactcacttctggccatataacatttacacagggaaatggatcattgatttttttttaatcaacgtgaatgaagaatgtttgtttatatatcactataaaatccagttgacctggacagtattatatgtacatatctattctaattaaatttaacaatcaaaggattggattacttttttcccccttgtaaagaggttcgagaatgtggtcaattgtatagatagcgtgttaaagccaaaacccagctctgagggccttacccattacttggatatttgctacgatccatctccctttgtgagtcaaatgttaagagaagaaacttgtatttgcagctagaggttactgtcacatcatagatttaacatttaccatcttcaaagtacaaatcttacatgtccttcaaaaggaggtcttaatacagttcctagttccttacttctgttttaaactttgggtaccaaaccaaaaagaagaaaaaagaaaggaaaagatcttctttgaagaaaagtatgtctctggatccctggaaaataatgatgtccaaagcaaattgtgaagatcaaatgtgtgttaagaaaaggtgtcgaggggagggacaaaaccagaaacggtggaaggaccagtgtaatagtcacagacttgcatcctggctctgcttacatttcctggtactctcgaatgtacgggcgttcacatagtcattgtgaagttgttggggtttttttggttttgtttttaatttagctcttctctgaggacgaagctgttggtggtggtggtggtgggggtggtggtgtgggatacatggtggtcaagttgtcagccctgatcagtttggactctgtaactcataggtgcattctttttttctttggtgtctcacaaattacccaattgttgaataaaactataaatatgttaataccagctttttccaataaaataacaaatgttacatcaaaaacgaaaaaaaaaaaaaaaa

SEQ ID NO: 224532 - DNA, 1000 bp, Homo Sapiens
tcaggaaaggggtaaaccgaggacatttcagtgcttgcttttgtctctgcctactgtcctgtggtagatcagctaccaggggaacacatttgttctcgtggggttttgtcctggagagtgtagtgaagtccgagagccctagctgccaacccatggtggatggtaacttctgtctcatcaagagtaaaacagtcctgcacacagcagggtgggtttgtgcctttggcccaacaggtacatagccccataatttctgaattattctatgcacttgtttccctcttcttttattttttatttgatatatgccgagctagaatcctgtcgggtagcttttgtatactaagaacattattattattattatttttgagacggagtctcactctgtcacccaggctggagtgcagtggtgccatctcagctcactgcaagctccgcctcccgggttcacgccattctcctgcctcagcctcccgagtagctgggactacaggtgcccaccaccacacccagctaatttctttttttgtatttttagtagagacggggtttcaccgcgttagccaggatggtttcgatctcctgtcctcgtgatctgcccgccttggcctcccgaagtgctgggattacaggcgtgagccagcgcacccggccaagaacattatttttaaagaagtgttaactttgaggacatatctgttccctggagatatttgggcttgaatcaggagtttgtcctacaggtgtcgcccttgatctcaggatgctaccagggctttgttctcgggatcctcgcacctggagagtgaagacgggcatgacggcaggtgaaggggtttgctgtgaaggaagaggagataaggcatttccaggaaatgggaaactgcctcctcctacacatggggcctgtgctcagaatgggcttagttcttataggatggatgctcagtattccttaataaagtagagttccattcttaaaaaaaaaaaaaaaaaa

SEQ ID NO: 224533 - DNA, 573 bp, Homo Sapiens
ggggtatacacagggaggccaggcagcctggagttagtcgaccgttgcgagacgttgagctgcggcagatgagtccaaagccgagagcctcgggacctccggccaaggccaaggagacaggaaagaggaagtcctcctctcagccgagccccagtggcccgaagaagaagactaccaaggtggccgagaagggagaagcagttcgtggagggagacgcgggaagaaaggggctgcgacaaagatggcggccgtgacggcacctgaggcggagagcgggccagcggcacccggccccagcgaccagcccagccaggagctccctcagcacgagctgccgccggaggagccagtgagcgaggggacccagcacgaccccctgagtcaggagagcgagctggaggaaccactgagtaaggggcgcccatctactcccctatctccctgagcagcaactaagtttaggcccagctgccagacctcagagatctcaccagcagggtgcttcccatgttgatgacaataaaatgaatgtgttgcaaaccgaaaaaaaaaaaaaaaaaaaaaaaaaaaaa

SEQ ID NO: 224534 - DNA, 1000 bp, Homo Sapiens; identical to SEQ ID NO: 221212

SEQ ID NO: 224535 - DNA, 1000 bp, Homo Sapiens
cacagctgcagccagtgggaggagacgccgtgagccctgccctcatggttctgctctgcctcgggaacctctccaaagccaccctctgggctgagccaggctctgtgatcagccgggggaactctgtgaccatccggtgtcaggggaccctggaggcccaggaataccgtctggttaaagagggaagcccagaaccctgggacacacagaacccactggagcccaagaacaaggccagattctccatcccatccatgacagagcaccatgcagggagataccgctgttactactacagccctgcaggctggtcagagcccagcgaccccctggagctggtggtgacaggattctacaacaaacccaccctctcagccctgcccagtcctgtggtgacctcaggagagaacgtgaccctccagtgtggctcacggctgagattcgacaggttcattctgactgaggaaggagaccacaagctctcctggaccttggactcacagctgacccccagtgggcagttccaggccctgttccctgtgggccctgtgacccccagccacaggtggatgctcagatgctatggctctcgcaggcatatcctgcaggtatggtcagaacccagtgacctcctggagattccggtctcaggagcagctgataacctcagtccgtcacaaaacaagtctgactctgggactgcctcacaccttcaggattacgcagtagagaatctcatccgcatgggcatggccggcttgatcctggtggtccttgggattctgatatttcaggattggcacagccagagaagcccccaagctgcagctggaaggtgaacagaagagagaacaatgcaccattgaatgctggagccttggaagcgaatctgatggtcctaggaggttcgggaagaccatctgaggcctatgccatctggactgtctgctggcaatttctttttttctttcttttcttttctttcttttttttttttttt

SEQ ID NO: 224536 - DNA, 1000 bp, Homo Sapiens
cagaaaacattgaagtcgttacacaccagatcactgtgcagcaagagcaactgcagttgttagaggaacctaaaacagtggtatccaaagaagaatcaaggcctccaaaatttgtcattgaatctgtcactcttccactagaaaccttagtgtccccacatgaggaaagcacttcattatgtcctgaggaacagttggttatagaaaggctacaaggagaaaaggaacagaaagaagattctgaactttctactggattgatggactctgaaatgactcctacaattgagggttgtgtgaaagatgtttcataccaaggaggcaaatctataaagttatcatctgagacagagtcatcattttcattatcagcagacataagcaaggcagatgtgtcttcctccccaacaccttcttcagacttgccttcgcatgacatgctgcgtaattacccttcagctcttagttcctctgctggaaacatcatgccaacaacttacatctcagtcactccaaaaaactggcatgggtaaaccagctattactaagagaaaattttctcctggtagacctcggtccaaacaggaggcttggagtacccataatacagtgagcccaccctcgtggtccccagacatttcaggaggtcgggaaatttttaaacccaggcagcttcctggcagtgccatttggagcatcaaagtgggccatgggtctggatttccaagaaagcggagacctcgaggtgcaggactgtcggggcgaggtggccgaggcaggtcaaagctgaaaagtggaatcggagctgttgtattgcctggggtgtctactgcagatatttcatcaaataaggatgatgaagaaaactctatgcacactacggttgtgttgttttctagcagtgacaagttcactttgaatcaggatatgtgtgtagtttgtggcagttttggccaaggagcagaaggaagactacttgcctgttctcagtgtggtcagt

SEQ ID NO: 224537 - DNA, 1000 bp, Homo Sapiens
ttttgttaagaaggaaacatttagcatttatatatttgtgtatggaaaacacttgatattttatccctgttgcatctggctgcacagagcctctcctcaaagatgctacaaaacttgaatataacacattttggaaggctgactaacctcgattctgtgttgtgatgtgcaatactgtttctaatgtttgtataaaaaaaaacagtgtaaacctttttaatgcaaatttatttttttcattgcatattttgcagattttatccacagtgtcattttttactgtcagaaaagataccccttttgtcattgcaactattttttaaatccagaaatctttgtactgatgtaaatgattgtagttattttggatagtgttttgctaacaaaaggagagacttttttcatgcatatttctattttgtttttttgggttttattttattttaatagtagtaaaatacttggaataatttttcatattcttgtcattaatattattttgtatttttatgtggaaatatataattttatgacactaattgctaaagtttattttatgttgaattatttttggagctgaaatctttgtaatattaaagcaactagtttctaattcccagtttctgtatagaatcgcacaagtggtttatggagtgtttggattgtaattataaatggttctttgatatgcaaattaatattttcagttgattttattttatattcctaatggggtgttaaagccgttttttatttttttctaaataaaaagagaacccatgcttttatggacactaggtaaacaccttcagcttaaatttttcgttaaatattttagtttattttattgttatcttccaggtgtctaaatctccagtctgtctgttgtactggtaatttaactctgtaatggaatagtttgctgccaactatttatattaagtaatttttaaatatttgtaatattgttgactgactaataaactattaagttattggc

SEQ ID NO: 224538 - DNA, 1000 bp, Homo Sapiens
gttgcttttggcaaaaggtacttcaaacaagggagggcctggactgagggggaccaggtcttcttgctgacctcgtctacaaaggcaaaggaaggcaaaggaagctgtctcgggtgtttctgaacaacgtgactcatgaggggctttggctacctcttgcattccccctagagatgtccaggccttacatttaatcggctttctctgcggtggggtagagaatggagctcccgccttgcgggcagtgctaaaggtggagctgggggattttcctgggaatgatttgagggctcttgaaagcccatgtgttccaaagcgtctttaactctgggatagcattggaagccgctgtcatgacaggacatggcactggatggctggcagagagccctggctgggagttagggagccctgggttggaatccagccccacctcttttatgccacaggtttggtcaagttctctcccgctcagggtagggctgtgaactccctcttacagctaagaacatgcagcttagtgaggacaagacccttctagagctttacccctaatcccccccaggagccccgaggccggcattattcctccccattacaggtgatgagcctcaaattcagagagcttaagcaacctgctcagggtcacgtctccaacaggcagtagagtcaaggtataaaccaggtctgtttttgtaccagagtcccagactaactgttggtaggaatcttgtaaccagtcatgttttcttccttgttttggccgctgggaagctcaaagtcaaattcgagacccttttttttccaattgtgctgagtctcctactagactcgcttcattctagctttctgcttttacctttaccctaatctttttatttttatgctattgtactttatttttgtaagttgctgagatatctgttttgcaacaagatgggctatatctaaataaagacatgatcaaaggtttgatttaaaagtcaaaaaaaaaaaaaaa

SEQ ID NO: 224539 - DNA, 1000 bp, Homo Sapiens
cctgtctcctgtcccctcccccggtcatgacagagacccgtgagccagctgagactgggggctacgccagcttggaagaagatgatgaagacctttccccaggccccgagcattcctctgattcagaatacactctctcagagccggactccgaagaggaagaagatgaggaggaggaggaagaggagaccactgacgatcctgaatatgatcctggctacaaggtgaagcagcgccttggcgggggccgtggtggcccatcccgccgggccccccgtgcagcccagcccccggcccagccttgccagctctgtggccgctcaccccttggggaggccccaccgggaaccccaccctgccggctctgctgccctgctacagccccccaggaagcaccagcccctgaaggcagggccctcggggaggaagaggaggaaccacctcgggctggggagggccgaccagctgggcgggaggaggaggaggaagaggaggaggagggaacctaccactgtacggaatgtgaggattccttcgacaacctgggggagctgcacgggcacttcatgctgcatgcccggggtgaggtgtaggcagagcccccatacggggagcttggcagaaggggtggggtgggaggagggggctgaggaaattggggttgtgacagtggtcatgggggatggggtactgccggtctgtgttgtcttagaagtagatgtgtgatggccagaataaaagccaaaatctgtatctgtgtgtgttggttcagagtgtgtgtgtgtgtgtgtattcccgcccgtgtgtgtgtttgtgtgtgtgtgtgtgtgtgtgtattccccctgggctccttcttggggaaccttggggtcttttgggaaagataacatttactgcgtgcttgtattcgatgaggtttccatgtatttacttacagaccccataatgtaaaggctctaataatagaattttgtttctcactcaaaaaaaaaaaaaaaaa

SEQ ID NO: 224540 - DNA, 1000 bp, Homo Sapiens
gagtttgagggcagcctgggaaacatggctaaatccgtgttcaaaaaatacaaaaattagctaggcatggtggcgtgcacctatagtcccagctattcaggaggctgaggtgggaggattgcttgagcccagcaggttgaggctgtggtgatttgtgattgcgccaccactgcactccagcctgggcaacagagtgagaccctgtctcaaaaaaaaaaaaaaaaaaaaaggagagaagaaaataaagaaggctaatatataatttttcttaatagctgagttgtgattcattttaccattatattcagaattgaccttaatttgttttccagaatcaaaagaaaataaaatataaattttgaaactatgagaacatatataggggatttatcaaatgagttactttttattatatcaattataatttcattttattaactggaataagtgcgaaagtgtacattactttttaacttatatgtgaaatgattcatgtacctcacaaaatcatgcaatcttgcagtgaagaaggagtatcagagctccagctacactgagtctttcaatttacagatcaagaaactgaagaccagagaagagaaatgattcggttaaagtcactctccatcatctgtgataagttgacaaatttatccttacacaaatttgtcctcattgagttgacatccaaaatttgtcaggaattaaagaatgacttttgagtggcaattatttatataacattttccattgtcttcatattcaccttttgtcatttgtttgctttctcttgcagcaaaaataatatgaggtcatcaagggcagagaactgtgtggcatctccttatagtaaaagtgcaatcatatggatggctaactttgtaatctctacaaataatttaccttatgtaattttccaaatgtaaaagtcaccaaaaacttaaaggcattaaaataaactaaaaaagtactcatttcttcaaaaaaaaaaaaaaaaaaa

SEQ ID NO: 224541 - DNA, 1000 bp, Homo Sapiens; identical to SEQ ID NO: 118927

SEQ ID NO: 224542 - DNA, 1000 bp, Homo Sapiens
cgaggtcaccctggattgaggctgagtcccaagtcagtcactggtgttcctccatgaagagcagagcagaatagagacagatgcacagagcaggccctgtgaggacagaggcagggactggagcgtcggccgcagcaggggcgtggagcccccagagctggaagagggagggatcctccccagggcctccggaaggagtgtgctgcgtgctgcccacaccgtgattttggactcgtggcatccagaactgggagagaataaatttctgatgttgtaagcctgcactacagcagccccaggacgctgaaatagttcagccggtgcaggctcctccctccctccctctctcttgttgtgagatattttttagacggggtctcacctgtcgctggagtgcagtggtgtgatcatagctcactggagcctctaatgcctgggctcaagcgatcctcccacctcagcctcccgagtagctgggactacaggtgccatcagacctggctaatttttaaaaatctttttagagatgggggaggtctccctatgtggcccaggctggccttgaactcttgggctcaagtgatcctcttgccttggcctcccaaagtgttaggatggcaggcttgagccaccatgcctggcagctccatctgtgttgactcctgaagcccctcatcttggctaatccggacaggcttgctggggaccccatctccccttggagactttgggatgtggctggatgtccaagtggccggggtcctccacagcccccagcttcccagggcgggaggcaggctgtgtcctcggtgggcactgacagtgaggctgaaatgtttgcacttcacatttccacatttaggggcattttgttgttgactcattcaaagctcttttaagtcgcttaatttgctgctcagagggaaatgaaaagggagccattttccctgatttgtttgcctcatcaacttttcaatcaataaaaaagtgcattttgctc

SEQ ID NO: 224543 - DNA, 1000 bp, Homo Sapiens
cccaccatgtggctgggaggacttgggagggggatggggacattgggaacctgtcaagaagtgctttatccagagaagcaaattttgcacgattggactgcaatttttgttttgtattgtttgtgttttttcttgaaaagctttacttttctttccacactcagctctccctcctcaaccccacttttatttttcttgctggggttgaggagagaaaatatagaattcctggataagaccaaacaaaacaaaacattaaaatacctgtatgttttgttttagacgagaccaaactaaacaaaaagtatctgtttatcaaagtaaaagtaacacaatggacaattctgcttattctctcaaagagattctaagatgcacctttagaactattaatagcaacctgcatttttttttaatttatacttcagaatcctttaagaacctggtgttcctgagtggtcctgaatcatataagttggtaatggaagctgtaatgaccaagtcccctaaacatactatgtctttgccacgtgtgctgtgacttctctgtgggtgatttaatttatttggatccacctctgagtgagcgcacagtgatcaggtgcttcaaagccaacagaccagctcctcttcctccggatcctcttttgatctgcccaggaaagggatgcattgacactctcctgcatgcacctggcgagaagccacctgaaagtcactgtggttaaagatattggtggaggtaccccaggagcactgttacaaatccttcttgttttggcatctcgtacaacattattaagacacagctgagagttgatgggtgtgtaatgcatatgccaaggaaatgtcactaatcccaaagcaatcaaaaaggagacctcaaaccagatgttaatttgttctttgtgtaacaatgtaaccaaaatattgatgataaaagtcataatttaagattcagaataaatgggtttgatgtctggcaaaaaaaaaaaaaaaa

SEQ ID NO: 224544 - DNA, 1000 bp, Homo Sapiens; identical to SEQ ID NO: 118928

SEQ ID NO: 224545 - DNA, 1000 bp, Homo Sapiens
gcttcatcgaggacaattacattcagcctgggactggcgagctggggacagagggtagcagggaccacttctccctctgagctcccatctttagaccctccccactccctccatgcctgacagcttaaggacagtggttatgacatgggggccttgaacctcagggacagaggtggctggggcttaaaggttggccagggatggagtaaaccccacttccctgacactagccagcaaagtgacaatgaccctctcttgctcaataactctcaactgttccctgctgttctcaggataaagccaaacaaaggcttgagtgtggacataaggccctctgtgatcatgcctctcggcctcttggtttcttttcttgccttcccctactttactgtcgaaatcaatgctattctccctcccaccacttcccatgcagtttccccaggcacctttgctcacattggtccccctgcctacgctactcttcccctaaatcctctatgactgtgatggcctgcctacctgccagcatttcaaatatgcccagatggtaacatttgtgcaggtgaaaaccagtgccaagcttccttttttttttttttcctgagacggagtctcactctgttgcccaggctggagtgcaatggcacatcttggctcactgcaacctccgcctcctgggttcaagcgattctcctgcttcagcctcctgagtagctgggattacaggcatccgccaccacgcccagctaatttttatatttttagtagagacgaggtttcgccatattggccaggatggtctcgaactcttgacctcaggtagtccgccttcctcggcctcccaaagtgctgggattacaggcgtgagccaccatgcccggccagcttcttaatgaaatattttcctataaataaagtgggtaatccggttataatatgtttttcacaggaattaataaatctattttcattttgaataaaaaaaaaaaaaaaaaaaaaa

SEQ ID NO: 224546 - DNA, 1000 bp, Homo Sapiens; identical to SEQ ID NO: 118929

SEQ ID NO: 224547 - DNA, 1000 bp, Homo Sapiens
aacagaatgccttattgttagggctgaattccatcagggcattttgttttgatggaacaaaggcggttaaacttgatatggtggaggacacagaaggagaacctccatttctaccagaatcctttgaccgaattcttctggatgcaccctgtagtggaatgggacagagaccaaacatggcctgtacttggtctgtgaaggaagtggcatcatatcagccattacagcgaaaactcttcactgcagcggttcagctgctgaagccagagggtgtgctggtttatagcacgtgcactataacactggccgaaaatgaagaacaggttgcctgggccctgacaaaatttccttgccttcagcttcagccccaggaaccgcagattggaggagaaggaatgaggggagctgggctctcatgtgaacagttgaaacagctgcagcgatttgatccatcggctgtgccattaccggacactgacatggactctcttagagaggccagaagagaagacatgttgcgtctggctaataaggactctataggtttttttattgcaaaatttgtaaaatgcaaaagcacataggagagggatggatgctcagaaatgaaaattccaaacatttgctgtctgtggtttttttttttttttttttttaaccaaagtgttgtcaggccaactgaatgatgatgtggttgctatggaaacagaaaaggctgccagctgttttaccagggatccagagacatagaggaagtagggggtggtatgagattatattttctgtttttaaaagattttttttttttatgtatttagtagagtataaagaaaagcagatgcctatagatgtctggagcatattttcatttgtgatctaatgttttaatttgtaaagtgtacaagtcatttttaatgttaaaaattagtgaatctaacaaaaggaataaattagcaatatttgaaaaaaaaaaaaaaaaaaaaaaaaaaaaaaaaaaaaa

SEQ ID NO: 224548 - DNA, 1000 bp, Homo Sapiens
cttaccaaattaaaggacaaactaatatagctggaacatatatgtgtgtatcaatacacactaaacacacaggtatatgctaaattgtaatggtaaccaaatgatggttacaacttcgtgactattatttgaggaagatttaatgtctttggagtgattttcccctctttcttcacattatcataaaagaagttagacactacaggcaagattacagagtagcctaagcagacaatttacaacctaattagcaagaactccaaatcatggaagtgaaattattattatcctacatagactgttccaagttagatgtcatcaatctgttcggcagaataaaatcaaacagattacctattgcaagtgaagaattccaagggtagaatgaaatgctttatctatttctagaatgttttcttagcttttggggtttaataatgcaatctcaaaatatctatttattttattttaatatctcttagcgctgtgattagtgctaaatgataaactctagatctcttctaacaattatcaaataaaaattactgctctttttgcatcccattgccagccttgctgtcagattcaaaattgctttttctagagttaaaggtagaaggagagaaaaaagtgactcatgaagtctatattcattaaaagtcctgttcactaaacatatctgcttatatcaaagagtaacttgaaatatctgaaaatatttaatttcaatatttccaaccagtgaatactggataatatttttatatacttctatcaacattttctaatttcgatttcagaagctggggcagtccagtcactcactttacttatgtgtaagttcctatacttgcacaattattatatatgattcagtatctggggtggatatttatatattatattcactgtaatacccacatcctgatttatgatttttgcctcacgattttcagattatattcaaataaagcttatttcaataaaaaaaaaaaaaaaa

SEQ ID NO: 224549 - DNA, 1000 bp, Homo Sapiens; identical to SEQ ID NO: 118933

SEQ ID NO: 224550 - DNA, 1000 bp, Homo Sapiens
gaagaggcggtggctgtgtggcccccttgagtggagccatggaaggggtggcatggtgccactggggcctgtggctgtagtagccctgggccaggtaacctccagggccctgacttttccagaggctgctgccacctacttcttatcaaagaagggggagaacagttcatctgagtcagtgcacctcccctccagtctccactccctgaggatggaatcggggaaacagcatcctgccgcctcctctctgcctgcccactcaccggcaaggttgtccctctgcccagggctcagggccatgtaccagatctgtctgtgcccacccaggcacagccactgcctcccccttggctccctgctcctacccaggagagctccctatccgcctttggtcagagctgaagccatatacgactgggtgtttgtccccctactttggccccaggagtaaaaaaacttctccttttctcacttcctttcctgcctcgggaggtggcagggcagttccctggctgaggccttttgcgccccacctccaggaccaagggccattctagacagggtgtcttctaccaggacccgtccctagccttcctggcctggagggcctggtcttgcactggcagctgtaatacaaagggaactcgccccacttctcccaagcctggtgctgtcctctcggcccaccatcggccaggtccagcgcttcctctggggctgacaacaggcccctgactcaccccggtcacctcccagggtccatggccagggcctctgtgtttggggggccacttgcccttcatcctgccaggcgcttttgcccgccctgcctcagcctgggccctgtgcccttgagccctccacccctggcccaagacccccccaaactgtctgactctgtgtttcctgccctgaggagagaggggtcagattgcagcgggccgagtgccctctccgtcccctctcctcccacccacgccacaggccagcctactcttcc

SEQ ID NO: 224551 - DNA, 1000 bp, Homo Sapiens
ccctccatccatccattcatccatctatccatccatcatccgtccatcctccatccatcatccatccatccatcctccatccatcatccatccatccatccatccatccatccatcctccatccatcttccatccatccatcctccatccatccatctatccatccatccacccatccatccatccatccacccatccatcatccatccatccatcctccatcttccatccatccatccatccatccatccttcatccagccatccatctatccatacatttatcatccatccatccatcatccatccgtccatcctccatccatccattcatcctctatccatccatcatccatccatccatccatccacccatccttcatccatccatcatccatccatccatccatccatccatccatccatccacccatcctccatccatccatccatccatcctccatccgtcatccatccatccatccatccatccatccatccatccatccattctgttgtacaacagatattcagcatgctttctcagggacatgctctgtgccggggacaggggatataagtgaggtatggatactggcctcaggaaactctcttctctttggaggaatctcttctggagtgttccactggagttttcatctctcttgcacccattacaaagatggaagggtccaattgactagaaatatagtttagagattcatatggagacatcatgaagcctgcctcccccctgccccttatacttgggctctctgtgcaggtggcacagaccataaaaggagagtgaagtctacagcctagagggtgccctgtgtgtggtgtcagatgtaacctttcacatgggatgtgtgtgctgtgagcattgtgctatttgagatgaatggttagtattttgtgtttacatgaaaataaatgtttaaaaatgtctcaggggtttgatgaagttactattcaataaaagaaacctctcagggaag

SEQ ID NO: 224552 - DNA, 1000 bp, Homo Sapiens
gagctgacggtctcagagctccggcagcagctgcgcctgcggggcctcccagtgtcggggaccaagtctatgctcctggagcgcatgcgcggcggcgcgccgccccgcgagcggccgaagccgcggcgcgaggacagtcccgcgggtgctccctggccgcgcctcaagcccaaggccctggcagccgcccggcgtcagggctcggtcaagcccagcgcagcatctcacaggccacctcttccacgcgccgcggataccccggggacggctccggctccaactcccactccggctcctgctgcagctccagccctgaccccttcctcagggccgggctcagcggctctgactctggaggaggagctgcaggaagcgatccggagggcgcagttgcttcctaaccggggcatcgatgacatcctggaggatcaggtggagcctgatgaccccctgccccctattcccctggacttccctggctccttcgacgtgctgtccccctccccggactctgaaggcctctcatctgttttctcctcttcactcccgtctcccacgaactcctcctccccttctcccagggaccccacggactccctggactggctggaggccctgagcgggggtcctcctctgggttctggtcccccaccccccagcattttttccgctgacttatctgactccagcagcagccggctgtgggacctgctggaggatccatggtgatggattttaggatttacagagacagagaactgatgggggtggagagaagctccttgtgggaggagagggaactaccagcagagcccctcctaccgcagacacaggatcggagacaacctccaaccccacctgcctcctgaagtgctgctgacatgcaactgccttaactttgcctacctggcctccttatgatccccctccggcgtggtatggttggggggcttcttttgctgctggccacggcaaacaagctgcttgctgcttccttcag

SEQ ID NO: 224553 - DNA, 1000 bp, Homo Sapiens
tcattgtacatccacactgatgaaaggaaaggaaacattaagatggcttaagtggaaaggtcacatacggcttgtactagagagacaccatgctaaagcaaaacatcgtttaaaaaaattctgacttatcatgtgctcagaaatgctcaaatgggtacaaccatcaccaagggtgggatgggagggcagggggaaaaaatatgaagcatcaaaaaaaattctgatttgtatttgtgaaattcaatagtaaccctattcattaactggattttaaaatcatttcaaagcacattcggctttcaaaagatgtttgtttaaataacacagttggcttttggtcaaaaaatgaagtttcggtaatgcatagtaacaactgtagtgtaattactggccacaaaataccaggtgccagaccaacccttttcgaaccatttaagagaaccaagccaagcaaaaatgcccagcctagccttacccagaagttcaaaagctcagcctttgtctccaggaaaaaattaattcaaagagcaaagccattattcggcacaaccaggtattctgttgtaaacatcttttgttaatacatgttgaaagctgaactttctcacgtttgagtgaaagagggctgcttaaagagagtttaaaccaagccaggttcaaggtttttttcttttctttctttttagatttctgacttcatatctgtgggatccacacaatggggaggtactggccttggaatccatggttccccagctatcattttactttagaattacagtgttctctgttagtgtcaagggaatgaacctgacgagaaaagaccaaacataggactgttacagggaagaaaaatatgaaaagacctaaagatgcacgtcctcattatatgtaaggaatctatttcctagaatcctataaaaagctcaactgaatttgcttcagttaataaatgtgatttaattataatcataatgccacagaaaaaaaaaaaaaaaaa

SEQ ID NO: 224554 - DNA, 1000 bp, Homo Sapiens
cttcagcatcagagaattcacactggagagaaaccctttgaatgtaatgaatgtgggaaggccttcagggtgaactcttcccttactgaacatcagagaattcatactggagagaaaccttataaatgtaatgaatgtgggaaagctttcagggataattcatcctttgcacgacatcggaaaattcacactggagagaaaccttacagatgtggcttgtgtgagaaagcctttcgggaccaatcagcactagcccaacatcagagaattcatactggggaaaaaccttatacatgtaacatatgtgaaaaagccttcagtgaccattcagcccttacccaacataagagaattcatactagggaaaaaccttacaaatgtaaaatctgtgagaaagcctttatccgaagcactcacctgactcaacatcagaggattcacacaggagagaaaccctataaatgtaataaatgtgggaaagcttttaaccagactgcaaacctcattcagcatcagagacatcatattggagagaagtgatatgaatgcagtttgtatggaagacctttgagactgagtagatgaattattgaatgtgagataatccgttctagagaataactatgaaagcttgcatcaagatagtcactttatttactgagggtcaggtttcacagtgtcatggggtttgggcatttaagaatggcaaacactcggctgggcacggtggctcacgtctgtaatctttgggagcactttgggaggccgaggtgggcggatcgcgaggtcaggggatcgggaccatcctggctaacagggtgaagccccatcgctactagaaatgtagaaaattacccgggcatggtggtgggcgcctgtggtcccggctgctcgggaggctgaggcaggagaatggcatgaacccgggaggcggaggttgcagtgagccgagatcgtgccactgcgctccagcctgggcgacagagcaagactcagtctc

SEQ ID NO: 224555 - DNA, 1000 bp, Homo Sapiens; identical to SEQ ID NO: 118935

SEQ ID NO: 224556 - DNA, 1000 bp, Homo Sapiens; identical to SEQ ID NO: 118936

SEQ ID NO: 224557 - DNA, 1000 bp, Homo Sapiens
gcccctgggcctgctggaccccgcagaagggctttcgaggaggaagaagacgtcgctctggtttgtggggtctctgctgctggtgtccgtcctcatagtcaccgtcgggctggctgccaccaccaggacggagaatgtgaccgttgggggctactacccagggatcattctcggctttggatctttcttaggaattattggcatcaacttggtggagaatagaaggcaaatgctggtggcagcgatcgtgtttatcagttttggcgtggtggccgccttctgctgcgccatcgtggacggcgtatttgcagcacagcacattgaaccgaggcccctcaccacgggaagatgccagttttactccagtggggtggggtacttgtacgatgtctaccagacagaggtcacctgtcactccctggacggcaagtgccagctgaaggtgagaagcaacacctgttactgctgtgacctctatgcctgcgggagcgcagagccctcgcccgcctactatgagttcatcggcgtcagcggctgccaggacgtgctgcacctgtaccgcctgctctgggcctctgcagttctgaacgtcctgggcctgttcctgggcatcatcaccgccgccgtcctgggggccttcaaggacatggtgcctctgtcccagctggcctatggcccagccgtcccaccacagaccctctacaaccccgcccagcagatcctggcctacgcaggcttccgcctgacgcccgagcccgtcccgacctgctcgtcctaccctctgccccttcagccctgcagccgcttcccagttgcgccctcctctgccctggcttcgtctgaggacctgcagcccccttctccaagcagctctggctctgggcttcccggccaggctccaccgtgctacgcacccacctactttcccccgggggagaagccacccccctacgcaccctgatagaggcgtggagtaaaagataaaaaaaaaaaaaaaaaa

SEQ ID NO: 224558 - DNA, 1000 bp, Homo Sapiens; identical to SEQ ID NO: 118940

SEQ ID NO: 224559 - DNA, 1000 bp, Homo Sapiens; identical to SEQ ID NO: 118943

SEQ ID NO: 224560 - DNA, 1000 bp, Homo Sapiens
ttgcctgtctccccacccatcagtgaaatccctgagggcaggggctgtctcattcatctgtggatatggagcgggaccactatgtgccaggccctgtgccagacactgcttatattgtggtgaatcaaacggacagacttcactcttgtgtagcttatgtcagacagacattaagcaaactcacaaatacataaaatatgctcataaaaggcctttatgaagaaaaacacttaagctgagacctggataagtgggagctagccagataaagctgcaggaaatagcattccaggcaaaggaacaaaactggtgcagacccagctgctagaaggagcagagagcatttgaggaggtagaagaaggtgacatgatggacaggttcaccttcccacagagtaaggggtgagtgacccaaggctcaatggatgagcagggtccctgctgaggacttctcttgagtacaatggggagccactgatagctttttaaggggatgaatggtgggatttggtttacatttattattatttgagacagagtctcactcttatcacccaggcaggagtgcagtggtgcgatcaaggcccactgcagtcttgacctcctgggctcaggtgatccttccacctcagcttcctaagtagctgggaccacaggcatgcgccaccatccccaggtttttttgttgttgttgttgttgttttgtatttttggtagagacggggtttcatcatgttgcctaggctgttcttgaactcctgggcttaagtgatctgcctgccttggtctcctaaagtgctgggattataggtgtgagccatggcacccggtcttggtttatattttaaaaagacaactgtgtagctgggcgtggtggtgggtgcctgtaatcccagctactcgagaggccaaggcaggagaattgctagaacctgggggtgtgaaggtttcagtgaactgagatcactccaacctgggcaataaagccagactctgtctc

SEQ ID NO: 224561 - DNA, 1000 bp, Homo Sapiens
tgtaacttttgggaaagtaaggtggcttccctgctctcagtgaagcattttattaaaagaataattataattaaaaaaacacgatacagatcagtgcatatagtatattactaatagtatgctgttaattgtgtaagaaagaaaggaaattagaaaacatatttgcataaataaaagctagacaaaggctaagaaactaatcaggtggtttccctggggtagtaggataatggggaacagtggggctgggaccgggtgggagaaagagttctcagtggttcctttctatacagttttaacttttgaaatgtgtgagagtgttacttactgaaaactgaaaggatatgacatgctggaacaggcaaaactacaaagacagtaaaaagatcagtgatttccaggagctgcaagggcagtgagaggaagggagggatgaggaggtggagtgcaggggatgttagggcagtgaaaggttctgtatgacactgtgatggtgggtacatgacattgggcattggtcaaaacccatagcatgtacagcacaaagcgtttgctctaatgtgagctatggactttagttaatagtaacgtgtcaatattggttcatcagttgtatcaaatgtaccacactgatgccagatgttaataatcggggaaactgtgtgtgctgaagagtacgtgggagctctctgtgctatctgctcaatttttctctaaacctaaaactgttctaaaatagaaagtctgtgaaaaaaaacaaaagtaaagttataaaaggaaaagaaaacagaggctttaaattaaatcatctattccttgggaaaggtattttgtaccatatgggactgaaatcatttctctggatgaattttataaaatgaattttgtaatttttttctgagaaaaaaaagttcttaaatacaataaaattgaaatgttgaaatataaaaaaaaaaaaaaaaaaaaaaaaaaaaaaaaaaaaaaaaaaaaaaaaaaaaaa

SEQ ID NO: 224562 - DNA, 1000 bp, Homo Sapiens
ataccaaagaacagagacatgagtgtgcgaggcatggagggatcattggagagggaaaacaagtccaacctggaagaagacttccttctaaaccaggcagacgaagtcaaattacaaatcaaatgtggtcgttgtcagattactgctcagtcttttgcggaaataaaatttcatttacttgatgttcatggagaggaaattgagggcaggctacaagaagggaccttcccaggaagcaaggggactcaggaagagttggtgcagcacgctagccccgactggaaaaggcatcctgagagagggaagccggagaaggttcattcctcctccgaggaatcacatgcatgtccaagactgaaaaggcagctccaccttcatcagaatggcgtggaaatgctcatggaaaatgaaggaccccagtcaggaaccaacaagccaagggaaacctgccagggccctgagtgtcctggcctccacacgtttctcttgtggtcccattcaggctttaactgcctgctttgtgcagagatgctgggacggaaagaggacctcctccaccactggaagcaccagcataactgtgaggacccttccaaactgtgggctattttaaatacggtctccaaccagggagtgatcgaactttccagtgaagctgagaaatgagaccccaaggcagcctggggttaaggagagagctctgccgccaccttccttcagagcttcgtgctttatggtggtgcttagtcacaaagatcaaacaacaggattggtgtgagtgaacagaaatgatttttgtacatggttttattttcttaacgaaataaaatataagctctcgaagcatatttttctaactatatgcagtcttattttaaaatacgtactgattcttaatatcttagactttcagaataataaaaagatcaaatttgaagattgaaatttagcagaatataggctgttcttcaaatacagctctcagtgaaaaaaaaaaaaa

SEQ ID NO: 224563 - DNA, 1000 bp, Homo Sapiens
atagtgtctttacaaccagaaatcttcttgaacagattgtcctgcctttaaaaaaattgacttatatctactcagttgtattaaccttggtgtcagaaaaagtttatgattggaaagttttagctgatgtcctgggttactcacatctgtccctggaagattttgatcaaattcaagcagacaaagaatcagagaaagtttcttatgttataaagaagttaaaggaagattgccacacagagagaaatacaaggaagtttctgtatgaacttattgtggctcttctgaaaatggattgccaagagttagtcgcacgtctcatccaagaagctgctgttctgacttcagctgtcaagcttggaaaaggctggagggaactagctgaaaagttagtacgactcacaaagcaacaaatggaggcatatgaaattcctcatcgaggaaacactggagatgttgctgttgagatgatgtggaaacctgcctatgattttctgtatacctggagtgctcactatggaaataactacacagatgtgttacaagaccttcagtcagctttggacagaatgaaaaaccctgtgactaaacactggagagaattaactggagttttaatactagtaaattctttggaggttttgagagtaactgcattctccacttctgaggaagtatagaaacaaagcgtgtgtttttgatgggagggaaaatgaggtaatggtgtgtgtgtgtgtgtgtgtctgtgtgtgtctgtgtgtgtctctgtgtgtctgtgtgtgtgtgtctgtgtgtgtgtgtctgtgtgtgtgtgtgtgtgtgtgtaggaaagaaagaatctcagaaaagcattatattaattttcttcatgctcaaaaccagtttttttttcctgatgaaagcacagcctaactgataaccaagatgggttttatcctcaaatatgtatttttgtgtatgtttcaaatacaagtattaggctgctttgttcttagaaagg

SEQ ID NO: 224564 - DNA, 1000 bp, Homo Sapiens
ttccactcctcactggctggttcactgtgttctgactagtccataaaaataaagatggaaggagatcaaacacagaatcataatcataatgcggcccccttccccagagcttacctcgaatgtgaaatccctacttcttataatgcagagttaaggagctgagcccccatgattttgtagctgtacttttgtatgtgtatatttttatagctgcagattgtccacacagtatacttttggaagtttgggtggatgactctgaattcttgcacacctttcctaaaaatttctcccaagagagacttgtttgggccttttgtggtgtcagtggaatggataggtaacttgggtgggcaacttggggagctgaccattctcttttggtaaatgttgacggctcaagaggatgaatatgaagctttccaagataagcagattaaaaggaacatgtgttaccgaggtaggtcactgtcatttttgttttaagagttggggggagtatctatagtaaacttgaataaaggggacaaagctagaacttattcattcattcattcacttatggagttgttactgattttgcggaggtcaggttcataccaatggacactaatacaatcagtgttcccaaggctgtgcaggggtggggggacatgctgtcaggatggtctgagcatctgggtgagaaccagagaaacaggacttcttccttctgtaccatgagctgtgtccctttactatgcaagcacatgaccccagagacagctggttcactggcagatccccatgatggacttactaagggaaaggtgagatgaacactgcccccaaggagggggtgaaatatgatctaacttatgcaagagcctataattagtcccagtctcgactctacatttgtttgtgcagcattcattcagcaaagacttttggggtttgtgcaaggcacagttttaagcacataatgtaattctaaaagatgaataaactagagaggttc

SEQ ID NO: 224565 - DNA, 1000 bp, Homo Sapiens
gctataacttcaaattttttaaaagagacaaactgtaaaaaatgtgtgtattcttaaaatgcaatatttgtaaggcttgttccaatgccacatacttgcagctcccattctatgtgtcatcaatagtgtcctatgcaataaaattatttgcaggtctttaaatcattttaggaaaggatgatcaaaaataatgcatccagcagtacaataaaagtaaaccacaaaaaaatacctcaggaaagaatagaaagaaagtctatctaatgacatgcctatatgagaagaatagcctagatatgaatatatggcatttgcagatttttatattagttgctttgttaaaaaaaaaaagattgtattgctgtccttgaatgccatagtcaaagagagtttttaatagaaccatgttggttgcactttgtagtgtttggtgctcatttaaatatctgaacatttactacagtttttaactctactgtgtaatataaaagatcttgcagaagttcttagtgttggtttaatattacctaatgaaagtgatgacatattttttatatctggaatgagcctgttgggatcgcattgcataccttcggggtacaagtcagtttctacactgggtgctgatccttgcacgcgccctttctaccatctcacggtggggatggccgcagggctgtgcacccagaagaagatggctgttagcgtttcggccttcataatggcctgagactttctttctgtaggtggtctggagctgtccggctggtggccccctattttgccatttagcgaacaaccacaggaattttaaaaacaaaaacatcccaagattttttcatttcaaaatgcttcaaagtccacattagatcagatactccgctgtcggcacattcagctgaggttcattacaatcgagactgcaatgtgatctatgtttcatcttgtttttataataaaaagcttcagggaacaagcccaaagccctcaccacaaaaaa

SEQ ID NO: 224566 - DNA, 1000 bp, Homo Sapiens; identical to SEQ ID NO: 118957

SEQ ID NO: 224567 - DNA, 1000 bp, Homo Sapiens
atctgtgctgtccttcaaatgcagccagtctactccatgtcctgttaacagaaagctatggattccctggatgaaatccaaggagggccatcttcagaatggaaaaatgcaaactaaacccaatgccaactttgtgcaacctggagatctagtcctaagccacacacctgggcagccacttcatataaaggttactccagaccatgtacaaaacacagccactcttgaaatcacaagtccaaccacagagagtcctcactcttacacgagtactgcagtgataccgaactgtggcacgccaaagcaaaggataaccatcctccaaaacgcctccataacaccagtaaagtccaaaacctctaccgaagacctcatgaatttagaacaaggcatgtccccaattaccatggcaacctttgccagagcacagaccccagagtcttgtggttctctaactccagaaaggacaatgtcccctattcaggttttggctgtgactggttcagctagctctcctgagcagggacgctccccagaaccaacagaaatcagtgccaagcatgcgatattcagagtctccccagaccggcagtcatcatggcagtttcagcgttcaaacagcaatagctcaagtgtgataactactgaggataataaaatccacattcacttaggaagtccttacatgcaagctgtagccagccctgtgagacctgccagcccttcagcaccactgcaggataaccgaactcaaggcttaattaacggggcactaaacaaaacaaccaataaagtcaccagcagtattactatcacaccaacagccacacctcttcctcgacaatcacaaattacagtggaaccacttcttctgcctcattgaactcaacatccttcagacttttaaggcattccaaatcccagtcttcatgttgaactgggttaagcatttattaaaaaatcgttttcttctacaaaaaaaaaaaaaaaaaaaaaaaaa

SEQ ID NO: 224568 - DNA, 1000 bp, Homo Sapiens
gctgcactcaggccaacaactttgcccggtccttttaccccatgctgaggtacaccaatgggccaccccccacatagagggcatagctggccacagtgctacaccacctgcctgattgccaagggtgcccagcacgtggccccagaccaatctgagtgacttagtgttggcaaggtcccgggacctgtgcagacttcttctgggcttacccagcacgggctccctggagcccagggcagctttcagattgtgttcctccccaggagcagggaacctgtgtggcaggtgccccgggtattttggcagaactagttgattagtttagggatctctggaaatgtcagtttcctgaagagccaagcactttgtgaattctggtttgtttgtaaaacagcattattataatgtaggtatggtcaatgagcagtggtgtccatcacatatattatagaagcaagcgaggacattccaccctagaaatggttcagaaactcataggcacccttagctgatggaaacaatcaatcatatttaatacgcttagaatcagttttactccaatcagctggcaattttgagctgccggttatacaccaaaatgttctgttcagtacctagctctgctcttttatattgctttaaatttttaaagaaattgtattgcatggatgtggttatttgtgcatattttttaacaatgcccaatctgtatgaataatgtaaacttcgatttttttttaaaaaaattagattttagctggagcttttgactaatgtaaagtaaatgccaaactaccgacttgatagggatgtttttgtaagttaattttctaagactttttcacatccaaagtgatgctttgctttgggttttaactgtttggccacggcgggggtgggggcggggggttggtacagaaacttgaagctgtttgtgatatgtacaactcagatgtttctcattaaaaaacaaaattagccagaaaaaaaaaaaaaaaaa

SEQ ID NO: 224569 - DNA, 1000 bp, Homo Sapiens; identical to SEQ ID NO: 118958

SEQ ID NO: 224570 - DNA, 1000 bp, Homo Sapiens
tggcatgtgctgttttggttgaaatcaaatacattccgtttgatggacagctgtcagctttctcaaactgtgaagatgacccaaagtttccaactcctttacagtattaccgggactatgaactaaaaggtgggactgaggatgtgtatagagtgagcgtgtgattgtagacagaggggtgaagaaggaggaggaagaggcagagaaggaggagaccaggctgggaaagaaacttctcaagcaatgaagactggactcaggacatttggggactgtgtacaatgagttatggagactcgagggttcatgcagtcagtgttataccaaacccagtgttaggagaaaggacacagcgtaatggagaaagggaagtagtagaattcagaaacaaaaatgcgcatctctttctttgtttgtcaaatgaaaattttaactggaattgtctgatatttaagagaaacattcaggacctcatcattatgtgggggctttgttctccacagggtcaggtaagagatggccttcttggctgccacaatcagaaatcacgcaggcattttgggtaggcggcctccagttttcctttgagtcgcgaacgctgtgcgtttgtcagaatgaagtatacaagtcaatgtttttccccctttttatataataattatataacttatgcatttatacactacgagttgatctcggccagccaaagacacacgacaaaagagacaatcgatataatgtggccttgaattttaactctgtatgcttaatgtttacaatatgaagttattagttcttagaatgcagaatgtatgtaataaaataagcttggcctagcatggcaaatcagatttatacaggagtctgcatttgcactttttttagtgactaaagttgcttaatgaaaacatgtgctgaatgttgtggattttgtgttataatttactttgtccaggaacttgtgcaagggagagccaaggaaataggatgtttggcaccc

SEQ ID NO: 224571 - DNA, 1000 bp, Homo Sapiens
gtaaacctgcaaatgtcccggatgaaatctgacctacgagtgactcagcaggaaaaggaggctttaaaacaagaagtgatgtctttacataagcaacttcagaatgctggtggcaagagctgggccccagagatagctactcatccatcagggctccataaccagcagaaaaggctgtcctgggacaagttggatcatctgatgaatgaggaacagcagctgctttggcaagagaatgagaggctccagaccatggtacagaacaccaaagccgaactcacgcactcccgggagaaggtccgtcagttggaatccaatcttcttcccaagcaccaaaaacatctaaacccatcaggtaccatgaatcccacagagcaagaaaaattgagcttaaagagagagtgtgatcagtttcagaaagaacaatctcctgctaacaggaaggtcagtcagatgaattcccttgaacaagaattagaaacaattcatttggaaaatgaaggcctgaaaaagaaacaagtaaaactggatgagcagctcatggagatgcagcacctgaggtccactgcgacgcctagcccgtcccctcatgcttgggatttgcagctgctccagcagcaagcctgtccgatggtgcccagggagcagtttctgcagcttcaacgccagctgctgcaggcagaaaggataaaccagcacctgcaggaggaacttgaaaacaggacctccgaaaccaacacaccacagggaaaccaggaacaactggtaactgtcatggaggaacgaatgatagaagttgaacagaaactgaaactagtgaaaaggcttcttcaagagaaagtgaatcagctcaaagaacaagtgagcctacccggtcatctctgttcacccacctcacattccagctttaactccagttttacatccctttattgccattaactcgttaacttatgttgtctaataaaggcaaattctattataaaaaaaaaaaaaaaaa

SEQ ID NO: 224572 - DNA, 1000 bp, Homo Sapiens; identical to SEQ ID NO: 220957

SEQ ID NO: 224573 - DNA, 1000 bp, Homo Sapiens; identical to SEQ ID NO: 115746

SEQ ID NO: 224574 - DNA, 1000 bp, Homo Sapiens
gttgcatgtgctgtgtgaccccaaggggacagggagtcactttggtcatctctgtccccagtacagatcttgattcatagtgacattccataagtggggtgacagcaaatgacttgcaggtagtctcattgtaggtttgtgcaccagagtgaccctgtgagcctttgttaataggttgggagctcagggtgtttatgtccacctgtctggtctagccaaacagtttttttctgggaatcaaatttctgtggtttttatggccagaaattttaaggacttgtgtgtgctgggatatgagaatagaagctacagagttcttttcttgggacctagactgggaggtgcaatgtcaggacctccaggtgaatggtaggatctgagttgaccctgcagttcggttatgcagtcaattatttctttttaagaggaggaggattcacttgggtgttgggatcaaatttggattctgtcccaggccttactgtaaaactaggggattgcctttccatatctgctgggggtggagacccttatgtgcagcactcaatcccactggaagcctaatgctgcagtcagaagcaatgcctggctggggcagtaggggaaattccacccaattttgctatgagcctaaaacctctttaaaaacggtcagttaactaaaaaataaaaatcaagtctttaggagagtagaaaacacaattaactaaaaagcagggacatctgaaagagacgtattaagttaacatttttaaaaatccaaatgaaagtaaatggaataaatgtatcaggtaaaggacaagttgtaagcttggatttttaggtctagcaatacactgtttacaagagcatcacctaaaatgtgacaaaagatgttgaaaggatgaaaaaaggtatagtagacatacactaaccaaaaatgtagctctttgaatctcagaaaaaagtagattttaataaagtgtgaaagttgtcaatcaaaaaaaaaaaaaaaaaaaaa

SEQ ID NO: 224575 - DNA, 1000 bp, Homo Sapiens
agctttgtaaagcagatgaaaataatgctaaattgcaagaacttggcaagtggcttgaacctctgaaaaaccttagatttgaaattaactgcatcccaaacttaattgagtatgttaagcagaatatcgataacttgatgaccccagaaggagttggccttaccactgccttacgtgttctctgtaatgttgcatgcccaccacctcctgttgaaggtcaacagaaagatctgaaatggaatcttgccgttattcagcttttttctgctgaaggaatggacacgtttattcgagttctgcaaaaattgaacagtattctgactcagccttggaggctccatgtcaacatggggactacccttcacagagttactactatttcaatggctcgctgcacactcactcttcttaaaactatgttaacggaactcctgagaggtggatcctttgagtttaaggacatgcgtgttccttcagcgcttgttactttacatatgctcctgtgctctatccccctctcaggtcgtttggatagtgatgaacagaaaattcagaatgatatcattgatattttactgacttttacacaaggagttaatgaaaaactcacaatctcagaagagactctggccaataatacttggtctttaatgttaaaagaagttctttcttcaatcttgaaggttcctgaaggatttttttctggactcatactcctttcagagctgctgcctcttccattgcccatgcaaacaactcaggtatcacttccatataacatgcatcttataaatgactgcagtaacactttttaaaaagccagtgattttgttaaaaaacaaaaaccctcatctcccttcctcccaaaaagacataaaataaccggatgagggggagataaaactgaaacaagttggtcattgaggaaatatgggggtaacattttaaataaatttttgttaaagtgaaaaaaaaaaaaaaaaaaaaaaaaaaaaaaaaa

SEQ ID NO: 224576 - DNA, 1000 bp, Homo Sapiens
caaggagaggaccggcagcaatcgatttgccaagggcatgtcagagacctttgagacattacacaacctggtacacaaaggggtcaaggtggtgatggacatcccctatgagctgtggaacgagacttctgcagaggtggctgacctcaagaagcagtgtgatgtgctggtggaagagtttgaggaggtgatcgaggactggtacaggaaccaccaggaggaagacctgactgaattcctctgcgccaaccacgtgctgaagggaaaagacaccagttgcctggcagagcagtggtccggcaagaagggagacacagctgccctgggagggaagaagtccaagaagaagagcagcagggccaaggcagcaggcggcaggagtagcagcagcaaacaaaggaaggagctgggtggccttgagggagaccccagccccgaggaggatgagggcatccagaaggcatcccctctcacacacagcccccctgatgagctctgagcccacccagcatcctctgtcctgagacccctgattttgaagctgaggagtcaggggcatggctctggcaggccgggatggccccgcagccttcagcccctccttgccttggctgtgccctcttctgccaaggaaagacacaagccccaggaagaactcagagccgtcatgggtagcccacgccgtcctttcccctccccaagtgtttctctcctgacccagggttcaggcaggccttgtggtttcaggactgcaaggactccagtgtgaactcaggaggggcaggtgtcagaactgggcaccaggactggagccccctccggagaccaaactcaccatccctcagtcctccccaacagggtactaggactgcagccccctgtagctcctctctgcttacccctcctgtggacaccttgcactctgcctggcccttcccagagcccaaagagtaaaaatgttctggttctgaaaaaaaaaaaaaaaaaaaaaaaaaaaaaa

SEQ ID NO: 224577 - DNA, 1000 bp, Homo Sapiens
tgctttgtgccaaaaatatcatacctaatttttatagtgctttactatcagaatttatattgtttattatatcttttaaaagcagtaagcagttttcatctgacagcgtagataaaagaggagtataggaatttgaatgctagagcatctcccaggtgagccttattgcagatctttttgatatagtcacccataagcatggtgagctcctgctctcataaggtcagccaaagccccttaagaaggtacacagcacatctgcagtcattcaggaggtcctgtgaagtgtggtgatgcatctaacaccttttgctgctcactgagaacccagctttgaacttacaagattacactaaccatttttaaagtgcacaaaaatattattattagtcttaactaaaattacatattttataatgccctgcaactctaaaccatccttttgtttacacatttttgtatggtattttaagattatcaatcacttcaacatttctataaccttgtttgtatagcactttctcaagagctgtcagtcccacatacagaatcatttcttttacaaaatgatttaatatgtaatcatgtgtcaggacataaattttgtcacttgggacagtagctttccagctaagataattgcgtgaactctgttaaaactgattatcactcatcaatggctttatttttaacctataaataacccctttcaatatacctggtttttacagcattgcaaaatctgtaaaaataacttttattggaaaatgtcatgaagtcatttttcattatttgtactaaacaatgttttatgtactccttttgtgttttatcttttgtttttccatctgtactcccctcatcctcctaatgttgagaaaatcaaatttcctgggtgtgtccttgttaagtgatcaaaagtaaatgttctctttgccattttagatggaaaaataaaaaaaattaaaaagtaaaaaaaaaaaaaaaaaaaaaaaaaaaa

SEQ ID NO: 224578 - DNA, 1000 bp, Homo Sapiens
ctgcagctttattagcttataacttactcatctctatctttaccagcaggctctgtattgttgatatttgcaacttgttttgcttttccattggtggaattgaaataattagtttttaattacataagatgcctgtttgctatttggtggaagatagatgttcatattgaagcagtcacatttgtactgtagttcaataaaagaaaaatgaagtattctgtagcctatatttttcatagagctcatgagcatttactgtacttgctgggtcttgccaagatcatttattccgctgcattgccaaagtgtcttcataccaaattaaaggtggttttaatatatgtttcatggaagttgtttataaaattcaaaggtatttcatttaggtgaaaagtcttatttattaaagtggtttgaataaagtagatcaaaacttccagagatcttaatggctatataggaagaaatatcactcaccataatttaaataaagaataaaaatacttgtattttgtggtggcaaatgtttggtagaactgtaattagaaaaatacaagtatatttgcgtgatggttacactagaagcccagactttacgactacacaatatattcatgtatctaaactgtacttgtaccccctaaatttatttttaaaaaaggaaaaataaaagtatcatgaaaaaacctatttttttttccactgtccttccactactcccataacaaacttatccatggttggtaaaattttacatatttctatccttgaaatgaaggcttcttttaaattccaaagaagtcatggaggcctgtgcatttgaattgtatatgctagtgaggaaaagatttagacatttcaagagcagggttggccaggcgcggtggctcacacctgtaatcccagcactttgggaggccgaggagggcggatcacgaggtcaggagatcgagaccatcctggctaacacagtgaaaccccatctctactaaaaaaaaaa

SEQ ID NO: 224579 - DNA, 1000 bp, Homo Sapiens
gtttctggagcctgcggcagcggtggcgagccacagggcggcgaccgtgagctccgggagctgcgcaaaccacctggagaccatgtctggggatgcgaccaggaccctggggaaaggaagccagcccccagggccagtcccggaggggctgatccgcatctacagcatgaggttctgcccctattctcacaggacccgcctcgtcctcaaggccaaagacatcagacatgaagtggtcaacattaacctgagaaacaagcctgaatggtactatacaaagcacccttttggccacattcctgtcctggagaccagccaatgtcaactgatctatgaatctgttattgcttgtgagtacctggatgatgcttatccaggaaggaagctgtttccatatgacccttatgaacgagctcgccaaaagatgttattggagctattttgtaaggtcccacatttgaccaaggagtgcctggtagcgttgagatgtgggagagaatgcactaatctgaaggcagccctgcgtcaggaattcagcaacctggaagagattcttgagtatcagaacaccaccttctttggtggaacctgtatatccatgattgattacctcctctggccctggtttgagcggctggatgtgtatgggatactggactgtgtgagccacacgccagccctgcggctctggatatcagccatgaagtgggaccccacagtctgtgctcttctcatggataagagcattttccagggcttcttgaatctctattttcagaacaaccctaatgcctttgactttgggctgtgctgagtctcactgtccaccccttcgctgtccagaattccccagcttgttgggagtctacgtcacggcttgtcttgggaaccaatccgtctctctttcttttctttgaagttcccaataaaatgaaaacaggaaatgtaaaaaaaaaaaaaaaaaaaaaaaaaaaaaaaaaaaaaaaaaaaaaaaaaaaaa

SEQ ID NO: 224580 - DNA, 1000 bp, Homo Sapiens
ccaatcaaaaatcaatggtcctgcttcacttcagacaaataataaatgcaaaaccttaaaacaacaattgccaccacccacaccttcaccagacagtgcatcttggccaggttgttgctctgaagcagagctagaaaagcctagaggcttttttcccacaccacggtatctactggattatagaggaagactggaatgttcttgggtgctcagagtttcagcaagcagtatggcaaaatttaccattgagtatctgtcactcctggggtctcctgtgtgtcaagactcagttctaattatttatgaagaaagacacagtaagagaaagacggcaggtggattacatggaagaagactttactcaatgactttcatgagtcctggaccgctggtgagggtgacattccatgcccttgtacgaggtgcatttggtataagctatattgacttgaaagtcctaggtccaaaggacagtaaaataaccagactttcccaaagttcaaacagagagcacttggtcccttgtgaggatgttcttctgaccaagccagaagggatcatgcagatcccaagaaattctcacagaactactatggggtgccaatggagattagtagcccctttaaatcacatcattcagcttaatattattaacttcccgatgaagccaacaacttttgtctgtcatggtcatctgcgtgtttacgaaggatttggaccaggaaaaaaattaatagcttcattcgctggaactctggcaatgatactgacaaaagacatattaaaaagagaaaaactgaattttattaacacatatatcatgcatatatgggaaaattcagtgtatgataatgtaagaagtgttggaaaaagaaaacagaagaaatttgcatcaaatttaagttatagtatggaggctgagaagtccaggatccaggtgccagcagatttggtgcctgctaagggctcactttctggttcttaggcacagcccattctc

SEQ ID NO: 224581 - DNA, 1000 bp, Homo Sapiens
tctggaaatgtgtacatacacctcactgagagatgctgagatgactacagaaattaactttgagaccagaattacagagaagaaaaaccaaaacccaaccctgcatggtcaagtggtgctaacccaagactgtaacagggagaaatgcccagaatcatcaaaatagtgaaagactgatctgttcaaaatatttgctatatgcactgggtataatccgtaatccatacactgccagataatgccatttcaaggaaggatcgaatacttgatggtaaaggccaagtccccctgtattgggaagtgtgtgatttcggcagacctgctgggaaaatttagggtagagcactctttacagaagaactcaaaaacccaatttggataattttcattatctttttagcaaaatggtttcttaatgtttatattttattttcaaggttcattgtttaatgaaatattttattcttgcatttccataaggaaagggaaagtcatgatcatcctaaaggatcacagtttttaaaaggcaaacattttccctaaggaaacagacacaagctttcctagagaatatgatgttttttaggcattaataaggtccttttttataaaggacacttttctcctagtagttttgaattcaggaacagatccaaagttagcagtatatggctgctacatttccattttcattttcgagccatcagtttatgttcagatgccatctctgtaatcgcacatttaaaacataactgtagcctcactaatggaaaagtagtatgatgaacaatcattcccaatggtgtacaatgtaagggttttagggagcaacagtatttaactggaagaaagaattgcatatttaatgtagtctaatatatacacatttgtttaacatgtaaacaaaagtgttaaattcacatatacaacattatacaatttaatcactcttggaataaaatttttatagccttttttctattgggaaaaaaaaaaaaaa

SEQ ID NO: 224582 - DNA, 1000 bp, Homo Sapiens
cagaccaatctgactaaagcacaagaggtacattcaactggaataaacaggccaaagagaactgggtccttagcactattttacagaaaggtctatcatttggcaagtgtacgcttacgtgatctatgtctaaaactggatgtttcaaatgagttacgaaggaagatatggacgtgttttgaattcactttagttcactgtcctgatctaatgaaagacaggcatttggatcagctcctcctttgtgccttttatatcatggcaaaggtaacaaaagaagaaagaacttttcaagaaattatgaaaagttataggaatcagccccaagctaatagtcacgtatatagaagtgttctgctgaaaagtattccaagagaagttgtggcatataataaaaatataaatgatgactttgaaatgatagattgtgacttagaagatgctacaaaaacacctgactgttccagtggaccagtgaaagaggaaagaggtgatcttataaaattttacaatacaatatatgtaggaagagtgaagtcatttgcactgaaatacgacttggcgaatcaggaccatatgatggatgctccaccactctctccttttccacatattaaacaacagccaggctcaccacgccgcatttcccagcagcactccatttatatttccccgcacaagaatgggtcaggccttacaccaagaagcgctctgctgtacaagttcaatggcagcccttctaaggtaaggtgaataggctaaaagttggatttcagattaacagtcagtaactgttaatcctgcctctttttttttttttcttttttggccaagttactactatactaataaaatatgaaatgttaactatgaaaaaaaaaaaaaaaaaaaaaaaaaaaaaaaaaaaaaaaaaaaaaaaaaaaaaaaaaaaaaaaaaaaaaaaaaaaaaaaaaaaaaaaaaaaaaaaaaaaaaaaaaaaaaaaaaaaaaaaaaaaaaaaa

SEQ ID NO: 224583 - DNA, 1000 bp, Homo Sapiens
aagaaagatggattttaatgggaagaaaagaattattttctacatcgttcctcatctcttgagtttgtcaaaaagttttctaagaggcagtgtgaagagccagagatgtccgaaattgcctgacttcatgttttggaagattcctaagtcacatgaaatcatctatcaaacacttgtcttccaaacggtgtgaaaaactacagccaagatagcagttagcattcaaggaagccttaaagattgtgattatgtttttttttcctttgcgtgtgggcactatgctttattagaacacattatttttaatcatagtattttttctttgcctctaagaaaatactttcttaatgctcagaaagttgcttccaattaatgtttttttccccttaaaaagagaagctttgagagatatttttgctttcatagctagaacagttgaagtcttcaactgaggttttatagcagattagacatgggtaaatgatgtctgtaatgggttgagttactgagatgacaatctcctgtgccatttggtttgaatgtacttgataggctgcttcaaatcagtcacttcaatgcattttgtgtaaacccagttgtccttttttattcctctttagacataaatgtgctaactattcctttctatacacaatttattttctaagattaaaaataataattgctaggtttggtggcacatgcgtacagccccagctacttaggaggctgaagcaggaggatccctagagcccaggagttctgggctgtggtacactatgccagttgggtgtaagtttggcatcaatatggtgatgtccctgaagcaggaaaccacaaacttgcatcaggacgggtgaacccagcccaggttggaaatggagcaggccaaaactcccaggctgatcagtaatgggatcttgcctatgaatagccagtgcactgcagccaggacaacagagtgagaacctgtctttaaaaaaaaaaaaaaaaaaaaaaa

SEQ ID NO: 224584 - DNA, 694 bp, Homo Sapiens
attcgcttccgggtgagaggtgcccggtcgccccagcaaccaagtcgcacctggagctgtcctagcgcctagttctctcccggccgcagagctggccgcccagggggagtcgcagagtttggaagatctctctaacacctctcggccaacttcagaagtgtataagatcagctttatctttccaaatggagacaagtatgatggtgactgtacaagaacatcttctggaatctacgagagaaatggaataggtattcataccactcctaatgggattgtctacacaggaagctggaaagatgacaagatgaatggttttggaagacttgagcatttttcaggagcagtatatgaaggacaatttaaggataatatgtttcatggactggggacttacacattcccaaatggggcaaagtatactggaaatttcaatgaaaatagggtggaaggtgaaggggaatatactgatatccaaggactagaatggagtggtaactttcattttacagctgctccagacctgaaattaaagcttcacatgtagatgtgatgttaaattaaagttgaaatgtagtaattgaagcttttagttgtaaggaaagcaacttaatctgttatttgaaatgacttcatacactacccctataagtttgccaataaaaccatcacctgcttacaaaaaaaaaaaaaa

SEQ ID NO: 224585 - DNA, 957 bp, Homo Sapiens
gtggagtaaaatggctgccgcctgggggtcgtccctaacggccgcgacgcagagagcggtcactccctggccgaggggcaggctcctcacggcctccctgggaccccaggcgcgtcgggaggcgtcgtcctccagccccgaggccggcgaagggcagatctgcctcacagacagttgcgtccagaggcttttggaaatcaccgaagggtcagaattcctcaggctgcaagtggagggaggtggatgctccggattccaatacaaattttcactggatacagttatcaaccccgacgacagggtatttgaacagggtggggcaagagtggtggttgactctgatagcttggccttcgtgaaaggggcccaggtggacttcagccaagaactgatccgaagctcatttcaagtgttgaacaatcctcaagcacagcaaggctgctcctgtgggtcatctttctctatcaaactttgatgtgatgactggtgactctgggattgtcaccagttgtaccaatttgaagaacgtggaattagtagaattctagaagtttacttctaatcatgtccctctcaattttatttcccgcagtccaggagtgttatgttttgccactattattttcagaatgtgaagattttactcttggcttaatttttccctccactcagtgctaaggctgagcctccagatgctgttacctcagatttaatcactggttgaaactccgtataatctgtagagcctccatggctctaaaatttggaattaacttctcttgccttaagagctgcttgtacatatgtggatagctatgtataaaagcttcattttaaagaaggttcttattgtgttgtggatcagggtcacagattgggtagcttggacaccagttattagaggatgagaaaagtaaatgaaatgttctctttttcacttcaaaaaaaaaaaaaaaa

SEQ ID NO: 224586 - DNA, 1000 bp, Homo Sapiens
ttggagtccaggccgggttttcaagcatcaagacggaagtaacagcggaaaggaagttccaaggcccgcgctgggaaaaaggtggggggaccaggggaagactcggagtgcgatggcggcgcaaattccaattgtggccaccacttccactcccggaatagtccggaacagcaagaagaggccggccagcccttcccacaatggcagcagcggcgggggctatggcgccagtaagaagaaaaaagcgtccgcttccagctttgcgcagggtatcagcatggaagccatgagtgagaataaaatggtgccctctgagtttagcacaggacctgtggaaaaagctgccaaacctttgccatttaaggatcccaactttgtgcactctggccacggtggcgcagtagctggcaagaagaacagaacctggaagaacctgaaacaaatcctcgcttctgaaagggcattgccgtggcaactgaacgatcctaactacttcagtattgatgctcctccatcctttaagccagctaagaagtattctgatgtttcaggtctgcttgccaactacacagacccccagagcaaactgcggttcagcaccattgaagagttttcctacattcggaggctgccctctgacgtcgtcaccggctacctggccctgaggaaggccacgagcatcgttccctgagccccagaaagggagatgaagtggaaagctgtttcaaaaacagactctggactcatgattttgtttcacggaaacaaactcgttctgctgtcaatctgaaaatgccagtgctgtgccttggaaagaatgtttggctttaatttaagggttttttttttttttagtgtgtgttttccctccaagtgtgatatttcctgctgaattaaattatacttcagttgttgcctcaagtaaaggtgtttgacaagaagatacaataaaaccatacttttcatttaaaaaaaaaaaaaaaaaaaaaaaaaaaaaaaa

SEQ ID NO: 224587 - DNA, 1000 bp, Homo Sapiens
tattcaggcatttgcatcaaattgctgaacaagatgaatagccacattaattcaatgattttaaaagactatttggggagggttgggtatataattttttagctctatttacatcccaaagtagaaagattaaatttatatttactagagctattcaaagaatacacttttctatattgtaaaaacaggacagcaaagtaaatcatacagaaaataaacatttatactattctgtaaaaaaggttttgcattttttctttagtataataacaccactttattaaccatttaatatgcaaaaaaccttttaaattatctgaagtaaatttgacattacttctgaaaacacacaactaaaaaattctatcattttgctcagttattactaacataaattgctttgaaatgagaatatgtcttctctttttttccccactgtttcttttaagagcagaaactcagccgggcatggtggctcacgcctgtaattccagcactttgggaggtcaaggcgggtgaatcacttgagtccaggagttctagaccagcccaggctacatggtgaaaccctgtctctactaaaaatataaaaaaattaactgcgtgtggtggcgcacacctgcagtcctcgctactttgaaggcctgagcctgcagaggttgaggctgtagtgagtcaaaattacaccactgcactccagcctggcaatcagagtgagaccttgtctcaaaaacaaaaatacctagaaaatcaatctactctgtcttttaatgtgaaatgttcttatgatagctatctttcttagtttcctttttttctgaagcactaaacacaacctgtaggtcttatctctggggtctgggaaacagaaccttaatgttacaggtacaaaagcaaacagagtgattagttccccattttctggtagtgaacaactgacatttttttcaatcttatgtaaaatgtgaataaaaataattttaaaaaaaaaaaaaaaaaa

SEQ ID NO: 224588 - DNA, 1000 bp, Homo Sapiens; identical to SEQ ID NO: 118966

SEQ ID NO: 224589 - DNA, 1000 bp, Homo Sapiens
cgcaagcccaagcccaagcccaaggtcggcttccccatgccgcggccgcggcccaaggcctacaccaactcggtggacgtcctcgacggggaggggtgggagtcccaggacgctccctcgtgcagcacccacccctgcgacagctcgctgccctgcgactccgacctctagacgcttgtagagcctggggggcgccgggtggcaaaggactcacccccgcacaggcccgcctggcttcgagttggaacccggacacttgcccctcactggtgtggatggaaatctgcctttcgtgggaccaaacaggactccttggacgattagttcaggttgggtttggttttcttcttaaagagtttagttttcctctccagagggatcagggtcctcttagggagtgacgggcttttcatatatttttgctgaagaatatatggaaagggtggcatttgcgtcacgtggaccagggacagtgctgaaatcagcagtgctcagaaacaatttaacatgttgaaacgacaatattctaaaatactgatgaatcttgcatcaatataattattgggttttttttctttttcctgctgtataactccttgccatgcaaactctcaagaggccaatatattcctggccatgtttgaatgagcctcttaaaataaacttagagccatgcaaatgccagcagcttaatggatttcatggaatgaaataccgtgattaactcatagctacatatcattgcataaatgggatttatcttttttctcacttatttttgcggtgaaagtcgagggcatgcaagagtttctcttccagaagccaagaggagaacaaaggtcctaatgctgtactattccaccctttggacgcctcatccaggacgcagaggactctaggtttaacattttgtacaaaatggaacctgttaatcatattaaagcacatatgtatatatcttttatttataaataaaattttaaaacaatagtttcagtat

SEQ ID NO: 224590 - DNA, 1000 bp, Homo Sapiens
gggatccagcgatcctcccgcttcagcctctagagtagccgagaccacaggtcacccctcgctgccaggctctcttcccggtccagagcccacaggatcctacaggaggggccaacaactgcttgcctttgaaacttgaaactctcggtctaaggttccttaggagcgtaaaaggcacagcgttttctgatcgcagcttcaggcctcccgcccctgtcccggtacctctcctgcaggacggaactctgtgggaaccgctcgttgattctgatggttaactgtcagatatccttgatattggacataggatttggaagagggcaggagagaaaaatgaactgcaagactccagcacaagaggtgggattgctggcagatgtctgctccctctccaaacctaatgaacatctcaaagtgccatccactttcctatacccttgatctgtgaaatggatcactgacgctttctctgtctttccggaaatgcaaaacaggtgaattttcaagcgcttgaattgtctctcacacttttcagtcaagagtggggctataaactccttcctcataggaaataaggaactgccactgcttggaagtaaaacgtatttttcccataagctttcacatttcccaaaaaaaaattatacatccagatgtaatccccctaagaggcttacagaccctaccaggagcgttcccacgcgaacgcatcatctcccaatcggatcctgaaaacaccatgcaaccaattccatccttttctggatcaacctgggcagaggacaggtgcagaggagcccagagaagggccttgacaagtcaggagacccaatttggggtcgcaattgtcactcactccccaggcgtttgctttgatcttcccctcccaccatactacttcttctgctacctggtttctccctggtatttgaggatcctccaattgccttctggtcttacagacgggagaataaaggaaaaatggcatcgtttccacctt

SEQ ID NO: 224591 - DNA, 1000 bp, Homo Sapiens
tcatcttctcatctgaatggaataagtctgaataccccatattcatactcctaatctcattatatcttatttagtgaattttatttatgaataatttctgttgaagtgaaaactagatatttaatattttgcttttttgctacatagtctactcaaaaattacatgaggagaaatcctttttccctttgtttttcttttttcttcttttgtggtatttaaagcatattttaggttgaagttacttatttctagtcttgtacttctggcttaagtataaccatgtaagaattataaattttagttttctgaacccttaaacttttttagcatgtggtctgttacacatgctaaaaaattagtcttacttgtaacagcgtaattaaacacatcatggaggagagaaacttaaaatagtattttggcttttgaagttatttgtgttgctaaatagatgcagaggttttacagcagtttattttaaggttttatttatacataattactttgaactcttcagagtagatattttttcacaaggcagtttgtcataaattctctcatgcgcttcagaatgcataagtgccatcctttaatcatagactttgaggagagaaagcataaaaatatagcatataatctaaaaataaatatataacatgcacaaataatgtgacattcttactgaatcaaatcatgattctagaacttgagatcttaaatagaatttcggtttgtatcttccatataataaccacacacagataaccacacaaaaaatcctttgtaaaatttctgattgataggattagagtgcttaaatttttggggggggaagggtggggtaaagtgtaagtgctttcttttgtccctaacttgtgtattgatggcagtccactctgttttctaaaaatgtattttactgtggtgcttaacttcttattaattaaatcccgtatcagaaaccttgaaaaaaaaaaaaaaaagaaaaaaaaaaaaaaa

SEQ ID NO: 224592 - DNA, 1000 bp, Homo Sapiens; identical to SEQ ID NO: 118967

SEQ ID NO: 224593 - DNA, 1000 bp, Homo Sapiens
aaatatgagcatttatcactgactcctcctggtccagtgagcagcagcagaattcaagtatttaaaaataaggtgcatttctaaattgcaggctataccttcttttccaaaccaatgggctagagtgaatttcctccaagtacttgggctgtcttactgctagctcttctaacaggggaagtctgtatgaatgcatcaccccctaataaggcaagaggaaggaccctgaaatgttgccagaaatgtactgttacatcaacatttacattatattaacatcatcacactctgtgttcaacacacagaacaacatagatactttagtttgtctaaagtaaaaatccacataaatagcagattcctttgttgacaccagtgtgttgtttaccttgtgcccatggtccagattttgagctggagaaggactatggctgttccttaaagtctctgcccttgcagaatctgtagccttcaggataccccgagtgccttacagggcttgtgaacaccgatactagaagtcaaaaagaagagagtgcccaagtgtgggtttggaggcactgacgcattcgccaactcaccgtcatcccctccttgaaaccctgagagagagtgtgtgttttatcacagtaatggaattcagtttagcctcaggaaactcatattgtgaatataggtatcaaatcatatatttgtttactgtatattttttaaaaagctttattgtaaatttatgcaaaaactaaccgggcctgttttcttacggcggcatgccaggtagtgtgtgtattctcccaggcactcccttcatagtcaccctctaaccacatgacattccgttccatgctaagcagtattcacaggcctaaaataggtttgtatggtgatctacaagattttacaaatatttttgtattgtgattcctatgatatataccagagaattttttactcgtttgtaaattattgtacagttttaataaaaaatgttttaaatctt

SEQ ID NO: 224594 - DNA, 1000 bp, Homo Sapiens
tttagcaggaagcagctcaggacagggaagacaaagtagcctccaggtgccaattactttaaagccactctgggtcaaatggagattcatgagtcacggccttggcccgaacgcccattactatgtgagcctttatttccttcagataaaggataactttttacggttttaaaaggagggcttaattaaaaggccaagaagagggttaaatggctctcttgagacactagcagcctggtccagtcaccctttgtcagcctgacagtgcctcatctgaccgccaggaggcatccttattggtgcttcccggctgcagggcactgcggcccctccctcacatgatcactaaaaaccttcaaagacccagtctagccaaaagctcaagtgggacaatggcacagtattaaggtcaaggacaaaaacttacttactttaggaatgaaccctattctatcatcatatacaacagcaccactgagagctggtgaaacagtttaaatcccatcctctgcttgtggcaaatgatgcataaatgcctgctgctcacagtaaaagggcttcttcctcttttactgggtgatccccctgaaggcccagcctatcccaactccacagtcaggaaggcctacgtccttggtccacagacggagctgggccaggtttaaaagactcagtctaggcttgcctttgcaaaccaaaaacgaggacaggtctgaagtgggaagaaagctccgaaatagaaaacggttaggtcctattctatccccagcaaatctaagcaagaaatctctttatacaccacatggcccccccactcccataaaacagccttggtaataaagaagttatcacaccaagacataccttttagatttttattagtagttctctctgaagaatcaaaatagttagcaaattattttagattcaagactgtatatcctttgtatttagatctttaatgatgtacaacataatacaaaacaaaccagagagactg

SEQ ID NO: 224595 - DNA, 1000 bp, Homo Sapiens
gaaagcaagacatttattaagcacctcgtatgtgccaggcactatgctaagcactttacataagttaggattaatccctgcaagaatcctataaagaatgttactagcatttacacttcccaaatgaaggtaccaaagctcaaacgcaatgttgtgaagctgtttccttcagatttaggttatgtgggatgatgtgggattgaagaggaaagaaaggtgggattatccccctaggaagactttcaggcctgacttcataggaattcatccatcttatcatgtggagtttatctcaccctgctgttgcaggatgctatttgcatgtgtccccaggtgatgttttttctttggggagtaggggtttggcttcctcattcatccctcttgctaaaagaggagatagttgatgttgcatctaaagatgctataagacaatgaaagtttgatgttgtacatacctacaagtaccatttttgtgcatgattacactccactgacatcttccaagtactacatgtgattgaataagaaacaagaaagtgaccacaccaaagcctccctggctggtgtacagggatcaggtccacagtggtgcagattcaaccaccacccagggagtgcttgcagactctgcatagatgttgctgcatgcgtcccatgtgcctgtcagaatggcagtgtttaattctcttgaaagaaagttatttgctcactatccccagcctcaaggagccaaggaagagtcattcacatggaaggtccgggactggtcagccactctgacttttctaccacattaaattctccattacatctcactattggtaatggcttaagtgtaaagagccatgatgtgtatattaagctatgtgccacatatttatttttagactctccacagcattcatgtcaatatgggattaatgcctaaactttgtaaatattgtacagtttgtaaatcaatgaataaaggttttgagtgtaaaaaaaaaaaaaaaaa

SEQ ID NO: 224596 - DNA, 1000 bp, Homo Sapiens
agtgcagtggcacaatcatggctcactgcagtctctgcctcccaggctcaagtgatcctcccacctcagcctctcaagtagctgggactacaggcatgtgccaccacacctaatttctatattttttgtagagactaggtttcaccatgttgtccaggcttgtcttgacctcctgggctcaggcagtccatctgcctcagcctcccaaagtgctgggactacagacatgagccattgtgcctgacctagttctgctttttatgttctaagaagtattatttattctatgctgagcttacatagaatttcttccatgttttctatagctatagtgtatttttaccttttactgttagatctatttcatgtttttattatggataatggaggaggtaaaggttgaattatattttcccccatattattgacccatagtgacaccagttttgggagatgtctttcattttcgcccttacgttgttattggcaccttttgcaaaaatcaattatttatcatgagtatacttctgaaatgatctgtttcatcaatctatttgtcttctcagtagttccacattgtcttaattatagctttagaggaagtcttgaaatttggtagtaagtcttccagttttgttattttaacaaatttctctaggctgggcatggtggctcatgcctataatcccagcactttaggagccccagacaggaggatcacttaagcgcagaagatcaagaccagcctgggaaatatagcaagaccttatctctacaaaaaaatttagaaattagctgggcatggtggcacccatctgtagtcctaactgctcaggaggctgaggtggggggattgcttgagtccaggagttcaaggctgcagtgagttgtgatcacaccattgcagtccagccaggttgacagaatgagaccctgtctcttaaaaaaaaaaaaaaaaatcctggtgatgcttttctggattaaaaaaaaaaaaaaaaaa

SEQ ID NO: 224597 - DNA, 1000 bp, Homo Sapiens; identical to SEQ ID NO: 118969

SEQ ID NO: 224598 - DNA, 1000 bp, Homo Sapiens
aattctgaatggaaagaggagcagtgagggagaatctcccgactttccagaagagttagaaaaatgatgaaaaagacctttggagcaaagctgatgacaacttcccagtgaattcttgaaggaaaatgatacgcaacataattaaattttgagttctacataagtaattcaagaaaacaacttcaatatccaaaccaaataaaaatattgtgttgtgaatgttgtgatgtattctagctaatgtaataactgtgaagtttacattgtaaatagtatttgagagttctaaattttgtctttaactcataaaaagcctgcaatttcatatgctgtatatcctttctaacaaaaaaatatatttaatgataagtaaatgctaggttaattccaattatatgagacgtttttggaagagtagtaatagagcaaaattgatgtgtttatttatagagtgtacttaactattcaggagagtagaacagataatcagtgtgtctaaatttgaatgttaagcagatggaatgctgtgttaaataaacctcaaaatgtctaagatagtaacaatgaagataaaaagacattcttccaaaaagattttcagaaaatattatgtgtttccatattttataggcaacctttatttttaatggtgttttaaaaaatctcaaatttggattgctaatcaccaaaggctctctcctgatagtctttcagttaaggagaacgacccctgcttctgacactgaaacttccctttctgcttgtgttaagtatgtgtaaaatgtgaagtgaatgaaacactcagttgttcaataataaatatttttgccataatgactcagaatattgctttggtcatatgagcttccttctgtgaaagtacatttggagacacaactatttttccaaaataattttaagaaatcaaagagagaaaataaagaccttgcttatgattgcagataaaaaaaaaaaaaaaaaaaaaaaaaaaaaaaaaaaa

SEQ ID NO: 224599 - DNA, 1000 bp, Homo Sapiens
gggtgggggcagagccatgacatttttggtttaaaggagccttctcatctctggccgagaacactgctgggctcccaggtagctgaaggcctcagcccacccactcccttcttccctgtgtggggctcaagcctggtgcacttagtatagaagagctaacgtactcaggcttgtgccacgggtgagcactgaggccccaggtgtcctccctcccccactgtctgggacacaggacaggtgttgcgtctgactctgtctccccctgtccaagagctataggctggttgaggcaagtggaaccttatcagtgacttggccaacaagggaagccttggggcctcagaattcattgaagatttgttttgggacaactggaagaatcagcaccatggatactcgcccgtgggcagggctgtggtcagccaagaatagaggtcatatagttgggccatggggcaattgttggcagccatgactgacggccccttgtgcaagctcattcttcagtggatccttcagtggagtggtgacacgtgccagcggtcactctgccacatcacttccttcttgaaagcctaagagtgcgtatgcgtgtgtgtgtgtgtgtgtgtgtacgtgaggcagaagaatatgacagatgtcagcttctccctgtgtcagatgatatgtccttgaagctggcaggggattcccagtccagggaatatccctacatgatttttgtcattcatgggtcctccctgggcctgacaacgggagtggtgggtgggtgagaacaggttctgagagggggcttctaggaaggccccagccctagtcctaggcgacttgaataaagtgggaggtcaaacatgggccttcggcattgggtttctagggaatatggctcagtagggcctgccccttcaagggcagcaagaacgaagcaggatgttgtcactcccgtctgaataaagctccatgagctgggttggaaagctgaaaaaaaaaaaaaaaaaaa

SEQ ID NO: 224600 - DNA, 1000 bp, Homo Sapiens
agtatatcagttatgaactgagggtgaaatatatttctgaatagctaaatgaagaaatgggaaaaaatcttcaccacagtcagagcaattttattattttcatcagtatgatcataattatgattatcatcttagtaaaaagcaggaactcctactttttctttatcaattaaatagctcagagagtacatctgccatatctctaatagaatcttttttttttttttttttttgagacagagtttcgctcttgttgcccaggctggagtgcaacggcacgatctcggctcaccgcaacctccgccccctgggttcaagcaattctcctgcctcagcctcccaagtagctgggattacagtcaggcaccaccacacccggctaattttgtatttttttagtagagacagggtttctccatgtcggtcagggtagtcccgaactcctgacctcaagtgatctgcctgcctcggcctcccaagtgctgggattacaggcgtgagccactgcacccagcctagaatcttgtataatatgtaattgtagggaaactgctctcataggaaagttttctgctttttaaatacaaaaatacataaaaatacataaaatctgatgatgaatataaaaaagtaaccaacctcattggaacaagtattaacattttggaatatgttttattagttttgtgatgtactgttttacaatttttaccatttttttcagtaattactgtaaaatggtattattggaatgaaactatatttcctcatgtgctgatttgtcttatttttttcatactttcccactggtgctatttttatttccaatggatatttctgtattactagggaggcatttacagtcctctaatgttgattaatatgtgaaaagaaattgtaccaattttactaaattatgcagtttaaaatggatgattttatgttatgtggatttcatttcaataaaaaaaaactcttatcaaaaaaaaaaaaaaaaaaa

SEQ ID NO: 224601 - DNA, 1000 bp, Homo Sapiens; identical to SEQ ID NO: 118973

SEQ ID NO: 224602 - DNA, 1000 bp, Homo Sapiens; identical to SEQ ID NO: 118974

SEQ ID NO: 224603 - DNA, 1000 bp, Homo Sapiens
aagttgattccttcattcacttcgccattcattcatacttccgtccatccattcagaaagcatttattaagaatttactcaggcatgatggcccatacttgtaatcccagctattgggaaggatgagatgggaggatggcttgaggccagaggtttgagaccgaccagccagggcaacacagtgagaccccttctcaaaaaaaaaaaaaaaaaagagagagtgtgtgattagaagctaaataggaaagttttgagcttcaagtcagtgaggagtaaaaaagatttttaaaaagcaaagaaaacaaaatataagggaaaaatatgagaaaaataaaaataaaaagagaataataggccaggcactgtggctcatgcccctaatcccagcacttttgggaggtcaaggtgagcagaacacctgaggacaggagtttgagaccagcctgcccaacgtggtgaaaccccatctctatgaaaaatacaaaaatcagacgggcacagtggtggtgcccacctgtgatcccagctactcaggaggctgaggcaggagaattacttgaacctgggaggcagaggttgcagtgagctgagattgtgccactgtactccagcctgggcaacaagagcgagactccgtttccaaaaaaataagagagaatagaagaagctactgcatgatgttagttaccaagcctgccatgggtcctctcttgctagacacactccatagatccccccactgagctgtggatgggcaaaccccggtggaatcccaccctccccaacaccccactgagccctgggccccctcctcccttcctcacctccaccttctccctgccttctctcttctctcgtctgagcccccaggccttttccactttgagggaggtgcttcgaagaatgttgcccacacctaagtgttagaagcctatgtccgttcatccctgagaggtctgaaagaataaaaataaattctaaaaaaaaaaaaaaaaaaaca

SEQ ID NO: 224604 - DNA, 1000 bp, Homo Sapiens
gttgttgagacaaggtctcgctgttgcccaggctagagcgcaggagcacaatcaccacacactgccgcttcaatctcctgggctcaaatgatccttccacctcagcctcccatgtggctgggactataggtgcatgccaccacacccagctaattaaaaaaattttttgtgtggagtctatgttgcccaggctggtctcttaactcctaggctcaagtgatcctcccacctcagcctcccaaagtgcttggatgacaggtgcgagccactgcacctggcccacattttttaaagagacactgtcccactccatcacccaggctggagtccagtggtgtgatcatagctcactgcatcctccagttcctgggttcaagccatccctcctgcctcagcctccccagtagctggaactacaggtgtgtgccatcacacctggctttacatttttctgtggggtcttactatattgcccaagccggtctcaaactcctgagctcaagtgatcctctgcctcagcctccagagtatctgggattacatatgtcggctaccgtgtctggccgttcacatctttggccactatttgcttgtgaaaaggtataatgaggtggtacttatcatttttactgtgtctcatgttttgtatatttttgtttcatcaactaagatgcactgtaacatctctgaaatctggatatattatcaatggtttatcatagttttgttagcaatacactgtcttttagtggtgcctaaaataatggtatagttgtgaggtgatcttagatttgatgaagcacagtatgcaggtaggcctaatgggggaagatggtaatataaaagcaagaagtattttttttttgtaatgactgaaagctgttctgtggatgacctaccctttcctttaaacacgattctctcacttccaactccaaacttgctcaactaatccttaaaaataaacttgagctggaatttgaaaaaaaaaaaaaaaaaa

SEQ ID NO: 224605 - DNA, 1000 bp, Homo Sapiens
atgaggaaagaaatggaggctctaagccatcagattcctcctcccatccagacagcggcagagagcacagatgcaaaccagcctgacccagaggctgggggagatgccgccactcctgattatgttctggcccttgaagcagaaatacgaactctaaagcataagtttaaaactctggaaaagcatctagaagatgtgttggatcctttaaagatgtcctcacctcatgctgagtctcagcccagcgtccgcacctcgacagagacgactggagggtctgcccaagctggtcaagccggagggtctgtccaagctggtcaagcaggaggatctgtccaagctggcccagtatcctctggactggcactcaggaagctcggggacagagtgcagctcctaaacctgctggtgacacgactcagacagaaggtgctgcgggaacccctggagccggccgctctccagcgtgagcttccccgtgaggtggaccaggtacacctggaggttttggagctgcggaagcaggtggctgagctggggaagcatctcaggatagcccagcacgggggagcggagccttcaggcaggaagcagcccccagcctcggacgccgtggcccttgggagagaggtgggtgcccgctagctcctcctgccacccgccgaggttcctgccacagaaaccgtccttgcctgtgctctgccagcgttgctgtctgtatgccctgggagctcaggtgggacgagggctgcagtgaaggccgtgcctggaagtgggccctgctccaccccctctccccattcctctgccttcttcctccacacgcctcctcttctcctggtccttcaccttgacgccccgttggtggggggcgggacgggcccatcccagtcctcccttcagctaacagcatcttgtgttggaaacgcaaaaaaaaaaaaaaaaaaaaaaaaaaaaaaaaaaaaaaaaaaaaaaaaaaaaaaaaaaaaaaaaaaaaaaa

SEQ ID NO: 224606 - DNA, 1000 bp, Homo Sapiens; identical to SEQ ID NO: 118982

SEQ ID NO: 224607 - DNA, 1000 bp, Homo Sapiens; identical to SEQ ID NO: 221329

SEQ ID NO: 224608 - DNA, 1000 bp, Homo Sapiens; identical to SEQ ID NO: 118983

SEQ ID NO: 224609 - DNA, 1000 bp, Homo Sapiens; identical to SEQ ID NO: 118985

SEQ ID NO: 224610 - DNA, 1000 bp, Homo Sapiens; identical to SEQ ID NO: 118986

SEQ ID NO: 224611 - DNA, 1000 bp, Homo Sapiens
tcccgtcaccatgctccagaacatttccgacaactggctggggggtgctttcatttgcaagatggtgccatttgtccagtctaccgctgttgtgacagaaatcctcactatgacctgcattgctgtggaaaggcaccagggacttgtgcatccttttaaaatgaagtggcaatacaccaaccgaagggctttcacaatgctaggtgtggtctggctggtggcagtcatcgtaggatcacccatgtggcacgtgcaacaacttgagatcaaatatgacttcctatatgaaaaggaacacatctgctgcttagaagagtggaccagccctgtgcaccagaagatctacaccaccttcatccttgtcatcctcttcctcctgcctcttatggtgatgcttattctgtacagtaaaattggttatgaactttggataaagaaaagagttggggatggttcagtgcttcgaactattcatggaaaagaaatgtccaaaatagccaggaagaagaaacgagctgtcattatgatggtgacagtggtggctctctttgctgtgtgctgggcaccattccatgttgtccatatgatgattgaatacagtaattttgaaaaggaatatgatgatgtcacaatcaagatgatttttgctatcgtgcaaattattggattttccaactccatctgtaatcccattgtctatgcatttatgaatgaaaacttcaaaaaaaatgttttgtctgcagtttgttattgcatagtaaataaaaccttctctccagcacaaaggcatggaaattcaggaattacaatgatgcggaagaaagcaaagttttccctcagagagaatccagtggaggaaaccaaaggagaagcattcagtgatggcaacattgaagtcaaattgtgtgaacagacagaggagaagaaaaagctcaaacgacatcttgctctctttaggtctgaactggctgagaattctcctttagacagtgggcattaa

SEQ ID NO: 224612 - DNA, 1000 bp, Homo Sapiens
ttccctcctttagtgtcacccgtccaagcgtgttcgtgggcaggcccccaagacccagcagcagatgaggccgacgcggatgctgccccccaagcctactccaaaacagagactgcaataaaggcgtggacgatgtggccagtaccctgaaggacaggacagtgaggaaggggagggagaggctggggaggggcaggcagggcgacaggcagggtctcagcggtagggacactgagggccaggcctagtggctggtgtggcgggagtggcgagccagggccctgtgggtggtgaggagtagttgctggccagcctggatgacgacctctgacccatgtcgccactggagctggtggcagtggggctggggaggaaggaacgccaagggccacagagagaacccaggctccatctgggccgagacatcctggcctctgagtttgacaggggagcccactgcccggccaaacaggagctggggctgggagctcagactcagtccagcccaggtgggagtcctggggaaggagatagcccacgagcctcaccagccctgggtgacagccagatggtgtccgaagccccaggcctggggcaggcagggggtgtctgggccagggatgaacggaggccaaactgggtaacaagcagagtcgggtgtgcagtgtctcataggcaacgtgaggagtgtttgagcaggagccggggcaggaggttgtggaaggccctggaaggtgccgaccagccaggccctctgatttggccggtgggggccatcggtgacgtgggaacgatggtttcagggaagcagtggctcagagctccgtgacgttttttggaacgggaggtgcgagatgcagacatttaacacatccggggctgtagccaggcagaggagcgtcagaccccccaccctgtttggaagggagaacccatcagattcgccttgggtgtagatgaaacagaaataaaagaatcaaagacaaaaaaaaaaaaaaaa

SEQ ID NO: 224613 - DNA, 1000 bp, Homo Sapiens
tgaggcaggagaattgcttgaacctgggaggcagaggttgcagtgagccaaaatcatgccactgcactcccgcctggcaacagagcaagagtctgtctcaaaaaaaaaaagaaaaaaagaaaaaaagaaaaaagaaaaatctcattatttcaaaatgatagacatataccaaaaacaagtctataatgtgagtagttactaaaatttacacatcttaaaagtgtgtaaatgcttaaatttcagaattaccatcagaacctcaattgacattcctttgaatacgctaataagtgacaaataagattaataagatttttcaaaatcgccaggactggtgaatataaatgatgattgaactggaataatattggggaccaaatcaaatgaatgattaaattatgaagctcatatccttttgaaggtagttgcaaagagacatttcaaaactgccctaggccattgcagcatccttagatgggacgcataatcattaccttaaagcatcaccactcattttgaccatatagattttattatgttagtttaaaaggtcaatcagcctcatgactttatagttatgtcttgtatttaaaaacattttttatacatttggttatgttgataaaccaaaaacatttgattaataaaatatctatttgaataaattatgagctatcctttcaaacagctattggcaagttttaaacccaaaatatatacacatagttctgtaataaaactgtttgacttctcaagtaacatgacttccttatttctgaacagtactggttactttcaaaatgaatttttattgagattttccattaactatttttttcaaagactcaaattttgtaccaagtaaatccaggctttatgtacaaacatgttgtttgttttatttggggctgggggaggtatatgatgagcagacttctcggaattcataataaattttctaaaagcctaaaaaaaaaaaaaaaaaaaaaaaaaaaaaaaa

SEQ ID NO: 224614 - DNA, 1000 bp, Homo Sapiens
tgataaaacatttactaccttgtcctttaagtctgctaggctctcagtaccctaaaataaactagattgtgttgctattttttttctttctctataaaaataacacattattttatccgttatttgaaattttacatttctggttaccaaagttcattctgatagcatgtactttgtgaattattatctttgtctataactgacagatgtttatattaaaataaaatattgtattaaaaatttaaaataggtattttggatagatatgtgtctgtagtatataatctaatgtgtccatagtattattgctaatcttttggtttactataagatgatataactattttttcattgggaatatacatttttcttaatgttccaacatctatactttgtaaagtcaaaacatttcccatgagctgtagttattcatccttctgtacaaaatgaaaagtttggaaattgtttgccctgataccttgaaaaagaagccagaatatttatttgcttcatcaacttcagtgtatatcattttgtgttattttatacgaaaacatgtttattattttcatttttgtaaaaggaagtaaaaggtcaacattttctctcatgtaccaaccttgtttgtatttctattttctgtaatgtttaagtatgatgttgaagaaattcacattctcttatagtttggatgggaagactattgactatttcagaaacagacttatttcagaggcttattgttttctctgtatttacctaatattttataacttttatgaatcagaataatgtccttcataaatttgtttaattgaagtcatctacttctaacaggacagatacacaactatttgaggtttacaaattacatctttgataagggaaatggtttcgtgacatgtacacagttgctattaaaatgtaactctatatattctatatgattgtaaatattttatacaacaatacaaataaaatatttttctattataaaaaa

SEQ ID NO: 224615 - DNA, 1000 bp, Homo Sapiens
aagaaagtggtctgtggatcagcattttagaaactacaaatataggtttgattcaacacttaagtctcagactgatttcttgcgggaggagggggactaaactcaacctaacacattaaatgtggaaggaaaatatttcatttagcttttttattttaatacaagtaatattattactttatgaacaattttttttaattggccatgtcgccaaaaatacagcctatagtaaatgtgtttcttgctgccatgatgtatatccatataacaattcagtaacaaaggtttaaagtttgaagattattttttaaaaaggtaaatggttaaattttacatgacagatattttatctattggcctgttccccaaatggccattttaaaatgcttgggtacacttctcttaagtggtctagtcaaggaacctcaagtcatgcttttgctatcaccaatcatagtgtacccatctttaatttatatcaggtgtataaatgtacatttccaaatgaacttgcacttgttatattataattggaagtgcagtcagcagatgctgttgtgaagctaatgtcacaattatgtgcaaaggtgtgcttcctgctgtatgtgagctgtaaaaatgttacgtgaagaaataaatgaaacttggccagtttgttcctctagtagtatatttaattttgacataagtaacttttaaaatttgtcttaaaaatttatacaccagcaatttagacaaagccttaagcaaattttgtattattgttctcacttattattaataatgaagtagaagttacttaattgccagcaaataaatacgtgtcaaaaaagaatctgtattcagaccctgggtcaggaaattactgcccacttgtcaagttcagcccaccatctgtttgaagattatatgaagtttaaattctagtgtccataaataaagtttcagcggaacacaaaaaaaaaaaaaaaaaaaaaaaaaaaaaaaaaaaaaaaaaaaa

SEQ ID NO: 224616 - DNA, 1000 bp, Homo Sapiens
ctcagagcaacagagcagatgaccaacgtgggctgctaaggaaggaagacctggtgttgccagagttcctccgtttacctcctggttccacagaactcaccctccccactccagctgctgtggccaagggctttagcaagagaagcgccacaggcaacggccgggagagcgcctcccagcctggcgagcagtgggagccagtccaggagagcagcgacagcccgtccaccagcccgggctcagcctccagcccccctggacctcctgggacgaccccccccgggcagaagtctcccagcgggcccttctgcactccccagtcccccgtctccctcgcgcaggagggcaccgcccagatctggaagaggcagtctcaggaagtggaggccgggggcatccagacggtggaggatgagcacgtggccgagctgaccctgatgggggagggggacatcagcagccccaacagcaccttgctgccgccgccctccaccccccaggaagtgccaggaccttccagaccaggaagtgggacccatggcagccgagacctcccagtcaacagaatcatcgatgtggatcttgtaactggctcggcgcccgggcgggatggtggcatagcgggggcacaggctggccctgggaggtcgcaggccagtggtgggcctcctacatcagacctccctggcttgggccccgtcccgggtgagcctgctaagcccaagaccagcgctcaccacgccaccttcgtctgagctgccctggcctggccaactctcctgtggacatgtcggggtggggcagcccaggtggattctgtgggcctcaggggggccaccctggccaccacaccctcaggagcccagccaggagggcagggggtgacctcgctggaggcactggccccggacattcgccatgctggccatggggctccctggccctggcctcctgctgcccaataaagcatttctgaggacccaaaaaaaaaaaaaaaaaa

SEQ ID NO: 224617 - DNA, 1000 bp, Homo Sapiens
gtcactggccctgcaaatgccctcagcagaagccccgttgccctcctggagtgagcctggtgagagatggctgtggatgctgtaaaatctgtgccaagcaaccaggggaaatctgcaatgaagctgacctctgtgacccacacaaagggctgtattgtgactactcagtagacaggcctaggtacgagactggagtgtgtgcataccttgtagctgttgggtgcgagttcaaccaggtacattatcataatggccaagtgtttcagcccaaccccttgttcagctgcctctgtgtgagtggggccattggatgcacacctctgttcataccaaagctggctggcagtcactgctctggagctaaaggtggaaagaagtctgatcagtcaaactgtagcctggaaccattactacagcagctttcaacaagctacaaaacaatgccagcttatagaaatctcccacttatttggaaaaaaaaatgtcttgtgcaagcaacaaaatggactccctgctccagaacatgtgggatgggaatatctaacagggtgaccaatgaaaacagcaactgtgaaatgagaaaagagaaaagactgtgttacattcagccttgcgacagcaatatattaaagacaataaagattcccaaaggaaaaacatgccaacctactttccaactctccaaagctgaaaaatttgtcttttctggatgctcaagtactcagagttacaaacccactttttgtggaatatgcttggataagagatgctgtatccctaataagtctaaaatgattactattcaatttgattgcccaaatgaggggtcatttaaatggaagatgctgtggattacatcttgtgtgtgtcagagaaactgcagagaacctggagatatattttctgagctcaagattctgtaaaaccaagcaaatgggggaaaagttagtcaatcctgtcatataataaaaaaattagtgagtataaaaaaaaaaaaaaa

SEQ ID NO: 224618 - DNA, 1000 bp, Homo Sapiens; identical to SEQ ID NO: 118997

SEQ ID NO: 224619 - DNA, 1000 bp, Homo Sapiens
ttttttaaaatacatattgacttgaattgtgaggcaataagataccttctatatgtaatgatcacagaactaacccttataatatagttttacttattttgtttactctaaaaatctatagcagagtttctctattttatatttcatagatttaaaaaacccaaataaagatggatttaaaattcactgtggaaaagagtattgagttacaaactgagaagaaaaagcaggaagttccctaataatctggaatattctacatggcttgattacatagcaaacaagaccaagatttagggctgtcttaaacatcactgccgtcttgaagcagggtacacacgttaggtattgtgaagaacatcaatccgaacttttcttctgttgtttgcactgatgcgattttttgttcttttatgtttatacaacgtatctatgttgtgtaggggaaattttttcattttttaaaaattctactttggttttgttgttgttttgatttgtttttggctaagtagaggacatggactagttgtagcaaacagaacatgctgtttgctcttgccaaaggtcagtgagtgagtgcatttgctgcagtggtggcacgtagagaactagatggtaataaagatttaaaactatgaagaaggttacagtgtaactattttggtactagaaccagttcatgctggccgaaacgacaatggtttatggacttgcatccattttgtatttttgtaatatttgtaaatatgaactttttaaattgctgcaaagatggtttcttttgtaagatgttttcaacgtttacattcaatccaagcctttgtatattttagagctgtgcaacactttaagtcttgtatttatttttagtaaaaatggtgacagtttcattgtgaacccctctcaaaaaaaatgtatcagaaaagtttgattacctagaaagtgtgtatagaaactgcaaataaacgtgactgcaattaaaaaaaaaaaaaaaaaa

SEQ ID NO: 224620 - DNA, 1000 bp, Homo Sapiens
cttccctttggaatgtactctggatcccttcccctgctttgacccccagactttgctccatctattattgcttctccatcctggatccttgacatttgtcaccccactggccttctcaggtgcaatcagtaaaaatgctgagaactcttggatcttaatcttcatgactgagttttttttagttgtatagttatcatctgcctttcttcactttgcatttcttcttgaatccattgcagattgacttccactcccactccttcactaaaaggactcttaccaagatcaaatctaatgggtacattttagttcctatgtgatttggcctttcgatgtcaatcatcactcccagccattgattttggtgacccacttccctgtgatgatcttctgatctagtttctcaggttccttcgctggtcctttttctttccctgcccctgacatattgacatttcctggagttggttttgtccttgattcattctcatgtcattctgcacacagtctctgcatgaactcaggcagacccttcatttaatgaccaccttagggctgatgattctcaaatctgtattccccgatcttgcatttgagctccagccccactcatcctctcggatgttctgcaggcccagcaaactcatcatgtccaaagtgaaactttttctctttcctgtctcctctcctctgatctgttctttcttggaacaccacccaagaacgtcacctcctccatcagattgtgagctcctggagggcaggagctgtgtccttctattcatcttcctatccccagaaccttgcacagatcctggaatgtggtaggtgctcagtaaatgtgtgttgaataaatgaatgaatgaatgaacaaatgaatgaatttgcttacttcaaggcaaaagaaccatgaaactgtattttgagtttctatgttatagcagtcagcaaatcctattaaatactttgtgtttccaagcaaaaaaaaaaaaaaaaaaaa

SEQ ID NO: 224621 - DNA, 983 bp, Homo Sapiens
ggatgcagcagagaggagcagctggaagccgtggctgcgctctcttccctctgctgggcgtcctgttcttccagggtgtttatatcgtcttttccttggagattcgtgcagatgcccatgtccgaggttatgttggagaaaagatcaagttgaaatgcactttcaagtcaacttcagatgtcactgacaagcttactatagactggacatatcgccctcccagcagcagccacacagtatcaatatttcattatcagtctttccagtacccaaccacagcaggcacatttcgggatcggatttcctgggttggaaatgtatacaaaggggatgcatctataagtataagcaaccctaccataaaggacaatgggacattcagctgtgctgtgaagaatcccccagatgtgcaccataatattcccatgacagagctaacagtcacagaaaggggttttggcaccatgctttcctctgtggcccttctttccatccttgtctttgtgccctcagccgtggtggttgctctgctgctggtgagaatggggaggaaggctgctgggctgaagaagaggagcaggtctggctataagaagtcatctattgaggtttccgatgacactgatcaggaggaggaagaggcgtgtatggcgaggctttgtgtccgttgcgctgagtgcctggattcagactatgaagagacatattgatgaaagtctgtatgacacaagaagagtcacctaaagacaggaaacatcccattccactggcagctaaagcctgtcagagaaagtggagctggcctggaccatagcgatggacaatcctggagatcatcagtaaagactttaggaaccacttatttattgaataaatgttcttgttgtatttataaactgttcaggaagtctcataagagactcatgacttcccctttcaatgaattatgctgtaattgaatgaagaaattcttttcctgagca

SEQ ID NO: 224622 - DNA, 1000 bp, Homo Sapiens
gcatctctctctttttgtcaggagttagaagtgacactaaggcactaatactgtaacttcttgataaaataactttattttttagtagtggaatgctgcaacttttttacacctaacaattgcttttaaattacagtattcaatttaaaagttgtattaactacagtttcctttgcaaaaagtctcaaaagaatcacttgaagggcattatttgttgatgcatttttctctgagcatggtttcatagagagaacttcaccaagtaatattcagacgtttatatgttgaaagttttgcttacataataaaaacaaaaacaagtgtctgaattgtatagtgtctttacatgaaagaactttaaacagtggccttatggtagaaaatttcataccagatttttctttttctgatgacattttggcttataactcgaagttttcttaagtttctgaagatcaaggcctatataattcatacatttcatattataagaaggcaagagacaaggtgcttcaaatattccatcaggtagttgtgagtgcactgaatttttagtaatatgttcattcagtttttttccacaactatttgctcttttccaatttcaaaatgctattgtggaaaatatgtaaagattttgtaatctatagtccatcttatttttccctcagggcaagcttgtgcatatcatatttttaaaggctttttaaaaatctgacaaacaaaatctcatatttgaaaattgtactttactactacagcattacacattttgcaagcacatcttatagagtgtttacttttagttcagttgatatgtattgcatacctactatgtgtaagagcaaatggatgggatttttaaatgaaatttttaggccccaataccttatttctttatgttttctgtgttctgcttaacagtacatatacattcccaattacatttttgtgaaatgtttatttgtaataagataaaatgttgttgctctttctgctt

SEQ ID NO: 224623 - DNA, 1000 bp, Homo Sapiens
cttggcgcagactccaagctccagctgaaacagtccaagcgtgtcagggacgtcgtgtgggatgagcagggaatgacctgggaagtgtatggtgcatccttggacgcagagtccctgggaatcgcgatccagaaccatttgcaaagacaaatcagggaacatgagaaattaatcaaaactcaaaatagccagacccggagatccatttcctcagatacttcttcaaataagaagctcagaggaaggcagcacagtgttttccagtccatgctgcagaacttccgacgccccaactgctgcgtccgtcctgccccgtcttctgtgttagattgaaagggagtatttatgggagtttgtgtataaatttacggtattcacatgcgtccctctatgtcaaagcttgcttagttttttgctgcaagactaggaagaaaaagcgagtattcactataggaaattgctattaaaaattgttagatcctttgacctggagctctataaacaaaaatgtcatttcaatttgaaagaaggaacaagaaaagagaaacaagcttcactgaaggtttgcaaccttaacaaattgaaaataatactcactgggtttttaaaaatatgatgttgttcatagaaatagcattattgtatcattatacatgtattattttgtataactgcctcaatttatcacacaatagtagttccattaaaatccctgcttcatattgaaagtagcaaaaacactattggcgaaaacattgttataatttctagtcttattgcagtaagaatgctgtaaccacacaaattataaataggtgataagaaccataatgaaaaaaatgagaacaaatttgattcattcctaggccagataacattaaataaaaacagttaaatgtgtaaaatatgaaatatgaattaatatttgtaaacatctgcagacaactctttttataaaccttcttattgctgttaataaatataagaaagttatattagg

SEQ ID NO: 224624 - DNA, 1000 bp, Homo Sapiens; identical to SEQ ID NO: 118998

SEQ ID NO: 224625 - DNA, 1000 bp, Homo Sapiens
cctccccagcactccctgcgcggaggaggccgcggccggggggcttctggtgaccggcagcacagatggcacagccaaggtgtggcaggtggccagcggctgctgccaccagacgctgcggggccacacgggtgcagtgctgtgcctagtgctagacacgcccggccacacggccttcacaggcagcaccgacgccaccatccgtgcctgggacatcctgagtggggagcagctgcgggtgttccgggagcaccggggctccgtcatctgtctggagtgttcacgggcagcggggacgcttgcgcccgggccttcgacgcgcagtctggagagctgcggagggtgttccggggccacacattcatcatcaactgcatccaggtgcacggccaggtgctctacaccgcctcgcacgacggcgccctgcgcctctgggacgtgcgcgggctccgaggtgccccgcggccccctccgcccacgcgcagcctctcgcggctcttcagcaacaaggtgggctgcgccgccgcgcccctgcagccggcctgatcccgcggggcccctgcagacgccagcccagacacccagcggctcccagagcgccccgccctgctacccgcggtggtggcgcccgatggccggcgaggggcgaggagcgaggaagcccgggcgggaggagagcccgtcgcaggcgtctggtttttctttggtggccaggaggcgctgggagcgggagtgctcgccctggggaccgcccccttttcccttttagggtggctcctgtcctccctccccatccctgacctggcgaaaggcctagtcctggggaccctcccacctcaggggctgcaggcggactgccccagctcccccagccccacgaaactgggcctttcctgctgagaggaagtgactttttacagaagccactgaacctggttattttggcaaatcgtccgtctcgagggccttggggggaactgaaatatacagcctgaacgtt

SEQ ID NO: 224626 - DNA, 1000 bp, Homo Sapiens
ggggaggaggaatggctttgtggtcgtcgttgtgctcacgaaaggaaaaatggggaggtcttttttttctcctttcttaactcactacagagtgagagatagaaagggatacttgaaactgggaaaggattcactctgtgaaagaatgtacacacagaagtcaagagctcttctgtggtggaatcccaattgttaaagttactgctgagtggcccttattttttaaagtagtactttgaatcatagtatgaaatgttacagtttatgcaaactgtgaattcccagagcagacttacctggtcaccgctctctggaaaaccaaggctccccgtgcttcttcccattgcttcctactaaagaggacaacaggaaaaagcacctagaatatttgggggggggggggggcaaattaattaagggtatttgtaattgctgcttttttcaggggtaatttccaacacacatacatgcacacaaacaaaatgttttaaaatgtgatttgtagcagtcaggaactaggcatatcatgcctttgtttaaaagtacaatcagaggtggtaagatgcctttggcttgtacagtgtgattcatcgagctctatcaacactggtaactaagacctacttatgccacataagagatgcatttttttaagttactgcatgtttttattaaggccattggttttcaaaataacaagtccttacaaagtatgattttataaatgatattctcgtaaaactgcgctttgccagtagcacagtgaatgtatgccaaatgcaagtccattccaaaatccatttggaaatcttgagctcagctgtggttcttaaacttttgcagtccatagggccttttttttttccttccaattttgtgataaattcatgatgtttacagcacagataaaactttgtgccataatcctaatttagctgaaatcaatattaactgttcaataaaaacttacttgcatatgttaacaaaaaaaaaaaaaaaa

SEQ ID NO: 224627 - DNA, 1000 bp, Homo Sapiens
tctgcaatggtgagtttctatccaaatatcccagaagatcaaccatcaaatacctgtggagagtttatctttctcatggaccgctcgggaagtatgcagagccccatgagtagccaggatacatctcagctgcgaatacaggcagccaaggaaacactgattttgctgctgaagagtttacctataggctgttatttcaacatctatggatttggctcttcctatgaggcatgctttccggagagtgtgaagtacactcagcaaacaatggaggaggctctggggagagtgaagcttatgcaggccgacctagggggcactgaaatcttggcaccactccagaacatttacaggggaccctccatcccaggccaccccctacagctttttgtctttacagatggagaagttacagacacgtttagtgtaattaaagaagttaggatcaacagacagaaacacaggtaggaagaaaatgtgatttccgggtgattggtgctgagtagtgacacacagactctagtgctacatgatgccggtgttgaccttccttcaagaggaccaaatgatttcagaatttagttttagcagctgaaaatttatttctccctgtaaacgttaaaaacagttttccaaataacatcaacaacacagcaaaaccattgtttcttattctttctaaactacaacgaacacaagaattgaatagtaagatgttaattttttttactataaacatttttagagaagtaaaacatgctgaaaactacacaaattataagcatacaactggactcattatcacagtgaatgcactgtgtgatcgccacataggtaaaaactggaatggtcgtaggcctctccatctgtacccttttccatcatgtcctattccctgtcactacacactaaaactttcctgacttacaataccatgggttatttatgcttgtttttgaatgaaaataaataagttatacagtaaaaaaaaaaaaaaaaa

SEQ ID NO: 224628 - DNA, 1000 bp, Homo Sapiens
ccatcctgagaagcacagacttaaacaacaacaagtcctgctttgctgatcttggatacaagcaaatgaatgcagttgcgttggtcgggatgattacagttgctgagcttgcaggatttgtgatcccagtgatcatcatcgcatggtgtacctggaaaactactatatccttgagacagccaccaatggctttccaagggatcagtgagaggcagaaagcactgcggatggtgttcatgtgtgctgcagtcttcttcatctgcttcactccctatcatattaactttattttttacaccatggtaaaggaaaccatcattagcagttgtcccgttgtccgaatcgcactgtatttccaccctttttgcctgtgccttgcaagtctctgctgccttttggatccaattctttattactttatggcttcagagtttcgtgaccaactatcccgccatggcagttctgtgacccgctcccgcctcatgagcaaggagagtggttcatcaatgattggctaaaattaagatatctctttaattacgcctttgtttacctacgttccttgtctttttccaaaggccagaattgtcaaccaatttctttaattgaacattgtaaaaaacaggaataagtacttttgtgtaatattcacagtcaacaggggtgtgatggtgaaggcagagtgtgaaaaacgtgagagaggaagagaaaatagatttacctgattcctctttaaaattcaagccactttcttatttaagaaacctagatcaagtttttacagatgtaaataaaagttgaatagtttaccttaaatttttttcaataagtaagttattgttaataatgcacagtaaatatgtgaatttttcctagatgtaaaaaaaaaaatctttcatataaagaccttaaattctgaaaaaaaaaaaaaaaaaaaaaaaaaaaaaaaaaaaaaaaaaaaaaaaaaaaaaaaaaaaaaaaaaaaaaaaaaaaaaaaaaa

SEQ ID NO: 224629 - DNA, 1000 bp, Homo Sapiens
taggagagggtgagatataagacatacatactttagattttaaattattaaagtcaaaaatccatagaaaagtatccctttttttttttttgagacgggttctcactatgttgcccagggctggtcttgaactcctatgctcaagtgatcctcccacctcggcctcccaaagtactgtgattacaagcgtgagccacggcacctgggcagaaaagtatcttaattaatgaaagagctaagccatcaagctgggacttaattggatttaacataggttcacagaaagtttcctaaccagagcatctttttgaccactcagcaaaacttccacagacatccttctggacttaaacacttaacattaaccacattattaattgttgctgagtttattcccccttctaactgatggctggcatctgatatgcagagttagtcaacagacactggcatcaattacaaaatcactgctgtttctgtgattcaagctgtcaacacaataaaatcgaaattcattgattccatctctggtccagatgttaaacgtttataaaaccggaaatgtcctaacaactctgtaatggcaaattaaattgtgtgtcttttttgttttgtctttctacctgatgtgtattcaagcgctataacacgtatttccttgacaaaaatagtgacagtgaattcacactaataaatgttcataggttaaagtctgcactgacattttctcatcaatcactggtatgtaagttatcagtgactgacagctaggtggactgcccctaggacttctgtttcaccagagcaggaatcaagtggtgaggcactgaatcgctgtacaggctgaagacctccttattagagttgaacttcaaagtaacttgttttaaaaaatgtgaattactgtaaaataatctattttggattcatgtgttttccaggtggatatagtttgtaaacaatgtgaataaagtatttaacatgtaaaaaaaaaaaaaaa

SEQ ID NO: 224630 - DNA, 1000 bp, Homo Sapiens
ggcaccttttagacttgaatgggaggctgctaacccgccctctccagtccaccccggtaaaagagctgttccccacccccagggagctcctgtccctgtcagcctttgctgtcccctgtccccaacggagactctgtcacccctgggctccccctgccatcgtgtgcttcacgtggccccatgcatgcccgcctctctgcatggtctcttgggaaaagagagatgtgtcgcctccgccagtccgactgccctccccaccccacccccgccaccccccacatgtgaccactgcaacgaagacactccttctgtccccacctgctccgaagacaaaccaacctccgtttcttttataaacagtcggctttttcttaataagccctcactgtacagaacagcccgttgatggtttatttggggtccccctctccccccagcccttttttctgttggtttagcacaaatacttccctcctccggcacctccaaacctaccccacagtcagtgtacttgttttatatatatttaatcttattcaatggaaaccatgcttttgtcgttttatactttgctaggtagactttattacccccccactatgccctcatttttttaaaaaaggaaaaaaaaaagaaactgggttccagtcttaattcattttccgtgccaggttttatttcgtgtgtgtgtgagtgtgttctgttttgtgttttgttttttgttgttgttttcagttgtttggttttcttttctttcccccctccggtcccatacttcacagcactctggtgcgggaagaagcagaagcaaaaaaaataaaaataaaaaaataaataaaaataaaaaaaataaaaaaggaaaaaaaaaaagaagaaacaagacatgccacctttcccctcgcactgttgcttttcctgatggttaatactactgtcacgtagctgtgtacaaagagatgtgaaatactttcaggcaaaaataaactgtaagtgactcatc

SEQ ID NO: 224631 - DNA, 1000 bp, Homo Sapiens
atgggcaatatcaaacttcctgcatatctccatttttgctctaggcaaattaattatccttaaaaaagttaagcatatcttctgaactgaatacatcagctggcataaaaggagcatgaagtctgttaaagccattgtcagcaaagctttgaaaataaaggacttcacaaaaacggtaatgtaaatgtgcttccaagttggggggaaaatgtgtacttaggaaaacatggaaacttagacttgtatagtgtaatgaacacaaataccaaaactgcattttggttttgcctataccatcctgatttttgaaaagtgaattataaacacaaaattgttagtgtttatgatgtttttatcataaaggatgtcagagaaactttatgcatattaaaaatgtaatgtaattataagcgattcccctcaacaatccagagaaagtagttctttaaataagagataatttaaagaaaaataaatactagacatcaaatttagatctggtttatgtcaaaggttttaacactgtacataaatgttcaatttacttttacaaagatcaagaatactgcccattactgtcacaattttccagatattatataatgaactcgtaatgtaacatttccttctagcttcctactgaattgtgagctgttacttgttgaaaaaccatatcacttttctgttgccatgattttttttttttcaacaaaaaaccaaagtgcattgtacgccctttggccagtcttgtatgtgccttgatccaacgctacatgtattcagcttttaaaactccacaaatttttcatactccttaaatatgaaaaattatggtcttattgctgaataaaacttttaaaaagtacagaataattgtgcttgctttttcaggattgtgttactatcactaagtagcaaattgcccagcacattagtcctaaacgtcccatgtatttttctaggcataaaaataaaagttggctaaaaattttaaaaaatc

SEQ ID NO: 224632 - DNA, 1000 bp, Homo Sapiens
ataattctgatatttaactgtcataattctgtagtgctattatagtgaaaaactcagttctataagctagctgtgttgtcacagttttatcatagttcataattatttcatgtgcaatcctatttggaggccctgttagacttttaacaatcccatccatatctgtaattctctgatggcaagaatggatggagcatttctgagttaacagtgctggacagtatcgtactgggtgtcataaactctttatgaatggtaatattatgtaaattgaaatctggccctcaaactatattgcagctttcagcagtatgtttgaaggcctcttttgttaatgattctgtaatgtatgaattatgttcttgagtggttaaaaaagaatatgaaggcttgataattatttattgggtaaagtcaggaaattgtagtgaaagaactaatggttttgttttttggaataaaggcacctaagctattgctaattgaattgctgctagaattagaaattatgctttagaatagaattggtatttctgtgattctttttgcttcttggtattttctcttgtatctatgtatctagtattgaggcttgctctttcatgtggctttatcctctctttaatagctgttgtaaaattcctgagtaactggctgcttcaggatcagcttgcagagtcttgcttttaggttagatacaaacaaagtaaatcatagttggtgtaaatccagcaaaaaacagctggctttggaatggagaacactacaattcaaatttgaagtatattcagaagaaaactttggaattagctttacatttgtttgtaaatctaaacaaatatgcaaaattggtcaaaatgtaagtatatagcatttttaaagattaatggttccttttatgtgctgatttctttgtattctgttctctgcattcatcattcaggaataccaccaataaatgtatttatatatcccttaaaaaaaaaaaaaaaaaaaaaaa

SEQ ID NO: 224633 - DNA, 1000 bp, Homo Sapiens
cagtcctgcagcctggtgcatcaccacttcctgatggagagtcagaagcttccaggcctccaagggtccatggaccacctactgagactctgcccactcccagggagaggaacctagcatccccatcaccttccactctggttgaggcaagagaggtgggggaggcaactggtggtcctgagctatctggggtccctcgaggagagagcgaggagacaggaagctccgagggtgccccttccctgcttccagccacacgggcccctgagggtaccagggagctggaggccccctctgaagataattctggaagaactgccccagcagggacctcagtgcaggcccagccagtgctgcccactgacagcgccagccgaggtggagtggccgtggtccccgcatcaggtaattctgcccaaggctcaactgccctctctatcctactccttttcttccccctgcagctctgggtcacctgacctgtagtcctttaacccaccatcatcccaaactctcctgtcctttgccttcattctcttacccacctctacctatgggtctccaatctcggatatccaccttgtgggtatctcagctctccgcgtctttaccctgtgatcccagccccgccactgaccatctgtgacccttccctgccattgggccctccacctgtggctcacatctcgccagccccacagagcatcctcaggcctctccaagggtcctcatcacctattgcagccttcagggctcggcctattttccactactcccttcatccgcctgtgtgccgtcccctttagctgcctcctattgatctcagggaagcctgggagtcccttctcacccctcaacctccggagtccaggagaacccgtacccccacagagccttaagcaactacttctgtgaagtattttttgactgtttcatggaaaacaagccttggaaataaatctctattaaaccgctttgtaaccaaaaaaaaaaaaaaaaa

SEQ ID NO: 224634 - DNA, 1000 bp, Homo Sapiens
tccagagctgctacgtcgctgtggcccgcgccggcggcatcgagactatcgctaatgagtatagcgaccgctgcacgccggcttgcatttcttttggtcctaagaatcgttcaattggagcagcagctaaaagccaggtaatttctaatgcaaagaacacagtccaaggatttaaaagattccatggccgagcattctctgatccatttgtggaggcagaaaaatctaaccttgcatatgatattgtgcagttgcctacaggattaacaggtataaaggtgacatatatggaggaagagcagaatggaccagtggatggacaaggagacaacccaggcccccaggctgctgagcagggtacagacacagctgtgccttcggattcagacaagaagcttcctgaaatggacattgattgattccaacacttgtttctattaaaacagactattataaagctttaagttgtcaactttgttctaaatatcaactagcgcaagtgaatactgaagatttcttagtcagtttttaggggattttcggggaggggaaataggtaatgtatggagcattttcacttctaaatagttagatacagaaattaagtgcattgtatctttttcataatggtactatttagaagcccagttagtcttactgagcttatgcttcactcctttatgtttaaccatgtgtctacaagaataagtttgttttggaaagttgagctatagctacagctctagctatccagcagacttttcattatgacttacatggcaggagctctaattatgctttaaaaatctgttgtggagattgctttaaatgctccctgcctggtgtggggatggggtccccctctttgtgagggctggagcatggcacggcatggattaacacggcagaggaacaaaggtgtgctctgagcttcttcatatttcaccttcaccctcacctgtgttctcttccctctctcccaataaaagggctcccatta

SEQ ID NO: 224635 - DNA, 1000 bp, Homo Sapiens; identical to SEQ ID NO: 116040

SEQ ID NO: 224636 - DNA, 1000 bp, Homo Sapiens; identical to SEQ ID NO: 119004

SEQ ID NO: 224637 - DNA, 958 bp, Homo Sapiens; identical to SEQ ID NO: 57125

SEQ ID NO: 224638 - DNA, 1000 bp, Homo Sapiens
actgtggcctcagtgtgcaggagatctacaatttcacccgacagcatttcccctttttctggacagctccggatggctggaagagcaccattcattacaacctctgcttcctggacagctttgagaaggtgccagacagccttaaggatgaagataatgcaagacctcgctcttgcctttggaagctcactaaggaggggcaccgccgcttttgggaggagactcgtgtcttagcctttgctcaaagggagagaatccaagagtgcatgagtcagccagagttgttgacctctctctttgatctttgaaatgccattgctcccttttggaacactgccttccttactgtgcctacttatcccctgacattcattaatctctaaacttacccagcctggttggtgccaagtctgtctttagctactgttacaataatggtgttaagtaaagttagaggtgggtacaggggagacagaacttaaatccaggtggagagtcatggaaagtcgcacgaggagagtggctgttgttccaaattttgagcaaaggaaaagaaatcctagaaacaatggcatagaaactaaggaaagaagggtgtgttttgtgaaagaaaggaattttgtttatagagagtattttcacacatgaaagtgaacagtggaatataaagcataaaaggcaggatggagccgagccatggagaacctcgagtgccatgtgaagagaatttgacttgtgatgaagaatcaagtttccccttctaccattcatcagctacatctcctttttaagtaacccattttatccttcagaacctcacttttctatttctggccctggacttctaagccttgtttctttgtcatccaattccaatattgacaaataattctaaacagctacttttagtttgtatgtttaacgtcctgtgaaatattcctgtattaaccccaagccttttgatgataaagctttattttctattaaaaaaaaaaaaaaa

SEQ ID NO: 224639 - DNA, 1000 bp, Homo Sapiens
tttcattttcattcagcaagtttttttttttttttcagagtcttactctgttgcccaggctggagtacagtggtgcaatctcagctcactgcaacctctgcctcctgggttcaagagattcacctgcctcagccccctagtagctgggattataggtgtacaccaccacacccagctaatttttgtatttttagtagagatggggtttcactatgttggccaggctggtctcgaactcttgacctcaaatgatccacccgcctcggcctcccaaagtgctgggtttacaggcatgagccaccatgcccagccctcatttagcaaagttttaaacataaaaagtgcttattagaggatatcagtgcctggcccacatgagagaacagatccatacacactttgaaaaactttgttcacttttaggaaatataattttgaaaaatcatttacatacaagaggtccactgaggcattgcttttaatggcaaaatattgcaatgtacttgaatgtccttcacattagattggtaagataaattttagtatgtgcatgtactggaatattatatagccagtaaacaaattgacaatgaagctctatttgtaccagtaaagaatggtcttgaagagacattgtaaaatgaaaaaaaaaaaaccaagttgtaaagcaatgtagattatcttatcagcatggaaaaaatgcaattattatatggaagcatgcaaatatatctctggaaagattaatcaaaatctattattattggctccttctgggaagaaccaagtgaatgtaggggttgaaggaatacatactcttcactttatactcttgaattttgtaaagaaatcttattttaccgattcagaaataaataagaaaatgtaagagacaatgctaataatgataacaataaaaaaatagtgaaattggctatcaaaaaaaaaaaaaaaaaaaaaaaaaaaaaaaaaaaaaaaaaaaaaaaaaaaaaaaaaaaaa

SEQ ID NO: 224640 - DNA, 1000 bp, Homo Sapiens
tatcactcagaggaggacacttctcagaatacagctactcatgaaacaggcacatcatcagattccacatcatctgttcttggacctcacactgacaacatgatttgtgctgtaagcaaagcctccttggattctgttttttcagataaacttcattctaaatatgaattacagcagattaaacatgaacctattgcatctgtaagaatcaaggaagaacctgtgaatgttaatattcctgaaaagactacagcactgaataatatggatggcaagaatgttaaagcaaaattggatcatgttcaatttgcagaatttaagattgacatggattctaaatttgaaaatagcaacaaagatttaaaggaagaattgtgccctggaaatctaagtctagttgatacaaggcaacacagttcagcacattcaaatcaagataaaaaagacgatgacattttgtgctaaatttgcatataccatctaaaatccttttttaaaaaaatttaatgtaataaagattcatgaattctgaaagcaagccaaggacttgctcctatgtctgttacaaaacatagtttatgtagctttgtaacattcctcagtgcctgtccataactgtgaagtattaagcacttagggccagatgcactgtaaacattgcaggtttaaacataaaggagtctttaaaaaaaaatcatttacgttggaattttaggttttagaatagagctgacattaacatatatatatatatataaatatatatatatattttgtaatatgagccagaattctttttcaacaatttaaagcttttccatagagcttatttatatcctttttttcattttaaatgtgtcagcactgtagtgtaaatagcttttaaatatctttttagtgtgatttatactgaaatgtgagccacttaataaaggttcatatgttcatattaataaatatgttttctgttgagtctgtaaagacaaaaaaaaaaaaaaaa

SEQ ID NO: 224641 - DNA, 1000 bp, Homo Sapiens
ctccagggcatgtgtatcgtgtgttgtcaatctcaaaatccgaatgcctatttgaatcaattgctagggaatgttattgagcagtatattgggcgatttcttccagcttcaccatatgtttcagatcttggacaacatcctgttttgctggcattgagaaacacagccactattccgccaatatcatctctaaagaaatgcattgtgcaagtcataaggaaatcctaccttgagtataaggggtcctcacctcctcctcgcttagcatccattctggccttcatcctccaactcttcaaggaaactaacacagacatttatgaagttgaactactcctccctggcattttaaaatgcttggtgttagtcagtgaaccacaagttaaaaggctggccacagagaacctgcaatacatggtaaaagcctgccaagtggggtcagaagaagaaccttcctcccagctgacttctgtgtttaggcagtttatccaggattatggtatgaggtactattaccaggtttacagcattttagaaacagtagcaacattggaccagcaggttgtcatccacttgatttctacccttactcagtctctgaaggattcagagcagaaatggggccttggcaggaatatagcacaaagggaagcctatagcaaacttttgtctcaccttggacagatgggacaagatgagatgcagagactggaaaatgataatacttaatatattttgtgattcatcctgtctattaattatcagtatctaaagccacattgttccactctaattcctacttttaattaattgtataatgttctgtttaaaataatttctaggattttttttccttttatatctgtaagtaaaaaatgtataaataaggaactgaaggttaattagcaactgtgtaataggatccttggaactttttacaaaactgcattctaccttgatgaaattttagttaaactaaattaaagaaacattttctgag

SEQ ID NO: 224642 - DNA, 762 bp, Homo Sapiens
cgccccgtctgccgggccatggtggcgctgaagggtgtccccgcactgctgtcccccgagctgctctacgcgctggcgcggatggggcacggggacgagatcgttcttgcggacttgaacttcccggcctcctccatctgccagtgtgggcccatggagatccgtgcagacggcctgggcatcccgcagctcctggaggccgtgctgaagctgctgcccctggacacctatgtggagagtccggctgcagtcatggagccggtgcccagcgacaaggagaggggcctgcagaccccagtgtggacggagtacgagtccatcctacgcagggccggctgtgtgagagccctggcaaagatagagaggtttgagttttatgaacgggctaagaaggcttttgctgttgtggcaacgggatgctgaagcagggtctcggcaccctggccctgcagcccagctcagtgctgggcttggctcctctgcagggagacggccctctacggaaacctcatcctcaggaagggggtgcttgccctcaaccccctgctgtaggcctggtgaagaccacctgggccggaagaggaactgggggcaccctgagctccagtaccaccactcacaacaggcctcccagtggcagctcccagacctgggccctggccagggctctaggggccggcagtcttggggtgggccctgccaattgggacgagtatccctgatttgtgaaaatgatggaaaaacgttcagtctcaagagtcc

SEQ ID NO: 224643 - DNA, 1000 bp, Homo Sapiens
ttaggtatcttccaagagcttagatgagagcatatcatcaggaaagtttcaacaatgtccattactcccccaaacctcctggctctcaaggatgaccacattctgatacagcctacttcaagccttttgttttactgctccccagcatttactgtaactctgccatcttccctcccacaattagagttgtatgccagcccctaatattcaccactggcttttctctcccctggcctttgctgaagctcttccctctttttcaaatgtctattgatattctcccattttcactgcccaactaaaatactattaatatttctttcttttcttttcttttttttgagacaaggtctcactatgttgcccaggctggtctcaaactccagagctcaagagatcctcctgcctcagcctcctaagtacctgggattacaggcatgtgccaccacacctggcttaaaatactatttcttattgaggtttaacctctatttcccctagccctgtccttccactaagcttggtagatgtaataataaagtgaaaatattaacatttgaatatcgctttccaggtgtggagtgtttgcacatcattgaattctcgtttcacctttgtgaaacatgcacaagtctttacagctgtcattctagagtttaggtgagtaacacaattacaaagtgaaagatacagctagaaaatactacaaatcccatagtttttccattgcccaaggaagcatcaaatacgtatgtttgttcacctactcttatagtcaatgcgttcatcgtttcagcctaaaaataatagtctgtccctttagccagttttcatgtctgcacaagacctttcagtaggcctttcaaatgataattcctccagaaaaccagtctaagggtgaggaccccaactctagcctcctcttgtcttgctgtcctctgtttctctctttctgctttaaattcaataaaagtgacactgagcaaaaaaaaaaaaaaaa

SEQ ID NO: 224644 - DNA, 1000 bp, Homo Sapiens; identical to SEQ ID NO: 119006

SEQ ID NO: 224645 - DNA, 1000 bp, Homo Sapiens
ttttatgtctgctaaacaacatccattctgcaggatccattactccatgggtcaaggagtaattttgactttcaagtattatttaaggaatacattttgtaaggctgtggctgccatagtggttgttctgtacaaagtaacttgaaaaccttctggaaaggattcatcattctagataccattaaggacatttgtgattcatgggagaaggtcaaaatatcaacattaacaggagttcagaagacattgacctcaaccctgatggatgatcttgaggggttcaagacttcagtggacgaagtaactgcagatgtggtggaaatagcaagataactagacttagaagtggaacctgcatatgtgactgaattgctgcaatctcatgataaaacgtgaacaaatgaggagttgcttctaatataagagccacaaaagtggtttcttgagatggaaactactcctggtgaagatcctgtgaccattgttgaaatgacaacaaaggacttagaatattacataaacttagttgataaaacagcagcagagtttgagaggattgacttcaattttgaagaatgttccactgtgggtaaaaggctatccaacagcaacacatgctacagataaatccttcggaaaggaagagtcagttgatgttgcagccttccttgttgtctcatttaaagaaatctctagagccacactaaccttcagcaaccaccacaccgatcattcagcagccatcaacagtgaggcaagactgtcttccagcaacaaagactcactgaagacttagattatcgttagcatcttttagcaataaaatatttttaaattaaagtatgtacattgtcagatataatgctattgcaaacttaatagactataatatagattaaacataactgttataggtactggaaaataaaaataattgtgtgactcccaaaaaaaaaaaaaaaaaaaaaaaaaaaaaaaaaaaaaaaaaaaaaaaaaaaaa

SEQ ID NO: 224646 - DNA, 1000 bp, Homo Sapiens
gtaaaaggaaatgttgaaatccatagctgtcctgtcaacagtagtggaatgaaaagtcgttggattgttttggcactggttctgaagcaggcataattggcaaattattataatactgctgcccgaaaatccccatttgcctcaagatagtggcatttattggcagaagcctctgaaatgtccagcacattcttttgagttaccatttaaggatcagcctgacaatcgacttctctctgcacatttgccccctttgtaacctaagccagactgttcccaaatgaccttctaaaggacacagtgcaccatcatcaatggaaacagttcagaaaggatgacaggagggagatgtttcttagttctgagagccagtctgtaacaatgggataagcatttaatggaatcaaagctgttttgcataaagagtgaactcagagacgacaagagggtctttatgaattcccttcacattttgtaaaaactgtcatatataggctatccccttaattgataaatgggatctagaaagcggtattatgaccagagggtgagaagatttaggaatttggatagcagttcaagataagaaagaacttcttatagttataaattttcaatgatggaatgggttgcttctttaaacagtgagcccaccatcacttggtatgttcaaggaaagactagataaagtcgatattgtgagaggaattgctgtatgataccgtttggagaaatgattgacataatcttttaaggccggtgaccctatcattttccaaataattgttgctagtacttagttaattagacccatttttttcttaggaaagagttggatcaatcatgggagaccctgaaaaatttccttacctttcctaaggtttaatttcctcttctgcgaaatggagacaattatattacttttgcttatttcataaagatcttgtgaggattcaatgaaatgaggttaaattcttttattaaacagaaagttttgagt

SEQ ID NO: 224647 - DNA, 1000 bp, Homo Sapiens; identical to SEQ ID NO: 119007

SEQ ID NO: 224648 - DNA, 1000 bp, Homo Sapiens; identical to SEQ ID NO: 119008

SEQ ID NO: 224649 - DNA, 1000 bp, Homo Sapiens
agcatacagttggactgagaaactgaatcttggttgcaatttactgacagaactgagctttggaacctttcaggcctggcacggaatgcagtttttacacaagttgtccggattgatggcttattttaaaaaattttcttactcacttcattggttctaataatacaagctccataattttggaaactgaatgactctgcaatgtagaaaggctataccttggcccggcgcggtggctcacgcctgtaatcccagcactttgagaggccgaggcgggcggatcacaggatgcccgggcatttgtagagaacactgccaaagaaaaaaaggctcaggagtccagccccaagggagctggaacagcctcacatggtgcaggggccaagaagttagccaagaactacttcatttcccaccccccatcaaatgatgccaaggagactaactccgaagaggactgatgtaaaatgcttctgcccagcatgggtgttcactgcacgagagcacttggccaagggggtgagtggggctgaaaatcctgctcaggctccatgctgagccacatacaaagtctccccgagacattgtggggcccttctggacagacatggagagcttctgaaagtcccgcatgcttggaattattttcaagaccccagggtagaatggaggttgcactattcgggccggccactctcctactggctgacaggatgctgcccgagatgaaacagggtgtgtgtgcaccacggagtcagtccaagactcctgttctcactcagggattcttcatttcttcttcctattgcctccacttcatgttattttcttcccttcccatttacaagtaaaactgaccagagccccaggaataaatggttttcttggcttcctccttgctcccatctggacccagtcccctggttcctgttggtcatttgcaaaccaagaggaccacaataaacaaatctctattttttttttaaatattaaagcattc

SEQ ID NO: 224650 - DNA, 1000 bp, Homo Sapiens
gtgtgtgcctcatctcatcagagaaggccgagctgctctggtttcatcctttggagtatttaaatacttgaccatgtacggcataatccagtttatcagtgcattactgctctattggcaactacaactctttggaaattaccagtatctcatgcaagatgtagccattactttgatggtctgtttaacaatgagttcaactcatgcctacccaaagctggctccatatagaccagcaggacagctcctttctccccctttactgctttcaatatttttgaattcctgtttctcctgcattgtgcagatcagtgcatttctctatgtgaagcagcagccttggtattgtgaggtctaccaatacagtgagtgttttctggccaaccaaagtaatttttcaacaaatgtgagtttggaaagaaactggactggaaatgcaactctgattcctggttcaattttaagttttgagaccaccacactgtggcccatcaccaccatcaactatatcacagtagcattcatcttttctaagggaaagccatttcgaaaacccatctatacaaactatatattttcatttctgctgctagctgccttgggcctcacaattttcattctgttttctgactttcaagttatataccgtggaatggagttgatcccaaccataacatcgtggagggttttaattttggtggtagccctcacccaattctgtgtggctttctttgtagaggattccatccttcaaaatcatgaactctggctgttgatcaaaagagaatttggattctactctaaaagtcaatataggacttggcaaaagaagctagcagaagactcaacctggcctcccataaacaggacagattattcaggtgatggcaaaaatggattctacatcaacggaggctatgaaagccatgaacagattccaaaaagaaaactcaaattgggaggccaacccacagaacagcatttctgggccaggctgtaa

SEQ ID NO: 224651 - DNA, 1000 bp, Homo Sapiens
accctgcaactaccccacctggggttctacgtggccaatggctcaggcctcagcccctcagcccgtggcctgatagggcagttccagcacgcagacatccgactggtgacaggacctatggggccatgcttacgaaggcaccatggcccagatgtgcctgtgattctaggcaagaggctgctgaaggactcaccaaggctgctgccccgctgggcttcctgctggctggtgaagcgctctcatgtagagctgcttctgggccacccctacctctcctatgtcctgtgatggcttctgaattccagagccaggagacctgaatttgggagatccagaaaccagggcatggggtgagccagggacagagacccaaggacatggaagcacacacagggacacacagactcacgcatgttctaaggaacacatatacaagggtatacaaacacatagacatgcagagacatagagtcagggactcctgcatcttcatggtccttcacatctccagtctcaccctctccaaatccatgctcctcaccagccctacaagccacttttgtaaaacgaaaaaatgatcagtagttctgctcacagctttccctaactcctatggcatattcaaggctctcagagtttccctaacaaaccatgctcactcctaccactggaccattgcatgtgcttttccttctgcatgaaacactcttcctttgttcctgtaggtgagtataattcatccttcaaatcctagttgttacctcttctaggaggcctttcctgatgcctgccctagattgagtttggtcctgtcctctgggttcctatagcccacccccaaccctccacgctcacagtatttatactgtgtagtaatcatctgtttacttgtctggatccctgacttagactgtgagatctttgagggcaaggaccttttctgaatcatctatgtatccccagtgcctctcacataataggtgcttagtaaatatttgtt

SEQ ID NO: 224652 - DNA, 1000 bp, Homo Sapiens
aacgtcccagatataacaatattttgtattttcaccactgtttatggtattctcagaatgcgataaatcagggacttgggtaataaaatgtttctggaaaattcattacaatgtcaatctttgattatgcacaatcctgctgaggtgaatgtgattgtgaaaagtacttattaaatgtggaagttagtgtagagggcagtacccgtcttagagagaagtacagaaaaccacgttttgaaattgaatttaaaaaagaaaggaaaattgtgtaactcggctgtttctattttcataattaaaaacttttgagagtccttgccagttttgtaacaaagagaccaacaatcattaatgaaaaccttgtaaattattttagattttcaggaacaccatgccattccctcattttctacttgtcattcaggttgatttcaatgtgaaaatgttttgtgaacaaacacttatttttatcctatgtgttagcctcgcttcatagttaaaaagccgagttataaagctcttaattacatctcaattggtatcagcaatagacctaaaggagaggtattgattgttactaacctctgtttcctaatgagttaaagtaatgtcactcatgacatagattgataacaggcctgtagtcaaaacttactgtgctaatggacttatttatattttttaaaaattcaaactgtggtcttgaaccccaattctcagcttattaattatagattatttaattgtattagggatatgtcatgttatatttacttttggataaaacttgcattagatgcataataactcagtaagttttaaaaacaatgttaatttttccttgtttagaagttaagcaccttatcaagatattaagttttaaaatcttgttttataactttgtaacttgagagtaatggatgctgtagtgatgtctttcacatatgtgaagatgaacaataaaattgtttatttacaagtaaaaaaaaaaaaaaaaaaa

SEQ ID NO: 224653 - DNA, 1000 bp, Homo Sapiens
aagcacctcgtaggaggagaaagagaccccatgaatttatttgcttttggtgatgttgatggagtaggaatcaatgcaaagcttcaacacccccttggagtaacatgggacaaaaaaaggaatttactttatgttgcagactcctacaatcacaagattaaagttgtggatccaaaaacaaaaaactgtacaacattagcaggaactggagacacaaataatgttaccagttccagttttacagagtcaacttttaatgaaccaggaggcttgtgtattggagagaatggagaattattatatgtagcagacaccaataatcatcaaattaaagtgatggatttagaaactaaaatggtatctgtgctccccatcttcagatctgaaaatgctgtggtagatggcccgttcctagtagaaaaacagaagacattacccaaactacctaaatctgctccaagcattaggctttcccccgtgactgcgtgtgctggccagactcttcagttcaaactcagattagacctcccatcgggatcaaagctaactgaaggagtatccagttgctggtttctaacagctgaaggcaatgaatggctacttcaaggacagatagcagctggagatatagagaacatttccagtcaaccaacaatttcactacaaattcctgatgattgcttatcacttgaagccattgtatctgtcagtgtgtttctttattactgtagtgcagacagcagtgcttgtatgatgaaggcaattttgttcagtcagcctttacaaataacggatacacagcaaggttgcatagctccagtagagctcaggtatgtattttagccagccagctagctagcaacccattgccaccacctactgtctcccatcctgactatcactgtaatttaaggaaagaaaacttcagttctgcctctggataccaagatgcccattgctcagttcagacaactgatattaaaataaagctatgctcctt

SEQ ID NO: 224654 - DNA, 1000 bp, Homo Sapiens
atattaatgaaaaatagaaaaacacttcataaagctaaaaatgaagatcttgatcgtgtattgaaagagtggatccgtcagcgtcgcagtgaacacatgccacttaatggtatgctgatcatgaaacaagcaaagatatatcacaatgaactaaaaattgaggggaactgtgaatattcaacaggctggttgcagaaatttaagaaaagacatggcattaaatttttaaagacttgtggcaataaagcatctgctggtcatgaagcaacagagaagtttactggcaagttcagtaatgatgatgaacaagatggtaactttgaaggattcagtatgtcaagtgagaaaaaaataatgtctgacctccttacatatacaaaaaatatacatccagagactgtcagtaagctggaagaagaggatatcaaagatgtttttaacagtaataatgaggctccagttgttcattcattgtccaatggtgaagtaacaaaaatggttctgaatcaagatgatcatgatgataatgataatgaagatgatgttaacactgcagaaaaagtgcctatagacgacatggtaaaaatgtgtgatgggcttattaaaggactagagcagcatgcattcataacagagcaagaaatcatgtcagtttataaaatcaaagagagacttctaagacaaaaagcatcattaatgaggcagatgactctgaaagaaacatttaaaaaagccatccagaggaatgcttcttcctctctacaggacccacttcttggtccctcaactgcttctgatgcttcttctcacctaaaaataaaataaaatacagtgtacagtaaccttttagtcaaaacagcatcatacttggaaactgaaagcctactgttatttgttattgttgcttaacagctgatacagatattctggtgacactactgtgctggcttacttaacctgaatacactatttttttcgttgtaaaaaaaaaaaaaaaaaa

SEQ ID NO: 224655 - DNA, 771 bp, Homo Sapiens
ctccactgcaaccacccagagccatggctccccgaggctgcatcgtagctgtctttgccattttctgcatctccaggctcctctgctcacacggagccccagtggcccccatgactccttacctgatgctgtgccagccacacaagagatgtggggacaagttctacgaccccctgcagcactgttgctatgatgatgccgtcgtgcccttggccaggacccagacgtgtggaaactgcaccttcagagtctgctttgagcagtgctgcccctggaccttcatggtgaagctgataaaccagaactgcgactcagcccggacctcggatgacaggctttgtcgcagtgtcagctaatggaacatcaggggaacgatgactcctggattctccttcctgggtgggcctggagaaagaggctggtgttacctgagatctgggatgctgagtggctgtttgggggccagagaaacacacactcaactgcccacttcattctgtgacctgtctgaggcccaccctgcagctgccctgaggaggcccacaggtccccttctagaattctggacagcatgagatgcgtgtgctgatgggggcccagggactctgaaccctcctgatgacccctatggccaacatcaacccggcaccaccccaaggctggctggggaacccttcacccttctgtgagattttccatcatctcaagttctcttctatccaggagcaaagcacaggatcataataaatttatgtactttataaatgaaaa

SEQ ID NO: 224656 - DNA, 1000 bp, Homo Sapiens
tagttcttattattgacgggaatatgattagaagtaccaaaactaaaaattccattatgtactgtttactttttatttaatattacatgtttttaccttgttgcggtatctttggccttcacacacacatgtgtgcgtgcacgtgcatttcattaccatgtagacaagacagttattgcttatagtaatttacccatttgagggctaagtgttttaagctgtggttttataagcaaagctgtaagtaaatgtaatttattttagaaagatattatttgaaatcaattttgaagaattgcactatttgataatgctgctactacatgagataactctggggaattaattttatgagataagatgaatggctttctagaaggtgttgctttttgttttttctttttcttttttacatttcatcttagaaaaagttgcttatattcagcaggttggtttgtcaaattcagtgtttgagtttgtttctggtcagttcagtagctgctactttagcaagatgtggcctttcacaaaagaggtaagagtgaccaaatagaattttaggacaataagtataggaaatatctctttatcgtaagataagaaacttgaactttttaaaggaaatgtcctcttgaaaagaacatttctgactgcatgcagaagggtacttaagacatatataacaggccaggagcagtggctcacgcctgtaatcccagcactttgggaggcccaagtgggcagataacctgaggtcaggagtttgagaccagcctaaccaacatggtgaaaccccatctctactaaaaatacaaaaattagccaggcatggtggcgcatgcctgtaatcccagctactcgagaggctgaggcaggagaatcgcttgaacccgggaggcggaggttgcagttagccgagatcgtgccattgcactccagcctgggcaacaagagtaaaactctgtcccaaaaaaaaaaaaagaaaaaaaaaaaaaaaaaa

SEQ ID NO: 224657 - DNA, 1000 bp, Homo Sapiens
catctttaaggagcctgtctctggagggctgtggcctgggggcattgccagactgcccattccaagggacctccctgacctacttagacctctcaagcaactggggggttctgaatgggagcctcgccccactccaggatgttgcccccatgttacaggtcctgtctctcaggaacatgggcctccactccagctttatggcgttggacttctctgggtttgggaatctcagggacttagatctgtcggggaattgcttgaccaccttcccaaggtttgggggcagcctggccctggagaccctggatctccgtagaaactcgctcacagcccttccccagaaggctgtgtctgagcagctctcgagaggtctgcggaccatctacctcagtcagaatccatatgactgctgtggggtggatggctggggggccctgcagcatgggcagacggtggccgactgggccatggtcacctgcaacctctcctccaagatcatccgcgtgacggagctgcccggaggtgtgcctcgggactgcaagtgggagcggctggacctgggcctgctctacctcgtgctcatcctccccagctgcctcaccctgctggtggcctgcactgtcatcgtcctcacttttaagaagcctctgcttcaggtcatcaagagccgctgccactggtcctccgtttactgacctggctgtgtgccaagactcgaaattcggtccgcacacaacaggacactttctctgccagctttcaagatgtgatgcagaggccaagtctgacgaattgaagtttcaattaaaatttaatatgtttccattcctcatcgcccaccccacccccgcccccaccaccgcccaagttctttttccatcattataattcatccttattatcttggtaaaatatttattaagtgactttttcagaaataaaaggcaacgtgtctcataaatattttttaaattaaaaaaaaaaaaaaaaaaaaaaaaaa

SEQ ID NO: 224658 - DNA, 1000 bp, Homo Sapiens
gcatctctggcatgccactgtttatgcattgaagtggaatttttggtataaagctaaatggtcttagaagcatagaaaatccctatgtgccaaaagtagtgaaacacaaacaaaggaaaatatattaataacagtctagtgtttttgttgagtctgccattcgtagctgaatatgtgattaattatgtgatgaaaacattttttataaatgatcttggtctattggggagcggggatagttaatattccagtacactgaatacatgaggaatttaaccacatacatcattgaagacaagggatagcagtttgtttttattcaaagacattgctgtgttctctttcattgcctctctcgctttctgtcacttttttcctccttacattaaagaaaagtttaattacagttaaaaatgtataatgtatttataatattcatcgataccattattcaaatattgctcaatacagcaaattagctcctaacctaacaaagtttaagtttacttggattgataattaggtttactctttatctgaataagaaccaattccatttgtttgaaatatggagtttgtgactacccaaattgctaattattctttcttttgaatatattttacatttctatgagcctaaggaagattcatgaaactgacctatgagagtcgtgaagtggtttttcagaatgctatgtaaggaccgatttgagcactaactataggtactctgaatatatatttcccttgattattcaccaaaagtgttccccagtctttgactctttaaattccaatactgattccaaaacaaataaatattttgaagactcaatgaatactttccatattttggcctatttatataagaaagttaataacattgacccttcacagctcttctgcctgctcctcaaagtggctctatctaaatatttattactaaaatgtttttcctacagtctacatgaatacaaacctcaatagctaagcttgacgt

SEQ ID NO: 224659 - DNA, 1000 bp, Homo Sapiens
ctggcaaaaaacatcacacctcaaaggcagagtgctttaaatacagaaaagatgtataggatgaattgctgctgcacagagttacagaaacaagttgaaaaacatgaacatattcttctcttcctcttaaacaattcaaccaatcaaaataaatttattgaaatgaaaaaactgttaaaaaaaacagcatctcttggaggtaaacccttatgagacaggaaacagcaaaggctagctttaggagagaaagtacagcacctggtgtttttatttatgagaaccttttctttgtccactttctctgtaatgaccttctatccctccgtttttgcctgcctgccattctcctattaggttggtggtttttattttcctctaagttccttccaccaaataaatattacgtaaaaaattcataccaaatcaatgagaatactggcaaggaatacatagggactttctgctatatatgtaactttttattacttaaaggtaccgaaggaaggccaggtgcagtggctcacgcccagcactttgggaggctgaggtgggaggatcccttgaggccaggagttcaaggttacagtgagctatgatagtgccactgcactccagcctgggtgacagattttgtcttaaaaaaaaaaaaaaaaaagttgatatgagttttattttctgtccgtttgaaatattttgtaatattccctgcattctctgtcgtctgcctcttccacataatgtcctttgctttcatgtttgttatcttctttttctgttcactcagaggtcatcaatttctttctctccgtccttaattggattatttttcttttggcctttgggcacagagtctgacctctggaccactctaactggagaaggaactttatgttccctctcctgctgtgtccacaaccttagaaatctgtagctagatttttgttgttatagatagaatttactgtttctgaaacccaaatacagttatcagtttaaggtt

SEQ ID NO: 224660 - DNA, 1000 bp, Homo Sapiens; identical to SEQ ID NO: 119026

SEQ ID NO: 224661 - DNA, 1000 bp, Homo Sapiens; identical to SEQ ID NO: 119028

SEQ ID NO: 224662 - DNA, 1000 bp, Homo Sapiens; identical to SEQ ID NO: 119030

SEQ ID NO: 224663 - DNA, 956 bp, Homo Sapiens
gcggaaatggctgggagggggatggggatgttgaatttggaaattggaggggacgctggtggacggattgggtgcaaggagttggtgttgatggaggagcaggacgccagagtcccagccctggaaccgttcagagtggagcaggcaccacctgtaatctactatgtccctgacttcatctccaaagaagaggaggagtatttgcttcgacaggtttttaatgccccaaagccaaagtggacccagctctctgggagaaagttacagaactggggtgggcttcctcatccccgagggatggttcctgagcggctgcccccatggctccagcgctacgtggacaaagtgtcaaacctcagcctctttggaggcctcccagctaaccatgtcctcgtgaaccagtatctgcctggggagggcatcatgcaccatcagcctgggctcccacaccgtgctggacttctacgagccgcggcggccagaggacgatgaccctacagaacagcctcggcctccgccccggcccaccacctcgctactgctggaaccgcgcagcctgctggtgctccgcggccccgcctacacgcgtcttctccacggcatcgccgccgcccgcgtagacgcgctggacgccgcctcctcgccgcccaatgcggcagcctgcccgtcggcgcggccgggagcctgcctggtgcgcggcacccgggtctcgctgaccatccgccgcgtgccccgcgtgctgcgcgccggcctcctgctgggcaagtgaccgccagggccgggacccctcggattcccaggttcctgcccctttggggctgctgtgactccgcgacctaggaaccgtgggcaaagggggctcccctgggttatttattttcccaataattttgtgtgagctacagaagaccccataccaaataaacaaaaaaatctttaaaaaaaaaaaaaaaaaa

SEQ ID NO: 224664 - DNA, 1000 bp, Homo Sapiens
ttgtattagtagagacgacagggtttcaccatgttggccagggctggtctcgaactcctgaccacaggtaatcagcccgcctcggcctcccaaagtgctgggattacaggcgtgagccacttagtatttgtaaccataagagaaagtatattttaacagcattacatttcatgccaattgacaagttttgccaattttaataagaaactaagctttatgtaatgtaacaccgtaatttatgaatttgttcattgtcactgcctttattcatgaaactgtcaaatagagtgtctttcaagggttgcaggatcttagagatagaaagtaccttggtgatcatctccagcctaaatttcatcatcccttctatggtattcccaacaaattatcatccaacctatacttaaaaacatatggtggccaggcatggtggctcacgcctgtaatgctagcactttgggaggccgaggtgggtgaagcacctgaggtcaagagttcgagatcagcctggccaacatggcgaaaccccgtctccactaaaaatgcaaaaaaaaaattaaccgggcgtggtggcaggcatctataatcccagctacttgggaggctgaggcaggagaattgctcaaacccgggaggcagaggttgcagtgacccaagatcgtgccacttcactccagcctgggcaaaagagcaaaacgccatctcaaaaaatatacatatataaggagataaagtttcccattttccaatacagtttcacatttgaacagccctaattgatacaactttatggcagggttttagtgtgtgagtgggatccaaaacactcaatcctgtaaaagggtacagtcctattgtatgttaacacactgatgatgtgagcctgtgagatgagccaatcaccagttgttatgttcgaatctgctttgtgttgggacgctttaatgtcagggtttcactaaataaatgaattttcatatactgaaaaaaaaaaaaaaaa

SEQ ID NO: 224665 - DNA, 1000 bp, Homo Sapiens
gcctgtaatcccagctacttgggaggctgaggcaggagagtgcttgaacccaggaggcggaggttgtggtgagccaagatcatgccactgcactccagcctgggcaacaagaacaaaactccatctaaagaagaaaaagaaaaactgaagagagagtagttgtcagagtgaagagtttaatcaacagaagtagagtaacatattctttagtagaactcacattatctgcttgaagcacattttgctaatgttttattcagaatgtatcatagatataatgttttaactaataaaatagaatggtttttctctatgaatgaatcacattctttctgccaacatagttttatcctgtctcagtaggatactccataacacaatagcagtacaccactaggctcttaaacgatcaagaacaatttttttcatggtgaaatcaaataacgcagttttggaaacctataaccgcattttgtgcttgaattacgtgccccacactgtggcttaggatacttattggggtataatgaaaatcttactgaaagttaatttcacattcttacaccccaaaatctgcattgccattgatgcatatgcaccacattattatatttccacatcagtttcttgtgtgccaaataagacccatgctatgcatcttggtttccatgaagtgaaaatacatagtaagaatgcgagaaatataaatcaggccaggcacggtggctcacacctgtaatcccagtactttgggaggccaaggcaagcagatcacctgaagtcaggagagaccagcctggccagcatagtgaaaccccatctctactaaaaatacaaacttagctgggcttagtggtgcatgcctgtagtctcagctacttgggaggctgaggcaggagaattgcttgaatccaagaggcagaggttctattaatggagatcattccattacactccagcctgggcaccaggaacgaaactcgttctcaaaaaacaaaac

SEQ ID NO: 224666 - DNA, 1000 bp, Homo Sapiens
tacgtgaatttgtaaggcaaaacagtacttcaaagaaatgtatatgcagtgagacatttctagctttatttccagatccctttcaacccaggtaccatttaatctctgtaattaggtgtactctggtggaacactcaccattttttagatgaggaaacagggtcagaaaggtcaagtgacctatccaaggtcacacaactagcaagcagttaagctagacttttactgtaggcagtctgcctccagtcccgctcctaaccactgtactgtattatctcctcaaatgcattagaatcttcacttccataaagaaatatgctctttgtttttttcttttggaacacaaggtttagtccatcactcactcacttttccacttttgataagatgtaaatattgagaactatttctcttctccagtagaagaagagcaacaggccatgtgtgatggtaaatggcagctgacacttgcgacagtatcaagaaggcactaaggaatggtgagaaggatgacttgccctttctaaagtggcatctcagcttgagtctgcagaatgccttgcaaatccagctcagtactgctagataatccatattgacaagagaagctaaagattcagattttctatgtgaagtttcctggttttaaaatgttagcaacaaattccaaatttttacagaacactgtacaggccagaaagaacaatctgtgtgctaccagtttacaattagctatgcttcttcctcctcagacctggcatgccctttccacccccttgcctttgctcttagtaccccgtgtacactccaacctcttccacctacaaatttctaaatgcacagttcaaatgttagttcttcagattcctgtctctgtaataacacttgcccctttgtataacagttctcatgtatatcttcctattagaccatgagctcctgtggtagaaattgtgtattcattactgtatccctagtgtgcagtaaaggatcacagtag

SEQ ID NO: 224667 - DNA, 738 bp, Homo Sapiens
gggactgcacatcctgggcctgcggcgcagtgtagacctgggaggatgggcggcctgctgctggctgcttttctggctttggtctcggtgcccagggcccaggccgtgtggttgggaagactggaccctgagcagcttcttgggccctggtacgtgcttgcggtggcctcccgggaaaagggctttgccatggagaaggacatgaagaacgtcgtgggggtggtggtgaccctcactccagaaaacaacctgcggacgctgtcctctcagcacgggctgggagggtgtgaccagagtgtcatggacctgataaagcgaaactccggatgggtgtttgagaatccctcaataggcgtgctggagctctgggtgctggccaccaacttcagagactatgccatcatcttcactcagctggagttcggggacgagcccttcaacaccgtggagctgtacagtctgacggagacagccagccaggaggccatggggctcttcaccaagtggagcaggagcctgggcttcctgtcacagtagcaggcccagctgcagaaggacctcacctgtgctcacaagatccttctgtgagtgctgcgtccccagtagggatggcgcccacagggtcctgtgacctcggccagtgtccacccacctcgctcagcggctcccggggcccagcaccagctcagaataaagcgattccacagcaaaaaaaaaaaaaaaaaaaaaaaaaaaaaa

SEQ ID NO: 224668 - DNA, 1000 bp, Homo Sapiens
ttggcaaatgagacctaattaaatcttctgcacagcaaaagaaactatcaacagggtaaacacacaacctacggaatgggagaaaatatttgcaaactatgcatacagcaaagatctaatattcagaatccattaggaacttaaacagattaacaagcaaaaaaaaacaagcaaccccattaaaaagtgggcaaaggacatgaacaaacacttttcaaaagaagatatacacatggccaacaaggatatgaaaaaatacctgatatcactaatcattagagaaatgcaaatcaaaaaaatgccatcacactaatcagaatggctgttattaaaatgccaaaaaattacagatgctggcgaggttgcagagaaaggggaatgcttatacactgctagtgggaaaataaattagttcagccattgtggaaagcagttgggtgatttctaaaagaacttaaaacagctaccattcaagccagcaatctcatgactgggtatatgtccaaaggaatataaattgttctaccataaagacatgcacatatatgttcactgcagcactattcacaatagcaaaacatgaaatcaacctaaatgcccatcaatggtagactggataaagaaaatgtgacacatatacaccatagcatactacacagccataaaaaagtacaagatcatgtgctttgcagcaacatggatggaactgaaggtcattatcctaagcgaactaatgcaggaacagaaagccaagtaccacatgttctctcataagtggaagctaaatattgagtacacatggacacaaagaagaaaacaacagatatggggcctacttgagggtggagggtgggaggagggtgaagactgaaaaactgcctatggggtactatgcttattacctgggtgatgaaataatctgaacacaaaaccctggtgacatgcagtttacctatataacaaaactgcacatggactcttaaacctaaataaaagttta

SEQ ID NO: 224669 - DNA, 1000 bp, Homo Sapiens
agctgagttgaagtttgtcaccaagaacgatggatatgtacacattcacccttcatcagtgaactatcaggtgagacactttgacagcccctacctgttgtaccacgagaagataaaaactagtcgagtattcatccgagactgcagcatggtgtctgtgtacccgctggtcttgtttggaggaggccaagtgaatgtgcagcttcaaagaggagagttcgttgtctccctggatgatggttggatccgttttgtagctgcttcccatcaggtggctgaactggtaaaggagcttcgttgcgaacttgatcagcttctccaggataaaattaaaaacccaagcattgatctgtgtacgtgtcctcgaggatcccggatcatcagcacaattgtgaaacttgtcaccacacaataaaaagcagtcttagagagtgcttgctactcacctgcttctagctcacctgggaaataacagcagaacctctacctcgaactaaagacctattggggctggccctggtggaggagcccagggcatgaagcccaaggcagctgaggcagtgtatatacccttagggccatttctaacaaagccttggccactcccagcacaatttggagtgtcaagggtgagagcctaaaacccagcttgcctgtctttgtctctgtgattgttctggagtgaattaagttcacctgataactcaaaagtgaatgtataatacaattctgttttaatctgtgtattctttttctcctactttttactggggtgagaggggcatgaagagaaatacgccttttttttttttcttttcctgtcgccaaggctcgactgagagaagtcagaacagagaaggggaaaaaaaacccaaaattatgtgaacaagcaaaattaaaatttcattttaggctattggctactgagtaaacttgacttgtgaggggtttttatttttactcattaaaagtcaacttaaaaaaaaaaaaaaaaaaaaaa

SEQ ID NO: 224670 - DNA, 1000 bp, Homo Sapiens; identical to SEQ ID NO: 119036

SEQ ID NO: 224671 - DNA, 1000 bp, Homo Sapiens
tcgagaaacaagcagggcacagtcggagtagggtgtttcgagaggtggagacgctgtatcagtgtcagggaaacaagaacattttggagctgattgagttctttgaagatgacacaaggttttacttggtctttgagaaattgcaaggaggttccatcttagcccacatccagaagcaaaagcacttcaatgagcgagaagccagccgagtggtgcgggacgttgctgctgcccttgacttcctgcataccaaaggcattgctcatcgtgatctgaaaccagaaaatatattgtgtgaatctccagaaaaggtgtctccagtgaaaatctgtgactttgacttgggcagtgggatgaaactgaacaactcctgtacccccataaccacaccagagctgaccaccccatgtggctctgcagaatacatggcccctgaggtagtggaggtcttcacggaccaggccacattctacgacaagcgctgtgacctgtggagcctgggcgtggtcctctacatcatgctgagtggctacccacccttcgtgggtcactgcggggccgactgtggctgggaccggggcgaggtctgcagggtgtgccagaacaagctgtttgaaagcatccaggaaggcaagtatgagtttcctgacaaggactgggcacacatctccagtgaagccaaagacctcatctccaagctcctggtgcgagatgcaaagcagagacttagcgccgcccaagttctgcagcacccatgggtgcagggggaacagcagcacaatggacctgacgctcttcgcagctgaggccatcgcccttaaccgccagctatctcagcacgaagagaacgaactagcagaggagccagaggcactagctgatggcctctgctccatgaagctttcccctccctgcaagtcacgcctggcccggagacgggccctggcccaggcaggccgtggtgaagacaggagcccgcccacagcatctgaattcgaag

SEQ ID NO: 224672 - DNA, 1000 bp, Homo Sapiens
gaggtcaggagttcaagaccagcctggccaacatggtgaaaccccgtctctactaaaagtacgaaacttagccaggcatgatgggggtctgcctgtaatgccagctactccagaggctgaggcaagagaatcacttgaacccgggaggcggaggtttcagtgagccgagattgcaccattgcaccccagcctgggcaacagagcgagactccgtctcaaaaaaaaaaaaagaaagaaagaaaaggaaacccaagagctgcctggacacacggaaacccaactgagaacaaaatcctggcccgtgcttggtcaaagcaaacccatttcactgtcaggacccccggtcacacaggaaccacccgccaggggagcctgtgactgtcagttcctgtcccaggctttgcccggccgccccaggaacccaaccctctgggctgacctttctcctgcttctctccaggctctgcaggggacagggcaggtgctgcaggagcccctttgctggctttatctgctcccttgttctggacacagagccctgggaaaaagagggggtggaagacagacaaggaaggtggaatgttctgttttggccaccaggaaatggggtggggtgggcatacacagagaggacccctctcttaatacagctgcttttctcggtgccaacctccctcccccaagctcagatcctcctcttatgcccttgattgtgccagcccatgccacccccatcctgggcacagttacaccctcccatgcagtgggagaaacacagaccctcgtacccaaaggcccctgccccacttctcccccacaaagcggggtctcaagccacactgccctgtttgctgccatgaggcccccccccccagcaatatcccaggggcgggcccaatgcccactgtacatgaggctgcatgatgggtctggggccttgctgattccccagacccctaattaaatgtttcttgtcccagcccaaaaaaaaaaaaaaaaa

SEQ ID NO: 224673 - DNA, 1000 bp, Homo Sapiens
taacagctaaacaaatcgaataacagctaaacgaatcgaataacagcttttgtacatcaacatcaagaaggaatacgcctgagagagatcagagtatatagatgaatatgaacaagaatggaacattcacttgtcaacgcactttctaaatctagatcagcagagatgggagtgattttctggaaagagatgtgatcatggattaaacaccagctcattggaaactcattggatgagatcagaaaacgttcatgaaaaatcatattcaggaaataaggaagaggaatataaatgctctagagttaacatgtaaaatatatacgtactgaggtttgtaaactgtcctttttaaatcaaactgaaaacaaaaagctttaacctttcaacagaatttttaaaaaggcagttagttctaaattattcctatctcaatagccaagaggctgatcaagcgtcatttattgaggaagcatcttagaaaatgcctctgaatgttttcataggagccgtgacctttggttcttcatctctaccattcatttacttcactgtgtaattagttacaaccactcagttattaagagacgtaacgcttcaaactttttaccaagtctgtgttctgtttaatctgtccatacaagttattactgagaaagtgtttatgccatatactattactccatcaagctgtatattacaggaagtacatctttacatcataggttcccaagcaacatagatttccctatctttcaggaaacagcatcaaggaactctgaaaaatatagaaaaagttcattttcaccttggaagctcacgtgtaatattataggctactatcaaataaacactttttttctaattctccctagtatatgcataggaatttaatatactttataaataagtatctaaaatgtctcctacttttttcctatttctttgccatacatgttatcagaaatccatgtcttctatttcccttactgatgggcactca

SEQ ID NO: 224674 - DNA, 757 bp, Homo Sapiens
ctcagaagaccgagaggacagactgccgtgttgccaccacaggctggaccatggacccccaagagatggtcgtcaagaacccatatgcccacatcagcatcccccgggctcacctgcggcctgacctggggcagcagttagaggtggcttccacctgttcctcatcctcggagatgcagcccctgccagtggggccctgtgccccagagccaacccacctcttgcagccgaccgaggtcccagggcccaagggcgccaagggtaaccagggggctgcccccatccagaaccagcaggcctggcagcagcctggcaacccctacagcagcagtcagcgccaggccggactgacctacgctggccctccgcccgtggggcgcggggatgacatcgcccaccactgctgctgctgcccctgctgccactgctgccactgcccccccttctgccgctgccacagctgctgctgctgtgtcatctcctagcccagcccaccctgccagggccaggacccagacttcagcaaatgtggctcacacagtgccgggacatgccgggacatgcggggtggctgttgtcatgggcgtctgccccttcacaccaggcactggggctcagacccaccaggaaggtggccgttcagcccgagctcctgaaacggaatcccaggtcctggctggagagggacacccctgattaccttaaggcccaggcaataaagcagggtgatcttcctcccaaaaaaaaaaaaaaaaaa

SEQ ID NO: 224675 - DNA, 1000 bp, Homo Sapiens; identical to SEQ ID NO: 119038

SEQ ID NO: 224676 - DNA, 1000 bp, Homo Sapiens
agacagtacgccgacatctgcctcttcagcaccgcccagtacaagtgtcctgtggctcaactcgaacaagatgaccaggtatctcccagctccacattctgtaaggtgtacaccataaccccactgctcagcgacaaccgggagaagcggggtctcgccctggatgggaaactcaagcacgaggacaccaacctggcttccagcaccatcgtgaaggagggtgccaacaaggaggtgctgggaatcctggtgtcctacagggtcaaggtgaagctggtggtgtctcgaggcggggatgtctctgtggagctgccttttgttcttatgcaccccaagccccacgaccacatccccctccccagaccccagtcagccgctccggagacagatgtccctgtggacaccaacctcattgaatttgataccaactatgccacagatgatgacattgtgtttgaggactttgcccggcttcggctgaaggggatgaaggatgacgactatgatgatcaactctgctaggaagcggggtgggaagaagggaggggatggggttgggagaggtgagggcaggattaagatccccactgtcaatgggggattgtcccagcccctcttcccttcccctcacctggaagcttcttcaaccaatcccttcacactctctcccccatccccccaagatacacactggaccctctcttgctgaatgtgggcattaattttttgactgcagctctgcttctccagccccgccgtgggtggcaagctgtgttcatacctaaattttctggaaggggacagtgaaaagaggagtgacaggagggaaagggggagacaaaactcctactctcaacctcacaccaacacctcccattatcactctctctgcccccattccttcaagaggagaccctttggggacaaggccgtttctttgtttctgagcataaagaagaaaataaatcttttactaagcatgaaaaaaaaaaaaaaaaaa

SEQ ID NO: 224677 - DNA, 1000 bp, Homo Sapiens; identical to SEQ ID NO: 119039

SEQ ID NO: 224678 - DNA, 1000 bp, Homo Sapiens; identical to SEQ ID NO: 119042

SEQ ID NO: 224679 - DNA, 1000 bp, Homo Sapiens
tatatacacaaatgttcacggcagcactatacacaatcgcaaagtcagggaatcaaactaaatgtccatcagtggtagaaaggataaagaaaatgtggtggcagggagtggtggctcatgtctgtaatcccagcactttgggaggctgaggcgggtggttcacctgaggtcaggagtttgagaccagcctggccaacatggcgaaactccgtctccgctaaaaatacgaaaattagccaggcgtggtggcgagcacctgtcatcccagctacttgggaggcctaggcgtgagaatcgcttgaacctggaaggtggtggttgcagtgagccgagatcctgccactgcactccagcctgggcaaccaagcgagactctgccttaaaaaaaaaaaaaagaaaatgtggcacatatacaccatggaatactatgcagccataaaaaagaatgggatcatgtcctgtgcagcaacgtggatggagctggaagccattatcctaaatgaactcactcagaaacagaaaaccaaataccacatgttctcacttataagtagaagctaaacattgagtacacatggatacaaagaagggaaccgcagacactggggcctacctgaggtcggagcatggaaggagggtgaggatcaaaaaactacctatctggtactatgctttttatctggatgatgaaataatctgtacaacaaaccctggtgacatgcaatttacctatatagcaagcctacacatgtgcccctgaacctaaaaaaaaagttaaaagaaaaacgtttggattattttccctctttcgaacaaagacattggtttgcccaaggactacaaataaaccaacgggaaaaaagaaaggttccagttttgtctgaaaattctgattaagcctctgggccctacagcctggagaacctggagaatcctacacccacagaacccggctttgtccccaaagaataaaaacacctctctaaaaaaaaaaaaaaaa

SEQ ID NO: 224680 - DNA, 1000 bp, Homo Sapiens
caggctacacacgaccatgatttatgttttcaggggatgcccatttgtcccaagcttatcctgtaattctagaattacctggtgtcctgatgcattttccactagaggttgctaatcagcatgttttagcccaagtccgccttcctgctgtggttaacctgttatgttgcttttggaaggagactctaagacagggaaagcaagttcatggtacatacgcagccattgtctctgtttttacccatggcagacattgctaatcaatggcagctctatttcactgagtctggataaggtttcagagttcaaatgcttgacgttggcacttaacatgaaagcctataggtcattcttgctctgggatctacaggcagggtaggcacaggtgcagcctaagaagggaacctgcttcctctcccttccaaagacagtgacagctgactgagggcaaagagcaggcaccactcagaacgtggtgagtacagctcagctcagcactcagtcagtggtaacttgtgcccagccctgtgctaggcgctgacattaacaggagcaaccagggcccaattcctggccttggagctcaaatctttcctttgatttttgctcctgatcatcaaggccccagtggcaaccatgtggtaagtggccaaccaagccctacccagggtcacccaacacactctgccttgagcctctcctcagggtctattccttgcgtggattatgtggccgtagcatgttacagttcaaacatgtctccactaccctgttaagagcagcctgggaacgtacaggccatcaagactatttatttaaatacaaaaaaaggggaaaacacacacacggaaaaaaaattgtaagcactttttttgtaaaaccaatgtctgttttgttacatacctttcatgtcgtgctttgtaaatgtcttatttgtgtaataaagttaatgcaagtagaagtgctggcactgaaatccagaaaaaaaaaaaaaaaaaaa

SEQ ID NO: 224681 - DNA, 1000 bp, Homo Sapiens
taccaggacctggaggacaaggagaagctggaggacctgggcgcggctctctaccgcctgtccacagaggagaagtaaagccatttctgccactttccccctagagagccgattccaccccggggcccgtagggccctctcgcagcccctgggtgagggtgtctctgtgaggctccactgcggtctgtgcctgactggccacatctaactctctgtttccaatttcagaatcctaactgttgcataaaatacattgtttgtcctgcgagaatattttccgtcctccaccatcaacattgacactgcgtagatttgccgcacttggacctccatgcgtggcactcacccgcagtctcctggacaggcgctgtattttattctgtcgcagagctaatgctgtttactcactcacttcaacaacactaactgcggtggtggcctccagcaggcccccccgctgcagaccctctgtcctgcctctgcctccaggcatgcgtttccccgtgagggccaatgcacctccccccaccccccaccctcccatgtccacagtgggtcgtgtgttcctggacagagaaacagtccacactggggcctgcgggacacatatagcagcatattttgctcttaaccccacccacctttttaatcacactagattttaagatcaatccctttttgaaacaactcacggagaaaaccagaacataaatggcctcctgccagctccggcgtctctctgtggtctgccttagtgggccaagtccaaatgcagagaaggcctttcccttccgcgcctgccccatcgggctcgctgacgaggaagcgctgtccctgtgatgaggttctctctcagagagtcttggaaaagagaccacttgctcttgtttaaaataaatttggacgtgatttttccatgcagcatctggtgtgaataaaacagcagttgactgataaaaaaaaaaaaaaaaaaaaaaaaaaaaaaaaaaaaaaaaaaaaa

SEQ ID NO: 224682 - DNA, 1000 bp, Homo Sapiens
agaagtggaagggacgctaattcgggtacccattccccaatcagccaaatggccgatgacacagtggcagaactggacaggcatctggcagtgaagaccaaagaactccttggatgaaagtccactggggccagcaatactccagagcccagtttctgctggatcccatgggtggcacattgggacttctctccctcccccatctacacagaagactgtcaccatgctgacagaagcctgtccttgtaaggcccagccttccaggggaacactcagacatgttcattctcttcctgcttctgctctgggccggtgggtggctctcagaaaatacttgctgctggcaaaaggcctgtactcaggcatttgctttgacttgatgttgccaagggactgaggccattggcaggcttagtaccacctgctcctcatcttaggagtctccttttcaaataattaggctctgttcccattttaaaactctgatattggccttcacctgtgactggacactttactagaggcccattttcactaaacaataaaatctaaataaattggaaggaataacaaccacaaaggaaagaatagagttggtctggattgatgatcactgaggatctgtatgtgaggcacccataacagtagttttgcctgtgagtcgtcttcacacatgctgttttctctgcctggctctctcttcccctccttacctggccagtcctgtttatcatcaggccttgtcttggatatcacgtcctctgggaagtcttcttttcccctctaacctaggaccctcattaccggctctcatagcacagtctactgctttgtacgaattctaagtattcttgttgcacttaattagcctgtatatcctcagaactttgtgtaatgcctggagcatagtaggcagtcatatgttgtatcgtgaataaattgcacatagtagctacccagcaaaaaaaaaaaaaaaaaaaaaaaaaaaaaaaaaaaaaaa

SEQ ID NO: 224683 - DNA, 1000 bp, Homo Sapiens
gggagcgggcagggcccgactggaaggcagccctacagcgggagcgtgaggagcagcagcacctcctagctgagtcctacagcgctgtcatggagctgactcggcagctgcagatcagtgagcgcaactggagccaggaaaagctgcagctggtggagcggctgcagggtgagaagcagcaggtggagcagcaggtgaaggagctgcagaaccgcctaagccagctgcagaaggctgccgacccctgggtcctgaagcactcggagctggagaagcaggacaacagctggaaggagacacgcagtgagaagatccacgacaaggaggctgtttccgaagttgagcttggaggaaatggtttaaagagaaccaaatctgtttcttccatgtctgagtttgaaagtttgctcgactgttccccttaccttgctggcggagatgcccggggcaagaagctgcctaacaaccctgcctttggctttgtgagctccgagccaggggatccagagaaagacaccaaggagaagcctgggctctcgtcgagggactgcaaccacctgggtgccctggcctgccaggaccccccagggagccagaagctgcccttcctcctcatcctggcccctccccagcccccgccaatactgtgaacccccttcccactcagcctggtttcctggtgagggtcctgcagtcatgggccctgggggacccccagggcaaggcccatgggagggaagggaccaagggcatccttgggccaactgtccacctctcttgtccactattctctcctttccacttctgtcttcaaaaggctccttcctaggatggatcgggtgctaggacaactgcagtccaatccaccagctctccctgcccctgtgtcttatttcagacatgagaataactgtacagtgtaaacttataaagcgtttttaatggttgtagattggaaataaagtatgtcatatgaacagctaaaaaaaaaaaaaaaaaa

SEQ ID NO: 224684 - DNA, 1000 bp, Homo Sapiens
catgactatacattgtgacatggtcattacatatggattagaccaactggagaattgccagacttgtggtaccgattatatcatctcagtcttgaatttactcacgctgattgttgaacagataaatacgaaactgccatcatcatttgtagaaaaactgtttataccatcatctaaactactattcttgcgttatcataaagaaaaagaggttgttgctgtagcccgtgctgtttatcaagcagtgctcagcttgaagaatattcctgttttggagactgcctataagttaatattgggagaaatgacttgtgccctaaacaacctcctgcacagtctgcagcttcctgagtcctgttctgaaataaaacatgaggcttttaagaatcatgtgttcaatgtagacaatgcaaaatttgtagttaaatttgacctcaattgactacaaaatttgtagttaaatttgactacaattggaaatgccaaaaactcactaataggggtgagtctttaattgtaatgactttgttttatccacattacatatttatgtatttcactgttatgtcaacatgtctgcagaatcactgtatgtaacaaacagccatatttaagacatgcctggataaataaaattggtaggaatgttttcttgccattatatttaacttttcttctttttccttgacaaatcttgataagtttttttatattagttttattttctagaaaatgtcttatgaatttctcctatttgctctagcatgcttacagaaaatgtcagtgtttcttacagctcaaatttgtatagttgttttaaaatgcggtctctttcttcttcccctggtacttttttctttctgtgtactgaagttagttcttatacatggtcttatattttggctgtctgtttttccctaggaacattcatacaggttgaatattccttatctgaaatacttgggactggaagtgttttcgattttggattttggaatac

SEQ ID NO: 224685 - DNA, 1000 bp, Homo Sapiens
agtagggcactcctaaaacacctggaaggtatctcagatgaagacatcatcaacattactcttcctactggagtccccattcttctggaattggatgaaaacctgcgtgctgttgggcctcatcagttcctgggtgaccaagaggcgatccaagcagccattaagaaagtagaagatcaaggaaaagtgaaacaagctaaaaaatagtctttctcaactgttggctaagaagaaatgcaaaagaagtggcataggagtgtgttatgggtgctgaactctctctctttttccccgattttccagagctaggctgtggagtagagtttgtataggtaactaggtaacttattgtggcccagataaggctttaggatgcctcagtgcttatgtcatagccttatgagttagctttcttgctagccccctagtcggtcaccaaactagtaactagtggggcttaatgaaggtcataagtttctgagatgggagagcaacaagtagagatgaagttaaaggtatttatcattcaagaaatcattattgagtcaccattgacaggcactattctaatcagtagttcactttaatatttaataagattttctgggataacagtaagggatattagataatataccgtatgtatttattactagtcttttcctctaggaaaagggatactttgataattaaggccagaggcccattagttgagaaagtcacagatatatttctccaagaaagccaacaaccaccaccacaatgacagaaatgacaacaaggccctttaacttgtcttctagtttagagacatccttcatttgacatttagtagaattcctctttggccacaagaataagcagcaaataaacaactatggctgttgaggttctcattttggtttgttttaattttttgaactttgggtacctgtaattagtttaaaaataaagttcctgataataaagtgactgaaaatggcaaaaaaaaaaaaaaaaa

SEQ ID NO: 224686 - DNA, 1000 bp, Homo Sapiens
cgaggagaccgcccggacggcggagcgacagaagagccagctccagcggctgctgcaggagctccgcaggcgtctgacccccctgcagctggagatccagcgggtggtggaaaaggctgacagctgggtggagaaggaggagccggcacctagcaactgacggcctcgcacggaactgccatcctgtgagggcagcggtggcgcccggcaaagttggagcccttgcggtaccagaaagcagcgagagcgagacctgggagccagggcaggggtggctgaccccatgctcagcctctaggggacggcaggccatcaggctgggggctgtgctatgtgggatggatgtgtgaggaaccccggttccacttaacaactaaatacaacatcttttgcacccctagaatgtcattttgccctcaaccttggtatttctcctggggcccttttagtcttgtgctgactttctcctgtcctcttccagtttagaataagacaggggagaaaaaggcttttcgagtgtgggacaaggtctgatgtcagtgaacggaactgaagagcaagacatggagcctggctggggctaagcagccccctcctccggatggcacaggctctgctaggttccggacacaggcttctgggggaagggtctcccttggccatcacgggaatggagtccatgctagaaagagctcagtgttgggctgggtttgccagtagaacactgcgttccagtcaccccggtcttgccagaagaaaccagcacctctttcccgtggctcctgtgttcagaatgtggtattggctctggcccagccttctcccctgttacccataattcttgcctctttccataatccgtggtttcagtttgactttgtatataaagttggggttttttttttttttttttggcttgttttttaaataaaccaaagtcaaaaacaaaaaaaaaaaaaaaaaaaaaaaaaaaaaaaaaaaaaaaaaaaaaaaaaaaaaa

SEQ ID NO: 224687 - DNA, 1000 bp, Homo Sapiens; identical to SEQ ID NO: 119053

SEQ ID NO: 224688 - DNA, 1000 bp, Homo Sapiens; identical to SEQ ID NO: 116952

SEQ ID NO: 224689 - DNA, 1000 bp, Homo Sapiens
aagctggagtaccaggataaaaggcttcattgcgtgttttgctataggaattctctgctcactgctgggtactgttctgctgtgggtgcccaggaagggactacacctcttcgcagtgttttatacctttggtaatatcgcatcaattgggagtaccatcttcctcatgggaccagtgaaacagctgaagcgaatgtttgagcctactcgtttgattgcaactatcatggtgctgttgtgttttgcacttaccctgtgttctgccttttggtggcataacaagggacttgcacttatcttctgcattttgcagtctttggcattgacgtggtacagcctttccttcataccatttgcaagggatgctgtgaagaagtgttttgccgtgtgtcttgcataattcatggccagttttatgaagctttggaaggcactatggacagaagctggtggacagttttgtaactatcttcgaaacctctgtcttacagacatgtgccttttatcttgcagcaatgtgttgcttgtgattcgaacatttgagggttacttttggaagcaacaatacattctcgaacctgaatgtcagtagcacaggatgagaagtgggttctgtatcttgtggagtggaatcttcctcatgtacctgtttcctctctggatgttgtcccactgaattcccatgaatacaaacctattcagcaacagcacataagccttgggtgcaagtgattcccaggtggcaaaaggcagccccatcagagatcacgggagcaacagtaagggacagagttttggggtccacttgtccctcagcatggaagccatcaccgtggtcctgcatagagtgagtctgcttctactctggcatctgagaacaagtgactctgctttagacaagcccctggagagcctggccatggagtgaggtagaaaagaagcactttttggtggtatatgctgtttctgaatttgaatctaagcattcttggtgttctga

SEQ ID NO: 224690 - DNA, 1000 bp, Homo Sapiens
ttgtctgatggaaaattcttcaagatgaatcctaatacaggagagttaatcaattgggtggcactggatcgtgagcaccgggggcaccatgagatgactgtgctagtgacagaccgcggctccccaccacgaaacgccaccatggcggtttacgtctcagttactgacatcaatgataacaggcccttcttcccccagtgtctccctggaaaggagttacacgtgaaggttctggaaggtcaaccagtaaatatgttggttacaactgtgtttgcaaaggatcctgatgaaggaaataatgcagaagttacatactcagtatcttcagctagacatatgcctctgaagggaaaaacagcatttgggaagcagtcgtgcaaaaaacaaacaaacaaacaaacaaaatcctgacctgaatctggtcagttctctagatctgcctcccaatttaaggaaaacataagaatagaggaacatattatgctacacgttggagatgcaacagcaaatctagatcatggaaaatgtcaggatacaagttccagtttattcaacaaataaattgcaaggacaaatagagagatgggtggcaggaatccatagattaaagaaatatgcaatatatggactttattttgatcttaatgtaaacaagaaaaataaagagtatttatgggatggttgaaaatttgaaaacttactgaatatttggtgatactgtgaaccattattaatttttaaggtataatatggtactgtgatgattgtgttaaaatatttattttttaaagatgcattttgaaatatatacagaagaaataatatgacttctggaacttacttcaaaaaaaatgggagaagcgaagtatatacatggggaatagatgaaataagattggccatgagctgatcattgttgaagctaggtgatggactcgtgaaagtttattataccattttgtccacttttttgtatgcattttccataataaaacttttt

SEQ ID NO: 224691 - DNA, 1000 bp, Homo Sapiens
tgatggtctctgtgctactccatcactggaaggctttgaagaaggtgaatatgaaactcctggtgaatataagagaaagagaagacaaagtgtaggagattttgttagtggagcactaaataaatttaaacctaacagaacaccttctattacacctcaagaagaaagaattgcccagctatctgaatcaccagtgattcttacaccaaatgctaagcgtacattgccagtagattcttctcatggtttctcaagtaagaaaaggaagtccatcaagcacaattttaactttgagctgttgccaagtaatctcttcaatagcagttctacaccggtatcagttcacatcgatacaagctcagaagggtcatctcagagttcactctctcctgtactcattggtggaaaccatttgatcactgcaggtgtgccaaggcgaagtaaaagaattgcaggcaaaaaagtttgcagagtggaatcaggaaaagcaggctgcttttctcctaaaatcagccataaagaaaaggttcgaagatctctgcgtttgaaattcaatctagggaaaaatggcagagaagtaaatggatgttctggtgtcaatagatatgaaagtgttggttggcgacttgcaaatcaacaaagtttaaaaaatcgaattgaatctgtaaaaacaggtttgctttttagcccagatgttgatgaaaagttaccaaagaaaggtacatttacatactactgttagagttttacctaaaaatcctgctttagttgcttttttaatggcaaaacatattaattaatttactgttctagagattaaaagttcatgtttgaatagtgaaaatattagaattggcaatgtatttttctatcaacaattgggaaatgcttatacatgtaaatatgaaaatgtttgacattcttatgttaaaaattatttcttgtaacacaaatactttattagaattaaatgcttagtgacttaaaaaaaaaaaaaaaa

SEQ ID NO: 224692 - DNA, 1000 bp, Homo Sapiens
caaccagcttctggtagaaatggatggtgcctctcttgaccagctaccctcccaggggaccatgaggaagctcagaggaaagacccccgcctgctcctgtctcacggagcccacagggtcacggagggcaatggagggtcattcgctctgctggggttgccttttgcactgaagatagagaccacctttttgagtgacttgagcccaaaggcaagcgtatatcaaacgatcttctccacataacctctctgtgccatcataagaatagctgcttccgcccccggatttgctcaggcctgggaatccgctgactgaaggcctcttgttgagtgccagctctaaacaagtccctttatgcagagccacagctgtgcatgctcagccctgccgaggtcccaggccaggctttgttgcttccgttcatggaagcgcacaggatagggccgacgctgtgccggtcgtggggaaatctcactggggaagagaaaagcccaagccttgttggttacgtcagccggtccatggcggtgtcctgcggaccccagagcccccgggaagggcgcaagtcaaagagcactggaggcaccgccggcgatggacgtccaggtcccggctcctgtgctggaaagcgttgatggggagcgtcggcgctgaccacacgcgggagctgcggaagcccagcggttcacacaggcctcccttcaacgtagtcatcccctggtggtggaagcaagacgacggcccctgacgtgcagccacacacagaaaaggctgctgtgaacattttatgcttcgactttttttttcttcagagacagggtgtcgttctgtcgcccaggctggagtgcagtgccaccatcatagctcactgcagcctccacctcctaggctcaagcttcctaagtagttgggactcaaggcttgagtcaccatgccaggctctgttttttcagtctgtgaaaaataaagtcatcagcatgtgaaaaaaaaaaaaaaaaaa

SEQ ID NO: 224693 - DNA, 1000 bp, Homo Sapiens
ttcacatgagatttgagggtccgcatggatggcctgtgccgccctcgctggcgaggctcctgtgtgcccctggctttctgggtctgtgcctctccagaatcttgtcttaccctccggtgtgcttgtgttcttagaaaagccccagcatggccgggcatggtggctcatgcctattatcccagcactttgggaggccaaggtgggtggatcacttgaggtcaagagttcgagaccagcctggccaacatggcaaaaccccatctctactaaaaatacaaaaattagctgggcatggtggtgtgtgcctgtaatgccagctactcaggaggctgaggcatgagaatcgcttgaaccggggaggcagaggttgcagtgagccgagatctcaccactgtactccagcctgggcgacggagtgagactccctctcaaaaaaagaaaaaagccccagcatgtagcaaaagcatttcttggtgagtgtgggggctggtgattcccaccttcaccctgtcatggtctcagggaacagcctgcttcccaccagcagcttgacacccacagtgtgctctggctgctgggagcccatctctcggagaaaccctgtccacccaaccccgagagccctagcgtgcagtcagcgtcagcacggcgctcccagatgagggccggactgcctccccttaagcagctgtgttggaggtactgcccagaccgctgcaggtccctggggatctgcatttctaacaggctcctgcccccaagactgctctggtggaaaatccagcctgggagcccctggagtggcaggccctgtcctgggtacaggtggagccacccccaggagttgcgtgtgtttttcttaattgaaagacttcccccaaaaggaagtggtcttttcactacccttgccagaaacatgctaggcaccactgggctctgtttctgtcccctagaaaatgggaataaaatttcttttgctgtcaaaaaaaaaaaaaaaaaa

SEQ ID NO: 224694 - DNA, 1000 bp, Homo Sapiens
gtagctcagattgtcaagaatgaaatggaaagtgctgtaaaactgtctgtgaaattgaaagtgaaagtgaaaataggcgccagctggggagagctaaaggactttgatgtgtaactgtgctgttgatgaagtcctcccagggaagcctgtgcagatgcagtcacctggaaagaacagagattaccctttcacctacctcagcaaaacaaactttcaagtcttgatagacttagcctagtaattttatagtgagagtttcaaactatatatcagtgtctatagcatcaaaaacttctgggggcgtgggggaagtagaataccaagtataatagttacattcactttcaaagagcatctatgaatttgccttttgtaacttactgtggctttaaacatattcagaacagatgcttgaaatatgcacttagcactttggttccacatctgtctgggtaaaccatgaagaaaatgaagctgctgcctcaatcgacccagacagcagccataggcagataaagatttggtttcaccctggtggtggtaggcatcgtgtgtgactttttttcctctaatatcaattttacagtacggaaatagtattttaaaatagtattggctaataaattatgaattctataaagtagtaagacttggtatggttggagtgtaggaatgaatattcatgaaatgtttcttattgcttttccttccctaattcatacaatgaatgtatttggaatacttacatattataaaataaactatacctcttcaagaggtatcctgttctgtaagatcagatgtttttattgcaggtcaatataatactgccagagacagaaaatacccccttatcagtcccttagtgcctctttctgtttgtggcatggtgagaaaacccatgctgaaaagattgtactttgtgatcccaatcagagggatggagctaatctttttgctgttgaaataaaatgaatttatgagaaaaaaaaaaaaaaaa

SEQ ID NO: 224695 - DNA, 1000 bp, Homo Sapiens
aaaacacaggttcgggttccctaagtcccacagtgtaatgattacaaatatcctagtgtccggtctagaaagactttctaggagaagactagtggaattttctaaaggttcagttttagcttttataacttaaatttggccctgttacgttctttttaatttgaaccataaggtatctcccctcccttcaggaataacttattggaaaactgaaaagaatcactgaatggaatgttcattttatggcagttgttttaagttttaaaatacacagaggaaaatattgtggaaggacctctttgttgctttcccttctaagttgtcttcttcttcttcttcttcttcttcttctttggtccttaagtgaaataaagactctaaaactaatttgtatattatcagccagagatgcggatggcagtcgagccaaatcgcatggctttcagatcaggtattctgcacattcattccaaggtcatagatttttaaaaggacctggatttgaagagatggcaaatgatgagccatcagaaaacttaatttggaaaacatgtatgtagccagtgtggatattgtggcctctctcaagacacattgacactgtagacttcattcagtccagtgtgagtattttggagtaggttggatgtagattttgtttttatcattgatttgtaccgacagaaatagacatttcatcatgtaaaattcctgttattctggaaaaacctattgttttgatcttcttgttttctgacttggaagtatcctttcaaaaaaactcttaagatatctaggtctaaaaagcacttcatgagatgctaaagctgacccactggttgaaaatgttgaccctatcctgttatttaaatgtgaacatttattgtacattcagtgagttatagtgttaatagtcttgtgctatgcagcaggtgtaaaaattaataaatatattttttaataaacatgtttgtatgtgtgaagctacaagaaaaaaaaa

SEQ ID NO: 224696 - DNA, 1000 bp, Homo Sapiens
ctgtgaaatgtgccgtttcctctaaataccagacagttgaaaaattacagcaatattatatttttattccctctaaattcaagagtaagcgcctaggatcccttaataagtttaaggccaaggcccgttccattcttctagcaactgacgttgccagccgaggtttggacatacctcatgtagatgtggttgtcaactttgacattcctacccattccaaggattacatccatcgagtaggtcgaacagctagagctgggcgctccggaaaggctattacttttgtcacacagtatgatgtggaactcttccagcgcatagaacacttaattgggaagaaactaccaggttttccaacacaggatgatgaggttatgatgctgacagaacgcgtcgctgaagcccaaaggtttgcccgaatggagttaagggagcatggagaaaagaagaaacgctcgcgagaggatgctggagataatgatgacacagagggtgctattggtgtcaggaacaaggtggctggaggaaaaatgaagaagcggaaaggccgttaatcacttttatgaaggctcgagttctgctgttctgtaaaagagaattggagaatgaaacctgctccaacagagatcatgagactgaaattggtcagaattgtgtccagaatgtgctcagctaattcagtattcttccccattctgggttggagtttactgcagagtaattcttacagtgctgatgtcaagactgttactgttcttcgactttgattccttgctcatgacatgagtagggtgtgctcttctgtcacttcacacagaccttttgccttttttagctgcaagtcaaggactaggttgatgatgcccatgacctgtaattgtaaagaagcttggacatctgcaaatgatatttaaaccatcttggcttgtgctttattcaaactaatgtgaaacaataaatttaaatattatttttaaaagaaaaaaaaaaaaaaaaaaaa

SEQ ID NO: 224697 - DNA, 1000 bp, Homo Sapiens
aacggagccagcgtgtcacatggtgagagagggagcaagagacagacaggggaggaaattcacacactgatggtggggatgtaaaatggtacaaccagtttggaaaacagtttggcagtttctcaaaggattaaacataaaattaccataggattcagcagttccacttgtgggtatgtagccaagagaaatgaaaacatatctccccacaaaaaaacttgggtatgagatttcacattatcattgctcataatagccaataagtaaaaacaacccaaatgtccaagaatgaataaatggataaacaaaatatggtatatttatacaacagactattattcggccattaaaaaaaaaaagagtggctgacacctgtaatctcagcactttgagaggccaaggcagtaggactgattgaagacaggagttccagaccagtctgggaaacaaagcgagaccctgtctccactaaacataaaaacaaaattactggggccccatggcacacacctgtagtcccagctgctcgggaagctgagatgggcggattgcttgagcccaggtattcaagtctggagtgagctatgactgtgccactgcactccagcctgggcgacagagcaaaccctgtttccaaacaaacaaacaaacaaacaaatacacagacagaagtagttaaacatctacaaggtaagtgcatcttgaagacgtgttaagttaaagaagccaattacaaaaggtttcacgttgtatgatttcgtttatatgaaatgtccagaataggcaaatctgtttgagagagagaaagtagatgagtacttgcctaggactgggaggaggattgcgaggaaatggagattcactgctaatgagtacagggtttcttttgggggcgcttatgaagatgctctgaaattgattgtgatggttgtacaactctgaatacatgaaacagcattaaacatcactttaagtaagtcaaaaaaaaaaaaaaaaaaaa

SEQ ID NO: 224698 - DNA, 1000 bp, Homo Sapiens
gaattattgtcattttacacatgaggaaagtgaggctgagagaatccaattagcttgtacgatatcactccataagagaagcaaatctgagagtaaaacccttaccccttattcttaagaatagtgcttgtttattcagtacaaaaaaaatgctgaaaggcagcgttttttagactctaaacattctgattttgaaggtgggtgttggaacgactgatgatgttttttatatcatcaattcagccaatggatgcgaacttaaaatctggattcacagaaccgtggtcacatttccccatcaaaatccccaaggcgggtcccaagttctctcctctacgctcattgcagaaatactttgaaataggttctgccagtctacaatagcagtgaagactgacaaatcagatattcccaatgactgacagcttctcatcttgcctctacctcagttaagtaatgtcaccctgaaacctagcttttctgcacttccatttctgacacctgaaaatgaaaatgataatcctaacttatacaccaagacctgttagcaagatcgattttgtaacagaaattgcttataagttttttatcagtaaggaccatgatcaccatttgtacatacataactaggttgttgagcaaagcatttttgctcatgtttcttaaggaagtagagtagtccttgtgtcagaacacatgttaatccacaaaacgccgcatcccagattccaaattaaaacatcgtttttaggattcttggagctagcctggatcatgggtaaaggaaacattttgccttttgtatcttatactggaatgggatgtctgtaagtcctagaacctctttgagcatatttcttacaagcctctgttttttcccctttaaaggaaactttgaaaggattgtgaatactggaaaatgacaaaactaaaggtagatctatcaagccaaaaaaaaaaaaaaaaaaaaaaaaaaaaaaaaaaaaaaaaaaaaaaaaaa

SEQ ID NO: 224699 - DNA, 1000 bp, Homo Sapiens
accggaacctgtggacaaagtggctgccatgagagagttccgggtgttgcacactgccctgcacagcagctcctcttacagggaggcggtctttaagatgctcagcaataaggagtctctggatcagatcattgtggccaccccaggcctcagcagtgaccctattgctcttggggttctccaggacaaggacctcttctctgtcttcgctgatcccaatatgcttgatacgttggtgcctgctcacccagccctcgtcaatgccattgtcctggttctgcactccgtagcaggcagtgccccaatgcctgggactgactcctcttcccggagcatgccctccagctcataccgggatatgccaggtggcttcctgtttgaagggctctcagatgatgaggatgactttcacccaaacaccaggtccacaccctctagcagtactcccagctcccgcccagcctccctggggtacagtggagctgctgggccccggcccatcacccagagtgagctggccaccgccttggccctggccagcactccggagagcagctctcacacaccgactcctggcacccagggtcattcctcagggacctcaccaatgtcctctggtgtccagtcagggacgcccatcaccaatgatctcttcagccaagccctacagcatgcccttcaggcctctgggcagcccagccttcagagccagtggcagccccagctgcagcagctacgtgacatgggcatccaggacgatgagctgagcctgcgggccctgcaggccaccggtggggacatccaagcagccctggagctcatctttgctggaggagccccatgaactccctgcttcccctgaacccccagcaagttgcagaggctactgcccttgggaggcactcatgaaggtgcctccatctctcccttccccaatatacctgatggtcaactctcaaaaaaaaaaaaaaaaaaaaaaaaaaaaaaaaaaaaaaaaaaa

SEQ ID NO: 224700 - DNA, 1000 bp, Homo Sapiens
atcttggcactcggcactcattggcacagtggtagttagaggtgaaaagtagagctgtcaagcccaagggcttagctttagggctcctcctgagttcggcccacagtagaagcaagattttaactagccccttttcctcttcaccctcccatgatgcgcagtgttcagaaagctggtaagtcctagggatttccagaagtagcctgcagaagaaggtaagtttgaaagccactccaggggtcctgatgctgtcatgctcagtgagccattttacagttctccaaagtctagccctgtttcggacctgcacttcacctctaagttatgtacaactcaacctgcatccctctaaaagtcctatatccatattcaccattggctaatttgaggccctgagtgggccttgaatgctaaaaagaagcagggtacgcagggctacatgtagataccacaccaaggctggaggctggtctgtcataagacagaaagaaagacgctgggcccaattttgacttggccaggggacaccttggtgtgtttgttatctttatctgtgggtaggctagctgacccatctccttgagtcattccctttgggaaaccccactgccagtattgatctcctttttgccttgtactgaatgacacattacctccacactctcccggactaggtggtcaacagggccacagggttgctttctgtctttggtggggcaggggagttgacagggatgagggtccaaggaataagcatgaatgacaagaaaacaagggaaagagttaacctgtcacatagcaggttaactttttcagggtttgcagttagaggtattcgaccattcactggctgagccagatcacgggaacttgagagcttttactgtgattcttcaatgtaaaaaataaacaacaatgtcaaactgtgtttatatgatttgtataaagcctttttaagattactatttaaataaacattataccagagataaaaaaaaaa

SEQ ID NO: 224701 - DNA, 1000 bp, Homo Sapiens
tgatgacattcggataagcactgatgtcccactggagaactgcatggaacccatctcggcttttgcagggggcaccctcctgccagggaccgagcccacagtggacacggtgcccatgcagcccatcccagcctactggtattacgtaatggccgccgggggcgccgtgctggtgctggtctccgtcgcgctggccctggtgctccactaccaccggttccgctatgcggccaagaagaccgatcactccatcacctacaaaacctcccactacaccaacggggcccctctggcggtggagcccaccctaaccattaagctagagcaagaccgtggctcgcactgctgagggccgaagcaagaacagcacccaaaacaaacgagaaagactgcaaacatgttgcctcgattttgcacttttttctcctcgcctagtttctgtgtgaactctcagacatctctttcccggatccccaaccctgagcactcttatcaatcccaaccatcctccttgggttcattttggtttctggtttttctttttcctttttgttgattccaaaccaacaaacccaactctaatgctgcatcttggactatccgaagagatccacccccaagcactccacaactcaaggctcagctggttttgttccagagactggttcgcttgttttttccccttgccttatcccatacctcctctcagtgggcagtctgccaggagacgtgaggggaagcctggatctgtgtgtatgtacatagtagacatgtgtgtgtgtgaatagctctctgtgtgtgggtgtgtgagagagcggctggttcattgtgtgtgtgtttgggcgaggggtgagtgttcagagagggcccctttaactcttatgttacttctcctggggtacattttacaagaaaataatatactgtacaagttttgtttacttggagaagagattgaagctttttgttgccttatctaaaaaaaaaaaaaaaaaaaaaa

SEQ ID NO: 224702 - DNA, 1000 bp, Homo Sapiens
agctttttaaagcatgcttagaaggaaaagcttaccaaaaatatattttgacatttagtttttccaagagctataatcttgcccatagtatttacctcatttttgtgtctgttttgctgtgggtaagctttataagataaataatgtctatacatgtttcgactgtttaatgagtaatcaacaaaatctgccagagagtccctctggaaccatataaagttcctggctttgaatgaaccagaagtgtttgcccacacagcaaatggtccatgttaaatgtaaatcctttttagtgttaatgtctgttctcataagcaggtatattatgatgaaacatgtaccagttctgtcatcactgtgatctttaaaaacctgcatttaacagtctaatttgaggctgggtgcagtggctcacacctgtaatctcaacactttgggaggccgaggcaggcggatcatttgaagtcaggagttcaagcctagcctggccaacatggtgaaaccccgtctctactaaaaatacaaaaattagcccggcatgttggtgcacgcttgtaatcccagctactcaggagtctgaggcacgagaatcacctgaactcaggaggcggaggttgcggtgagctgagatggcaccactgcactccagcttgggtgacagagtgagactccatctcaacaaaaaaaaaatctaactgaagaactaagttgattttttatttgccataaaccaagcaaaagtaaatgcaataatttcgagatttatggtaaacaaatttgaggtatggataaatctttcacatattttttattgctctttagtaaagaaaggcacaagaaagaaaatatccagctctcttgtgttatctcagtgtggcgactgcagaaaattgacaatgcctgcctgtgtaaatgtatggcttactgtcaaagcttcattcttggctgcatgttgaaaatgtgattaaagttaatagaggagatgaaaaaaaaaaaaaaa

SEQ ID NO: 224703 - DNA, 1000 bp, Homo Sapiens
ccttctggagggtgagccaagggagtttgtggagaactctgagtgcatacagtgccacccagagtgcctgcctcaggccatgaacatcacctgcacaggacggggaccagacaactgtatccagtgtgcccactacattgacggcccccactgcgtcaagacctgcccggcaggagtcatgggagaaaacaacaccctggtctggaagtacgcagacgccggccatgtgtgccacctgtgccatccaaactgcacctacgggccaggaaatgagagtctcaaagccatgttattctgcctttttaaactatcatcctgtaatcaaagtaatgatggcagcgtgtcccaccagagcgggagcccagctgctcaggagtcatgcttaggatggatcccttctcttctgccgtcagagtttcagctgggttggggtggatgcagccacctccatgcctggccttctgcatctgtgatcatcacggcctcctcctgccactgagcctcatgccttcacgtgtctgttccccccgcttttcctttctgccacccctgcacgtgggccgccaggttcccaagagtatcctacccatttccttccttccactccctttgccagtgcctctcaccccaactagtagctaaccatcacccccaggactgacctcttcctcctcgctgccagatgattgttcaaagcacagaatttgtcagaaacctgcagggactccatgctgccagccttctccgtaattagcatggccccagtccatgcttctagccttggttccttctgcccctctgtttgaaattctagagccagctgtgggacaattatctgtgtcaaaagccagatgtgaaaacatctcaataacaaactggctgctttgttcaatgctagaacaacgcctgtcacagagtagaaactcaaaaatatttgctgagtgaatgaacaaatgaataaatgcataataaataattaaccaccaatccaacatccaga

SEQ ID NO: 224704 - DNA, 1000 bp, Homo Sapiens
agagaggcctgtccagtctttgaaaacatcaagagatacttcaccctcaagtggttcagcagtttcttcatcaaaggtgttagacaaacccagtaggctaactgaaaaggaacttgctgaggctgcaagcaagtgggctgctgaaaagctagagaaatcagatgaaagtaacttgcctgaaatttctgagtatgaggcgggatccacagcaccattgtttactgaccagccagaggaacctgagtcaaacacaacacatgggatagaattatttgaagatagtcagctaaccactcgctctaaagcaatagcatcaaaaaccaaagagattgaacaggtttaccgacaagactgtgaaactttcgggatggtggtgaaaatgctgattgaaaaagatccttcattagaaaagtctatacagtttgcattgaggcagaatttacatgaaataggtgagcggtgtgttgaagaactcaagcatttcattgcagagtatgatacttccactcaagattttggagagcctttttagatttttctgctcaggctaaaaaaaaaaaaaaacagtttctaaaaattttttttcctggattgtgtaaatccttaatatatggaatttttgtgatgcagagaaatactttatgatagttgacaacatttcagtattaaataaacatctaaaatagtctgtttaaaatgtttgattcaaatttttgtattttttgtagagatggggttcaccatgttggccaggctagtctctaactcctggcctcaagtgatctgcctgcctcagcctctcaaagtgttgagattacaggcgtgagccaccgctccctgcccaacacatataccatctgaaaatgttagaattctgagttgtgattttattgacttgttgcttgctttttcttaggctttgtaacttgtaatatgttaaagtgtactatcctaataaactgaatactttggtatcttagagaataaaaaaaaaaaaaaa

SEQ ID NO: 224705 - DNA, 1000 bp, Homo Sapiens; identical to SEQ ID NO: 119071

SEQ ID NO: 224706 - DNA, 1000 bp, Homo Sapiens
actagctgtgtgaccttggacaagtgacctaatttttctgagcctgtttctcatttgtaaatggtgataatacctacctcatagggttgttgtgaggattaaaatgaggaaatgaatgtaaagcacttagtacagtatatgaaataatgggtattcaataaatgatagtttctacagatccttctccccaccaccctccacagtccttgatccagaacttaccctaatctgatactgcctcacgtcaatggtgagctgatggacacaagatcaaataaggctatgcttattttgtgctgccagaaactgtagcaacctctgtgttcttagaggcacactgtttttgcaggccctcctgcctgggtttcattctggctatccctctaaggcgcaaggtgaagaagcttctgggccaggaaggaaaaaaaaatgcccacctgcagctctggtgaagcttgggcctgctctcctttccatcctctaaggagccaacttggcttttacctgtcaaatagtcataaagtcccctatcctttaccccaccttatacacacgaggctttctcaggaagtggctctgccaggcaggactatgtgggaaagggtttttccttagcacacgaaaaagccccttcccctggattcatgtttcttattttggagggagaagggaattgcacttcacactgccatcagggtttagttgacctcataatggtgcccactttctcgactttggccaggatttccttcaaagaaaacgactttccttcatttccctaagcctgtggcccaaatggtggaccagaatgatggtgggagggggcaacccccagtagctttgcctgcttttataaagttgaacaaattgaatttagacattcaggctaacctgcctttcttagtactcctttgttggcatgggcaggggttgagtcagcagaagtggaccaaaggattcctctgaataaagttatttaaattgaaaaaaaaaaaaaaaa

SEQ ID NO: 224707 - DNA, 1000 bp, Homo Sapiens
gctgctcgcctcttttgctacttccttgacccacctatacctgagtattgggttgctgtcaggttctggctgggctttgaccttcgctccgaccctggcctgcctgtcctgttatttctctcgccgacgatccctggccaccgggctggcactgacaggcgtgggcctctcctccttcacatttgccccctttttccagtggctgctcagccactacgcctggagggggtccctgctgctggtgtctgccctctccctccacctagtggcctgtggtgctctcctccgcccaccctccctggctgaggaccctgctgtgggtggtcccagggcccaactcacctctctcctccatcatggccccttcctccgttacactgttgccctcaccctgatcaacactggctacttcattccctacctccacctggtggcccatctccaggacctggattgggacccactacctgctgccttcctactctcagttgttgctatttctgacctcgtggggcgtgtggtctccggatggctgggagatgcagtcccagggcctgtgacacgactcctgatgctctggaccaccttgactggggtgtcactagccctgttccctgtagctcaggctcccacagccctggtggctctggctgtggcctacggcttcacatcaggggctctggccccactggccttctccgtgctgcctgaactaatagggactagaaggatttactgtggcctgggactgttgcagatgatagagagcatcggggggctgctggggcctcctctctcaggttacctccgggatgtgacaggcaactacacggcttcttttgtggtggctggggccttccttctttcagggagtggcattctcctcaccctgccccacttcttctgcttctcaactactacctccgggccccaggaccttgtaacagaagcactagatactaaagttcccctacccaaggaggggctggaagaggactga

SEQ ID NO: 224708 - DNA, 1000 bp, Homo Sapiens
tctgtaaactattcctaaaatgtgtatgatatatttgaaaaggcttccattaatataatagctttgcttgcagccttccaatctatgttggtttacctgtagtgttttataaagtgtggtcagaggcccctatagaatgtattgtttgaaagtgtagtgatatatttgtgtttttatttcaagtaagtcattttaaccgaatgttcattcatattcatttataaaaagtacctgtatcaaaggaattttaacaaagagcaatcagtattattggaccaaatttggtgtttgttttcaccttgacgctcttcttttcattatttctaatgctacaagaatgctgtaaagtgtcttctaaaatgatgtagcctgacaagacatttttttcagtgtataaaactaggtagtattgtgcactgatttgaccattgtgaaatcctttctcagtgtaactgcatttctaataaaaatttattgagtgaaacaatctttgtacaatgactagtcatgcatcatcagtaattttacaagttcttgtagtaggtagggggtactactagggatatctgtggcatgattatgcattccgtagtattatttaattaatttggggttcattttgcttccttttctttatgcttagattatcttactggttcaacatttttctgatatatgcagtattacagatattcagcaaaagtattaatgggcttctttaaattctatattatagtatttcagttccgtgtcttaacagtttgtgataatttctaaaactgtcttttcaacttatgtaatgatgttgacacttttggcttttatttctggtattagagtttgtattttcacagagtgctttgtagcaggcattacaattaatctgttttgtacataaatgtgccaacagcttgatggtggcgtttttgaaatgtagaacagagtgcttgcaaaatgtaataaatacacttgtgtactttgtgtacttattattaaaaaa

SEQ ID NO: 224709 - DNA, 1000 bp, Homo Sapiens
cccagcaggttcttattcctgcatcacagcaagccacagcaccacaagttattgttccagattctaagttgatacagcatatgaatgcatcaaacatgagtgctgctgctacagctgctaccttagcactccctgcaggtgtgactcctgttcagcagatattaacaaattcaggccagcttcttcaggtggtcagagcagccaatggtgcccaatatatctttcagcctcagcagtcagtggttctacaacaacaggttataccacaaatgcagcctggtggagtacaagctcctgttatacagcaggtgctggctcctcttcctggagggatttcaccacagacaggtgtcatcatccagcctcagcaaatcttatttacaggaaataagactcaagttatacctacgacagtggcagcacctacaccagcccaagcacagataactgcaactggccagcagcaaccgcaggcccagcctgctcaaacacaagctccattggtcttacaagttgatggaactggggatacatcatctgaagaagatgaagatgaagaagaagactatgatgatgatgaggaggaagacaaagagaaagatggagctgaagatgggcaggtggaagaagagcccctcaatagtgaagatgatgtgagtgatgaggaaggacaggaactctttgacacagaaaatgttgttgtatgccaatatgataagatacacagaagtaaaaacaaatggaaatttcatctcaaggatggcattatgaatcttaatggaagagattatatattttccaaagccattggagatgcagaatggtgaagagttgctttttttcttttataaataaaagaaacttaaaaaaaatgtaaagcggacagtttgaaacttggggcatatgccaaccaaaacttcgtttctgcatgtcagaaaagtgcagtagaagcaaagctactggaacaaagatagaccttgacaacatagacactacttac

SEQ ID NO: 224710 - DNA, 1000 bp, Homo Sapiens
attccaacaacttcaaagtaaaatcagtttaatttcagaaaagtggcagaaatctgaagctatcatggaacaattgaagtcttttcaaataattgctcatctaaagcgtctacaggaagaaattaatgaggtaaaaacttggtccaataggataactgaaaaacaggatatactgaacaacagtctgacgacgctttctcaagacattacaaaagtagaccaaagtacaacttccatggcaaaagatgttggtctcaagattacaagtgtaaaaacagatatacgacggatttcaggtttagtaactgatgtaatatcattgacagattctgtgcaagaactagaaaataaaatagagaaagtagaaaaaaatacagtaaaaaatataggtgatcttctttcaagcagtattgatcgaacagcaacgctccgaaagacagcatctgaaaattcacaaagaattaactctgttaagaagacgctaaccgaactaaagagtgacttcgacaaacatacagatagatttctaagcttagaaggtgacagagccaaagttctgaagacagtgacttttgcaaatgatctaaaaccaaaggtgtataatctaaagaaggacttttcccgtttagaaccattagtaaatgatttaacactacgcattgggagattggttaccgacttactacaaagagagaaagaaattgctttcttaagtgaaaaaatatctaatttaacaatagtccaagctgagattaaggatattaaagatgaaatagcacacatttcagatatgaattagtttgacattattgagattagactaaggtaatttttttaatgggacctctcatgagaagactggtaaatcaaaaataatgatattttggagcaaaagtcattttatatttaatcctattttgtacagtaaaaataaaactttaaaacaggttgattttccaaaataaatatgctaaaacctaaaaaaaaaaaaaaaaaaaaa

SEQ ID NO: 224711 - DNA, 1000 bp, Homo Sapiens
tcagagagatgcatgaagcccagctggggcgtgcgggagccgcggctagtcgccttgcagaacaggccgcccagctcagccgcctgctggcagaggcccaggagcggagccagcaggggggtctccggctgctccaggacatcaaggagactttcaataggtgtgaagaggtacagctgcagcccccagaggtctggtcccctgacccgtgccaaccccatagccatgacttcctgacagatgccatcgtgaggaaaatgagccggatgttctgtcaggctgcgagagtggacctgacgctggaccctgacacggctcacccggccctgatgctgtcccctgaccgccggggggtccgcctggcagagcggcggcaggaggttgctgaccatcccaagcgcttctcggccgactgctgcgtactgggggcccagggcttccgctccggccggcactactgggaggagcctaaagaaccctcctggcctccagctcagccttctctcacctactatgtctgtccaacagaccggccagaatttagcttcacttgagagagatctggaatggtcgccatgattgaaaccacgcaccattacatcatcattacattaattacatcaacataaattatttcttcccccttcccttttccagcactcaaccaaggagcaaagctcatcccaccccacacccctcccaggtctgctcactgccaggctcctctcccctttgttcagtggagctggcttttctcccagcccctttccatgcctttcactccatttggcaagctctgagggggagcctggggacgggtttgggtccccaggaggagagccttgggtataatctatttttctaggagcctcttgccttgtcacttgcagctttcgccctctgctttgatggctgaggtgaactcatgttctttgggaaaagggaaggcgtgctgtggaaataaaatgtttatttgcttctctaaaaaaaaaaaaaaaaa

SEQ ID NO: 224712 - DNA, 1000 bp, Homo Sapiens
tatgggccaggaccaaagaggccacttcttgccacagagccttaggggaccgtcctgggctcattgccatcctggctctcgctgtccttctcctggcagctgggctagcggcccaccttggcacaggccaacccaggaagggtgtgggtgggaggcggcctctccctccagcctgggctttctggggctggagtgccccttctgtccgggttgtgtctgctcccctcgtcctgccctggaatccagggaggaagctgcccagatcctcagaaggggagacactgttgccaccattgtctcaaaattcttgaagctcagcctgttctcagcagtagagaaatcactaggactactttttaccaaaagagaagcagtctgggccagatgccctgccaggaaagggacatggacccacgtgcttgaggcctggcagctgggccaagacagatggggctttgtggccctgggggtgcttctgcagcctcgaaaaagttgcccttacctcctagggtcacctctgctgccattctgaggaacatctccaaggaacaggagggactttggctagagcctcctgcctccccatcttctctctgcccagaggctcctgggcctggcttggctgtcccctacctgtgtccccgggctgcaccccttcctcttctctttctctgtacagtctcagttgcttgctcttgtgcctcctgggcaagggctgaaggaggccactccatctcacctcggggggctgccctcaatgtgggagtgaccccagccagatctgaaggacatttgggagagggatgcccaggaacgcctcatctcagcagcctgggctcggcattccgaagctgactttctataggcaattttgtacctttgtggagaaatgtgtcacctcccccaacccgattcactcttttctcctgttttgtaaaaaataaaaataaataataacaataatacgggggaaaggaacgaaaggaaaaaaaaaaaaaaa

SEQ ID NO: 224713 - DNA, 1000 bp, Homo Sapiens
ggcttgcaaatgtggcctgtctgcgaacagggacagttttaattccaggaaccactcagctgacccagaaagacattctctacagactacaatcttcaaaagcaaactgcattatcaccaatgatgttttagccccagcagtagacgctgttgcatccaaatgtgaaaatctgcactccaagctgattgtatcagagaactccagagaggggtgggggaacctcaaggagttgatgaaacatgccagtgacagccacacctgtgtgaagacaaaacacaatgagatcatggccatattctttaccagtggaacaagtggatatccgaaaatgactgcacacacccacagcagttttggtttaggattatctgtaaatggaaggttctggctagatttgacaccctcagatgtgatgtggaatacctcagatacgggctgggcaaagtctgcatggagtagtgttttttctccgtggatccagggagcatgtgtattcacacaccatttaccccgttttgagccgacttctatcttgcaaacactctccaagtaccccatcacagtcttctgttcagcaccaactgtataccgaatgcttgtacagaatgatataaccagctataagtttaaaagcttaaagcactgtgtgagtgctggggaaccaattacccctgacgtgactgaaaaatggagaaacaagacgggcctggatatctacgaaggatatggacagactgaaacggtgctaatctgtggaaattttaagggaatgaaaattaaacctggctcaatgggaaaaccttctcctgctttcgatgttaaggtttgcacatccccttccaggagaatgtttaacaacccaatctgtacactacctacctaccgcttacccccatataaactttctttgttatgatggtgattccattttacttccatgatactttaatttttataaatatgtgaaaatgattagaaatgaaaaaaaaaaaaaaaaaa

SEQ ID NO: 224714 - DNA, 1000 bp, Homo Sapiens
tcagaccatggaggatgtgaacttgcatcagttcttcagttaaatccatgtagaactggtaaaataaagtctctacaaaacaaccaagatgtatcctttgaaaatatccagtggagtatagatccgggagcagacctttctcagtataaaatggatgttactgtaatagatacaaaggatggcagtcagtcaaaattaggaggagagacagtggacatggactgtacattggttagtgaaaccgttctcttaaaaatgaagaagcaagagcagaagggagaaaaaagttcaaatgaagaaagaaaaatgaatgatagcttggaagatatgtttgatcggacaacacatgaagagtatgaatcctgtttggcagacagtttctcccaagcagcagatgaagaggaggaattgtctactgccacaaagaaactacacactcatggtgataaacaagacaaagtcaagcagaaagcgtttgtggagccgtattttaaaggtgatgaaagtattatgcagatatgccagcagaagaaagagaaaagaaattggcttcctgctcaagacaccgattccgctacattccacccaacacaccagagaatttttgggaagttggttttccttccactcagacttgtatggaaagaggttatattaaggaagatcttgatccttgtcctcgtccaaaaagacgtcagccttacaacgcaatattttctccaaaaggcaaggagcagaagacatagacgttgaaacagaaacagaaggatgaaggacagttttttccttcttagttatttatagttaaagttggtactaaacattgatttttttgatcttctgtaaatggatttataaatcagttttctattgaaaatgtttgtgatattttgcttttgcacctttaaaacaataaggcgctttcattttgcactctaacttaagagtttttactttatgtagtgatacctaatacaattttgaaaatacaaaaaaaaaa

SEQ ID NO: 224715 - DNA, 1000 bp, Homo Sapiens; identical to SEQ ID NO: 119083

SEQ ID NO: 224716 - DNA, 1000 bp, Homo Sapiens; identical to SEQ ID NO: 119085

SEQ ID NO: 224717 - DNA, 1000 bp, Homo Sapiens
attttaatttgagaaataaagatttcctccaagccacatgaggactctggcacccacccacaaagcaagacctgtatttataagccgagggctcagggagcctaactgcgggacccgtcagggccccgtgacccatccccgtccccacccccccctccaccgctgggcccatcagtgtgtgttggggggatgcttggcagctgggggtgaggagacaacaaacctcgggaactggagccagagctgcggcctgactgacgccttttgatgctcacgggaaatttctgcccaggatctcagccccaggctggttgtttctacaaatctctctcaaatgtattattttggtgacaaaaatgaaggagctttgtaaattttttttaaaattatgaatcatatcaagtagttgtttacatttcttgaaaaaataggaactcgggcagcagaatcagattggcagaatctttagactacacaggcaataatcaagtctgctgttttggcctttcgtagtagaagtggttgtagtgtttagatatctgtttggtcttgcttcttgtattgcatttttttcaataaacaacaacaaaaagaactctctctgtgaggattgatccacttttaaatttctcttctaccagcaacttgggaaaaattaaatatgggtgggggagacctaaactcaagtcattttctaaagtaagttacccacattgaccaaaatgcagcttcaacgttgagtaaagggatttctgagagctggccaatgccttttgccagctgcagtgagattctgcagcataggccacgataaaggaaggagagaaggggcttctcagacttatttgcagaagggcccagaactcagtatgaaggcattggcagtagtgtagctctagagggatataccccagatggctgagggaagaaagggattgaggtggtaggagttcaaggctcagtccccgtcccagatggcagtggagagtctcatcccgtg

SEQ ID NO: 224718 - DNA, 1000 bp, Homo Sapiens
gagcccctcttcctgggcgaggaggatttctccctgtcagccaccattggctctatcctcagggagctggacacctccatggatgggactgagccccctcagaatccagtgactccccttggcctccagaatgaagtgccaccccagcctgatccagtcttcttagaagctctgagctcccggtacttgggggactctggcctggatgacttctttctggacattgacacatctgcggtagaaaaggagcctgcacgggccccaccagagcctcctcacaacctcttctgtgccccaggttcttgggagtggaatgaactggatcacatcatggaaatcattctggggtcctaaaactgtgatagaggggatcgatccttcctcatgtcatcttcggtggcctggatccctgaatgcaactctgggtgtgtgtttttgtgggggctcgaagcagtgactatggcctcctttgttcccatttcagggttccacaaactgtcttgcatgtgtgtgtgtgtctggttaccccgaccttctgtgaaggtgggtcttcctgaattaatttatctattccaaatgccttaacgagactctgtttctgggagtctgattttccacttacacatttcttccacctttcctgctagttcccactcccctgtgaccactggggcctcagggaagataaagaaagctgggcctgtcgaaggatgacagggatgtgctgccaggttgctatagaaacccaggctctgcctcttgcaccttgagggggtgggaggggctggtgtcctccctccaggctgaaccccacttcctcggcaggaccccagtctcagcagcctcctgatttcataaccaggccggaccacgtgcaatagggtggaaaccaaactgctccatgccgggttatttaaaagaaaggcagagtttgtggtggcttttttttttttttttggattgtttgtaatttttttaaataaaagtattttggaaggag

SEQ ID NO: 224719 - DNA, 1000 bp, Homo Sapiens; identical to SEQ ID NO: 119087

SEQ ID NO: 224720 - DNA, 1000 bp, Homo Sapiens; identical to SEQ ID NO: 119089

SEQ ID NO: 224721 - DNA, 1000 bp, Homo Sapiens
gttagttaaggcggaggtacgaggccgacccggggagggggacggggtggggaaacggaggcaggggacagaagaggggagattgggggagagatgacagctgcagggatggttgtgagccgctagtgatggagagcagagggagagggccaggctccagactcccacacgcccacacagcacctctgccaggcctaggagaggacaggtgcagctcttgcagctctgcgggtgtgcggccaaaggcaaggcccacgggctggatgtcacttccccgactgtctcttggttggcttgtccttgtgcaagacccagcctgtcacgacagagcctgggcacttcagaggaggagccaggatcgaatggaaggggggaattggggtccaccatagtcttctgctctggtcctccacgggtggaccaggatggagtctcctgcctacctcactgcattgcactggacctgggatgcctatccaccctctggcagaagacactcaccaggttatctgtgaagagactctgggatcccatcacctcaaagccagagggtccccaagtcaccgctgagagcacttgagcctcaaggatgtaagcctgaccataggatcttgactccaacagcggcaacccccacccccattgtggtccgtccttaacccatccactcttcttcggaggcaactgagaacacataaagcaagcagctacctagcatccccctcctaaagctttagactcagagcccagggtcccccacaagcctcaaggtagcctcaggtttctctaatttcctccactcccagttcgaagcaaacagcttactgcctagtccccgccaatcccaagggcgggctggctgatggcagcatggtgggctggcctgggtgtggagtgaaagagtcactgtggtgggggcgagaggaggacttgggagctggaggtgtgacaccttcagttctgttcctattaaaggaccttctgaagggcaaaaaaaaaa

SEQ ID NO: 224722 - DNA, 1000 bp, Homo Sapiens
gtgaaaaaggaatgatatattcttgaagacatcgatatacatttatttacactcttgattctacaatgtagaaaatgaggaaatgccacaaattgtatggtgataaaagtcacgtgaaacagagtgattggttgcatccaggccttttgtcttggtgttcatgatctccctctaagcacattccaaactttagcaacagttatcacactttgtaatttgcaaagaaaagtttcacctgtattgaatcagaatgccttcaactgaaaaaaacatatccaaaataatgaggaaatgtgttggctcactacgtagagtccagagggacagtcagttttagggttgcctgtatccagtaactcggggcctgtttccccgtgggtctctgggctgtcagctttcctttctccatgtgtttgatttctcctcaggctggtagcaagttctggatcttatacccaacacacagcaacatccagaaataaagatctcaggaccccccagcaagtcgttttgtgtctccttggactgagttaagttacaagcctttcttatacctgtctttgacaaagaagacgggattgtctttacataaaaccagcctgctcctggagcttccctggactcaacttcctaaaggcatgtgaggaaggggtagattccacaatctaatccgggtgccatcagagtagagggagtagagaatggatgttgggtaggccatcaataaggtccattctgcgcagtatctcaactgccgttcaacaatcgcaagaggaaggtggagcaggtttcttcatcttacagttgagaaaacagagactcagaagggcttcttagttcatgtttcccttagcgcctcagtgattttttcatggtggcttaggccaaaagaaatatctaaccattcaatttataaataattaggtccccaacgaattaaatattatgtcctaccaacttattagctgcttgaaaaatataatacacataaataaaaaaa

SEQ ID NO: 224723 - DNA, 1000 bp, Homo Sapiens
ggaagaatttactgatgagtcacataacttgcatgtaatattaggttctcattttttagcttcgaaactgtgtccatgcaaagactctataactgttaagacttgtgtggttgaattttgacttctttgatattcagcatttagtgcatacattttgcaactagggaatttgattttctatacccacaataatatttatggctaacatttattaggcacttactatgtgctaggcactgtaagcactttacatgcataatctcggtattccctgtgagtacagggttaattatttacctctatttcacaaatgagataatgaagtgggatgaagtgcgaggttaagcaacttgcttgaagtcataggtagtaaatcgtggggccaattttaacccagacagaccactgactccagttcatgcttttgctgcctcacttttttaagtggtatttttaattaggaagaccatgctaaagatactttcaaggataaatattttctcacttcaattgttggtttaaaattagcataaataggtaaaaccagcatgctcaaacactgagctcaaacattaacattactaataaaaaaaaaaaagagtgactttaaaagtttctttctatccagggtttctcttgggatactcatatggtatattactggcttatatttcaaaattattttattcaacatgattgactttggccttttataatttacataaaacataattttcctcagttctgtaatccagattttccccattgagtaaataatacaattaaatttacatatggtaatttagacatttaataggatattgcataggtagaatactttgtcagtacttagttactacctatatgtatttttgtgttacttttcagtgatttaaagaaatctaacagaaatctgcttaaatttgttttaaatagtgaatatcctgcttgctatggaatgaataaacaggtaaatttgatatgaaaaaaaaaaaaaaaa

SEQ ID NO: 224724 - DNA, 1000 bp, Homo Sapiens
tgggttccctatcaaaacaaataaaaatatacctttttcaggtttcaatctgtgcagggtatatgcatgttaattctaccatgcttaagaacttccacaaaatatttcatggagaggtctgcatttagacggaaacagaaattgcttttcccctcactgttcctgaatgctctatacttgttttaacatttttgctatctttttttattattctgatcatgatatgaccatttaacctcagaattcataattcctgaggggtgttaagaagcagtcccattggtgaggatattatgacttggtgaccattcttaggagtagaaaaccaaggacaattgcttctgtattcagtatccacttcttaatgtggctttatatgtaaaaataataatgcagtggttgtttctgtcaggaaaataaatcttacagaacaactggtggaattgaagctgctgcgctagacttggatattttgggtagtgaagaagcaatggcaatcttgagtctattattgtataatttagtaaaagaaaaaaataatcgttggtggtcctactaagagaatgcagcttttttgagttgtcacagaggctgtgtgtgccctacactgaccagggtttgtaaaaccctttcattctggtacaagagtcgggggtataacttttatacttgaatctacctaccaagtttacatttctcaattcctttttgtaaggtgctatttctgtatttaaataactttcttttaacgtaaagctgctttctgcttatcttattgcactgctagttgtatgtaggtattaattttattgctgcttactgcttttgttttcttattatttagctctgctctttttcctaatggctatattatctatagctatttacttgtaactgtactacatgtaaactgattttttgttctgattttttttctaatatttttaggaaaatattaagctttataaaatagcaataaaaaataattcatttaagaaaa

SEQ ID NO: 224725 - DNA, 1000 bp, Homo Sapiens; identical to SEQ ID NO: 119091

SEQ ID NO: 224726 - DNA, 1000 bp, Homo Sapiens
ctttgctaaattttacaataaaccaaagtctgataacagttaatgttgctgcttgcgtccttaaatgacttaaggtttcatcttccagaagatattgagatatattactgtttgcatatcaggttgaacaaaatgcttggaacaaaattaagcattatttctagaccacaacattctagtgtataatcaaccatactgttagtcacacacgcccacatgacaatcatctgaaagtccccaactatacacattctgttcaaccaactcacccttgtgttggtactttagattaacattttgtcatcagtgattctaactcaaatcatatgtttatttgtgtaataaaatgtattattctcccaaatttcaaggaataattgagattaagtatggaggccattcaaggcaaaaatgtcctaaatttaattgcattttgagattttgttggcatttacttgtatgtattttgtgattctgataggatgtataaatacttagatgcatacaagccgatggatagaaagacagataaatatcccgatagcctactatcagcatcctactactgcttccctaaagcagaattgttattcatttaagaagtctaatatgatatacattcatcctagtataaataaataatctctaagttttctgaaatggaatatttaacgcacatagacagtggatatttactttaaatataatgttattaatcctctgcatttcttttatcttgataactcctagtgagggaatctaattaagatttcatgctgttctttgtaatgataaatgtttccggactaaacactctataatacaaatcaaaaaatcttccttcttataactgagaaatgtttcacccaaatttcctttgttattatatatttactacacatgttgaatttattattgtttatttccaaggcatgtattattcaatttctaattaaaatatatcagggcttaaaaaaaaaaaaaaaaaaaaaaaaaaaaa

SEQ ID NO: 224727 - DNA, 1000 bp, Homo Sapiens
attgagaataatgatttggttcagggcaactacaaataatcacttactaagccttaaataaagccattatttttatatcaatagcacaaaggaaaaccaaaagtccttaaccactgaccatttttatcatattttaggcctttttttaaaaaatcagggtatagtaggcactaagttttattaggaaatatttaaacctgctgaaggatttatttataaaaagtgcaatttttcaaaacacattattattttttaatttcccaattttttcagtttttcaaattgtaccacaacatagaactgtgatattttgctattacttcaatgtgaataaataaggtaaagtatatcatttattgagtgcccatgctgtacatttaaaatatgcattatttaatttaatcttactcccagcaccaaaaggtaattgaccagcctcaacacaattttggacaaagctagtaactgaacacaggtctgtctgccccacacttctctttctcttgtaactgcacaatagcagaaaattggcaagatgtatttttactttccaagatgccgtgtgtgccaagaataaatgaaatgatgttaaagcataataataacatatctttaaaaagcttttcaaaatatattttcaccctgacagtgacccttgtaacttaaatgatttttggaaatattagtatgtaagtataattcaaagttgtcaaaatgtaagacatttagaagtaatttttattatttatattgttaatacttaatcactggaaattcattttccttactcgatgttttctttcaactgagaagcctaaaacaaacaaaaaccttgtgtgttatcctgatatagttgactaaatgtatttgttcttatatggatagtaatatgaatgtgacatgcaccaattgtcctattataattttcagataagtgtaactaagcacttgtgtaataaatattagtcattttatttcaaaaaaaaaaaaaaaaaaaaaa

SEQ ID NO: 224728 - DNA, 1000 bp, Homo Sapiens; identical to SEQ ID NO: 119093

SEQ ID NO: 224729 - DNA, 1000 bp, Homo Sapiens
gccgtcccccagcgcagggcggaatgcaacagcgacggggagtccaaggcctcttcggcgccttcgcccagcagcgagcccgaggaggggggcagctagcgagcgcccgaactggccaggacccccgcgcccgccgcacagcgcgcagccgggcgctcaacctaaggtcctcttcgaaggtggtttgcattcttaatctggcatcttctccaggcctaaatcttaagaaaaagaaatgggtgctggggtttgggggatgggggagttgttttgacatttgggaatttctcccctgcccttattggttacgtgcctgcaacttataggtgcttattaaggagactcttttcctatacttctaaaatgcaaactgtttcagattctgagcacctcattgtaaatacgattattctaaaaactcaaagggcgagaacaactggaatttcccaccttccgtggtgtgggtaaatggtatacataaacattaaaccttaaccaaagaagaactttaccgccaccaaaacagaaacaaccccaaacagccaaaaacagtccttaaaaatgagaggaacattttcttgcattccttccttcgggaattgtattcaaaatgtaatggaaagtaattgttgacctcctgctttgggtgaaggagactgtaagctggtacttgagaacgaatttgccagcatgtgctgttgttgactgtgtgaatgatggtgccagggaatccgtggcttggtacacactgtttcatccagtggccacgtggaagctttgtagcattgagcagatagtaaaatatcttagaattaatgatctctttggaagagagcccagatttgtatgaaaacttgtttttcctctcaattgttttgtccactgttttcttcattttccttttctctgcataccccccgccccccaacgtgtagctctccatctaagttttggataaactgaagtggcactgtgactttaaaaataaaaaagaaatcta

SEQ ID NO: 224730 - DNA, 1000 bp, Homo Sapiens
atagagctggacagattccattgttcctacattttgtaggttttttttcactgccttcattatgtatcttctcttgccttcattattttattttattatttcttctttttctcttttttagagccaccaatactggatttgtttgtttttcatttttttcttttgtagaaacggagtcctcctgtgttgcccaggctggtattcaaactcctggccttatgcattcctcccaccctggcctcccagagtgctgggattacaggtgtgagccaccatgctctgccaattattttaaattactaggattaaagtatattatgtatgtctttaacttctttctttcccattgataaactggcacccttcttttaagtacctgctctcccattaccacctatttccagctgctttttgaggttttttgcttgcctgtctcttgcttccttcttaacctctaccacttaagagagtttgttataatcaaatttgacttcctagcctgtggataatttactattaagtaaattattaccacagggagccagtgaggtcccagtagtctaaaacagttcatgtgttcacaaaaattgcctccccggcagagattatgcagtaagataatttaactgaataatactatgtgcatgtatcttgcctcagatatactcatgcaaatatgaatatacctctgatatggtttggctctgtgtccccacccaaatctcatcttgaatgtgtactcccataattcccacattttataggagggatccagtgagagataatttgaatcaagggggcggtttcccccatattgttcttgtggtagtgaataagtctcacaagatctgatggttttatcaggggcttctgcttttgcatccttctcattttcttttgctgctgccatgtaagaagtgccttttgcctcccaccatgattctgaggctttcccagccatgtggaactgtaagtccaattaaacctctttttcttcccc

SEQ ID NO: 224731 - DNA, 1000 bp, Homo Sapiens
gaggcacctgtcggcagactggtgacttcacttttgagtgcaactgccttccagaaacagtgagaagaggaacagagctctgggaaagagacagggaagtctggaatggaaaagaacacgatgagaattagacactggaaaatatgtatgtgtggttaataaagtgctttaaactgaattgacattaacagtgggtgatcaactttactatgtgcttgtgcttttgcttttgatggagtaattcattgttttcttatccacctaaatgcacccagctgcccttgattttctctgggctactggccttcacaaccctctcccatgtaccctctctgactttggggtaaccctcccctaacttaaagctagagaattctgaaactgaggaggggatcctctgttaatcagtgagcactttttgatgagctgatagatgatatatgagagactatgcgtggcacaatactttgttacactcttcactgatacaagtgttctagagtgtacacacaacccaaagatagaaataaaaagaggagcagtgtcggggagcttggggcctggtgttccatggagagggagaaaggaacaagcttgaccaattcattcaactccttataaaaatgatgaggaggctgaaaaccaagaattttgattgggaacagaatacaagcagctgaatcagatgaattactaagccacaaagatcctgtttttatacaaatatccttagtacaaaaacaaaagaaggaaaactgtaggggggagtaatgtgctaagtaagcagaattgcctcaaaaagaagttgttctagttactctttcagagtgggaatcttagattctggtattgtggatatggttcacatataatgggattgtgtgttttattttggagggattaaaggtcatagtttggtcctcagtaaaaaaaaaaaaaaaaaaaaaaaaaaaaaaaaaaaaaaaaaaaaaaaaaaaaaaaaaaaaaaaaaaaaaaaaaa

SEQ ID NO: 224732 - DNA, 1000 bp, Homo Sapiens; identical to SEQ ID NO: 222145

SEQ ID NO: 224733 - DNA, 1000 bp, Homo Sapiens
tttatacaaaaaaggacttctgcaaaagcttggaaattcagaacctattttttatcatcttattttcaaagtaggcaaaagcaaaatcacttaattagtaccattaagtgagagagtaatggaaaactgttatccatcaaaagtgatataatatcctgtacttgtcactcatgtaaaactaatgtatcaaaattagcatatatggaagaaaaatcactattcaaaaatagtttcaattgggcaaatgtgtgtctacaactttgttgaaatggcagagtctgtgttgatcctcatatacaataatgttgttgtaacacaagtgttattagaccatagccacaaaatatttaatgtgttgtgccttcatgatgtaacagaacattctccaggtagggtagttgggggaaataaagggataaatctctaattattgctgtttaactgtttgttatcatagttggtcaatgcctggcaggtaccagcatattgtcacttaggtcaaaccaataaagtgacaactaatgttaataagatctcagttgcacgtgcaaacaaatccaaattcgaacattcttaggaggtttttgttaaggcatgacagatgatttaaacaaataaatagcatgcaacaaaatgtctttattgaaagaagtggaagttatcttaatgccacggttcaccatcaatttaaaagtaaaaaaaacaaaaaaaaaacaaaaaatttaaaaaaaaggtttgctaatctgatagttaatttgttcttaccaaaaaataaaattactttgtaaatagcagttcacatttttccacagtataatggaaaataatgggtaggggtgcattgcttattgaagtacatttttgtcggtttgtgaggggtgtttgatgactttgacagaataaatatctaaacaattatccttgttactgctttgccagttctacgttatttacaattattcagctcttgcaataaatgttctgaattcctgaaaaaaaa

SEQ ID NO: 224734 - DNA, 461 bp, Homo Sapiens
ctcgagtccgggccgcaagtcccagacgctgcccatggaggcgtccagcgagccgccgctggatgctaagtccgatgtcaccaaccagcttgtagattttcagtggaaactgggtatggctgtgagctcagacacttgcagatctcttaagtatccttacgttgcagtgatgctaaaagtggcagatcattcaggccaagtaaagaccaagtgctttgaaatgacgattccacagtttcagaatttctacagacagttcaaggaaattgctgcagttattgaaacggtgtgaagacggattctttggttgataaattgctatcattctaaagtcatggacttcactttcggcaacaaaactaaataaggatggaacatttattgaatgaaaaatgcacttttgtttttccatttttttaaataataaaaatcagacaaacaggaaaaaaaaaaaaaaaaaa

SEQ ID NO: 224735 - DNA, 1000 bp, Homo Sapiens
aaaaaaagagaaggaaatggcagatcagacatgtattgaagaatttgtgatccacgcattggcattttgtgaaagcttatatgatccatatcggaattggagacatagaatttcagggtagaaactggagctatcaatattttcatgaccttgaaaatcttaatctctccagaagggatactgcattggttcttctccatcagctggcttagacatcaaacatcttaaatgatacactgttttaatatctaaaaatctgtcattctacttaattaacttagtcataaggacaaagccttagtatatttttgccacatacatgttatgtataaattttactgttgaataatacaagtattcattgctgactgaattcttaaaactttgggaatagaaaaaacacatttattaatggatgctaaagtgattcctgagaaaaataatgtgtatggttaatatggaaaacctttggtaatgtgatttgggtataagaatactaaaaccagagtacagggtgtgaatcgtgtaccaggagggattttatttttaaatatctttattgaggtataattgaaatacaataaactgtacatatttaaagtacccaatctgataagttttgtcatatgcatacagccatgaaatcatcaccataagcaaggtaatgaacatattcatcactctcaaagtttcatagtacctctttgtgatcccttcttacttaatcctccttgccaccccaccatcaccagaccactgatctgctttctttatgatcagtttgctacaaatgaaatcacataatatgaaccttttttggtctagcttttgtcacttagcatagtaattttgtgatttgtctatattgttgcatttatgaataaatcatttatctgctgctgggtagaactgcattttatgaatatatcaatttgtttattcttttgatgatggacattaatagttctaggctattatgaataaagtttccatgaacatc

SEQ ID NO: 224736 - DNA, 1000 bp, Homo Sapiens
atattccatgatttctgacttcccttggctgaggtcattacgagctgcagagcccaacagcttcgctcgatacgactttgaagacgatgaagaaagcactatctatgctcctagaaggaaaggacagctgtctgcagacatctgtatggaaacaataggagaggaaatttcagagatgcgtcagatgaagaagggtgtatttcagcgagtagtggcaatttttatccactattgtgatgtcaatggagagccagttgaagatgactacatttaattggtccctcctcctttccagctattttgtcagaaagcaagtagggccatccagctgccagagtgctccacagggacttgaggcatgcagttgggaggtcctggctcggtttgctatatagggaatatataaggaacatcgaaattgtatacaaagatttgtacataaaaaatatacaaagacgcttcctaaagtaccaactttatatcatatgtttatacaatttaatttaaaaattcattttaaggaagacagataatttgaaagacttttgtttttcttgacttaattcatgaagtatcattttttgactgagtctccatttacttcattcttaatgattattgtcatccctttaaatctgtgcctttttcttcttgagcgaagctgtttgagtaaacctgttgaagagtgtttgtgtcttttgtgcttttttgttgttattaaaacaccaactaaaccttatagtcaagacaaggctctatgtttctgtacaaagctgtagttctttcttagtattatagttgccatgtttcttaaaatcaagtaaaaagacttatgagcttaaaaaaaagtgagtttgagagggaaatggaaaagtttccagagtatttctagtaatttatttccacattgaattgtgtatatgctttatcttgaatataaaataaaagtttattaaaaactttaaaaaaaaaaaaaaaaaaaaaaaaaaaaaaaaaaaaa

SEQ ID NO: 224737 - DNA, 690 bp, Homo Sapiens
ggaaaatgtaggctaccagtagaaaatgacattctctattaataagatctgaggtgcgacacacataattgtcccaatttttaagattgatggggagcatgaagcatttttttaatgtgttggcaggccccattaaatgcataaactgcataggactcatgtggtctgaatgtattttagggctttctgggaattgtcttgacagagaacctcagctggacaaagcagccttgatctgagtgagctaactgacacaatgaaactgtcaggcatgtttctgctcctctctctggctcttttctgctttttaacaggtgtcttcagtcagggaggacaggttgactgtggtgagttccaggaccccaaggtctactgcactcgggaatctaacccacactgtggctctgatggccagacatatggcaataaatgtgccttctgtaaggccatagtgaaaagtggtggaaagattagcctaaagcatcctggaaaatgctgagttaaagccaatgtttcttggtgacttgccagcttttgcagccttcttttctcacttctgcttatacttttgctggtggattcctttaattcataaagacatacctactctgcctgggtcttgaggagttcaatgtatgtctatttctcttgattcacttgtcaataaagtacattctgcaaaagcaaaaa

SEQ ID NO: 224738 - DNA, 1000 bp, Homo Sapiens
taagccgtatttataacaatgtttaagattctcagaaatcaggagatttttatcctatccataagtaatatgtaactgccataagtatagcttttagaatgtaatatgtaaactgcgatttggtcctctggaaaaaaaaaaatgaaatgaagagtgggaaggcagtttcttttctgctaattcgttctgtgatggtgagcaagcaaatcattaacctctctgttttttattgggcaaatggggataatcaggcacaggtctttccgccaatgcgttatgatgattaaagaaggtaattttgtgcagggttttaagtcaacagacagacctgggtttgaatccaagtgctggcacctacttgctcagtgatcatgaacacaattttaaatctttctgaatctcatttaaaaaaatttgtgaaacaagatgatagaattaattttgtgagattgttggactgatttgagatcatgcctatgaagtacctagcacactgcctagtacatagtagaagtccaggaaatggaagccattattatgtaaaacgttttgcaaaggtactttttaactgtaacgtaaagtggtactactgtttgaaacttagatggcagtagtttgcatttctcgtgatcagaagccaaaatataaatacatactacctaaaaaatcttgaagagaggtaataatttgaaattcatcttcttaagataaaaatcagggcagggtgtggtggcttatgcctgtaatcccagtactttgggaggccgaggcgggtggatcacaaggtcaggagttcgagaccagcctggccaatatggtgaaaccccgtctctactaaaaatacaaaaaaattagctgggcgtggtggcgcatgcctgtaatcctagctacttgggagtctgaggcaggagaattgcttgaactcaggaggtgaaggttgcagtaagctgagattgtgccactgcaccccagcctgggtgacagagcaagactccatcac

SEQ ID NO: 224739 - DNA, 1000 bp, Homo Sapiens; identical to SEQ ID NO: 119101

SEQ ID NO: 224740 - DNA, 1000 bp, Homo Sapiens; identical to SEQ ID NO: 119102

SEQ ID NO: 224741 - DNA, 1000 bp, Homo Sapiens
ttcttctatgattttggagcagcaatttttattttaaataaaattccacttttaagaaattcagggaagatttggtcacattgaagatacagtatttttgtagtatttataaactgttctaaatgatagactatagaaaacatttttgtcatatgaaggtaaatcagtccattattttggatcatttaaactgaacattacaccttctgggctttgatttatgaagtggcacagaatctaactttgcactgaatatcttttcattcacatctcctctgccttagtcacaatggcaacagtacagaaaattctatcaaacctcagaatatagtagaaataattaagctgttgaatgagtcttaaaaattatactactgttaagtggaccaagtttggtgaagcagaatgtgacaaaggttgattaaggaaggaacaactcaaggacattgggaatgataacttttccacttgagaactactttatgttttactgtaatttttaaagtttttttgtcctttttgttattttgcaaaagaaaatagtatttacaggtggcttcttttaaaatataaaaatataaagcaggaatgtatatgaaatgtcagattttattgtatttgcagagtattagctttgaaattgaataaagaaagctgtttgtagttttaaaatgccttattggtatcaattagaaatttcttctattttttgatgtacttagagctttttgagtgtagaattttaaatggcaggattttacagtgtttacatgcaagtgcattttataagtgttctatatgtgtaaaatagtattttcaactggaaagtgttggctagtgcaaaaggcctggccattttctggttcccatgatgttgcctacactgctagactacagtttagtatcgctttgtatcatgaggccaagaaattccatgttgtttgtaaatagaataattgaaaaagcaataaacatttattgaacaaaagaaaaaaaaaaa

SEQ ID NO: 224742 - DNA, 1000 bp, Homo Sapiens
taattaaattagaaggtactctggagaaatcagaattggaacttaaagaatgtaacaaacagatagaaagtctgaatgacaaattacaaaatgctaaagaacagcttcgagaaaaagagtttataatgctacaaaatgaacaggagataagtcaactgaaaaaagaaattgaaagaacacaacaaaggatgaaagaaatggagagtgttatgaaagagcaagaacagtacattgccactcagtacaaggaggccatagatttggggcaagaattgaggctgacccgggagcaggtgcagaactctcatacagaattggcagaggctcgtcatcagcaagtccaagcacagagagaaatagaaaggctctctagtgaactggaggatatgaagcaactctctaaagagaaagatgctcatggaaaccatttagctgaagaactgggggcttctaaagtacgtgaagctcatttagaagcaagaatgcaagcagaaatcaagaaattgtcagcagaagtagaatctctcaaagaagcttatcatatggagatgatttcacatcaagagaaccatgcaaagtggaagatttctgctgactctcaaaagtcttctgttcagcaactaaacgaacagttagagaaggcaaaattggaattagaagaagctcaggatactgtaagcaatttgcatcaacaagtccaagataggaatgaagtaattgaagctgcaaatgaagcattacttactaaaggagaaaatgtgtaattcaaagaagatactgatgtgttgaaaaaatggaatttttggtactgtgctgtttacttattatatgtagctcatacttcatagaagctgttattttgcttttgaataaattttatatttcaatattttaaaagaaagcccttctaaaacttaattatatttttaaagaaaatttattattttatttattgttttttggcttaaacttgctgctttcttttgctttttatataaaa

SEQ ID NO: 224743 - DNA, 1000 bp, Homo Sapiens; identical to SEQ ID NO: 119105

SEQ ID NO: 224744 - DNA, 1000 bp, Homo Sapiens; identical to SEQ ID NO: 119107

SEQ ID NO: 224745 - DNA, 1000 bp, Homo Sapiens; identical to SEQ ID NO: 117184

SEQ ID NO: 224746 - DNA, 1000 bp, Homo Sapiens; identical to SEQ ID NO: 119111

SEQ ID NO: 224747 - DNA, 1000 bp, Homo Sapiens
gttgcgggacaaacaagaaaagaaaaagtgaagttgcctcattatttgctgagttccaagcctaagtctcaacctcttgcaaaggtgcaagattctgttggaggaaaagtgaacacatcctctgttgcatctgctgccattaataatgcaaagtcatccctttttgggttccatcttctcccatcatcagtcaagtttggagtgcttaaggaaggacatacctatgccacagttgtaaagctcaagaatgttggagtggacttctgcaggtttaaagtaaagcagcccccacccagcacaggactgaaagtgacttacaaacctggacctgtggcagctggtatgcagacagaactgaatatagagttatttgccacagctgttggagaggatggggccaagggatcagcacacatctctcacaatatcgagattatgacagagcatgaggttctgttcctacctgtggaagcaactgttttaacaagcagcaattatgataaacgaccaaaagactttccccagggaaaagaaaatccaatggtccagagaacttctacaatttattcctccacacttggagtcttcatgtctcgtaaagtttctccacattagtttcttctcggtacaactcaatagcctccataatcctctcagcctacagaggatgagaaaggaaagaagtcatcacaacatactccatcatcccaggacactgaaactggaagaactgaccagaaatttgccaaatgaaatagcttcaatctgtttaataaagacgtgcgaatagagtgccaaaaagcatttaaagacatttttggttttcttattttttaatgtacagggaagagactgagtgtcatggactcaggtgggatgatatctagacactctgaatagggcaggtcccaggaacacctgaaaggagcacatattgatcaaagagattcaggactactcccatctttggttacaagagaaggaaacaggttataatccc

SEQ ID NO: 224748 - DNA, 1000 bp, Homo Sapiens
cagtctgtgtatgtttaaattttcactttttatggatgagcataaacctagtcttagtttaaaggcaaactaaagttgaggggaaataattaatcaatactgattaattgatttataaggttcaacactgtctaccctaaataatttttatatgctcaaggcaaagcagggaatagaggcaattagctagataattcaagcagaaatccattttcatcgaaattgcctgtgtgcacatatttttagatgaaaaatgaaactaccttacaatattatttttttaatcaatgtatttgtttgcaaacatttgccatgttgaagagtgtgtataggaaaggtctagaaataaataggcttgtgcatacctaggcattcatgctctttcttcctcttcagagatcatcagaaaagaggtgggaatacacaagcaggtgcatgtaagcccaaaagctagaaagccttatatttaaccaaaggttgatgtgttcattccagttattcacttacagatgaaactaaaacaaataaaggcaagctattatcagtttggtagttcgttattttagaacaaatttctaaatgaatttattcccataacctacaatagcactgagaacagaaaacatgtttcttcttcattttgtttaaagattgcgtacctaggtaagtcacactgtatagataaaaaccttcttctgtattcctcacctctaaattatatgttatttgctatttgaaaactgtagttaactatggttttttattagtctattaaaagatacgtggagatattaaattatacctaaagcagacgtccaacaaattctgtacatgctgctttacatctttgcaacaaacctcttaactagcagcattatttctatagtgtgattacctgagggtgcctccaaatgtatatcatttcactcccctcccctccccacccccaatagattcaaataaataaaatcctgagcaaattaaaaaaaaaaaaaaaaaa

SEQ ID NO: 224749 - DNA, 1000 bp, Homo Sapiens; identical to SEQ ID NO: 119118

SEQ ID NO: 224750 - DNA, 1000 bp, Homo Sapiens; identical to SEQ ID NO: 119121

SEQ ID NO: 224751 - DNA, 1000 bp, Homo Sapiens
gtgttgtgcgcaggcctcagagatgctcttccggtcagagttcccttggcagggccttggaggcctctggttggctctctcaggaagagggcaggtcagggattgggcggtgtaaattgactcagaaacctgcggtttcagcttttctgtggcaaacagggccgagggctggtgaagctgttaaggctaaatgtcgcatgcatgaggcgggctgcaggcctccttaggccttttttggggtaattacaccagtatttaaaaacatttttttttgtttgttttgagatggagtcttgccctgtcacccaggctggagtgcaatggtgcgatctcggctcactgcaacctccgtctcccaggttcaagcgattcttctgcctcagccttctgagtagctgggattacacgcgtgtgccaccacgctcggctaatttttgtatttttagtagagatgggatttcaccatgttggccaggctggtctcgaactactgacctcgtgatccacctgccacggcctcccaaagtgctgggattacaggcgtgagccaccatgctcggcctaaaaaacaattttcttgaagaatccgattttgtgcatagtaatgacacagcaccattcctgagaaataggaaatatatgtgtgtggtatgaaaagcccatattctgttcttgtcacctgaatctaggcttcctctttggatgtgaacgcgggaatgaacagtggctgttttccacccaaaggggcgtggagaccttttggaaacgggctttctcctttccattttgcagccgggggcgggtggaaaccttccttcgaagggtagtgccttggggagcagcagacctgctctgagtccagcttagctttccaaaattctgtgtggaacttactggagatgtttttatatatttgaaaataatggcctgtatttctcacgctatacttaaaaaaaataactaaccttttaaacaaagatattcaaactcaaaaaaaaaa

SEQ ID NO: 224752 - DNA, 1000 bp, Homo Sapiens
aagactttcgggagaaaaactcatcaaccaaccagcacattatccggctggagagccttcaggccgagatcaagatgctgtcagatcggaaacgggagctggagcatcgtctcagcgctactttagaggaaaatgacctgctccaagggaccgtggaggagctacaggaccgggtgctaatcctggagaggcagggccatgacaaggacctacagctgcaccaaagccagctggagcttcaggaggtgcgtctctcctgccgacagctgcaggtgaaggtggaagaactcactgaggagaggagtctgcagagctctgccgccaccagcacatccctcctgtcagagatcgagcagagcatggaggctgaggagctggagcaggagcgagagcagctgagactgcagctctgggaagcctactgccaggttcgctatctgtgctcacaccttcgaggcaatgacagtgctgactcagccgtctccacggactcctccatggacgagtcttcagaaacctcgtccgccaaggatgtgccagccggcagcttgcgcactgccctcaatgagctcaagagactgatacagagcattgtggatggcatggagcccacgggctcccggagacttgatgatgactccttagaagaacagataaggcagaccagtgaggactcgagagccctaagggagctcatggagggagagagggggaggctgccggaagcctccagatgctgcctgcctgcctgctcacaaccgattcagtctccctccctccctcacgtggggaaagcacagcagggatgcgcggcaagaatgtacctgtagatgtgtacataccacagtgctgtaattttgtatgtagcaatcatgtaaatacatgtatggattttataatatacatatataaaaatctataaaggcatatttttagaaaaacagcacaccactgcttcttttgaaaatagtctgaataagaataaaatgaatttctacag

SEQ ID NO: 224753 - DNA, 1000 bp, Homo Sapiens
atgcctggccttgtttctggaccactgggagcagcactgcagcccaggggagctggagtccagcttggagcagccacaggcccagggagctgtagcaagagggtagtccaaaggcagatgccagacaagacacagccaggaacccggccaggtccccccacatgcccctcagggcccaggcctgagtgagtgctgctcagatgtgactgagagggatgacctccttcagcagggcagctcctaagaggctgcgtgcaggtgcgtgtggggggagatgccacactgtgtcggggccatggtgcactgtaggtggctgcaatggtctctctgtaaggaaaatcactgacagcagctccttctggacccagtctggaaggtctagagggggatagaatttttatttcatatccttatgtggtgcttggaaaatgtttttaaccttgaccatgtattatgtttataattaaaaacccaaagaaccagctcatgtttggaaaaggaatcttccactgaaacatttggatacccgacgttctccctggacacttggcccggcaatagttggggtctcctgggaagctgagtgctggcttctagcctctccagttccctcagactctgtcttcagctcgggcccctccgttctgtctccctcgactccaagtcaggaataccgtgggcttcctgccctcaccccacacctcaagaccatcccactgcttgcctgcttgccccctgccatctcgcactcagccctgggtgcctgtgaagcctggccccactgcctgccgggggttcctgcagcacccccctactccaggctccccatctccctgaagcttccagggtagcagctggtgggacactgatctgtgagctctggaatgtctgcttagaattctgagaggcaggaactgctctgtctttgtaactactcaaggccaactgtcacatgaaggaatgaataaagagtttttactgacttgtgcaaaaaaaaaaa

SEQ ID NO: 224754 - DNA, 1000 bp, Homo Sapiens
gtgccgccccaggggccctgggagctgcagggcatattgctgctgagccagaatgagctgtaccgccagatcctgctgctgatgcacctgctgccgcaagacctgctgctgctaaagccctgccagtcttcctactgctactgtcaggaggtgctggaccggctcatccaatgcgggctcctggttgctgaggagaccccaggctcccggccagcctgtgacacagggcgacagcgattgagcagaaagctgctgtggaaaccgagtggggactttactgatagtgacagtgatgacttcggagaggctgacggccggtacttcagggtgtgtttcaaaagctgcccctggagggaggtggtagggaggcggtggggagctgcactcaccccggcctgtcccctccagctcagccagcagtcacactgcccagatttctttcttttcctctgccgcctgctcagcccgctgctcaaggcctttgcacaggctgccgccttcctccgccagggccagctgcccgatactggtgaggcccttgttcccttgcagtcctcgaggcaggctgtgtctgtgctgggtgccaggtctaggtcttctctcttctgcagagttgggctacacagagcagctgttccagttcctgcaggccaccgcccaggaagaagggatcttcgagtgtgcggacccaaagctcgccatcagtgctgtctggaccttcagagacctaggggttctgcagcagacgccgagccctgcaggccccaggctccacctgtcccctacttttgccagcctggacaatcaggaaaaactagaacagttcatccggcagttcatttgtagctagaactgtgaggaggagcctgtgctgagacttctcagccccagaacacagctgtgtcctagagccagaagatggagaggaggctgcaaacccttagctgctctataaatataatcattgaggcttgaaaaaaaaaaaaaaaaaaaaaaaaaa

SEQ ID NO: 224755 - DNA, 1000 bp, Homo Sapiens
ccgacaccggccggggaggaagacgttaaagacgccagggaggaggacggtgtggacaccattgaggaagacctgacacgggccggggaggaagacggtaaagacaccagggaggaggacggtgcggacgccagcgaggaagacccgacatgggctggggaggaagagggtgcagactccggggaggaggacggtgcagacgccagcgaggaagatgatacaattaccaatgaaaaggcacacagtattctaaattttttgaagtcaacacaggaaatgtatttttatgacggtgtctccagagatgcagcttcagctgccctcgcagatgccgctgaggagctgctggaccgcctcgcgtcacacagcatgctgccctcagacgtgtccatcctgtaccacatgaaaacgctgctgctcctgcaagatactgagagattgaagcatgctctggaaatgttcccagaacattgcacgatgcctcctgaccatgccagagtaatctcagctttctttagttactggatcacacatatccttcctgagaagagcagtgactaaaatggaatatctctttaagaacagctcctctttaacaaaaaaacttaaaagacaaatgtgagatgggcttagagttagttctctgggaacttgaaagacatttatgccatattatttattcacgtgtttgttcctggtgggcaagatgccatctgaggcttcagatgagaaattggggtaaaatggaaatttttcacttatttgcaattatatatatcttgaattactacataaaacttgattctgtttctctacttattgtaaaaattgaaaatggacattctgttaagttaaatgtatagtttgaagctcatatatttttatgaagttttgaatcaccttgtatctgaaagtctctgctttaagaatgctttctgggtattaaaatgttctagtttaagtaaaaaaaaaaaaaaaaaaaaaaaaaaaaaaaaaaaaa

SEQ ID NO: 224756 - DNA, 1000 bp, Homo Sapiens; identical to SEQ ID NO: 119125

SEQ ID NO: 224757 - DNA, 1000 bp, Homo Sapiens
cgggccgccgccgctgggacccctggcccgggccttgcagctggcgctggccgccttccagctgctcaacctgctgggcaacgtggggctcttcctgcgctcggatcccagcatccgtggcgtgatgctggccggccgcggtctgggccagggctgggcttactgctaccaatgccaaagccaggtgccgccacgcagcggacactgctctgcctgccgcgtctgcatcctgcgtcgggaccaccactgccgcctgctgggccgctgcgtgggcttcggcaactaccggcccttcctgtgcctgctgcttcatgccgccggcgtcctgctccacgtctctgtgctgctgggccctgcactgtcggccctgctgcgagcccacacgcccctccacatggctgccctcctcctgcttccctggctcatgttgctcacaggcagagtgtctctggcacagtttgccttggccttcgtgacggacacgtgcgtggcgggtgcgctgctgtgcggggctgggctgctcttccatgggatgctgctgctgcggggccagaccacatgggagtgggctcggggccagcactcctatgacctgggtccctgccacaacctgcaggcagccctggggccccgctgggccctcgtctggctctggcccttcctggcctccccattgcctggggatgggatcaccttccagaccacagcagatgtgggacacacagcctcctgactccaggaagagccagagctgtgcagggaggaaggggtgagaggggggcccccacacctagactcagtaaggaagtcgggttggaccttaacatctgcattggacaactccaccccttccttggccttgcccctgcccgcctacactcctacgtgtccagggcttgggccgtgacttaggcagaggagtgcagaggagggtctggcaggggctgctcaggccgcctagctgcccctttgccaggttaataaagcactgacttgttaa

SEQ ID NO: 224758 - DNA, 1000 bp, Homo Sapiens
caggtgtttcaacccagtccctctctggctcctcggatgcccttctccattgggcaggtcacaatgcccatggttatgcccagtgcagatccccgctccttgtctttcccaatcctgaaccctgccctttcccagcccagccagccttcctcaccccttcctggctcccatggcagaaatagccctggcttgggttcccttgtcagcccccacggtccacacatgccccctgccgcctccatcccacctcccccaggcttgggcggtgttaaggcttctgctgaaactccccggccccaaccagtagacaaactggagaagatcctggagaagctgctgacccggttcccacagtgcaataaggcccagatgaccaacattcttcagcagatcaagacagcacgtaccaccatggcaggcctgaccatggaggaacttatccagttggttgctgcacgactggcagaacatgagcgggtggcagcaagtactcagccacttggtcgcatccgggccttgttccctgctccactggcccaaatcagtaccccaatgttcttgccttctgcccaagtttcatatcctggaaggtcttcacatgctccagccacctgtaagctatgtctaatgtgccagaaactcgtccagcccagtgagctgcatccaatggcgtgtacccatgtattgcacaaggagtgtatcaaattctgggcccagaccaacacaaatgacacttgtcccttttgtccaactcttaaatgacggacctgactggggaggaagaagaagagaaactgatgtgaacaggaagcgcgggttcaagatttctaaaactctatatttatacagtgacatatactcatgccatgtacatttttattatataggtaatgtgtgtatagaaagtctgtattccaatgttcgtaaatgaaactatgtatattatgcaaaaaaaaaaaaaaaaaaaaaaaaaaaaaaaaaaaaaaaaaaaaaaaaaaaa

SEQ ID NO: 224759 - DNA, 1000 bp, Homo Sapiens
aaactggaagaaaaaaccgcccacagcagcctggcactcttcagagatgatacgggtgtcaaatatggcttggtgggattggagcccaccaaggtggccttgaatgtggagcgcttccgggagtgggcagtggtgctggcagacacagcggtcaccagtggcagacactactgggaagtgacagtgaagcgctcccagcagttccggataggagtggcagatgtggacatgtcccgggatagctgcattggtgttgatgatcgttcctgggtgttcacctatgcccagcgcaagtggtacaccatgttggccaacgagaaagccccagttgagggtattgggcagccagagaaggtggggctgttgctggagtatgaggcccagaagctgagcctggtggatgtgagccaggtctctgtggttcacacgctacagacagatttccggggtccagtggtgcctgcctttgctctctgggatggggagctgctgacccattcagggcttgaggtgcccgagggcctctagtatgtccattactggagtccctaatcacgcctttggccagcctccttttgaaagtgtccgaagcctttttactttgcctcaagcaacctctagctcccacaattcagtgttgggtcctctgtgcaatatcatgatcatcttcctcatcccctaccttgtgaaagctaggcatacagccaaaccctccttttccccacccaccaacactactgccaatttcctaggctaccatgggtgtatcttccttgacctgcttccttcagtccctctgcctccctttgcccaggcctttctcagactgtattccatcctggggtcttatcattcagctttgtttgaatttattaatcaccatgatacctctccctccctttgtccacatgtaacttgttcttggggctctaccagatggctgaagagtaaatcctttctacctctggccaaaaaaaaaaaaaaaaaaaaaaaaaaaaaa

SEQ ID NO: 224760 - DNA, 1000 bp, Homo Sapiens
gaaacgttgagctcatgcaggacctcccacctgcgtcttcatcttgtccttcaatgagcagacgagagttcagaaaaatgcatttcagagccaaagatgatgatgatgacgacgacgatgatgcagaaatgtaggggccatacaaaataatgtccttgagtatttagtaccattaacaatttgacaatttagcacattacaagatttatataaaatgtatctccaagagaatgtcttaatcaaacttcagaactgacccatctaagtcaatagtgcaaagcacccaatacctgtggaggatgtactcatgggaactaaaactcaaaccatctttgaggttgcaaagctgctgtactgtgccaatgtcctttctttttttttttttttttttttccttggagacagagtttctctcttgtcgcccaggctggagtgcaatggcgcaatctcggctcactgcaacctccacctcctgggttcaagtgattctcctgcctcagcctcctgagtagctgggattacaggcatacaccaccacacccagctagtttttgtattattagtagacacgggggtttctccacgttggccaggctggtctcaaactcctgacctcgtgatacgcccgcctcagcctcccaaagtgctgggattacaggcgcgagccaccatgcccggccagtgtcctttcttatacacgtacatacatgatgatggcttgagtcagctgcagggcagtgggcttaatgagagggatctttgtaaagacagctcttcacttcagctcagtagctttggtcataggcaagtttgttttccattatcataatttgatgattcttgtgatgaattcaatgctagttcttaaagaactcttttatttctgtatgtggagctaatgtttaccttggaaattttgcaaaatacatgtaagaaagaaataaaatatattttgaaaataaaaaaaaaaaaaaaaaaaaaaaaaaaaaaaaaaaaaaaa

SEQ ID NO: 224761 - DNA, 1000 bp, Homo Sapiens
caggtcattgggcaaaacagtgcccaaaccccaagccgccaacacacccgtgccctaactgccagcaaatggagcactggaggtcagactgccccagcctcggggcggccgctgtggctccacatggcgacccctccctggatggcgaaggtgccctctagctcctccaactggatgacgactgaagaggcccaggctcgggaacccctctcacccttgccgagcccagggtaatgcttcaggtagcaggtaagtccatttcctttttgctagacacaagggctacctactctgttttgccatcttttagcaggcccagccgcccctcctcaatctctgttataaggattgatggcactccctccacctaccgccagacgccttcactgccctgccgcctagaccactatataactttcttgaacccataatctaccatccttccttctattccttactaaagcaaatacatcgagttatcttcttactttagtaaacactttctcaggttagattaaagcctgccctaccacccataaaacagcagaggtagtagcttcaaccctcattgaacagataatcccgagatttggcctgcttttatctccaaaatagtcaaacaggtgacaaccacacttggcgttaactggaagctacacactccataccatccgcagtcttctggaaaagtggaatgcgccaacggccttgtcaaacaacacctaatcaaattggctctcgagaagcgccaatcgtggagctccctgtgaataacccacctcttggcacgtacctgccctacctcaccctgttaagggagctgctaagagaacacaccgaccacagccttccaaagcccggaccactcagcccagacagtccggccataataaccccaggagatcaggtactagtaaaagacctccaggcaagaggtctctccccccagtggaaaggcccctatacggtaattcttacaacaccgacggcagctaaactt

SEQ ID NO: 224762 - DNA, 1000 bp, Homo Sapiens
tttaaggagaaactaacaatgaaaacgggcttgttgatggaggaaaagttggaatgcagcctctggtgctgtttgagcgatccctctatcccgggtcgctgctgtgttctggaaaggcacattgtaccctggatgcagcagcttcatcagcaatggaagtggctgatatgtggactctgcagattatataaccttcctaagcacccgaatgttgagatgccagatcaaccactacccatgggtcagaatgggacaacagaagaagtgacttcaaaagaagaggaagaagaagagatggatgaagatatagaagacttagatcactgtgagatgaaagaagagcctactagtgagaagaagttggaggatgaaggaactgaaaaagaaaactgggcaatattagagaaaattaggaagactgaaaggcaaggccatttaaatgtgttgaccctgatagtcctttgcacagtgatcttcagatcttaaaagaaaaagaagagataggagacattttgcttatgttttaaggtatgtattgggtagaggagcattatatatggaacctctcacaaaacaggtgattattttcttattatactcaattttcaccctgaatagagtgttttgattatgtaagttagatcgtaagtagatggctctcttaaagacattttagtggttttttgtttgttttgttttgttttgcttttttccgtagctcctactttcaagaatgaaaaaggtatcccagcagtttgggaggctgaggcgggcggatcacgaggtcaggagattgagaccatcctggctaacacggtgaaaccccgtctttactaaaaaatacaaaaaaattagccaggcgtgatggcaggcgactgtagtcccagctactcgggaggctgaggcaggagaatggcgtgaacccgggaggcagagcttgcagtgagctgagatggtgccactgcactccagcctgggtgacagagtgagactccatctc

SEQ ID NO: 224763 - DNA, 1000 bp, Homo Sapiens
cgccaccagctcaggcacaaagcggcagttgcatagagtgctccgtggtcagtggctgtcctcaagtgccccagtcagctcggctgagcccaaagcctcccatctctgcattcaggggctctcttcttcccccatccatcaccagggaccagtgatcttgcctgtcgatgcccggctctcgcttgatgtctcagttccggaacagagatgctccagctactacctgggaaggctctggccccaaaaatatttagttagcagccattcagttaagtggaattgactttttatcggctttcctctgtacggctgccaccagcgaaggctgtttccttcttccctcttctctgcctgtcagtttcctccacattcctatcggcagcctttagctctgatcgatactaaccgctgtgtaacagctcacgcacgactgctctggtttgcatcgatcagacccttcttccaacaggtagtcagctatttgaggcaatgacttgagataaacacctacttttacttcaggctaattcatttcaggtggatttcaaggaggccctgcaccccgtctcttagacaagctgaaattggagagtcaagatccacgcactgcatgcttgagatcctaggagacctttcttcctctcccgttttctttttctttcccttgtattttgtaagtgccacttataaacaagataccaggactcaggacgttgaaaatgccacttcagaaaatgtgtcggccatccatccctctgtccttttaatgagatgcatccgggactgcaggaaaccaagactgctgcggaggcaggattgtcgctgggcaaccaagcatccttccagctgccccagaaagaatctcacaatgtcctgcaatccctggtcttctcaccacctcagggggcggtccttgaatccacccccatccttgttccaggctcacaagtgaaatttaccaggagctgatattgcaaaatagattgctatttcgcaactg

SEQ ID NO: 224764 - DNA, 1000 bp, Homo Sapiens
gcccaccttgattctaggcatctgcccataggaccagctatcgctatatcctttgacagagcagcctacgatgccatgtggtagtgctcaggacagacatggtgcccatgcatacaggcataaagtcctgttcagaaatcccctatccaccttccctacccactgctggctgaaaaactaccagacttctatgtgggctctgatgtccttagcatgcagggtaagtgacaaacctggcttccttcttgtcacttgccagtatgacttcactgacctagacaggccgtaagaactctttccccataactcttaagtaatccaccaacacattccagaaaaccgactgcagaaggtgggctttaaaaccttaaaaacctaggacaatgaaggagtccaatcccttggcagatccaacaagatggctggggagagggagaaacaaactggaggctcccaaaggaacctaacttagcaaaggttctcatcttataccctccccttacccaaatactgtcctactgaaagggccctaccagttaagggatctcttctaaataacaggcaacccctagatccaagtagttcagtccaggaagactgggagccaatcactcttgaaccttgtgggcaaacagtatgggggaggaccctcttgacaggccttggtaggcaagattccaacacaggaagacagcaagatggggcctagagtatggggccctacatgctgttaaggttgtggttaggaatggtgcaatgctgcaggagctggaacaaagctacaccaaggaacagagcacagagcagcaggggccgaaattgaggaggccttaaatgctttgagcttttgccttcagtctaaagctgtagaatagggggttaagagcttaggctgaccacagggaagtttacaagctagagcgaatatctggactgctaatatctgacaacagtaggcgaaatttactttttcttcaaatacacattttcaagaattgac

SEQ ID NO: 224765 - DNA, 1000 bp, Homo Sapiens
ctacaggcggtggctttctttgtgctgcacttcctcaaggccaaggacagcacctaccagacgctgtgagtacctggccagcagcaagtacctgagtcccagctcacctcctggttcctgccccaccgttccccttcagtacccagggtgctgtcttctccatgggcaagccctcaggacggtgacagcgtgctccatgtgagccacaccccttttgtctcctccagttggggtgtttcctttgtcagatgttggctgggaccaggactcagcctgggccagtctaggagcccagctgagccctcctgtgtcttttcccttcatgctgccagcagggaagagaaccagtaggtgccagcccaggcaagcctgtggcccgcgtttctgtggctgtgggcaggagctgggccttgtgtctagttgggttttgctctgagaaggggagctgtgcctgaggccctctgtgtgccgtgtgtgctgtggggcgggtcgccacagcctgtgttaaagtgtttgctcttcctctgctgcctcctctcgaggcagggggtccttggctggctgaggcagtgtcaccttcctgagtgtcctctttggcctctgcagaatctgacccctttgggcctggactccatcctgaggggaaaggaggatgcagagggtggcctctgggcacccttgtgggtaagcggggggcgggggcgggaaaaactctggccgccagtttttggctcctgcgggcaccaagcaggctcagtgtctgatgcctgacatctcctcctgtcctgggcctggaacctgcagctgagaaaatccctcaaccacctcgtctcctccatcgcccctgctgggccccccagcctgacagtgggttgtatgcctgcctctttccaccaactggcctgggcactgcccccaaataaaggaactctgcactgcaaaaaaaaaaaaaaaaaaaaaaaaaaaaaaaaaaaaaaaaaaaaaaaaaaaaaaaaaacca

SEQ ID NO: 224766 - DNA, 1000 bp, Homo Sapiens
gcctcagctaccacgcctggccaatccaggtcttaagagacctcattgcctttgttttatgagatatcattctgggattgggaatatgtaaactcaactggagattttttttcataaaaatttatatagttccagccctctcattgcttcctatcctaaatcctcttccagtctgtccatccctcactaccatgatagtctacattctgataagctgtgaggccactgccaagggagggagaaatggtcactttctggtggtggttaatgctttgttagatagcttcatccagtcaatagttgaaaagttttcacataatccagtattggcatcagagccagaaatgccctccctaggtccaggaccaaagataaaacaaacacgaggaacatgtagcgtctacacaggaaagtaaagaattatagaattaactaattctacttgaaatcaggagttttataaaacaacatttttagacgtggtcatcttttattggtttccatcatctcttccccttctctctgggaacagttacccgggtattctttgggaagctatcctttctcagctatgtggtttggcaccaccaccatcttcatgagtggaccctgtttggcttgtgtcaatcagtttatcccatccccttggccacagagccattgtgatatgaggagatactggctcttctggaaaagagaggcttttcttcatcgagagctaccagaggagatattatctgtcctctgtgtggcacataggagaatgtgagacctagaattatagcaacttttttttttctgttaaaaggggagattctcaagcttccaggtgctaccatatggagcctaaggataaagccaataccaaagaaaacagtgactaaacagagagaaactaggtccttggtgacatcttttgagccactagaccaagctttacctgaagcagagctacctcagaacttttcagctatgtgagccaataaacatctgtcaaacg

SEQ ID NO: 224767 - DNA, 1000 bp, Homo Sapiens
tctgagccctgcccaccagaagcagctgcagatcccatggcccaggtcacattctcttgggggccacttctggggacacacaaggaagactgatgtgccagaaacattccagtggccccgggttcctattccaactctgcctgcactatcttcattcaatcattccttccagcctcaaccttctcatgggaaggacgcaaccacccaccacaaaactcactgtgagagtcttgtgatagtatagtatgttcatagcctagcgcctgggagagtgctcaagaatgggtagctgtgagcctggcaggtggtgcacacctgtggtcccagctactcaggaggctgaggcgggaggctcccttgagctaaggagttcaaagctgcagtgagctatgatcgtgccattgcgctccagcgtgagcaacagggtgagacactgtctcaaaaaaaaaaaaaaaaaaaaaaaaaagaaagaaatggtagttgctctgggtgaactccttcagaggatggatttgatttcattaccatctctaagccccagacaccctgcaggccttccatacagcacaggttggagctgaaggagtgcccaggctgcggatggaggaaggacgtgctcgggagaaggtgaagatgggagagaagcaagatcttctgtgtttggaccaaggacacatttccttactccatagcagctgtggtcagtggcttagctcggacaaggagatgagagcccatgtgttgtgagggttcttctgggaactctgagaaggcaggagccgcccccgcccttcactgcctctcttccattctgcagcatggaatatggatgtgtggtctggatgtacagacaccattttggaccataaagacaaggacgattgtctaaggatgacacagccagagcactgagagtggcgagaaggacaggggagctgctgtgccaagcaggactgtctctcttaagagaaaaataaaatttattggtgtttaaaccatt

SEQ ID NO: 224768 - DNA, 1000 bp, Homo Sapiens
caggcaggactacaaatggcccagacccctcagaaatgaaggtttggatcactccaccaggaaaaaaaaccacaacctgctgagctgcttgctgaaggcaaagggaatacagaatgggtagaagaaggtagtcatcaatatcagctacgaccacgtgaccagctgcagaaatggggactgtaattgtcatgagaatttcctccttcttttgctaaaatcatgtttgtgcatgtatacacttgtactaagaaaatatcttcattttatttcctttttctctatgatgtgacataagatttattgacttcatagcagcatttaagtattgttaactttatataatagtatttgggttggggattggtgcctttctggttgtatgaagaatagttgtattatgttaggtgtaattatgacattattgtctttaagattatgtatgacctcaggaggtgtgtatgggttcaagttgacaggggttggagttgtgattgttaatgctctgtgtcaacttgattggattgaaggatacaaagtactgatcttgggtgtgttggtgagggtgttgccaagagatattaacatttgagtcagtgggctggggaaggcagatccacccttaatctggtgggcacaatctaatcagctgccagcgaatataaagcaggcagaaaaatgtgaaaaggagagatgggcctagcttccagcctacctctttctcccatgctggatacttcctgcccttgaatattggactctaaggtcttcgctttcaggacttggattggctctccttgctcctcagcttacagatggcctattgtggtaccttgtgatcatatacgtttatacttaataaattcccctttatatatatatatctatgtatatcctattagttctttccctctagagaacgctaatacaccatccttgattaaatcccttcaccctctctccatctttgtaaaaattctcctcattaaattattgttcagtg

SEQ ID NO: 224769 - DNA, 1000 bp, Homo Sapiens
ccttgatcttccccctccggccactcaccacagctgggagggtccaaggagaccctcagccactgtcccttcagccctcaccccaccctggctggctctgcccggacagtccttagggacatcttggtcctgcccaccagccaggggacccagaattggagcaggggagcaggacccccagaccctctcataccgcttttgttctgaggccttgagggaacacggggtcttcgcgaccccaggcgagatgatgctgggacagaggagggtcgggctgcatcggggccctcctggtccccactcctgggtgagtcagcatctcagtctccagttctgggtgggcggcaccaggtgtgagcctcagcggtctccttgctggctaaggacctgggatttgctccagtgcccctcgggagggagtaggacacgtgcccagagagcaagcagaccccctccccgaccaacttctgagagcaaagacacctagagctagagattcagcaccccctgagcctcagtttctccactatgaagtgggatccgtgatctcagccttaccagggctgtgaggattaaatggtccagcccagcctggggcctgcctggagtaggcagcctgctcaggatgggctgtggaaggagggctggggtagacctttcaagtccacttgggcatggggagctgagagctagcatgccgtttaacttggcaggaagcaggccgggcgcagtggctcatgcctgtaatcccagcactttgggaggctgaggcgggcggatcacgaggtcaggagatcaacaccatcctggctaacacggtgaaaccccctgtctactaaaaatacaaaaaatcagccgggcgtagtggcgggcgcctgtagtcccagctactcgggaggctgaggcaggagaatggcgtgaacccaggaggctgagcttgcagtgagccgagatcgcgccactgcactccagcctgggggacagagtgagactccatctc

SEQ ID NO: 224770 - DNA, 1000 bp, Homo Sapiens
ccctaaattcgtaaaattttttagaaaagattagtaaaaaacataacacctggtggtcaggaaatcttgattttagaactttgtatcccctaccttactttgtcacattggcaaagttacttcctcaactattgaagatgaattttagactagaattaactatcccccaaaacaggggtccccaacccccaggccacagacctgttatctctctgtgggctgttagaaaccaggctgcacagcaggaggtgagcagtgggccagtgggtgagagagcattactgcctgagctcctctgcctcctgtcagataagtggcagcattagatttttttttttttttttttttttttttgagacggagtctcgctctatcacccaggctggagtgcagtggcacaatcttgggttactgcaaactccgcctcccaggttcacgccattctcctgcctcagcctccagagtagctgggactacaggtgcctgccaccatgcccggctaatttttttttttttttgtacttttagtagagatgatgtttcaccgtgttaaccaggatggtcttgatctgctgaccttctgatctgcccgcctcggcctcccaaaatgctgggattacaggcgtgagccaccgtgcctggccagcattagattcttataggagtgcaaactttattgtgaccttcacatgtgagggatctaggttgtgcactccttataagaatctaatgcctgatgatctgaggtggaacagtttcatcctgaaaccattccccaccccccaacaaagtccatggaaaaattatcttccacgaaactggtccttggtgccaaaaatgttgaagaccactgcccccaaaagaagcaaatcactactgtgtctaaggcacagccagcctctgtaggggtatgagatgcaaaacatacaattctaaatcacaaggtgccattttgccctaacttattttcactaaatctctattttttcacccttagctt

SEQ ID NO: 224771 - DNA, 1000 bp, Homo Sapiens
gctgggaggcgccacataattttaaattaccagatctcacaagaactcactatccggaagacagcacccagccatgagggatccaccctcatgattcaaacacctcccaccaagccccacctccagcactggggatcacaactcgacatgagatttgagcagagacaaatttccaaactatatcactcagaatctggaatagaaagagtatgcaccataacacttttattctctacagaaacagacactgtgctgagctcaaaaaatagtgattcatcaaatatgaatgtgcaaacctcttttgtactgtatctgtggaatcctggttactggggctttgagcccctgtcccataaaatctctgtaatactaacctaactcatggcatttctttaaaatcaaatttaatgaaatgatggacataaagcccatggaactgagtgtgtaatcttctcttatttgattagatgttaaacttgaaacacttttttttgataaaatatgaaatacataaatgagttaaattgttgtgactttccttataagattgaaaacaataaggtgtttttaatactttttttctgtgttctcttgaaagtagctttacatgtattaagcaatcctggctttagatattagggacaataaaaatttctgcaattttcccagttttatatagccattgtttgcaagtatgaaaacctgtcttttgttactgaaatattatcttttattttggcttttttgataacttttatgtttgccttgagcaagtcacttatcttttctatttgtgttttctatttcagtttatttatgaaagacagtaataatgattgtgatgtaccttacaaaaaaagataaaatcgtattgaagagactgttgaatatgaacgcagtgtattaaatgcccgatataggaacaaaaataaaatgaagaacatttctattaaaaaaaaaaaaaaaaaaaaaaaaaaaaaaaaagaaaaaaaaaaaaaaa

SEQ ID NO: 224772 - DNA, 1000 bp, Homo Sapiens; identical to SEQ ID NO: 119134

SEQ ID NO: 224773 - DNA, 1000 bp, Homo Sapiens
actcagcatctgaccatccccacctcctggatctacagggttcatagaggaggacccagaagagggaaagtcaggctgaggaacttggcctccctgctgcaagggaaatgacatcggttaccaaggaggtgaccagctatccttttccaagactgaaaagcagaaatacggccctgaggctagagggtctaagagaacaataggaagaatttcctgacaaaggacaatgttgcctaaaggactcaggaagctctgtgaaaacaggagactcccgagcaccagacccttttccaccaggcagtgtttttcccatatgacaggtgagaaaactgaggctgagagacatgtaataacttgctgaagcagcaaccagcacaccatatagctgaaatctgtagatcagcagttaaaagtggtagggcaagtcctctctgactttcagcgctaagagcctaggattctgtgtttttctgcttaagcctgggaatcagagtcctacaaaagccgcgcctaatcctgggggtgtgggctttaaacccagagagaaagcatgttattggaatactcctgcacttttctccctttgaatcccaccacggaaagaaaattctgtgacgtgtacccagtatttattggagggtatttcctagcaagaaaatgagggcgattgaccaggcacggtggctcacgcctgtaatcccagcactttgggaggtcaaggtgagtggatcacatgaggtcaggagttcgagaccagcctgaccaacatggagaaaccccgtctctactaaaaatacaaaattagccgggcgtggggtggcgcatgcctgtaattccagctactcctgaggctgtggcagcagaatcgcttgaacccgggagacagaggttgcagtgagttgagatcaagccatcgcactccagcctgggcaacagagtgagactctgtcaaaaaagaaagtgtggtacatctatactaatggagtactatttagccgtc

SEQ ID NO: 224774 - DNA, 1000 bp, Homo Sapiens
catttagcttcttgaaagtggaataatttttataatagactatagtgaatctaaaactacactgttaagagtatataattcttaacaggaattataaataacttcaatatgatgagagcacttaagatctcaataactgtggaagtgacaaaataaagctagaattcgaagaaagccttaagttacactatatgtaactgatatgtctacatgagatttggatgctatcaaccttcattggctataaactttgtttgttttattttagcgtccattgtacatcgttttaaatgaaaggatgataaaatatgtgtttttgagagccttgagtatttgtcattctgcagaatattgtaattgcatgcataccgatattggagaaatctgggtcagccaagtttcatgttattgcatttagattaacctagtaatagtccatttgcctagaggaaataatgtgctccctgaaagatgactattctagaaggataaatatagatttcaagtgatcgtaaaatagtattgtttgtctcatatgcattatttgcattttgtcctcagagatttccaatggtgaatttactggtatactaagtgatttaaatttgaatgtgaaatactgataggcttttaagcttcttttaagaagtagatagaaatacgaagattatgataagaaagtctgtcacagtgctatttggaaaacggaaaatttacaagcaacctagaggtccagcaatgtgaaaagaatcaagtaattctgcttaaattcataagattcagtataatgcccagttattaaaattacatctttaaagaatacatgacaacatgggaaattacgtaagtcatacaaggtgggaggaaaggtcatgtgtaaaattgtatgcataatataagcccaattttgtaaaaaccatatattcttatatgtacagaaaaaaaggactgcaagtaaatatgccaaccattttaataaaggatctctctggattgtggg

SEQ ID NO: 224775 - DNA, 1000 bp, Homo Sapiens; identical to SEQ ID NO: 119135

SEQ ID NO: 224776 - DNA, 1000 bp, Homo Sapiens
catgactgtgctcacacacacacttggctgcctgggtccctctccccaaggccctgaggtgggcaggaggggctcagattcaccatggtgacactgccctcccacaggactatgagctctggaagtcctcggacaagatctgccgacagctcatctaccacctcacccctcactcgaagcagcagcaagggtccagcctgcgccagaggaagacccagagctgcctcaagagcagcctccagaagactctgctggcaggggagactgtggacctctcaggcatcccgctgtcgacacaggacgtgcaacacatcacacgctacctgagcagccatggtgctgtgctggcggtgctggacctgagcttcacggggctgagtgatgagctgctgcacctcctgctgcccagcctgtgggcgctgccccgcctcacccagctcctgctcaacggcaaccgactgacgcgggccactgcccgcaagctcactgatgccatcaaggacaccaccaagttccctgctttggcttgggtggacctgggcaacaacgtggatgtggcttccctgccccagcccctgctggtcggcctgcgccggcggctgagccagcgcacctcactccccaccatctacgagggcctggaccttgagcctgagggcagtgcggccggggccaccacccctgcctccacctgggactccacagctgctgggctgggacccgagccccaggcctgctgtgccaggtgacccaccacccacctggctcattgctactgacttgtgatgctctcaagcacatgatagtgggcgatgaaggtcaaggaggactcacaggcccccagaaatccagtgtaaatgctcagcctgagattaaggggacagaagaatggactcataggtggccaggtggccagccctggctagaggctcagccttccctcagtgggaggggccccagcacccacagtgtggaccccgcaataaagagtgacacccgc

SEQ ID NO: 224777 - DNA, 1000 bp, Homo Sapiens
tgtcattcaggctggactgcagtggcaccattaaggctcactgcagcctcgacaccctgggctcaaaaattcctcctgcctcagccccccaagtaggtgagaccacaggtgagcaccaccatggccagctaatttctgcatgttttttttgtagagatggggttttgccatgttgcccaggctggtgtcgaactcctgaagtcaagcaatccagcaacctcggcccaccaaattgctggcattacaagtgtgagcccctgtgcttggcctatacctgaaaatttcaatccaagccatagttagagaaccacaagagttcaataatttccctcaaaaaatccctttgtcatgttcaaaagaactgccagatttttctattttatgtgggcagaatcctggatctcctctttggaaataaatggtcatagttttagatcggaaaatatgtcatttattggtggaatgaacacaattcattcacatggacacggtgagccaaccctgctttgctgctgctaccgttggcattgcagaaccggaaacctccccaacacatattcacataaagcaaccatttattctgatgtctccctgctttgcaggtttactggactcatgcgggtggtagacacgcatgtgtgtgggagtcacgttttctgaaggacctacaggctgggatcccagaggattcttcacttatgtttgactcaacactaagggactttcaagaaaccaaagaagaagctgccaggcatcatagaacttagctttgaaaattggagagtgtcacttttctatgacattatattgattaaggactggttctcggcaacaatcggcttcaccctccactcttcccttcttggagtttctaccaagatggcagaatgacagtccttttccctctacaagagctgagatcacctgcttcatagcaaacctggagaaccacttagcagaaacaacatgttacctacaaactaatgaaggcagattgagt

SEQ ID NO: 224778 - DNA, 1000 bp, Homo Sapiens
atgttggtaattttaaagactgcaaggcagtttagagaatgaagtaaaccaatagatactcttttgattctccaaagaaatataattttggtttttgttcctcagagagagtttgaaagaaattttcagatgttctgttccctatagagggcctattccaggatctaaatgaatgggaatttataattcctttcatagactcaaacctgaaagcagaaatttttagtagttgagttgctttaagtgaattttaacaaatatgacacagaaaaggtcagatgctgttgtataaaattttttactagtgtgtcttatataattctttcttctcattaattcagtgcctttttcctctaagcatactcttggtccatgccccatgcagtgtcaactgatgtttaagctacagagcattgttgtagtggtgagggccctctgttgcaggggcatggggaaatgcatatattaatcaggggctggaggagtatacatgattcttgtgttcatgttgtcatttgaaactcttcacataaaattttctaatattcatttggaaaacctctccactggagaggtttcatctctgagaggttttgtaataatagtgtaagttcagtaaatccagtccaaattctcatcacatgtattatttgatactaaattttcaattattacttcaaaataagagtctgaggatttcttcttactggcgttcttaaaggtctctaaaattaaagaacaagatgtggttttttgtttaagacgtttttagtttatttgttgttaagttaaactggagaaagtttgtcatcctcattttcaaactgaaaactaatcaaatatagtgcctatttagtctcaaaataaggtaactattaacttgattatactatataatattctcaattacatttgaatttaaaaatattgagctcttgattacaatttaatacattgtaaaaagtattaaatcctttgaaacatcaaaaaaaaaaaaaaa

SEQ ID NO: 224779 - DNA, 1000 bp, Homo Sapiens
tatttacatactgtatctgaaaacagactttaaagtcacaagattataaatgtacatatatattctcacattctgaaaaataacattctcagaatccacagaaaatatacttagttactactgaagataatttttgaaatgtaaaaattagatttaaatagtatattttaaatgacagaactataattacagagatcagatcagataggtaaactgcaagatagataggatgaaacttttggcctactgtattacttacagagtttttttgtgtgtggtttttaaaactgttaaggcaagaagtgtcaaatgctttagagttaaataacagatcactgatttcaaagacttggtgtatagtgttaaaaattaaagcttaaaaggtggttagaaaagtggattaatgcaaaaggggtaataaagactgcaacattctcaggaccaaattaaactgctaaaaaaaaaaaaaaagttcattgacttgcttagtcgtatactcaaatgatgataaacctacatgtgcaaaggctcacgtttaagattgtcaagccagcagtctactgttgtgttgccattgcttttccattgggagaagaaagaattaaccagtcattaaaccatttggtaagttgcactttgctgtgctgatcccacaggaaaggcttgaaacacgagaagcagcaaagacagagcacacaagtgcataaggctgttgtcttcggcttgggtgaaatgacagttcctcttcattctaaaggtttactccattgaatttaaggcatttgttcattccagtgttgagatgctttgcatctctgcagaagaaatttattttaaattgtttaaatatctggaaatacttttagctatcatttataaagatagttttgttctcagtttcactataaattatagaacaaatgggaaacaagggtttaatttagttcagccattttacaaggaaataataaaatactaaaatctgaaaaaaaaaaaaaaa

SEQ ID NO: 224780 - DNA, 1000 bp, Homo Sapiens; identical to SEQ ID NO: 119138

SEQ ID NO: 224781 - DNA, 1000 bp, Homo Sapiens; identical to SEQ ID NO: 119141

SEQ ID NO: 224782 - DNA, 609 bp, Homo Sapiens
atggcgtcccagggtcgtcggcggaggcccctgcggaggccggagacggtggtgccgggggaggcgaccgagacggattccgagcgctctgcgtcctcgtcggaggaggaggagctgtacctgggtccttcgggcccgacgcgcggccgccccacggggctgcgggtggctggggaagccgcggagaccgactcggagccggagccggagccggaaccgacggccgcgccgagggacctgcctccactcgtggtgcagcgggaatcggcggaggaggcctggggcacggaggaggccccggcgcccgcccccgcgcgctcgctcctgcaacttcggctggcggagagccaggcgcggctggaccacgacgtggcggccgccgtgagcggtgtctaccgccgtgcaggccgcgacgtggccgccctggctagtaggctggcggcagcccaggcggcggggctggcggcggcccacagcgtgcgcctggcgcgcggggacctttgtgcgctggccgagcgtctggacatcgtggctggctgccgcctgctgccggacatccgcggcgtgccagggaccgagcctgagaaagacccggggccgcgggcctag

SEQ ID NO: 224783 - DNA, 1000 bp, Homo Sapiens
ctaaggaatgttattatttgctagcgctatgttaagttgtcttattaagtaattgagtcctttcaatgtcttcttgaggtatgtattgcttgttcttgtttctacgtataaggaaaatgaagctgagagaagtgaagtcacttttatgaggttcaacagtacaggatggagccaggatttttatctgggtctgtctgactttaaaacacatactcttctcctagcatattctgcctcacaggtgcttagtctttgcctttgtagcatttacagtacagctggagacccatgatgattacatataaagttcagttagaaaagatgggtagttactttattagtgttcatctgtggagtatcagaatagcagtcagccaactctgtctcatatcatccttcattacttttccccatctccctactcaaagacttgcctctattaagaattttgtcattcttctgtgaaagggtagtgtaagttatataagccctcagcgatacatgcacaaagatgttctagttaggggctaatttggcaagagaaacagtttattaatgtttttgaaaagataagtcatattcatacttaataccattttgtatttgtggtaatattttaatattggagctaaatacaaatttttgcataattttttgatgattttcagctttgtgggcctattgggttacataagtgactttttgtttggcaaatgttactcctgtattgagtaagtctaacattacgtcccttttctttttggggaggggtagccagaggagtgagtttttcatttagatgaacattgatcaaccattaagacaagatagttgaagacatgtatgtggactgtcaacaaaaataacattttttgaaaagcttttattttcaacatgtaaaaagtgagaaattacttcaaaatatatgcaatttaaattttaaaaaaaaaaaaaaaaaaaaaaaaaaaaaaaaaaaaaaaaaaaaaaaaaaaaaaaaaaa

SEQ ID NO: 224784 - DNA, 1000 bp, Homo Sapiens
ggtagcaatctgaaacatgaggagtacgattctactgttttgtcttctaggatcaactcggtcattaccacagctcaaacctgctttgggactccctcccacaaaactggctccggatcagggaacactaccaaaccaacagcagtcaaatcaggtctttccttctttaagtctgataccattaacacagatgctcacactggggccagatctgcatctgttaaatcctgctgcaggaatgacacctggtacccagacccacccattgaccctgggagggttgaatgtacaacagcaactgcacccacatgtgttaccaatttttgtcacacaacttggagcccagggcactatcctaagctcagaggaattgccacaaatcttcacgagcctcatcatccattccttgttcccgggaggcatcctgcccaccagtcaggcaggggctaatccagatgtccaggatggaagccttccagcaggaggagcaggtgtaaatcctgccacccagggaaccccagcaggccgcctcccaactcccagtggcacagatgacgactttgcagtgaccacccctgcaggcatccaaaggagcacacatgccatcgaggaagccaccacagaatcagcaaatggaattcagtaagctgtttcaaattttttcaactaagctgcctcgaatttggtgatacatgtgaatctttatcattgattatattatggaatagattgagacacattggatagtcttagaagaaattaattcttaatttacctgaaaatattcttgaaatttcagaaaatatgttctatgtagagaatcccaacttttaaaaacaataattcaatggataaatctgtctttgaaatataacattatgctgcctggatgatatgcatattaaaacatatttggaaaactggaaaaaaaaaaaaaaaaaaaaaaaaaaaaaaaaaaaaaaaaaaaaaaaaaaaaaaaaaaaaaaaaaaaaaaaaaaaa

SEQ ID NO: 224785 - DNA, 1000 bp, Homo Sapiens
ccaagagccatccccgccaacagccagccaggacacggggcctcagtccacagccaccaggaggtggactcttccgacctccagtgagcttggaagaggaccctgggtgtcagtgagatctcagccctgatgacaccctgcgagacctggagcgtagggcccagctagcccgcacctggatttccaccgttcagagccgagacaccgcattcctgctgttccgcgtggctgagtctgcattcgttcgttacgcggtgtgtgaagactgacatctgcactgcgaggatggagatcttggtcatctctgacatctcctgcatcgcagaggccactgccagccccccttttcccccatggtcatggtgtcacccccgtcaccctctgactgcaggcctgggcgactgcggggagcttgctcttccctccccctcatcacagtggccttctcatggcacccaaacctttcccgccgttctcctgtcctcgggctggtcaggcggatgaggtccctactcccgagcccccagcctcacccactgcagggccaggctctcagtcacccctggaaaatggtgcctggttcacagctcccgtgcatctgcctcatctctcctgatcaacgtctgtctcttgggagtagctagagttcctcatgagcttgtcctcaagcgaggcatgcatgaggcctccagccggtggtcagtgagggagttaagtggcttctccgtggaaacacagccttctgctgcagcagaggctcacccagcgtgaactgcccccagggaacactgggcgatgcctggggacattgtggttgtcacgatggggggtgctcctggcctggagtgggtggaggccagagacactgctcagcagcaccctgcagtgcccaggacggccccgtcccagagaacaatccagccccgaatgtcagcaccttccccctacccgagttgtgaaaataaaaaatgtttccagacaaaaaaaaaaaaaaaaaaaa

SEQ ID NO: 224786 - DNA, 1000 bp, Homo Sapiens; identical to SEQ ID NO: 119144

SEQ ID NO: 224787 - DNA, 1000 bp, Homo Sapiens
gctgggattacaggcgtgagccaccgcgcccggccatctcagggatatttaaacaaaggaagaggaaatatagggaagagaaagaaaccacagcttcttttagacttgtctgacaagcctatggcaattttgtcgtccctttgttattttatgtgggagagggaaatgtttcagaaacgaaagatctcatcccctttatttttctgtgtatgcattcactgctgcccagtgtcagaacagttatacaaacgagggcttgaaaacattttgtgaaaacttgcttagtcctgcaacgttctccactctcgaggtgcaggagcatacatctttataaaaaatatggaggcttgagttatgaaacacttttataaggagataaggatgtacatatgtttggacacattgtccacttcagatgcttgtttaaaaaaatgtttcaccatgtgtctttacccaatacacatactttttcttgatgtggatttactttttttttttttttttaagtttttctgggatagggatgatagtgtaattgttcatgcccacagtaatcctgggaatcttagttttttcctatgattgtggtttctcagcttctttacctctcctttgagttaggtccacctcagttttctaaaggtcaaattaaggcccccccaaaaatacagtatgtagctgaattcctttgaaagatcatgataaactcagaagaacaaacatagaaggaatgtcatttttaatctttttaaagagtgtgtgaaaattcactttaactggaattttaacaggcaagccggcatgcatatatgtagggatgtgtgactttcacagttgtcaccatggacttaggcttgattaaaatgctacacatttagagcgttttgtaattccttttttatatttttaagactagattttgagccatgtgatagttttacctcatattaaatatattgtacagaagtaaaaataatcatgtattcactttgaactcctc

SEQ ID NO: 224788 - DNA, 1000 bp, Homo Sapiens
ctcgctgcgcgtcgagcgcctcgccctggctgacgaccgccgctacttctgccgcgtcgagttcgccggcgacgtccatgaccgctacgagagccgccacggcgtccggctgcacgtgacagccgcgccgcggatcgtcaacatctcggtgctgcccagtccggctcacgccttccgcgcgctctgcactgccgaaggggagccgccgcccgccctcgcctggtccggcccggccctgggcaacagcttggcagccgtgcggagcccgcgtgagggtcacggccacctagtgaccgccgaactgcccgcactgacccatgacggccgctacacgtgtacggccgccaacagcctgggccgctccgaggccagcgtctacctgttccgcttccatggcgccagcggggcctcgacggtcgccctcctgctcggcgctctcggcttcaaggcgctgctgctgctcggggtcctggccgcccgcgctgcccgccgccgcccagagcatctggacaccccggacaccccaccacggtcccaggcccaggagtccaattatgaaaatttgagccagatgaacccccggagcccaccagccaccatgtgctcaccgtgaggagtccctcagccaccaacatccatttcagcactgtaaagaacaaaggccagtgcgaggcttggctggcacagccagtcctggttctcgggcaccttggcagcccccagctgggtggctcctcccctgctcaaggtcaagaccctgctcaaggaggctcatctggcctcctatgtggacaaccatttcggagctccctgatatttttgccagcatttcgtaaatgtgcatacgtctgtgtgtgtgtgtgtgtgtgagagagagagagagagagtacacgcattagcttgagcgtgaaacttccagaaatgttcccttgccctttcttacctagaacacctgctatagtaaagcagacaggaaactgttaaaaaaaaaaaaaaaaaa

SEQ ID NO: 224789 - DNA, 1000 bp, Homo Sapiens
agcccggggaggacacagagggcaggcgggcgccctgttgggcttcctgatgacggggacgacaggccgaggattcacgctggaagcccacccaagccggcggggccctagcgcagaaattcagaaccccctgtcctgaaggatctctctgtcagccagcctggagtgcaatggcgcaatcatggcttactgcagcctccagctcccaggctcaagcgtttctcccaccttagcctcctgagtagctgggactaaggcacacacactgtacctggcagctggcgaagcattgtttctgagtgtgtgaggatgttttcagtggactcagtgaagatctgccctcagcgtgggcaggcacatccacttggttggggacccagatggaacacaaagggagaagacaagcaaattctcttttctggagggagacacccatctcctgcccttggacatcaggactccaggttcttcggcctttggactcaggcttgccacagaggcctcccagggctctcggccagtcagcctcagaatgagagttacaccactggcttccttggttcaaccaccttcttacctggactgagcctcacttacagcttctctaggtctccagcttgcagacagcctatgggaggacttctcagcctccataagtgtgtgggccagttcgcctaataaatcccctctcctggccgggcgcggtagctctcccctgtaatctcagcattttgggaggcagaggtaggtggatcacctgaggtcaggagttcaagaccagcctggccaacatggtgagacccccgtctctactaaaagtacaaaaagtagctgggtgtggtgctgggtgcctgtaatcccagctactcgggaggctgaagcaggagaatcacttcgacctgggaggtagaggttgcagtgagccgagatcgagccactgcactccagcctgggtgacagggcaagactctgtctcaaacaaataaaaatcccctctcct

SEQ ID NO: 224790 - DNA, 1000 bp, Homo Sapiens
aagtgttccctgagaaacccaccagcctaagaagctctggccccaggcttgtcactagcagctgcagtcaacagttcaaagaagtcatggcccaaatccagtgtgcacccctccccattcacagagcctttttcacaattccatttccagttcatctatggcagtccagccagctcctgggcagcttgagagggcaaacccaaaacctcatgacagccagagcctgtctttcagcattcagtccgcctggccggctccagtttccccatggggctgcgggacagaggaccattacaactagatcaaggagcccagaaaacctccagtagtggacaacaggttttcaccatagcctacgttaacccatttttgagccaagcttcaaccctcagccttgaaaaacaagtctttaatttaatttttgttttttgcctaaatccaaagaaaaagggctgccgggccaggcgcggtggctcacgcctgtaatcccagcactttggcaggccgaggcaggtggatcacctgacgtcagtagtttgagaccagcctggccaacatggtgaaaccctgtatctactaaaaatacaaaaattagccggacgtggtggtgcgcgcatgtaatcccagctactcgggaggctgaggcggaagaatcacttgaacccgggaggcggaggttccagtgagccgagatggcgctattgcactccagtctgggtaacagggagactgcatctcaaaaaaaaaaaaaaaaaaaaaaaagggctgtccatgtattcacacacccctcaaaaaaagcctttagttcctactttagccactggtttctcagaatccaaagatcacatattctagtgtaacactgcaagaagtcttgagaaaaagattattgtagtgttcaaaatatttttgtattgttaatgcatcatcatagaaaaacttttaaacatgagaataaagatactttttactgggtttgtttttcaaagcctgaaaaaaa

SEQ ID NO: 224791 - DNA, 1000 bp, Homo Sapiens
ataaattctacacaaggctttcaagaccatcagagagcaaaaccacatgttctgtcttgaggagccatagcagaaagagcaaattagtcattatttactgaacatgatgatttactaaatctctccatctgcattagtattttaaggagcactgtgagagaaatcacaaagtattagagtttaccatgattcagagaagttcttcaggcctgtagaaagaggagtatggaacaaccttacatttgttgaaataacttgaaaaggaaccatttcttgaagaaactgaagtaatagcaataagatttgatgtgtgagtagctttgatttaaaatcaatgcaaaaagcacaactaataaattgaatgtttccatgtacctcactttatttcagttaacaagatactttgacttgaagtgtttttagtgtatccctatgaaaatcatttttggtacatctaagttttcacttataaactgttatttcaaagcaaacatactagtgatatatatatgatttatggatgttgacgccaatgttcagtttgggtacgttggtgtattgcaaggggagaggcttttataacaatagatttgaacatttttaaaaaattggactgtgtaacttaaatacacaattatttggtttaggatggttattagggcccattagaaacaggagaagtattttacccattcttaaagctctaaaaaaccatctcatggactgaaaggtagatagacagatggaccacaatgggaaataggatgtccatttgtacttctttgtacttttttgttaataaactgttttggaattaatggcttaatttgtgatatcatgttctagaaatacctgcaacatgacagtctaatcagtagtctattaaaacttgtattcataatgtgtataatttcctggtaaggctaactcctgatcgtttctgtagaaagatgacaaataaagaaaaagttataattattaattaaaaaaaaaaaaaaaa

SEQ ID NO: 224792 - DNA, 1000 bp, Homo Sapiens
ggcccgtggccaggagagcaggtggcccactggcccggggccgtccctcactggtccgccaggacgcctacaccaggagcgactcagagccctccaagcactcggccgagtgtgacccgcggttcccgtcagtcatcccggagaccagcgagggagagtccagtgaccacaccaccaaccgattcggagaccgtgagtccagcagcagcgacgaggagggcggcgcccagagcagggactgtgacctggcactgggctatgtggcggccgggcatgaggagctggcctggacccaggaggccccggtcagctcggggccactcctgtcccccgtgcccaagctgtgccgtattaaggcctccaaggccctgaagaagaagatccgcaggttccagccgacggccctgaaggtcatgaccatggtgtgaggtgcagtgactgcgtcaagagaagcctgctgcacacaggggccctttccatgcagtgtcctgtgcatgtctgggtttcagtgtcgtcttgccaagtcgctttatcttccgaggccaccgtttaacaggagtccccgcagatgggttctgccctgtggagtatggccgtgagtccccgccccagcaaagacttccatgcggagctctggtttcagatgccagcagcctccccggccgacctagtgtctcttttcaaggtctgcccaggatgctgcttcccggcatgcaccttgtttccatgttgtcatcctcccatggcttcccctgccctcactcccctctggctggggaagtgtttcccaatcctttgaccattcctccccaaaagcattttaaaaaggcggttgcaggactttgagctggaaattgaatttgagtttaaactccacgttaagctgtcagcatacacaaacacccaaattatgccatgatctcaaataaaaggaacattttttttccctcttttaaaaaaaaaaaaaaaaaaaaaaaaaaaaaaaaaaaaaaaaaaaaaa

SEQ ID NO: 224793 - DNA, 1000 bp, Homo Sapiens
tgaatgactaactgcttttctacttcgggggtctcatatagaaatcctgcttcagaatactcttccctgagcactctatctaaataaatccctcttctgcaacccagtgctttttgttctattactgacttcttttccttgtagaagttactattactgctttttacctttttatttatttgtgtattgtctttgttgttgccctcatcttatctccacaaaaatatatgctccataaaaacaggcatttctgtgtcttattcagcactttatcagggcctataacaatgcctgggacatattcagtgaccagtgaatatttttggaaggaaagaaaagaggaaagaatgaagtaacaaacaaagaatgaaggaagaaaaaatttttacaaacattcaacatatttttattttgaaataattttgtatttttccctatatcctacattggatcagaatattactgttatgtatagccatgaggacatggtctcaaaaaatgagaaactttcttagacagtaaaattgttaacttgagatgtttgcttccatcttctagagccaagtaggatctaactttaatttgacttagccaataatctgaaactattatagtatctgtctttcacagatacatgcaatattcacttctaaatatttaatgataaatttgtaatcatacatgatagtcaattttaatgattatgttgtcaaaattcaggctttttgtgtgaattgaagacttaaagaagaatttgtaaatatgactgtataagaaacaacagaaagatgaagatgaaccgaaatagaaatatcaagaggctacaaagtcttagcaaattataattgctaatggtacattatgtggtgtttagtatcacatttagaatgtagtcatttgttaagtttttcatggggtaaaagaaagaatttattccaagaaaattctggaattttaaaaataaacatgacatcttatcatgaaaaaaaaaaaaaaaaaa

SEQ ID NO: 224794 - DNA, 1000 bp, Homo Sapiens
agattggatggccacaatacattctcctacgtctccatatttgtccccctttggctttccttactaactttaatggccacaacatttaggcgaaaggggggcaatcattggtggtttggcattcgcagagacttctgtcagtttctgcttgaaattttcccatttttaagagaatatgggaacatttcatatgatctccatcacgaagatagtgaagatgctgaagaaacatcagttccagaagctccgaaaattgctccaatatttggaaagaaggccagagtagttataacccagagccctgggaaatacgttcccccccctcccaagttaaatattgatatgccagattaaactcctagagaggacccaggcacacacagactccacttggccttcgcctcttgttcattcatcccaaacctggaaatggaaacaggcttcaaacactcgtctcacgccgtgtttgagatcaccgcctcatcagtatgcatcatagatggaggtggtttcagtatgtgggtgtgtgtgatgtgtacctgggtaagagacttgctttccaggttcgcactttcaggtgtagctgggggcagtaagtcgaattgttttagtaggtcctcaaaaggaataaccacacagctgtttgtttaaatgctactgtacctatcaaaactattgtttaaaaagtatttttatacactgctaatctaaaattgtatttcagattgtgcctgtcataacaatagcaaatgtaaaaagttctctttcccaccacttgtttataaacctcatagttgatatttttagtgttcctactgttaaaatactctctccttgggctttgctgatactggtctttaatattctgataggtgaatttttctaatggaatgaacccatgcatatatagtatttatatgaatattttagcagtgtaatatgttgaattctagttctctgcattaccattattacgttaaagtattttttaaagcttagg

SEQ ID NO: 224795 - DNA, 1000 bp, Homo Sapiens
ctctgattcaactctgatttgaccctagcttgtcaccctgacaccgactccacagcctttggtccttggcactctgatcccgacccttggccctcttccactgggaagtagcaatgggtggaccgctgggctgtggtctgggtggtctatagctgtggcctgaccgcacactgcaacaactttcaatgccccaatttacaaccttggtgtgttgcctcctcacccctggcacaatgagactttgatcccatgcctaatctggtgtgctctggacttgcaggatccctggagttgcagctaccagacatggtgcgtggggcccggggccccgagctctgctctgtgcagctggcccgcaatggggccgggccgaggtgcaatctgtttcgctgccgccgcctgaggggctggtggccggtagtgaagctgaaggaggcagaggacgtggagcgggaggcgcaggaggctcaggctggcaagaagaagcgaaagcagaggaggaggaagggccggccagaagacctggagttcacagacatgggtggcaatgtgtacatcctcacgggcaaggtggaggcagagtttgagctgctgactgtggaggaggccgagaaacggccagtggggaaggggcggaagcagccagagcctctggagaaacccagccgccccaaaacttccttcaactggtttgtgaacccgctgaaggcctttgtcttcttcatctggcgccggtactggcgcaccctggtgctgctgctactggtgctgctcaccgtcttcctcctcctggtcttctacaccatccctggccagatcagccaggtcatcttccgtcccctccacaagtgactctcgctgaccttggacactcacccagggtgccaacccttcaatgcctgctcctggaagtctttcttacccatgtgagctaccccagagtctagtgcttcctctgaataaacctatcacagccactgaaaaaaaaaaaaaaaaaaaa

SEQ ID NO: 224796 - DNA, 1000 bp, Homo Sapiens
tctgttaatcataatctggtcactgggatgttcaaccttaaactaagttttgaaagtaaggttatttaaaagatttatcagtagtatcctaaatgcaaacattttcatttaaatgtcaagcccatgtttgtttttatcattaacagaaaatatattcatgtcattcttaattgcaggttttggcttgttcattataatgttcataaacacctttgattcaactgttagaaatgtgggctaaacacaaatttctataatatttttgtagttaaaaattagaaggactactaacctccagttatatcatggattgtctggcaacgttttttaaaagatttagaaactggtactttcccccaggtaacgattttctgttcaggcaacttcagtttaaaattaatacttttatttgactcttaaagggaaactgaaaggctatgaagctgaatttttttaatgaaatatttttaacagttagcagggtaaataacatctgacagctaatgagatattttttccatacaagataaaaagatttaatcaaaaaatttcatatttgaaatgaagtcccaaatctaggttcaagttcaatagcttagccacataatacggttgtgcgagcagagaatctacctttccacttctaagcctgtttcttcctccatatggggataatactttacaaggttgttgtgaggcttagatgagatagagaattattccataagataatcaagtgctacattaatgttatagttagattaatccaagaactagtcaccctactttattagagaagagaaaagctaatgatttgatttgcagaatatttaaggtttggatttctatgcagtttttctaaataaccatcacttacaaatatgtaaccaaacgtaattgttagtatatttaatgtaaacttgttttaacaactcttctcaacattttgtccaggttattcactgtaaccaaataaatctcatgagtctttagttgattt

SEQ ID NO: 224797 - DNA, 1000 bp, Homo Sapiens; identical to SEQ ID NO: 119150

SEQ ID NO: 224798 - DNA, 200 bp, Homo Sapiens
ggccgggcgcggtggctcacgcctgtaatcccagctctcagggaggctaagaggcgggaggatagcttgagcccaggagttcgagacctgcctgggcaatatagcgagaccccgttctccagaaaaaggaaaaaaaaaaacaaaagacaaaaaaaaaataagcgtaacttccctcaaagcaacaaccccccccccccttt

SEQ ID NO: 224799 - DNA, 1000 bp, Homo Sapiens
cgtgtcagcttctcaggttgatgtagctgtgaaaattaataagaaagttgtgcccctgaacttttctgagttctttagctaaacgaataaagcagttacatcatgaagcacagcaaagtgaaggggaacagaattacaggaagtttagggcaaggatttgtcctggagaaaatcaagcagccgaagatgaactaagaaaagagataagtaaaacgatgtttgcagaaatggaaatcattggtcagtttaacctgggatttataataaccaaactgaatgaggatatcttcatagtggaccagcatgccacggacgagaagtataacttcgagatgctgcagcagcacaccgtgctccaggggcagaggctcatagcacctcagactctcaacttaactgctgttaatgaagctgttctgatagaaaatctggaaatatttagaaagaatggcttcgattttgttatcgatgaaaatgctccagtcactgaaagggctaaactgatttccttgccaactagtaaaagctggaccttcggaccccaggacgtcgatgaactgatcttcatgctgagcgacagccctggggtcatgtgccggccttcccgagtcaagcagatgtttgcctccagagcctgccggaagtcggtgatgattgggactgctcttaacacaagcgagatgaagaaactgatcacccacatgggggagatggaccacccctggaactgtccccatggaaggccaaccatgagacacatcgccaacctgggtgtcatttctcagaactgaccgtagtcactgtatggaataattggttttatcgcagatttttatgttttgaaagacagagtcttcactaaccttttttgttttaaaatgaaacctgctacttaaaaaaaatacacatcacacccatttaaaagtgatcttgagaaccttttcaaaccagatggagcattgcttgcaaattttttttctctatgtttgcatgcgctcgt

SEQ ID NO: 224800 - DNA, 1000 bp, Homo Sapiens
gtagctaggattacaagtgcccaccaccacgcccagttaatttttgtattttttagtagagccggggtttcaccatgttggccagactgttctcaaactcctgacctygtgatccacccacctcagccttccaaagtgctgggattacaggcgtgagccaccgcgcccagccaacatgtacatgtctttagaaaagatgcaaaagagtagtgccacatgattccattaagttctagaacagccaaaattaatccatggtagaagatatcagaacagaggagggacgatgatgactgggacaagatagggtgttgtttcttgagtgatgagactgttctatctcttggtagggctgttcgtaacacaggtgtcaaaattcaagaactgtaaacacttaagacctgtgcattccactgaatataaaccatacctcaattaaaaagaggaaaaattaagaaatttttaagcatgaacattgaacaataaataaatatataacattaatgagtgtcccataaattagttagtgttaattagaaaaccccactgtgttttctcagaatttatagtaaccataatcacaataatagctacaaactttctcacctttaaatgtcatcacaactttaggaaacaggttatatcttatattattattattattattattattattattattattattttacattttaacatctctgaaacagggatgtgtcctacaatcaccatcagccaggaagtggtcaggatgcagtggttataactggattattttccctggcctggctgaccatctgcaaccccctggtgtttcaatgtacaaactattttaggaccatctgcgtactggctgttgcctgaaaatcttgtgttgatgtggatttgtaagactgggaaagcaccagcattcaaaacttgaagaaaggtgttagcagtttggcagacaatcctacagaaaactctttattcttgggggagaaaaagttgcctccca

SEQ ID NO: 224801 - DNA, 1000 bp, Homo Sapiens
gggggggcaggaattgcattcagtgaatttacaagataccaggaaacccatctgttggaggaaggtaatgaaggagattatcttatcctacttattattttacttccttattctgtgggacagaagaatctcttgagtcctctaaaaaactatatgctgatagcaggagttacagaacaattcagtagtgtctggaatagaacagtggtttgaaaagtagagggcttgttaaagcacgggatgctgattcagtaggccttgagtggggataatttacatatccaacaggccaggtgatgccctggcttggggatcacattttgtgactgatgcagagtactgatggtcatccagtccccttccttcggtgtttgagaccacttcatctggaccgagctaaagtctaggaagaaataaagtttcaaacccagtagagttacctcaaagatacacttgagacccttttcagaagatggcaccgaaagtgaagaaggaagctcctggcccgcctaaagctgaagccaaagcaaaggctttaaaggccaagaaggtagtgttgaaaggtgtccacggccacaaaaaaaagaagatccgcatgtcacccaccttccagcggcccaagacactgagactctggaggccgcccagatatcctcggaagaccacccccaggagaaacaagcttgaccactatgctatcatcaagtttcctctgaccactgagtttgctatgaagaagataaaagacaacaacacccttgtgttcactgtggatgttaaagccaacaagcaccagatcaaacaggctgtgaagaagctctgtgacattgatggggccaaggtcaacaccctgatggagagatgaaggcatatgttccactggctcctgattatgatgctttggatgttgccaacaaaattgggatcatccaaactgagtccatctggctaattctaaatatacatatctcttttcaccaaaaaaaaaaaaaaaaaaaaa

SEQ ID NO: 224802 - DNA, 1000 bp, Homo Sapiens
cgagctccagccgaaggagaaggggggtaagtaaggaggtctctgtaccatggctcgtacaaagcagactgcccgcaaatcgaccggtggtaaagcacccaggaagcaactggctacaaaagccgctcgcaagagtgcgccctctactggaggggtgaagaaacctcatcgttacaggcctggtactgtggcgctccgtgaaattagacgttatcagaagtccactgaacttctgattcgcaaacttcccttccagcgtctggtgcgagaaattgctcaggactttaaaacagatctgcgcttccagagcgcagctatcggtgctttgcaggaggcaagtgaggcctatctggttggcctttttgaagacaccaacctgtgtgctatccatgccaaacgtgtaacaattatgccaaaagacatccagctagcacgccgcatacgtggagaacgtgcttaagaatccactatgatgggaaacatttcattctcaaaaaaaaaaaaaaaatttctcttcttcctgttattggtagttctgaacgttagatattttttttccatggggtcaaaaggtacctaagtatatgattgcgagtggaaaaataggggacagaaatcaggtattggcagtttttccattttcatttgtgtgtgaatttttaatataaatgcggagacgtaaagcattaatgcaagttaaaatgtttcagtgaacaagtttcagcggttcaactttataataattataaataaacctgttaaatttttctggacaatgccagcatttggatttttttaaaacaagtaaatttcttattgatggcaactaaatggtgtttgtagcatttttatcatacagtagattccatccattcactatacttttctaactgagttgtcctacatgcaagtacatgtttttaatgttgtctgtcttctgtgctgttcctgtaagtttgctattaaaatacattaaactataaaaaaaaaaaaaagaaaa

SEQ ID NO: 224803 - DNA, 1000 bp, Homo Sapiens
ttattttcatcctggagatccttcttaagtggctatccaacttttctgttttctggaagagtgcctggaatgtctttgactttgttgttaccatgttggtaaggatagagatcctgagggttcgtttagtgggatgaagaatgtgcctaggtgaatcgaaagaacaagttaacatgataataggaagaaacaaaaatttacttaacttctttcttttgatttttttttcctaaaactaaacatcaatcattgcaggagttgttggtattaggagcaaagtagactaactacaacatcaatgccaacaagagcatctgccggttactgagcacttactaagtgccaagcactattttaagtgttttccttacattatctcatttatgctccacaacaacctaattaaataaccatgaattttatccccctttttatatctgaacaagttgaagtatagtgtttaagcaacttaatatagaaaggctgaatagtaagcacttctcagagaatgctattcaaaggataacgcccagggaacaatgaagaggataagatgaagaagctgcaattctgcctgggtgccttggggtgtattttacttataacctgtgtgttttccacagtccctgcttcccgaggttgtggtattggtaggggtaacaggccaatcggtgtggcttcagcttctgaggatctgccgggtgctgaggtctctcaaactccttgcacaattccgtcaaattcgagttattattttggtcctggtcagggccctcaaggtgatttgactgttgcaagctaaagcagggggcaaggtagataaatgtgagggcttaacatagaatatgaaacaaattggccgggtgcggtggctcatgcctgtaatcccagcactttgggaggccgagggggatgggtcatgaggtcaggagttcgagaccagcctgaccaacatggtgaaaccctgtctctactaaaaataccaaaaaaaaaaaaaaaa

SEQ ID NO: 224804 - DNA, 1000 bp, Homo Sapiens
aagctttttcatatctgttcttatcctggacatcagtagtttttaattgcccagcatccgttccatcttgtaacaactccctgatgtttcttaaaaccacctcttcctattttcagtctgtggtttggacagtctgacccaaccttgagctttgtgggtgaacatgtaattcagacctcatcaatcagcaaatccatctgaactgtggaggagaagctctctttactgagggtgctttagctttgtaggatgaaaacctcaaactaacagggcctaccatgtagagaatgaagccagtgcaggggaaagcagagccaaaatatggagagacttgaatcctgatgacagcgtttgtgcccctggatccaaccgtgcctgaagctagaatatcccctggacttttcagttatgtgaaccaataaatacccttttttgcttaagttactttgagttgggtttctgttacttgaaattgaatccacactaatatatctaccaacattgagacttgacagatccaagtatttattaagctagaggtcatggtcactgaaattactttccaaagtggaagacaaaatgaaacaggaactgagggaatatttaagatcccacagaagcgtaaaaatgacatggtagaaagtaatagaaaacctaaatgtctgtcattaaaggataggttaaggtgtggttcagccatataggaatatctcgtatctgttaaaatgaataaagtacattcattgtgtatggaaaaatggccatgatacattaggtgaaacaagttattaatagaaaagtgtacagtgtgaactcattttaaaatgtgtgtgcttatgtttataaatgcatagaaaggtctattcacagctttctttgaacagtgtagatcacatgaaactttcaactttatacatttctgtattaatattttacactacccacattatttttaaactttattttaaataaagaatttttaaaattaaaaaaaaaaaaa

SEQ ID NO: 224805 - DNA, 1000 bp, Homo Sapiens
cctctttctgctgccactgactgccatggccatctgctatagccgcattgtcctcagtgtgtccaggccccagacaaggaaggggagccatggtgagactccaattcccaggccttaatccttaaccctagacctgttgcctctagcatcatttatttatctacctacctaatagctatctaccagtcactaaaccatggtgagattctaaccatgtctagcacctgatgctagagataattttgttgaatcccttcaattataaacagctgagttagctggacaaggactagggaggcaatcagtattatttattcttgaacaccatcaagtctagacttggtggcttcatatttctatcataatccctgggggtaagaaatcatatagtcccaggttgggaaggggaaaacggtttgcaacattctcctccttgtaggaggcgagctctgtctcactagctatgcccctccatcaattcaccctatactcagatcagaagctgagtgtctgaattacagtatattttctaaattcctagcccctgctggtgaatttgccctcccccgctcctttgacaattgtccccgtgttcgtctccgggccctgagactggccctgcttatcttgctgaccttcatcctctgctggacaccttattacctactgggtatgtggtactggttctcccccaccatgctaactgaagtccctcccagcctgagccacatccttttcctcttgggcctcctcaatgctcctttggatcctctcctctatggggccttcacccttggctgccgaagagggcaccaagaacttagtatagactcttctaaagaagggtctgggagaatgctccaagaggagattcatgcctttagacagctggaagtacaaaaaactgtgacatcaagaagggcaggagaaacaaaaggcatttctataacatctatctgatcctaacagagtatgtaggaacagaatagtaagtctttag

SEQ ID NO: 224806 - DNA, 1000 bp, Homo Sapiens; identical to SEQ ID NO: 119159

SEQ ID NO: 224807 - DNA, 993 bp, Homo Sapiens; identical to SEQ ID NO: 119160

SEQ ID NO: 224808 - DNA, 1000 bp, Homo Sapiens
cagcttcgcccgcaccgtgctctggaatcccgaggacctgatccccctacccatccccaagcaggacgcagtgccccccgtgcccgcggccctgcaatccatgcccaccctggacccccggctgcaccgcgctgccacggcagggccccccaacgcccggcagcgcccgggcgcctccacggattccagcacacagggcgccaacctccccgactttgaacttctgtctcgcatcctcaagacagtcaatgccaccggctcctcggccgcccccggttccagcgacaaacccagtgacccccgggtgcggaaggcccccaccgaccctcggctgcagaaacccacagactctacggcctcctcccgggctgccaagcccggccctgctgaggcgccctctcccaccgccagcccgagtggggatgcctccccaccagccaccgctccctacgacccccgcgtgctggcggccggtggactgggccagggcggagggggcgggcagagcagtgtgctgagcggtatcagcctctacgacccgaggactcccaacgcggggggcaaagccacagagccggctgctgacacgggtgcccagcccaagggtgctgagggcaatggcaagagctcggcctccaaggctaaggagcccccgttcgtccgcaagtctgccctggaacagccagagacagggaaggccggtgctgatgggggcacccccacggacagatacaacagctacaaccggccccggcccaaggctgctgcagcccccgctgccaccaccgccaccccaccccccgagggtgccccaccccagcccggggtgcacaacctgcccgtgcccaccctcttcgggacggtgaagcagacacccaagacgggctcaggaagcccatttgctgggaacagtccggcccgcgagggtgagcaggatgcggcatccctgaaggatgtttttaaaggcttcgaccccacggcctcccccttttgccagtag

SEQ ID NO: 224809 - DNA, 1000 bp, Homo Sapiens
tgaggagggccagcctgtgcttgtgtcagtgccaatgcgtctcccactgcccccggcccaggtccactccagcctctccgcaggggagaagcccggcttcctggccccccgggacctccccaagcacacccctctcatctccaagagccagtctctgcgcagcgttcgccgctcagagagttgggcccggccacggccggacgaagagcggcccctgcggcggccccggccggtgcagcgcacgcagagtgtcccggtccggcgtcctgcccgccgccgccaatctgcggggccctggccgcgacccaaaggctccctgagcatgggaccagcgccccgcgcccggccttggacccgggactccgcctcgctgcctcggaagccgtcggtaccctggcagcgccaaatggaccagccgcaagaccgaaaccaggcactgggcacgcaccgacctgtgaacaagttggcagagctgcagtgcgaggtggccgctctgcgtgaggagcagaaagtgctgtcccgcctcgtggagtcgctgagcacccaaatccgggccttgacggagcagcaggagcagctgcggggccagctgcaggatctggactccaggctccgtgctgggagctcagagtttgattcagagcacaacctaacaagcaatgaagggcacagtctgaaaaacctggagcaccgcctaaatgagatggagagaactcaggctcagctgagggatgctgtccagagcctgcagctttctccaaggacgcgggggtcttggagtcaaccccagcccctcaaagcaccctgcctcaatggagacaccacctgagctgcccatcctgcctcatcacacgtggtctgggagcagagagatagccatcttagggggggtgtctgactttgccttagccctacttggcctacagtggggagtggagctgctggtcccaaccactctggcagtatgaagttgcccagtaaaatcttgatttcagtgaaa

SEQ ID NO: 224810 - DNA, 1000 bp, Homo Sapiens
accctatgaatgtagtgaatgtgggaaggcttttcatcagatcttgtccctaagactacaccagagaattcacgctggagaaaaaccttataaatgtaacgaatgtgggaataattttagctgtgtctcagcccttagacgacatcagagaattcataatagagaaacgctctgattataacaagtataggaaagaaaacatgtggttaccactcaatccttattaaatattagtgagttctttttggttagtaattctttgaatgtagttcatatttcagttcatgagtatccgttatttgaagtagctcagtagtagacatctgttacttttttttttttcagacagagtctcgctctgttgcccaggctggagtgcagtggtgtaatcttggctcactgcagcctctgcctcctgggttcaagcaatcctcctgcctcagcctcctgagtagctgggattacaggtgcctgccaccatacctggctaatttttgtatttttagtagagacggggtttcaccacattggtcaggctgatctcgaactcctgactttaggtgatccacacgcctcagacttcccaaagtgctgagattatagggatgagtcactgtgcacagctactaattgatttttgatctatgtatggcacctgatttcatcctcgagagtgacgtaaacctaagctactggttcattctctgtttatatagttaaacttcacttgtaatgttgataaaatcttttgtacccatgtgtttagcttcagtgtattttacaatctgatgtttctcctcacaatgaagtactaaattttgtttcttttcaactgtacaacccattgtcttgtgatatattgacctgatctcttaggattagtgaaaatttatgctttattaatatttgattgttattaggaccatctagagatttctgtttatgtgtgtgtatgtgcatctgaagatgtgtattttatttaaattttttgtattaagtg

SEQ ID NO: 224811 - DNA, 1000 bp, Homo Sapiens
ctcgacatggcacggccaggttggactcaagtccttctgagtttgcagctggccaagaagcagcgagagaggtccctgacccccaacaaagggtcagcgtggaaacctccccaccccagacagctgcccaggaccctcagggacagggcagagtgcgcactggcatggccaggtccgaagaccctgctgtgcttttgggatgtcaggattcccccaggctgaaggctgtccggccaacctctcctccccaggaccacagacccacctgccccggcctggggaccaaggacgccttgggtctccctggagagtctcctgtcaaggagtcacatgggctggctaaggggtcaagtgaggagacggaactccctggcatggtctatgtcgtgggttcccaccacaggctgaggccctggaggctgtcccagagccctgtcccttcctcgggccttctcagcccaggagggagaggaccccagggagctcttcagtctccatctgctcagaaaagaggcctcagcccatcaccttctcctgccagcaagtccaagaagcgacctctctttggaagcccatcccctgctgaaaagacaccgcacccagggcctgggctcagggtctctggggagcaatccctggcttgggggctgggtggcccctcacagtctcaaaagagaaagggtgaccccttggcctccaggaggaagaagaagcggcattgtagccagtaggggccgccatggggcagactctctgatgccagtccccaaaagtggggctctgaagtctcggaccctcatggcacccggtgccccaaagcaaaggctgcttctcctccagtgctgatcttgctgggccttagctttggagggtaggggaaggaggggagggagaaggtggctgaacggggagggcaggaagggagggcctggggggtgggaagcagtgccttgggggccttgtgtgtaaatgtgaataaatgtagttgttttggaaaatg

SEQ ID NO: 224812 - DNA, 1000 bp, Homo Sapiens; identical to SEQ ID NO: 119162

SEQ ID NO: 224813 - DNA, 1000 bp, Homo Sapiens
attacacatccaggccaggcacagtggctcacacctgtaatcccagcactttgggaggccagtgcgggcggatcatgaggtcaggagtttgagaccagcctggccaatgtggtgaaaccctgtctcttccaaaaatacaaaaattagctgggcgtggtggcacacgcctgtaatcccagctacttgggaggctgaggcaggagaatcgcttgaacctgggaggcagaggttgcagtgagccgagattgcgccaccgcactccagcctgggtgacagagtgagactccgtctcaaaaaacaaaaaggtgacacatccagctctttctccaggtcactgcgctggaggacagatgtgccgtcttgtcctgcctgtttcacatcagcataggatcaaaggatgacaatgctgacagcttctgaagccgaactcaacagtctcataggctcctcacttgtcacttatttttccctagctccctcaaccgcaccccatccctttagatcgtgcgtctgttttagtgactctgacacgatgccgtcctcaccttccaaatacccagttatttattcaagaggggggaagtgggtagaggatgggatgttttggaagcactttgcaagttaccactatctgaaaatcccctgctgttgcggggagaagctttgaatgcactgaagagaattccttctaaatgaaggcaggtgatagtgttctttctgtaagtaaagggaaagaaaaaaaacatagtttgcttaccaggtggagacaagattcaagacatagcagaagagtggaagacaaatattttccacttaaatgaggctgtttttgacgttctctgccaaggatttagagctttcgttgaactaacataaaaggagtgcgagtcttagtagagatgttccgtgtgtgccgcccgtgctctgaactgcgtttccacctgctgtggtgcttgtgcagcctggcagttcattgtcatctttaataaactaaggaaat

SEQ ID NO: 224814 - DNA, 1000 bp, Homo Sapiens
tcttttctctttacttaaaaaaggggagaggagggtttctagattccatcttcaaaccccagtcgtcccataaaattggacgtgggaaaagaccttcactgcctgcgtggcctttcccagacctctcctcgaatgccacaaaaccggtccagccccggcagagccgccttcggcccttgtagctcctgctggccccacaacagggaaacagtttgcaaagtggcttggaaggagtgtggcctagggatctgctgtaagtggccagacgtagcaggagagcccagtgtcaccttctggtcctggtcagccttaacactgtggcatcctccacagcacacacggcagcctgcagtctggaaggtggacccgagcctttgcagagaggcgccgcagagccgcaggcctgcgccccagccttctgctcccgactgtgaggacacccagttctagtagagcactttttttaaagctcccattttgtaaccactagtttgcggttgacttgagtactctggtgacttcctgcgtcaagcgttctcaagctgtgagaatgtgcgcagctccaggcaggttttctctcggagagttaagtcttcccttgaaggcagggaagcaggatggatacacatatatcacacgcataaaacaccaggtgcgggagcagcccagactcaaggctgactaaactggaggctgaataccgtggaggtccacatgcagcttccctggagggcaggccggaggcgctcccgcccctgggcttgaggatgctgcaccccgtgggcttccaggcctgcccagatgatgccttcaggcctctgtccctggcggccatcctcaggccgattttgaccagcaatgatagactcttcttaaccctttcaaaataaatttttcagtgggacagaaaggagagttaaaaaacatttttttaaaggtggtaacatctgacccacaaagggaatgggtctgttttatgcaaaataaaagtttttcaaat

SEQ ID NO: 224815 - DNA, 1000 bp, Homo Sapiens
aacccaattctgacataccaaagaacagctctacaaaatctctagactcctttcggagtcaagttctgcctcaggaaggtccagtgaaagagagccattctacaactactgaaaaagctaatattgctttatctgcaggagacatagatgattgtgacacactggcacaaacccgcatgtatgaccatcggccttcaaaaaccctgtctccaatatatgagatggatgtaatagaagcatttgagcagaaagtggaatcagaaacacatgttacagatatggattttgaagatgaccaacattttgcaaaacaagattggacactactaaagcaactgctctctgaacaggattcaaacttagatgttacaaattccgttcctgaagacttaagtttagcacagtatctaatcaatcagacactacttttagcacgagatagctcaaaacctcagggtataacacatattgacactttgaacagatggagtgaactaacatctccacttgattcctcagcgagcatcaccatggctagtttttcctctgaagattgttcgcctcaaggcgagtggacaattctggaactggaaactcagcattaagtgttaacattttggaaaaatttatgccactcctttattttttgatgcctatattatatccaaatgataattgcattagccggatataaactttctttaatattgagtctttccaatttaatgaggtaaacatagtttatttattaatatatcacatatagaaaaatgtttttctaaagtttttgagcatgttttctctaattattagagaaattagaagacttataaggaaaccctagcttcagttttcctttcctagctgatgatttgttcacttaatcattattcaagaatttaaaatgtgaatgcagaagtagatcagtccctttactttttgctctgcatagggtaacatagtaatttaacaataaaaacttaccgtgcttgtgtccatt

SEQ ID NO: 224816 - DNA, 1000 bp, Homo Sapiens
aaaacaaatgatggcaagttctcaagttaactaaatggaatcaaccattaccaggcaaattcttgcaaataccaaaatactactatgccttataaaacaaaatgaaagcaggttaagattttctgctctgtttgtatgttaatagaaatggaaatactaagtattttaatgcttagctcttgaacagtagacctaaaagggttttaagctatttaaatctacttgctagtttttgcatattttatatatatatatatttatatatatatatagtgagaagtgaagaaaatgtatggtactaagattatgccttattgataaatagataaaccaatttgaatcctcttagcatgtttaagtatgttgattgctttctaattaatgaacttctcacagaaatttcacttagtgaaaccaatgattgtagcaaactcatactggatcatttcagttaccttgaactaatagcacataatggttttttgttgttgttgtttttaatgtagcccttacctggatatacatagtctgcaatcaccaaagtataatatcttgtaaggctatattttttaaagcatattttttcttgagcattaaattatcctaaatggtaatatattgtggataagtctgggcttattggacataatacatatttgggttggtactggttgaatccttcagttaactgctttgttgctttttgcaagattttttatcttaaacatgtcaggcatcttaagtcacctttatactgttttgttcctctgagtttctttcagtatgttatacaaatgccagacataacatgtagcagccatacttgcatggaaactgactacacatacataatactgcattttattgtaaggttttcacattaatacagcaattaccctgactaaattgagttttgtgatatatggaaaacttcattgtaagagaatcttgcatacaatgttgacatattaacatccaaaataaagcatctgtgtacaag

SEQ ID NO: 224817 - DNA, 1000 bp, Homo Sapiens
gagggggaagaccccagcgcgtagggcccagggcgacagcctgctggggctcggggacccctccctgctgaccccgccgccgggagccaagccgcacaagtgtctcgtgtgcggaaagggcttcaacgacgagggcatcttcatgcaacatcagaggatccacatcggagaaaacccctacaaaaatgcagacggcctcatcgcacacgcagcccccaaacctcctcagttacgatccccaaggctccctttcagagggaattcctaccccggggctgcggagggcagagcggaggcccccggacagccccttaagccgccggagggtcaggagggcttcagccagaggcgggggctgctgtcctccaagacctacatctgctcccactgcggagagagcttcctggatcgctctgtgctcctccagcatcagctcacccacggcaacgaaaagccctttctctttcctgattatagaattggcctaggggaaggcgcagggcccagccccttcttaagtgggaagccctttaaatgccctgaatgcaaacaaagctttggcctcagctctgagctgctgctgcaccagaaagtccatgcaggcgggaagagctcccagaagagtccagagctggggaagagctcttccgtcctcctggagcatctcaggagccccctgggggccagaccctaccgctgctcagattgcagggcctccttcctcgaccgcgtggccctcacccggcaccaagaaacccacacccaggaaaaaccccccaatcccgaggacccccctccagaggcagtcaccctgtccacagatcaggaaggtgagggcgagacccctacccccacagagagcagcagccatggggaagggcaaaaccccaaaaccctagtggaagaaaagccctatctgtgccccgagtgtggagccggcttcacagaagtcgcagccctcctgctccataggagctgccacccaggtgtctccctgtga

SEQ ID NO: 224818 - DNA, 1000 bp, Homo Sapiens
aaggggcttgaggcttaatgcccatcctgtggccaagctgagcttccactccgggaccaaaaaaaaaaaaaagtctgctttgtgacatcatcgttatgagcggaaagtacctagatgacaatgtttccattctgaaaaatagaaacatactattcaagaccaaggtagcagaaaagttacttgtatctgcttatcataagacgaaactctgcaacttggcaacggtggccagttttcgtaatgaaacagtctttagtaatttaatcttcatgcttcataacaaaccaaaaccccatgagatttccacattgcataattttgccttactaacagaatcatatccttaaggatgaccatcattcccccaactaaaacaaatacaaactaatgtatgatatttttttaagtgccagatcaatatggtctaaagcttcaataaggattgtgtgtaggtgaataaagacagctaagtgaatgtgtgtaaagtgtagcaaaagcagacagatatttatgtacagtattcatagaatggaaagttaaatatttttgcagtgtgtatttaaaagagaaactcaccataatagtgccgtctaaaaatctttgtaaagttaatttaatgtcctttagaagtgggagtctggtggaactgtgttggatttaagataccttttcactcttccgtatgtcatgagccttgtgcgtcacctcactgtggtgcatgtgcaagggcgtgtgcacgcctgtgctttgccatcccatgttgtaaacagctgttccaaaggcacaaacgagtttagggtagactctgtaaacacctccttactcactatagtcaagaagtccagcggcgtcccaatatagaggtcccagtgcagtctgtccagaatagccagctccatcctcagcagctcattcggggaatagtcagagccatagtgctttgtgaagtcttttacttgtggaataaactgtaaaaagaaaataaagaggccaaagccct

SEQ ID NO: 224819 - DNA, 1000 bp, Homo Sapiens
caagaactggaccttccccaatactagggcagccggcagctcctcggaccctctcatgtgcccaccccgacaactggaggggctgcccaggacccccatggccctgcccgtggaccggaagcgaagccaggagcccagccgcccgtcccctacgccccagggcccacctttcgggggtagccgcacccccagcacttcggacatggccgaggaaggcagagtggccagcgggggccccccagggctggagacctcggagtctctcagtgactcactctacgactcgctgtcctcttgtgggagtcagggctgaggggctgcgccacgccacggccccgctggagctggggaccacagactggaccggctctcttcatgcccagcccccggagacggggacccctccctgaagggaccaaggaggcaggtggataagaaggtgaaaagggggtccctggcacaccccaccacccactgcttcggcggatgagatgaccgtgctcagctcagggagagaccccgcccttggtcccttctctcacccagagtaaggctcttcctggaagggactgggggttaaaggccactgtgtcgcagccctccagtccctacttcaggctgagccatcttgtggtgctgggcttcctgcccaccagccgtgccatctctgcccaacccggctgctcctctgccccgaagccctcgcgaggccctcctggaggcccccgtgctggtggagtttgggggccagggggacaagttgccttctctctctgccctggtcctccctgctgtctggatggtgctgccctcctctgccccatgcctttggggtctgttcgtccgtcttttttgttgttgtttttatatattgaagcgcctggcccagcccccagcccccagccccgcactgcggttaatttatgtgttgtttaaaatgcggctgctctgcttcctgcctctgcttctgccgtatccctaataaaatgtggaggccccc

SEQ ID NO: 224820 - DNA, 1000 bp, Homo Sapiens
tctagtacctccatatctcggaatgatactgaccgcattgctgcaaggcctggctggaagaacgtgggcaggaaaggaggagctattgaaagccattgcctgtgtggtgacagcttgcagtgcagagctggaaaagtctgtgcccaatcaacccagcacaaatgaaattcttcaagctgttctgaaggaatgtagcaaagagaatgtcaaatacaagattgtagcaatcagctgtgcagctgatatcttgaaggccaccaaagaggacagattccaggagttctctaacattgtcatacctctcatcaagaagaactcacttgaaagcagtggggtccggacaaccaaaaatgaagaggagaatgaaaaggaaaaggagctccagctggaatatctgctgggtgcctttgaaagcctgggcaaagcctggccgcgaaacgcggagacccaacgttgttatcgtcaggagctgtgcaaactgatgtgtgaacggctaaaactcagcacgtggaaagtgcagctaggagtcctgcaatcaatgaatgccttttttcaggggttaatgcttttggaagaagaacatgccgatcctgaggctttggctgaaattctgcttgaaacttgtaaatcaatcacatattctttagaaaataagacctactcatctgtgagaacagaagctttatctgtgatagaattgctgcttaaaaaacttgaagaatctaaacagtgggaatgtttgacatctgaatgcagagtgctcctaattgagtctttagctactatggagccagacagcagacctgaactgcaggagaaagcagcgttactgaagaaaacacttgaaaatctggaataaattagaaggggaagaaacaaacaagtgccatgttcattgggggttgaagtggtggtgttctttgaaaaaccaagtgggaaaaagtaaagattaatctgtagcatgcatcattccttggctgaaataaaaagaaaaagcctt

SEQ ID NO: 224821 - DNA, 1000 bp, Homo Sapiens
cccgtaccccagaaagcagaggaggcgtgtaaataatttctggaaagtgactgttgtgacccggagtcctcatcaagatgagcgcgctccatgagggagctgctcccaccctgcggacgcaggcggccggagcctctggtatctcagcttgtgtcaagcttgttatcatgtaaattctgtacaaagaattgttatttttctcttttttgttgttggtggttttgttgtgtgttttttgttgttttttttttattcctttcccccaggccctctctatttgagactgtgcccgccggtttcaagatcaaggaaattggtggcaacaagacacagatggggtacctgggcacagcggcgaacttctcttccgtttgcggttttctgcctaattgtgcaactgaggaaataatttatttttcacatgaggaaatgcgtagcttgtagagacggctgattcaagttacatgtacagcctccaaagggctgtctccattctgtccccttcccataaaagaagtgggggtgttcgagaagaccagggaagggacccttgcctcacccctccccctggcctcaccttgctcccagccatcgtgcccagtgttaacctcggctggccttcactaaggggactagacctccctctccccaggagccccagccccagagtggtttgcaataatcaagatatgtgtcgagtcatttttctttcaactccctcatttttcattgaacaaatctctgcttttcaagagttgggggtttctgctattttttgctttctctccctccccctgcaaagatgagaaccaatgagttttagggatgtttgtgcgggtagactccatcatccatatgtaacttgttttgaagagaagtgtttccgttgtgtgtcttgatgtaaatatttgttcatatttttgtgaattcaatactatgtaccattgtattatagtaacttttataaagcaaaccataaatatactgacttttcttacag

SEQ ID NO: 224822 - DNA, 1000 bp, Homo Sapiens
aggaatattgttgatgcagccaatattaatttgagctaatggattgttaattctgaaacgaaaactgtaactgtagagcaggcttttactatgagaggtactactttttataatagagaatgtggttgtgtgggctttttttgaacagaaaacacaacaatgacctataccgtgagaaaagccattttatcttcttcgtggtatttttacccccaaaggaactgaagatggaaaatatgactaataagttattgcagttttggtcttgaattctgtgccatctgaagttagcatccagcttcttaaaaagcagccacgcctacagcctgttttttgggaaggctgtaggtggagagatgggcttattttgcataccaccctcagggcccagagacccactgcattttccaaagttaagcaaatgacaccattttcttccatcagctaaactttacagataatagtgtttccacctcatatccttttctttgccccttctcaaatgagtcagaatagtcatgttccccttgagggatgtctgacttgaatggagaattgttctttcctctcttgaatcagctcactagctccctgatggtctgggttcaaggaaatggttaatgaggtagaggccacttatacaagtccttgggattgtaccattgctgtccacaaacttagtatcaacaacacatgctgtgccctgtgaacactctcctctcacctatttccagggttggtcttcctgagaaggggatggatgaggtaacacacagtttgggatacgtatctgttgaatgaatgaataagtgaaaggataatagtcctctgaggtaaaaatggccttgtcagaattttgaaaatccaacagattcctattaaagcactctgtgtaccaataacatgcatgcattgtaccaagtaatcacaatgtgaattggtcaatttatgagccttgcctactttagaaaataaagaaacctgcagtagcctctaccac

SEQ ID NO: 224823 - DNA, 1000 bp, Homo Sapiens
ggctcaagtctgggaaacttggcccagggctcaggaattgtgtccagaggaattcattctttttaagaataagatagtcattaagaagttggatgctagaaaatatgaagaaaacttaaaggcagaattgacaaattggattaaaaatggccaagtgaagaaggtcaaaagagtactgaagaaccttagtccggattcattgtctagttcaaaagatatggtgaaaatgtttcctcttcttgttgaaaagttaagacaaatggataagttgcctgcaatattttttttgtttaagaatgatgatgtgggaaaaagagctggaagtgtgtgcacttttctggagaagacagagacaaaaagccatccccacactgaatgtcatagttatgtctttgcaatagatgaagtacttgaaaaagtgaggaagacacagaaaaggatcactaaaaaaaacccaaagaaggctgaaaaactggaaagaaaaaaagtgtatagagctgaatatattaatttcctggagaatctgaagattctggaaatttctgaggactgcacgtatgctgatgtcaaagccctacacactgaaattaccaggaataaagactcaactttggagagggtattaccgcgagtgcgatttacaagacacggcaaagaactgaaggctttagcacaaagggggattggatatcatcacagcagcatgtattttaaagaaaaagagtttgttgagatactctttgtaaaagggcttattagggtagtgacagctactgaaacacttgccttagggatccacatgccatgcaaatctgttgtttttgcccaagactcagtctatctggatgctttaaattacagacagatcatgtgaactctcctagactggaatatgaagactgtgattttacagagaaaaggagtttatctccatttcatgaccttttaggatgttgctgtttcaactttaaaagccatattttccttttctcaagtatag

SEQ ID NO: 224824 - DNA, 1000 bp, Homo Sapiens
tagaaaagtgggatgtttttagttttgtctataacctgtagctgggccaacccttgagaggacttgtgcaaagcatgtgtgcccagacccatcagactcctcagatatggcctcaaatacctagagatgtagaagtaccgtggagggcctcaataagagggcaagcacacagatggctagaagcctgtatggcttctggtcaggatgaacccttggccaagttcttgaggaaaccaggtctatattcctgaagggacagttcagtttgggactctattaggtttcagtagtaatataggctgcttgcatcattttaacattcatagggaaaatctctttgagcaggctataaatgaagctgttgcaggtagggaagaacaggacctgaaaatgggaaccaggaagtgagatcctgttggcaaagggaatgtagagcttccagggtgcattgcccactgttctcattgcataccagtcctccaagtcagtctagccttactgtacacttgacaagtgcttactcagcaagtcccagacccacggccttttatctcccaagactggctttggccatgaccttcctcatcaggcctctgagcacactctctaggaactgctgcagaaattcccctaccttagcctcccttctcccaggactcctctcttgactgcaattgcctcttcttcttcttcttcttcttcctttttgttttttttttttttgcctgcattcacaattacttttcacaaaggtgttggaaatggcatttttattttacacagatagttgcacatatatagagaaaattaggaaagtccatttttaactctaaagggaacttttttctctaaaacttacttgtaaagctactgatacagatgggccgcatggttaggggaaagctcctctgtgaaaagagcatgtttattcctcttgtacattttcctcttttaactgctattaaacaagaaagcctacatacctgtttcaaaagccacg

SEQ ID NO: 224825 - DNA, 1000 bp, Homo Sapiens; identical to SEQ ID NO: 119164

SEQ ID NO: 224826 - DNA, 1000 bp, Homo Sapiens
cttggggaccctgagagcctcctcgggcgcacccgggcgctggaagctgcacctgacggagcgtgccgacttccagtacagccagcgcgagctggacaccatcgaggtcttccccaccaagagcgcccgcggcaaccgtgtctcctgcatgtatgttcgctgcgtgcctggtgccaggtacacggtcctcttctcgcacggcaatgccgtggacctgggccagatgagcagcttctacattggcctgggctcccgcctccactgcaacatcttcacctacgactcctccggctacggtgccagctcgggcaggccttccgagaggaacctctatgccgacatcgacgccacctggcaggccctgcgcaccaggtacggcatcagcccggacagcatcatcctgtacgggcagagcatcggcacggtgcccaccatggacctggcctcgcgctacgagtgtgccgcggtggtgctgcactcgccgctcacctcgggcatgcgcgtcgccttccgcgacaccaagaagacctactgcttcgacgccttccctaacatcgagaaggtgtccaagatcacgtctcccgtgctcatcatccacggcagggaggacgaggtgatcgacttctcgcacgggctggcgctctacgagcgctgccccaaggcggtggagccgctgtgggtggagggcgccgggcacaacgacatcgagctctacagccagtacctggagcgcctgcgtcgcttcatctcccaggagctgcccagccagcgcgcctagcggcggccccaaccagccggacctcagcaataaggcggcccccggacctcaccccgcgccggcccccacccaggggctgcatgtggacccccccgggcggcccaggggaccccgccccgacccaggggctgtggacgatgtacaggcaacagagctacgcactcctttccttttggaagcaagaagaaaatacgtgaaaacggaaattaaagatttaaaatt

SEQ ID NO: 224827 - DNA, 1000 bp, Homo Sapiens
tgggagtttgacttagctgtggatcggggaggggggtggggggaggggggaaaggggtaggggtggggggtgttgatgactatatcttaaacttctggaagctagcgtgatatgttaatcctgagtatatgcttttggctgtgtattgaccctgtggatttgtctctctaagaaaagaagctgagcgccttacccggtgcagtcctgcacctttctccctctctggagccatctggaagggaattcacactgtttaacatccaccttgacacacacctcctattgccaccaccgctgccaccaccaccgccaccaccgctgccaaccctccccccacgccccccacccccgcaaccttcctgggagtgaagacacggagtccctaccaactgtcccactgtagggaacaaagaaagccaatgtttcttctgtatagattgcttctcgtccgcctctccatatctccccatttcccacacccttgtgccctgtgtctgcctctgtttcatcactgtgtcagaggcccatgtgaaatctttcattctgatgtgagttttataaagatgtacactgtgcttaatccctgcccatccttggtagcccctagtgcaataaagtctccctgagtggtgagttctcccggcaaggaggaggggagtttcttctgcagaatccagcccctcacttccttgcttctcctcccccaggaccaagttgttgaatgggccagagatgcagccagtggggaatccttttcccctcagccactgcaagctggagtgctgatatggtcttctttttctcccaacttcgccactcagcccctgcctgtgtcattccaccgccatccttcacctctccctcagcctcatggagaggaaacattttctaatgtctgtatatagtatatatactacataaaatatataaattatatatatactaatttatgtcttgtttttcaaacaagaatgattaaatctattcatcttactatccc

SEQ ID NO: 224828 - DNA, 1000 bp, Homo Sapiens
aagcaattagtatttcactgcacgtcttccatactaatgttcatttctaaatcttatatgtaggcatttgttagttccaatgatttcctcactaatataacactttttaatgggaatctttccacctacagccctggaatgataatgctacagtaattcttctgaattgactttttctttcatcctgtcagctttggacaatatcccaattatggcagggaacaggtggggaactaagatcagttacaaaaagttgtagatgtgtcaactttgtattggctgggatatcactgtgcccaaacaaaacaggcgaaatacctcagttaaaatttttccatcaaagtctttaaaagaagagtatactgaagaaagggcagtcacaatacttacttctaacagcttctaaagggtacatgtttaacatttcatttcaaaatcaccccaaatttgcactaaataccaatgaagtgttattttgctttagtagtcttctgagcaacaaactatggggaattctgtaaaaacatataaaaagttcaagactttttttttaaatgaatgatcactatgttaaatgcaaacttttttttttttttatttaaacaaacatacacttctcctggcaaggttatagatgattaacctctgttcatagacttatatataaaactagagggttttttgtttacttttttaatttttcaagtgcaattgtttcttacacagacattattactattaaattatcatttagccagttatctgcaaatatatagtatgtattgtctcttcttgtgacgtttagtttaattgcttattttaaagcagaaacattagttacaagtgtcttacaatatttttaccaacagtaaagtagagacttaatgaaaataccttagtgtgattttaatataatttgcatattttagttgtataaagttttaatgtaaaatgtccattattgaagggaaaagatctttcaataaaaaatacccacgag

SEQ ID NO: 224829 - DNA, 1000 bp, Homo Sapiens
cttcgccaaggagcgccttcgcccccgtgctgcgccccccaagctccccaccccaggcctgccccagagcccacggagaggggcttccagaccagtcttttgaggattctgacaagtttcactctccagcccgggggcttcagggcctggcatactcctaattacggtctgcagctgttcccatggagcccggactggaggtccctctgggattcacagccacaccccggatggtggcacagacagatgcagggccagggccatgggcggacctcaacccgtgagctgaacggggagaggccttcaccccatgctcaagcctccccgctagcagccccacaggcttctctcgcctccctgtcttggggtagtcagaagccccagcactgtgcagatgctcttggcaggacagcatcgcagggaggtgctgggattctgggcctcactgtctgggtcttggttcctctgaaagagatggatcttgtgcagaccagggttgttgagtgaggggagcgtgggatggggaccgtgggaaagaggacagctcagggagaagtgacctggaaaggtcctgtttgcatctgacccatctcaactggcccagcatcccaacttctctgcagcgaaagggtggcgccccgcagcctcgggaggcctgcccaggctcccgtggagcttccaacagctgcttggccccgcagctgcccccacttcctttgagacctgcactctcatgcttgccgcatcatgcctccctgtgggggctttgggcatggaggaggcagaagagggggtgccaggcctcctgtatttggggtcttcccccagtggatgtctcatggactctggccccacacactcacaatgactctggctggccccacgcagcgggcccagccgccccccaggtggcctcacattctgctctgctaagtttggagaaaacagaacaataaaccagatgcaggtggtgcccgcccggcctctcacctgcctcctt

SEQ ID NO: 224830 - DNA, 1000 bp, Homo Sapiens
tcaagcctcagatgctgctccacgagagccatcttccccagtggagtgcctgcctcccctgctaggcccgtttccctgaaggagctggccgtactggccgtgggcccagtcctgggaggagcagcacagccttgcccaggcccagtccacagagccagcagcttgggttgagatgaatgatgtgttcacaaatgaggggatttcccttctggactaaactgaaggagaggcttgttgctttccagaggtgtgtggctcttaagttgacatcagcttttccccttgtgggtggttctttagctctcctgtcacaccattcgggtgtcctaatgtagggacaagagcaagcctgctgctcaggccccctggcgaggcttcacctcactgtggaagggggcgtcctgcagctggttagtcttaggcctggtggctgatcacttgtggggtcagtctccagcacccagcgctcccacaagccttgccaaggaaggcctgcttttcagccacaaacttcaggaaactcatccccccgctccccaaagtgttgttgctggccctgggcttgtgtggctcctgaggattgggaatttcaaataattgcaatacctgagttagaattccttctaatggcatcgttttaagctggaccataaagcagaggggaattacaagtgtgtcccatgcctgaccttcataattggtgtgggggacaggggagtcacagccactgatatttaggtgatgtctcttaggacttcagtgcctcagctgcctgaactgtaaatgttttctgaatttcacatatttttttttgcatgccttaggaagaagcacataggtaaaaccagcagtttccagtaatatagggggtttttgagcaaggcccctggagcagcggagagacaagatggagcacatgtagtctgtgtgcctggtcacacagaggcctgcatgcaagtagcaaagcagctctcaagggcttgtcagtaaaatatattag

SEQ ID NO: 224831 - DNA, 1000 bp, Homo Sapiens; identical to SEQ ID NO: 119170

SEQ ID NO: 224832 - DNA, 1000 bp, Homo Sapiens
atgagagctgtatgtgcccaggggtgggccctgccactggccaccccgagcccaggacgcattctggtcatctctgagcccacttgtagtgtagcttcttctgttagagatgttagccttttctctctgtggcgacttttctgccttcccttcttctgttttttgtgatcattcttagctacctgtgccaagtcacagttagactacctcagaatgtagtcaagaattcacccagtgttctttggatgtcccttccctagggggaaaggctggggaatgttgctgggagcattcccagctgcctctccaaagtggtcctaactctgccttggctatggtgcagacattccaaaaagtgttttgtatacagccctgtacatctagttttcttggttctccctggcaagttcgctaccctagcttaggctgacgttctgatgagtctctgcttgctgagctcatcactgtgggatggtgacctgcagagctgcagattggagcaagtggacagaggagggagccagctaagccaaatccgtcactgccacttggctggcaggccttataagagggcggatctgggcccgtttgcaggaggccattgcctaccctctccccacagtgagccagcagccatcagctgatcccacctgggaaaccttcatgcctctctgatggttactgcccacccttaccccacccctcagctcagcctggtatggaaagcaaggtgcacgttggtctttgattgttctgtcctcacagcagagccagctttccccccatgttgctgctgcttttgctgctcatgctgcttgttgttttctcttccttatctttccaaattgtttccttgaaatgcttgtttccaatttttcttagattatgtttctaatttttattccaggtgtttttttttcttacttgacagaaaaaaagaaaaccccaacaatatcttgctgtattatcacattttttataaagttaaagcatttctctt

SEQ ID NO: 224833 - DNA, 1000 bp, Homo Sapiens
cgcctgcgccctgtgccagcgcgcgccccgggaaccggtgcgcgccgactgcggccaccgcttctgtcgggcgtgcgtggtgcgcttctgggccgaggaggacgggcccttcccgtgccccgagtgcgccgacgactgctggcagcgcgccgtggagcccggcaggcccccgctcagccgccgccttctggcgctcgaggaggcggccgcggcgcccgcgcgcgacggcccggccagcgaggccgcgctgcagctgctgtgccgcgccgacgccggcccgctctgcgccgcctgccgtatggctgcgggccccgagccgcccgagtgggaaccgcgctggaggaaggcgctgcgcggcaaggtgcgcgccgcggggtcccgtgccccaccccggacgcgtgtgctgggcccctccctcctgcggcttgcctccccatatttcctgcgtctcttcggagtctggtccccttccccgtcttggtgtcccctgctgggcgaaacccgctctgagagtctggcagcagcgggtccgggagtctggagccttgcccatggcggacaaccgggcttcgaggttatctctgggatggagaacaaggggtctgtggaaatcatgagaaaggacttgaatgacgcccgggacctgcatggccaggcagagtcagcagctgcagtgtggaagggacacgtgatggaccgtaggaagaaggcactgaccgactacaagaagctgcgggccttctttgtggaggaggaggagcatttcctgcaggaggctgagaaggaggaggggctccctgaggacgagctggctgaccccactgagcggttcaggtcactgctgcaggcggtctcggagctggagaagaagcatcgcaacctgggcctcagcatgctgctgcaggtgcgggagccccgctgggtctgcccaccatcgggccagggtggacgcaggcagcagcgagccattgggggaccattgcccgaagtcaaggcttaa

SEQ ID NO: 224834 - DNA, 1000 bp, Homo Sapiens; identical to SEQ ID NO: 119171

SEQ ID NO: 224835 - DNA, 1000 bp, Homo Sapiens
gggatgtacttcagttgttacaagtgaaagcaatataattagacattataagtgccataaattatctaaggcatttacatcacaacaccgaaatcttcttattgtattcaaacggtgttgcaactcacaagtaaaggaaacgtctgagcaagaaggtgctaagaatgatgtgaaagattctgacacgtgtgtatcagagagcaatgataattcaagaacaacagctacagtttcacaaaaggaagttgaaaaaaatgaaaaagatgaaatggatgaactaacagaattgtttattacaaaattaataaatgaagatagcacaagtgtagagacccaagctaatacttcttcaaatgtaagtaatgattttcaggaagataacctctgccagtcagaaagacaaaaagcaagtaatttgaagagagttaataaggaaaaaaatgtctcacaaaataaaaaaaggaaagttgaaaaagctgaaccagcatcagcagctgagttaagtagcgtgcgtaaagaagaagaaactgctgttgccattcaaaccattgaggagcatcctgcatcttttgactggagctcttttaagccaatgggatttgaagtatcatttctgaagtttcttgaggagtctgcagtgaagcagaagaaaaatactgacaaagaccatccgaatactggaaacaaaaaaggatcccattcaaattcaagaaaaaatattgataagactgctgtgactagtggaaatcatgtatgtccttgtaaagaaagcgaaacgtttgtacagtttgccaatccatcacagcttcagtgcagtgataatgtaaaaattgttttagacaagaatcttaaagattgcactgagcttgtcttaaagcaacttcaggaaatgaaacctaccgtcagtctgaaaaaacttgaagtacattcaaatgatccagatatgtctgttatgaaagatatcagtataggtaaagccacaggcagaggtcagtactga

SEQ ID NO: 224836 - DNA, 1000 bp, Homo Sapiens
aaagaaaccaagtggtacataagcccagcttttctgctgggctaagtgtaagtgtgagtaacatggtcaagcccctcttttttgggctaatgtaaagcctttcctgccttgcattaatgctatctccctgtgtactgtttctcttaaatgagcagatagaaatctgcagtgttggcagataggtgatggagaggatgataattttatcttctggccacagagctgcagccccagttgtcagagtccttaaatgaaacccccaaatccatccctccttccctacccccactggaatattctagaataagagcactggataagtacacttgaacacatttttctaaccttagaaaatacctacaaggcctgttgtcttgacccattactcaattgtccctggcatattatctgatcttcacgtttcttggaagcagaatcatcaaggctttcctttgtaactgccctttccgtacacagcaggcatgaataaatgctgagtaacagacaagttacagacaggaggggaaagaggaggaaccatacaactgtttttgcaaaatgatggctgagtccagattatagaggttgccttacccttagaatgttatttagaccaagtttagcttttagagtccaggtctggttaattgccagggtagcaaagaatcgcatgcaccaatgtaaacaggagtcagaatgcattattagtcaaagatcgaatttcacattgtagagatgtatagctgtgattaagctgcatatgtatgctgggaaacggcttgagtggatggctaatataaaagttgttggccataatgccacacctctcatctgcttgaaatatggaccagtattctaaaatatcagctactggggtctcattcactacaagataaattcaaacttcacagaactttgcagcagttcaccaccagacgggactgtgtctgcaaactctcttgtcttcacagacgcctaataaagcaaaactctgaatctc

SEQ ID NO: 224837 - DNA, 1000 bp, Homo Sapiens
ctgcctcggcctcccaaagtgctgggattacaggcatgagccaccgcgcctgaccacattgccatatctgaaatggctggattctcttaggtgcttttctttttctttctttctttctttttttgagacagaatctggctgtttcccaggctgaagtgcagtggcatgaactcagctcactgcaacctctgcctcctggattcaaacaattctcatgtctcagcctcctgaatagctgggattacaggcacccaccaccatatctggctaatatttgtattttttgtagagtcggagctttaccatgttggtcaggctgctctccaactcctggcctcaagtgattctatcgcctctgcctcccaaatcttcacctgctgggattagtttcccctgtctcagtaaattttttttcccaaactaagtgaacattagatttaatttggctggccccagaagaaaaacatgcacagatggtagttttactggtgttgcagtaagttttcaaatttggaagtttggcagctttatgatcttgaaccttgctgtccatctctcacacaactcctctcttggcctccagagtccctttactctcccagctttcctcctgcccctggctgctgtttcccagcctttccacattggctttcccatgtagtccttagtgtgtctgctcctcctctctctcctcatcacagttcccagcccccaccttcaactgaactcaacaaaatcttcaacttcatacagtagtcacattgttagtaataacactggcatttttattttgataaaatagaccgtttaaatttttgagattctaccttatattttttgaattatatactaaagcaaataagtagtgatgtaatgtcattggggaccaagatttttagtgtaaatgaaaaaagataacaaatataaactcaagtaaacaccctgtagtctttcacatgaattggaaatatcagaataaagtcatgatttttctctttct

SEQ ID NO: 224838 - DNA, 1000 bp, Homo Sapiens
tttctgtgcaggacgggagtctcagagaggagacggagtgtgggggagggagggccggccacgcggtggacagagcgagggtgccagggtgaccagaagaccgtcaccacccgacagcaacgcaagtgcctttgaccttgatttggacttttctcccttttgcatttggtgctacagacttgagacaccagcagaagttgtgttcagcccggccccgctgcgcctgtccgggccggggctggcgccggttgtgtttgtgtccaccttgccttctttgcagccaagcagtttttgtggagtggagtgggacttacctgcacgccccaggggtctttcaggattcaggatgacttttcttttacaatggtttcctctcggcagagcccgggttgtgggggatctgtgtggggttctcaacgcagatccatcctggggtctcccgggcagggatggctgacctcgagtcccctcccttcccgagaacccgctctgtcccgagggcagctaacaagggctgagccccaggtacaggttgcctcttccacggcaggaatttttaccaaaaccacaagcaaaaaacaaaacagaccaccacgaccaacaacaaagatggggggtagggttttgtaaaggttctgttaggttcatatttttatatcattttgcccataaatgcggaatttgccgtgggaatttgaagacaaatgatctatgtttttatggttttctagggaaggtgttctgggggccgggctctctccagctgtgggaggcctgctccctctggggggcaccctgggcagggtgggggggccttgggaggcgcttcttgccaaatgcagacgaggggtgagcctgccagcgtttgcgacgtccccgcacgacaggctcatactttctgaggatcgtgcatagcataggacgtctgaacctttgtacaaatgtgtagatgacatcttgctacagcttttatttgtgaattaaagatgcatcgatggtt

SEQ ID NO: 224839 - DNA, 1000 bp, Homo Sapiens
ggcctggagggcccagcagatgccctcgtcagcccccgtctcatttccggaacaggccccctcgaactcgaccgcctggcaagcctacaacgccggggtcaagatgggctgctggggcctggtcatttatgccgccactggtgctatttgttcagggccaccccttggggagaagcatcgaaattcccatgtcctcgttttagggaaaaggccgctgtgggctggcaccagaagcagtgtggttctgagacccttttggggcctgtcctgcctgtgcggtcccatgatgctgtcccacgtcaatgccctgttacagaagtacttggacaactacgacctgagcgtcagggtgatctacgtgctggggacgctgggcttctctgtcggcacagccgtgatggccatgtttcccaacgtctacgtcgccatggtcaccatcagcaccatgggcatcgtctccatgagcatctcctactgcccgtacgccctgctgggccagtaccatgacatcaagcagtacatccaccacagccccgggaactccaagcgagggtttggcatagattgtgccatcctgtcctgccaagtgtacatctcgcagatcctggtggcctctgcccttgggggcgtggtcgacgccgtggggactgtccgcgtcatccccatggtggcctctgtgggctctttcctgggcttcctgacggccacattcctggtgatctatcccaacgtgtcagaggaggccaaggaggagcagaaaggcctgtcttccccgttggccggcgaaggcagggccggtgggaacagcgaaaagcccaccgtgctgaagctcacgcggaaggagggcctgcagggaccggtggagacagaaagaatgacgtatcttcttttcctcagcgagttggacacattgtgcccagggcagccctgtccttgggcagcgaccgcacaccaaagctgggaggaggctggtccggggggcctgggcagaagacagtga

SEQ ID NO: 224840 - DNA, 1000 bp, Homo Sapiens
aatgctgcttttactattttgcattttatagcaacattaacagtcttttcccagtcaggtgctgtccagggaacatgtttcccttgggaggtctgaacagagtgacctggcttgatgtatttcctgagctctagtaccatatcatagaattagttaaatgtagtcaacagcaatgtcagaacaattgacattgtctttccaagagtgaatgcattggctttcggaactgctactagagacatacatgaggcagcgaacacatctttaggtgggggcaaggctatatctgattgacagagatctctgatctctaatgacatattgctattgtcctattatgtttaaatttgaacctaaatcacttgagtgttatgagtgatggctatataacatgctgtttggttagatttacagtgtgtttttatgttgcagtttagtttgaaacaacacttaagcacactatttctgttagtgtatatagttttcaaactaacaagcctgcgatccttgttagtgtagtgactgcctctttaggagtatggggccctagggtgtccatatatttttaccccatgggtcattctagtctaaggactactagtagaaccctcaaaaggtaattgctattatagggacttacttattggagactggtaatataataaaatattgaaggagtggccatggtcttagcaggttttagaatgaccttttaactccagtaactacttccttggtattggtatccttgatagagggaatataacatctggcagtaatctcattcaggttatactacctgactaaatttaatcatactttcatgtatttgtttcctcagttggacctaagttactgtatttgtttttcttatttttttattattgtacagtttctttacctttcaagtataaatgtgtatataaaatgtaaatacaaagaattcactaaaaaccactcataacaattactgtgtaaataaaactggtaagcagagtaa

SEQ ID NO: 224841 - DNA, 1000 bp, Homo Sapiens; identical to SEQ ID NO: 119174

SEQ ID NO: 224842 - DNA, 1000 bp, Homo Sapiens
catggagacgcccatcgagcgcgaaatccgccgcagctgcgaacgcgaggagagcctgcgccggagccggggcctgagcccgggccgcgcaggccgtgaactcgtcgagctgcgcgtgcggccggtgctcaacctgccgggtcctggccccgcgctcccgcgcgccctggagcgggcgcgggcgggcgcgcagatgcagcgggacatcgagcgggaggcccaccggcaggcggcgctggcgcgccccgcggtccccgagccgcgcgcccggtcgccgccgcagccgctgggcgaactcaagcgcttcttcgaggccgcggcggggagcggctcctcggcgggggcgggggacggcgcgggcccgcagaggctgccagagcctgggggacggccgcgctcggccgtgcagggcgggtgccgggtgctgggcagcgccccgccgcctttcactccgtcactgctggagcaggaggtgcgcgccgtgcgcgagcgcgagcaggaactgcagcgccagcggcgcagcgtctatggcaccgcggagttcaaggagcctacgccgagcctcaccgcgagcaggggcgacggaaagttggtggtgatctggcccccccgcagaaaggtctcggagaacggcctggagcaggaggagcgcaaaccttgaggtttgaaaaggctgggacccccggccggaagtaacgtacgcgtcagaggaacagggcggggggcgtctagcattaggcctggagaagggtcggctctctgcattggggaagatgaaatcgacttgcctttgtgaaattgaccagccccctctataaaacttacagtcccccattgggaaactgaccaccacccacaactccgccagtgaaactgcccagcccttctctgcctaattgcaaactgaactaccctctcccttgactgttaagagggccggagttaccgcctcgattgccccactccccccacccccaataaagcctcttctttcagggca

SEQ ID NO: 224843 - DNA, 1000 bp, Homo Sapiens
gtctatgcgtacaaggagacgtagggtccgagacccatggggaaactggtgtgatgcaaaggacttagaaggacaaacgtttgagcatctctctgctgaggagttggcaaaaagaagagaagaggaaaaaggcagacctgttaaatctttaaaagtgccaagaccaacaaaaagctcgtttgatcccttccaactgataccttgtaatttttttagtgaagaaaagcaggagccatttcaggtgaaagtggcttcagaagcacttttaataatggatttgcatgctcatgtttctatggcagaagtgattggtctgttaggaggaagatactcagaagttgataaagtagttgaagtctgtgcagcagaaccatgtaacagtctgagtacaggactacagtgtgagatggatcctgtatcacaaacacaggcctcagaaaccttggctgttagaggcttcagtgttattggatggtatcattctcatcctgcttttgatcctaatccttccttacgagatattgacacacaagctaaataccagagttacttctccagaggaggtgcaaagttcattgggatgattgttagtccctataatcgaaataatcccttaccatattctcagattacctgcctggttataagtgaggaaattagcccagatggctcttatcgcttaccttacaaatttgaagtacagcagatgttagaagaacctcagtggggattagtatttgaaaagacaagatggataatagaaaaatacaggctctcccatagcagcgtccccatggataaaatctttcgccgggattctgacctgacttgtttgcagaaacttttggagtgtatgaggaagactctgagcaaagtgaccaattgctttatggctgaagaattcttgactgaaatagaaaatttgttcctttccaattataaaagcaaccaagagaatggagtaaccgaagagaactgtacaaaggaattgttaatgtga

SEQ ID NO: 224844 - DNA, 1000 bp, Homo Sapiens
gcgcggcggcggggccgcggggccccgggagggcgcgagcagccccggtgcccgtcgtggtgagcagcgccgacgcggacgcggcccgcccgctgcgggggctgctcaagtctccgcgcggggccgacgagccagaggacagcgagctggagaggaagcgcaagatggtctccttccacggggacgtgaccgtctacctcttcgaccaggagacgccaaccaacgagctgagcgtccaggccccccccgagggggacacggacccgtcaacgcctccagcgcccccgacacctccccaccccgccacccccggagatgggtttcccagcaacgacagcggctttggaggcagtttcgagtgggcggaggatttccccctcctcccccctccaggccccccgctgtgcttctcccgcttctccgtctcgcctgcgctggagaccccggggccacccgcccgggcccccgacgcccggcccgcaggccccgtggagaattgattccccgaagacccgaccccgctgcaccctcagaagaggggttgagaatggaatcctctgtggatgacggcgccactgccaccaccgcagacgccgcctctggggaggcccccgaggctgggccctccccctcccactcccctaccatgtgccaaacgggaggccccgggcccccgccccccagccccccagatggctcccctgacccccctgaccccctcggagccaaatgaggcaggaatccccccgcccctccatagagagccgcctttctcggaactgaactgaactcttttgggcctggagcccctcgacacagcggaggtccctcctcacccactcctggcccaagacaggggccgcaggcttcggggacccggaccccccatttcgcgtctcccctttccctccccagcccggcccctggaggggcctctggttcaaaccttcgcgtggcattttcacattatttaaaaaagacaaaaacaactttttggagg

SEQ ID NO: 224845 - DNA, 1000 bp, Homo Sapiens
cctgcagtccacaaggcactggaacagtgacctctaaatagagccagactctccctttccttcactcttgcctaaggtggagcagatcccaaggctggggttaggcaagtcagggaaagaaccacagtcactgtttcttcatgaccgtctccaggccagggactgggctcacctgagctttgcagccgtgatagggcttattaatgcctctaatagccctgcctggtacgatgatccctattttacagatgaggaaactgcgcctcagagagttaagaggcgcccaagtgcacacagcggctggtaaggacagctgggacctgaccccagatccctctgaccctggttctcctgctgtctgcagggttggccgtgagtcccctccttgtaactgtcagcttttatgtgtgtgtgcattctcgtgtgtgtgtacattctcatgtgtgtgtgtgtgtgcacatgtgtaccatgtgcatgagggtttggctgtgtgtgacactatgtgtgtgtgtttgtgtgtgttgcctgcctgagctcagagagagccaaacccccagagaagggtgccccctccaccaaccaggtgagctccttgcagaggcctggccttcatcccacaaaccttgcagaccacaggctccctggcttgcagcccccaaaaatgaaggcagcgctctgctctggacgtggcctttccagcactcaccactctgaattaaacatcacaggcccccatctgcacatgtcgtggggctgcctcgggcagaggaccgtttccttttacgctgtgccatgccagggagatctgggcagcagcagagtcctgagatgtcctttgatgtacccacaggagagttcgctccttcccgaggcagtgtcccccagggcttggcaggccaggcccacagcagagacaccaaaccacagaatgggacggcagagggccctaaaaagcccattgtcatgcactggctgaaaatgaaagaaaacctgcagattt

SEQ ID NO: 224846 - DNA, 1000 bp, Homo Sapiens
cctttgttggtatgtgaattctctttgttgctgttgcaaacagtgcatcttacacaacttcactcaattcaaaagaaaactccattaaaagtactaatgaaaaaacatgacatactgtcaaagtcctcatatctaggaaagacacagaaactctctttgtcacagaaactctctgtgtctttcctagacataatagagttgtttttcaactctatgtttgaatgtggataccctgaattttgtataattagtgtaaatacagtgttcagtccttcaagtgatatttttatttttttattcataccactagctacttgttttctaatctgcttcattctaatgcttatattcatcttttccctaaatttgtgatgctgcagatcctacatcattcagatagaaacctttttttttttcagaattatagaattccacagctcctaccaagaccatgaggataaatatctaacacttttcagttgctgaaggagaaaggagctttagttatgatggataaaaatatctgccaccctaggcttccaaattatacttaaattgtttacatagcttaccacaataggagtatcagggccaaatacctatgtaataatttgaggtcatttctgctttaggaaaagtactttcggtaaattctttggccctgaccagtattcattatttcagataattccctgtgataggacaactagtacatttaatattctcagaacttatggcattttactatgtgaaaactttaaatttatttatattaagggtaatcaaattcttaaagatgaaagattttctgtattttaaaggaagctatgctttaacttgttatgtaattaacaaaaaaatcatatataatagagctctttgttccagtgttatctctttcattgttactttgtatttgcaattttttttaccaaagacaaattaaaaaaatgaataccatatttaaatggaataataaaggttttttaaaaactttaaa

SEQ ID NO: 224847 - DNA, 1000 bp, Homo Sapiens; identical to SEQ ID NO: 119176

SEQ ID NO: 224848 - DNA, 1000 bp, Homo Sapiens
cttgtaagccactgagttcctggattgatgatctcatccagcgactgaatttcttcaatacttgggccaaagtggcttatactgcaatacagcgtcggtatatgagatttgtcacagtttggaagcagtctattccatcaactagccaaaaatgcaaacaccctgaggattcagagaacaatttctttgaagggtttccttcaagatactggctcccagctttcttctttccacaagcctttcttgctgctgtgcttcaagactatgggaggtcccgaggaatcgctgtggatgccctcaccttcacccaccatgtgatttccaacaccactgacaaggatgagaagttctccgtatttatgccaaagaaactcaacatagtcaggagagcgtttaagggctcagcttcctctcacactggagtttacatttttggtttattcatcgagggggcaagatggaatcgtgaacagaaaatactggaagactcgctgcctctggagatgtgctgtgattttcccgacatatactttttgccaacaaagatttctaccaaaacaccaaatgcttccaaccagacagattcagaactctatgcttttgaatgcccagtttaccagacacctgagaggtcaagaattttggcaactaccggtttaccaacaaactttttaacatcagtgtatttatcaacgaagaaacctcctagtcactggatcacaatgcgggttgcattgctttgtgagaagaatgaaaaataaatgtccatatcaaaccattttaatttttgactctaatcagacttacatgtttcaagacattcacatgtagtcaacaccctttataaaatatttgtgtgttcagccagactgggcaggtgcagtctatttcatttgtacatgaaaacttcaacacagaggggaatcttgcagctgctttttattctaagtacatgagacctgactgtgcaatgtccctgtggttgggctctagtacaggt

SEQ ID NO: 224849 - DNA, 1000 bp, Homo Sapiens
gtgtgttcagctgattcatgtgagagggatgggaaggatgggaacacagtatggtctagagggtaccaagacagaagaggctattgtgcagaaccttggggagacgccttccagagagactggaggtgcctctgccagagaaaaggaggaggtcatctttgctttgaaccagaccctcctgcagcaggaaagcctgcgagcaggcagtcttcagatcccctacacgacggaggatctcatcaaacactataactgcggggacctcagctccgtcatcctcagccatgacagctcccaggttcccaattttattaatgccacgctaccacctcaggagcgcatcactgctcaggagattgacagctacttacgccgggagctgatctacaagcggaatgagagaatagggaagcgggtgaaggcccttttggaggagttccctgacaaaggcttcttctttgcctttggagctggtcatttcatgggcaacaacacagtgctggatgttttgcggcgtgaaggctatgaggtagaacacgcccctgctggacgacccatccacaaagggaagagtaaaaagacctccacacggcccactctgtccaccatctttgctccaaaagtccctaccctggaagtaccggcaccagaagccgtatcctcagggcactcaacgctgcctccccttgtgtcccggcctggaagtgccgacacgcccagtgaggccgaacagaggttccggaagaagcggaggcggtcacagcggaggccgcgactccggcaattcagcgatctgtgggtccgcctggaggagagtgacatagtcccgcaactccaggtccctgtcctggacaggcacatctccactgaactgcggctccctcgccgtgggcattcccaccacagccagatggtggccagcagtgcctgcctgtctctctggactcctgtgttctgggtgctggtgctggctttccaaacagagacacccctcctgtaa

SEQ ID NO: 224850 - DNA, 1000 bp, Homo Sapiens
agaagatgagagaatgggtggctgtatgcacagtacccaggacaaatctctccacttggaaggagatcccaatccttctgcagccccaacatccacctgcgcacctaggaaaatgcccaaaaggatttcaatatccaaacaactggcttcagtgaaagctctgaggaagtgctcagatctggaaaaagctattgccaccactgctctgattttcagaaattcttctgactctgatggtaaacttgaaaaagctattgccaaagatctgctgcaaacccaatttaggaatttcgcagagctccccttcaccttctaccatgagtggaagcagcctgaggtcctcaccacatgcagatgcctgatcttgaactttccagccatcagaattggacaagaaaccaagccaaaatacagagagatcctttctgaacttgatgagcacacagaaaataagctagattttgaagacttcatgatcttgctcttaagcatcactgtcatgtcagatctgctacaaaatatacggaatgtaaaaattatgaaatgaacagttttaaatatgctgtataaaataatggcaaaagacagtgttattaaaatgtttccatcttatttttgattaattgaatatatctatcatgcatctgaaattgcctaggatggttctgattgctggtattcagatccaatgtaactccaaatatttacccatacacttcaagaatgtttgaatgataaggtctctgtgtgctttacaataggatagatttgataccactgaataataaatggcttttgctgagtcagtagcgacctagagcactctacttatagtcattgagtcactcatttattcactaaacatttgttgagcatctacttgatggaactgctgaggatacagtaatgaattggccaggcaattccttccttcagacatgtttgcagaagtctagcagaagagatagacattgaacaatttttaaataattgcatacac

SEQ ID NO: 224851 - DNA, 1000 bp, Homo Sapiens
ccagggtgagaaggagaggcctgaagcctggggccacgttcccacacaagccaaggaacctattcctctttggacagacagcgagggaataatcagacagtgggtgcaaatgttcatgtcccgatagctccacacacccatgtatctgtgggaactcaaaccaagccagagcccacagagccaaacaaacagaaaatcacaaacccatctgtcctcttctcaatgcagaactccttcccgtccaataattttcctgaaccaatcacccttgttattgggtatcttctccactgctgggtaaggcctgcacatggtctgtctgtaactttctagaagactgagaactgcttatgccttagggagttctatgtgagcagcaaggttattccccctagttacacacacacgcacatgtgccaatactcctgcaaagacttgctgtttctaaaatccactactcagaaaaaccagggtgtcggcttaaagttttcagctccatctatcaaaatttgacctttttttaagagaaaaatatgtagatgagtgaaaaagacctaggattgaaagacaaaaagccatgtgtccatgtaaccctggccagtcactccacctgcctgagccttggtttcctcagctgtgagctcctaccaggtcagtgtgggaattggccaaaatgacgcagcagaagtgctttggagactaaagattgtcaacgaaatgtaagtgtcattttcgtagtattaggacgtttacattacagcaggctttaattagaacccacttagatatcgactcagaatgatcaattacagtggttaaaatacacatacctggtaatcatatacttgctttctgtccccagttcttacattaagtcaaccaactgacccaaaaatcaaccaataactaactggccatctctccactcactcagcattctcctcttaaatgcagggcatgcagaagattaaggtacagccccttccctggataggaactc

SEQ ID NO: 224852 - DNA, 1000 bp, Homo Sapiens
ccatccgcttgagcaaagagcttgattatgagaaacagcagttctataaccttactgtgcgggccaaagacaaagggcggcctgtctctctgtcatctgtttcctttgttgaggtggaagtggtggatgtcaatgaaaacctccacactccctatttcccagactttgctgttgttggatctgtaaaggaaaactcacgcattggaacaagcgtgctgcaggtgactgctcgagatgaagactccggaagggatggagagatccagtactccatcagggatggcagtggtcttggaaggttcagtatagacgacgagagtggtaagtgtaatattttgtgccaagagtgttgtttcacctcttttaaatggtcaacagtggaaaagtaaagggatgttaggacactaaaatagaatgacaaatgaggttgcatttggtgcagagacgacgcacatagatgctttttcttaggatgttctggtttgttagaagatctgtttataaactaacagctgtggtttccagtgggagtcctggtttgttttgttttgttattttcttgctcagcactattgctaccaggtcatcttttgataagcctaagtaattgtcacttctgttgattgtactcctgaccctctctaaatgaaggactctgataaagtaaattacatttgaattggctttaagttagaagtgtgaaatggattttcaaatggatcttatataggaatctttccctttacagtaaggctttgcagaagtgatattgcattagttgcttggtcttttatctttcatgggttcatctggtccttgaatgatgggcatttgcactctgtagctccattaatataaggaggtgtgcttctacaaatgttttcttaatggaataaatgagtcttgctatgaattttatttataaaaattgattttaagaatttatttgtaaggagatatttacaaaacattaaaaaatatggggcaacattgttccagt

SEQ ID NO: 224853 - DNA, 1000 bp, Homo Sapiens
tcttcattaggaagcttactgccattttgatggagcttgaagcccccattttgatggacttctagtctgtctttcctgttatggtcatttattaattttcactaatccatatattctttagacaaggagagtcaagaaactacttgtcatagatgaagctctgagttacttttacccatcaggtagctgtttagtcaataataaacagcaccaaaacaggattagcagagctcttaaaaacagccttaaatacacactgagtttagaaaaatgtaagaaaatcattgttttaatctacaaattcatatgcagttgcagagatgcaaaagagatcagagtaagttaaagtaggaaaggttttataaaagtattgatggctgtgtcctcatctgcatttttgtttttatgatagggctgatattttcaacaacgaaacacccaatgttcagaccttacctcagtctaagagctggctccacagttggtagcaatggccctgttaggcagactgtccccctctttgggaatggaaagaagccctgcctggatgcatggagcagatggatactgacaccaaggacattcagattttctttcctatacctattttcataaaatttggaaagaaaaactatctgcagtatttttttaaaacgacttctgctattcttacttagagaaatccagtgatagcacctcatgtcttcagaggagcaagaagttcaaggagttaaatgtcacattcatactcaggtaatagagaagaataaaacacatcaggtttgcttcatctatcctaagtggtgcttaggggttcagaaaaaatgtttcaagtacaggaaattaatgagcaatatttacaatgtattttaataaaagggatttttctagttaactctgagttaagcacgaactcctttcttttgttaattgttggaaataccattaagatgtatttgtctgtttttctgcattggcaagtaaagaacataaaacaaat

SEQ ID NO: 224854 - DNA, 1000 bp, Homo Sapiens; identical to SEQ ID NO: 119180

SEQ ID NO: 224855 - DNA, 1000 bp, Homo Sapiens
tgggcccttccgccatgcagaactgctccaccccgctggctctgcccactcgagacctcaatgccacctttgatctctctgaggagcctccctcaaagcccagtttccatgaatgcattggctgggacaaaataccccaggagctgagcaggctggaccagcccttcatccccagggcacctgtgcccctgttcaccatgaagggccccaagccaacatcttccctccctgggacctctgcctgcaagaagaagcgcgttgcgagttcctcagtctcccatggccgcagccgcatcgcccgcctccccagcagcactttgaagaggccagctgggccccttgtactcccagagctgcccttgagtcccctgtgccctagcaaccggaggaatggaaaggacctcatcagggtggggagagcactctcagcagggaacggcgtcaccaaggtgtcctgaccgccagaatgtcctgaccaccaaggtgtcctaacctaccggcccctctgctggatacccctcttggacctgtagccacctgcaccaggagctggacctgccttccttacctgggagcaattagtgccaacacacctttgctgtattaacatccctccccagacatccatcctgctactcaccctctgttaatctcctgttacactcagcttcttggcatgtacatattcatttgtgagtgttaatgtgctgctgttttttgttttttggtggtttttgttttttgttttttttgttttgagatggagtcttactctgtcgcccaggctggagtgcagtggtacgatcttggctcactgcaacctccgcctcctgggttcaagtaattctcctgcctcagctttccaagtagctgggattacaggcacccatcaccacacccagctaattttcgtctttttaatagagagggggtttttccatgttggccaggctggtcttgaactcctgacctcaggtgatccgcctgcctcagcttccca

SEQ ID NO: 224856 - DNA, 1000 bp, Homo Sapiens
tgggccagaacttcctatttcactccagcagcagccagggcctgctatgactgagggttggaccctgaaagtgggactttctgtctccctctcttgctgcagaagaagagtcttcctgtatttgtgcaagtaaggagatgtgacttcttggctgggaaactcttgctgatctaactgtgtggtttgcacaacctccaagcctctgcagcagacaggcagggcttgctgtgttgctctgagctagagagggagcttggccatgttctctgaaaaggtccccttacattcactttgccacctgtaggccacaccccatccagctcccagcatcttcatcttaaaacagatcagatcatgtcactcttctctttaaacgcttctacggcctgtgcatttcccttcagatattatccaaactcatcgtcgtgaccttcaaaaccttgtggtctggcctctgttggcctccctgacctcccctcccaattctttctctgcccccggactccagtatcacagtctgtctctcagccacaatttattttgcccctagagtttgctgtgcttataacacttctttttcccatatgtcattcatttctcaagtctaagagtagcagttaccatcttagacgaccgttcccttacccctcccttagtcttgggttaagtcccagaatccttgaatttgccgttcctgatacataaatatgtaatttcttgtgtggcctgagactctctctctaaactaagggctttacaaaagcagagaccacatcattaactcagcacttaacccagagcctcacacacagcaggcaatcaataaatatttgttgactgatcaaatgttttggtgccagtgaagagttgggcttgctgctgctgtcttcagcgtaagtcttgctttttcagctgggtttctaattgagaatttagagagtgcattggtgaggattcttttgactgcaagtaacaaaataaaatggtggcaagaactatg

SEQ ID NO: 224857 - DNA, 1000 bp, Homo Sapiens
ggtctgtgtgaaaaccagtacccagatataaatgtaataacaggtgttcttaaggattatttaagagaactcccttctcctctgataacaaagcagctttatgaggctgtattagatgcaatggcaaaaagtcctttgaaaatgtcatcaaatggttgtgagaatgacccaggtgactctaagtacactgttgacctgctggattgtctgccagagattgagaaggcaaccctaaagatgttgttggatcatttgaaattggtggcttcctatcatgaagtgaataagatgacgtgccagaatttggctgtgtgctttggaccagtattattaagtcagaggcaagagccttccacccataacaacagagtctttactgattcagaagaacttgcaagtgctttggattttaaaaaacacattgaagttcttcattacttactccaactctggccagtgcagcgtttaactgtcaaaaaatcaacagacaatttattcccagagcagaagtcttctctgaattatctgaggcagaagaaagaacgacctcatatgttaaatttgagtggtactgattcatcaggagtacttaggccaaggcaaaaccgattagacagtccacttagcaatcgttatgcaggagactggagcagctgtggggaaaactactttttaaatacaaaagaaaatttaaatgatgtggattatgatgatgtcccttcagaagatagaaaaatcggagaaaattatagcaaaatggatgggccagaagtaatgattgaacagccaattcccatgtccaaagagtgtacatttcagacatatttgacaatgcagacagttgagtctacagtggatcgaaaaaacaatctcaaagatctacaagaaagtattgatactttgattggaaatctggaacgtgagctcaacaaaaacaagcttaatatgagtttttgagattgagggtttttttttgtaatgtcttaaagtttcaaatctg

SEQ ID NO: 224858 - DNA, 1000 bp, Homo Sapiens; identical to SEQ ID NO: 119184

SEQ ID NO: 224859 - DNA, 1000 bp, Homo Sapiens
ttgaagggagaagaactaatgaaataaatgaggtcctctcctggaagctcgtacctgacaattacccaccaggtgaccagccacctccaccctcttacatttacggggcgcaacatttgctgcgattgtttgtcaaacttccagaaattcttggaaaaatgtcctttactgagaagaatctgaaggctttattgaagcactttgatctctttgtgaggtttttagcagaataccacgatgacttcttcccagagtcagcttacgtcgctgcctctgaggtgcattacagcaccaggaacccccaggcagtcaataagtgttgatggttctgtaagaacaactgctccatctagcatggtgttctgagttccaggtaaaaaattaacaaggtggtgggtttttatccagagcacaaaacaaagtgcccaccagggggctttgacagaggtgtgccctgttgtttgagttccccatgtactgtagttactctgtttagaattatttcctaggtgcctgaaagtgttctgacatgacacttgctactttgtaggccatctgtgatggcaggtaaaaagcaactgttcacagtgaaatgttcatggaagtgtacataggttaggccatttcagcagacattgcagttagtcagcaagaaccacattgtttcgttatttgttagcattaaacaaaattttttttgcaaattggtttcattctcttgatgaagctgagcaactgtccaacaaggtttagtttgtacttgaaaactgcaaagtagtctcaaagtattttagagggaatccatattgatggcaaaagaaaatttgcagctataatttgcttctgacggttccttctctgtgaaacattatttttggtgatctaaagaaagcattgcctttcttgtttgcaattttacagctatacttttttgtgtaatgttacggttccctttctgtaaaatgttctttttggtgatctaaataaagcctctcttgtt

SEQ ID NO: 224860 - DNA, 1000 bp, Homo Sapiens
gtataaaagtgcactacaagaagcatgtctactctatggatattctcatgagcaaagactggaaatgtgctgcctatcaaaactacaagataaatccgaaacacatgacaaagttgctgcactggtcaagaaaaggaagcagacttctaaaaataatattgaaaagaagaagcccaaatttagaaaaaggaaaaggaaagcaattttaaaatgctcttttgaaaatgtttattctgatgatgccttatcaaaggagaacagggttgtctgtgagacggaagttttactaaaagagctggagcaaatgctgcagcaagcactgcaacccacagccacacctgatgaatcagaagaaggacatggagaggaaataaatatgggagaaaagttatctaaatgcagcccagaagctcctgcaggcagtctgtttgaaaaccactatgaagaggactatcttgtaattgatgggataaaattaaaagctggagaatgtattgaggatataactaataaatttaaagaaatagatgctttgatgtctgagttttagaacattatacatttttcaaattaattataaaaatattggcatctttatatttatccaaagttaaaactttaaaaatgtttagtgaaataggtataaattataccaaagtttatatttgcggtaactttctacttcatattttgagaatggccatgatttttagagccagtcaaatggtatttaagttagtgttaaaaatttagaattaaaaaaccctgatatttgtatttatatatttcttgtttgccttaatttttaaatggtttgtgaaatttgcctaacaaacatatgttttacaatgattgtttaggccctttgttcaaaaatggataacttaaaatggctggccaagctattataattctcagaggtaattcaaatctaataaacttagagaatgtatatttgcagtggaatcaaactattacaaaataaaaggaaataattttt

SEQ ID NO: 224861 - DNA, 1000 bp, Homo Sapiens
tgttcatgggtttcttccgtatggagtggattaagagtgttttattttgttgttctaactgagaaaaaaaggaggcacccacaaggttgaggtcacacagtctccacagtttccaggaggcgtttgggggtggggaaggcacctccagagcatgaggctctaaggggacatgagtaaagcatgtctgtgacccagtgaggaagggagaggccagctgcactcctgcacggggttcctagctgcagaagggtcccgcctaggccgaggggaaacacctgatagcagaagaggcctggatgcacacctggcacgccgaggctctccgcccagacacagtgctccatgtcagcccctgcacctggggtgtgtgattcacgtgcacagatgccacaatcctgcaccaatatcccacagatgggggaaggtgagaggaaggggcaagtgatgtgtaactgctcaagagatgcttaaacctccatagagaggagccgggcgcaggggcatctgtgtgtcccgtcacacactgcagcagggaagggtggctggctggctccctggcatcagtggtttggtttaagctccagagggtcttattgccattgtcttttcctctgccccttgagccagcctaaggccctggagtctgtttctttaggcggatgaactgacatgctcctaccatgaccaggctctgggcaaggctcctcacagtatccttgagaggtgggcatggaagtgcccatttctcaggtacagaaaccttcagagaggataaatagcttgccctgtagaagcaggactgaaacccttgtctgcctgactcccccagctactctgcccactgtagccccctgccttactgtcctggcacacccctcaccatcctgtataccttaaatatcaaagagggcaagagagaaagggctttaaagataagttatttttttaaggaaccttaatattatttttaagaagtaaccaaattagtgacgtgaaatgc

SEQ ID NO: 224862 - DNA, 1000 bp, Homo Sapiens
gattacttactacaaaaaagggaaaatatgccaaaaaataaaaaaccttaaaattcatatgaagcaacgtaacagataactgagcacttggctcaagtggtcagacttttcataatgttactgtgtaagtttggaattacctaataaccccaggctcaggattaacagaaggttctgggtgagttttaaaacatttaatatacctatgatttgttttacaacttgaagaaaaggcaggcagtcttgtgtctaatgagcttaatgcaaattctaattatactgcaaataatttaaagttttgattgcattctacaattgtctgtttggaaaattacatattatgaagtcattatatattttatcaaatcagaaaaagtcagctcaggaactgtagcagcagggagttctaaagatgacatgaactatactataggggtgccctactctatatggcctagggctttggtttgggtcagtcttgttctttcagatacataacaccagcagtactttcgggctcacttcaagaaccagataactctcccaaaccatgatacatgaagtgtataatcaagatttttaattaagctttagaattctttatttgtgtagagtgatggaaatgaccaagaagtaataatataaagcaaaagaattgggagagatcaggttttaagtatataaatattttttttttctcatggcatattctcaaaggtgttttgttacaaaccagattttcattttttaaaaaatgagacttggtggtatttaaaacctacacctaccatgttgctatttcactttcattgctttagttgcttaatatttaagctttgcttcatgctaccttttgtctgtatttcaatcttcataagcctattttgttttgtagacttgaatgataaaaattgtttctcatcttaagtatgctcagagttttaaatgttaaagaatgttgtgtaacctttatccaataaagtctttgattttttaaaaa

SEQ ID NO: 224863 - DNA, 1000 bp, Homo Sapiens
gaagactgggggctgcaggcgcgctaggagaactatgccatttttgggtcaggactggagatctcctggatggagttggattaagacagaagatggctggaagaattgtgaatcttgtagtcagaaacttgaaagagagaataaccattgtaacatcagtcacagcattatcttaaatagcgaagatggagaaatactcaataatgaagagcatgaatatgcatccaaaaaaagaaaaaggaccattttagaaatgacacaaatactcaaaaggcatggctattgcaccttgggagaaacctttaatcggttagacttctcaagtgcaattcaagatacccgaaggttcaattatgtggtcaaactgcaggacaaattcgagcatcttaaaatgattcaacaggaggagataaggaagctcgaggaagagaaaaaacaactggaaggagaaatcatagatttttataaaatgaaagctgcctctgaagcactgcagactcagctgagcactgatacaaagaaagacaaacatcctgatccatatgaattcctcttattaagaaaaataaagcatccaggattcaatgaagaactgactatcaccttgttaatcattcagaaacatgttgcagacttaagccatttttgatatagatactgaaacaattacttgctaagagcaaacttgaaggtatggataaggccctgagtcatcttcctgagctgaatgatagttaagctgaattaacaatttggacaagacagcaaatgctattgtcgaagttttctaaagaagaatctgaagtgaaatgacatcaagagacctatcaagacctgtatccaggaaaagaccaaaccaatgcagaccaaaccaatgcagaactcctatgtgctgatggtggtcttacatttccctaagtttctgccgactaaactgtgcacacgttctcgggacctcctgaagctgcgtcacaggcactaatcaaagaacacaaccaag

SEQ ID NO: 224864 - DNA, 1000 bp, Homo Sapiens
tgggggtgtaaagatggtggctggctacgggatgggctgctgttgtacccacaattacacaagaacacagaggtttaactcgagaccctcagtccctgagcccctttggtgtcacagccccaagacccctccacctgcagaagccctgggggacctggcccgggccactatcctggagaagctggaggagttcctcagcgtccgcaccctctacttcatcgcctatctcgccttcggcctggggaccgggcttgccaccctctccaggaacctctacgtggtcctgtcgctctgcataacctacgggattttattttccaccctgtgcaccttgccttactcgctgctctgcgattactatcagagtaagaagccactgtcccccagcatggcatgcaggggagggagagtgagtgacgtgcccaagctggaggccacgaggaccttggagcctcggacagaggaccagcggctgtcatgtgcagaggactttgggggtgtagggcaggtcccatcctggatgaagtcatggattcttttcattgtcgtcatctctccgaacacaaatattgttaaactcttggctgaactccctgtgcatgttggcgctgaaaaatgtgaggccgctgtgtgtgggccgctcgggcctcctgggctcgcaggacacaccgagctcggtcaccccgtgctggccgcggcgtgtctcgctgacacgtttcttcctctgggtcagtttgcagggtccagtgcggacggcacccggcggggcatgggcgtggacatctctctgctgagctgccagtacttcctggctcagattctggtctccctggtcctggggcccctgacctcggccgtgggcagtgccaacggggtgatgtacttctccagcctcgtgtccttcctgggctgcctgtactcctccctgtttgtcatttatgaaattcctcccagcgacgctgcagacgaggagcaccggcccctcctgctgaacgtctga

SEQ ID NO: 224865 - DNA, 1000 bp, Homo Sapiens
cttcaccaagaaagagccactcggtgtctgtgccattattattccctggaactacccgctgatgatgctggcatggaagagtgctgcgtgtttggcagcaggcaataccttagtgctcaagccagcacaggtcacgcccttgactgctttgaagtttgcagaactgtctgtgaaagcaggctttccaaagggggtcatcaacatcattccaggctcaggtggcatagcaggacaacgtctgtctgaacatcctgacatccgcaaacttggtttcactggatccactcctattggcaaacagatcatgaagagctgtgctgttagcaacttgaagaaagtttcccttgagcttggtggcaagtctccacttataatatttaatgactgtgaacttgacaaggctgtgcgaatgggcatgggagcagtatttttcaacaaaggagagaactgtattgctgctgggcggttgttcgtggaagaatccatccacgacgaatttgtgacaagagtggtgagatccactgatcatgggccccaaaatcataaggctcatctggaaaagctgctgcaatactgtgaaactggagtgaaagaaggggccactttggtgtacgggggaagacaagtccaaaggccaggctttttcatggagccgaccgtgttcacagatgtggaagactacatgtacctcgccaaagaggaatcctttgggcctattatggtcatttctaaattccaaaatggggacatcgatggagtgttgcagcgagcaaatagtacagagtatggtttggcctcaggggtttttacaagagacataaacaaagctatgtatgtgagtgaaaaactggaagcaggaactgtttttattaacacatacaacaagacagatgtggcggccccatttggcggagttaaacaatctggctttggaaaagacttaggtgaggaagctctaaatgaatatctcaaaaccaagacggtgacactggaatattag

SEQ ID NO: 224866 - DNA, 1000 bp, Homo Sapiens
gctaaagaaaaattgtggtcattgatgatggaatatatgacttgcaggctttgaagtctgcagaattcaagaaaagagctgcaaatgcatttttgtatctttattcaggactcacatgctttaccctaaagaaacctggggctaggggaaatgaaaggaagcctgaagactgactaccaaaacatgcaatatacttattcactgtctaagtctgtagtataacatgaactggagtctctatccttttctaaaatcgcattttgtaagaaaagaaagaaaaaaaaaaaaaaagaatgtagtcccacaactcctgatttgaaagaaacaccttgtattttttatatacatctcttatccactgtgacttttcttttaaactgggctctgtgattccagagtttagaatgtagaaatgaaatgcttagctttaccttttcttggggggtgtggaccctgccagaaatgtaattacgtatgctcaagtgcattaattgaaggcactgtgcacaccattggactgctgaccacagttaaacatttccagtaaaatttcgtaactggtcacagctcattcataatcactgtattttttgaccctgataaagacaattattttgatggtgttctggtactgtaattggtatcctttaaattatttaaaacttttgggtgtggggcaggcagagagggatggtgtccagagatacatcacactttacatcctatcttactgtcctctgtttttcttaccctccttacatcctttttgttaaaaataaaaagcattgtagctgttggtttgtgttgtattttaacaaagaatgaatgattacagtgtgcatcatttagaaacctttcaaatgttaccttcttgaattgccctagaaaagaacaaaattagttgactacccaaccaaacctttcagttgatatttgctttttgtgtttatttatatgtaactaagtctattaatataataaaaatgaatatacctgcagc

SEQ ID NO: 224867 - DNA, 1000 bp, Homo Sapiens; identical to SEQ ID NO: 119187

SEQ ID NO: 224868 - DNA, 555 bp, Homo Sapiens
agaattgatagttttaattctacccattttcacctggcacatcagatcagtggcaatcatttattttatggggtgtggaggggaaagggatagaaagcggatagaaagctagaatccactgaagtccctgtcctaaaaatctcagagctgtgtttacttagcttgttttaaaaaaaatctcgccgccatgtatgacaagtgttactgcaagaaattcatcagccttctacagatacttccagttttgctgtaatgatctgcagaagagaactgccatcactttctcacatcccaaggtgttgcaggaactcagagagaggggagagtggctgaaacgcttaattaccggaggcgaaggaggggcgcgcgggggaccgaaggagaggggagtgaagaaggaaggtcctttaccaggcttgtacctggagaaagctttgaatcgcttctctgctatatttggaaaaggtatgcttgctttttaaaaaaatgcctttagggcaaagtgatacccttgtgtaataattaactcagacaataaaaataattggaaaatca

SEQ ID NO: 224869 - DNA, 1000 bp, Homo Sapiens
cgacggtcctgactctgaagcagataaagatcagcatccggagaataagcccagctggtcagtcccatcccccgactggcgggcctggtggcagaggtccctgtccttggccagggcaaacagcggggaccaggactacaagtacgacagtacctcagacgacagcaacttcctcaacccccccagggggtgggaccatacagccccaggccaccggacttttgaaaccaaagatcagccagaatatgattccacagatggcgagggtgactggagtctctggtctgtctgcagcgtcacctgcgggaacggcaaccagaaacggacccggtcttgtggctacgcgtgcactgcaacagaatcgaggacctgtgaccgtccaaactgcccaggaattgaagacacttttaggacagctgccaccgaagtgagtctgcttgcgggaagcgaggagtttaatgccaccaaactgtttgaagttgacacagacagctgtgagcgctggatgagctgcaaaagcgagttcttaaagaagtacatgcacaaggtgatgaatgacctgcccagctgcccctgctcctaccccactgaggtggcctacagcacggccgacatcttcgaccgcatcaagcgcaaggacttccgctggaaggacgccagcgggcccaaggagaagctggagatctacaagcccactgcccggtactgcatccgctccatgctgtccctggagagcaccacgctggcggcacagcactgctgctacggcgacaacatgcagctcatcaccaggggcaagggggcgggcacgcccaacctcatcagcaccgagttctccgcggagctccactacaaggtggacgtcctgccctggattatctgcaagggtgactggagcaggtataacgaggcccggcctcccaacaacggacagaagtgcacagagagcccctcggacgaggactacatcaagcagttccaagaggccagggaatattaa

SEQ ID NO: 224870 - DNA, 566 bp, Homo Sapiens; identical to SEQ ID NO: 119190

SEQ ID NO: 224871 - DNA, 817 bp, Homo Sapiens
gtagagcgactatgggcgcacgccgggtatccgcgccgcagccaggctcggagcgcgcggctggaggggcgcgggcggcgcgcgctccagagatgccttcctgcgaggctccgtcagcgcggcccggggagatcgcccgcaggcagcggaggcgcggcgggccgggggacgaccagggagcccctaacaaagcagctttgggagggccggaggcctctgcctccctcggcgataggtccgcgaagctgcctgtcatctcgcataggtggaggtggccaatggcgtgcacagacggagctctagttggcgcgcgcgcgcggctcggcatcggtgggattggtcggaggttgtggagaacgcggaaacggagacgctggcggtacagcctcgagcgaaacctttccctacacgaggccggagcttcctcctctcctgaagagctctagacttccccatttacaacaaaggctgggatgtatgttccttacaccttgattccatacacacgtgttcgccccgggagctgggaaggtctgcgctcccggggtgatcttgttgaaaacaaaaagaattgcccacgctgtggaagataaacctaaaccggaaaattgaaagtcatccctgattcctccttcttcttaaccctctcccatccatttttgttaacctcccaaacccattcctcccatcctgtctcacctggacctcagtaaagggctcccatcgtccttctgtcccaggccttgccccctgaaatctgttctccactttgcagaatgatccttctaagcagaaaaatctcattttgcgctcccaa

SEQ ID NO: 224872 - DNA, 1000 bp, Homo Sapiens; identical to SEQ ID NO: 119191

SEQ ID NO: 224873 - DNA, 1000 bp, Homo Sapiens
cctaaatgctccacttaaaagatatagaatggcagaatgggtaagaattcaccaaccaagttgctgctgtcttcaggagactcacctaacacatacggactcacataaacttaaggcaaagggttggaaaaagacacttcgtctaaatggacacatcaaaagcgagcaggagtagctgttcttatatcagacaaaacggactttaagacaacagcagttttaaaaagacaaagagggacattatataatgataaaaggactagttcaacaggaaaatatcacagtcctaaatatatatgcacctaatactggagatcccaaatttataaaacaattactactagacataagaaatgaggtagttggcaacacaataatagtgggggatgttaatactccgctggcagcactaggcagatcaccaagacagaaagtcaacaaagaaacaatggacttaaactataccctggaacatatggacttaacagatgcttacagaacattctacccaacaagcatagaatatacattgtatacatcagaacacgggacattctccaaaatagaccatatgatagggcacaaaacaagtctcagtaaatttaagaaaatcagaattatatcaagtactctctcagaccacagtggaataaaattggaaattaattccaaaaggaacactcaaaagcatgcaaatacatggtaattaaataacctactcctgaatgattgttgggtcaacaatgatatcaagagggaaatttaaaaattctttgaactgaacgataatagtgacacaacctatcaaaaactctgggatacagcaaaagtggagctaagaagaaaattcatagcattaaatgcctatatcaaaaagtctgaaagagcacaaataaacaatctaaggtcacacctcacagaattggagaaactagaacagtccaaatccaaacccagcagaagaaaagaaataacaaaatcagaacaaaactaaatgaaa

SEQ ID NO: 224874 - DNA, 1000 bp, Homo Sapiens
caaccgcagcgtgctgcgcctcgggctggcctccaccaagctcacgtgcgagggcgcggtggcggtggcggagttcatcgctgagagcccccgcctcctgagactggaccttcgggagaacgagatcaagacaggcgggctcatggcactgtcgttggccctcaaggtgaaccactcactgctgcgcctggacctcgaccgtgaacccaagaaagaggcggtgaagagcttcatcgagacgcagaaggcgctgctggccgagatccagaacggctgcaagcgcaacttggtgctggcgcgggagagggaggagaaggagcagccgccacagctgtcggcctccatgcctgagaccaccgccaccgagccccagcccgacgacgagcccgccgctggggtgcagaacggggcccccagccccgcacccagcccggactcagactcagactcggactcggatggggaggaagaggaggaagaggaaggggagagggacgagaccccctgtcctgccctggtgccccccacggactccctgggccctggggacaggagtcccccaggcagcccctccacacccaccgagcagcggatttccgtgtccagcccgggccggggccacaaggtgtttgtggtgacccgggtggagagcccgcccgagagggcagagccccctgcgtcccccacccctccctctcccccaccccctccctccccacccgcctcaccttccctaccaccagccggggccattgacacccgggacacagggtcctctgagcctcagccaccaccggagccgcctcggtcagggccaccactgcccaacggcctgaagcccgagttcgccctggcactgccccctgagccgcccccggggcctgaggtcaaggggggcagctgcggcctggagcacgaactgagctgctccaagaacgagaaggagctcgaggagctgcttctggaagccagtcaggaatccgggcaggagacactgtga

SEQ ID NO: 224875 - DNA, 1000 bp, Homo Sapiens
cagcaaggggtttggctttgtgtgtttttcctccccagaagaggcgacaaaggccgtgacagagatgaacgggcgcatcgtgggcaccaagccactctacgtggcactggcccagcgcaaagaggagcggaaggccatcttgaccaaccagtacatgcagcgcctctccaccatgcggaccctgagcaaccccctcctgggctcctttcagcagccctccagctacttcctgcctgccatgccccaggtcattgggttagctgacagggagccaagattgaaatctaagatctttgccctgcaggattcagggctaatggacatcctgagatgggaggaaggagctttcattacagccttgtgggtcttgactcaccagtccctgcaggagccacctccagcccaggctgcatactatggctgtggcccagtgacacccacccagcctgcccccaggtggacatcccagccacctagaccttcctgtgcctcaatggtccggccaccagttgtgcctcggcgccccccggcccacatcagcagtgtcaggcaggcctccacccaggtgccacgcacggtgcctcatacccagagagtagccaacattggtactcagaccacaggacccagtggggtaggatgctgtacaccaggccggccgctcctgccgtgcaaatgttcctcagcagcacatagcacctatcgggtccaggagccggctgtgcacatcccaggacaggagcccctgaccgcgtccatgctggctgcggcgcccctgcatgagcaaaagcagatgattggggagcgtctctacccccttatccatgatgtccacacccagctggctggcaagatcacgggcatgctgctggagattgacaactcagagctgttgctcatgctggagtctccagaatccctccatgccaagatagacgaggcagtggccgtgctgcaggcacaccaggctatggagcagccgaaggcgtacatgcactga

SEQ ID NO: 224876 - DNA, 1000 bp, Homo Sapiens
tctacctgagactccggccattgacccagccccagggcatgggctggtcttttgtacagaggcagaaaaaagcaaggcaaaggtacagcattccaggggctgcacggcctcaacagagcgctcaacttctggctgagggtctgtgtgaccttccccgagatgcagagctgagccaaactaggtggccacctacaaaagggccaaggccaggcaagttgaggccctaaataaaaggctccaaggcaagtgtgtagaactccaggcctcgctgccggtcagctgctcggcacttctgcgtcaagaggcactggggatgcagcaggctggcaggtggctggccctgctaatgcaagactgctcaggccatttcagcagcagccaggtgtcaccttggtgagctggggaaggtgggaaggcacaaagccagggtttctacaaccacactctcagcccgactgacttgctgcgagtgctggtggagctcacagacggcggctggtggatggtggactgtgaacctcactttccctatgttcagcagcacaaagggaagaagccaccacatcagcccaggagccctgagcagcacaggcagtagggccactcactttggccatccgcacccaaatgcaatcaatcaacccagcttcggaagctaccctaggatctcgtcaataaactgctaagaagccatcaactggcctaaagaaagagttcactgaagaacgcaattgctttaaagaaagaaaaattagtttcctatttaagtcttaaaaaaaagcaaaccatgtcctgagatgtctgtgttaatagtgcagagagaacctagggtttgaggttgctgtagcaatggcattggagaactttaacttgaacattctcatcgatacttcctggacatattttgtgtttttaacttacttagtatttatttgccttgttcatatgttcaattttctgaaatttcaattaaactattggtgtttcactttttacccaa

SEQ ID NO: 224877 - DNA, 1000 bp, Homo Sapiens
tatggaacaggatatttcttactatgtaatacatgccataagtgtgtattttctgatcatggccttctcaccacaatggcttacaaacttggcagagacaaaccggtatattatgctttggaaggttctgtagctatagctggtgctgttattcgctggctaagagacaatcttggaattataaagacctcagaagaaattgaaaaacttgctaaagaagtaggtacttcttatggcagctacttcgtcccagcattttcggggttatatgcaccttattgggagcccagcgcaagagggataatctgtggactcactcagtttaccaataaatgccatattgcttttgctgcattagaagctgtttgtttccatattcgagagattttggatgccatgaattgagactgtggaattccactcagtcatttgcaggttgatggaggaaggaccagcaacaaaattcttatgcagctacaagcagacattctgtatattccagtagtgaagcccttgatgcccgaaaccactgcattgggtgctgccatggcggcaggggctgcagaaggagtcgtcgtatggagtcttgaacctgaggatttctccgccgtcacaatggagcggtttgaacctcagattaatgctgaggaaagtgaaattcgttattctacatggaagaaagctgtgatgaagtcaatgggttgggttacaactcaatctccagaaagtggtgaccctagtgtcttctgtagtctgcccttgggcttttttatagtgagtagcatggcaatgttaatcagagcaaggtacatctcaggtattccataaaacctaccaactcatggattcccaagatgcgagctttttacataatgaaagaacaacccagcaattgtctcttaatgcgatgacactattcatagactttcattttatttataagccacttgctgcgtgaccctccaagtagacctgtggcttaaaataaagaaaatgcagc

SEQ ID NO: 224878 - DNA, 1000 bp, Homo Sapiens
gcaccttagtagcagcaacgtcatgccttttaatctctatatgttcaaaaacaacaaccccatcagcaactcccaggacatcaagtgcttcatgacagatgttaacagctggctgctcacctttggattccagctacacaacgtgatccctggttatcccaaaccagacatggatgccatggaaccctcctacgagctcatccacacacagatgaaaacgcaggagtgggacaacagcaagtctatcctcggggtacagtgtgaagtacagaagcagctcaaggcctttgtcaccttagaacggtttgaccagctctatggctccacaatcaccagctgccagcaggctccaaagaccaagaagtttgcatccagcggctcagtctttggcaagggggtcaagtttgccttgaaggatggccgagtgaccacagacatcatcagtgtggccaatgaggatgggcgaagggttgctgccatcttgaaccatgcccactacctagagaacctgcacttcaccattgatggggtggatacccattactttgtgaaaccaggaccttcagaaggtgacctggccatcctgggcctcagtggggggcggcgaaccctggagaatggggtcaacgtcactgtgtcccagatcaacacagtacttaatggcaggactagacgctacacagacatccagctccagtacggggcactgtgcttgaacacacgctacgggacaacgttggatgaggagaaggcacgggtcctggagctggcccggcagagagccgtgcgccaagcgtgggcccgcgagcagcagagactgcgggaaggggaggaaggcctgcgggcctggacagagggggagaagcagcaggtgctgagcacagggcgggtgcaaggctacgacggctttttcgtgatctctgtcgagcagtacccagaactgtcagacagcgccaacaacatccacttcatgagacagagcgagatgggccggaggtga

SEQ ID NO: 224879 - DNA, 1000 bp, Homo Sapiens; identical to SEQ ID NO: 119193

SEQ ID NO: 224880 - DNA, 1000 bp, Homo Sapiens; identical to SEQ ID NO: 119196

SEQ ID NO: 224881 - DNA, 1000 bp, Homo Sapiens
taggaaactccctgttcctagacaagcgactaaagcctcggcagcactatttggacagcatcaaggagctttatggagcttttgctttttctgccaacttcacagattctgttacaactgggaggcagattaatgactatttgagaaggcaaacatacgggcaagtcgtggactgcctcccggagttcagccaggacacgttcatggttcttgccaattacatcttcttcaaagccaagtggaagcaccctttcagtcgctaccagacccagaagcaggaaagtttctttgtggatgagaggacttctctccaggtccccatgatgcaccaaaaggaaatgcacagattcctctatgaccaggatttggcttgcaccgtcctccagatagaatacagaggaaatgccttggcgctgctggtcctccctgacccggggaaaatgaagcaggtggaggctgctctgcagccacagaccctgagaaaatggggccaattgctcctgcccagtctgttggatttgcacttgccaaggttttcaatttctggaacatataacctggaagacatacttccccaaattggtctcaccaacatactcaacttagaagctgacttctcaggagtcactgggcagctcaacaaaaccatctccaaggtgtcacacaaggcgatggtggacatgagtgagaaggggaccgaggccggggctgcttcaggcctcctctcccagcccccatctctgaacaccatgtcagacccacatgcccacttcaacaggcctttcctcttgctcctttgggaggtcaccacccagagcttactcttcctgggaaaagttgtcaacccagttgcagggtaaccatggtgggaggccaggagttatcttatctcatcctggaccaaacagataggccagaaccagcctgcatcctggggctgctatgtggttcagttaatcagtgtgccaagattctaataaagttgaccttgggttctgtg

SEQ ID NO: 224882 - DNA, 1000 bp, Homo Sapiens
tgagtgaagtgttcgatgacgcaagtgaccaggattccactgacaaaccgtggcgcccttactacaactacaaacccaaaaagaaatccagacagttgaaaaaaatgaggaaagtcaactggaggaaggagcacggaaacaggagcccgagccataaatgtaaatacccagcagaactggattgcgccgtggggaaggctcctcaggataaaccctttgaggaagaagaaactaaagagatgcccaagctgcagtgtgaactctgtgatggagacaaagcagtgggggctggaaaccaaggaaggccccaccgacatcttacttctcggccatatgcctgcgagctctgcgccaagcagttccagagcccttccacactcaaaatgcacatgagatgtcacaccggggagaagccataccagtgcaagacctgcggacggtgcttttcggtgcaaggaaacttacagaaacatgaacgcatccacctgggcttgaaggagttcgtctgtcagtattgcaacaaggcattcaccttgaatgagaccctcaaaatccatgaaagaatccatactggagaaaagcgttaccactgtcagttctgctttcagagatttttgtatctctccaccaaaaggaatcacgagcagaggcatattcgggagcataatgggaagggctatgcctgcttccagtgccccaaaatttgcaaaacagctgctgcccttggaatgcaccaaaagaaacacttattcaaaagcccaagtcagcaggagaaaataggtgacgtgtgccacgaaaactcaaatcccttggagaatcaacatttcattggttcagaagacaatgaccaaaaggataacatacaaaccggtgtggaaaatgttgtcctttgagtggcaagaattagaaaaatcttcaaaaatatagttggtggtttttttagttatgatttaagtttagtttcattttgtccatgtgacagtcatgaaggagtgaaatt

SEQ ID NO: 224883 - DNA, 1000 bp, Homo Sapiens
gaattttcttttttttttaagacagagtttctctctgtcacccaagctggaatacaatggcactatttcagctcactgcaacctctgcctcccgggttcaagcgattctcctgcctcagcctcctgagtagctgggattataggcacacaccaccatacccagctaatttttgtatttttagtagaggcggggtttcaccatgctggtcaggatggtctcgaactcctgacttcatgatccacccacctcggcctcccaaagtgctgagattacagacgtgagccactgtgtcctgcctaaaatgaattttctagatgattgaataacagtagtcctttgataggagataatgacttggtttatggccttaatatactacttaattacttaagatgtttattaatagaatgataaatgtacagagtaacctataagtgtgacatacttttgctttcagtagtttcatgtaaagaaaaaaacttgaaaatagattactattaacctgaggacccatgggaataacagacactggggaggtagggtggggagcgggaacaagagctgaaaaactacctactgtggactctgctcactacctgggtgacaggatcatccataccctaaacctcaacgtcacacagtacacccagctaacaaacctgcccatgtgttccctgaatctaaaaaagaatcaaaataattgtttaaaaaaagaaaaagacaatagtattacccatgggacaaaatttgtactattagcaagaatcatttgtgtctcatttagaaacaatttgacttttgttccattgtttaaactttgacaaaaatggttttgaatagatctttataacctgatgccataaatacaagattctctgataccttcatttaatatatcaatattgggcctaaaagagtattctataaagcttaaattggtattaactatgatcatcttgatgtctatgatagataataaacaaggtcatacatacctta

SEQ ID NO: 224884 - DNA, 938 bp, Homo Sapiens
agaaaacaccaaatggcggatgacgccggtgcagcgaggagggtccggaggccctggtggccctgggatggggaaccgcggtggcttccgcggaggtttcggcagtggcatccggggccggggtcgcggccgtggacggggccggggccgaggccgcggagctcgcggaggcaaggccgaggataaggagtggatgcccgtcaccaagttgggccgcttggtcaaggacatgaagatcaagtccctggaggagatatatctcttctccctgcccattaaggaatcagagatcattgacttttgcttgggggcctctctcaaggatgaggttttgaagattatgccagtgcagaagcagatccgtgccggccagcgcaccaggttcaaggcgtttgttgctatcggggactacaatggccacgtcggtctgggtgttaagtgttccaaggaggtggccaccgccatccgtggggccatcatcctggccaagctctccattgtccccgtgcgcagaggctactggaggaacaagatcggcaagccccacaccgtcccttgcaaggtgacaggccgctgcggctctgtgctggtgcgcctcatccctgcacccaggggcactggcatcgtctccgcacctgtgcctaagaagctgcttatgatggctggtatcgatgactgctacacctcagcccggggctgcactgccaccctgggcaacttcgccaaggccacctttgatgccatttctaagacctacagctacctgacccccgacctctggaaggagactgtatttaccaagtctccctatcaggaattcactgaccacctcgtcaagacccacaccagagtctccgtgcagcggactcaggctccagctgtggctacaacatagggtttttacacaagaaaaataaagtgaattaagcgtgaaaaaa

SEQ ID NO: 224885 - DNA, 1000 bp, Homo Sapiens; identical to SEQ ID NO: 119199

SEQ ID NO: 224886 - DNA, 1000 bp, Homo Sapiens
cagtgacaagcagcgcctcatggagatgtacaacaacgtcttctgcccccctatgaagtttgagtttcagccccacatgggggatatggcttcccagctctgtgcccagcagcctgtccagagtgagctggtacagagatgccaacaactgcagtctcgcttatccactctaaagattgaaaacgaagaggtaaagaagacaatggaggccaccctgcaaaccatccaggacattgtgactgtcgaggactttgatgtgtctgactgcttccagtacagcaactccatggagtccgtcaagtccacggtctctgaaaccttcatgagcaagcccagcattgctaagaggagagccaaccagcaagagacagagcagttttatttcacagtaagggagtgctatggcttttaaagagcgtcagcatgcactgcagcactcaagggagatttggaactcagagtccttgttaagtgtctgaaggacaggcattgaatatcttagatacgaatgtgggcatactcagagaccatccctacacttaaaggtgcaaacattaaaagttgtatatgtctaacagggatccgcccaagagaaaggatgctcccaagtatacaactaagaagattttcttttttaagaaatttttaactagctagtaggctttcactggaaagtttccttctcaggcacaggggatcctgaaaggggaacttcatcttttagttcttggagagtacatacaaatattcataataacacatattttgtttataaaaatctataatctcttctaggtgatatgatgacattattttataacttttattgttgggaaactattttttctaattattgctaaaacttaaaggatgggtaatatgcagcattactattttgcacataattccaaaacatcgtattttcttattcatgtatctctagtcttcttttagacagttggacccttttttctttttctttttttttttttttttttaa

SEQ ID NO: 224887 - DNA, 1000 bp, Homo Sapiens
ggaaaagccctatgaatgcagtgagtgtggaaaggcctataggcacagctcccatctcattcaacaccagagactccataatggggagaaaccctataaatgtaatgaatgtgcaaaagcttttaatcagagctccaaactcttcgaccaccagagaacccatactggggagaaaccttatgaatgtaaggagtgtggggcggcctttagtcggagtaaaaatcttgttcgacatcagtttctgcacactggtaagaaaccttataagtgtaatgaatgtgggagagcattctgttccaatagaaatctcattgaccatcagagaacccacactggggagaagccttataaatgtaatgaatgtggcaaagccttcagtcggagtaaatgtcttattcgacatcagagcctccacactggggaaaagccatacaaatgtagtgaatgtgggaaagccttcaatcagatctctcaacttgttgaacatgagcgaattcatactggagaaaaaccatttaagtgtagtgagtgtggtaaggcattcggtctgagtaaatgtcttattcggcaccagaggcttcacacaagtgaaaagccctataaatgcaatgagtgtggaaaatccttcaatcaaaactcatacctcattatacaccagagaattcacactggtgagaaaccctatgaatgtaatgagtgtgggaaggtcttcagttataattctagtcttatggtacatcagagaacccatactggggaaaaaccctataaatgcaatagttgtgggaaagcctttagtgacagctcacagcttactgtgcaccagagagtccacactggagagaaaaaccttatgaatgtattgagtgtgggaaagcctttagtcagcgttccacttttaatcaccaccagcgaactcatgctggagagaagccctcaggtctggctcggtcatcttcttaaggcatggttttctgagacagacagcaaagacctttga

SEQ ID NO: 224888 - DNA, 1000 bp, Homo Sapiens
taatcatacccacttactatatcataccaaaattcgttggttgtctcaagggaaaatactaagcagggtttatgagctcaggaatgagattcacttttttctcattgaaaaaaaatctcatttggcaagtatttttgaagatgatacttgggtaacaaaattggcatatttaactgatatttttagcattcttaatgaactgagtttaaaactacaggggaaaaacagtgatgtattccaacatgttgaacgtatccagggatttcgaaagacattattgttatggcaagtaagacttaaaagtaatcgtcctagctattacatgtttccaagatttttgcagcatattgaagagaatattattaatgaaaacattttgaaagaaataaaattagagatattgttgcatctcacttctctgtctcaaacttttaaccatttctttccagaagaaaaatttgaaacattaagggaaaacagttgggtaaaagatccatttgcttttcgacaccctgaatcaataattgagctaaacttggtgcctgaagaagagaatgaattattgcagcttagttcttcatatacattgaagaatgattatgaaaccttaagtttatcagcattttggatgaaggtaaaggaagactttccattgttaagtagaaagagtgtcctgctattgctaccattcacaacaactagtttgtgtgaactagggttttccatcttaacgcagttaaaaacaaaggaaagaaatgggctgaattgtgcagcagttatgcgggtagcattatcttcctgtgttccagactggaatgaacttatgaacaggcaagcacacccatcatagtaaataaaaatcttacctagcttttgtctttgtatttcttattttgtagtatttttctatgttatatttaaatggtactataatactgtgatacttttgttatgttttaatttttgttatatttaataaaattattttatgttcattgaa

SEQ ID NO: 224889 - DNA, 829 bp, Homo Sapiens
gtgtggcccagacagggcactgtctgtggccccaggggttgaggacccctggctttaacaacagaaagaccccagttactggattgggatccaccctcactcaatatggcctcagcttaatgaaagacatctgcagagaccctatttctactaaaagccacattctgagacttctcgtgggcgtgagtttttgagagacactgttctgctccatgcagggagggaattgggatctgaagacgttgcattcgaggtctcggggctcctgatgagcagcctcggcctgacctggggcaggtgtgatgtctgcggctcaccatctccaccctgcctgctgtggaatctccacaacgacaggtgctttggaggccagagtgcatgcgtacgggccctgcacacgctgaatgtcactgggaacaaggacacaccccgcttccaggagaagatagaacatgtcgaccccttttagccatccccagtgcaggacatgctattgacttccatgagacaaacacctacttggaaatcaggttttttctgtaccttttgaaggagcaggaatttcccagcatttcctggacaaagacggaggccacattcgctgcatcctttccagcaagatgtcattctgagatttttgtcattcctgggcgttatgaggactgccaagggacacaattccatgggaggaaagttttcttctaagctgcaagccagctctggcttctggagtttctccttaggattgcaagacagtagttccctgtcctttaggtcttctccagaaataccttaaaatagcaaataaaataagatataagcaaacaaa

SEQ ID NO: 224890 - DNA, 487 bp, Homo Sapiens
atgccaggcctggagcctgtccccacccccaccagcacgcgcgcgctattggtccccgtcctcggccccgccccatggcgcgcccggagaagcccgaccctctctgctcttccccagcctgcgctgctccagctccacgtgcgcccggggatgcaatgcagccctgcagacaagcgtctccggcaggacgtgggccgcgggtctcggagcctccttcacttaggaatcctccggaatccgccccactgcacgccagcagtcggaggcctggggcgtgctgcccacgtgactgacggccgggaaggaaagatggcggcgactatgatggcttcagagagagggcaaccaacgagaggacgccgcccgccagagcgtccacaccgccgctttttctgcggttgcgtcctgggaaggcgcgaattgtgtggctacgggcgggtcgtcctctccaccattttttaatggaaaaaataataattctcaaaga

SEQ ID NO: 224891 - DNA, 1000 bp, Homo Sapiens
ctgggggaggggctttgatgaagacaaggatgaggatgaaggctctccagggggctgcaatcctgcaggtggcaatggtggtgacttccacagactggtcttctaatgtgaacctgctgccaacctgaccccttccctccaggagccaggtagggcctgagggaagctgtggaggcaggccctaccaagaggaaggatggtacagctcatggcaccttagtcctcagcctgatgaagggtacacagagattctctcagatatggaagtaagacctaagtccctttcattggggatcagtcccattaaaactttacacccaagtgtcctggttaacttgaagcagccgagatgggcacacacgggtctttgcctccccctccttccctagcaggctccccatgcgggaagatctgatgatgttcaggaaacaggctagacctcagctccaatgttttgacatcaagtactattttccttccgactgctgtacggtataaagcacagcaggatccaagccttgcacaaaggggtggggggggcagtgtctcctctggctgtcctgtttgtttgtttctcatatgggggtggggggtacctgcactgtctgtacctttctgagaagaacagagaccgagacctgcccccttaccaagcgccactgcatggttttgggggggggggcggggggctagcttctcacagcaggaggcctttgcccccacagcccctccacgcctgcctcagggcctgagaagccaccacttgtatcccccttgtggttagagtcctgattttactgcaaaggtgttcatgttccttgtgaagtgtgggctcttaggaagcctgtgggctcctctgagcagttggcctttgtagctgcaacagcagccacctgcaggttgggtgaagtgccctgacactgctgtagcccccttctaacttctaaccgaagacaagacagacacccatgttcataaataaataaaagtaagcctaagc

SEQ ID NO: 224892 - DNA, 1000 bp, Homo Sapiens
ctgaccagctccctcactgcccatggaagcacccctgcttctgccccggtatcttctctcgggacacctacgcccacctcacccggggtctgcagtgtgcgggagcagcaggaggagatcacgttcaaggggtgcatggcgaacgtgacggtaacccgctgtgagggcgcctgcatttccgctgccagcttcaacatcatcacccagcaggtggatgcccgctgcagctgctgccgccccctccactcctatgagcagcagctggagctgccctgccccgatcccagcacgcctggccggcggctcgtactcaccctgcaggtgttcagccactgcgtgtgcagctctgtggcctgtggagactagcagggtcgctgcctgctctcctggggctgaaggactgcagatgacagacaggaaaacacccaccagcccccttcccgcttgtgccagcagctgctttcctggtcaccaggcctggcccccaagtgccctgggccgtggctccctggggcaccggttggagaggggctgccaagcaggggctcagactaccacactcctgcagaccctgagccagcagagagggactgaggcggacagtggtcacggacctcccaggcacacagggcactcccgaccacccctgcccaccgtccaacacctcccagcccctgaacttggccccagccctgctgggcccagaaccctgcagatgaagccacagagcaggcgctcgaccagacccatcaggggcgaggagggcacggaaacctgtgccgagatgggggcaagaggcccaggcagccaccagcacagagaagaggagatccccagagtcagggagggcagagggtggcagcgagggcagggcagccgcccccgctcccagccaggcagaaggcccccaccagcaccacacccatccccagcagcctgtccttgggagagggcgtcacccggtcagagactccaaataaaccggttcttgtcaaggcac

SEQ ID NO: 224893 - DNA, 1000 bp, Homo Sapiens; identical to SEQ ID NO: 119206

SEQ ID NO: 224894 - DNA, 1000 bp, Homo Sapiens; identical to SEQ ID NO: 119207

SEQ ID NO: 224895 - DNA, 1000 bp, Homo Sapiens; identical to SEQ ID NO: 119208

SEQ ID NO: 224896 - DNA, 1000 bp, Homo Sapiens
tctgcctcagggacttgatattttgtatggaacaggaacgggagatgaagtattctcgagctctatacctggcccttctgaagtgaccactccactcttccatccagatccttgctatttactgccaaagaagacacaaagcattgttgcactgtcctgaaatttcaatttctggaaaataatcaccaacatgaaagagcattgtttacagttagaaactttattaactcttacctatccatctcatgggactcttacagactcagattcatctttgtcttctgaaaatcagttatgaaatacactttgcacagaattaggcatctgcctatctgtgcattaaattaaagcaagttaaggccctatttgttactacctgcctcatttgccaaattgtagcaggtgaggtgtccttccctaatacagcatgcattgagatgcaggagaaaggaagaggcataagaaaatacaagaatgactatttcattctatattgaacctgtcccaaagtggtaggttttctgggctggaatcagaagttgcttagctaactatgacagtcaccctctgtacgtgacaggccactgtggtgactttggtcggctgagttccagtgttgtcaaaacaagacaaatggggatagattgtgcctggggttgctaattctctgcttcatatcaccatatgccgtttctggtaccaagtgaggggacatgcttgtcagggaaaccttaaaattgaatctactgatatatcttgttgaaaaaatggaaaaggtgcaaagtattagaaggaacgttagggcgttgctttcaaactgatgaggggaatgtgaaaatggtatcataaaacaggaaatgtgcttcatatgcccaagaggggaagaggtggaatcggaactccaaaacaactggtacatgttttgttgatgggcaaaaaaaatcacagcacaaccagaaaggagaatgtaccagatgttttcaaattagagtatttcaaa

SEQ ID NO: 224897 - DNA, 1000 bp, Homo Sapiens
ggtgtacttcatgcggaaattgtggctcaacatatctccagggaaggatgtgaatgcagacaccatactccattaccaccaggagctgcccaagtacctgcgcggattccacaagtgttcgcgggaggatgccatccacctggcgggcctcatctacaaggcccagttcaacaacgaccggtcccagctggctagtgtccccaagatcctgagggaactggtgcctgagaacctcacacgcctgatgtcctcggaggagtggaaaaagagcatccttctagcctatgacaagcataaggacaagacagtggaggaggccaaggtggccttcctgaagtggatctgccggtggcccaccttcggatccgccttcttcgaggtgaagcaaacctcggagccttcctacccggacgtcatcctcatcgccatcaaccgacatggggttctgctcatccaccccaagaccaaggacctgctcaccacctatcccttcaccaagatctccagctggagcagcggcagcacctacttccacatggcgctggggagcctgggccgtggcagccgcctgctgtgcgagacctccctgggctataagatggatgacctgctgacctcatatgtgcagcagctcctgagtgccatgaacaagcagcggggctccaaggccccagccctggccagcacctagcagcggatgctggcgtgtctgctcaggcgcccttcccgacctctagcctggcggcaccttcccaggccctctcaacccagggcctgtccttggcgggcagccttccatgctgccccccatacaaagcccactcagccccgcaggcggccccctctgtcctgggcgctgcccagggaggccaaaagacgggcccagaatggggtcgggagtctcggacccccaggctattggtggatgactgactgacaggacacctcccaaccccaccccaccccaccagaatgttcaataaaaactcctggagcagga

SEQ ID NO: 224898 - DNA, 1000 bp, Homo Sapiens
ttggggattcacgtatgccctggaccatctggagcccaagttgctgcagatcctgtcaccacgagtggacaccctctggccaccatagcaaagaagtctgcaggcaggagatggagtctcgctctgttgcctaggctggagtgcagtggcacgatctcagctcactgcaacctctgccttcccagttcaagcaattctcctgcctcagcctcccaggtagctgggattacagtttccaaggcaggaaaggtaaagagacaaagaaagtgccttgtacagatgcaaacggaggtgtagactgtgcagctgccaaagtggtgacaagcaatccagaggaccatgaaaggatcttaatgcaagtcatgaacttgaatgtgccgatgaggcctggcattcttgtccagagacagagtaaggaagtgttggccacacccttagaaaacagaagggacatggaggcagaagaggagaaccaaataaatgagaagcaagagcctgagaatgctggagaaactggtcaagaagaggatgatggtttgcagaaaatacacacatctgtcactagaactccttcagttgttgaaagccaaaaaagacctttaaaaggagtgacattttctagggaggtaattgttgtggatcttgggaatgaataccctacacctcgaagctatactcgagaacataaagagaggaaatgaagctcaaaaaagggtaagagtgaaagaaaatgtaacgtttgactaacgttgaaagactgagggtacaaaatcatgttgaaacaacaaaacaatggggaattaagcaaataaagatattattttacctttgtgcagaaaggagtgagccatgtgcaaaattctgtaagtaaaatacttagagcttgaatataattttttaaaaattcaaatctgagttcaagaaattgattgtattgcccttaaaactatctactcaaacactgttctggcatgtgaataaagtgatttttgtttgtaca

SEQ ID NO: 224899 - DNA, 1000 bp, Homo Sapiens
gcaaagccctcacctcaacagcctggctcaacaaaacccccatctcaacagcctggctcagcaaaaccctcagctcaacagcctagcccagcaaagccctcggctcagcaatctacaaaaccagtaagccaaacaggatctggaaaacctctgcagccaccaacagtgtctccatctgcaaaacagcctccttcacaaggcctccctaaaaccatctgtcctctttgcaataccactgaacttctgttgcatgttccagaaaaggccaattttaacacatgcactgagtgtcaaaccactgtctgtagtctctgtggttttaatcccaatcctcatttaacggaggtaaaagagtggctctgtttgaactgtcaaatgaaaagagctctaggcggggatctggctccagttccgtcatcaccccagcccaaactgaagactgcacctgttaccactacatcagcagtgagcaaatcatccccacagccacagcagacttccccaaagaaggatgctgcaccaaaacaggatctctccaaggcacctgagcctaaaaagccaccaccactagtgaaacaaccaacccttcatggctctccttcagccaaggccaagcagccccctgaggcagattctttgtccaagccagcccctcccaaagaaccttctgtcccatctgagcaggacaaggcccctgttgctgatgataaaccaaagcagcccaagatggtaaagccaaccactgaccttgtatcttcatcatcagcaacaacaaaacctgatattccaagctccaaagtacagtcacaagctgaagagaaaacaacccctcctctaaaaacagactctgccaaaccctcacagagttttccaccaacaggggaaaaagtcagcccatttgattctaaagccatacctcgacctgcatcagattcaaaaattatttcacatcctggtcccagttcagagagcaaaggtcaaaaacaagttgaccccgtac

SEQ ID NO: 224900 - DNA, 1000 bp, Homo Sapiens
atcagataatgcatgctggggaaaagccctataaatgtcaagaatgtggaaacgccttcagtggaaagtcaacccttattcaacatcaggtaactcacactggtcagaaaccatgtcattgcagtgtgtatgggaaagccttcagccagagttcacagctcacaccacctcagcagactcgtgttggagagaaacctgctttaaatgatggctctaaaagatactttattcatatcaagaagattttccaagaaagacatttttaatgtgataaatgcagaagacagtttagcaactgttcacttgacattagaagataagatggcataatgaaagatatataaggtctaaatattactggcaaagtaaaataaatagttcagatgactactaaagtcaaagtcattaaatctggaagtaaacacgagaattcattctgggaaatcaggctgtctgtgtaaaggttactgctgtgctcaggagttgaaccgtgtggtgctgtatccggatactcatgacgaatggatggagggcgtgaaaagtgagcccagctggtgctctgggtctaccctacctgacatccttccagtcttatcctttgtttcctatccaggcccaggcttgtggctgagaacatccactttcagtcccatatacctgcctccaagtgtggtacagagaacttgggcctgctgggggcgcttagccttactctctccaccacctctcccaccaacccccagatgaactgcaggtagacgtttcttccttgcttggagccccagtttttgcatttcattttcattaaaatgaaaggtggtttggttttggttctaaggagctctacagtttaacagagagagggaccttaggggccaagaaagcaggggcctaccaagtatctccacttttgaaaattgtaattactgataaaaaattttttaaaggcaggtttattgaagcataatttataaacaataaaatttactctttttagtgt

SEQ ID NO: 224901 - DNA, 1000 bp, Homo Sapiens
ccccaactgtattgtaatcattgcagttaggtttacatgtgcaatatgcaaggtacttgataggcattttctttttgtttttttgagatggagtctcgctctgttgcccaggctggaatgcagtggcgtgatcttgactcactgcaacctctgcctcccaggtttaaggggttcatctgcctcagcctcctgagtagctgggactacaggcacacaccacaacacttggctaatttgtgtatttttagtagagacagggtttcaccatgttggccaggctggtctcgaactcctgacctcaggtgatctgcctgcctcagcctcccaaagtgctgggattacaggcatgagccaccgtgcccagccaggcattttcaatgctcacaacaactctatgaggtgtgggtattcatttatgcctatgaggacactgaaatttgtggagagcagcatttgttccaggtcacacagctggaaagagacagagctgatattcaaacccaagtttgtccctcaaactaacaccccacactgctttgggagtggacatagtgtcttgaggcttgcagggtatgtcacagacaccagagcagtgtctttggtgctgggaatgaaatgtttgttggcatttagtgtgtttactgggtgccagtcccctcactaagcacctgcattatgtctcccacatgggattctgcaaagtagaaattttacgtctcacaggtgaaggatcaagctcagagaggttaacttgcccacagtctcatgactacaaagtggcagagcagccaggatttgaaccctggtagcctggtgccagagcccaccctgttaaccacaagcagagaggttcttgatattctgatcccattaattatgagggagaaaatgtttctctgctgacaaattgttaaggggaaatttaccctcatttctcctgagccttaggggtgtcactcttaaaatcgcatattcaacaaacaaatgccttctaagtact

SEQ ID NO: 224902 - DNA, 1000 bp, Homo Sapiens
acagaaacaaggctagagaaaaagccatcgttcaaagaaatttcccttgagctcagcctgcgcagtgcccggaaacatggtggggaaagggcccgagcagttggaaggaaaacaaggcaatttaaatttagagtttatgacttgaagttgttttgtttgttgtctattttgtttttgtaaatttctttgacagacttttactaaaaggacatgtagtttccatgaaagtaaaaaaaaaaaacaacaaaaaacccacatatactgtagcattttgtctttatattgttttatttctacaaatctgttcattaatattgtgctttaaggctgaaatgaagtatattatgaatttttttaagaaaactcatcaaatttcagggtatcacaaaactttattatattattatactgcccactatttattatatgttatagatgtctgagaggtaaaccaaatattttatttttaatgttaaaaaaacatcaaatttaactttattagcatattttagcaactttgggataaatacggacttttacttgattttgaaataatcccagtgtaggcccatgtgctggatctgttggatgctagaatatgggctttgaacctaatacaaatatattactagaaaatgtgatttttttaaatgccaagtaaattgatattagtgtatgaattagtcatattttaaaacattatgtggttagagaaatgcggttttctgccatgaatgttaagttgcaaatcagtggaaatggagtcgacctcttcggagcacagggtgtcattgccctcgttgttcaagaggccagaatttttctatccccgctaagaaacaaagcatctatgttgagatatgtgtttttttgtttgattaatttgagatcattctaaatactttatacaatattttcacatgcacaaaaatgcgcgttagtggtttttggagaggggtgaggggtgggggaagtgcaaaataaagattattggctattt

SEQ ID NO: 224903 - DNA, 1000 bp, Homo Sapiens
ttgtaaggaatgtgggaaatcttttacttctcactcaacactaattcaacatcagcaaatacacactggtgagaagctctatgattgtaaggaatgtgggaaatcttttacttctcattcaacactaattcaacatcagccacttcacactggtgagaaaccttatcattgcaaggaatgtgggaaatcttttactcttcgctcagcactaattcaacatcggccagttcacactggtgagaaacgctacagttgtaaagaatgtgggaaatcttttacttctcgctcaacactaattgaacatcagcgaattcacactggtgagaaaccctatcattgtaaggaatgtggaaaatcttttgcttttcgctcagcaataatccaacatcggcgaattcacactggtgagaaaccctatgattgtaaggaatgtggcaaggcctttagacgtcgttcaaaacttactcaacatcaacgaatccatactggtgagaaaccttatcgatgtcatgaatgtggaaaagcctttgtccgtttctcaggactcaccaaacatcacagtattcacactggcgagaaaccctatgaatgtaagacatgtgggaagtccttcagacagcgtacacaccttactctacatcagagaattcataccggtgacagaccttatgaatgtaaagaatgtgggaaatcttttacttgcggctcagaactaattcgacatcagcgaactcacactggtgagaaaccttatgattgtaaggaatgtgggaaggcctttagatgtccttcacaacttagtcaacataaacgaatccatactggtgagaaaacttatcaatgtccggaatgtgggaaagcctttttctatgcctcaggactcagccgacatcagagtgttcacactggcgagaaaccctatgaatgtaagacatgtgggaaggcctttaaacagcttacacagcttactcgacatcagagaattcatgacctaacataa

SEQ ID NO: 224904 - DNA, 1000 bp, Homo Sapiens
accagtggtagagaggaaaggaggagagaagaagttggagctggagagcagaggaagtgcagaaaagctgggaacagagagggaaggaggtgaggaaccactgggcatagagagaaaagttgagggacatttgagggcagagaaggaaggagatgaggaaaagcgaggggcagaggaggaggaggtagaagaaccattgggagtagagaagaaaggaggtgaggaagagccagaggcaaccaaagaaccactggaggcagagagaaagggaggggaggagacactggaggcagagaaaaggggaggtgaggaatcattggagacagagaagacccaagggacggagggagatctgaatctagaacaagggtctagggaaggaagtgaatcccaggcagaggagatgaatgaggcagggcctccccttgaggctaacacggagacaaggccagagaaggaaggaccccagccccaggagaagccagtaggagccctggaggaggaaggagtgaagccccaaaccgctgctgagggccaaggccccttgggggatgccacacctcttctggcagagaccccagccccagagcagcccgccgaatgccagccactgcttcagggggaggggcccagcgccaaccccagtgcccaccctgtgcccacctacgcgcctgcccggcagcctgagccatctgcccccaccgagggtgaagaggcaagtggccctaagcaaaagacgtgccagtgttgtgcggtcatgtgaacccatgcccctccaccccatgtccagctcctctcacagctacctcggcctcttggcacccagaagagggtcccaggcacagacagggaccacaggactggccatggcacctgggagccagctagcctgcacgtccacctaaacctgggcttccagaccccttgcccactgcctgtaaccctggcctccttctgcgatgaagcctttatacttgaaaataaaatgtgaaagcactca

SEQ ID NO: 224905 - DNA, 1000 bp, Homo Sapiens
gcctgcaggaggggcagggccgccccggaataatgtagtcggagggtctccactggccaaagggataaccacaaccatgcacccaggcagtgggagtctgagcagcctggccactgccaccaggcccgccctgcccatcaccactccccaggcccacgcccagcaccccacagcctcgcccccaacaggcagctgtctacggcactcagcccagccaacggccagccaagcccggagcaccatttcaacagctgcccactctgcagcccaggctcaggaccggccaactgccaccgtgtcacccctgcgcacccagaactctccatcccgcctgcctgccaccagcctcaggccccactcggtggtgtccccgcagcacagccaccagcccccggtgcagatgtgcccacggccggccatccccctcacatcagcagcatcagccatcacacctcccaacgtcagtgccgcaaacctcaacggggaggctggaggggggcccatcggtgttctgtccacatccagccccaccaacacgggatgcaaactagacgagaagaaaagtgaaaaggaaggcttgagcacaggccatgagtggtgctccttgcctcctcggggttctgagcctcttgctgtccctgtgcagttgaccaagtccacacgttctgtcgacaggcagccggggaagccagctgctgccagcgctcatcccagcttctccaggtttaccagtgccattcacttccgaagtgacagctacactctgctggcacaggctggctgcatgctcccaccaaccagggtggggaggggcctgctgtcacctgcacacactggcatgagagctctgctggttagtggcactggcgttggctgggcagaaggggtcgcagagtcagccccgtgtggctgggagcaccggcgactccaggtcctcttcctgttcccctattgtcaggctgccttccgagggataaggggagccagcatgtgcggctga

SEQ ID NO: 224906 - DNA, 1000 bp, Homo Sapiens
tgtgtttgtggtggtagcaggtgaagagattgtgctgattcctttaaaggcatattcccaagatgcaggtattgtcttctctaagccagacctggtcacctgtctggagcaaaggaaaaagccatggagtatgaagcacccagaatatggcaaagattttaagcagtcttcaggtcttactatacctgagagaattcatactaaagagagaccctacaagtgtgaagaatgtgacaaagcctttaaacaatcttcaagactgaataaacataagaaaatttatactggagatacaacctacaaatttgaagaaagtggcaaagctttttactattcctcaggccttactcaacataacatagttcatactggagacaaaccctacaaatgtaaagattgtggcaaaatttttaagtggtcttcgaaacttactatacatcagagaattcatagtggagagaaaccctacaaatgtgaagaatgtggcaaagcctttaagcaatcttcaaaactgaatgaacatatgaaagctcatactggagagaaattctacaaatgtgaagaatgtggcaaagcttttaagcaaccttcaggccttactctacataagagaattcatactggagagaacccttacaaattcgaagaatgtggtaaagccttttattggtttttaagctttactaaacatatgataattcataggggagagaaaccctacaaatgtcaagaatgtggcaaagcttttaagtggtcttcaaaccttactatacacaagagaattcatacgggagagaaaccctgcaaatgtgaagaatgtggcaaagcttgtaagcagtctttggggcttacgattcaaaagagaattcatactgaagagaaaccctacaaatgtgaagaatgtggtaaagccttttactggtccttaagctttactaaacatgatagttcatactggagagaagcactacagttgtcaagaatgcatcaaagcttttaa

SEQ ID NO: 224907 - DNA, 1000 bp, Homo Sapiens
aagaaatatgtacaggtgacccatagctacctcactgtcactaaaatgttttttaataatcttaaagcagattctgcacttcatggtaaagactttgaattgtttctctgctttctaagccattcacctgagaagaaaatcactccataaactatgcagacgtactgtctttgcgttttcttcctgactacttgttccaaactctgagtcagatctaaagtcactttaagtcacagaacgcatggtatttcacttgtttttctcattaaaagtgattacctttgctgtattaaattgataagtaaaggtcattcagacaaccactgcttttgcaatttactgaaaaatgttataaattatctcagaatgtagccaatagcaagcacagctcagctcccagggtctgcctgcttctgtgagctttctggttaccagccaccagaaggcccaggaacaatgtagaactcaggtcatcatccttggaggtaaaatgaaccagatgattttcacccttacttccactttttcgccttcatcagacaaggttcactttctccccacactctaaaggtcactgggcaaatatttaggctctgagttcagatactctttcttccagcaaatggacttacactcttcaacaagtgatttagctcatttcagcatttctaaaatgtgaatcataagattagcaagctaaaaacagttatctcacaagtcaaaattgttgggctttacagaggctaacatctagtttagccaagtttatcaggagggggcaagcacttaagggctgaaacgacccatttcataaagtgctaagtttttctgccaaggaactttaaaaaatagaaaactggctgggtgcagtggctcacgcctgtaatcccggcactttgggaggccaagacgggcagatcatgaggtcaggagatcgagaccatcctggctaacatggtgaaaccacgtctccactaaaaatacaaaaaaaaaaaaaaaa

SEQ ID NO: 224908 - DNA, 1000 bp, Homo Sapiens
gcaaacaaaatgtcctgcacagaagaaatcctcttttgagaacacagtggtcagaaaagtgtcagtgacactcaaagaaattttcacaggggaggaaggccctgaatccagtgaatttagtctaagcccaaaccttgacgcacaacagaaaattccaaagggacatggatccccaatatctaggaaaaactccaaagataattcagacttaattaaacaccaaagacttttctcacaaagaaaaccttgtaaatgcaatgaatgtgaaaaagcctttagttaccaatcagaccttcttgtacacagtagaattcatggtggagaaaagccttttgaatgcaacaaatgtgggaaatctttcagccgaagtacacaccttattgaacatcaaagaactcacactggagagaaaccttatgaatgcaatgaatgtggaaaagcttttagccggagcacacatcttagtctacatcagagaatccatactggagaaaaaccatatgaatgtagtgaatgtggaaaagcctttagccgaagcactaaccttagtcagcatcagcgaactcatactcaagaaaggccttacaaatgtaatgaatgtgggaaagccttcggtgaccgttcaaccataattcagcatcaacgaatacacactggagagaatccctatgaatgcagtaaatgtggaaaagctttcagttggatctcatcgcttactgaacatcagagaacacacactggggagaacccctatgagtgcagtgaatgtgggaaagtgttcagtcgaagctcgtctcttacagaacatcagagaatccacagtggagaaaagcctcacgagtgtagagtgtgtggaaagggcttcagtcgaagctcatcccttattattcatcagagaactcataccggggagaagccgtacaaatgtaatgactgtggaaaagccttctgtcagagttcaactctgatcagacatcagcaccttcatactaaagagtaa

SEQ ID NO: 224909 - DNA, 1000 bp, Homo Sapiens
agttgtttcggagccccaagtccctcagctatcacagacgcatgcatcttggggagaggcccttctgttgcacgctctgtgacaagacctactgtgatgcttctggactaagtcgtcaccgccgcgtccatctgggttaccggccccattcatgctctgtgtgtgggaagagcttccgggaccagtctgagctcaaacgccaccagaagatacaccaaaaccaggagccagtggatggaaaccaggagtgtactttgaggattccaggcacccaggctgaattccagacacccatcgccagaagccagaggtccatccaggggcttttggatgtgaaccatgcaccagtggccaggtcccaggaacccatatttagaactgagggtcctatggcccagaaccaggcatctgtacttaagaaccaagcacctgtgaccaggacccaggcacccatcactggaaccctctgtcaggatgccagatccaactctcatccagtgaagccctcaagactcaatgtcttctgttgcccccattgttctttgacttttagcaagaaatcctatctctccagacaccagaaggcccacctcacagagccgcccaactactgcttccattgcagcaagtctttcagctcattttccaggctggtcagacaccagcagacccactggaagcagaagagctacctttgccctatctgtgacctctcctttggggagaaagagggccttatggatcactggaggggctataaaggcaaggacctgtgccagagcagccaccataaatgccgggtgatcctgggccagtggcttggcttctctcatgatgtccccactatggctggggaggaatggaagcatggaggtgatcaatctccccccaggatccatacccccaggagaagaggcctaagagagaaggcctgcaaaggagacaaaacaaaggaggcagtgagcatcttgaaacataaataaatggcctttctgactga

SEQ ID NO: 224910 - DNA, 1000 bp, Homo Sapiens
ctgatcagaggcctaacccaaggagggggtcatgtgcagacccagcagtggggaggaaagatgctgcagaggagacagatgcccacagaggcccctgagtggataccatgctcactaagtgggctgaccccacattggacaccactgcatccatgtccatcacacaccacagctgccttttcttctgcctgcttatgggaaagtcccctcctctcctccgttttcttctcttcctgccctatcacaccgtgcacttctccctttccttaaagaaccaccatcaactttaggaggagggaaaggggtggctctggcaggaaaagccagaatcccctctagccagcagagagagaggaatggctgcatgttttctcccccaatccaaggcactaggttttggctaggttgcaggttccaagctgctctcctgctgtgtcggtgagttctggttaacctgcaacctcctgatgtggccactgcagttcatcgagtcttcagggactccccatggcctggagtactttgccttgcttacacgggagaggagaatggatttatagagaacatcatctaaatccaacttgaccattgtgtggccacacttgctagattgctttagtctaaatctagcattgtagaaagacgggggagcttggagctgcacaaacccaggtctggaactggctccttaccttgaaaggtgaataatcctggcaggactcttagccttcctgggcctcagtttctttatctgtttcttgggaaggaggatctctgctggttggttgggtgatgtgggggctgtgtgaaaacaacttgtcaatacaagccaaaataggaatatttctccacagagtatgaaggtcaaatgagagaatacatttaaattaaatggaaaatttaaatggcaaaaaaggcaaagctgtattgaaagttctgagcttctctataaggagctttttgactatgtaagaatcctatactcgttccccctaaatat

SEQ ID NO: 224911 - DNA, 1000 bp, Homo Sapiens
cttacctggttccaagggagaagtaggccaaatgggacctacaggccctcgaggaccagtgggaattggagtacaaggtccaaagggagagccaggctcaatagggctcccaggacaaccaggagtaccaggagaagatggagctgcagggaagaagggagaagcggggcttccgggagcaagaggcccagaaggaccacctggaaaaggacagcctggccccaagggtgacgaaggcaagaaagggagcaaaggaaatcaaggacagaggggacttccagggcccgaaggaccaaagggtgaaccgggcattatgggcccttttggaatgcctggaacatcaattcctggaccacctgggccaaagggagatagaggaggacctgggatacctggatttaagggagaacctggactttctattcgaggaccaaagggtgtccaaggccctcggggaccagtgggtgctccaggactcaaaggtgatggctatcctggtgtgcctggacctcgtggattaccaggaccccctgggccgatgggtttacgtggagtgggagacactggagcaaagactttgaacacttcccatggccttgaagatccttcatgccccgactgcagcttctgtcatttctccctggctgccgacattcagccaaaatggcctgccctacttcagctcattcctgcatcagggactcgccaggatggctgattattaaaagcttagctcaaatgtcacctccccgaccacccatacagaaagcattactaccccaacccctctgtatgttttccatgtagcgtgtatcactttctgagatcatcttcctcatttatttctctgcatattccatgagagtgaaggttttcctggagcaggcttcttgctttgttccctcctaacttcatgtcaccagaactaggtgtaccattcagtaggagctctacaacttgttgaatgaatggaaaatgaataaatgatcaatattaccct

SEQ ID NO: 224912 - DNA, 1000 bp, Homo Sapiens
atagcagcaagggaatggaagaaatttataatttgtccagtagaaagtttcaggaagaaagtaaatttaagaggaaaaaatatattttccaactaaatgaaatagaacaagaacaaaatttaagagagaacaagagaaacatttcaaagaatgaaacagacacaaattctgcatcctatgaatcatctaatgtggatgttacaacagaagaaagctttaacagcacagaagataactctacctgcagtacagataacttaccagctctactaagacaagacataagaaagaaatttatggaaagaatgtctccaaaactttgcctgaatcttttgaatgaagaactggaagaacttaatatgaaatacagaaaaatagaagaggaatttgaaaatgctgaaaaagaacttttgcactacaaaaaagaaatattcacaaaacccctaaattttcaagaaacagagacggatgcttcaaaaagtgactatgaacttcaagctttaagaaatgacctgtctgaaaaagcaacaaatgtaaaaaacttaagtgaacagctccagcaagccaaagaagtcatccacaaattgaacctagagaacagaaatctaaaagaagctgttaggaagttaaagcatcaaaccgaggttggaaatgtgctcctaaaagaagaaatgaaatcatattatgaattagaaatggcaaagatccgcggagagctcagtgtcatcaagaatgaactgagaactgagaagaccctacaagcaagaaataacagagccttggagttgcttagaaaatactatgcttcttcaatggtaacatcatcaagtatccttgaccactttactggggattttttttaaaacttaaaaaaatccttccagtaggcaagtcattgagccaaatcagtgtttattgtattttctttgcgtattacttaaaatatatgtaataggatgttattttcattttcagtaaatcacagtatctataaaacata

SEQ ID NO: 224913 - DNA, 1000 bp, Homo Sapiens
gataaaacctttgaattatttaactcaatatatgttaagtttctactatgtgctgtgtattggtactataaatatgaataagacataagatattacattcaaaaacatcagaatacatgttcttttaaagtataccccaaaacatttaccatgtgttctggggcgcatgttaggctggatcacaaatcaagtctcaagaatttcaaaagattgaaatcatatagagtatgaattaaaccagaaatcaagtacataaaggtaacaaaaaatttccaaaatgcattaatttaaggaacatacacctcatgacccatgagccaaaaaataaatcacggcaaaattgcaaaaatattttgaaatgaattttaaagaaaatacttagcatattaaatacttagcatattaaagctctaagtacatatgttagaaattttaccgaaaggttggctatcagtgtttccagaagccagggaaaaagtttatacaatttgatcgctgaggcagggaaacaaagtgagacctccgatcgccctgcctttctgaggtgagcactctggatcccatcgcaggagatcagagtcttgctgagttgaggagaggaagattggagttgatactgagatagcttgaattttcaggacaaagtatcaacaaggaggaaggtagacaaaaaaatccagaaatctatgtagagaccccattgtgtacattgcggaacactaagcctaacaattctcaaaattagcgtgagattgggaaatatctaatttccatccagccacagtggagagtcctgactgaaaaccaggcattcgctaaagatcccagaaaggttgtgtgttacatacgtagggctaaactatcctgactaaaaactacactacacttgctcctcacccccacaaaaagcttaaaaacaagcctcaatagtataaagctgatctgtaagtaactaaactacctgcagaacaaagtccaaatttattagttccagtactcc

SEQ ID NO: 224914 - DNA, 1000 bp, Homo Sapiens; identical to SEQ ID NO: 119221

SEQ ID NO: 224915 - DNA, 1000 bp, Homo Sapiens
aatgtttattgttttttaagtggttactttgtttttccttaatactttctgttaacttaattattactcctgttgcagtgttactgttatgtattagaagtggcttttccccctaagatccttagtcttttaaagacaatttaaggtattggccatttggcagtagaaaatgtgcatgttttaacttggttttataaaatctgtaatgtttcacttcttgaaccatgtaccaaatttgccaattttctgtccaagtgtttcagatgaataacaaaacgctgttcattgaagctttcgccacctttcttaaagcagcgtatgttccaagggaaaaaggcattgaaaagcaatcgtttgtttttatgaagaataggtgttcagattccttcagtttttttgaaattagaaatttcttaccttatgtgaaatattcacaaacgtgcacacttctgcagagacaaagcatttcactgcacgtgtaccaggttattgattttatcttttcctttcagggttttgtcctcccaaaccagagtcatatgctgctagtagaattttttatttgatcctgcgaacttttcttataggaaaagtaaggcaaaggatgtgtagtgcaaccatctgataaactagtgtgattgtatttatcctctgttctgtgtatttctgtaatggaatctttacaattcccaaaacggtattttagacctactggaaatctgtatcgaaacagctatgtgattctgccactgagaaaaaaaaaatttttaattcgtttttcttatgctggtttgtttttctttaatgaagaaattgatctcatatggcatcatagatgctaaataaataaaagcatcatacttctctagtttgcctgcattcagtggctaacattatgagcattgtgtaagataaacacatggtcagtatcaatgtaaatgttagagccatgattaattcctatgaaaattgaaattaaatgtcaaagacaactagacat

SEQ ID NO: 224916 - DNA, 1000 bp, Homo Sapiens; identical to SEQ ID NO: 119222

SEQ ID NO: 224917 - DNA, 1000 bp, Homo Sapiens
tttcttttatcttcttttgggagggcagagcctgtggtcattcctgccctggctctccttcccttgaactttgaggcttgtcatgaatttttaagtaagcgttttatcctttaggggaagaaacaaattaatttcctgcccatttcaaaaccacagccctagtatgtccactgtgtttcaggcatgtgtttgcatgtatatggagggagggaccatgttcttcctcctgtgccgccaagcccatagtttatctgtgctccctatctgcctccaccttccgttatgtccaagagtacccactgccccagtcactcctgatctgaagccaaagatggtaggaggggcagggccgacaagggaccgtggctactcgggacccaggcttcccctccagtgtgaggaagaagctctgacctagagagagatgaataggtactggggcttggtccctgccttcccagcagggaggaaagatgggattgagctgggggctgcactgataagatttctaaagtcgcaccccaaaagccaaactgggctggagtgaagagggggcagttttctctctaaatgtagcattgaatttggccctggtccctttaagtgctctgtccacccatctcctagtgcagcctcctggacagttggacccactcctgcagcccagtgttcccttcctcacactcaatacctcagccaggggccaagacacagaacttgaatagaggtcatgccccctccgcccccacactgcatccttgcccagtttggctgccatcagtattgtcccctgagaactggacaggcttcgtttacacagtacagggtctcccctgaggggggatccttcagcctccctcccctactcacatcctcccccaaccggcttcgggtcctcccaccacactctggttttctatgctgttttggtgcaagtacaactgtcgtagtcatggctttgggatgggttctgtttattaaaatcctattgctcctactg

SEQ ID NO: 224918 - DNA, 1000 bp, Homo Sapiens
attcccgttgtaacttaaagggaaactttcacaatgtccggagcccttgatgtcctgcaaatgagggaggaggatgtccttaagttccttgcagcaggaacccacttaggtggcaccaatcttgacttccagatggaacagtacatctatgaaaggaaaagtgatggcatctatatcataaatctgaagaggacctgggagaagcttctgctggcagctcatgctattgttgccattgaaaaccctgctgatgtcagtgttatatcctccaggaatactggccagacggctgtgctgaagtttgctgctgccactggagccactccaattgctgggcgcttcactcctggaaccttcactaaccagatccaggcagccttccgggagccacggcttcttgtggttactgaccccagggctgaccaccagcctctcacggaggcatcttatgttaacctacctaccattgcgctgtgtaacacagattctcctctgcgctatgtggacattgccatcccatgcaacaacaagggagcttactcagtgggtttgatgtggtggatgctggctcgggaagttctgtgcatgcttggcaccatttcctgtgaacacccatgggaggtcatgcctgatctgtacttctacagagatcctgaagagattgaaaaagaagagcaggctgctgctgaaaaggcagtgaccaaggaggaatttcagggtgaatggactgctccagctcctgagttcactgctattcagcctgaggttgcagactggtctgaaggtgtacaggtgccctctgtgcctattcagcaattccctactgaagactggagctctcagcctgccatggaagactggtctgcagctcccactgctcaggccactgaatgggtaggagcaaccactgactggtcttaagctgttcttgcataggctcttaagcagcatggaaaaatggttgatggaaaataagcatcagtttctaaaaaaaaaaaaa

SEQ ID NO: 224919 - DNA, 760 bp, Homo Sapiens
atgagctatgcaagagtaaaaacaagttatccgacagagaaactagagttagaagtgcaggatgaatttaccaagagaagacaggaggcgctatgcagcgacggcggcagagaaagcgtgggagcgacgctcttgctctggacgccgacgtgcccacgtcgaggccgcgcccagacccggaggcggggccgtcacgtggggcagcgtgggccgctgccttggaaacgcagagcgcgcgctccaggtaaaggctgctacgcccaggacagggttctcacggtggaggaaaggacttctgcgggataccacgctgtgcgccaaaaagccgggcggcttcggagccagagcagcggctctgcggcgcaggcggcgggtcggggcagccttgaagccgggatccggcccgaaggggtctttttggagttcctgagctcagtgccccagaaggcacatacttcatatgaaatatgaaggatttcatactgcacaagaaaaagccttgagaaagacagaattgcttgtggaccgtgcgtgttccaccccacctgggccccagaccgtgctgatccttgatgagctctcggattccttgtgcagagtgaccgacttggtaagatgctttgcctcagacttgaagctacctctctttcaacctgttaaaatttaagtgaaatttatcctttgttgtttactgttaatattagattataaagttaaaaatgtctgaaactatttgagatccattgggtataattttttg

SEQ ID NO: 224920 - DNA, 1000 bp, Homo Sapiens
ggggccccggcctctgttttaagggggcagggcgtctgcaacaggagtggcacacggtgaagtgctggcatggctctacctcccaacccctcccaaccccatcccaaagcctacagtcctctgctccttctacctccactgtatcctgcatcccagaccctacagattgtgtgattgcttcatctgtatcaccccccgagtcctgtggacctgccttctgtgtagagcaaaacccaggctccctcacagccattctttgcagagatcacccttgcagtgagtgtgagttccttccaggtgtgtgcgcgtacactcaccctctgaattgctgccgctgccaaggaagtgggctccaggtgaaggccagtgccacgtcactctggctggccttcttagtagtttcatttctccggaagctgagccagtctcctggtctagcccaggttgccagaacgcttggcattgcagagtgctagagccagtggagaacttgccaacttgattgttttacagcagaggaaagaggatcacagagggaaaatgattcacccaaagtcacacagcaagttcatggctgagctgagaccaggattaagcttcctgactcccagttcaccatgaaaagggttctggcaacaggttcaagctggagaatccttcaaaatgctacacccacattctctccaactcttcatctccctgatcttccagacaaactacctggatgttgcccttaaaccatttctagctgttaaccctgtccagaaaaatgattgagtgatagctgagaagtggaaagtgtgggatttttggcaggtgctctctttcctccgccccccgcgccattctttctcttcctcctctctgtaatggtatgtccagcctcactctccctccctggtgctgtatgcgttccccctgttagctacatttgtgatcacatacccttcttttaagtgaatttttttcatttgatttgtcaataaacgaatcaaactgg

SEQ ID NO: 224921 - DNA, 1000 bp, Homo Sapiens
ggttctctagctaaaaacagtagaaattttgcacacctgggttagaaaaaaaaatagccattaaacccacccctgttacaggtcactattggtattttgattttgccttcaatccatctgttattgtttacttttaagagtccttgatagttgctttttatgtccagagttttaatttcagtcagaaagagaaataggccttggtgagcatgctttgtcttggctggtgccagaagtctgtactcaaatatttttaaaataatttttagttgaataacaagttagacctgtgtttagctttctcattgttttcctaaaaatagaagaaaaggttttaaatactttaaccacgaaatactttaaagcaggtttaaaataaactccttcattttgcctgttctattactctgttctcacactgctaataaagacatacccaagactggtaatttataaagtaaagaggtttaattgactcacagttccacatggctggggaggcctcccaatcatggcagaaggtgaatgaggagcaaagtcacatctttgtggcaggcaagagagagagcatgtgtgcaggggaattcccctttataaaaccgtccaatctcatgagacttatgcactctcatgggagcagcatgagaaagactcacctccgtgattcagttacctcccactgtgtccctgccacaacatgtgggaattgtgggagctaaaaatcaagatgagatttgggtaggaacacagtcaaaccatatctcctgtatacattcacactagcattttagttttagaactagttctatgttactatctgaattaatttttccacaattttgtaaggaaaaataatgcgttctttgaatttcatgtgtaaatgatatttttagttttgtgtcattttgtccaataaattctgaaaatctttgtattgacagtgtgttatctctgcataaccatatatgtataagagcgctcaataaaaagaataaagagg

SEQ ID NO: 224922 - DNA, 832 bp, Homo Sapiens
caggaatgggctggggcgcgtttgtagttgggaatcctgagcccgggctgttgcttggaggactcgggagcagcagtggatttcggcgttaccaggagagctatgtataggaatgccgctatggaaagacatccaggacaccttgttaagtgaaaaaaggttcagtatctgaacacttttgctaaaggtctctggaaagctccctgtgttaattctcgatgagactacgtctgtgccggccgcttcctgagcctccttccatgtgcataggcctgctgcatgctggagacctgcggcacagctgccaagtgccccgtgtggttctgtgatcttgggacagtcacttcctctctgtggttgtcagtcttctcatccctaagatggaataaaaaggcctacctcattgggctcgtgtgggtgaggagaactgaagagtctgagagcgcggcacgagccagaggctacggaaaacactgccctcctacactccaccttggagagacccagaaaagaacaagcttcatttgtaaaaaaggaaaacaactcaggcaatgggggtggcttaaaggcactctacagtgtgcagatgccttccacttcttccatctgccctgtctctccaagaacccctatggccccggtctcagaacagagctgagtgcagaaatgaaaatctatggctctgtgttccaaaacgatgaagaatttcaagatggtggcagtggtaaaatctttctccaggaaaaatctgtccttggcccaatgtgtaaacacttgctgaggaacttggaataacttgcagtgtcttgcagtattgtgaaaccagcaactt

SEQ ID NO: 224923 - DNA, 1000 bp, Homo Sapiens
tagtttaaataggtttgtttaaagaactcttgggaaatttcttaacaaattgtaattgtttttataaaccttcctacagagttgtgtaccattcatcatcaccatcatttaatatctgtaagtgcccagaaggtacaaggtgctatacagccgttaaacaccccctccctgcaactgtttaaaattagaatagatttttgcatcaaccactgctagaagctttccccacctaggtgggctgcaagggcctgcattcccaacatcccattacatgtttcccactccagaaagtctctgggtttattccagctttttatcttgacgtgtcccattcacccccatggtttggtttggtttggttttgttttttaaatcaagaaagtttcagggaatcaaaagaggtcggacattttttaacctagcagaagtacagagtcatatattttgctacgaatattgttgtagtacagaaaacccactttgcccgttagtgtgtggatagtatgtgtgtgtccgcactcatgataacttgaatgttgaaccagacatagggttcatttttgaaaggttaaaccacactgtttcaggaacttgctccaaatactacttggttatcccttcctttaccagttagaactaaagagtgtgatgtatgaacacactgggttgggattttctgttgaggatatgcagggcattttggcatgaggcaaatacagaagcaagatttcattctacttggtgatttgaatcatgacagtcctcattccaatctctctttaattctctctggccctgcccacactctgtatttgaaaatcttgtttttgctctttccggagcttcacccctctacttacatattgtaaagttgtataaatctatcattgaaaggtcctctctgccagcagtggtgccaccctttggtttgctgtggtactttgctgtgtactccgtggcatcatgttactgtgtaaataaattcattttaatacacact

SEQ ID NO: 224924 - DNA, 1000 bp, Homo Sapiens; identical to SEQ ID NO: 119228

SEQ ID NO: 224925 - DNA, 1000 bp, Homo Sapiens
tttttttcccactgtccaggaatcgatttaatttttacagttgtttactttctcacatttttactaagtccagaatatcatcaaactcacaaaaccactggtcaaaaaaacccaaatggccactaattaggcaatacagcacctgcctcaaatttgggttcatatagatttttttcctccctttttgtggagaacatagtcttgctgtgttgcccaggctagtcttgaactcctggactcaagcaatcctcccgcctctgcctccctaaattctgggattacaggcgtgagctgctgtgcccagctcatccagattcttgctggttctctttctcagcctaaatgtcttgtttgcgtggagaaattatcaaatgaagcaggagtgccaaacaagcctcataggctcttcaccctacaacatctatgttaggtagaaaagtatgtggatttttaaaaatcatctggtataaagagtttttaagaactatcttcatcatcttagtatcagattgtgcttgagaagttaggtacaatgtaatgtgattcattgctaaaaacaaaatgcctcccacaattgcagactcactcattttaccaaactatggaatttgtcaacaccttttcttgggaccaaggaagcaaagtcagtggataccgtgtcctgtagacatgtcacttgtgataaggcacggacaacatgaactggcaaaaacattggcatttggtcaaatgcttatgagctaaggatagaagggaaaaaatagttgtgtgaatgattttacctcttagttcttacgaaggatggttatcgggctggaaaaatgtttattggactgatgctttggagcctctcaatgaatgtaataaaaaaaatgtgtagtgagcacaaatgtatggatttgcagcacaatccaactttgaaaatgtgaaaataagtgagttagtgatatgtttggttggtgttaatttgagtcctaaataaaatcgagaactggtaaaa

SEQ ID NO: 224926 - DNA, 1000 bp, Homo Sapiens
tgtgtattactgtgcaagagacacacaccctccagtgtgtcatgtggagactcacctgggaatgcaagtggccaacagtagtgaagaggatgagcttgtgtggtcaaaatgggatgtggatgtgaaatttatcctgtgctgtgcaaagtaccacagactaacagctctcccctcaggcagggctaaggtgtctggggaatgcagagttgtgttcacgaagaagatggcattatgtctgtcttctcctgtgactggtgacggctcccccagggagcagctgcaggagtcagccctggacctgaagagcctgcactgcccctctgcatcacctgcactgtttctggccactccatcacaaccagtccttactactgggcctggatctgccggctcccagggaggggctgaaatgggtgcccacttcctggtgcagctggtgcagtctggggctgaggtgaagaagcctggggcctcagtgaaggtctcctgccaggcttctggatacaccttcacctactgctacttgcactggagagagcctgtctctttcatctgtggcaggtgcatcctgctgacacttttacttggtgattgtttgtggggtgaaggggcttggacacagggggatgttctccaaccttcggaccgagcctccttcttagctatgggtggtgcccagtgtgaggtgcagctggtggagtctgggggaggcttggtacagcctggggggtccctgagactgtcctgtccagcctctggattcaccttcagtaaccactacatgagctgggtccgccaggctccagggaagggactggagtgggtttcatacattagtggtgatagtggttacacaaactacgcagactctgtgaagggccgattcaccatctccagggacaacgccaataactcaccgtatctgcaaatgaacagcctgagagctgaggacacggctgtgtattactgtgtgaaacacacagcgaggggaagtcagtga

SEQ ID NO: 224927 - DNA, 1000 bp, Homo Sapiens
aacgctgcaggttcccggccctgttccccgagtctccctgctggctgctggccacaggtcaggtagctcgagccaggaagatcctgtggcgctttgcagaagccagtggcgtgggccccggggacagttccttggaggagaactccctggctacaggtcaggcgcctaccagggaggagggagattcaggtactggaggagggcttcggagaggcacagctcctcacccccctcccctcacatctctgcggctacagagctgaccatgctgtctgcacggagcccccagccccggtaccactccccactggggcttctgcgtacccgagtcacctggagaaacgggcttatcttgggcttcagctcgctggttggtggaggcatcagagctagcttccgccgcagcctggcacctcaggtgccgaccttctacctgccctacttcctggaggccggcctggaggcggcagccttggtcttcctgctcctgacggcagattgctgtggacgccgccccgtgctgctgctgggcaccatggtcacaggcctggcatccctgctgctcctcgctggggcccagtatctgccaggctggactgtgctgttcctctctgtcctggggctcctggcctcccgggctgtgtccgcactcagcagcctcttcgcggccgaggtcttccccacggtgatcaggggggccgggctgggcctggtgctgggggccgggttcctgggccaggcagccggccccctggacaccctgcacggccggcagggcttcttcctgcaacaagtcgtcttcgcctcccttgctgtccttgccctgctgtgtgtcctgctgctgcctgagagccgaagccgggggctgccccagtcactgcaggacgccgaccgcctgcgccgctccccactcctgcggggccgcccccgccaggaccacctgcctctgctgccgccctccaactcctactgggccggccacacccccgagcagcactag

SEQ ID NO: 224928 - DNA, 1000 bp, Homo Sapiens; identical to SEQ ID NO: 119230

SEQ ID NO: 224929 - DNA, 1000 bp, Homo Sapiens
tccctggtgagtggcgggctgagccctgccatggacgggcaggctccaggctcacctcctgccctcaggatcccagagggcctggccaggggcctgggcagccggctcgagagggatgtctggtcagcccccagctctctccgcctccctcgtaaagccagcagggccccgagaggcagtgcactgggcatgtcacaaaggactgttccaggggagcaggcttcttatggcacctttcagagagtcaaatatcacactctttctttaggtcgaaagaaaaccttaccggagtccagcttttgatggagcgtgtcagtattgtgtgacgctggcattcttgggactttgccaagcaactgtaggcagctcatgttgagaatgggtttccaggaaacccgttgtcttgtaatctctaaaaaaaaatttttttttttttgtggtggggggtctccatatctagacttccaacacccaaggtccatataacccaaggtcgaaaaccttcctgcatcattgggtgctttgctacagtttggccactagaggatgctattgggtcagtattaccagtttcagggcaagaactgatatttactaaagagttttggatgtgggcaaacaagatgaggctggtttaataagaatcttcaatgtcatgtcaaatactgtcaatggcttttcctttttctttcttttttttttttaaattgtggacttaaagaaaaatattttatttttaatgcttttctgggataagcattaaagatgccaaaaagaaaaaaaaaacaaaagaatgatagtgatggtaaggcaagattctagcaaagagagatgggagataaatggctgagagttcaggtgaatatttaatatattaaaaattgtattaaagtttttcaaggtattttaaaaataactattttgatactagaaaaaaagtccattttttaatttaaatatgagatctatgtacaattttaataaaatcctgtccatgaaa

SEQ ID NO: 224930 - DNA, 1000 bp, Homo Sapiens
ttccgctccaagcagtccctagtgctggagcgccagcgcctggacaagcgactggctctcatcgccaccatcctggaccgcgtgcgggacgagtacccccagttccaggaggccctgcacaaggtcagccagatgatcgccaacaagctcgagtcaccagggccctcctagggagcagcctggactccgccttgcaaggcctccaggaagagatccggaattgtgtttgtcatgagggacttggaatcttttgtgttcctaaaaaccacatgtaccctcagaagggcatcgtttaagagaaataagccagccccacccataggaatctttttagccactcagcaatttaataaaccaggtaaaatcctagcgtttcccatggcatcccatcgcaaagacagagcctgtgactgcagacccacacacccacactcccacactgggcttactcgtccaggtaacactttggtttgcagcactcccaaatctgcacgtgcctctcacaacacaacgctgccacaggtccacaagctggtgggctgagcagaggtgggaaagttaaggcagctccagccagcctggcccgggaggctggtccccccagcacttccctctactaggtgcatctgaaaacccacaaaccaccttctttaccagttttcccatccccaccccttagaactctcaggtcccttttcctgcccccatgtccccatttgagttaaattcagatccacagcttgcaggagaaagtcagtggccccagacacacgtaacagggtgagcactgaaataagagcacgctggggcgtccacaccaagggactacgccccagtctgcccacctatcttttctccatcattaacccagcgctctttctccctggacttccaagtaccaatgaccttggggcttctttgcagtttaaagggaaaatgctctacaaaataatttcactttcaaacatttcagcagaagaataaaatcttttttctgaat

SEQ ID NO: 224931 - DNA, 1000 bp, Homo Sapiens
aaggcacatcagatctcacactggacacaaaccatatgagtgtcaagattatggagaaaagccgtatagatgtaaggaatgtgggaaggccttcagttatttccagtcatttaaaaaacatgaaagaaatcacagtgaagagaaaccctataaatgtaaacaatgtgggaaacccttcagttatcgtcaatctgttcttagacatgaaaggactcacactggagaaaagccctatgaatgtaaaaaatgtggaaaaaccttcagtactcttacaggtttccaaatacatgaaagaactcacactagagagaaaccctatgaatgtaaggaatgtggaaaagcctttatttaccttgcaagctttcaaagacacatgataatgcacagtggagatggaccttataaatgcgaggagtgtggaaaagcattcagttgtcctagttcatttcaagtacctgaacgaattcacactagagaaaaaccatatgaatgtaaacaatgtggtaaagccttcagttggcttggttcctttcgagtacatgaaagaactcacactggagagaaaccctgtgaatgtaacgaatgtgggaaagccttcatttatcgaactacgttaaaaggacacatgaatattcacactggagagaaaccttataaatgtgaacaatgtgagaaagccttcctttctcttgcaagctttcaaatgcacatgataatgcatactggagatgcaccttataaatgtaacgaatgtgggaaagcattcaattgtcttaattcatttcaaatccatgaaaggactcacactggagagaaaccgtatgaatgtaaacaatgtggtaaagccttcagttgttccagttcctttagaatacatgaaagaagtcatagtggagagaaaccccactgtaaagaatgtggaaaagccttcagtcatcccagttcatttagaagccatgaaaaaatacaccctggcagaaaacttcttgaatgtaagtaa

SEQ ID NO: 224932 - DNA, 1000 bp, Homo Sapiens
gtgtaagttacacaaaagaggttataatggacttaaccaatgtttgacaactacccagagcaaaatatttcaatgtggtaaatatgtgaaagtctttcatcaattttcaaattcaaagagacataaaagaagacatactgaaaaaaaacctttgaaatatatagaaggtgacaaagcttttaaccagtcctcaacccatactacacataaaaaaattgatactggagagaaaccatacaaatgtgaagaatgtggcaaagccttcaaccggtcctcacaccttactacacataagataactcatactagagagaaaccctacaaatgtgaagaatgtggcaaagtctttaagtacttctctagctttactacacataagaaaattcatagtggagagaaaccctacatttgtgaagaatgtggcaaagcctttatgtacccctatacccttactacacataagataatccatactggagagcaaccctacaaatgtaaagaatgtgacaaagcttttaaccatcctgcaactctttcttcacataagaaaattcatactggagagaaaccgtacacgtgtgataaatgtggcaaagcctttatttcatcctcgatccttagtaaacatgagaagattcatacgggagagaaaccctacaaatgtgaagaatgtggcaaagccttcacccgctcctcacaccttactatgcataagataattcatactggagagaaaccatacaaatgtgaagaatgtggcaaagcctttacatggtctgcaggcctccataaacataggagaactcatactggagagaaaccctacaaatgtgaagaatgtggcaaagcgtatactacatcctcaaatctaactgaacataagacaactcatactggagagaaaccttacaaatgtaaagaatgtggcaaagcttttaactggtcctcagaccttaataaacataagagaattcatattggacagaaaccaagaacgtga

SEQ ID NO: 224933 - DNA, 1000 bp, Homo Sapiens
gcccacgcgcgcgctggccgccctcaagtgcacctgccaccacttcaagggcatcatcgaggcgtttggcgtgcgggccacagactcgcgctggagccgagacccgctctaccgcgatgatccgtgcaaacagtgccgcaagagatacgagaagggcgacgtgtcgctctgccgctggcaccccaagccctaccaccatgacctgccttacggacgttcctactggatgtgctgccgtcgagccgaccgcgagactcccggctgccgcctgggcctccacgataacaactgggtgctgccctgcaatgggccaggcgggggccgggccggccgggaggaggggaggtgaagccgggggaggggaggggagagcccaccacgcccacccctcccctctccccccgggagccgagggtccggactgggccgcctgcccattcccctactccaggcagcattgatccctcaccggaactgagctggggttcagcaggggtgacccaggaaagccctctgcttgatcctgttgattttctactcttcagaaccagggccgtggaccctctgagaagggtgttttttttttttttatcagcatctcactttcttctccattcagccccaaccccctccctgccatgctttccaccccaaggacccaccagcagggagcagacggcagctaattttggtaccacttaagggtccccccattctggcccccatcctctccctcaccccaattctttctcgctggagctgttatttcccaagaagccgcatcgcccaaggttggcacctctcctaacctgccacacgacagctctcacctctctaggaattgggggctgtcaggtcacaggtgggatctggcatttttttatgacagtccatttctagatggtttgcctattaaagaagtgggggggaaatactgttttctccttaacctcaagctaccagtctctcctcttccgcgtagaggaagaggggggcagac

SEQ ID NO: 224934 - DNA, 1000 bp, Homo Sapiens
gctggagagaagccagtctggagggaaaccggagccggtggtgacggtgcgcacccaggagacagacgtggtggagatgacgactcaggccaagtccccggagtcgcccttcaccgtgaccaagaaggagtccaaggacatcctgattagccaaaccaaggaggtgaccctggaggccttcaggggccaggggaagttggaggactgggcccactgggcgaagcttgaagagaggtccccggacctgcctggcgtgagatccaaggagttggagcagcggaagagatgggtcaaggccaaggaactggccgtcgagggcccctcccaggagcacagcaggcccttctctgtggaagcgctcaccctcaccaagctcatgatcacggccaactccaaagagcagccctcgaaatccgctttggtctcacttccctcctggctcttggcgactccgcaggcgtcggccacgtcaatgatggcttcagtgccctcccgccccggccagctgtccttactggaggggaagccagtggtggtcagagagcagccagagtcgcacacctgggtgaaggagggcaagcggccatggggcgagatgaaggagcagccatggggcgagatgaaggagccaccctgggaccccaaggggccacccaaggtgccctttcgctccaagcccacctctgccagtctgaagagggaaggaatctcccaggcgcctatccccctgaccgcctcaccgtgggaggacttacggccatcgcccctctcggagaccctcatctcaaagatggaggccacagccagggcgtcccagcagcccaagagggtgtcgcaggagcccatgaggatgccagcccagcaccccctggccactgtggggtcgtcttcagaaattcttttgcccatgctcttagaacttgaaactgtgaggaacacggccaccaaggcagaggagatacaggaggaatcgggcgtcttgaaccttctgcccaggtag

SEQ ID NO: 224935 - DNA, 1000 bp, Homo Sapiens
cccgcccgcacccggcggcctgcagcccccggacggctccagcggcacggatgcggccagcgtgctggacaacgggctggcgggggaggtgggggcggccgtggcggcactggcaggggtgtctgggggtgaggacgcaggcggggcggcggtggcaggtgctggcgggggtgccagttccggccccgagcgcttcagctgtgccacgtgcggccagagtttcaagcacttcctgggcctcgtgactcacaagtacgtgcacctggtgcgacggaccctgggctgcggcctctgcggccagagcttcgcgggcgcctacgacttgctcctacaccgccgcagccatcggcagaagcggggtttccgctgcccggtgtgcgggaagcgcttctgggaggcggccctgctgatgcgccaccagcgctgccacacggaacagcggccgtaccgatgtggcgtgtgcggccgaggcttcctgcgctcctggtacctgcggcagcaccgcgtggtgcacactggcgagcgggccttcaagtgcggcgtgtgcgccaagcgcttcgcgcagtcgtccagcctggcagagcaccggcggctgcacgctgtggcccggccccagcgctgcagcgcctgtggcaagaccttccgctaccgctccaacctgctggagcaccagcggctgcacctgggcgagcgcgcctaccgctgtgagcactgcggcaagggcttcttctacctgagctccgtgctgcgccaccagcgcgcccatgagccgccgcggcccgagctccgctgccccgcctgcctcaaggccttcaaggatcccggctacttccgtaagcacctggctgcccaccagggcggccggcccttccgctgctcctcctgcggcgagggcttcgccaacacctacggcctcaagaaacaccgcctggcgcacaaggccgagaacctcggggggcctggagcaggggcgggcaccttggccgggaaggatgcctga

SEQ ID NO: 224936 - DNA, 1000 bp, Homo Sapiens
tgaaatcgatgacgtggagcgcctgcagcggcgacgagggggtgccagcaaggaggccatgtgcttcaatgcaaagctgaagattctggaacaccgccagcagaggatcgccgaggtccgcgcgaagtacgagtggctgatgaaggagctggaggcgaccaaacagtatctgatgctggatcccaacaagtggctcagtgaatttgacttggagcaggtttgggagctggattccctggagtacctggaggcactggagtgtgtgacggagcgcctggagagccgtgtcaacttctgcaaggcccatctcatgatgatcacctgcttcgacatcacctccaggcgccggtagatgagccagacccttgtcctagtggtcccccgctccccaggacttcagagatgttgcacgcccctaggccctctgtgctggggcatcaaagacaatgaatgaggatgaaggttggtggcaagtctggagcgggcgttgagcggaaggcgagttttcttttgttttctgtaggaaaggtgcaaacgtcaaacaccgtggaaggagaaaaggatgggaagcccgaggggtgtccaagccctgtgagactgaaaaagcactttgaggaaccttaaagaccttgtttgtacataagaactgctagcaaaagagacctcactcttctcttgctttcgtgagaaaggaggggcgtggatgtaggattgctgtggaaagcgaacacaaaacaacccagaatgactgattaagtgccttgcaaatctttattattatccaaacatttatgttcatactttcttgtgtacagatggtgctagtcaagatgaaaacaacaaaacaaacaagaaaaacattttggaaatgtattcacagctctttttctcttggtgttttatcctatttctgacttgctgtttctaagtaagttgtgtttgtagagctatttcttaatcagtattgcttatgaataaatattacctgtcttttatggtt

SEQ ID NO: 224937 - DNA, 1000 bp, Homo Sapiens
ggagcaacagcgtgttggcttggctgttgacatggatgaaattgaaaagtaccaagaagtggaagaagaccaagacccatcatgccccaggctcagcagggagctgctggatgagaaagagcctgaagtcttgcaggactcactggatagatgttattcgactccttcaggttatcttgaactgcctgacttaggccagccctacagcagtgctgtttactcattggaggaacagtaccttggcttggctcttgacgtggacagaactaaaaaggaccaagaagaggaagaagaccaaggcccaccatgccccaggctcagcagggagctgctggaggtagtagagcctgaagtcttgcaggactcactggatagatgttattcaactccttccagttgtcttgaacagcctgactcctgccagccctatggaagttccttttatgcattggaggaaaaacatgttggcttttctcttgacgtgggagaaattgaaaagaaggggaaggggaagaaaagaaggggaagaagatcaaagaaggaaagaagaaggggaagaaaagaaggggaagaagatcaaaacccaccatgccccaggctcagcagggagctgctggaggtgaaagagcctgaagtcttgcaggactcactggatagatgttattcgactccttcaggttatcttgaactgcctgacttaggccagccctacagcagtgctgtttactcattggaggaacagtaccttggcttggctcttgacgtggacagtgagtaccttactgtgaaggtgataagcctccacctggtcttccatataggggtgatattcctgttccaagtggcccttactgacccgagagatgtcattgccgcaggcaggacctatgggcgcatatagattgtaatgaaactgtagtctcagttggaagcctagacatgaaatgggtcagtgagcaaggctctattcctagtctccagccatgcctgtggcaagctg

SEQ ID NO: 224938 - DNA, 1000 bp, Homo Sapiens
tagaagagatgtctgtgctgcatgaggtgaagacggaccgaagccactgcctccacaccgccatcaccaccctggttgtggccctgggcattctgactttcatctgggtgttgatgtttctgtgcacagctgtttatttccacaacttgtcccagaaggtgtttggcaccttgtttggtttgctgagctggtacgggacatacgggttttggtatccgaaagccttttccccaggacttcctccccagagctgtagtttgaatttgaagcaagatagttacaagaaataaaagagtaacagaggggggacagaaggacaatggctaatctatttttcaaatatatattttgcttagttatttggctaaattattgatcctacttcagagggaaagtgtaccaggcagttttggtgggtggtgctgaagtctggggagtgagtttagtcttcagactattcttggcgacatcaccagtgttgcaagcaccaccattcccagttaggcactttttgtccctggtaagacttgacctttatctggaacactccttttgtccctagagtggggacctaaggctcagcaaaagggcagaatcaggaaagcctttatggtgtggctaaaggagtggccagagccttgggactcctttgctgccttctccctggttccagttgtctttagattttcacggctcttactgctgttacttaacagtattttccagccaggcatggtggttcacacctctaatccctgcactttgggaggccgaggcaggcggatcacctgagattgggagttcgagaccagcctgtccaacatggcgaacctcgtctcttctaaaaatacaaaaattagctgggtgtggtggcacatgcctgtaatcccagctactcaggaggctgaggcaggagaattgcttggacctaggaggtggaggttgcagtgagctgagatcgcaccactgcactccagcctgggtgacagagcagactcca

SEQ ID NO: 224939 - DNA, 1000 bp, Homo Sapiens
ctctgaagtcagaggagaagctgtgggaccccttcagcctggaggaggggccggctgaggagccccccagcaagggagcggtgaaggaggagaagggcggtggtggtgcggaggaggaagaggaggagctgtggtcggacagtgaacacaacttcctggacgagaacatcggcggcgtggccgtggccccagcccacggctccatcctcatcgagtgtgcccggcgggagctgcacgccaccacgccgcttaagaagcccaaccgctgccaccccacccgcatctcgctggtcttctaccagcacaagaacctcaaccagcccaaccacgggctggccctctgggaagccaagatgaagcagctggcggagagggcacgggcacggcaggaggaggctgcccggctgggcctgggccagcaggaggccaagctctacgggaagaagcgcaagtgggggggcactgtggttgctgagccccagcagaaagagaagaagggggtcgtccccacccggcaggcactggctgtgcccacagactcggcggtcaccgtgtcctcctatgcctacacgaaggtcactggcccctacagccgctggatctaggtgccagggagccagcgtacctcagcgtcgggcctggcccgagctgtctctgtggtgcttttgccctcatacctgggggcgggttgggggtgcagaagtctttttatctctatatacatatatagatgcgcatatcatatatatgtatttatggtccaaacctcagaactgacccgcccctcccttacccccacttccccagcactttgaagaagaaactacggctgtcgggtgatttttccgtgatcttaatatttatatctccaagttgtcccccccccttgtctggggggtttttatttttattttctctttgtttttaaaactctatccttgtatatcacaataatggaaagaaagtttatagtatcctttcacaaaggagtagttttaaa

SEQ ID NO: 224940 - DNA, 1000 bp, Homo Sapiens
cagcagctccatttggtccagcaaccttagcagcgcccttcccttcaccactccagcaaacacgctggcaagcatcggcctcatgggcacagaaaactcccctgctcctcacgctccctccacctccagtccagctgacgacttgggacagacctacaacccgtggcggatatggagccccacgattggaagaagaagctcggacccttggtctaattcgcactttcctcacgagaattaaattaagcaaaaaacaaacaaacatagtgggccctcgtctagatcatgatgtgccagtttctgagacatctttttaaggctcttactgcagctcccctccccaccctcctcttctttgcaaaacagacccaagcagggcaggctcagaccactcgcttctttcagatctttcttgcaattatgataacatgagatttgctgttgtgcttttagagaaaagtctggactcagccacaaactctaataagacctgtacatctgagaacctttcccgttactgcgttttcaccacctgtcttccccatgctttatttatctgtatgaacacagatttgacattacagctaaggaaataatttgagttgattcagaaatcctggcatgtgacaattttgttaaattaccaagtttggtttttaataatttctcaatattatgcgccaagatctaattttaaaactgtatgaggactttgtgctgaaaatagagtatttttttaaagtaaggctgtcttggtttaaaagcagattacagaaatgtaagtcaacttaagaacggtgaatgaatgtaaaaacattcagttgagaccatatgcattttctgtgctgtttgtacttgaggtatgtaacatttgtatacctgaacttattttaaagatgaactgaaatgcacatagccaagtcttgagatacaagattgaatgtgtatttcttaaaaatacaactttgtgttgtactttgaaataaatgatgcttttttc

SEQ ID NO: 224941 - DNA, 1000 bp, Homo Sapiens
ggagattatattggcatcagacttcgggaaaatgaatttgacccaaaaggaagacggcaactcacctttctagatgatatggcacactatgacttggccatcagtgttgctttgcaatggctggatccctcagaagacttaacttggctggagtgggaggaactgaaaataccactccatggcagacccatatatccaaatcgtagagaacgagaagctatgattttatcatcttatgctggaatcttaatgaacagtatcccgattgaggaagtctttaaaatttatggggctgattcttctgccgattctggtaccatcaaggttccccgagtttcatctctctgcctctccttgcacccctttgccatgttaacagcacccaaagcagcagcatacgcccgcaaacagagtgtcaagtcaagaaaggtaacaacaaataaaaatgccaccagcatctctgcaaaggaagcaaatgccacagaatggaaatcatcacaaaggttttcagacacacagccaaagcacaaagtcacttagaaaattggaattgtaccatggaacttcataatagattctctgggagcagacgagaagcatcatcttaaaaccacagctcttgccagtacatttttctttacaactgtttttggtacaactgcactgaagtgttatttttgatgttgagctttcttcttttagaagcatattgcatggctacattttcttaaaaaaaaaaactgtgaccttatgctacttcattgtgactggaagactgctggagaattcagaaagtatatagtatttctgtgttagagcaagctggctttgtagcacattttacaaatgtgtggcattgaatattgcacagtgatggagtgggaggcagatttccaaagagttaatccaaaataaaattaatctgtcattgattgcctttactgtgttctcatatgaaaagaatgtttaaatcatttcaataaagcattaaaaaaatgaa

SEQ ID NO: 224942 - DNA, 1000 bp, Homo Sapiens
gctggcggagtaccagggcagtctggaggtgctcttcgtcacgcagttggtagaaggtcacctgccaccatttgccaatccactgcaggtcttgaggcagatcctggaactgtcagtcaccaccaacacccctgtcccccaaatgcagctacacaccattttcacagaactgcacgtccaggtgtgcaacaaggccccggcccagcatcagtacagcagccagaatctgatggagatggtgcactgcttcgtagcccttgctcgctcctaccccaaggagctgatgaagttcttcttcagccagatggagacaaacaaggaggccgtccgcgtggggactctgaatctgattagggctatagtgagcgcagatgagcccaggatgagtatcagggccatctacctggctatccgggtagtcaagaacaccatctctgatacccggtccaaggtgaggatggctattctccacatcattgggcagttggctctctgtggctaccaggagagaatcaaaggctggggcctgaagtacctgtctgtgcagctgaccttatccacctacaaactgacaaatcgccgggagaagttttatcagagggacttggaggagaggatggtccacaaagtcaccatggacactgtgaagatcattacctcttctgtcagtgggatgaccaccgagttttgggtgaggctgctgtgctacatcatggagacagactacgtggaagctttgactcctatctgtatcagcctcacaaacctggcagaacaccagctccatggccaggatgtggatgtcagcgtggctggcaagagcaggcaaggtgggcaaagttcctgtccagctgattggattgggcaggtgggctggctccttgtctgggaatgcccacccctctccacattcctcccaccctcattcccccttctcctggaaacatccaagtccaaattaatactattaatgcctacctggatattaatgcctacctga

SEQ ID NO: 224943 - DNA, 1000 bp, Homo Sapiens
agcgctctgcaatgagggcagtggctgccctgctgaccatccccgaggtggggaaaagccccatcatggccgacttctcttcccaaatcagatccaaccctgaacttgctgccctctttgaaagcatccagaaggattccgcttcagcccccagcacagactcaatggagctcagctagtcccctcagcaccaaggtgggccctcgcttaagagaaaggagcccacccaagtccgaggcctccccatcccaccatcgcaggtctctacttttgcccttccaccatctcactgggggccctgtcgctcctggtcagggcttacagtgccttctccagggacccaactcaaaggcccccagcccaagctgtgaggctgccaacagttgggccccttccttaactcaggacagtcatccaaagaaatagggtgaggaagttttccagtgacttcacactgtacccctccatagtctgtctggttccttcagagggtgtctctgcctcacaaactagtagtatttagaaataggctgtgctgtcagctgtaaaagatcaggaggcagcagacaccactctggtttcttcactgcattcagcaatgcctgaagttagtgctcaggccgggcatctcaaaagaaaagatacttgagttattcacattttaaaattcaaaacggttcatttttaagtggcagtgatgaatcagaaatttggaagatgatacgggtttcttttttccagggaggaggaatgggttgggtagggaactggacaggcttggacctcatgtttcatttctaatttcaaaatacttattagcaaattgggcaacaatgggcatcttccatgccaccacccaggcataaccagttggtttgtttccttctgaggaaggtttcaaatgtgtctagtgttcagtattgaggacaaagaaatacaagtggcaggcccaagtattttctgtgatatcccaggttaataaagattagattctaagtta

SEQ ID NO: 224944 - DNA, 1000 bp, Homo Sapiens
taaggagctgagggcttaacaagtttctagaagctgccatcaacatgccaagtcagtaaaactgatagttgatcagatttcaaggtctggggagtatatccactgtgtactgggtcttgagctctagagagctaggccttgctaaaataaaagaattaccttacctaccatctttgttcaagtctcagtggaatttgttacggccctggctgacctccgagcagaggctagctgtcccatctgtctggactacttgaaagacccagtgaccatcagctgtgggcataacttctgtctctcctgcatcattatgtcctggaaggatctacatgatagtttcccctgccctttttgccacttttgctgtccagaaaggaaatttataagcaatccccagctgggtagtttgactgaaattgctaagcaactccagataagaagcaagaagaggaagaggcaggaagagaagcatgtgtgtaagaagcataatcaggttttgactttcttctgtcagaaagacctagagcttttatgtccaaggtgcagtttgtccactgatcaccagcatcactgtgtttggcccataaagaaggctgcctcctatcataggaaaaaactggaggaatacaatgcaccgtggaaggagagagtggaactaattgaaaaagtcataactatgcaaaccaggaaatcactggaactgaagaaaaaggtaaaacatagggcagaagaagtcaagtctgaatttgagcaacttaggttatttctccaaaatgagcaagagactgttcttaggtaattacaagatgaagagatggatattttagcacaactaaatgaaagcctaacaaaattttcagattatacctcctcattaaaatatctactaaaggaggtagagagcatgtatgtaaagtcagaactggaatcactggcaaatgttaaggatatctgtcacagatataaaaatttaaaattccctgaacctttttcattcaaa

SEQ ID NO: 224945 - DNA, 1000 bp, Homo Sapiens; identical to SEQ ID NO: 119239

SEQ ID NO: 224946 - DNA, 1000 bp, Homo Sapiens
ttgctgtagcaagagtgtctctctagattcctcctctctgagcagggcatctctgaaacaaaggcagcagccccagtcagggacttatagataaaactcccatctccctgggacagagcacctgggggaaggggcagctgtgggcacagcttcaggacacttaaacgttcctgcctgctggctctgaagagagcagcagatctcccagcacagtgctcaagttctgctaagggacagactgcctcctcaagtgggtccctgacccctgtgcctccggagtgggagagaccttccagcaggggtcaacagacatctggtgggtgcccgtctgagacgaagcttccagaggaaggaacaggcagcaatctgtgctgttctgtagcctgcgctggtgatacccaggtaaacagggtctggagtggatctccaacaaactccagcagacctgcagcagaggggcctgactgttataaggaaaactaacaaacagaaaggaatagcgtcaacatcaacaaaaaggacatccacacaaaaaccccatccgaaggtcaccagcatcaaagaccaaaggtagataaatccatgaagatgaggaaaaaccagtgcaaaaaggctgaaaattccaaaaaccagaacaccttttctcctgcaaaggatcacaactccttgccagcaagagaacaaaactggatggagaatgagtttgacgaatttacagaaggaggcttcagaaggtgggtaataacaaactcctctgagctaaaggagcatgttctaacccaatgcaaggaagctaaaaatgaaaaaaggctggaggaattgctaactagaataaccactttagagaagaacataaatgatctgatggagctgaaaaacacagcacgagaccttcgtgaagcatacagaagtatcaatagctgaatcgatcaagcagaagaaaggatatcagagattgaagatcaacttaatgacataaagtgtgacgtcaagattagag

SEQ ID NO: 224947 - DNA, 1000 bp, Homo Sapiens
catgtaatggagtaggattttttaccatagtcagaatgaacctcatatgtgctgtgaagcatgaaaccaatgactgagtaatctctgtactgaaaaggaatacagcacataaaggataaggtgctacatatttttttattttaaaaataatttcaaatgtttttctttccccaatctttctctttatatgatataactgctgccatctcgtgttccctttgaattatttttttctcctttcagtcttgaagtatctatgacaacaggaagaaatgttcagaaattttttaaaggattttttaaatacaacatttggatgttaagttgagtggagtcacatagccccaggaggtcatctgaaatttttaatttaattttgttgtagctgtagcccaagtcccaattttaattgcctttactatccacaattgtgtcaactttcctcattcaatttatctaattatagtcaaaaaaaagcattctcctgaactataactttagtcacacctctgcttgtagtggttttcagtcttcctcctaaaccagaatcaaatttctactcatacatattcaggtcctataccaaatggctccatgttcagacaattgcttgccatcctcttggttcaagtcacatgcttgccatgttttcccaatcagaatccatctttcttccaaaattaggctcaaaactaattccagcaatctttaccccaaagctcattagctcatataatgtgttactttaaaattttttcattgtattgatacacacacacaaaataagaaaacagaacatgctctagtaccctctctgccaaggacaattatagatatttattatttccttcctatcactgcctgatattagattataaagacattgaagatattatgatataatatgaagtctccctttataactccctgtatgcctactacagtgttatttcatcaagtggacagttaacgaacacaattgattaaatagctgccaatg

SEQ ID NO: 224948 - DNA, 1000 bp, Homo Sapiens
ctgcagagacagtccattctgggctgctggctttttgcccttcctgcatgatttccagctactgtgacctggatgctgggaacccaggcatcggctccaaaaattagaaggcgagtgctgagaagacttgtcacaggtttctcaaatcagaatatactcagtcatagtggttccctgggaagccccagaccctttgacttgtgacattactggtttgcagacataataactacactcagaggaccatggaggcagagggatcatggtttcagggcactgaaaactctacgagccaagaggactagtgcatggactgaaagtcaggcatgccctcaaataggctgtattttctttccaggaatgtaacctttcccctttttcttctgacctgagccaagattggaaatcagaaagtctcctgtacatggagctgaagaggggctgctgttttccgaatgttttccatttcacaggcgccacctgcttgcccggggttggtcttgagaagacacccaaatgttcatgcctcagaaaggcagcagaatgccttttaggaaatttttttaaagtaatttgaagttatatagaagtttggtaagaagaagcagttgtttctctcttttctccctcatttcatggaggtgttaatgatcatggctggccgtgatgtacacatgggctgattttcattttttcagtttcatagctgagaaattcagctttgttttagttgaatcatcatattggaaagcagacattgaaagttttcttttctatctttgttatgaatgtgctatggccccttttggagacttctattgggtaatattctatgtgagagaaggaaacttggtattaaatgttgtggaaaataataatgatgataataataaagtatatgctgcaatggtgtactgccaatcagattgcttgggagaagaaaatttattcaaatccaacgataaaaaattaatttcttattgaataaacagtatgttcc

SEQ ID NO: 224949 - DNA, 1000 bp, Homo Sapiens
ccaagcaagagtggacacctggggttcctagccgcattgaggtgggaccaggaatgtgtatgtataacatgtggagaaggaccatgtgtggggtggggagtgaagctcccacatgtggaatggaagccctttgcattggccaagggcagaggtgggagattgatggttcatttttccttggccctagcccttagctacagggaggcctagagagaggacacttggcaagtttaggatgggaaacaaggttaagcctggctttgctattcagacctgtgcagccctgattttggggactgggcccaaggagccatgagtcttaggcttgacactaggggccttacatggccaggtctcatatgggatttggagaaggcatttttcctaacactgatactacaagtcaccaatactcttgatgccttaagatgctagaaagccttggagagtggaggcagcagagatgggaatggaggtctgaagaagcttgctgctgttggggaatgtgtttgggaaagtcaagagtggtaggattggttggctgggcgcggtggctcacacctgtaatcccagcactttgggaggccgaggccggtggatcacttgaggtcagaagttcgagaccagcctgcccaaatggtgaaaccccatctctactaaaaatacggaaaaaaaaaaaaaaagagtgctaggattgggccagttaagagcaggggagacctggctgggcatggtggctcacacctgtaattctagcactttgggaggctgaggcgggtggatcatgaggtcaagagattaagaccatcctggcctacatggcgaaaccctgtctctactaaaaataaaaaaatgacctgggcatggtggtgggcgcctgtagtcccagctactcggggcgctgaggcaggagaatcgctcgaacccaggaggtggaggttgcagtgagccgagattgcacaattgcactccagcctggcgacagagcgagactcgtctc

SEQ ID NO: 224950 - DNA, 524 bp, Homo Sapiens
aaaaaaactttttcgtctgggctgccaacatgccatccagactgaggaagacccggaaacttaggggccacgtgagccaccgccacggccgcataggcaagcaccggaagcaccccggcggccgcggtaatgctggtggtctgcatcaccaccggatcaacttcgacaaataccacccaggctactttgggaaagttggtatgaagcattaccacttaaagaggaaccagagcttctgcccaactgtcaaccttgacaaattgtggactttggtcagtgaacagacacgggtgaatgctgctaaaaacaagactggggctgctcccatcattgatgtggtgcgatctggctactacaaagttctgggaaagggaaagctccccaagcaggctgtcaccgtgcaggccaaattcttcagcagaagagctgaggagaagattaagagtgttgggggggcctgtgtcctggtggcttgaagccgcatggagggagtttcattaaatgctaactacttaaaagaaaca

SEQ ID NO: 224951 - DNA, 1000 bp, Homo Sapiens
tgaagaacattgtaacccaccttgtcaacatggtggcacatgcttggctgggaatctctgcacttgtccttatggttttgtaggaccaaggtgtgaaacaatggtttgtaacaggcactgtgaaaatggaggccagtgtcttacaccagatatttgccagtgcaaacctggctggtatggacccacctgtagtacagctttgtgcgaccctgtctgcctcaatggtggttcgtgtaataagccaaatacttgcctctgtccaaatggattctttggggaacactgtcagaatgctttctgtcaccctccctgtaagaatggtggccactgcatgagaaataatgtgtgcgtctgtcgtgaaggatacactggtaggagattccaaaaaagcatctgtgatcctacgtgcatgaatggaggaaaatgtgtgggaccaagcacttgctcttgtccttctggttggagtgggaaacgatgcaacacacctatctgcttgcagaaatgtaaaaacggtggtgaatgcattgcgcccagcatatgccattgtccttcctcctgggaaggagtgcggtgtcaaataccaatttgcaacccaaaatgtctttatggaggcagatgcatatttcccaatgtgtgttcctgccgcactgaatactctggagtcaaatgtgagaagaaaatacagataagacgccattgagtagcatcaagtatatgaattacaagcctgtatcttaagaatggaaatattttgttcagaaaaagttggagataacttggagtttatttgaacatcattcaaaaaatatcttaaagactgaagaaactaataaaatacataatgatctctgttgtaatcatagagaaaagcaaagaagaaatccaggtaatctaaatttgatgttgagatgggataggatatttacatattgagatgatgtatctgatattccacccattcacaatatttaataaactgaatattttctcagccctaact

SEQ ID NO: 224952 - DNA, 1000 bp, Homo Sapiens
aaggatgattatcttaagttatgtttacactttggtaatatttgaaaatggatgtatatactggaaatgtctgtaagtgtcttgtttttgcacctaatttatgatctattatattgcattttcttaaatatcttagaagtatttttctttataactttgtatattgaatgtttagataaatgtccaactgacaatgttataaatcaaattcttattcctaaaatcatttagtattataagtattttgattttttaagttaaattatagtaattttaggccgaagtgagttattttaacattaccacttaaaacggatgaaattgtaaaagtcatttggtttgattgccccacaaagcataagatgtaaactgattaagggtatgaaagcaaagtgaaagacctcagatcttgtgcacattttgttttcctattatttcttttattgactgtagtgcatgatacctaatcaaggctccaatgtcttgcacaattcctactttaatgctagtggttttcagtgtccttacaatttaacacagaattgttatttcatcaaccttaaaaactgcagtttttattatcagaaaatgaacaaaaagggaatatctggttgctatgaactgattccctaaaggagagctcagtatgattctaacaatagccaaaagtgttttggggtataggttatgctttgttgggagggaatgtgtggtgaggaggccaagctgcagacagaaagcattgtatgagctgtatctgggtcagggtttcccattaaaggatgttagttttataacagattactttgtttaagaccatctcccttcaagtaactcacagtttatgtaatactaatctcattctttttttacctgaatcaggaattttctgcagaatgttaagttagggaagaaacctcatttcatccattctaacactcctgatgaagtccccctttagtttcatgacaataaagctgttctgtggctatcatccttt

SEQ ID NO: 224953 - DNA, 1000 bp, Homo Sapiens
ccagttagaatggcaatcattaaaaagtcaggaaataacaggtgctggagaggatgtggagaaataggaacacttttacactgttggtgggactataaactagttaaaccattgtggaagacaatgtggcgattcctcagggatctagaactagaaataccatttgacccagccaccacattacttggtataaacccaaaggaatataaatcatgctgctataaagacacatgcacccatatgtttattgcagcactattcacaatagcaaagacttggaaccaacccaaatgtccaacaatgatagactggattaagaaaatgtggcacacatacaccgtggaatactatgcagccataaaaaaggatgtgttaatgtcctttgtagggacatggatgaagctggaaaccatcattctcagcaaactctcacaaggacaaaaagccaaacactgcatgttcttactcttaggtggtaaatgaacaatgagaacacatggacacaggaaggggaacatcacacactggtgcctgttttggggtgggggaatgggggagggatagcattagcagatatacctaatttaaatgaggagttaatgggtacagcacaccaatgtggcacatgtatacatatgtagcaaacctgcacgttgtgctcatgtaccctagaacttaaagtataataaaaagaaaaaaaagtatgtgtatgtatctatacatatttataaaagaaggcaacatagtgacagcctgttagagacccaatttgcataataaaagatcagggtggggtggccagcctcttcacgtactatataaagggcacacctggtttaaccaatcctctgtgccctatataaggcagacatgacttcctcaagctcatctataaaccaactgcatcttgctatgaacctggaaaccatttgggatctcttcctctgcaccagaaagctctcttctttgtttcacttattaaacttctgctcttaaaccc

SEQ ID NO: 224954 - DNA, 1000 bp, Homo Sapiens
cacgcactggtgataggcatcctcgtggtcatcatcagggtgtaccatggcatgaacacaggatatgccatcaatccgtcccgggacctgccccccccccccgcatcttcaccttcattgctggttggggcaaactggtcttcaggtggcatcatctacctggtcttcattggctccaccatcccacgggagcccctgaaattggaggactctgtggcatatgaagaccacgggataaccgtattgcccaagatgggatctcatgaacccatgatctctccccttaccctcatctccgtgagccctgccaacagatcttcagtccaccctgccccacccttacatgaatccatggccctagagcacttctaagcagagattatttgtgatcccatcccttccccaataaagagaagcttgtcccacagcagtacccccacttcctgggggcctcctgtggttgggcttccctcctgggttcttccaggagctctagggctatgtcttagcccaaggtgtagaggtgaggcacctcaagtctttcatgccctgggaactggggtgccccagggggagaatggggaagagctgacctgcgccctcagtaggaacaaggtaagatgaaagaatgacagaaacagaatgagggattttcaggcaagggggaaggaagggcagttttggtgaaaggactgtagctgactggtggggggctggctttggaaatactttgaggggatcctgagactggactctagactctcccctggttgttcccttccccgagttctggccggttcttggaccagacaaggcatggcccaagaaggtagatcagaattttttagcctttttttcattagtgccttccctagtataattccagattttttttcttaatcacatgaaattttaataccacagatatactatacatctgtttatgttctgtatatgttctgtgctttatacgtaaaaaagagtaagattttttttcacc

SEQ ID NO: 224955 - DNA, 498 bp, Homo Sapiens; identical to SEQ ID NO: 119245

SEQ ID NO: 224956 - DNA, 495 bp, Homo Sapiens
atgcatctgggcctgagctggtatgtcttcaagttttctgccaagattcaagatggcagaagtggagcagaaaaagcagcaaagcagaagaagcagaccttctgcaagttcacctcctgtggcgtgcaccccgacccactgctggacttgtcatgcgagcagcgaatgaagctgcaccgtggcctgtggcagaagcagcactcgctgctgaagcgcctgcgcaagggcaagaagtgggcactgcctatgcagaagctggaggtggtgaacgcgcacctgcaggatatgatcatcctgcccgagatgggagacaagacggtgggtagcatggtgggcgtctacaatggcaaggccttcaaccaagtggagggcaagcccgagaggattggccattacctcgatcacctacaagctcgtgaagcactgcccggccaggcatcagagccacccactcttcctgcttcaccaccctcaaggattctgctcagccagtaa

SEQ ID NO: 224957 - DNA, 1000 bp, Homo Sapiens
gctcggccccgggactgtggtccctgagctccgctctctgaagccggaagcccaggccctcatcacacagggcctctactcccactgccgggcccttctgagccagctgccagacactggggcccctctcgaggacaaggacacccagggcctccttgctgtgggggaggcgctgatcaaaatcgactcagggcaaccgcactggcacctcctcctggcagacattctcatggcacagggtatgcggcggccccaaggcagctacgaggaagctggcacccacctggaaaaagccctgcaccgtgccccaacgtcagaggcagcccgggcccggctgggcctgctccagctcaagaagggagacgtgccaggggctgcaagggacctgcagagcctggccgaggtggatgccccggatctcagctgcctgctgcatctcctggaggcctcggagcggcagagccttgcccaggcggcggcccaggaagccggcaccctcctggacgcagggcaacccaggcaggcgctgggctactgttcgctgtctgtcctggccagtggcagcagtgcctgtcacctgcgtctgcgggccacctgcctggccgagttgcaggagtttggccgggcccttagggacctggaccatgtgctccaggaggcgctgggggatggtgacctcccaaggcgggcagaggacttctgccgtcagggtcgcctgctgctgagcctgggggatgaggcggcggccgcaggggcctttgcccaggccctgaagctggcgccctccttggcccagaacagcctgtgcaggcagccaggccgggcccccactgcacgcatgttccttctccgcgggcagtgctgcctggaggagcagcgtcacgcagaggcctggacggcggtagagagcggcctcctggtggaccccgaccaccgtggcctgaagagactgaaggccagaatccggagggaggcatcctcaggctgctggctacagtga

SEQ ID NO: 224958 - DNA, 599 bp, Homo Sapiens
gtcagtcccagccaggacacagcatggaaatgagggtccccgctcagctcctggggctcctgctgctctggctccgaggtgccagatgtgacatccaggtgacccagtctccatcttccctgtctgcgtctgtaggagacagagtcaccatcacctgccgggcaagtcagggcattagcaatgggttatcctggtatcagcagaaaccagggcaagcccctacgctcctgatctatgctgcatccagtttgcagtcgggggtcccatctcggttcagtggcagtggatctgggacagatttcactctcaccatcagcagcctgcagcctgaagatgttgcaacttattactgtctacaggattatactaccccattcacagtgttacaagccataacaaaaaccccccagagaagcagatgtgtgagtctgcactgtcctagctactcctcctggtgcctccatctgctgagaacatttcccaaattgcatccacactttgaagtttctgtagaaagtgacatgaagcctcctctataccttaactatctttccttcacggcatccccagcggcacagacagggcaaaccctctcctga

SEQ ID NO: 224959 - DNA, 1000 bp, Homo Sapiens
tcatgtgcgcatcgtggagtatcttattcaagatctgcacctcaaggacctgaaccagcctgatgagaaaggaagaaaaccatttcttttggcagctgagaggggccatgttgaaatgatagaaaaacttaccttcctaaacctgcatacttcagaaaaggacaaggggggaaacactgccttgcacctcgctgcgaagcatggtcacagtcctgcagtgcaggtgctgctagcccagtggcaagacataaatgagatgaatgagctcaatatcagtagtttgcagatagcaaccaggaacggccatgcatcccttgtcaactttcttctcagtgagaacgttgatctgcaccagaaagtggaacctaaggagtcccctcttcatttagttgttatcaacaaccacatcacggttgtaaacagtttattaagtgcacagcatgatattgacatcttaaatcagaagcagcaaacccctctgcatgtagctgctgatcgtggaaatgtggaactggtggaaaccctgctgaaggcaggctgtgacttgaaggctgttgacaagcaaggaaagactgccctggctgtggcctccaggagcaaccatagccttgtcgtgggcatgctcattaaagcagagagatactacgcctggagagaggagcatcatgagagcatcagggacccgtcaacaggctttactctgacattcaagcaagatcacagtctggagaccagacacattcgcacgcttctctgggacctggcttaccatcagctgaaggccaatgagtggcagaggctggcccgttcgtggaactttacagatgaccagattagagccattgaggagcagtggtcgggaaatgaaagcttccgtgaacatggccacagggctctgcttatctggctacacgggaccctgatgactcagggtgacccggccaagcaactgtatgaagagctggtacacgcaggtttcccaaaactagctggtaagtga

SEQ ID NO: 224960 - DNA, 1000 bp, Homo Sapiens
gccttagacaaatatttacccttctgatcctcagttttctgtcaaagaacttctgctcatatccaattcctataaagtgggagtactctaacctgatattaccaacattaggttagattttatcctaatgttaggtattagaatatatcctaacattactagttcttcactcttactaaagtgcatgttagatttcttcaatgatttttttaaattggcatggttgatacaaagcatccttctatccaaatactgtgctcagtcgcctaagtgatagtttagaaccatactatctctctgtggaaagaatgctggggctcctggctacacactttgagtagaagggaaaatacccctcttgtatttatgatgttttttctttctacttgattaagaagaaagtacaaaaaggtgcttattgaagcattgtcaatttgggaacaagattctcaggaatgaaatatttgtgactgttctcagcatgaaaggtagagagaagattacttgatcattatgtgcttatttgaaagtcactttcctcccatgcctcaacatctcactttttagaatgcacactgaatgcctggaatctctttgttttagaaaagacaaaggatgcattgttaaaaaaataatatttctggggaaaaggctcagtgctcaacggttactctataaagagatttaaaaagaaagtcaagggaagataaggaaggtagcatggctaacaacctcgtgggttctactagcattatttcatgcaaaatgtcattaacctttatataggagagaataagtctgggaatcaactggcatctaaactccatttcttgttttgtcactgcttccctggttgactatggaaaatacatttggtcttttgataccttggtttcaacaactataacatgacttaagaacttttatgcatggactttgtaatagttatctatttctgcatacaaattacttcaaaacttaaatcgtcgtttgaaacaac

SEQ ID NO: 224961 - DNA, 1000 bp, Homo Sapiens
tgctatttttagaactcatactgcaagtggtagaaaagaatgggggtgggggctgctgaccaaagagattgcttcattattggaaacagaagataagtaggctgaagagggtgattggaaagttgagaacagggaggcagttcttcccctctcccctccacccccatgtctccctctcccattccaggagctgagcactaggagaaagaagggcacatgagaccagatgatggaagctgacctggctttccactctggctacagactttctggatgtgtgacctcgaatatgttcctgagggccacctctagcctataaggtgtctttgtgcaaatagaagacacccctttgcacaagtaaataagagaatattctggttggatgcagcatctcatagttcctgatctggcaaacagtgcatggctgaatttccaccctcccaacagtacatttgtgcagcatcccagctacccaaccacatgcagcaagcaggtgtcacttcacatctgtagacccctgcttgtcctctccataagtgaagataatatctgcaaaacagggagatccaacacaggagacaaaatgcaaggcgagaaccaataattaaaaaaaagaaaaagtcattcaaggtcttagggtgcaggccacccaggacaaagactgggaggagcatgggttctctgccacatgtgagggggcagtgaagaccaattctgattgatatcttagagtaggaagttggaggatttagggatacccagtgactgaattctaggttacatcatcgctatcattaatttcttgacatagaagctgaccagctctcagcatttcgtaatcattgcagagtgcaggctaggggctctggggctccagccctgccagtctgtaattgatgtaggttaactctattctccagtttcctcatctgtagaatcaggtaactgatgtacttctttcacagaggaattacaaaaataaaacagaataatatctgtg

SEQ ID NO: 224962 - DNA, 1000 bp, Homo Sapiens
gctcctgcctgccagtggcctctttaggcccagctcattcctcacgtcggccattccaggccccgtttttcccttccggcagcctcttggcctctaatttgtttatcttttgtgtataaatcccaaaatattgaattttggaatatttccaccattatgtaaatattttgataggtaatttatttggagtgagtttctgcgccaagcccgaattttttattttattttccttattatttggtgttaaacaggtttaatgacggtcatggcaactttttggcacaatgaaaaatatcgcccacgatcaacgtgttctgttctggggaagggggcaaaggcagggtgaatcactttcttaaaaagtatagctcaagttgggagtgcagagggaatggggagaaaaccctcccgctgcctgtgtcgaagtgcaggagcccccacccccatactcacctgagtccagcccctctggggaaagaaggggtgcatgaactccccctagtccacaggcgcctccctgtggcccaaggccctcttcacactccatcttgtagccccagcaggagctattttccgaaaagtgaaaagctctgaaggtcccacaattcatggtatgtacaggggctcggaggagggaaactgcccagctttcccccggcacagctgcaggggtagggggtatagataagaggagcaggccttggccaggcgtggtggctcacgcctgtaatcccagcactttgggagggggaggcaggcagatcacgatgtcaggagatcgaaatcagcctggccaagatgatgaagccccgtctgtactaaaaatacaaaaattagccggacgtggtagcgtccacctgtaatcctagctacccggaaggctgaggcaggagaatggcgtgaacccggcgggaagaggttgcagtgagccaagatcgcaccactgcactccagcctgggcgacagagcaagactcggtctcaaaaaaaaaaaaaaaaaa

SEQ ID NO: 224963 - DNA, 639 bp, Homo Sapiens
ccgcaaccaacaccaccaccagtccaggacctgatgtaatattgccacagactgattcccgttgcctttgatatgcaacctgtgcctacagtcagctctcagggctaaagaaaacagtcagctcctgcggcatctgatttgcctcctgccctcgctgctgttaatctgcaacacgccacagcctctagatcgctgccgttcagagtcggatgtcatgggggcgactggcaggggttctttcttctttcggtttgatacatccttccttccgctgctcctcgcaatcaaccgctaggggaaggagggaagcaggcaggagggagagcgggagacttccggaaatccctttcctcccttcccttcacaggttgccccatagtgaccctggagactcccgcctgcccccagtgaaggaattggttactctcccagagccctcccgggcatcgcccccttcctcacttcctcctcttcctgcccccagcctctacccctccagcctcctgtggcttcacaggcaagtgccgcatcccaggaagaaggagttggagctccgtgatgttctggaagctgagaagtctaaggtcaagactccagtggattacgcatctggcgagagcctacttcctggtttgtagg

SEQ ID NO: 224964 - DNA, 1000 bp, Homo Sapiens
ctagtgatgtttttttccagtgggatcacagactcactcttccttgcagaaaatgaacaaaggattcatgtaacactggcaggtactggcagccacccagggcctctcacaggaaagggagatcagaaagagaagcaaagaggactcatgagataccatagggctgctgcgtccagccttgcctggagctagggccacctcgatgccctatagtcttggagccacaacgtgcatttactcaaagcctctttgagtttggtttgcttgtttgctttctgcctggaaactgccagcatcctgagagatacgagatctgcatctgtgcagagacacagggtttgttaaaagtcacaggccctgactgaagtgtggaactggctgaaatgagaaagtggtaatttggggaggaccttgtgaaatggaaggagttttaaaccttacatgcatcagaattacctggagccttgtgaaaacacaggttgctgggccctagtccattaagaaaggaagtggggcttagaatgttcatttctcccatgttcccaggtgatattcaccatgctgtcctgtctgggcactaccttttgccatacccattacaaggtattgcacgtgctggttgaactatggtctgtcttattttggtgctaaaagcctgtgccaaataccaacgctgcagcattaaggaatgtgatagaaaagattctgaatataggccaggcgcagtggctcacgcctgtaatcccagcactttgggaggccgaggcaggcagatcacgaggtcaggagatcaagaccatcctggctaacatggtgaaaccccgtctctactaaaaatacaaaaaattagccgggcgtagtggtgggcacctgtagtcccagctacttgggaggctgaggcaggagaatggcgtgaacctgggaggcggaacttgcactgggctgagatcgcgctactgcactccactccagcctgggcgacagagcaagacttcgtctc

SEQ ID NO: 224965 - DNA, 799 bp, Homo Sapiens; identical to SEQ ID NO: 119257

SEQ ID NO: 224966 - DNA, 714 bp, Homo Sapiens
atgggagagacaggcaagctgcaaagggaagtcgacgaaataaaattaaagccctacaatcgtgttcgtgtcaatgtagatggggtgcccccctcggtttgctcacagaggtgggtgtgagatcctacaggacggtctggaagacatcccatggaaggcactttattttgcccagaagctggaggaaaagcagaagagtgctgattggtgcatttacaatcctttagctagacagaaaagttcttcaagtccccacttgacccagaaagtccagctggcttcacctcttaaaactactccacctgaggtttttagatcaaaaagaattgtactcaaggaattgaagctatggagcctctgccacatctggacctgattttgatgacaagatcctgtacctcaagcccgagactaatttcataatttgatgaatctttttggagagtcatgggaggaatgtaaacaatttgtggccaaaggagaattatggtagtttgaagatgtggatacaaattatttgacattcttctcatagaaaggtaactccatagctgggagccaagtctcgaagccccatgaggggaagtggatacatctcagaattgggtttcctgatacacacgactgcatccttcatctgccaggccctggcattgtttactggagaagatgtcataggaaattgggctatgtcattgagccactggagtcaca

SEQ ID NO: 224967 - DNA, 1000 bp, Homo Sapiens
ttcctgcccacccgccggctgtcgcagaaacagcccaggaccatgcgccagcgcccgcgaccctctaccaattgcccttcggacagacgccctccccaccacctcacacgccctcttccctggccccacacacagcgagcgaccgcgaccaccttccacgctcttccctgcctatctcctccgcccgccttctcctcactcgcccaaacagacacagcccagattcttcccctattcctccttttccctccttcctcccaccggcctccgcccaccgcccaccgccttgaatcgccgctgcgctgcccagaggcgtcctggcctgaacagcccgcccggtttcaccctccaacttctgaccgctgagcagcagcgagcgactcgctcgtggagccgcacacacgtctcccaccagaggcacgccatccaacatcctgtcctttcctccgacccctcggaccccggccgcgcattccattctgccgacaccctagccaggtcgccgatcccacctcgctacctgtgctcccttcccgctaacacctgcctgccggcccacctgcagcccggacgcctgccggccagaggcagcgggaaccctgcacacagccgggcaggcgagtccaaacccggaaagacagcccaagaggaatcacgagcggaagccctagatccccgtcacccgcccacaaacgcctggccccgccgggaccagctctgcgccacagcgcatccccacgcgggaagccgcggcctgggccgtcccagccacacccagcgcgccttctccagggtcagccagctgcggctctgccgaagcgctcctccgctcctttctcgcgctccagcctccctaccagcccagggggccggaccccaagtgcgagccggtggcgtgggtcagagcgcaggagcgaggcgcccacggacctggtctgcgtttctgagccgcacgccacggctgcgagacccgttccccatcgccgcccccgctcgctga

SEQ ID NO: 224968 - DNA, 682 bp, Homo Sapiens
atgggcgtggggggagaagaaaaccgccttcccttcaacaaatttttcccagagatcaggccgcagctgtttggctcccagcagacccggtgtgacgttaagggacggggcggttgccggcgtcttgaggggaacctagggaccgagaggactctccgggaaggcggccggagcggaacccagccccgctccgagtgccacgtctccaggaaccccctccttactcttggacaacactccgcccccgcccgggcctccgtcccccaaaccgccctcatttgtgcagcgccagatccttcggacacatccctaggtgtctccatcctcattcggtccatccaactcccagacctcacgtcaaccggctgcaccccactttccagcctgcgccccagatctgcagccttcgcccctagatacacccgcctggtgatgaggcgctcctcgcgttccttccgtctccagtgcaccggctttccctcgtcctctgcgcagtccatctcagctcatctctccaattcaatgccatcatctctcctcaccatctctcggtgccctggaatgtttgctgtcagatgtcccctgtgaaacccacaaacgcttgcgatttggcctccttgttttattttgtgtagtcctacaacgtcttgttactaccccctattacaacacttataactca

SEQ ID NO: 224969 - DNA, 1000 bp, Homo Sapiens
atttattttgaaattattttttcttgatttttttgccttttgttttgtgagttttataatgtacagaatatttttaaattattatatatatcaactaattagtcttcatttaaacttacgcctctggggtcttacttgggtttctcctaacaatattatacacatatttgcaataatttctctcatactgcttttaactcatttaatttttcaactttttaagaataacaaaagtgatattaattgtaaaaatgctgaagtgacatatgaatttatgaagtgcatatgtattttttagtttaccaatgagatgggagaaatgctgtcttatattttaacatacattttggccattacacagatgaagcaacttttcatttgttaatacataatgcatactttttcttctgtgcaattcctctttgtattctttgctcattttcccactgggatttgcaagttctttattatttgataatctctatacattctgaatatcaattttttgttatatataccatgtaaatattttcttctaatttgttatttgtcttttaatggtatttatcaattgtttgctaaaaatgagtttgtttagttagtaaaatttgtctatctttaacttcatgatatttgtatatcatgtcatgaggaaaaggcatgaatattttaaaaacttccttgtagtgttaattttattttttatttcattctttaagttatttgaaatttattgtttatttcttcaaattccaaataataaccaactttctcaaagcaatacttctttctactgatttcaaacgttacatttgtcttctctgaagttcttgtttttttgatacctgactgtcacactactgctgtggatgtgcttcataccatcacagtactgcagggttataagattatctgatagccaatagaagcagacgtctactcactgtcattcttttgtcttttggagaataaagttagctatttttatctgggttctcaa

SEQ ID NO: 224970 - DNA, 774 bp, Homo Sapiens
ttatccaggagctttttatacttgttgaaaaccccacccaggggttgttatcctgaatgaaaggagggtatcctctgccacagctgagaatgcccatggtaactggggaaggaggaagtcactgttgcctcaaatgttccagccgagaagtagcagctttgccatatgctgggtgactttgtctcaggacagtgtggggccaaagtgtttattctgcaccagcagctagcagactcaagggaaaagtgcaatgctgagaagtgggaacatcttgctaattacaatgagaaaggcagaaatatgtgtttgcggggaggcagccgggccactcaccttccaagaaacaaaacgtgctatgaagcaggaagcacacacggcatcctgtactttcatatggctggatgcatctcttcaagcttatcccaagtgctgcctctctaacctcaccacacgaatcacagcaacattgcagataaggaaatggaggtcaagggcttggctcaaagtcaccacagcagttagtgggggtcaaagattgcaatgagcatttctcttcttcccgccccagatgattggacttaacaaggccaaggaaagcttaagtgggtcctgatccttggctttccttaaacctcagcagggtgggaatgagtaagaggagaagtatagagtgtgagcttctatcgcccactgcctgcctacccagggactgtaaggtctaggtggtgagatgaactcaaaactgacaacaattaaacacttttatgaaagcta

SEQ ID NO: 224971 - DNA, 845 bp, Homo Sapiens
atggggacctggaactggcggctcaccccgggcaaaatcatggtcctcttgctcctgcctctggggttctccgctggccgaaaggaccttggggaaaatgggcacgcggtgctgggagagtcctgggagcgggagagcacgaagggcacagccgctgggacagtgcagcccaaactttctggaagtgtgaactggaccctcctggggctccgggccctgcatgatccgggccccgctggattcggccccttctctgctccctctgacttcacgccctatcactctgctcctcacttcctctgcaaaaagcctagcaccctccggcagctcctccttggagccggctctggctccaaacaaaagatacccaaacaaaggcaagaaagtggtgaattcctagaaccgggagggcgcgggctcgggggccagctgcaggttcctgagacgtgggagaggaggaggagtgaacacagaccgcaggccagcccggggccgcgggcgctgttctccttcctgtgccgagtgtggtttgctatcaagcggtggcagttcagccacaatcaggggcagggggagggagaggccccccgaagaggcagaggccctgcctcggccgccctgagcctggaaggtgattggctagagcgactcccggccgggagcggaatgaatggcggggaccggggcctctgggtggtgcgagcatcatgttgccttttaatatggagcatgtgccatagctctccaggagaacccctctgtgtcacagcgaacctcagtcactgacactcaaaagaaggaattatttcaactcaataataaacaaataaccctattttaaaatc

SEQ ID NO: 224972 - DNA, 680 bp, Homo Sapiens
atttttttgtatttgtagtagagacggggtttcaccatcttggccaggatagttttgaactcctgacctcatgatccatctgcctcggcttcccaaagtgttgggattacaggtgggagccactgcgcctggcctaaccaccaccaagattcctaaaaggcgaataggaagcagctgtggcttattggaaggaaagaatggcagcaagtcctgggggagctgtgcccgcaccagatctcccgttagggcagccaaggccatagagagtggaacagaatggaatctgtctctccttaagctgttgaggatgacgccaggtcctgggaaaatgatactgtcttggtccagcctccacctctgcatctccaggactgatgttccccctgttaaaggagctggatctccctttgtcacccaggctggagtgcagtggcgtgatcatgactcactgcaggcctcaacctctcaggctcaagtgatcctcctgaatagttgggaccatagaaacacaaacagcagaatggctccatctctgttgaagacttccatcaactagaaccacgagggctgatggacagaccacaaggccagtttgttccagttcaatgattaaaagaaccacagacgtgagccaccgcgcccggccaaaaccctgcttttaataaagtgtgaaatggtaa

SEQ ID NO: 224973 - DNA, 820 bp, Homo Sapiens
ctttctcctcctttgccaaagaagacgacccactcacctcaccgaattgttcctcatgtgggttcatgggagacaaaatgtttttagcaggagatgaggcatttgcttgacaagaacatttctgagctgaggcttctggttttaactttgtcaaccagcaggcagcatttctctgactgtaaatctgagttaatttacagacatgctcctaaggaaggaaaaactgaatcagtacccttgctcctgacacagagagaaagtcaccaccaggagaaaaagaaaaaaaagatctcaggtttcaatgagataatgaacttgtaaccacctgaatatatcaacgagtacaaacaggagcactccttccttccttatagcctgcaaagagatggtgtcattgagaagagattactgtttggaggaggggtcaggagaccttttctggaaagggccagacagtttcattagtatttacctaatgtcatcttcctgtttgaggaccccatctgggataccacagcacatttggtcatgtctcctgaggctcctcttggctgaattcaggaaagaacttgagttctacttttgcagtgaagaacagagaacacctgcagaagctgagaatgaaatgagcccaccaggacttagcaaccgtcttgctgagatgtgtcccaagcaccctctcaagaaagcttctgtgtgcaattccccattcactggagctgtttcccgggcgcctaagctaagtgactttctcataatggccactgtttccttcaagttcaaaggcgtcacttgcaagaggtctatcagctctggatga

SEQ ID NO: 224974 - DNA, 566 bp, Homo Sapiens
atggagtcccagaagctcaggagcagagggacagccacctgccaggggagtgccgaattggacacacagagaccggaaagggcctgggggagggacgtggcacaagggaagcccggggagaaccgcccgccgcagaggaaagcgggctggcaggcgagggagcccgcgtcggctgagagcccacaggcccccacagggacacctggtcgccatcacatggacacgctatttttgcactcgaggctattccaggaagtccatccagacagagcacgccttccccagcctcctcttattggcctgcagccctgctctccccacgtctggtgatctgtaaagagggcttgttctgcgtgggtgggacctgctctagatccatcttggaaaatgagctcatgccgttggtgtaaccaccattcctgcccccatgccactctgccccggggcctgctggctgacgtccatggtgcagtcgtgatgtccacgagcctgtctgtgccctcgctgcggccgactctctctaggagcgtccccacaggatgcagaacctccctttgagctcggtg

SEQ ID NO: 224975 - DNA, 1000 bp, Homo Sapiens
gctgaccccatctcacagtgttttactctgaaaagatataaaggggtgccagcaataactcagatggttggtgagctctgggacagatttcaaacaagatctttcttggcaccagtcaaaccaattaattttgtgagttcaagttctagaagtaaatatattcctctctatactggtcatgtgcagtctacaaatgctgatgatgttgacaaccccttgggagacatcgcatcgctagccaagcagcggtactctaagcctctttatataaacacaagtcgtgctgcaaatattccaggatataccggcaaggttcatttcacagccacccacccagcaaattctaatattccatcaacaaccccatcaccagattcagaactgcaccgcgtcttccagaaagaaatggcagttgacctcttccgtcaccaggctcccctgtctcgactggtcacaactgtgagaccctacaaccctttcaacaagaaggacaaagaaaccatagactactagaggaggcggccctgcgcgggctgtccaggcctccgcctggggaaggcttgtgcggcggtgggaaataaaggctgcttctccgcgctgcgcagtgtggtgggttcggtgctgttctccgctggcctgcgcgtccctgcccagcccgcctctctcccccggcaggcggcgctcagctggacactgggcgcccgccagccgcggcgcagactcccaagccgccggcagcagggtagcagggcctgtgttgcagaagattcctctttagggttggaatattgggtctacctagaggtttcacatggcaccacttcagtgcagggattctagagcagagagcagaccatagattttagaatctcaaaggcagtctagtcaaaaatccgtatgctgtcagtgggaaccctgagctactgagaaagtgcgttcttcttttctagcaggggacatcacacaaggggacaacatctaccctctcttggcctgctcc

SEQ ID NO: 224976 - DNA, 1000 bp, Homo Sapiens; identical to SEQ ID NO: 224952

SEQ ID NO: 224977 - DNA, 1000 bp, Homo Sapiens
tcaactgcacataagaagaacataatgttgaagtcatttcagagtgcaaatatcattgaattgcttcattatcaccagtgtgactctcgatcatcaacaaaagcagaaattctgaaatgtttgctaaacctgcaaattcagcatattgatgccaggtttgctgtcctcctaacagacaagcctactatccccagagaagtctttgaaaatagtggaatccttgttacagatgtaaataactttatagaaaacatagaaaaaatagcagctccatttaggagtagctattggtgactcaactacagcctgcctggatatggatgatgccaataaaaaattagtattttccctttggaaaacttgtgaacatgtgaatacacatgtgaacagtcttacatttgaaaaaccaatgttctacaacttggaaagttttcattttttatattttgctgaaatatgtcacagtggcattgcagttgtctgttagctttgggttgcagtgctagatattgttttaaattattttcattttaaacaagatgccttctaagctattgagcttattaaaaataattttacatgtttacttagttggagcaaaaataagtctattttaacaaatagctttgtttttgcatgctaatgtcagaaaggcatacgatgcacattatgctctgttttaaaggttttaccacccttgtaaaaactataatcttaaatggttttatttgctgttacacaaacaacactacataaaacattttttcctaaatggtacaaatttataaactatcatttttcacttacggtatttgtaaatactacactacaaaaatcagctttctgagaaagaaataatcatttatttatgatattgaaaatttctacagtaaacactcaaaaccaagcaaaaaacatttgtaagatacacggtatctatttggagcaacggtttttgtaactaatgtgtttcattttttaaataaagacaactaaaaat

SEQ ID NO: 224978 - DNA, 1000 bp, Homo Sapiens
caactattgaaacccttgtcaggcgcctgttggacccctggagcctggttaatgggaacgaccacagtgggcatcaaatgggtaacttcagtacgccagcacggttgagaactattgttcaacgcgaacttcacatatgaagcccctctcatgtgtcaggcacggcgtcagatgctggacggcaagaaggtggccttctgcaaatggggatgagtcctcaccaggtgtgggatctgccagcacctcgatcttgggcttcccagcctcagtactgtaagaaagtttcgctctttcacccaggctggagtgcagtggcacgatcttggctcacttcaacctctgccttccagtttcaagtgattctactgcctcagcctcccaagtagctgggattacaggcacccaccactatgctcggctaatttttttgtattttcaatagtgacagagtttcaccatattggccaggctggtgtcgaactcctgacctcatgatctgcccacctctgcctcccaaagtgctgggattacaggcgtgagccatcgcgcccagcccataagttttagtgcctttttttcatagatgctgaaactgaaaaagggtgtggttaaataatttgcccaagccagtctctggcaaagatgggattcatatccagctactgatgaccaaacatggtgagcaggtatcctatgtcccgaggaagcccattccacctgagcactggatggaagggatatcgcaatcacccccatgcatgatggacaggtctaggagcattggacactcaatggaaactcatgcccctgtcagaaattggcaactgccacttccacggcacttgcaaactttgcacacggtccagatgtggcctggcttgttgctgtcatggtagcaatagtaattacttaggggatttctgcagatcttgctcatattgtgcataatagggtataaaatatggaaaatttgcctctaaaataaagtgttgctggcaaa

SEQ ID NO: 224979 - DNA, 1000 bp, Homo Sapiens
gtgccctttgttctggtctgactcttgcgaatctcagagcaggagaagttgcagcttactgatccctcagtgctcacagtactcatgtggggcagccacactaactgcattagcagtgtggttacttctttcttctgcctcgactcacatggcttctccccacgaaggtcccagggtggccatttatacaatccatttctgtcctctttatggaatgtagtcgacggatattgctgcacctcatcaggccattacattgtccatgttaaaattataaaaatgatcctagtttttcataggagtctaggattttgatcttttaaaaaatacagtgtgatttcatgcttttgaacatctttttttcattgaaacaaattcaagttcttggcttaaaaaaaaattagtgatgtctttaaaaaatattctgttacactacagataccaaaacactgacaaagatttaggcactccaagagagtatgacttcgtgtttaattggggagcttgttttcaacattgcttatatttgaatagtagaaaacccgacattgatgtttcttcctgttgcaaggtggggctttaaactttcaaggtacaaaagtatgtcttttaaaatggaagtaacgtttgtttagctagtgaatgtgacaatatattttatgtatataatgagtctaatgtaattttgatcaacttggtaatgatgttattaaatagcaaaacaagtgcagtgtattaaagctaaacactacattgaaacgcaaacaaaattctggtgaaataactgggctgttgatgcaggtcaggtggaagctgagaaataaatgtatataaatatgtagctgaggatattaattcccattatataaccataattctgtgacttgtaataaaccaagctgtacaatttagtttataatagcagtatctgagctgctccaaaatatatatatcaacagtggtaaatactgtagatttttatatatatatatatatatat

SEQ ID NO: 224980 - DNA, 1000 bp, Homo Sapiens; identical to SEQ ID NO: 119267

SEQ ID NO: 224981 - DNA, 1000 bp, Homo Sapiens
cgagtgggtctttgccgacatggacctgcttcaccgcgttgtggcgcctggggttcgcatggccctcaagcttcaccaggaccacttcacgtccccagatgaatatgaggagccagcagccctatacgatgccattgcggccaacgaggagcggctggtcatctcacatgagggtgacccagcatggcgcagcgccatcctcagcaacacgccctccctgctggcgctgcgccatgtcctggatgatgcctccgacgagtacaagatcatcatgctcaaccggcgccacctcagcttccgagtcatcaaggtgaaccgggagtgcgtgcgcggcctgtgggccgggcagcagcaggagctggtgttcctgcgcaaccgcaaccccgagcgtggcagcatccagaacgccaagcaggcgcttcgcaacatgatcaactcctcctgtgaccagccgctgggctaccccatctacgtgtcgcctctcaccacctcgctggctggcagccacccccagctacgggcactgtggggtggccccatcagcctgggtgccattgcccactggctcctgcgcacctgggagaggcttcacaagggctgtggcgccggctgcaatagtggcgggaacgtggatgattcagactgtagtgggggcggtggcctgacctccctcagcaataacccccccgtggcacaccccacacctgagaacacggcagagggtccccggacctcacggccccctggcccgggtctcctcagttctgagggccccagtggaaagtggagcctggggggccggaaggggctgggaggatctgacggggagccagcctcagggagccccaaaggaggtacccccaaatctcaggacattccttgcttggacagcagtgcccctgagagtggcacacctatgggtgccctgggcgactggcctgcccctattgaggagcgtgagagcccggcagcccagcccctgctggaacaccagtactga

SEQ ID NO: 224982 - DNA, 1000 bp, Homo Sapiens
ccatgtttgatgcaaacttgaacccaatgctctcattggtggcacagctttggagggtggtggccccaagaaggggcaatctgcctgctgctatattaatctggaaccagggccaacagctactcttgaactatggtatttgaagagcgagttcattgcctgttttaccttaaatgacaggaaaggaagatgaacaaaccttgctttgccttggcttcaaactagttcttgatttaagacaccagaaagggagagagggagtctgcttagagtttgaggttgcctctcacaagatgacagttaaaagttgccaccttacttaaaaggcattaaggaggcatttactcacaaaggagagagagtaaatttttttcttaagaggaaaaaaatactgataatacatagaacaatctgcacatccagtcttggcactttttccaatttgactgatctctaaactggtgacccttgcatatatcttagtctcttttctacaatcttcttcagaaagctacagcagctaacaatcatgtataaagatgcatttcctagatcatcttcagaagaaaatctcttcagcactttccctagaatctgtctcctgaccaccccgccccagacctgctttctcttttgagaattcataaccaggtatgtttagataccagttcaaaagaccactctatgggttgatgaggaaaaggctgcctgaggacaatttaagaccataatgagtttccaatttttaaagaaaatttggctagctggcttttaattcttaattaaaatcattaaatttaattaaaattattccaatcaaaatatatcactttccaagattccacattcatattacttacttatactatggagactttctctacctgagcatgtattcaggggctataggtacatttaactctaactaactgaaaaaaatcaggaagaaaaaactattaaaataaaataacctcctaaatcatttgggggtatccccatc

SEQ ID NO: 224983 - DNA, 1000 bp, Homo Sapiens
gtgaagtggacaggagcctgctctgtttgctgtgctccagctctctggagcaccggtatcacagacactgtcccgctgagtgggctgctgaggaacaccgggagaagcttttaaagaaaatgcagtctttatgggaaaaagtttgtgaaaatcagagaaacctgaacgtggaaaccaccagaatcagccactggaaggcttttggagacatattacacaggagtgagtccgtgctgctgcacatgccccagcctctgaatctagagctcagggcagggcccatcactggactgagggacaggctcaaccaattccgagtggatattactctgcctcataatgaagccaacagtcatatcttccgacgtggagatttgagaagcatttgtattggatgtgaccgtcaaaatgcgccccatatcactgcaacacctacaagttttcttgcatggggtgctcagactttcacctctggcaaatattactgggaggtccatgtgggggactcttggaattgggcctttggtgtctgtaataagtattggaaagggacgaatcagaatggcaatatacatggagaggagggactctttagtcttgggtgtgttaagaatgacattcagtgcagcctctttaccacctccccacttacactgcagtatgtcccaagacctaccaaccatgtaggattattcctggattgtgaagctagaactgtgagcttcgttgatgttaatcaaagctcccctatacacaccatccctaattgctccttctcacctcctctcaggcctatcttttgctgtgttcacctctgaccagagacaaatcagatatgtgttcatctgctgtgggaacccctttatcccagaaagccctcttccttgtgccttatcaaacaggacaaatacgttctgttttatgtcttgaattgcattctaatgttattaaaactcatttattgtgttactattaaatgtggtaaaaacactaaaagtgt

SEQ ID NO: 224984 - DNA, 1000 bp, Homo Sapiens
cattgaagataataaaaatgaaacctgtagggttttagacataaatccacaggtagaggaaactgactctcgattatgtgtaagaacagtggagatgggaacttcaattcaggcaccatattccttaactactcaaaatgaaaaatattttgagaattcagctgaaacagacattccaaaaatcaccaaaaaactatctcaactaggagaatcagagctttttgcaagttctggatcattttcattacagagctctataccagtctgggaaacagaaactggccatggtataatggaagaaccagaacttactttaataagcaccactgataccagtattgctgaaatggattttgcaaatttaaccctagaagagaagagcgagaatgaagcaaaatgcttctttcaggtgagtgagtttctgcctcttgtatcagcaacagaagcctcagattatccagctgtatcagaactttccatagaaaaaccaaggacagcatctacagaaacccctcgcaggcttacacctgtaccagggagcttacaagaagcatttataaagaggaaaaaatcatttatggagagatcccaccagaggcagaaagaaataaggaataaaattcatgtctctgaaaattctcaaatcaaaacagttaaagagaaaccatctataagttcatctgtgagtcgtctaaagggcgtgaataaagtcagagcatcttttcctgaagacagaaagactacacaggctctaaggcaccaaaggggtctaaggttatacaatcaactagctgaagtgaaacaacaaaaggaagaaaaaacaaaacaagaagcttatgcccaaaacagagcaagggcaaaagaattccataagaaaacactagagaaacttcgagccaaaaatacatgctgactttctagaaatagtgtaaaggttttttaattgtgtatatgtagcattagacaaaattatttaaagtcaataaattgttattcgagg

SEQ ID NO: 224985 - DNA, 1000 bp, Homo Sapiens
tttgtcctcctccttctcacttcctcctcattccctggagtagcctgccggggcttctcttccttgttcccagggccagatgtcagaggccatggaccagccagctgggggtcctggaaacccaaggccaggagagggtgatgatggcagcatggagccaggcacctgccaggagcttctgcaccgactgcgggagctggaggcagagaactcggcacttgcccaggccaacgaaaaccagcgggagacttatgagcgctgtctggacgaggttgccaaccatgtggtacaggcgttgctgaaccagaaggtgagtaacccagacaccctggggagaagccctgggcacagcagatgagacccttcctggagactaagggcttggaggacatgggctgttgccctccagtgattccccgtctttccgccttgggcgggtccattctgttctacctagagacagaggtgggactaggtaaggccaggtctctgagcagtggtcactgatttgagcatgacttcttcccttaccctgtccccagctggcttttccaggttgtgatagcccttaaagcagtgttgatgttgtgagcctaaatggcatctgaatatttactcacctatggtggataacttcttgacattggggccactttaactccaaggccttgctctgtcttatataggcccttttttgatgtgtggtttctaagaggcagagggccaggcgcggtggctcacgcctgcaatcccagcactttgggaggccgaggtgggcagatcacgaggtcaagagatcaagactatcctggccaacatggtgaaaccccgtctctactaaaaataaaaaaattagctgggcatggtggtgcactcctgtagtcccagctactaggaaggctgaggcaggagaatcgcttgaacccaggttgtggaggttgtagtgagccgagattgcaccactgcactccagcctggcgacaaagtgagactccgtctc

SEQ ID NO: 224986 - DNA, 1000 bp, Homo Sapiens
ttgggggactgttgggaaggcatggttggttttgaaatgtgaggacatgagatgtgggaggggctgggggtggaatgatatggtttgactgtgtcccaacccaaatctcatcttgaattgtagctcccacagttcccatgtatcctaggagggacccgatgggaggtaattgaatcataggagtgggttttcccctcctgtcctcatgatactgaataagtctcatgagacctgatggttttataaagagtagttcctctaaacatgttctcttccctgccaccatgtaagatgtgcctttgctactccttcaccttctgtgataattttgaggcctccctagccatggggactgtgagtccattaaacctctttttctctataaattacccagtcttgggtatttcttcataggagtaaaaaaatagactaatacactctttatctttcagacttttctatatttttataactttttgtgagacttcataaaagtttagaaaatgcattagtgaattgtgttattgctaaaagtgaaagtcatctagcattcttattcacatatggcctagtttttcaagagtttttcagaacttaggttggctagaaaatcaccagtcttttctcattatattgtagaaatttcatcagtgagtattatcagatgttgtataagaccttacaaagaccccacagaagtaaaggcaataatcctatatgtaaaaaaacaaattgataacaaaaacaaaaaacaaaacaagacaaactaaaaagtactgaaacttcaagaaatgtttttccaataattgaaaataaatagctgtttggatgaatataaaaataaatctcaataaattaaattcagctgccatttttgaataattaattggtatatgttggattatgtgtgcatattgtgtaacaatgatactggctgtaagatagctcatattgggttctttttctgctacctataatagatttgtgagtgtcttacaac

SEQ ID NO: 224987 - DNA, 1000 bp, Homo Sapiens
acacttggaagtcttgggagaggaaatgtatgcttatccagaattcacgaagttgttttggaatacagctgcacctaaattctctgttccagaatctgtcatgaaggaaactctatatccaaaatatgagcgagtaaaatcttctgtagacttgaggaaggagaagatcatagctcctttggaaatcaagaatgatatgcaaagcagtataaaagaggttatgtttcagaaagcaaaggaattgaaacgtcagctccagctcactaagcaaaataaaactgaggagcccaactatgtgaaagaaagtatagatgacatctttgataacatgtgcgaaaaacacagtttgagaaatctctctttgactctcattgaagcgtctaaaaaagctggcattagttacattgtttatcccaagaaaaagaagatgagatggaagaaaagattgaaacaacaaaaacttatattcgtgcatgaagagttatccaagcctccaaaatctcttgaaagactgagtttattcgtatttcctatggctagtacagtagcagccctatggcacatgttactcaatgaagactatattgcaaaggaagaatttgagaaggctaatcctagacttgtagcatttgaaagcatattagctaagggaggaattccagaaaatattgatcctcggacatgggctcttgataggctcattgagtacaaagatgcgagcatacctgtaaaagagaaagatgataaaatatcagttcctgaagacccacctgaaagagtgaaagaaccaccaaaactaaaattaaatgattatgtggagtctgatcttccacaagaggtcattaaatattatgaatctgaagtgaagattttgactgaagaaataaatgataagacaaaatatcctgcatttgcatattgtaggcgtggagctatttataggaaactgggaaagttgcagagtgccatgaatgatctgcagagagtaagttttctttaa

SEQ ID NO: 224988 - DNA, 1000 bp, Homo Sapiens
ttgtttagtccaaacgcacttaactttattttctctagggtaattacatatatgactgtatcaatgagggtcgtactaatcaggaatcaggtggcactcaaatggagtgatttgaggagagtttattagagacctttcacagaggtacagacggggtttagaaaaagcagtaagagagcgctactctggggccagtaccaaggagaagcttttaccacacccaagcctgaaggggcaagagtagaagtcgctatcgaaaactagaacttaagagggaggctgagtggtgtggaggcagctgctgggcaggacccgcagccctcagcagggaggtgccgccggtccatagtgacatgccaggctgggaactgagggcacacaacctgatctcttctcatcccactctctggtccctcatcgtcattcccattggccaaacccaaagagaagtcagcagactgggagccacttgaggctatcatttcaggcctgtcaccggggcccagaaagggcacagacctggagaagcacgtagaagatcccctgcacagttatggtaccaccatgggcgcccagcaggccctgggcagagagacttctaaagccctcctggagaagaatctgcacagacatgctggtgttgtcataccacacgacacgggagtttagtacaagggcacaaagacaagcttctgttattatcatcctgtgggagggttatattttctagtataatcagttcatagaaaatatacagctattattcgaggcttgctctgtagaaaactacttcattttaatgtgagggatttgtttactgatctcagaaaatctctcataaggttttaaatgttccccaaataaagtaaaatttgaagatatccagaaaaatcatgaagcaaaagaaactttctatgattctatttcagagaaactgttgtcacttttgaaactaggcctatgaatttaatgtggaaaaataaaaatagaatttgaatca

SEQ ID NO: 224989 - DNA, 1000 bp, Homo Sapiens
gatgggggcccacagggccggtgtgctgttgagccaggactgtgctggcaccccacagggagccttggagccctgcgtccaggaggccactgcactgctcacttgtggcccagcgcatccttggaaatctgtggccctggaggaggaacaggagggccctgggaccaggctcccggggaacctgagctcagaggatgtgctgccagcagggtgtacggagtggagggtacagacgcttgcctatctgccacaggaggactgggcccccacgtccctgactaggccggctcccccagactcagagggcagcaggagcaggagcagcagcagcagcagcagcaacaacaacaactactgtgccttgggctgctatgggggatggcacctctcagccctcccaggaaacacacagagctctgggcccatcccagccctggcctgtggcctttcttgtgaccatcagggcctggagacccagcaaggagttgcctgggtgctggctggtcactgccagaggcctgggctgcatgaggacctccagggcatgttgctcccttctgtcctcagcaaggctcggtcctggacattctaggtccctgactcgccagatgcatcatgtccattttgggaaaatggactgaagtttctggagcccttgtctgagactgaacctcctgagaaggggcccctagcagcggtcagaggtcctgtctggatggaggctggaggctcccccctcaacccctctgctcagtgcctgtggggagcagcctctaccctcagcatcctggccacaagttcttccttccattgtcccttttctttatccctgacctctctgagaagtggggtgtggtctctcagctgttctgccctcatacccttaaagggccagcctgggcccagtggacacaggtaaggcaccatgaccacctggtgtgacctctctgtgccttactgaggcacctttctagagattaaaaggggcttgatggctgtt

SEQ ID NO: 224990 - DNA, 1000 bp, Homo Sapiens
gtgtgtcttcttatttctaaagtcttattaaacctacattatctaaaatgcccattacctataaatttctcttccactctgagattaaatatctttctcagtggttacctttatatttttagaacattttattgtttaaaaatcacagtcaaagcttcaaaaaacatacaccccaaaatatcccaatttcagtatcctactacccagaggagagcacatggctgttcttccccttctggtgcccacagcactagcgaggaccctgccctgaagagaccacttgcccaccctcctgcccaccatatgttaagtcaccgtttctaatacatttatttatttatttatttatttagtaagatggagtctcgctctgttgcctaggctggagtacagtggtgcagtctcggcgcaccgcaagccctgcctcctgggttcaagcaattctgtagcagcgtcccgaggagctgggattacaggcacccaccatcccatccagctaatttttgtatttttaatagagacggggtttcaccatgttggccaggctggtctcaaactcctgacctcaggtgatccacccacctcagcctccaaaagtgctgggattataggtgtgagccactgctcccgggccctaatgcttttataatttagtttatatttgaactatttggaatttattttgtgtctgtacataatctggagagaatttactgaatagcacatgtatccccccaactgcaatgccatcctcgccatataccaaataatcatgtctattttggtcaatttctgaactgtttattctattcctttatctagttacctatttatacacaaataccaaactttttattattatacccttaaataatattatgaaactcacttggtgagacctcctctatattttcctactgtttcagaatttttcaagggtagtttctttcctatgcatactctagaatcatattgtctatttccaaaaaaaaaaaaaaaa

SEQ ID NO: 224991 - DNA, 1000 bp, Homo Sapiens
cgggttagggaccctagagggttaagggaacaacagagatggggctgcaatgccctgtctggaactccgctctcccgctggggtggttctgattgtggctcatgcctggttgcaaattggtttttaacccacaaattgtgattattttttaaaaagccaaacagattttggcaggagttagaataaatcccggggcctgggcttctctattcttggccctccgtagtctccctccgagaggaggccagagggagaggaggatctcagcaggcctctagccgcttccagatgcagtctggggagtgggctgaaggtgaagggaggaaggctgtgggccactctcccttctgagaggcagctgcagctcaggccctaatacactctttgccctgtggcctctcccttttccccccttctggttggaggagggagaagtgggaagtagcttgggaactggtttgtccacataaacttccccattgttccttggcccgccctcagggcagagccccctgcccaggctgggtaagagatgggcttggtccagcagggaccctgagggaacaaacccttttccttctggggagagagtgccccccctaccatgtagttgaacaggggctaggagctccccactcccctccctctaacagcaggctgtgtgggtttcaattcccatccttcccaccccggctaggtgtcgtccaccctgtatcctgtgtctgagtgtgtgtgggggggttctgtactaatttccatggccggtggcttttccttccatgcatcactcccccccgcatgcccaggggccacccgcctggcattaccgcatgctggggtcattgggggaggggggtggggctcacgctgtcctgtggtcttgagatttttatttttgcatatgtaatccattctgtacaggtagctaactttgtaaacgctgtgtattccctctgcccccatggctgctggtgtaaataaactgcatctcccgttggta

SEQ ID NO: 224992 - DNA, 1000 bp, Homo Sapiens
gatggctcaacatatgcaactcaatacatgattcatcacatacacagaattaaaaataagccaggcactcacacctgtaatcccagcactttgcaaggccaaggcgggcagatcacatgatgtcaagagtttgagaccagtctggctgacatggcgaaaccctgtctctactaaaaatagaaaaattggctgggcatggtggcaggcactgtagtcccagctacttgggaggctgaggcaggagaattacttgaacctgagaagcggaggttgcagtgagctgagatagtgccattgcactccagcctgggcaacagagcaaattgcttgaatgtgggaggtggaggttgcagtgagccgagattatgccattgcactccagccgggggagcaacaaagccagactccatctcaaaaaaaaaccaaaaaaaatcctatttagtacaaggtacattatttaggtaatgagtccattaaaagccaacactttccccactacactatatgtgtatgtaacacaactgcccttgtaacttcctaaacctataattaagaaacaataaaaggcaaattaagaatgcttttttaaaaggtgggggcattatgctaataagttactgtggatttcagagtgcagagtagaaagatcacaagaatttagtgtggtaggtgggaacagaaaatgggtgtataaattttattgacgtgggagtactggatattgtagagacagatatcatcagggcaaggagattaaagatttttgcattgacggtttgacactatattgtggtaataacactgtatgtgttgggagatagaacaggaaacatcttccctggaatatgtatactattaaatgttttatcaaacttttgatcaaacaagacagcacaatttataatttcatttctatttctatgttatgagaaactgatcatttattcaaatgtttaacaggcatgttcatgttactataaactcttctgtttcaccatca

SEQ ID NO: 224993 - DNA, 1000 bp, Homo Sapiens
tgtggcgaggtttttaatcaacaagcacaccttgcacgtcatcatagaactcatactggagagaaacattacaagtgtaatgagtgtggcaagacctactctcacaattcagtccttgtaattcataagacaattcacactggggagaaaccttacaagtgtaatgagtgtggcaaaaccttccatcacaattcagtccttgtaattcataaaacaattcatactggagagaaacaagcgtaatgaatgtggcgaggttttcaatcaacaagcacacgttgcacgtcatcatagaattcatactggagagaaaccttagaaatgtgaagaatgtgacaaagtttacagtcgcaaatcaaacctcgaaagacaggagaattcatactggagagaaaccataaaaatgtaagagtttttgacaaggctttcggacgtgattcacacctggcacaacatcccagagttcacactggagagaaaccttacaagtgtaatgagtgtgtcaaagcctttagtgggcagtcaacacttattcaccatcaggcaatccgtagtgtagggaaacttgactaacgtaatgattctcacaacgtcttcagtaatgctacaaccattgtaaatcactggagaagccataatgaagagagatcttacaaatgtaataattgtggcaaatttttcagacatcgttcatacattgccgttcattggcgaactcatgctggagagaaatcttacaatgtcatgattgtggcaaggtcttcagtcaagcttcatcttttgcaaaacaggagaattcatacaggagagaaacctcacaagtgtgatgatcgtggcaaagcctttacttcacattctcacctcattagacatcagagaatccatactggacagaaatcttacaaatgtcatcagtgtggcaaggtcttcagtccgacttcactccttgcagaatatcagaaaattcatttttcaggtaattgttcccaatgcaatgaat

SEQ ID NO: 224994 - DNA, 1000 bp, Homo Sapiens
aggctctgacctatgtctttgaagcagctgctttgtagagtccctctctttactgtcctcgttaggactgttttgtggttccatgaaaatgtttagcatccttgcagaattacttgagaaggggctggtaccagtgtaaagaatctatttctgtaaaactacgaacttttgcatagggaatttattctaagcaggtcatagccgtgatccagagctgctgctgctcactgccagtccttgcggctggcggcgattgccggacagactctctgtggcctggctctcatccttggcgtgtcagcctgcggcaggctgccagccatccatgacaatcatgtgagctcagccacagacctcagctggcggtttgatccctggcaggtccctcgagcagtactggtaagaggcttcacacattttcccactcttacagttcatttttcatagtaggaagggcccttggcctccccagtgcctcttccagagcctccaccagcactaagctcagaggaaagaagaaaagggccaggagtcagacgtcacacccgggggctcccctttcccatgtagaagtgttggcatgcgtcagtctcctttacagaggggtggatgtatccgtggaggaggggccttctctctttctaattgcactatacttgttctagcttcagtctggagatacttaagacctccatggggtcgtgatccatagacttagcaagtcttgccttatctatggagctcgatggtgagaattgtgaccattgtctgatgtccatagttccttccccctagattgtttctttccacggattgtgttcatctgaaccattttattttttatttaccaaagtactgtacttggctatttgcagtgttttcaaaaccaaatgtttctttttttgtgtttttaatcttcgatacttggtgcaatagaagctgcaaagatgtgccactttatctatgaaatggagttttgtataccaataaattctagttt

SEQ ID NO: 224995 - DNA, 1000 bp, Homo Sapiens; identical to SEQ ID NO: 119275

SEQ ID NO: 224996 - DNA, 1000 bp, Homo Sapiens
agatggacacccaggcctgtggtggacatcagactccagaaggtcatctggctcgaggtggacatcaagccccaggtggatacctagtccccaggtggatatcaggccccacttggacaccagtccctgggtagataccttggcctcaggtggatatccagtctctagctaagcatcaggctccagggggacccaggccctagctgactggggactagtgtttatatggggccacatgtccgtctgggccctaggtgtcaacttgtagcctgatgtcaacctgggagctggtgatcaccagagaggactagtcctcctggtgcctgatgtccaacttgggactttgtgtccacctggagaccgatgtccatttgggaccagatgtccaactggagcaagatgtccacctgtagcctagaacttcacctaaggcctgatgttccccagggcctacagagcctatgtatctacctagggacttgtgtccaggtggggcctgaattccacctggggcctggaattaacctgggacctgatgtccacctgagacgtgggtgttcctctggagtctgatatctatctggggcccgggtgtcctcctgtggtctgatgtccacttgtaggctggtgtccacctggggcctgggtgtccacctaggaacctgatgtatacctgaagtccagtgtctacgtgggtactgatgtctaccaggaaagtgatataaacctggggcctgatagccacctgggccctgagtgtccacatatgttctgatttctcttttggcctgagtgtagggcctgagtgccacctgcttcctgatgttcaccaggaacctaggtattcacttgggagccctgggggcctctgcccttttggccgcgttgtctcctggcttttagggtggtgggattctcggctctgattgcagcaggtggattcacttagctctcctccccttttagcattactgtcttctgtaataaacctctcactttg

SEQ ID NO: 224997 - DNA, 1000 bp, Homo Sapiens
gtgcctaacagacatgctcagattcacaaaatgaattcagaacacttacctgtcccacccgtgaaagtgaccttggaggtgtcattgccccccaccaccccagtttctagtccaagccaacagctggtgctagatagatgcttgatgaatgagcagatttgactgttagttactctgtacctaaaactcctatctttacatcaaagccctgacagatttgcccttgacagactgaaatccggggctgctgcagggttcacctccaggaggcaccattcacgacactgtcccataaatggtaatgggctcccagggatactgtttacatagactgcactgagaacggtgacccttaggtttgtacaatgaggtaccctgttgaatgaccctaaaccagcctccaaaatgtgcaggatcccacattggtcagcgccaaccctgagcacaggatctaaaactatagatgatatggccaccctggccacagctggaaccaagctggtggcccaagagagagcctcttcttggaattgcatgtcagtttctcatacgcagtttcttcctatttttcccatttcccgttttaaagctagtggcatacctcacagtcaaataaccaagtggtcagtgtctcgacaatgtgcagtaacgaggtgggggctgcaagggtgaggggctcagtcaccttaacaaggcaggagacctcccacaaaaggctgatgtgtcgtccccagggccagctggacaagggcatgcagcgcaggggtagggggatggaaatattttctctcccgtaaactctgacttcatgtgagcaggcatggggtctccctgagagctgataaccgggaaaaccaaaaccaataatattcctaataataatactagaatgtaagaataatcatgtgtttttcactgaccgctgttgctctgcttttgtctttatatacagtagtttttataacaatgtccctaggttttaataaaggagtgtcatgtc

SEQ ID NO: 224998 - DNA, 1000 bp, Homo Sapiens
ttctaacatcctgattgatggtcacatggaaggggagatctggggcctggccactcacccttccaaggacctcttcatctctgccagcaacgatggcacagcccggatctgggacctggctgacaagaagctgttaaacaaggtgagcttgggccatgcggccaggtgtgcagcctacagccctgatggggagatggtggccattggcatgaagaatggagagtttgtcatcttgttggtgaacagcctgaaagtttgggggaaaaaacgagaccggaaatctgctatccaagatatcagaatcagcccagacaaccgattcttagccgttggttcttctgaacacacagttgacttctatgacctcactcagggcacaaatctgaaccgcattggctactgcaaagatatcccaagctttgtcattcagatggatttttctgcggatggcaaatacattcaggtgtcaacaggtgcctataagcgccaggtgcatgaggtccccctggggaagcaggtaactgaagccgtggtcattgagaagatcacctgggcctcctggacaagcgtcctgggagatgaagtcattggaatctggccacgaaatgcagacaaggctgatgtcaactgcgcatgtgtgacccacgctggcctgaacattgtcacaggagatgactttgggctggtgaagctctttgattttccatgcacagaaaaatttgccaaacataagcgatacttcggtcactcggctcacgtgacgaacatccgtttctcttatgatgacaagtatgtggtcagcactggaggagacgactgcagaagcctcttatgttattgctgctgctgctaccagccagcaactgcagaggccatgctgaggtgcctccttgccaccagccgttgggaaatgcctaccatgctgccccggatgcacaagctcaaaacgctgcagaagttacacaactgctcccataatctggactctccaaaaccgtga

SEQ ID NO: 224999 - DNA, 1000 bp, Homo Sapiens
gttcttggtagacttactttctgccctcggattcagaagagtactgtgtgttggaacaccaaggttgcatgagctgatcaagttgacagcatcaggtgacaagaagtctaacattaaaagccttttattggatattgattttcggtattcacagttttatatggaagatagcttttgccattataatatgtttaaccatcatttctttgatggaaagactgcccttgaagtatgcagagcatttttacaggaagataaaggcgaaggaatcattatggtgacggatcctccgtttggtggcttggttgaacctctggctattacattcaagaagttaattgctatgtggaaagaaggtcaaagccaagatgacagtcacaaagaactacccattttctggattttcccctatttttttgaatcccgaatttgtcagttttttccaagcttccagatgctggattaccaggtagattatgataatcatgcactttataaacacggaaagacaggtcgaaaacagtctcccgtgcgtattttcaccaacattccgcccaacaaaataatccttcctactgaagaagggtacagattttgctctccgtgtcaacggtatgtttctctagagaatcaacactgtgagctctgtaattcttgcacatccaaggatggcaggaaatggaaccattgctttctctgtaaaaagtgtgtaaagccttcctggatccactgtagcatctgcaatcactgtgctgttccagatcattcttgtgagggccccaaacatggctgctttatttgtggtgaactggatcataaacgcagtacttgtcctaacattgctacatctaagagagctaacaaagctgtcagaaagcagaagcaaagaaaaagtaataagatgaaaatggagaccacgaaaggacaatccatgaatcatacatctgctacaaggagaaagaaaaggagggaaagagcccatcaatatcttggctcttaa

SEQ ID NO: 225000 - DNA, 1000 bp, Homo Sapiens
ctttataattacctctctgaagccttttagtgtaatttctctttgtgactgtgcaatgtccccatgtaaacacagtgcattctgttttgtgcggattcatggccatgtcagttacattcttcttcgtctcacagaaaataatagccctcccttcagatccactgtagacttgaaggacatctcattttcatctgtgttttataaaggaggaaattgaggacctcacatggagggactggaatttaaaaccaggtcttctgactttaaggcctttcttttagtgttttcccttttcttttccttaagtcactaaaatctgtagttatataatcttacataaagcatatgcaaaatagaaaaatgatagtcaccacatatctactaatgggattaaaatgtacaatcctaaaagcttacttgttagcacacttgcttatctgtccattcattcattgaaccagtaagtatttattgagagttagtgggaatacaatgctgtgcaagacaaacaagatccctccattcataccacttaaattctagtggggaaaacatctgcacataacaaactaaataaaatgatcataaaataataaatgctatttatataaaactggctactttcattactgctcagttaaagggtcttgtagctcattttatgacatgaaaaaaatcaaggtctaaaagctccttgagacaatttaaactctaataccaaatatacctctataaaataccaaactgagctaaatacggtatatgtgtacttatacatatgtacataacctaaatatacgtgtgcacacattatctatacaaagagccatactcagtgaaagataaattacctcctaaactaaagtcccctctgaggtacaacagaaattaaaataattgcttctcttctcaactctatgtagcacgtattttccatgatgggataaatgttttcatttcaagtgccaatgtgtgaactgtaataaacattactgctttc

SEQ ID NO: 225001 - DNA, 1000 bp, Homo Sapiens
atgggtcggtagtgatgtggagaggggagtagagagaaagcatggattctgggataactcccagttttcttgcttacactactgggtgaattctgatactttttattccctgaggcagagaatgtaagaggaaggaaaagttagttttgggctgtgcttggtggatgggaaaggtaagacatggtgaattctccatgcttgtgggatatcaaggtaaagataaaagttagaagtgcaaaacaaaggtctggggttaaggtatacatttgagagcccactgagtatggttggaaatgtggccacctggcatataaggagaaaagcaagctattcccaaaccatggagaatactaatcttgacccatgagaatagaggaagttgctagtgaaggaaaatgagagagtggtggtggaactaggaatgggagaagctcatccaatttacattacgtgatgccttttgtgatttgatagtggcaggtattattccaagcactggggataaaacaacaaacaagatagccaggattcctactctcagagtcttgcattttaagggagagacagacaataaagatatcgtatcagaggaaaataatcatgaaagtcagggaggagcttttcccagagtaactgacagtatcaaatagcaagagagttaggatgaggactgaacagaagacatcagatttgaaaattagaaaatcagtgctgctataggaagaatagtccccaaagatacccaggtcctaattcctggaacctgtcacttatatgcataaaggactttgcagatttaagttaaggatcttgagatgggaaaattatattgcattatctaagcaggtcctaatgtaatcacaggtgtctctataagagggagtcagaaggagatttgactagggtaaagagagtaggaaattcgacaatggaagcaaaaggttggagtgatacaagaaagcagccatgagccaaggaatgtgaatggcctccagaagct

SEQ ID NO: 225002 - DNA, 1000 bp, Homo Sapiens
cattatacatcagagagttcacactggggaaaaaccatatgaatgtagtgaatgtgagaaagccttctcccagaaatcacccctcattatacatcagagaatacatactggggaaaagccctatgaatgtagagtgtgggaaagccttttcccagagtcacagctgattatacatcacagagctcatactggagagaagccatgtaagtgtactgaatgtgggaaagcattctgttttatacattaaagagttcacactggtgagaaaccctacaaatgtgctcaatgtgaggaagccttcagcaggaagtcagaactcattatacatcagataattcatactggggagaaaccgtatgaatgtacagaatgtgggaaaacattctctcgcaagtcacaactcatcatacatcagagaacccacactggagagaaaccctataaatgtaccaaatgtggaaaatccttctgtcagcagtcacatctcattggacatcagagaattcacacgggagaacaaccttatgtatgttctgaatgtgggaaagccttctctcagaagtctcacctcccagggcattggtgaattcatacaggagagaaaccttacatatgtgctgaatgtggaaaggccttttctcagaagtcagaccttgttgtacatcagataattcatactggagagaaacctgatcgatgtactgtatgtgggaaggccttcatccagaagtcccaactcactgtacatcagagaattcatacactaatgaaatcataagaatggtctgaacacagaaaagccttcagggtcagttcaagccttaatagatagtgcaacaaccaatggatttgatgattttggggactacatctttgttgataaaattttacaagtgaagtcatgttcctaatgtatttcattctttatcaaagataatagagaagtcaatacgtaaatgatggacattttcactatggcatataaaagtttttaaattga

SEQ ID NO: 225003 - DNA, 1000 bp, Homo Sapiens
aaagggctgactttagttccttcatggtaatggcttgagtaacatcatctttgggattttttaaatactggtccagtctaggagaacctggaagatgaccagaggtatttcagtttccctagggagagcttcgttatccatgtggatgataagtctgcttgatttattattaaatcattatagcagtgaagtggtgccattttctctctcttaagccccatttgaaaggctagagaaggggatatatatactatgttcaaggtttgtaaggttgttaatgtacataattgcagattgcaataaaagcttagatacattttgtaaacccaacccactaaatgagcaggttacaagacaaatgtcaccagcctcaagtattttatgaactatttactgagggtagttatgttaaatagattataatgtggtaaattatttcctgaatcctttatcacaggaaaaacacagaccctcataaaagggataattaaaacggatgtgtctgaacatttagtgaagatgagacttaaaacatgaaagtgtatttgtgtattttgagggttttagaaaccggttgccttagaggttagacttttgaagaaaaaaaaaaaaagatacagatcttttcccctggccaaagggaagttgtattagtctgtgacatcttgtgatgctgtttatcttggtttgacattggagatacgctagtaactgtgataccatactataaaacagaagaattttctgctactaaaaactgcctttttacaaaatgactgtaaatatttgtaaaataaaataacactaaactttaagcccaaaaggagagatagagccatgtgttcagttgtggacctgtccgtggggcacagtgccaccccatcacagtgttgctgtcatcaggcaaaagtgaatgtttgtttatggcaaattcgtcttttgcgaatggcttaattctgacactacctttctgggaaatgttaataaatttttaatattc

SEQ ID NO: 225004 - DNA, 1000 bp, Homo Sapiens
ccctccaggctgctgctgcgtgggggcccgggtgcccccaggtccatgcagactggggattcggtggggaggggcgcttctaaggaaccaaactgacgctcactctgggcttcccaagcacccttagcatggagcccaccccaaggcctcccaccgtgcatgggacagggcagcccgatgccagctggcctacctgactgtgccaggggccctgcccccaccctctcaggatggcctagacttggggaacagagccgggtggggttgcagcccggagtgtctgtcaaaggcaccaggtggagagggcccggcacaggcccaccctggtccaaaccctcacactacagaaaaccccaatggtgctgaaactgtcgcccggccacgcctggcccctccccacccaggagggaggtggcacttcttaacctgtacagttttattgtaccaagagactcgccccgcccctgtatcataagcctttaaatggagtcaactttttaattatatatataaagataaatatatataaatatatatataaactttttaaaactgtgaaaaatagctatgaaattataaaaaaaaacattctgacgtgcagaatattattttttatttcctgttagattatagtgtctagcaccggcttcaccggcctcccagtccccagcacaccccccgcccaccccaccaagtgtactgtactcaccccccaggatagagaagtgtttgttagggagagaagagggagaggcaggagccggcccaagcccagggtccctgcttgggccccagaaagcacttaaccaggccccaagccttcaagggaaaccaaggcctcaaccagacaatcttgagggaaggaaaagccagactttgggtttgttttttgggggaattattggtttttttttttatgtttcttttggaattttgtttgttggcaaattctgtgtgatcttttttcataaaaaaaaagaaaagatttaattggaaaaat

SEQ ID NO: 225005 - DNA, 1000 bp, Homo Sapiens; identical to SEQ ID NO: 119283

SEQ ID NO: 225006 - DNA, 1000 bp, Homo Sapiens
aaactgaccattggctgccagcgtgtcaactcccctatcactttactcagagtccctctgagggttcttgtgctgactggccttcaggatgtccggtttccccaggatgaggctgtagccccatccagtccattcttggaggaggatgaaggtgggaagaaagattcatggctagctgagctggctggggaacgcctaatggctgccacatcctgccgcagcctccatctatacaatatcagtgatggccgagggaaagttgggacgtttggcatcttcaaatctgtgtacagacttggcgaggacgtggtggggaccttaaacttaggggaaggaaccgtagcttgtttgcagttttcagtcagcttacagaccgaggagcgtgtacagcctgagtaccagcggcgacgtggggcagggggtgtcccctctgtgtcacatgtgactcacgcccggcaccaggaatcctgcctacatacaactagaaccagcttctccctcccaatccctctcagctccaccccaggcttctgtacagccattgtgtccttgaagtggagattgcattttgaatttgtaacgtcccgagaaccaggattggtactcctaccccctgtggaacagcccgaacctaccacctggacaggacctgagcaagtacctgtagacaccttcagctgggacctgcccatcaagctggaggaagcctgggtattttgacacgggatcatctgtaaggccccatcctccctgtgccctctctgctgctcctccattcctaacgcttcaccccactttaccttgagcttggaagtagcacttgctgtagactcctgggtgctggaggagtagagacatcaccaagcagatgatcccccagcctcctaggatccccttggcctgtccagcccagagcatccttagggccattgctgctgcacagccctctcagacccttcttggcctctgctcagctactctggtcttgactccttgactt

SEQ ID NO: 225007 - DNA, 1000 bp, Homo Sapiens
ggtggttctgggctctctgtaggctggtcctagtaggtgacacccagcaacacccctgttggacaggattgattgttcgcagtcttagaccaacacttcagtcagaaatgttactgggaggaggaaaggaaaatcactttttttcctccatgtggaaatgaggagagaggaaagtggattgcaaaccaaaatgtgagtcagtgtgatgaagcagtggctctgtcatctcggcctttatccaataacaaaccagcatctcttaaaggcgcttttggcctagacacccctgaagtttggatgaagtctggtggattccctgtctgttgtatttctgtgtgcctgttcccttcattgctgtgagttgggagtgcattgagagatgatgtccatctgatatattcctgtgaaataaactgccagcaaactttctaacttgtattttaactgttaaagaagagattaaaaacttcggctttggacatgtccacattatggactgtcatcttatttttaaaagtcattctttacgtttaaaattttaaaataaaaaccttctgaggtattgatgtagtccaccgtgtaaatgttaccttctctccatgctgccattatgccaaaacaaaagctgtgataaaaaaagtgcttgagagagtgtgttgataagaaagtgatttatttacagatggaagtctttgtttcatgaagctaccaaactttaaaaagaatgtcacccttttttttgtttgttatggaaaccagagattgtaaaatggaaaaagaatcgtttttttgttgactttttgatgctggcacgaggtttttgtccacttttttcatatatctgtgtataaaaaaattgttgtttactatggaattagtattacattttgaggtaaacaaaagaatttgtattgcttgataaatattagcttgtaaatttaaagtttctttacttcaattaacttaaaggaccaataaacccataaaagatgctttcttt

SEQ ID NO: 225008 - DNA, 1000 bp, Homo Sapiens
atcaatcattgcatactcattcaccatcatcaacacccttcagggagtgttgctctttgtggtacactgtctccttaatcgccaggttcgaatggaatataaaaagtggtttagtgggatgcggaaaggggtagaaactgaaagcactgagatgtctcgctctactacccaaaccaaaacggaagaagtggggaagtcctcagaaatctttcataaaggaggcactgcatcatcatctgcagagtcaaccaagcaaccgcagccacaggttcatctcgtctctgctgcttggctaaagatgaactgacctggcaagtgccatggcaatgacccggaagttaccgctcctttccgtttgtctacagcgcccctgtggtcacacatagattggacaaatgccactatttctagctttcctgtgaaaagtctaggctcattcacctattttggctttttatgttcatagaaagaacaagacatttgggagaattcttagatccagagtccagtagtgtggcacgtgcaatgaagtgtcggaaggatgcattttaaagatggcgggcgggagaagtggattttcttcttgcagctactgccaccttgccagaaactcactaactggcatctggattcagctcatagttccctttctggcctctctgctgtattttatgctcccaaagatcttacattaacactccacattcacataattcaacaattttcatatggatcagtattaaagagggtgttgcattttgcaatacaaaaatgcattatcaggtgctggagaggatgtggagaaataggaacacttttacactgttggtgggactgtaaactagttcaaccatcgtggaagtcagtgtggcgattcctcagggatctagaactagaaataccatttgacacagctatcccattactgggtatatacccaaaggactataaatcatgctgctataaagacacatgcacacgtatgtttattgtggcatta

SEQ ID NO: 225009 - DNA, 1000 bp, Homo Sapiens
tgaaaaaccctacaaatgtaaagaatgtgggaacgcctttagtcacacgtcacatcttgttagacgtgaaagaattcatactggtgagaaaccccgtgaatgtaaagagtgtgggaaagcttttaggagtaaccatcaacttactatacatcatagatttcatactggggagaaaccctatgaatgtaaggagtgtgggaaggcttttagtgtgtatggacgactgagtcagcatgagagtattcacagtggtgagagaccctttcaatgtaacaaatgtggaaagtcctttaggctcagttcaagtctcaaagtacatcagagcatgcatactggtgagaaaccctttgaatgtgacaaatgtgggaagtcctttaggtttagttcaatccttcaaggactgcgggtctggatattccgtcgtggactacgtttcccactgacgacggagaaaacttggtcctttggctccgcgctgcgcgtgacctgcagtcacctgagcaagagggcggcgtgggtcgctgcgggagcccctacagccccagcccgcagcccacgtggcaccctacagggctgtgagagtggggctgctggaggcgttcagagcgcggaggccccaggcgcgggccgggctctctcccgcctcctcaggcccgggggtgctggagctgccgaggtgggggctcatctttgggagacaggtggggagtgtgagagaccgcgcagcggcgacagggccgggcgtgcctgtgtgacgtgggtgcagctgtgggacttcaagtatgactgccacagagaaatggtcccatccaggaaatcagatattgagtcctacctgagtttccagcaagaagtgtctttgctcagttcaaaagccacagaagaagttctggacgatgtgggccttcaatcttctaagatgggaatagaaagaagaggatctacccagaccaggaccctgctgcccaatctcaggtctacatctgcctcaccaaaataa

SEQ ID NO: 225010 - DNA, 1000 bp, Homo Sapiens
caaagggctggaggagacagtggtatgtcaagatatttcccgatttatgtttgtctccaagaccggattcatttgtgatttgtcggattatttcaaaattttatccatgcacacctttctgtgtaatgttttagataagacattctatggaaaacgcagggcccgttctgcctcctggagtgtttgggtgaggtgggcggagcatggagcctgctggccagggggtgaatgcccgggaagcccgctgcaggagacagtggtggaaaaggccaactggccgtcggggcatccctggccccgggcagctgactggctggaacaggacactgtctgggctttggggcgggagccctcctctgggaaaatattttgcaaggaactgatcatatttcctatgtctagagaattgcagacactgcacaaccttcggaaactctttgtccaggatctgaccacccgagttaaaaaaagtgtggagttggacaacgatgatggagggggcagtgctgcccagaagcagaaaatttccttcttggagaataacctggagcagctcaccaaagttcacaagcaggtaggagagttctgcccgctcccctctgattccctcctctctcctggaaagaagccccaccaggtttggccacagtgtgcggagaaggcactgagattgaagctggtccgggacaacgcagacctgcgctgtgaactgcccaagctggagaagcggctgcgtgccacggcggagcgcgtcaaggctctggagagcgcgctgaaggaggccaaggagaacgccatgcgggaccgtaagcgctaccagcaggaggtggatcgtatcaaggaggccgtgcgggccaagaacatggccagaagggcccattcagcccagatcgccaagcccatccgccccggacactacccggcctcatctccaacggccgtccatgccattcgagggggaggaggcagctcttcaaattccactcactaccagaaataa

SEQ ID NO: 225011 - DNA, 1000 bp, Homo Sapiens
ggagggggccaccaggttggccagggccatggctgagcacgcagggccccgactccccctggtgctgaagacgctggcatgcacacacagcagtgcgtatgagaaccagagggtgaccaccaccgccttcctggccgagctgctgaacagcaacgtggccaacgacctcatgctcttggactcgctgctggagagcctggcggctcgccagaaggacacatgcgccagcgtgcggaggctggtgctccgcggcctggccaacctggcctccggctgccctgacaagctcctcacagccatgattggcgggctggacgacggggacaaccctcacagcccagtggccctggaggccatgctgggccttgcgaggctggtgcacctggtggagtcctgggacctgcgctcagggctgctgcacgtggccatccgcatccggcctttcttcgacagtgagaagatggagttccggacggcatctatccgcctctttgggcaccttaacaaggtctgccacggagactgtgaggacgtcttcctggaccaggtggtgggcgggctggcgcccctgctgctgcacctgcaggaccctcaggccaccgtggccagcgcctgcaggtttgccctgcgcatgtgtggccccaatctggcatgtgaggagctctcagctgctttccagaaacacctgcaggagggccgagccctgcacttcggggagttcctcaacaccacctgcaagcacctgatgcaccatttcccagacctgctgggccgtctcctgaccacctgcctgttctacttcaagagcagctgggagaacgtccgagctgctgcacccctgttcaccgggttcctggtgctgcactcggagcccaggcagcagccgcaggtggacctggaccagctcattgcggcgctccagatcctgctgaaggacccggcccccgaggtgcggacgagggctgctgaggccctgggccgcctggtgaagctcgcctaa

SEQ ID NO: 225012 - DNA, 1000 bp, Homo Sapiens
tctgcattctttgccttatatagatgtgaaagttcttgaaattaagaataaggcaagaaaattgaacatcgaacccctaagaagtaatctctccaaatattatgtcctgagccagtcagaaatatgtaaagggaagaacatttttttgctgtctcttatcttcagtagcccaggaaatggaacaagacgggacctcattaggaaaacttggggcaatgtgaccagtgtccaagggcatcccattctcacactgtttgctctgggaatgcctgtttcggtaactacccagaaagagatcaacaaagaatcctgtaagaataatgatataattgaaggaatcttcttggacagttctgagaaccaaaccctgaagatcattgcaatgatacagtgggctgtggctttctgccctaatgccctgttcattctcaaggtggatgaagagacgtttgtcaatctaccaagcttggtagactatcttctcaatctgaaagaacacctagaagatatctatgtaggaagagttcttcatcaggttacacccaatagagatcctcagaacagagactttgtccctcttagtgagtacccagaaaaatactacccagattactgcagtggtgaggcctttataatgtcccaagatgtggctcgaatgatgtatgtggttttcaaagaagtacccatgatggtgccagctgatgtgtttgtaggaatttgtgctaagttcattggccttatacccatccacagctcaaggttttctgggaaaaggcacattagatacaacagatgttgctataagttcatttttacatcctcagaaattgcagatcctgaaatgcccctagcatggaaggaaattaatgatggaaaagaatgtacactgtttgagacatcctatgagctcatttcctgcaaacttctgacgtaccttgacagctttaaacgttttcacatggggaccataaaaaacaatctcatgtattttgctgattag

SEQ ID NO: 225013 - DNA, 1000 bp, Homo Sapiens
tctcttgctgatggagaccaggagggtcgggacagaaggccttgcccaaggtctcacagccaggagcctgcctccactggtccctgtgtggccagtgctgccctgggggctgctgctgtgcactggagggtcagctgcatggaggagccagaggagatggtgccgaggacagagcttgcggccctgtacctggctcccagaggaatgggtcttggagctgctctgcacagacactgaccttgaggagagacaggggcgccactccctcctccactcgctcaggtgagcattcaaagcgtcataggtaaccaggagcactagttggcatggcgatttcagaggtgagtccaatgtggaccctggccctgggaaggtcacagtttgatggaagatgccagactcacacattcactcactcactcattccctcgtgtattcattccgcaaagcttcactcattacctacctggggccaggactcagtctcagagccaaggagagcgtggttgggaggagactcagacgctttccagcatccctgcccccaggtgtctacacacctgtgtactccccaacttggagtgtggcagggctgcaaagagggtggatgtgctcccgtggtgaggttactttatatcgcaaaggtgccggacttctgcaggtgtaattaaggtcctaaccagctgaccttgagttaatcaaaatggagatgatcctgggtgggcccaagctaatcaggtgagccctttcaaaatggccttgaagtcagagactctcctgcaggatttggagatccagccccatgaggaacaggggcaaggaaatgcaatcttccacaaccgagagagcttggaagagggtcccaaacctcagaggagaccccagctccggttggcaccttgactgcagccccatgagacagaagacccagctatgccatgtcctggctcctgacctgcccaaactttaagacaatagataaatgccattttaagctttt

SEQ ID NO: 225014 - DNA, 1000 bp, Homo Sapiens
gcaataaatctaaaggccataaatttagagtgacttacagaagatcgaactttggagtgtggcagagtaagggatggaaaccgggccctccagttcactatcagtagcttttgcactggtctgcccttcctaaattaagtatgcacttcaatttgatgagtggaaacagtctatctgggcagtaaccagggagctttgtgcctagtagattgcttctgttctgcacttctttggtttcccacctcaatgtaaaaaatagctagcaatgaagtccagaagttgtcaatggttcatccccagaagaatgcataatgtccaaagttgtatgtgtatgatgtcttcaatggtattaagttatttcaaattcttagttcacctacataaatcatttctaacaagcatcttcttaaccaactttatgcacagtgtatgtttgtaagtgcttctgcacgaatgtttatacatgactgtttccatagtacttatgtttttaaaaatattcagtcatttcctactataatcctcatgtatccatgtaactgactcaaaaatacttcagccacagaaagctaaaactgagcaaatctcattcttcttttccatcccctttgcatgtggctggcatttagtaatgattaataatatggccagctgaataacagaggtttgagacacaattctttctcaaaggagtcagctaagctgggtctacttatggacaaacatctaaatgtgtggaagtatctgatatttgacaatggtaaatttccacttagctagctagcattgtcagacttcaatctcctcatggctctggccgtcctgttttaagcatgataattgttggccacatctcacatagttctcattgagtgagttcataaataaacagggtttttttttttttttaaagagcagccaagcacaaagtgtgactttgttgacattttatgtgactttgtcatatgttcctaacccccaataaaagcaatgttgcatc

SEQ ID NO: 225015 - DNA, 1000 bp, Homo Sapiens; identical to SEQ ID NO: 119290

SEQ ID NO: 225016 - DNA, 1000 bp, Homo Sapiens
gtgaggatgagcagtgtctcttggttttcattgaggatagagtaagagattgagtttagattgcaacagaaggaattagtttagataccaggaagaacttcctagcctgaagatttgtcatagtgtctgctttctagatatctgggaaagatttgataatagttgtttgtgaatagaaaggaggatatgatgtttttattggccattttgcgggactcttcgacttcttgctgctgtctcttgaggatacattccaattccatcctggcgagatccaagtgcttacgtactgtctccttagctgccttagagtaaacgatcatcagttcaatggaccaaaatcaccttcagccatgtggtttcttcatcatcatggatttcttttggttgacaaacattctggctctcagatgcaaaaagtcacactgggaaatgaactgtaagtggtgaaattagttttggtatttaatttaaaactacatttatagtttttctcttctcttctatgttgcaatgaatgtaaagtatttgggatccagtgcttataaacctttccttcctttgtgcacagaatgtaactagcaagcccattagcacccagataattctatcatgttagtttcccatcctggaaaatctttgtacagtgggaagttccccgatgtgtttttctttcttaggtgaagggttggctatatcactttattgaattttgcattccttagacttttaaaatatactaatgtattctagtcttactctaaagacctttgatgttaaaggaatccttcatttatttcatattccctatctcatagggccacaattattttaatacagagatgattttcaaaatattttaacaactggtacaggacagatgccagccactcagaagggatgcctgctgtaaacaagcagtatgtatggttgtaccaatgcctattggctgaacattatgctactttcagatattaaaatggtgttcctttgaatcgtg

SEQ ID NO: 225017 - DNA, 1000 bp, Homo Sapiens
acctacctaccttaatccttggggggttaagctttcagactggaatgataactgaactattcatttgcagtaattctgggttttgtgcatattttaaaaaggaataccgggcttgcctatattcattacaacgtcctcccagctttcaaatcttccaatacaatgcctcttctctagtcttttaagcacatcctgtgactggatatgattatgggagatttacatgcatccttgtctattgtatcaaaagatcagggaataaaatgcccatcattaaaaccccaaagtgattggattggcatgaggaatggggatggggctggcatggaagagagggttctgactctgagatttcatgaaatgcaaaacaataggacagctgctcttccataaacagattattattattatttctacctagacagcttgatagcagccattatcttctttctgggtgtcttatcaagttccggctgtgtgcagcatgggtgataaggaaagagaaatgtcacccatgggattgccaaggattatttctatgcactgctgttcagcaacagccaatctctcagaactgagaagaagtcctattgttcacgctgggcagttgctattctgactatcccaagagagcagaaaagggatgtagttgccattgtgcaaaagattgatatttcattactctcagctaaagttctgaaaagcagaatcatcatgaaatatctttgaagagagaaaagacaagggaagaaaagaagaacgaaatgagttcagagctttttagaactgtgagggagtgcgaaaaaagaaaggtgtaatactttcaaacagtggaagttaaaatgccaggcgtgtaagcctcagtgaaattgagcagcatcacgtcaccacgacttgtggtccagctgtttattgcaaagactccatcctgcgttactcatcagaaaatagttaactttgtatctggcattattttaattaaaaaaaaagttaacttact

SEQ ID NO: 225018 - DNA, 1000 bp, Homo Sapiens
gcctgcttgctcacgggatcttcccactctcctcgggaaggcttccgagctgcttcctcaggatgtcctgtgatagcagcctgacctgtcaaagccatgcgaataccatctgttcagttatataacttgagatctgggaagaattctcaacgtaggatttgctgcccaaatcaaatcattttcagaaaggagattaagcattctttgctgggaaaaggagaaattaccagaaaaaattatcatttcactgagtataaacaaacctttgtccaaaatacacaaatgaaaatgacaaatttgcttcattaatatttgcttgcattaaaaatatacacagggctatgtatggttcaatatcttaagtgcaaagtaaaatcttaattaggaacaatggaattgttaatttaatgaatcttaattttgtttagatcattagcctgcagtataatgtcccaagcagaatttggggtggggagcttggtggtggaagaggaagtgctcatttctacagacatgacaagattattaacactaaagaatgacttttctttcatgggaggggaagatatctgacccaccagcagtcagacagaaaccctgacttgtgattttaacattaccttatatgacccatggtcaccttgtatgaccaaagaaaaccatttatgaaatagctgtccggagttcaagatttaaatggtaactttgtagactaggttttctctcatcatctaatttacttgccttaacgcttgtttctttgcccttattcctactggctctcgagtataatatcctgagaatttatgttgaacagcactaattttttcacttggagctagcacatgtttatgactagtacaagtttataactacaaaaaacagagattttgtcatcttaaactgaatttactgggaataaaatcagtcaattcagaaaagtataacaaaggaaataaaaatcaccacaactcctactacctgaagattaaatggttaa

SEQ ID NO: 225019 - DNA, 1000 bp, Homo Sapiens
tgtcctcagctgctgaaagggccacgtttgttttcattacaaataagaccaccgagtgggctcctggcgtgggggcgggaccagccgcgcgcagtcttcagaggcagccccccaggctgtctctggagggtgtgtctctgcttccctttccccgtgtttattttcagacgaagccaagtggcccggggggaccctccggactcccagccttcagagaggagggcagctcgggctttcgccgcagtgcttcctgcccgtcacgtgtgtgctcctagccggggtcgggggagctggtatcttggcccttctgggaggacgcgcacagcccgaggaggcagagccccagacgggaatgggcttttcagaggtggggtgcgggcgaggggacgatgcattatttttaatatttgatttatttttccaactggacttcttcccggggctctttctgggcccagctgcctttgtgatcccgcgccccggtcctcggcctctcacctccagcgccggggcgccccctgctgtcggaagcggctgtgaccgggcagaggtgctatctgggactctgggttctcagcccggggacagcgaaccgaggggcagatgatccatcagaaaagagccggcactgcccagccccgcgcccctgcccctgcctttttccgggagcgcgccgcgccgcacccgctacggccgcttgaccccatctttgagcccggccccaagctctgggaccgtcgtgcccctcatcaaggaagagccaaggaccccaaggagaagagaaaggagttcatgaaggcagaaatgcctggggcccacgaacatcccagtgtggccctggacgggacatcatgctgggcaacacagctaaaatgcgggtgaagaccagatttcttgcacatggcggtgacgggatgctccctagagagcttcaagtggattctttgctttttattttctctcttaataaaaatgtatgatgtttacattgtcagagaac

SEQ ID NO: 225020 - DNA, 1000 bp, Homo Sapiens
gcacactgcagtctggtgtgtgtggtgggcacacatagaacacttgctggtcttgaaaatgaagccatcttttggggcccctagaaatcaaagagacccacttagccaagatatcactcttggacaccagcaagggtgagatcacttgataggtattttgccgtgtgtttctttttaactatataaaaaacaaaagggtggatgtgcaaacccaacccaagaataccttggctcaggctcaactagatgaaacttttaaaaatgatttaatgttatgttagactgttgcatattaaagcgatgtaatgccttctaagaaacgagagtcagatcctgaaagcgatgacttgggtaaatgtaaggagttataactcacttttcaagagagcaactataaacattttgcccaatatgtacagacctctaatgacagtgtgcaaagactctttcgttcccagattatgaggctgccactttctcctccccttcctgagccgcacttttctaaacagcaactgtcggggcagggggatgggaagctcatgagagaaggaaatatttgggaccgtgtcggccagtggaatggggcttgtggtcaccgtgttacagagtcaaatcacttcccagtaaacaccagtttccgatggctctctggccagggttggccggggacaagcagggagtatatgtgtcgggtacgttgcgtcacaagctgtgcagctgtgtaggcctctctgtccagaggcattaatggaaaatgattgggcacccagcccacagcagatgcgctgaggaatccagccagggggagctgggatgcagtgggagaggggacacgcagggcctggctgagaagcctcgcgaggtaaccacaggcggaaatctgaaaaatgaagacgttcccaccagttccagaaaacagggctaacttaaaatgcagcccctttccttgaagtgggcttggcaggccccaggtgttgaaaggcaaaagaaaaaaaag

SEQ ID NO: 225021 - DNA, 1000 bp, Homo Sapiens
ggagaggcatgatttgagtcagagagcattatcctctctgcgttatccaaccccatgtcccatgatgcactttgtagacaagcaagtgtccctggtggagaatccacagccacacatcctcattggttgcaaggatcagtgtccaatatctactgccatgatcattctcagttttacatccacagagcttcatagaattctaacaccacaggtccaagtagaggttttggcctcagagtgggctagattccacctctgacagcagctgtgggactgtttttccatctgtaaaatggagacaagagtatcacctacctcatggtgttggtgggatcgttaaacagaattccgatcatgaaacccttagcctgctccctgcataggctgcatgcgctcagtgagctatggctctgtttcatgctgactttaccatcatgtaagcagttttaaaaatgctagaagctttagtcatagaattaccatatgatacagcctactgcagagtccagaggctgaggcaggagagttacttgaacctgggaggcggaggttgcagtgagccaagatcgcgccactgcactccagcctgggcaacagagtgagattctgtctcaacacaaaaaagaagacatgtgtccccatcacagtatcatacagagtgcttccactgccctaaaataccctgtgctcttcctattcatccctctcttcaaccccagcaaccactgatccttttaccatctccatggttttgcctttcccagaatgtcatattgttggaatcatacgctatgtagcctttgcaaatgggcttctttcaccgagcaatgtgcattgaaggtgcctctatgacttttcaagggttgatagctcattcctttttattgctaaataatattccattgtctgaatgtaccacattttgtttatccattcacctactaaaggacatcttggttgcttccaagtttgggcaattataaataaaactgctataaac

SEQ ID NO: 225022 - DNA, 1000 bp, Homo Sapiens
gccggcaactgctgggcccgggacagtgaagcagaggaggaggtgggggaggcgagcccaggtcggggaagggcagcacctgaatcacccttggggcccagacccccaagagtctccggggagccgaggcctggcgaggcagtcccgggattcgccccctccccgctggcccgagggcgcaccacgtgctgggcagagacttcggcgaggccgagtggaccctgcagcgctgcttgggaaagggcaccttggactacctggtgggggcgttgtgcttcgttaccgaccgccgggacgccaacccacggtgcccacccgtgcgtcattccgctgtggatcagccctttggcggcccccctccaaagtctacaaggtcacacggatgtctgcaggcagaggtggggctgctggggccctgccaggtgagggctgcccttgtggggcagtctctgggccttggaggccggaagcctcctggggctcctacggctggggggtgctgctcatcctggctcccagggattgcgccgtagccagctgtaatgggtgggactggcgctcactgctggtgcaggctgtggccatctgggaggtcctttctggaatctggaccttggctgtcctgagagtgacactcctcatctcaagtactgggggcatgaagttaggcttggcaggtgggataggagcatgccaggtgctgcgagggtttaatcgggctcttctgctggccttgaatatggtggacaggacaggacattctcattgctcaggagccactggcgctgcctttgggaatgaagttccacagccccccactcattgctttggctgtctgctgcatttgaaactgtacgagggtcaggaagaaggctgcggggatgaatggctctaccggcttgccacggatggggaactggagcagccagtggccccaagaggaggaaggaagggaggcacggcagacccaacaccagctgtgccaggctttggggggtga

SEQ ID NO: 225023 - DNA, 1000 bp, Homo Sapiens
atgcccttcctttacagaacaccctttaacagcatccaggaggaacgagaggctgcaatactgaggctttcaaagtactcacgaggatgtccgagaatggctgtgatgccaggcttctggcaggttccagactccatcacaagcccagcatccctgcaccagatctgacatcgctgctgttgtgccagctgtttatgaagggcctgagtagctagcaggtttttatcaggagccctgctgggggcttagacaccaaaagagaagactcatcctctgtagttcttcttgtgaatgtccttttagaaaaacaattagaaccaaccacaagcaccaaagtcctaatgggatctcctgcgagcacatatcaagcaggattgttgctatttctcctcactggctctttggacagactgtgtgagctcctggagggttccactgtatctaccctttgacactgaccagttggcacatggtgacatattccaatgtgttgattgcaaatgtgaacgtacagccagtgctgtgtgcgggaggactctctcctcctcagtggggccacaccgtgcactattaatggagccccactcctttgcacagcctggccatgcagtggctcatattgaggttttagccaactgaaatctcccgtgcatttttctgacaagccagctaggcctctgctatgctgtccttgtgtctttcatttgatgaccttaagggtgggactgttttatcttaagttacaggtggtcaagtccagcccaaggacagcaactctgagggtcaagcctcataggctaactggatagatgttctctgctttgccacccactggagcccgacctgccccactaatttatatttcccctggtctcattttgtactttttatttataattcacccttaaagtgtatgtgtctcttataagctgcctccgatctttcatggtatgaggtggttacctaaataaagaaggagatttggcctttgtttttatgt

SEQ ID NO: 225024 - DNA, 1000 bp, Homo Sapiens
ttttttttttaacttttactattggacacggaaataggacatggcacaccagggagtcccctgggttccagacatagtcctccctgcctttcttttggagttagaacccagcttacccttggcatttgggatcagtcatcccagaaggtaaccccttttttgccctgagctcaggtgagagccttatcttccaggtagtggaaccattgcagtatctcctcgtgaaaggattcctcccttagtgtggcagatgctggcagtgccctcccatgttcctgaagctcttgggttcactggatgaacttccagctgccagaacctgcagctctttatctaaggactctctctggccactggagcctgctgagcaggctgaaagttctggggaattatactcccagccacagcaaccttcagccaatcaccgatggggatcggtgcgtaaatagccagcttcctcatccctcaggtcctgcagcaaacattatgactggctccctgagttccttcttaggattaagctctggttgtccacgtgttttgtttgtttgtttgtttgttttgttgttgttgttttgtttgtttttgagacagagtctcactcttgttgcccaggctggagtgcaatggtgcaatcttggctcactgcaacctccgcctcctgggttcaagcaattcccctgcctcagcctcccaagtagctgggattatagccatgtgccaccacgctcggctaattttgtatttttagtagaaacggggtttctctatgtcggttaggctggtctcgaactcccgacctcaggtgatccacctgccttggcctcccaaagtgctgggattacaggtgtgagccaccgcacccggccggttgtccatgtttttaacttgcttgataacacaccctttatgagcctcctttctttccaatgtcagtctcccactggcttgcttggtattcctagcatcgcttttcaaataaacacttgtgtttctcaaa

SEQ ID NO: 225025 - DNA, 1000 bp, Homo Sapiens; identical to SEQ ID NO: 119300

SEQ ID NO: 225026 - DNA, 533 bp, Homo Sapiens
atggcgggactgcctcgccctgatctgagcctgcgctcactccacacgtcacaaaccacagccctagcagaccccctgccctcaggggcccccagaaacagttgtgcctatggacgtggctgtgtgtgcggagagctggctgattcaggccagtgttctgggacgaagagaagcccacaccccaggccatggcccctcttgactccacctcctgggggcccagggttggatgggaagctgaatctggccacactcgttctggaactcccttacctctgtatctttgcccctgctaggcgttgcccacccgtctctccccacctgcagcacagccaggcagcggctggcagtggtgatggtctttgcgtggggtcaggcaggtatgatgccccactctgctgcttggcggctggtaggccttgggagttctgccttatctctgcagctcagctttctttcctatcaatagtaacacccacttcactggattattgggaagattaaatgagatccactaagcagtgcttaccaca

SEQ ID NO: 225027 - DNA, 1000 bp, Homo Sapiens
tcttcccgtctccgcctcctaagcagctgggactacaggtacttgcccccaggcccagataatttatttaaaaactttttttgtagagacagggtctcactatgttgcccaggctggtctcaaactcctggcctcaaacaatcctctacctcaacccccctaagtgctggcattacaggcatcagctgccatgcctggctacaaatcttaatgttttccccatggcttctttttctggcgttcttttctcaggtaatggaagtgggcagagaatgatcctttccctaggctccagtgtgtaagaattaaagaaagaggaaagaaacacaatggcttgatggtcgaggacaggtttattttaaagaaaacaaacccaagagtggcttctggctgagttagatcagaggcatgctctcttacagactaagagtttttaaggattcagggtgggagagtttatcagaggcttggactgcttctgtgtctctttaggtgtgcttatctgggagggagttgtgtgtctgtttccatacatcttcctgcagctgcaggcatacccccaggtctgcttttagcttccctatcttagtgcacctgaagggaaagaatgtgcttattaaggcccactgttatactggggcccaatgtatgagggtgaagtttggcaattacccaagagactttccccccacctccctctgtgcctgagctgtctcatctatgttttactgtctgctctttctgtctgcttgttgttagaagagaagtgattttcttgaaatgcatgaggctggaaagggagctggcacttaaagtggcggtgtttgtccgagaggatggtgctcctgctctgtcacagtgggcatggggattcaggccactgccaccgaatttcaagagcccaagcacagagcccagaactaaattgtgagggtttaaaaaaaaaaaaagctttattgaagtataattgacatacaataaacttgaatatttaaagtgt

SEQ ID NO: 225028 - DNA, 1000 bp, Homo Sapiens
cacagcccgccgagaaccaggaatacgagagccaggcggcgcggcggcgggacctgtactgagcaagaaagaagatttcaaagtaatttattgttatgagatccgtgcttttatcttgtctcagactcccaatgataggcacatactctcctctgtacatttaatgaaactactaaaatatttcgatttaaatcttccacctatttgttttctgtgtatcctacctgttcccgaccttgacattttcaaagaatacaggttacttattttgttttttggtggtggtgagtttttttggggttttgttttttggtttttggttttatttttggagacagggctttgctgtatcgcccaggctggaatacagtggcgcgatgatagctcactgcagcctcgaactcctgggctcaagggaccctcctgcttcagcctcccgagtagctgggactacaggcctgcgccaccacgcccgggtaattttttattttttgtagagatggggtgttctatgttgcccagtgtggtctcaaactcttgggctcaagagatcctcccacttctgctgcccaaagtgctaggattacaggcatgagccaccgcgccgggacagttattttgtagagtgttctttaatttggatgtacctcatcttttatgtatctttgggaggaataccacataactcatgtggtttatcccatcgagagacacacagtgtcaatgtgttccattcttggtgatgttaacttttattacttagtgaaaataattctaagagatttcaccactgtagagtgaataaatgaatatgtgggattcatcaatgaataagtaaaaggatgccaactggcaaaagaactgagttgggaggatggcttgagcctgggaggtcgaggctgcagtgagccgtgatggcaccactgccctccagcctgggtgacaaagcaagaccccgtctcagaaaaaattaaataaataaataaatacccagcacctg

SEQ ID NO: 225029 - DNA, 1000 bp, Homo Sapiens
cctccaactaaagcctcagtaatgacggtcgcccctccccctgggaactgagttgtcccaggcggactccagactgctgtgccggcagcggggatttcaagccagtggttcttagcttgcggggtttccgtgggagtgggaccctctgagcgagaccacttggctccctggctacagccccctttccacagaagtggacatttctcctgcctcactggagttccaggtgctgccggagtatgtaaaaattcctgcagctcagtgcctgcccaaacagccgccgacgggagcagctgtcattggtctgcccagttttgtatttgagacccagggcactggtggttgtaggctcccgaggggatctgctgatctgtggattgcaaaaatctgtgggaaaagcttagtacccttggtgggtagcactgtccctcaccacttcccttggctggggagggaggtccccctgccctgtgcagttcctgggtgaagcaataccctgcttcttctcgctctctgtgggtcatgccgaccatctagtcagtcccagtgagatgaactgggtatctcagttggaaatgcagaaatcacccacattcctcgttcctctcgctggcagctgcagaccagagctgcttctagtcggcagtcttggcccctccccgccgaggtaagtttaataagtcttctaaatttgtccttgccataatgatcagtgatgatctgtcttttaataagttaaatgctttccagacttcaagactctcacccacatcaaaaataaaattatatatcggccatattaccaggattttagaatgttgtattttatcctctaattataggtcaaataactaaggtagaaaggagtaaagcaacttccatgtatgtagtgaggatgttggggggtctgggactaaaattctgccttgggattcccaagaggttggtgattatgatttttgtactcttagacacaaaataaaataacattctgttttgt

SEQ ID NO: 225030 - DNA, 397 bp, Homo Sapiens
atgcatgaatactttaaaagctcgaacaagcgttcctgggaagggcgcacgcacgaaacttcctccgtcccttgcatcctcagggcccgcccggcaggacgactgagcaaggccttggaagaccggagagattggagtgaatggggaggaattgaggggaaaatggagatagaacctgaaagagccccaaacgccagaacctgtagctccccaagaataaggtcttccagaagaactagacccaaaactagccgttggggaacaccgaaatccttggaggagcaacatccgcatgaccctctgtgttcctttaggcaaaaggacttgcttccattgtttgttcaattgtttgtgtttgttaaataaataaaacgattttcatgtatctttgaaatta

SEQ ID NO: 225031 - DNA, 1000 bp, Homo Sapiens
cgtttcagactcattgttgtgactttggtttcaatccagggacacaccgtggccaatggagtgtctcaacagcatctatgatcgctgtttcccagagacagcatctcagataccgatgctgaaagagaaacagcagcctgtccccaggtggcaggaaatagtccattttaacggcaatttcataagtggcagatgatttttattgtaattttctggtgagctgattaagtggaggcagagtcagttctgaggcgtcaatgtctttaacaactcggggagaccgaggccatgctcagcaggaacactaagtccatggaaaacaggccctgggcccgctgatgtgcataattccacgtttgccccccatgtaaccaggatggtaaattacaggtgtcagataatcacgctctggagtggctacttgaggatgcgatcgaccaatttaagctccgtctgacacatgatcaatagcccgtgatgctgcatggaattgcaggcacagcgtccaaacctgcagagcagtggctcccagctgtggcaactttgccccccagaggacatttggcaatgtctggatatgtttgcaattgtcacaactaggagagggggatgctattggcatctggcgagtgaggccaaggatgctgctaaacctcccatgatgcacaggagaagtccccacacagacacatcctgcgcagactgtccataaagcttaaatgagatgctctgacttagagccacagtgaacattccattccatcgtctgggtatctccagggatgtacgtagctggatgtctagcttttcatctgggtatgaccggcctcacgcagaatcaaaaccatgtgtaggtcgaatctcttatttgctctcctgcttcctttcattgtaatattctccttctcattagtattttctgttattggaggaatggtaagaaaacataaaatgctggagagttacgattttgtttctgtcaataaaaaagtaatttgcc

SEQ ID NO: 225032 - DNA, 1000 bp, Homo Sapiens
ttttactttcaaatatttaaatttccatcattctaacaaaatcaatttttcagagtaatgattctcactgtggagtcatttgattattaagacccgttggcataagattacatcctctgactataaaaatcctggaagaaaacctaggaaatattcgtctggacattgcacttggcaatgaatttatgggtaaccactgatccacttccagtcactatccatgagtttttatttccaaatacatgaaatcatatgaattgaacatttcttttgattgagcagtttggaacccgtctttttgtagaatctgcaagtggatatttggaaccctttgaggcctatgctgaaaaaagaaatatcttcactacatgatgaccaccagcagcagctggggaaaccagcaccctgtggaattccatacggtgcatagaatacatcctcccttcagttggcttgggtcaacttaggtcatgggccacctggctgatagcagtttccacagaaatgcttcaagatgaaagtggatgaccgggccaccctccaccactgccctgtaagaccatgggacacacaggccaccagttcttttcatgtggtcatcccctgttagatgggagaaaatacacctgcctcatttttgtaccttctgtgtgaacattccacggcagagcttcactaaatgtgtgatgaagaattgaatgaatgaatgaatatgagagaaaatgaataaatggttcagatcctgggctggaaggctgtgtatgaggatggtgggtagaggagggtctgtttttcttgcctttaagtcactaattgtcactttggggcaggagcacaggctttgaatgcagactgactggactttaattctggctttactagttgtgattgtgtgaccttgtgcaagttacttaaaccctctgtgcctgtttctttatctgtaaaatggatataataagatgtcaaaggactgtggtaagaattaaatgctttaaaaaaa

SEQ ID NO: 225033 - DNA, 1000 bp, Homo Sapiens
atagctctgctaggtgtcatcctcttaaggtcactaggattctagtgttgaaggcttgctgccacacagatggcactgttctatcctcaaagcattttcagggtgccatctaatgggtctgaatcctggttccattgcaaactttaagcaaggaactcagcattatccaatccccattttctccaactactggccccctctaaggaggctgaagagtgaaagcatgttgaacaccaagatgctctccaaagatggagtccttctcttctgagccccacagctctgcaagatgggtaaaactcaaggtggcattaggctctgagaggagctccatcacacagctggcatagtatggagctggaccagagcccaaatcccctatctccccactgtcctaaccaaaagcttacacttcagaacccaaggccgtgaacacagacctcacacagctgtaacctgagaaactgccattgctgatctagtgccagaaccacttccccatccctggctttcctgctgacttcccacgagataagacttttctttaaaaagggggccttctcagccacacgcagtggatcacactgtaatctcagcactttgggaggccgaggcgggtggatcacttgaggccaggagttcgagatcagcctggccaacatggtgaaaccccatctctactaaaaataccaaaaaaaaaaaaaaaaaaaaaaaaaaaagcagggcatggtggcatgtacctgtaatcacagctacccaggaggcacaagaattgcttgaacccaagatgcagaggttgcagtgagcctgtttgtacccctgcactccagcctgggtgacacagtgaaaccctgtctcaaaaaaaaaaaaaggagcctttggccaggcacagtggctcacacctgtaatcccagcactttgggaggctgaggcgggtggatcacctgaggtcaggagtttgaaaccagcctggccaatatggtgaaaccctgtctctact

SEQ ID NO: 225034 - DNA, 1000 bp, Homo Sapiens; identical to SEQ ID NO: 119311

SEQ ID NO: 225035 - DNA, 1000 bp, Homo Sapiens
tgtcatcaaggagggggctgtatgtggaattgcaaggccaaagacatctcgggtcaactcttctcaggaccagatccaagtcgccagtgagaacacacattcaggcagcctccaccagcgccctgcctcaggagcgaggctccctgcttcatgtgggcaagagctgcccttgttttcccagcgggcagttgggggtctggagcctaggaagcaaagtgaagcacacactcctgcttccttccttccctgcagttgagacgggagtcttactttgttgcccaggctggtctcaaactcctggcttcaagcaatccttccactttggccttccaaagtgctgggattacaggcatgagccaccatgcccagcctccttctcttactagctgagaactaagagaagacactctggagacagaggaggaaacagtgacgatgccacatgatgaatacataatggagggtgaagacaaggctccgtcaggggcaccaaggagggaaacccagttctgtggggaaggtatggggcagcttcacaagcccagtgtctgctccctttgtgggagacgtgttgtttcagcatccattcccccttcttttaggaaaagtgcttgaatttccttttcatggaaccacccacctccctctcatccatgcattctattcccagtatcaggggtagacaagtgacttcaggcttggccaattagggttctgactcttggtcaaatcagagtgaatcctgagtcatttgtaaactccaaggaaagggcttgctttgttttctgttgaatgcagtgctctgagatagccggaaatgaaactgctctcttgccacactgaaggctagagaagggcctggccaggaaatgatgccagtgatcaggggtggagctggaagagggggagtgaggaggcccagacatcttgggagccccaaattcacctcaggatttaacttctccgctgctcagccaataaattcctttcttccatgact

SEQ ID NO: 225036 - DNA, 1000 bp, Homo Sapiens; identical to SEQ ID NO: 119312

SEQ ID NO: 225037 - DNA, 1000 bp, Homo Sapiens
tttcctcgggcaggacgcggctcccgggtctcagccccggcgcgcagcgaaccagggccggctgcggttcccggaggagtgcggagggcagacgaccgcaagttccccccaggagcctcccagccggcgttcagatcgcgccggttccaggcagctgcaggcggcccatcttatgctaacgatcctacttcctccgccaagcctgtgaaattactgccgagagagcgcgcaggcctcaaagttacgaatttttcccaaagcagagaaagagaaggctcagcctagtttgtgagcagagatgaagaaaagttgcccgagtcatgtggcccagtcgagtgtgaatcgacaaaatattcccgactgagccccgtttccttcgggataggtacaatgtcgtgagggcgccaggcccacagccttggaaatagacctccaaggcgcccctgctcaagctaaacgcaccacgccggctttccacaccaaatgcaaatttccgaaaaccccagacggcctcagagatgctgcaggctggcgagcgatttcagctacccctagctccttgtgggttggcccagcctgcgagcgcgatcctgacttgtgtccgggtggactgaaatatcatttttacaaatggagaaaatgagatcgagatggacagacatagcaaggtgataatgtccgactcaattatttctactgggaatgactgaaaggtaaaggaatcgttaatgaatctggagatgacagaggcatgctttatttaatttttaaattagtaaggagtgcagacttggggtggtggagagcaagggtttttttgttgttgttgctgtttgtttttgtggggttttttttctgctggttattgccaagtataatgactttctttaaatccgaaggcgaacgaattgattctgacaattaaggatttgtccttcaatcttgcaaatgcccaattaaaagattattattgtcaataaagccttggagctacctttgt

SEQ ID NO: 225038 - DNA, 1000 bp, Homo Sapiens
gtgccaggtgcgagctcaagccacctccctcaaccgctctgagaaatatcccacttcacaaacttgctcaaagtcacgctgctggctggatttgaatccagattttttttagcaccactgaaaaaacaatatgacaaccggagaaagaaaaatctaaaaagaatacagtaatccatattgttacaaagaaatgcaacttttcacgacatgaaacatatatatactgtgtatagttgcaaccacactttttttgttactactttcactaccatttttatttgttcacgattcatttttaaggtgtgcaggtgtccttaactattcactcagccccctaatgtttttggttctttacggttgtttgctaacgtatccttgaattctgcacttgggacaaatacctgggagtggaaaggctcccaggtagaaggctatgaatggccaagtggtcttggcttacagcgtcatatttttcccaagagctgccccaattattctaccgcctccaaggaacaagtgtaaggagtttaacacacttataaacattgagtgccatttcccccctactttaatagtctattgctagttcaaggttacttagcatttcttaggtgacacaacattcaaaaatgaatgtttttccatgcatttactatatgcattccctctcctgtgaataatctattcatatccatcttctggggacttgaacctcttctaactttgaacaagcatttttttatgttacagatattacttctttgtcgtcattgatgcaaatattttctagcctgttgttctttcttgttttattctaatgttcagtgtgtcattctaatgttttaattgcttcagtgctgacaaagtgagctttctgctgcccatctgatagtcttttttctgctagttttgtacaatttcatttcatatttcattctctgatgactatcccgattttattttggcttatttatttggagtaaaatatggacataactca

SEQ ID NO: 225039 - DNA, 1000 bp, Homo Sapiens
ggtctcttccagtgctaaaggctgcctatgatactcatctgacctgatttctcctgcacagtgttgcaactgacgagtagcagacttgcccttgcctgcatttggggggatggctgagactttccttacagaaagccctactttcagcatgaacactaacccagtttattggctcagggtgtagagagttgccttgtcactggcgaagtcagatgcagccagtaccagagctctgcactagctgtgaacactaaggaagaatagctgagtgaggaagcagagtgccaggcagcacatccttcttcaggtgtttcctgccctgggccagatcccaggcactgcagcaatatctctgcatgatctagggctcctggaaatagcccattaagggcaaaactcgctgcccagaaaacattagaacattaaaagagcagggtctcatctgattgtcttggtttcctgaggctcattcagtctgtgtccactggtttcagtctgagttctctgcactttgaggatgcagacagtgaagttctcccatggttatagggggagagatcataggaatgctatggaaagaggcctgaagtcagagccagctagtggttattatttattaattgcctgtgaggtgccaggcgcacatattagaccatatgtgattgcagtgagccacccggatccccttcaagctgctgctgcagctgatggaagtcctattggcagacagccttctctcatcagccccttcaggacttgcctcagttgcagagagctgccttccccaagatcacacccttccctggggactcacaaccaatggctgatccagaagaatccataaagcccgtatcatttcagcccaatttaggacagctttgttgagccattagacctacatgcagcccaacctctccttctacccacttcttctttcttccctttccttccacggtgtctgttccaagcacttgccttaataaacatgtaacaggttaaa

SEQ ID NO: 225040 - DNA, 1000 bp, Homo Sapiens
ttcttttccttctttctgtcttttctaatacaaggcttgaccactggggtaaaattgtcaaaatgtaaaaaggagataattaaaaaataaatagtacctaagtagtatgctaaaatatacatggggcaagataatctttgcattttatccttgggtgcattctggaccactttaatcttttttttttttttttcctaagacagactctctctctgtcatgcaggctggaatgcagtggcaccatgatgactcactacagcctccacctcccaggctcaagtgattaatcttaaatagtgcaattattctatttaatcacaaatgtcagcatctcttttctttagttttggcacatgattttcaccttttatcctctctctctctctctccatgcttcattatattagttccctaggctaccacaacaaattgacacaaactaaatgacttcaacaacagcaatgtattctaaaacagttctagaggctagaagtcctaaatacagtggggccacactcgctctgaggtccctagagagaatccattctgtggatcttccagcttctgggggctgccagcattcctttactcatgccagcattcctttaccccagcttctgggggctgcaccactccaatctctgctccctggtcacattgcctcctcttctgtgtgtcaagtctccctctgactcactcttaaaagaacatttgtcaggccaggcacagtggctcatgcctgtaatcccagcaatttgggaggccgaggagggtgaataacttgaggtcaggagtttgagaccagcctggctaacatggtgaaaccctacctctaataaaagtacaaaaattatctgggcatgatggcaggcacttgtaatcccactcctcaggaggctgaggcaggagaattgcttgaacccgggaggtagaggttgcagtgagcagagatcgcaccactgcactcctccagcctgggtgaaagaacaaggctccatct

SEQ ID NO: 225041 - DNA, 1000 bp, Homo Sapiens
aaaattctgaggtggatctgtagcacaatgggcttctagtgacaaatcaaaattctgatctttaaaatgtatgcacaatttacctgttaccgcctggcctaagccatcctgctgttactgctgtgtagcaagttgcagccaaagcgacctcacacggctcctgaaggtcaagaatctgggagcagctcagctggatggctgtgactcggggtctcatgaagtggccaagatgccagctaaggctgccgtctctgaaggcttgacctggcgaggatttgcttccagactcactcgcgtggctattgacagaaggcctcagttccatgccacatggcccgttccacagagcagctcacagcttggtagtagctggcttccccagagcggtatctgcgagcagcgtccagatggaagccatggtgttcccttaaaacctgatatggagggtgattccccatcatgtctgtattctgtgggtcacacagaccaaggccggtccactgtggaaggcaaggacgaggttgccagtgcccggcggtgggtggccacagccagcctccctgccagtgtcccccacagacaagttgtccctgtaagacaggtcagctcaggtcattccgagctcagaccttccaacggcgtccatgtccctcagtaaaagccagagtcctaaaggcctcttgcctgctctggcctcctctcaccattctctgccatcctccatctgcccctggtgtccctgaagtcttgaacatgccgagcacatcctgcctcgtatgcttcctggcctggaatgcacttgccccgggacaccctgtgctggctttagtgtttccttcctgtctcctcaagtcaccttattatcaaaaggactccgacaggctaagtgtggtggctcatgcctgtagtcccagcactcgggaaggccgaggtgggaggatcgcttgagcccaggagttcaggacctgcctgggcaacatggcaaaactttgtctctctt

SEQ ID NO: 225042 - DNA, 1000 bp, Homo Sapiens
gtcagaatgactgatgagtgctcttcaggtgtgaatcatggcaatacagtgaaagacagtgatttactgcttttgagggcgtgcatgtatatgattaacggatggaagtgcaggactccaagatttacttccttccctttccagcagaattacctgagacgagtaaaatctactggtggagtcactccattattcttatctgtggagatctagatcttgatttgaaagtttctgagaaaatcttcagctcagacttgagggtcaactttaccagctgaaggatctgcatttactgctcaaccacatctaatttgatgtcctctgcagatttaaaatgtgtgccttcttttccgtcaccaagtcatccctgggttactactgaacatccttctcaattccccccgacccatggatggctgttctccattgtctgtttcaccagatgtcctcaaaacaaacagacagaagaaggaagtggctaatggagctgtggagtccaagtgtgactgccaagaggaatccagcaaagccaaaaagcccaagcatgtagccctgcccgaagcacgccacacgcatggaaaacccagaggaaatgagtgaggatcaatgggaagaagagagccagccaggaagttgaagatttgtccaggagcagatagctgaagagagagagagagaagagagaacggcttacagctcaggtcctctctccatgcttaggaaccactacaaatgctactgccttgagtctcattttgtttccctctggaaaccacatgtgtaccttgtttgcaacagtatggggcaccgaggaagagaaccaatggcagaggccacatgtgcaagcaagatgggagtctggagagcctcaggctaaatcacgagtgctcagccctctcctctttgtaagggcaaccgggtcatatctgccagcatagaactgctctgtccacagccctaaaatctaatacctagaacaataaatgcacttaagcacgtc

SEQ ID NO: 225043 - DNA, 1000 bp, Homo Sapiens; identical to SEQ ID NO: 119317

SEQ ID NO: 225044 - DNA, 1000 bp, Homo Sapiens
cgctttcctttccgggctgctgctgggctatgaggtgctgcacgccctgggctacggcggccaatccggcctggaagggccctggccctggtgggccttccagctaggcctgcgcctgggcgaggtgggcgtcgcgctcccgttggcgctgctgggcctctacccggcgctctgcagtcctcgcgtgccgccgcgctgctgggccaagctcttccgcttgtccccgggccacgcggctccgctgctgccgggaggctgggtcactgggcccccagacaaggagcccctggggagcgccatcgctcgcggggacgcggagctgctgcagctgtgcgcgctggcagggccaggcccagacctcctactccagggcggaggttgccggggcttcgaaggcgcggcggccaacccggccccgtccccggcttcctctccctgcagcgattacaccgtggacttccgcccgccctccccaatcaacctgcgacgcagcatcgaggaggccctctgcagcgaggccctgcttgcgcctggcctcttccagggccctgccttcgaggacgctctgcctgggctcggactctaccgcaccgcctcgctggggaccgggggcagggccagtgagagatcaggggaggcctctggccccgctgcgcccccggagctcccctcccctggggcttggcccgcaggcagcagcgtctcatctggctcgttctgcggactctcgcgggacagctcgtccatgctgctgtgttccagccccgacaggcccccgcgctgccctctggtctgcgtcctcagtcccccgcggccctcaggaagcagccccagcctcccggcctcaggatcctaccaggccctgtccccaccctctcgcgactccccagagcctgcttctgagctgcaggccgaggaggccttgctgcaggagcagttcctggacgcctgccgacagatcgacgagctgagcgtgggcagcgacaccatagacctgtga

SEQ ID NO: 225045 - DNA, 1000 bp, Homo Sapiens
ttccctctggttggtccccctgtgccacaccgcagcctgcgcctggccagcttcccgtccctgcgagcacagcctgcgcctggccagcttcccgtccctgctgcgaccccattactaggtcatcgtctcatgccagagaactcgcaggaatcgcatgcaatgtttaacgagaggcagaatgtgggcaccaggtgtgaagcagtccccggctgtggacgggagactccaggctgcgccaggcagggcgccttcccctggaccttgaagggcacccgatgtcctggggccgtgaggggcggggtgcttatccatgtgacaggactcttccagtagcaacagggagggcccagcaaaacccgcagtttgtttcgggccacgttccaacaagtgactcggcggcgtctcccacctgcacactcagtcaggaggctgcagtctcccgtccagccccacagcctgagggattcctgttggttacccagaactgcctgccacaggtgccagggcaagagatgtcactcaattttccagcccccagtcctgtagacatcctgggtgtgcggcacacatcggctcactcacactgaccctctgagccggtgagaactccacaagaagagggccagcgcctcacaagatcaaggcggaacaacgcgtttgtgggatgatgaagacctcataacagacgtgccagtgggttgattactgtgaaattctcaactgtggtttctgtaacttaaaaaaaaaaatttccactttgggaggccgaggcgggcagatcacgaggtcagaagatcgagaccatcctggctaacacagtgaaaccccgtctctactaaaaatacaaaaaattagccgggcgtggtggctggtgcctgtagtcccagctatctgggaggctgaggcaggagaatggcgtgaacccaggaggaggagcttgcagtgagccgagatcgcaccactgcactccagcctgggcgacagagcgagactctgtctc

SEQ ID NO: 225046 - DNA, 1000 bp, Homo Sapiens
aaaactcaactgtgcaaaacaaaacactcaaattttaaaaagcacaagattctgctgggatcatctggcagcaggggcagcaggaaagacgtaatagagatttcaaagcaggctgaggaggaggacagggcattccagcctctgtggttcagcaatctcaccactccacaaccgacggtggctttccagcacagatcttcacggattgcagcattcaggacctgagtccatgcccatgcagaggcccattgcagtgtttgcttagcatagctgcatttccagaatgtaggcaggagaagctgtaaaagattctcaccctgccatgcacactgatggctcacattctaaagagtcaggagtcattttggatttgggctgacctggtagacttctgaaagacagtgctctgggttcaagttgtcctcagggctggatgatccatagcaaatatcccctgatggataagcattgtgctgagagacttgcctccatcagctgtgtaaacctcaggatgacctgcacacaggtatactaaggcacacagagaccagctcgtagtcagtgacaagtaacttgccaagagctgtggtttaaaagcatgtctgcaaattcttggacactcttgtcatccagaaatagagtctaaccctcctcccttgaatacgggctggcttcagtggtggaaatgacaatgtgtgagtttgaggtttgattagaaaagatgacacagcctctgcctgactctcaaggcccttgttcttggacattagctgccatgctgggaggaagcccagcagccacacagagaggccacgacagccgaggtcccagccaagccagcatcaactgcccaacacgtcaatgagtgatcctgcagagcctcccatctcctagccaccgcagctgatgctctgagagcggaggcaagctgtccttgctgggcgctgcttaaactgcagatgtatgaacaaaataaaaatggtggttattttaagacact

SEQ ID NO: 225047 - DNA, 1000 bp, Homo Sapiens
aacctaaactaaaactaaaatgctttctgcaaagaataatacaccaacataaagtccgggtatcctaagcatgtggtgtgtatggtgtctgaaattgaatatgctgtgaaactgcctgtgtcgaaatgcagtgtttcccaagacctggaggctctctccagctgctgattgtgatcacctctcccgatcaccgctgagccctgcaggtcaccttctcctgacctattacaccactgattgcttatgctgggcacaattttatacccttgctgttgttcagtctaatcatccctataaccctatcggatcattcccatatgacagaggagaaaacctggggacacaggggctgtgtcctggccaaggccttgcttgcagcaaaaggcagagctggggtctagccaggagccccagcacagtcctgttcttcccccactaaactgagctgtgaaatagatcatggcggtctggaaaacgagctaattccgtgccgatggaggtgttgatggatgtccaccactctccacttgggaggaggccttaacatccccctcaggtctagcttctctctgtgactgagtaccttgggaaagtgggctcagaggaggaaagggacttacttgcccaagggccacagctgccaagtggcaggtaagggaccgttattctcctgtccctttcacagaggacaggaggaaagtgaggacaggtggggtacatgagtttagcctcttttctgcagcaggcccagatcagctttgcacacggttggtgctgacctcaaatgcagccctagaggggcctatctctgccctgagtattgaggtgcaggcttcttcccctttgttctgtccatttccaaaaatgtgaacacacacctcctacatgtttatattattgtgtgcatagatactaccattgtaacattttttgcggattaaaaatgcactattgtattgaaaatttcaaaggaaatgtgtaataaaacatttaaaattaa

SEQ ID NO: 225048 - DNA, 1000 bp, Homo Sapiens
gacctacctgtattaaaatccgtggggtttcagaaagacccttccgcagtcattcatattcaaatcaaggatagggcattttgatgaaaataccccaccaaactgctgtttggattggacaaaactgtagttcaggttagaattactgttattttaaatagacatcttacaaccttgtggtaaagtaaccttagcctgaatcgcccctgatctttctttgtgtcaatttacagaattctgaattacagatgaacaaagcggtgaagttttcttttaattttaaacgacaggtcttgaaatggctgtaagttgagttctgcgactccatctctttaatgatcggctcagagtggtgtatagttgatgatctgagacttacatatgtttcaatttctaatcaaataatttatcataccattggggagaaggacgccttaggaattttcaacacagaggagaaagaacatttttgtcttttggagcaaatgttttgccactttttccccagatgtccccgttagatgcctagaaaagatgcattgttgacgaataatacatgatttatttctcttttatgtctacaggtggcagtgtagaagccagaccgggagcttccagaagtggtttctgaaagagtcaaatgtacatgagtaagcaagcacaggaatctgaaaaaccacaggcccactaatttgcctgcttgactaaaataaggacgagttatgtgctgatgagagacatgtttgtaatgttattcgttgtgacacagttcaaaagaatttgcctttgattctcactaaaatgtaaagttttgcatattaagatcctttttcaacaactgagcaactctttataatgaagggcagaagacgccaaagggaagaaaatatttacctttgtgggcttttactttctttcctgggaatggtaggccatagctattggtatgtttttttttgttgttgttgttgttgttgttgttttttgagaaggagtctct

SEQ ID NO: 225049 - DNA, 1000 bp, Homo Sapiens; identical to SEQ ID NO: 119329

SEQ ID NO: 225050 - DNA, 1000 bp, Homo Sapiens
atgtggtgacctcacctatccatctccctcaaggcagcttttgcctcagccaagatgtctcaccccactctctctgatgcaacaagaagcccctggagaacgtttcagtcccattttgtacttctgtcatgtgctcatcacagtctgggtccccaacgccggagccatgatgaaggcctctcctggcccagctgtggcctcacattggcctccccaggccacgtttccgcttgcctcgcggcagccttggcaagcccagctcctgcctgccgagggcctcttaaagaggctcatctcgtgcctcgccgtggcctccccaggccatgctcccacctttcggcagcctctgcaggcccagctcctgtgtcccgatggcctttttttgcctggctttgcctcaccgcggcctcttgaggcgcagcttttcccttctggcgacatctccaggcccagaacttcctcaaatcggcctcccccggcccagttgctgcctgccggcctcctctccgggcccagctatttgctcatggctgcgcccacaggcccagctcctgcctccaaacagcctcctttgactcggctcctgcccagctcctggcaacctacatcggcccaaagcctgctccagtccagctctccaggcccgcctcttgcctcgcagcggcctttccaggcccagctctcgcctcgcggcagccttccacgaccccactcgtgccggccttccacgacccccctcgtgccggcctccgggcagcctccacaagcccagctcctgcctcatgctggtccctgtaggcccagcttgtgccttgcggtggcctctccagacccagctcccgcccaccccgatggtgtctcccggcccaaagctcccttactgaacgatgacccctctagacccagctcctgcctgctgctgatggcctctgcgggcccacccaaagcatcccgaagttggcttcaccaggcccagctcctgcctgttgtaggcccctag

SEQ ID NO: 225051 - DNA, 1000 bp, Homo Sapiens
tgaggaactgtttgaaaacctggcagagattgtaaaggccaagattatgaatgaaactagaacaactcttcttgatcctgattcctgcagaaaggccatactgtgctatagtgaagaggacactttcgtggattcatcggtgactccgggctttgacttccaggagcaatgcacccagaaggctgccgaaggatatacccagttctactatgtggatgtcttggatgggaagctggcctgtgtgaacaagtgcaccaaaggaacgaagtcgcaaatgaactgtaacctgggcacatgtcagctgcaacgcagtggcccccgctgcctgtgcccaaatacgaacacacactggtactggggagagacctgtgaattcaacatcgccaagagcctcgtgtatgggatcgtgggggctgtgatggcggtgctgctgctcgcattgatcatcctaatcatcttattcagcctatcccagagaaaacggcacagggaacagtatgatgtgcctcaagagtggcgaaaggaaggcacccctggcatcttccagaagacggccatctgggaagaccagaatctgagggagagcagattcggccttgagaacgcctacaacaacttccggcccaccctggagactgttgactctggcacagagctccacatccagaggccggagatggtagcatccactgtgtgagccaacgggggcctcccaccctcatctagctctgttcaggagagctgcaaacacagagcccaccacaagcctccggggcgggtcaagaggagaccgaagtcaggccctgaagccggtcctgctctgagctgacagacttggccagtcccctgcctgtgctcctgctggggaaggctgggggctgtaagcctctccatccgggagcttccagactcccagaagcctcggcacccctgtctcctcctgggtggctccccactctggaatttccctaccaataaaagcaaatctgaaagctcagaa

SEQ ID NO: 225052 - DNA, 1000 bp, Homo Sapiens
cagtagctcctaaggactaaaactgttcagcccagcattcagctctttggaggagtccatctgtcccccagcacatccaggagtaaggattccgactggtccactcctcatcctggtgtcttcagcttctctgctgccatgttctttgctgggatggctgcttcccaactccacctccagaatcaaggatattcctccaagcccagctcgaatgcttgatctgcctggagccttcctggtcatccttgggtgacctggagctggtgctgttagagcacttctgctctgccctgatgtgcagttgttgtgaatgggccactccatagtttatccttcctcacacccctggggcatagtaccctattcaagtttgtccaatgagtgcatgggtgaattaatgaatgaatgaacaaatgagtctttgccctagacaacttaaggtcctcactctgcattaggagcctccatttttctccagatggttgaaataaccagcctctgaaggagccaatggtttggtcactgctctctcagcaaattacagtcactgtcacttagcatggagagtggacgttgcacatcactgtgaaaccttgcagaggaggagagggcaggttcatcagaagaaagaaaggacaaaatgactccttatgaagcattttgtgccttctgtgagaaaacatgtatttagatcagataaactctagtcaaaatacaaaaaggaaaaatgaaagacctctgaaataggaacaatctcttgaagaggcaaatgactcaaaactgctcagtggctctttcagaaaatctaagtaaagttccctgacaacagaaactgaagagattgcctggttcatcttgtagtcttccaaaacagcagataatttctgaatctcagatgttgaatcagtgcaacgggatggatttcttgttcctaagtgttaaatgatcacatacataaaagagtctgagcctgagcaacataatgagaccctgtctctac

SEQ ID NO: 225053 - DNA, 1000 bp, Homo Sapiens
ttttttttgtttgttttttgttttgtttctgtttttgtttttttttaaagttggaaatagaagaatgagaaaaatctataatcaggccaaacttgagaactttcctgtgcttcagcactgtaattctgctgacctaatgttctcaaaagaggcacttttactttctattgtgcatgtatgattgttgttttttgcttttgagggggcttttgtgtttgtaataatgaagcagaagaaaagtgcagtagtagataaatgatcacaacatgttatgcaattttattttataaaattttaaggggaaaagtttaactctttgtaaatcatttcttagctctggtaaaatgcttatattactcctctaaaacatgctcaattcaggcctttgtctttgttaagtgccttttttctttcttttttcctctcttttgaaactgttgtcacattatcttaaagtacagactgataagtcaggggattcaggaggaagaatctcacacttgtcaacatcatgtcatgctgtgtaaccctcttcctttgctttctatgtatatggatatatgtgtaagatacatacattacatatatataaaactaggagctgctgtaccattgcatcctttccaaacactcccctttccatgtttgcaaaacttctgccttgtttattccattgcttttagttgattaaagtgggtggattagaaaagtatcttttcggccgggtgcggtggctcacgcctgtaatcccagctctttgggaggctgaggcaggtggatcacgaggtcaggagatcgagaccatcctggctaatatggtgaaaccccgtctctactaaaaatacaaaaaattagccaggcgtggtggcaggcgcctgtagtcccagctacttgggaggctgaggcaggagaatgacataaacccgggaggcggaagttgcagtgagctgagatcgcgccactgcactccagcctgggcgacagagcaagactccgtctc

SEQ ID NO: 225054 - DNA, 1000 bp, Homo Sapiens
gaagaatccctcagagcaggaggccatcctgtgagcagccgtgagtgggtctctgtgggagtagttctggagctgaggtggaagctaggggaagcaactcgccctctccacgtcagcatcagcgtgctccgaggacaccggccagtgccttccttaggtggtgggaaaggggggtccctgtgcagcggggccactgagaatgctgtttgtcataaaatttgcactacccgatttctcaaggggcacaggcctgctccgttcccctttgtcagccaatggccaagaaggaagaagatgactgccatcttattcctgaacttcctcattcaggacccccgtggaaacacagtgagcatccttatcagaggccctggcccaggctggcccctttgctttgtttggagaggctggctgagtttcagcccctagtgctggagacccccttgttggagaggcttcctgtttatgcctcacaagaagaaaaaccacagggctctgggaggggaagaagcatgcactcccgctttggctggagtcccagcgcttgtcgccaccctcctccttgcctgtagtcttgacagcatccgtatgtacgtgtcctggcatttcccctccctctccctgatgactgatacccaccgggtctgacattccaagtaaccagtatgtaactggtagtttgatcccaatagccatagcgactccaggtgggagtgagggagcccagccccctgtcctggaagataccttagagtatgtgaccgcgctccagacccttgcttctctctcctgcagaggatgagtttctagggtgctaagtacctatcagaacagtgtggaggggcgggtccctcatacaggtgtgtgcttagccaaatacagtaactgtgactggcccagggatgttctctcctctattttcaaagatgaaaggaggttttaaaaaccatgtttgattcctaaccttttgctacctgaataaagcagagtctatttcaac

SEQ ID NO: 225055 - DNA, 1000 bp, Homo Sapiens
gcattcaatggaatctgactttaatgattaaaaatgtcagggtatggtctacaccagtttctaaaaagagattctcattgtctttggtgacaatcaagtgggtaggatgctacaaatccccccccccaacccccccggacccaaaactctttgccatattgttacttagttgcttaaaaagcacattatgtgtttaaatcattctcctgactcttcagcaggaaacaattcttaaatttaggaaaatttaccaaagctaaggggaagggctttccatgccccctccccacctaaactctgattaaaagttagtgagttaatgtcacttaattacttgggtgcttcttttttgtcttgtctgtggctgcttaagtctgatggctcctacataacccagcgaactcgcacccgagctgacacacgatggaaatagaactgaataataattaacactattttccagtagggtaggacaattgttatttaaaacatagtccctatagctttatttaaacgtatctagttaaggttaatttggcatttaaagtagtaaatcaggaacattctcctaacttggattttcttgggaaatgcactaaacaggacaattattcctgaaaacctagtgaccttcacaggaacatggcgggacctgtgacactaagtaagcttcagtgaaaactgttcacggtcgtaaccgtagaagtgttgccaaatctgtttccatactctctttgatcatcatcaaacattctcaaatgtaggcaatgctaacactaattatagaaattaagaaaatgtgggctcctgtttgtaactaaacggacgtggggaggtgcacctcctgtcactgaggggtgcctttcatggacagtgatgctttgctttgaatggagagggcgaggaaccttgacttacagtgactatctaaggttgtgataaatatggcatttcaggtttttttcttggatttcccattaaaaatagtcttgtatcttgc

SEQ ID NO: 225056 - DNA, 1000 bp, Homo Sapiens
ctttcaagatattccatattctgattggtgtgagcagactatccataatcctttagaagtggttccctctaagttttcggggatttctggatgcagtgatggggtgtctcaagaaggctcagctagcagcaccaaaagcacagaattgttactaggtgttaaaacaattccagatgatacaccaatgtgccgtatactccttcgcaaagaagttctaagattagtcattaatttgagtagttcagtttcaactaaatgtcatgagactgggcttttaacaattaaggagaagtatcctcaaacatttgatgacatatgcctttactctgaggtttcccatttgctgtcacactgcacattcagacttccgtgtcggaggttcatacaagaattatttcaagatgtacagtttctacaaatgcatgaagaagcagaggctgtgttggcaacaccaccaaagcaacctatagttgatacatctgctgaatcctgacctcatatttatgatggatatagatacatactatatatattcatatttgtggatttcctaaaagcctcagaaaatacgactgactaggcagcaaagacaggagtatcttctgtacactgttccgcagttactggtacatgaacagttggaactgctgactttcctaaccaaaacaacttccttctctcctttgttgagccttttgaggggttcatgattcattaccacagttttaagagtttcagttaccattgtatgcaagagccaagcactgaatacctacataggttttctattttctttcattttaaaagcataatgacagtggaacaataatgggatatgcagaagcacccttcacaagttatttctgaatgatttttagggtaaataatacagatgccttgtttgttaactaacttgtggaaagcaggaatcagtgtctctaaggctgcatcctattaccacaatggggtgtgctataactgctggtattagagagggaac

SEQ ID NO: 225057 - DNA, 1000 bp, Homo Sapiens
cgagacctggtcagacgcagggaaccactgtgtgacccaccagtgtgagaagcaccaggatgggctcgtggtggtcaccacgaagaaggcgtgccccccgctcagctgttctctggacgaggcccgcatgagcaaggacggctgctgccgcttctgcccgccgcccccgcccccgtaccagaaccagtcgacctgtgctgtgtaccataggagcctgatcatccagcagcagggctgcagctcctcggagcccgtgcgcctggcttactgccgggggaactgtggggacagctcttccatgtactcgctcgagggcaacacggtggagcacaggtgccagtgctgccaggagctgcggacctcgctgaggaatgtgaccctgcactgcaccgacggctccagccgggccttcagctacaccgaggtggaagagtgcggctgcatgggccggcggtgccctgcgccgggcgacacccagcactcggaggaggcggaacccgagcccagccaggaggcagagagtgggagctgggagagaggcgtcccagtgtcccccatgcactgaccagcactgccgccctcctgacctccaaggagaacctcccatatgtcctctgagctcggcttccaaggccagtggaacttgtgcccctgtccaggcggctgcagctttgaacacactgtccacgcccgctttcttgtggagggtgtgggctatgggtcacctgctgcctggaggaggggcccttacccaccccgcctgcagccacctctcaggaccagccccggggctggccgagctcctctggccatgcatccagcctgctgttctggggacgtgagcatcacctgagggtctcaggaatgacgcttggacatggtgatcagctgcctggtggctgcaggaggaagaacctcactcctacctcagccctcagcctgcgctcccctcctcagtacatggccagtctgttgcataaatacacttgagcattttgca

SEQ ID NO: 225058 - DNA, 1000 bp, Homo Sapiens
tcctgggtcaacaggaagtcaccacggagctggacagtcatggttggatcttatcgtggaagcgtgagcaggactttgacctgcagttgctggaacgggtcgtgcaaggggaaaaaaaggacaaggaggagaatggctggttgaaagtgcaggccatgcctgtcactgagttggacctggagcctcaagactatgacttggacatcagcagagagctgtccaaaccagagaaggtgtcaatccctgagcgctacgtggagctagatcccgaagagccacccagccttgaggagctgcaggcgcggtaccgcaaagccgagaagatccgcaacatcctcgcccggtcaagcatgtgcaacctacagccgacctcaggccaggaccagaacagtgtggctgacctggacttgcagctgcaggagcaggagcgcatcatcaacatctcctacgccctggcctccgaggcctcccagcgtagcaagcaggtggcagcccaggcagtgactgacccgtgacccagcatgcaaagaagcctggagccaggggcccagtggaaccagcttcctccaaggagatgacctttctgcccccaaggaaaccccttccagctgagcagggaatccggccggaggaaggagcagcttaccgactgcgggtgttcaccacaggccaggccctaatatgcacccactagtttagctcagactcctctctacatatgaatggcaaaggcacttttgatatacactgtaaaatacactgtattttagaatcggaatctattttctaatgttcccctcaagggctgagtggcaggaaggttgaggatgcaggactttgcagctgcacgtacagattcaggtacttctgggtgacaggtgttgtgggggcaggaagggcggggcaagccgaggctagtccaacttccaatgacctcaggagaaagtgagatttaaagaggtgttcccagtagactccagcaagaggctggttggcgtgc

SEQ ID NO: 225059 - DNA, 1000 bp, Homo Sapiens
tgctgtgcagaagtttcaccgggagaagtcggcctcttcctgatgggcaaccacaccaccgcccggcgccgtgcccttcctttgtcctgccctctggagacagtgtttgtcgtgggcgtggtctgcagggatcctgttacaaaggtgaaacccaggaggagagtgtggagtccagagcgctgccaggacccaggcacaggcgttagctcccgtaggagaaaatgcgggaatcctgaatgaacagtgggtcctggctgtccttggggcgttccagggcagctcccctcctggaatagaatctttctttccatcctgcatggctgagagccaggcctcccgcttggtctccacaggaggctgtggcagctgtggcatccactgtggcatctccgtcctgcccaccttcttaagaggcgagatggagcaggcccatctgcctctgccctttctagccaaggttatagctgccctggactgctcactctctggtcttaatttaaaatgatcccatggccacagggctcctgcccaggggcttgtcaccttcccctcctccttcctgagtcactccttcagtagaaggccctgctctctatcctgccccatagccctgcctggatttgtatccttggcttcgtgccagttcctccaagtctatggcacctccctccctctcaaccacttgagcaaactccaagacaccttctaccccgacaccagcaattatgccaagggccattaggctctcaacatgactatagagaccccgtatcatcatggagacctttgttcctgtgggaaaatatccctcccacctgcaacagctgcccctgctgactgcgcctgtcttctccctctgaccccagagaaaggggccgtggtcagctgggatcttctgccaccatcagggacaaaccgggggcaggaggaaagtcactgatgcccagctgtttgcatcctgcacagctacaggtccttaattaaaagtgtactgttggtt

SEQ ID NO: 225060 - DNA, 1000 bp, Homo Sapiens
cggctgctttaagaatgatggccagcttttcaaccacgcctgggagggtggagatgaagaggacatttcactcactgcatatgttgttgggatgttctttgaagctgggctcaattccacttttcctgctctacgaaacgcactcttttgccttgaagcggcattggacagtggtgtcactaatggctacaatcatgcaattctagcttatgcttttgccttagctggaaaagagaagcaagtggaatctttactccaaaccctggatcaatctgccacaaaactaaataatgtcatctactgggaaagagaaaggaaacccaagacagaagaatttccatcctttattccctgggcaccttctgctcagactgagaagagttgctatgtgctgttggctgtcatttcccggaaaattcctgacctcacctatgctagtaagattgtgcagtggcttgcccaacagatgaattcccatggaggcttttcttccaaccaggtgattaatgtaggcctgatattaatagcaatatgcggggaagaggggctcttctctaagaatcaaaacactgtcacctttagcagtgaaggatccagtgagatccagtttaacggtcataaccgcctactggtccaacgttcagaagtaacacaggcacctggacaatacacagtagatgtggaaggacgcggttgtacatttatccaggccacccttaagtacaatgttctcctacctaagaaggcatctggattttctctttccttggaaatagtaaagaactactctttgactgtttttgacctcacagtgaacctcaaatacactggaattcgcaataaatccagtatggtggttatagatgtaaaaatgctatcaggatttactccaaccatgtcatccattgaagaggtaaataatagaagcctaatctttcatcacaaagacagctacatagagtataaagataaaataaatacttgtttagccgtagtttag

SEQ ID NO: 225061 - DNA, 1000 bp, Homo Sapiens
gacaaaaccactgctcctggacctcctaccacagtcactgcttccacaggagtcaaagaaacttctgaaactggagtgcaaacaggctccaccttggttacagctggagtgccaacaagaccacaagtatcccagccagaaaccactgtcgtggcaaccagagaagtagaaaccgaaaataaaacagaatgtctagcctcacttccaccagctccagtttgtcacggtccattgggagaagagaaatctcctggagacatatggactgccaattgccacagaggtacctgtactgatgcaaagactatagactgtaaacctgaggagtgcccttctccacccacatgcaaaaccggcgagaagcttgtgaagttccaatctaatgacacctgctgtgaaatcggatactgtgaaccaagaacatgtttatttaacaatactgactatgagattggtgcttcattcgatgaccccagcaacccctgtgtctcctactcctgcaaagacacgggctttgctgcagtagtccaggactgcccaaagcaaacctggtgtgcagaagcaaacagaatctatgattcaaaaaaatgttgctatacatgtaagaataattgcagatcttcccttgtaaatgtgactgttatctacagtggttgcaagaaaagagttcagatggcaaaatgcacaggggaatgtgaaaagactgccaagtacaattatgatatcttactcttggaacattcatgcctttgctgccgagaagaaaactatgaactcagagacattgtacttgactgtcctgatggcagtacaatcccttaccaatacaagcatatcacgacctgctcttgtttagacatatgccaactatatacgaccttcatgtacagttaatgctgacatcaccttcccagttttaacaggcctggtatttattttataagtgaggaaaaataatcatttaaaaagtgagaataaactaaacaatgtgagaataact

SEQ ID NO: 225062 - DNA, 1000 bp, Homo Sapiens; identical to SEQ ID NO: 119339

SEQ ID NO: 225063 - DNA, 1000 bp, Homo Sapiens
gaagaaataaggatttccagtcattaaacaaaactaaacaatcttattagatgggtgatgtgtttcaaaggatacttgctattttttgaagaaataaggatttccagtcattaaacaaaactaaacaatcaaatgttctatattaggaatctcaagtatggctttttttaaaaaacctttttaacatcttgatgtcaaggattataagtatggcttttcagaattgttttgtttgtcattattcttgcctttaaaattttaactcatcaaagtgaagattagaaataaattttagaaaatgtagaatagtattgattctgttcctgtaatagaatctcagtggagtttttttgcaaaactaatatggatttcatctgattttattatttcttaaattttagattttattgagtaccatttatatgattgtacaagcattcactctttactagcattttttgtttttcagacaagctgaagtggttttattaagatttggtaatatttaaatagcaaccttctctgcctttttttttttttaatatagaattttgaccattttgactttttaaatgcctggcatctttaccaaccaagtaaactggaagatctgttactggtagaacaggttgaggagacagtaggaatttgtaaaaagtcatttgatttataatcaacactacaaatactatgtgttatttataaaatcataaagaacacttttgtcagactccaaaatttgtatatacttccaggccataagagttgatagtattatttatgactttgtagattaagttatttatgtatgaaacaaagcaggaaaatatattgagaagggatcgtgtttacagaggacttctttaaagtgtcacatttttaaaatgtaaacatatttttaatgcatacttaagtaatatttaagaaactaaacaaaataatgatacaattgcagtgttgtgcttgttgtcaatgacaaaaataaaaccattttggtggt

SEQ ID NO: 225064 - DNA, 1000 bp, Homo Sapiens
acatgactacatgtcccagtacacaaaagggcactggttggcgttctccttaatgtatttagtaaagatcagaagaaatcctttaagagtttaaatgcccctggaacaggcatatacaggctctagtcaagaatgaattcgagtgaaggaaagctgtgtgacacctggcattcctctgtgttcatggagcttatttgaggctagaagatggattttaccatctagacctctctggctaatagctagtcttcaaccatctgacataggaatttacttcttttccttgaatggagaacactttaaaaataataacaaacattattataaactaatatatgtgagagtacttagttgaaacaaaaaggagttttagtagacagtattatactacatttgaaaatcaaggagcagtttatgcaacgtaaaacgtttacaaactgcagcacaatctactgttcgtgaatgtcaaagtgtcatgaggaaagtgtctatacaatcacagagttatatttcctcacaaagttctttacaaagagtgaaatatgtttttatacctctcagtttcagttagaggcatattttgtgtaatatttatggcttaaaatggactaaaggtcctgttcttgccttgtctgaacttgccgcttttgcattctttgagttcagtttaaagacagttactttaagcccattttaaaccctcaggctagaaatcgtaccactgttaattagccacattatttggtctaacagtttatcattctgaaactgagcttacctaatacattgataaattatttcaaaggtatttttatagttcaaatcgcttcacttttaccctgacacgtataaatgactaggaatgaccttcagatagcgtttagcaactgtaaccaatctgacaataatgtgttcatcaggtacctgtggattaaatcacatactggcatatttaagctgaatgtcagtctgaaaaataaatgtactatattaactcaaa

SEQ ID NO: 225065 - DNA, 702 bp, Homo Sapiens
atgagccctgtcccttctcactctggcctgatcctctcctcgggggacgcggttgtgccacgggcggggtggtcgcggggtcctgggccagtgccccgagcgcggcagaatttgtccaaactcctgatgccccagcgtcacctcttccaggcgcccggttcccccagggacagcttcaagcgactccacggtgagaaagagacccgatctaacccaggcctttcatcagagcccaggagggaaggcaggaagtgggaccacgaggcccggggggcttctaactcgtctggccagggagatctgaattggggtgaagagcagaatctccagaacaaggaggaggtggtgatcatggagacagatttggctgaaatgcctgagaaaggaggtgagaattgcggacgtgttgaacttgtagcgtggaaggacgaaattcctgctcctgaagggaaaacggttggctcaggggaggtggctcttggctggctgtctccattgtcttggggatggatgggctttttaagtgagactgaagagcttggtatgggagcaccgccctttccatggcagctgggcacacagtggacccttcaaagctacccccaaaatttctgtcttcccaggattctccccatttccaagagaagagcacagaagagggagaagtggctgctctgcgcctcacggccagatcccaggtga

SEQ ID NO: 225066 - DNA, 1000 bp, Homo Sapiens
ccagatggagccagcagcagccatggccacaaaggctgcacacaccatgaggagggcaagagaaacccagggccttgtgaagctgcccatccagccgagtcaggtccagatgctgggtctcagagccttccaggatatcttcaaactcttcagctccagcccaacaggcaccgtggacatgcacagcatgaaagttgccctgggcaatgtgggtatccagctgagtccacaggagacgttcgaggctctgcggcaggcagacttggatggtgatggaatcgtaagcttcattgacttcctgggtgtcttcgatgacaaccaccgcttggctcagtgcatgggtgaggggcaaggctggtggaggaggggtgggcctggcttagggggtgccccctcctcaccctccttcaccttttttgcccccaagccgggtgaggaacagccagctctgtacccccagggactgcagaccctgttcttggaaatgctgttcaagctgctgggccggggctttgtgccctccaagttggcacggggggtgatgaggcacccgccccaggtgcgcgcagcccgtactctcagattcctaacctggagggagccggcgggcgggggagggacacgcagtgaggggcgggacaagtgcccggaggacagacagatggggcgacactggctggtggaggggaggggcaggcgaggagcgggggcaggcccggaagaaatggggacccggcaggcggtgacggaggcggcacgcgcggagatggatactgggccagccacgaaagcctccgccccctcgaagcgggctccctcgccgccaactctagtgaagaagcagcccttctccccggcgcccgctggtttgcagaggcctgctatgaagagcttgtgcaagtaaagcgtttgctgagcggaaacaggctgcgggtggctgcggcaggcatggagccgacgcggatcttttgcaaacatctttattaatctcatataaaaa

SEQ ID NO: 225067 - DNA, 1000 bp, Homo Sapiens
atggcaccttcaccatcttgtaagaatcacttttcctcaattgtcctctgtgtcctgcctgacatggcagccttttcctggaggccttcctgggccttctttatctccccaagccatatggacaactgactttctgctttcacctttgcttgtcaactctcccttctcctcattctcttttaatgttaggccccttctccagtcttttccttttactctggtcttttactcgtttttgtatccatttttatttagccccatcacatcattgcttaaccgctgctctcctcccattttcgcttcaccctctttacagcagcctgtccctctcccgatctcagtgatgatgctctaagtggttaagagttgattccggagccaggctgcctgggtttgaacccagatctatttattagcttggtgacccagagcaagttattctgcctgtgactcaatttcctcacctttaaactggggatcatgctagttagcatttcataggattgttgtgaaatttaggtgagtgaatatatgaaacacttcatcagtgcttagcatatgtaggagagttggctgttcacatgattattcagtcctttagttttgtccagaactcatttttgtccctagctttctatatgtagaactagttttatgtcaaacccagggccaagtatgctactgtctccagaacacaaaaatgataggagggaagaggctgggtgtggtggctcacgcctgtaatcccagcactttgggaggccgaggcgggcggatcacgaggtcaggagatcaagaccatcctggctaacatggtgaaaccccatctctactaaaaatacagaaaaaaattagccaggcatggtggtgggtgcctggagtcccagctacttgggaggctgaggcaggagaatggcgtgaacctgggaggcagagcttgcagtgagccgagattgcaccactgcactccagcctgggcgacagagcaagactccatctc

SEQ ID NO: 225068 - DNA, 1000 bp, Homo Sapiens
gcctctgcccgaggacccagggaccctttcagcagagcgtcgttgcttgacacagcccgtggaggaccagggggtctccacccagctactcgcgccctctggcagcgtgtgcttctcctacaccggcacgccctggaagttgttcctacgcaaggaggtgttctacccacgggagaacttcagccatccctactacctgaggctcctctgtgagcagatcctacgggacaccttctccgagtcctgtatccggatttcccagaatgagcggcggaaaatgaaagacctgctgggaggcttggaggtggacctggattctctcaccaccaccgaagacagcgtcaagaagcgcatcgtggtggccgctcgggacaactgggccaattacttctcccgcttctttcctgtctcgggcgagagtggcagcgacgtgcagctgttagccgtgtcccaccgtgggctgcgactgctcaaggtgacccaaggccccggcctccgccccgaccagctgaagattctctgctcatacagctttgcggaggtgctgggtgtggagtgccggggcggctccaccctggagctgtcactgaagagcgagcagctggtgctgcacacagcccgggcaagggccatcgaggcgctggttgagctattcctgaatgagcttaagaaggactccggctatgtcatcgccctgcgcagctacatcactgacaactgcagcctcctcagcttccaccgtggggacctcatcaagctgctgccggtggccaccctggagccaggctggcagtttggctctgccgggggccgttccggactctttcctgccgacatagtgcagccggctgccgctcccgacttttccttctccaaggagcagaggagtggctggcacaagggtcagctgtccaacggggaaccagggctggctcggtgggacagggcctcagaggtgaggaagatgggagagggacaagcagaggcaaggcctgcctga

SEQ ID NO: 225069 - DNA, 1000 bp, Homo Sapiens
catatggcctgctgcctctgccaatttaaaaatagcattgaggctgtctgcaagacagtcaagctgcattgcaacagtgcatgtctgacaaacaccacacattgtcgtgaagaagcatctgtagggaatccagaaagagtgttcatgaaggtgttacaagcccagaagaagcacatgagcattgagctgactactgagccggaggcagcctcagacagcagtggcatcaacttgtcagtctttgggagtgatcagtttgaaattccgctaacccatcaactacagtccgtcatccccaacaacgatgtgagaagcttcatttctcatgttatctggaccttgaagacggactgctccgagacctatgtgcaagtgacctgtgccaagctcatctccaggacaggcctcctgatgaggcttctcagtgagcagcaggaagtaaaggcgtccaaggcagaatgggatacagaccagtggaaaactaagaactatattaatgaaagcacagaagcccagagtgaacagaaagagcagaagtcgagtgagctcacgaaagaagttccaggatatggctataacaacaaactaatcttggtgatatctgtgactgtaatactaacgattttgattctaattttttgtcttattgaggtattcgtccaggtggcctggagcaactgaagaaccaccaaaaaaatgaaacagccagttcctgccttcactgatgacattccaccatggtgatttgttcctgccccaccccaactaatcaactggccttgtgacattcctcccctggacaatgagtctcatgatctccccatcctgcaccttgtgacccctgccctgtctgcaagagataactacctttaactgtaattttccaccacctacccaaatcctataaagctgctccaccccatctccctttgctgactctctttgtggactcagtccacttgcacccaagtgaaataaacaaccttgttgctcacacaaa

SEQ ID NO: 225070 - DNA, 1000 bp, Homo Sapiens
cggccaggagccacatggcgcggccacacaggggcccctggccaagcccaggcaggaggctagctccaaaccggtgcctgccccgggtggcgggggcttcagcaggagcgccacccctacgcccaccgtcatcgcccgggctggcgcgcagccctcggccaatagcaagcctgtggagaagtttggggtccccccagcgggggctggctttgcccccacaaataagcacagtgccccggactccctgaaagccaaattcagtgctcagcctcagggtccacctcctgcaaagggcgaagggggcgctcctcctctacctccccgcgagcccccctcgaaggcagcccaggagctgaggactctggccacctgtgctgcggggtccaggggcgacgcggccttgcaggcccagcccggcgtggctgggcgcccccccgtcctacactccatcaaacaggagccggtggccgaggggcatgagaagcgcctggacatcctcaacatctttaagacgtacattccaaaggactttgcgaccctctaccagggatggggtgtcagcggccctgggttggagcacagagggacactccggacgcaggcccggccaggagagttcgtctgcatcgagtgcggaaagagcttccaccagcccggccacctcagggcccacatgcgggcacactcagtggtgtttgagtccgatgggcctcggggttctgaagttcataccacctccgcagacgcccccaaacaatgggtatttaaaatagtaaataagagagaggaaggaggtgacgttcaggtgctgtgggaagcaggcttggcggaggggtatgatgatgagaccctcattgttcactggctccatcgcactcctccctggggccgtgtgcctgttccattcttcccaccattcgaactgagcgaatctggcaaaggagacacgtctgtgggaatgcgtagattccgcctcggaagagagctagcgcaacactaa

SEQ ID NO: 225071 - DNA, 1000 bp, Homo Sapiens
agcagcaggttaactggttggcagagacagagggactgagggactgtcttcctccatgaagcagcaggttaactggttggcagagacagagggactgagggactgtcttcctccaggaagcagcaggttaactggttggcagagacagagggactgagggactgtcttcctccaggaagcagcaggttaactgattggcagagacagagggactgagggactgtctccccccaggaagcagcaggttggctctgtttccttcgtggggcagctggtctccagggcagcaagagagaccaagccccagtgcacattctacagcctctgtgcacatcagacttgttaatatcccattggccagtgtaagtcacttggccaagcccagattaaggagtggaaagatggaggctatctcctcctgggagaggaggcaaaggaggtgggagtattatgtggccacttatgtttgcaatctaccatacttagcactttgagaaaagaattaactgagaaacttgcttcaaatagggccagtaaaatgaagccccaattgaagtaaaatgcatatataaaaaatgaaactgtgaccgattttaaggacagtattggcaaatatttctgtgctcttggaggagaagacccttattggcatgacatgtcagaaaccacaatgaaagaattattttaacttgcattcataaaaattaaaattattcattaaaaacatcgtgaatgaaattaaaagtcaaaatgtaagccagaaaattatttacaacgtatgtgtcaggaaaagacaatacccttcaaactttgagagtttacatcagaaagaaaacagcaaatgacatgatccaaacttgataaaggacatgaaaaagagccagcacttagtatgttttctgaatgaataagtagccaacagcacatgaaaatgcgtgtaatccatttgtaagcagagaaatgcaaactaaaacagtaaagtgtcattttcacttcctgg

SEQ ID NO: 225072 - DNA, 1000 bp, Homo Sapiens
ccatacacaacactaagggacgaacctgatctcttatactagtatccttaatcatttttattgccacaactaacctcctcggactcctgcctcactcatttacaccaaccacccaactatctataaacctagccatggccatccccttatgagcgggcgcagtgattataggctttcgctctaagattaaaaatgccctagcccacttcttaccacaaggcacacctacaccccttatccctatactagttattatcgaaaccatcagcctactcattcaaccaatagccctggccgtacgcctaaccgctaacattactgcaggccacctactcatgcacctaattggaagcgccacactagcaatatcaactattaaccttccctctacacttatcatcttcacaattctaattctactgactatcctagaaatcgctgtcgccttaatccaagcctacgtttttacacttctagtaagcctctacctgcacgacaacacataatgacccaccaatcacatgcctatcatatagtaaaacccagcccatggcccctaacaggggccctctcagccctcctaatgacctccggcctagccatgtgatttcacttccactccacaaccctcctcatactaggcctactaaccaacacactaaccatataccaatgatggcgcgatgtaacacgagaaagcacataccaaggccaccacacaccacctgtccagaaaggccttcgatacgggataatcctatttattacctcagaagtttttttcttcgcaggatttttctgagccttttaccactccagcctagctcccaccccccaactagggggacactggcccccaacaggcatcaccccgctaaatcccctagaagtcccactcctaaacacatccgtattactcgcatcaggggtatcaatcacctgagctcaccatagtctaatagtctattttaccctcctacaagcctcagagtacttcgag

SEQ ID NO: 225073 - DNA, 1000 bp, Homo Sapiens
ctgttgtggaggccctggggacagctgggaggactggaggggtggtggggaggttgtggtccttattagacattcagatacccaggtcccaaatctggtccagccctggtaatcctgatgcagagggtccacaaccacatttgggaaatgttgacctaatgcacagcaggaaagcactttcatttgctaagaagtttccatatgaagggccacgcagacctgagcatgtagaaaggcaaggggccagggaagttactagaacactgactctggggttatattgcctgggtttgaatctaatcttggtcgcttactggtgatgctacccaaggtgtctgtgccttcatttccccacctgtagaaatagggataggatagtggaaggtattgaggatgagctgagaccatctgcatagagggcttaacatagtgactggtacttagcaaatgctccatgagttatgattgctggcactggcatgctctccagagtggccctcagaacaggggccctcagccaccaaatcctagacagggcttcctctgacagaggtgcaggctatgactacatggctccagggcatgccactcaccctgcagtccccatggccttgggtggtggttatcacgcttctccatcagggggcggtaaagctctttccgaaagtgctgggattccaggcatgagctatggtgaagctcttaaagaaggggtggcttggccgggcgtgctgactcatgcctgtaatcccagcactttgggaggctgaggtgggcggatcacgaggtcaggagatcgagaccatcctagctaacacagtgaaaccctatctctcctaaaatcacaaaaaattagctgggcatggtggcacgcgcctgtagtcccagatacttgggagggtaaggcagaagaatcgcttcaacctgggaggcagaggttgcagtgagccaaaatcacgccactgcactccagcctgggtgacagagcgagactctgtct

SEQ ID NO: 225074 - DNA, 1000 bp, Homo Sapiens
ccttttctccacaacttcaccagcatctgttatttttttattttttaatattaaccattctgactggtgtgagatggcatttcattgtggggttttgatttgcgtttctctaatgatcattgatgttgagcttcttttcgtatgcttgttggctgcatgtatgtcttctttagaaaagtgtctgttcgacacctctcaaaagaagacatttatgcagccaaaaaacacatgaagaaatgctcagcatcactggccatcagagaaatgcaaatcaaaaccacaatgagataccatctgacaccagttagaatggcaatcattaaaaagtcaggaaacaacaggtgctggagaggatgtggagaaataggaacacttttacactgttgctgggactgtaaactagttcaaccattgtggaagtcagtgtggcaattcctcagggatctagaactagaaataccatttgacccagccatcccattactgggtatatacccaaaggactataaatcatgctgctataaagacacatgcacatgtatgtttattgcggcattattcacaatagcaaagacttggaatccacccaagcgtccaacaatgatagactggattaagaaaatgtgtcacatatacaccatggaatactatgcagccataaaaaatgatgagttcacgtcctttgtagggacatggatgaaactggaaatcatcattctcagtaaactatcgcaagaacaaaaaaccaaacaccacatattctcactcataggtgggaattgaacaatgagaacacatggacacaggaaggggaacatcacactctagggactgttgtggggtggggggagtggggagggatagcactgggagatatacctaatgctagatgacgagttggtgggtgcagtgcaccagcatggcacatgtatacatatgtaactaacctgcacattgtacacatgtaccctaaaacttaaagtataataataataaattc

SEQ ID NO: 225075 - DNA, 1000 bp, Homo Sapiens; identical to SEQ ID NO: 119346

SEQ ID NO: 225076 - DNA, 1000 bp, Homo Sapiens
cgggccgcggcgcctcgaccagagccgctgttccaactacgacacgccggcctgggtccagacaggccggccgcccgcccgcgcccgcgacaccgcagcgccccgggaccccggccgcgagcgcagccatacggccgtctacgctgtgtgcggcgtcgcagcgctgctggtgctggccggcatcggggcgcgcctgggactggagagggcgcacagcccgcgcgcgcggcgcacagtgaccagggcgctgacagagcttctgaagcagccgggcccccaggagccactgcctcccaccctgggcccacccctgggtggctgtgtccaggtgcagatgggggacggcctcccccggggctccccccacaacagcgcaggtcccaggactccgcgcctggctcgagcgtcgcctccgggcgagccgttcatgagggtggcaccccccgggctggctgccgccgccgctgcgcgtgactcggagccaggccctgttccaggcgctggaggctgcggcgaagacaggcttggctcgcagcctcgcccggagaacggtcccccaggttctcaccgaacggcctcggggagaggactacggagaggtgacagcgagggcggagtgaaccggggcatcggaccgagccgcggcggcggcagcctgacgctgcagccagactacgccaagtacgccacgttcaaggccgccgcgctcaaggccgcagaggccgccccgcgggacttctgtcagcgtttccccgccctcgagccgtccccgcggcaacccccggcgcgggctccgcgaccatccccggacttgcctgcgccgctggacgcctgcccctgggccccgccggtaccccggcgacccgggcacgcggcccggcgccagttcagtgtgaagatgcctgagaccttcaacccgcagctccccggcctttacggcagcgcgggccgcgggtcccggtacctaaggaccaatagcaagaccgaggtcaccgtgtga

SEQ ID NO: 225077 - DNA, 1000 bp, Homo Sapiens
ccatgtccctgcaggtgtggctgaggtcatcgtcttggttgggggccgtcagatggtggggatgacccagcgctcgctggtggccgtcacctgctggaacccgcagaacaacaagtggtaccccttggcctcgctgcccttctatgaccgcgagttcttcagtgtagtgagtgcaggggacaacatctacctctcaggtgggatggaatcaggggtgacgctggctgatgtctggtgctacatgtccctgcttgataactggaacctcgtctccagaatgacagtcccccgctgtcggcacaatagcctcgtctacgatgggaagatttacaccctcgggggacttggcgtggcaggcaacgtggaccacgtggagagggtcctggagcagttctccaagaccaggggttgcctgtatgggccttccctggggggcaaggccctccttctggctgtgaaagttcagcatgggcacagtgtacgacaccatcaccaaccaatgggaggcggtggccctctgcccaaggcagtacactctgctgcagccacagtgtgtggcggcaagatctacgtgtttggtggggtgaacgaggcaggccgagctgccggcgtcctccagtcttacgttcctcagaccaacacgtggagcttcatcgagtccccaatgattgacaacaagtatgcccccgctgtcacgctcaatggcttcgttttcatcctgggcggggcttatgccagagctaccaccatctacgaccctgagaaaggaaacattaaggcgggcccaaacatgaaccactctcgccagttctgcagtgctgtggtgcttgatggcaagatttatgcaactggaggtattgtcagcagtgaagggcccgcgctgggcaacatggaggcctacgagcccacaaccaacacatggaccctcctcccccacatgccctgccctgtgttcagacacggctgcgtcgtgataaagaaatatattcaaagcggctga

SEQ ID NO: 225078 - DNA, 1000 bp, Homo Sapiens
gaacttgtgctgcgtggcctggatggttggaggcagagcttggaaaggaagcagcatctcccatcaccacctctaggactcgggggctctctctaatcttggaatggctctgagccagtccatccctagagtatagtgggactctcctggggacaggtatcctcttgagatggctctggccaggatctgccccccatccccatcactgtggggagagcgggacatctcaactctgttccttcttcaggttgcctggccacttgcactgctgctgacagtttcacaacgaacgcaaagggccaaccaggtggttgggagaagagggtcagtgacaggcctggggcaagcccctccctcccggaatcccctccatcagcaccatcaccatttcttagaacatttgttgtgtgtttactccttgtccagagcttcacatgcattactgcatttattcctcaagtcaaagctaagagggggataccaccactgggccattcttaaatatgcacacttctagcaggagttaggaccagagtccgtcccaggtctgtctgacatctgtgtcctcactcttaaccactgtgccattatgtaaatacaggttattcccaccccaagtccagggggacttatcaggtgttaaactgacgagtagccggcaggtcagcttgagctggaaagtgggcacgtggggctgtgggtgggcacgcaccaccttccttccctggcacactgcataacaccagtcccatcctcacccctaggcctcctctgtgcccaaagaagaagtggcaccttttaagactagcccccgagaacctgaagacctaccagaccttcccatcagggaagagggtctctccacaggagcggaaaaagagagactgctactttgagttcagagcatgagacttttagttcagagcagagcctgatgcctgagatcctgggtcgtgaccagcctggcttgcttggaataaaatctttagccatgaccatg

SEQ ID NO: 225079 - DNA, 1000 bp, Homo Sapiens
gcaatacttaatattcaagccagatgtgatgctagagtagaaaaccttcaagctgagtgcagaaagcaccgtctcttactagaagaagacaataaaatgttggtgaatgaattgaatcattcgaaagaaaaaaaatgccaatatgaaaaagagaaagcagaaagagaagtagctgtgagacagcttcaacaaaaacaagatgatgtcttaaacaaacgatcagcaacaaaagctttgctggatgcttcatcgcgtcactgcatctatttagaaaatgggatgcaggattcaaggaagaaattagaccagatgagaagtcaatttcaagaaatacaggatcaacttacagctactataagatgtactaaggagatggaaggcgacgcacaaaagcttgaagtagaaaatgtcatgatgagaaaaattattaaaaaacaggatgaacaaattgagcggtttgagaaaatcctgcagcattcaagtttgatgctgcaggtgtttgagagctagatgaagcatccagccaaactagactacatggagctccacagtgatcgtcttcacctccagctgtttgcatttacttcttccctctatcctacatgtgttttccttccccttcagatatcaacctatgaattgcctctaccaaaaagcctacaatattgacacaaacctgggctagtatcccttctatgtcttccaataagtgctgtcttatgcctgtcattgtatgtatgactctgtacgggaattgcctgtttgttttttcagattatagcatacagttgttgaggggtggactgtatcatctttatcttgtaattccagtgcttgtcctagtaccttagcacatggttgctgaatacatgaatgaagagtgagaaaccagaagctctgatacttaactgccatgataatgaattcagtgtgcaactatgggcaaattatatttaatagtaattgcatattgtacatatttttcattcttattaacact

SEQ ID NO: 225080 - DNA, 1000 bp, Homo Sapiens
cttccagttaggaattcaaaaaacaataaagagaacttccttggaaagtgtgtttcctccttcagagaatgttctacagcacttaggaaaaagtagtaataacaagatgatgtaattaaataggctctataaatgggctaagctgttaaaatattctactttatatccctcctttaaaatctagcaacagttgtctatacaatattaagatcttctctatatatttaaagttaaaatataatttttaataagtttttaaatttttttatttcaattttgttacttagaacattaagatgcatatttgtgatctaaagaaattgtcttgtccattttaaaaacctttattaagtcacttttaaaatgtattgaccaagaaggaggtttgttgttacatcaatgtttgtgaaatgatttccatacataaaaaatgtaatttacctgaactttgtcttaagactcttacattggattataggataacagataaataaactgtatagatacattcagtatcatacaacattttggaatgtgtatgctttcaggcttccaagataattaaattactgtcatgatacatttcatgcattttttatgacttcagtataaaacattcaggtgtgttagccttccctgggaagggtaaacttgtatgtgctttggtaaagtacttaaattccaatgttccctatagtgcttgcattcattttgtgaaaagttttgttgtattgttagaacaattttcaaaggctgattttatgccttatctgatagaaatatagaatagatagttctttaattgcttactttttaaaagtaatataatatttaagttgcatttttattaatagtaagattaacatttaagtctgcattttctttaaatgttttaaatgtttatagcattcaatgtgtagttggatttacttgactaaaaattagccctttaacgtttatatttgttgtatttatatttaataaaggcatctaatcttta

SEQ ID NO: 225081 - DNA, 1000 bp, Homo Sapiens
gcagacaggtggagccctgctcccattgccacatgcaattctgagaaaatttcccttgtaactgatcagtgtcatggaggagcatgctaggaaaacacagcaccttctaatttgaaagttcctgtctccaatcacagaaaggctaaaccagagaactgttttctggttttgcaaacatgtgatcattacatttcaatctatgctacttttattcaaaatatgcagcagtttgactttaaagttgcaaactggctaaaaacgttttactggacattcagctatattgcttagaaaagggctacatgtttctttttcatataagttgttcattgagttatgataggaatatattcataaataagcaaagaaaaatacctaattgtaattatcaaaggttcacttaaaaaattaactattaggtaaacttaagggggcagtgaaaaatctatttatgatttcgggagtaacctaaccatgaataatattagcataatgagaacatttactttttaaataaataactaaattttgtttacaatatgagtttttccagaatacaaggtttcaataatcacatgaggagtttaaagttttaaatatatactcagacattcattgtaacacagagtgtatgtaaaatcatttcccccactcactggagggagtatttattgcagactttttgttcagcaacatttagtgtttcagtgaaagttggacagttggggcttaaaacatttatttgtaaaatgagctatgttcaaatgtaaatatttgtaatttaatgtatttaccacattgactgtactaattatttagtagtcatactgtaatttttatgttaataataactggagttcaaagtctagctattggtataatcatctaatattatatatatctccagtgcccctgaattttatgtttgatgactatatatttgggcatatatcttgttggattagaataaataaaacactttatattttcatgaactcta

SEQ ID NO: 225082 - DNA, 1000 bp, Homo Sapiens; identical to SEQ ID NO: 119348

SEQ ID NO: 225083 - DNA, 1000 bp, Homo Sapiens
gtggcagaggaaggacatcctttttcagatctgctatggaatgtatggttttatggatctagtgtgcataggtaagaccatgaccttcaacgttaacacacttactgtgagaaaacggaagccaatcatgcagcatttatgtggcgtgtgtgaggtgcacaggcatcgcgatggtgaccagtcggcgaggggtagcgatttcttaagctgtaaaatatttatgaataaatatgaaatttatcaggtagtttcaagtgaagaatgtaaaactaccaagagaacaatcaaaatgtccactgaagactttagggcttatgtggtttggggatgtctgagtagactaagctctttcctggtctccctgtggagagccaagaccaccagaatccagtgtggtctgattcgggaccacttgcacagtgaagatactttctctacgggaagtggagaccacagctgccaaccaccaacagccccgtgcatctcagagctgtacaagcagagcagctgcacaccattcaaaagtgtcatcaattttcatcaaaagactttcatcacaagacttttggagcccaaatccaaccatttgattaccactcaatcaccgccaccattaccaagcctggaatctgagctcctggggtcactgaggatagccgagctttggaagttgacaggtctcattgttcatgaaggagctgcagtttacagagtgtttaagcgctggcgagctgtgaatttgcactgggatgtgttaaattatgacaaagccacagacatcgaagaaagcagccggggagagtcttccacaagtaggactttgtggttgccattgacagctctgcggaacagaaacttggtccacccaactcagttaacctcaccaaggtttcagtgtggctatgtgttattgcacctgttcaatcggatgaggccccatgaagacttatcagaagataacagctcgggggaggttgtgatgagagtgacttcagtgtga

SEQ ID NO: 225084 - DNA, 1000 bp, Homo Sapiens
gtcctccttttccatactgaaatgaggtggctttcccgaggccaaatacttactcacatttttgaaatgtatgaagaaataaatcagtttcttcaccacaagagcagtaatttagttgatggctttgaaaataaagagtttaaaattcacctagcataccttgcagatttattcaaacacttaaatgaactcagtgcatctatgcagaggactgggatgaacacagtatcagctagagagaagttatctgcttttgttaggaagtttccattttggcaaaaacgaattgagaaaagaaattttaccaattttccttttcttgaagaaataattgtttcagataatgaaggcatattcattgcagctgaaataacactgcatctgcaacaattgagcaacttcttccatggatatttttccattggagatcttaatgaggcaagtaaatggatattggatccatttctttttaatatcgattttgttgatgatagttatttaatgaaaaatgatcttgctgaattacgagctagtggccaaatcctaatggaatttgagacaatgaagcttgaggatttctggtgtgcccaattcacagcatttccaaacctggcaaagacagctctagaaatccttatgccatttgcaactacatacctttgtgagttgggattttcatcacttttacatttcaaaacaaagtccagaagctgctttaatctgagtgatgatatccgtgtggctatttcaaaaaaagttcctcgtttctcggacatcattgaacaaaagctacagctacagcagaagtcactgtaagctgatatacttttttaatgaataatttcaatcttaatatcattgtaaaattaagctgtaattctgtctctttcatatttatgatatactgaattctatgtctaaaaaacttaagaactttaattttgaatgaggcatgtgaaaatatgttttgagaataaaaacacagcagaaaagattaagt

SEQ ID NO: 225085 - DNA, 1000 bp, Homo Sapiens; identical to SEQ ID NO: 119352

SEQ ID NO: 225086 - DNA, 1000 bp, Homo Sapiens
tacatacatttatgaagggtcaatttagtttggacagtgaggtatttgtcttagtggaaaaaaggagaattagtctgatcaaatcgtgaagtaatacagtgaacttgcaggtgcacaaaataagagggccacatctatatggtgcagtctggaattctgtttaagtttgtaggtacctcttggacttctgaattgatccagttgtcatccaccacagacatctcacatcagatacagacagttccaagattgacaacagagaacaacctgctggaaagacctgggcagaaatggagagccctgcgggaaccatgctacattttcatctaaagagagaatgcacatctgatgagactgaaagttctttgttgttttagattgtagaatggtattgaattggtctgtggaaaattgcattgcttttatttctttgtgtaatcaagtttaagtaataggggatatataatcataagcattttagggtgggagggactattaagtaattttaagtgggtggggttatttagaatgttagaataatattatgtattagatatcgctataagtggacatgcgtacttacttgtaaccctttaccctataattgctatccttaaagatttcaaataaactcggagggaactgcagggagaccaacttatttagagcgaattggacatggataaaaaccccagtgggagaaagttcaaaggtgattagattaataatttaatagaggatgagtgacctctgataaattactgctagaatgaacttgtcaatgatggatggtaaattttcatggaagttataaaagtgataaataaaaacccttgcttttacccctgtcagtagccctcctcctaccactgaaccccattgcccctacccctccttctaactttattgctgtattctcttcactctatatttctctctatttgctaatattgcattgctgttacaataaaaattcaataaagatttagtggttaagtgc

SEQ ID NO: 225087 - DNA, 1000 bp, Homo Sapiens
tgatcgggaggaagagggagcagtgacattcagcgactgcggacagggcacggcggcggcatccttgtgtgggagtggggatgtcagacgcgggctggagggggaagctgccccccaggatgctctctccctgcctgcgaggagctggcgagctcagccgcgttctgggtgctttcttgggcggtgcaggcggatggcagaggggctgaggcgggaggggggcggggaagaccgctggggggcccttccccccctctcttttagccagcgcttcctggttaatgtgaatttatcttgggtcagctcagaaggctccagcagagcccctgggtgcccaggtgtgccctgggctgctcttggggtggggcctgtggttgttctcattccattgcattgcgtggctgcccaccccaggcagctcaatgactgcacaagggacaagggacagccgcagctctgctggggtctgagtcattttcgtgttcatgtaggaataattcctctcattgttaacaccctggtgattcccgcttctccctactccagacgccggagtcctagtgtcaatgacgttggcaaggttttgtcctggacctcgtcctcctccctggctggactctcacctcgatgcaggtgtgagagctacacctgcagcattagtgcagaagtgaagcctctggagagaaagcattggttgactgtgaaagcacatggggaaaaaattctgctacctaccgaactgcaggctagtgacctgggggcctacaagcaggtccagaagggacccctgaagccgaaaggcatcacagagcttggagtgaccaagcagaagaagaaaaagaagcacaaagacaaggagaaagtgcaggagaagcgacacatggaaaggatcctgaagaaagcatcccagacccacaggcagagagaggaggacttcagcagacacctggacgcacacacggagcatcgcgacacccccaaagtcagctggacccagtaa

SEQ ID NO: 225088 - DNA, 1000 bp, Homo Sapiens
ccctgtcctcagggagtgtccaggctcgtctccttcatcgcccctcaaggccacgagagtggacgtcgtgcctgaggcccggcagaagctgctctctcctgggcctcaggtgaaggaggtgccagcggcttctgcctatgccggcagaatactccatggccgactgaggcactgcctggccaggtctctggtctctgccattgtccccctgggtcactcagggcagccattgcaagacaatagcagagccagagtcccggatgccagtggcttctcgatcaatgatgagaccgagctggaggccctgtgcgctgagatcgcctcccagcacctggccacggagagccctgacagccccaacaagccctgctgcaggttcacctacctgaccatgacgggcgaggaggtggagctgtgcagccggggccggcacatccttgtggcgtgggagaacaaggacatctacgcggcagccatccggagcctgcggctgcgggagctgcagaatgtggagtgcgtgacggccgtgcgggccggcctgggctccatcatccccctgcagctgctgaccatgctcagcccactggagatggagctgcgcacctgcggcctcccctacatcaacctcgagttcctcaaggcccacaccatgtaccaagtggggctgatggagacggaccagcacatcgagttcttctggggggccctggagatgttcacccaggaggagctgtgcaagttcatcaagtttgcctgcaaccaggagcgcatcccgttcacctgcccctgcaaagatgggggtcccgacactgcccatgtgcccccgtaccccatgaagatcgcccccccagatggcacagcaggttccccagactctcgctacatccgcgtggagacctgcatgttcatgatcaagcttccccagtactcctctctggaaatcatgctggagaaacttcgttgtgccattcactaccgtgaagaccccctcagtggctga

SEQ ID NO: 225089 - DNA, 1000 bp, Homo Sapiens
tatttgtaaacagctcgcgggccagcagttggggtctgctctccgacatttctccacctactttgcgcatctggatggatcctgtgggaacctgaagaagaccaagttggaccatgtgctcttccgcatacagcctgagtggcgccatcagcacaagcctgctgccctcctccctcatgcagggccagatctgagccacgtgtccatgcagcagagcaggctgcccacaacctccatgagcatcacagggcccggctacagccacacgggacccacctcgcagggggtccccatgcaggggcaaggcaccgttggcaactatgtgtctcggaccaaaatcaacattctggctggcaaacgagcgacaccgacgcgcagagttaagtgctgggacttcccaagcctggaaagcagaccgtgtctctgcaactacgcggctgccacgagcgctgagcggccgggcatttggcctcgaggaggaggcactgtaagggcggcgcaagagggcggaacgcgggacgccaggcaccctagctcccgacggacgcagttttcagttgcacgggcgagctccgggccggctgcggagcgactccccgccgccaagtgggcggcgtggctgtcgggaaagaagggctggggcctgccgttcttcctcccgagtatcccctccagctggacgaccccacgctgcagcacgggcttccggcttctctcctcagtggccaattcgagggcacagcgggctccggaggcgcggcggcaagcctatcccgcctcccaaccacagcctccagcacccgagagaacggccgcccacagcacacgttctccggacaggagggcgaaggcccaagacctggagaggtgggctcgagggaaagatctgggtcccaccactacttcctggagacgccggggaaagcaggccatccttcgagccacccatctcttctccgattggttaactgccttcttattgcgctccgctggctggtga

SEQ ID NO: 225090 - DNA, 837 bp, Homo Sapiens
atgagggttggaccccttccaaatgtgtttaacagggcaaagacttggaagaaatcatatggatgcagtgaatgtgcagtgaatacttgtaaactactcatgaccatgcctcagagaactcatgcaggaaacaaatcccaggaatctcatgattttaggagagcccttcccagtgagttaaagctcattgctcatcagcaaactcaaacaggagtgagaccctactgatgcaatcaatgtcaaaaagccttcattacaaattcagggcttgtgtatcatcagaaaactcatcatagagaagggaaagtctgtacatgcagcaaatgtggagaagttttcccttggaagtcagaactcattttatgtcaaagaaatcattcaggagagagaccgttcatttgcaaattggatctcaacaatcataagaaaactcatcatgcagtaaggaaatcccatgaatgcagtgaatgtgggaaggttttatcctccaaaaaaaactttgttatacatcagagaacccatacaggtgagaaacccttcaaatgcaatgtatgtgataaagccttcacatcaaagggaaatctcattgtatatcagagaactcatataggaaataaatcatatgaatgctcagactgtgatagggccttctccagtaaggtatatctcatgactcatcagccaattcacacaggagagagaccctatgatgcaatgaaggtcaacaagctttcacccaaaagacaggtctcaagagagaggcctgggagagccaccgatggagggggccgtcaggatgtggtcggcgaggacagggattggcggttagtgatctga

SEQ ID NO: 225091 - DNA, 1000 bp, Homo Sapiens
agggaggaccaagggattatccaaagactccagcactggctcgccccatgcagaggaaggccctcaggctaaggccggggccgagccttgctggatgctggtgctcctgctgctggcttctccgctggccacactgcttgtcatcctctccccaacccaagggacctttgcaactctgaaatcccatcaagactacacaaggggcagagacaattcactaaaaggaaactggggcactgttaggaagtgcatgcacacacaagagaataacgaaactaacactggggtgaggacaaggcagtgcttggcggagggcgggctcaacattcgcgcatgtgcagaaagagaatgcggagccacggtgtcctcaggctaccggcaaggccgtggatctgcgtggctaacggggggcaagacaggggtcacggggctgagtgtggaagccctgcgtggaaatcgagagagccctcaggaggtcttgggggatcaaacccaaaggtttccaagagccgggctggtagatgaaggaaacaagccagatgtagcacagaagggagtggtggcgactgtaccgacaggagaccgattaattcctgaaccctctgattttgtggaagggctgggacttggtgaagctgtaggtatcgtgagtgactggcctgatcacgaggggaaggagcacccacagaatgccagggtcctcctctttggcagtggggaactattgggtgttattatagcagctatcatcaccttaatcacatcaacactgaaatatttgtttaccaaagaaaaatactttccatgctcctctgactgtgtcatccacatgagccaccaccagcagcccaaagccagttccgaagcagcagaacatttttcgagcaaaacagcactctgtgaccctcggagtgcttgttcagctgaaattacttgtgtctggcacagaccttctcttttgattttggcaggatttcagggagtgaaaaagctaggttag

SEQ ID NO: 225092 - DNA, 819 bp, Homo Sapiens
atgcagtttagcaaacgaaccatgacagcagcggtgagctcctccaagcccgctcgctacaccaggacgcgcggccaagattggccggaagggctgagttgctccctgcctggaggtggtcccatggggcccactgtctgggtcaaggatggtgcagagctggtgtcctcaaaatgcatcctggtggagccccagcagctgcaggtgctgactgcctctcacgaggaccctgggggcctgcagctgcagcgactcacccagcatgagcgttgtgggttttcctgcgggcggcgcagccggtttccatcagaaccgcccagaggcggacgctgccttcctggggtgacggagcagcaggaagcgttttcggatcctggaatacgtgggcggcccgtgggaggggctgaggcgcagtttcctactcacccggatccgaatcctccgcggtgctgtttcaagagagccggattccagatcacgctccagcccggactcggaattcctgccctgcgggtctgcattttcataacgggcaggtgtgagtgccctgcagctggagaccagaagcctgaaggcagctcggccctccccagcccacagcgccgttattccgtttctatatcagaacaagccagtgagagccggtttaatggggcggccggcgaaaggggcttggtcccgccttctaaatctccccaggtctccagcccactggaattttctcttccaagcgtggccccgccctctccgctcgtgattggccctaagttccgggccccagtttcattggatgagcggtcgggggaccgggccaggtga

SEQ ID NO: 225093 - DNA, 1000 bp, Homo Sapiens
tgctctgttccctgtggttgtctcaggcctgttactgcagaaaatgatgttcatgttctgcaaagtggacattttcctctaccaggccatcaaccatattcattgcaagcaagctgatttaggcagagctgcaggcagtctatgtaagtccaggtctggcaagggcagggtgggcagagggaacagtggtgggcatgggatgggcacaaaagtgcctctgtcctctgtgctgaggattcaagtgaaggatgaggagtttatctgcaacatggcagctgttaacctggaagccatgaagtccactgaggaaaccacccgctgcaccagccttacagcaacaggaagaagaggcgcccggaaaaccttagctcttggctatctcttccctgagcacaccctggccctggggcctgagatctctccatgcaggggcagccatgagctccgggggcagcagcaaggctggccacaccacccatcagccacctccagccccgccgctcaaccagccatcagtcccttaactgccagtatcccagccagcctagaagcaggctcacagttttccatggagggcttggataataaactgatcctggatgttggtggcatacgccacctgatctacatcagcaccatgagggcctttccaggtacccgcctctacaagccgactgagccatccccacctggcaccccagctgctcagggcccactgggagatgtctatcccctgtctgctctgggccagctcactgctgctgtcacagccactgcaggcatgtgcactggtatcttgttggttcctgtgctcctggtccacttccagtgctattatgctgtggccctggctcgccagaaactaaggcccatgcccaagcatagccagattgtagcattgctccccgtactgctcctgggacaaatgctccttagagctgtaagaaggcctttgaaggtcctcagagactccaagcagatgcgggtcagtcaggtctga

SEQ ID NO: 225094 - DNA, 1000 bp, Homo Sapiens
gatgcacgatgggcaaggacttcacctgctgttgctggctttgaggatggaggaaggaggccacaaacctagaagctggagcccctagaagctagaaaaggcagggacccgattctttccttgagcctccagaagggacacagccccgccagcaccttgactttagcctggtgagatcctcttaggacttttggcaatcagaactataagacagaaatggaagccactgagtctgtagctgtttgttgcagcagcaatagaaaactaatgcagggcccaagaaatcactggtgatgagatcgggaaagtgggctcaggaggtctggatctgtgatgagatggggaaagtgggctcaagaggtctggatctgtggtgagatgggggaagtgggctcaggaggtctggatctgtgatgagatggggaaagtgggctcaggaggtctggatctgtgatgagatggggaaagtgggctcaggaggtctggatctgtgatgagatgggggaagtgggctcaggaggtctggatctgtgatgagatgggggaagtgggctcaggaggtctggatctgtgatgagatgggggaagtgggctcaggaggtctggatctgtgatgagatggggaaagtgggctcaggaggtctggatctgtgatgagatgggggaagtgggctcaggaggtctggatctgtgatgagatggggaaagtgggctcaggaggtctggatctgtgatgagatcgggaaagtgggctcaagaggtctggatctgtggtgagatgggggaagtgggctcaggaggtctggatctgtgatgagatggggaaagtgggctcaggaggtctggatctgtgatgagatggggaaagtgggctcaggaggtctggatctggggtggggatctggagtggaaggggaattcatttgttcattgtctatccttttgtattgattgaattttttatatatatatgtgaattttcacaataaaatttttttcc

SEQ ID NO: 225095 - DNA, 1000 bp, Homo Sapiens
tgctgagtaactgtgattccccaggtgatggcatcagctgagaagggaaggaagcccatgtgaggacactgaagaaggagtgagcagacaataagaagcccacagaagacagagaaggaacaactagagggagaagccaaggcaggcatgtgtgataacatataggaactgagggagaggacatttcaagatggaggggatgccatacaacaggactatgtgatggtttttggctgtgtccataggaagtcacaacaggcaagggaaagaaaccagaacccagtcatggagttaagaagtgagtcagagaggagatgggtagggacagtgaggtaaggcctctttctaaggaagtttggctgaaggatagactagctggacacatgctggctgtgtggggtagagggaggaatgatggagggtaggagagccttgagcctgcgagaagagtctcctagaatagagaagctgaggttaaagttgtggaagacagtggggataactgagtgacagataatcaggagaagaaaaggagatccagaatcatgacagagagatgacctttgccaagagcacagccatctttcactgtcacagagaggtaggacaaaacgattggtgttcaagaattggtttgtagcacaatattttaactatgtcctttaaaaagtttctccacagacactacccaaagcagtccttcactacagtggcagacagacctgaaaattttcatctgaagcagcagagtgaactgcagagtcagagatagaatctcactatgttgaccaggctggtcttgaactcttggcacccaagcgatccttttgcctggaatcccaaagtgtcagatttactgaagaatatttcattgtaattactttttatactttataggtcaagagctctgttttaaagacaaaatttattgaatatactttttcaaacaaagtttcatgttctaatcattgtctgatttcagcattaaatgaaacacagt

SEQ ID NO: 225096 - DNA, 1000 bp, Homo Sapiens
gaagagtcggatgggcgcgcccgtccccggtgcatcaagaggctggcccggccaggggcgaggggctcgcaccgaaccccgcgcacctcgccgcgggcggggctgggccgtagtcggctcgatttaaggctggtatccaaggctgcggccggtcaggcgagcaacccggccgacaccccgacccggatcccgagctgcgtcgcggacgatgccgcgggcccgtccgggactacgactcccgacgggctctgcgatcgctccggggcggcccagcgtgcactgcgccggccaaaggagtgtggtccaccggaggactccctacattcttcctccattacctcactgcctccggtggctgctgggataccggaggactcgggtcccggctcgactcagtcctccagccgcccggggaatacctctagttcttcccggccgccgccgccgccgccgccccgccgcttcctcctccgcctgccggcctccttcgccccgtcccgtccgcgcagcgcgtccggcccgcccgcaggccagcttctctcgggagcccccacccaggcgcatggctccatgaagcaagaggaggaggcagagcgcgagaggtcccgtccgccccagccgcgtctgggccaggataaaagcaaaaccatattcctgctgctgtcagttatgatgcactgagaaaacttcagagacctaaactttttccagagaagagaagctttactggtgttccagccctaagaaacctttgttcaagaaaacggcagatgctctgttgaatccactggagattgttctgatactaaggacaagtatcaaccatctttcctgtgaaaaattccctctcgtactttagttctgtggatccaaaatttatagcattcttctaccaccacaggggctcatatgacattaacagacaagacacttttcagaaagacaggcaacgtgttggaccttccggagcttctcagaagacagagggttttcttttgag

SEQ ID NO: 225097 - DNA, 1000 bp, Homo Sapiens
ttattcatacaattcatggtggatactacttcgagggtgttcacagaccccaggcagagagcgcctggagggaaaattatccaaggcaggcccattcatagttccaggacagccagaagaaagcctccgttaagcaccagaagtctccggggcaggtggggccaggcagcatgaaagaattggccgcaagagttccaaaccctgtcccaattatggagggtgacttttctttgtcctccttctccattcccttccatattgctcatgcatccaaagggagacctgaagactctctagcagggcaaggccattttcttttggcatttttctctccccagagtctagctgattatcagcttagacacacagcaggctatgtgctgtgaacaacaggcatcctgggttattttacaaactcatggatagtcattttgaaaccacctttgcaaaattgtgactgaaacagtgaaagagagctaacttaaccagctccatcttgtttctaacctccaagctgtctttgttcattcctgggcgtaggctgaactaactttgggagaaacttagtttgtagttatagtttaaacaaagactgtgacagccctttcccaatgcagacctccttcttgtctggggactagactaacattagccacaggattagaaattacggtttaggagtcacgcagctggaggctacaagattctgaccctccctaaactgcttctaagatcagtgcttgagacatgttgcagaccccgcacttgctggatcagctgacgccacacagatggataaactgcctcgtctgatcttgtggcccccacccgggaactgacgaagcgcaagaagacagcttcgactccctgtgagttcatccctgaccaaccagcactcctggctcactggcttccccctaccaagttatgcttaaaaattctgctccccgaattctcgaggagactgatttgagtgataataaaactccagtctcccgca

SEQ ID NO: 225098 - DNA, 1000 bp, Homo Sapiens
cggaaaccatagagatcagggctcagccggagggccggcccactgctgtcacgtggcctccatccgtgcgctttattggctggtgctggctttacggggttgaattttggacgctgcctgccattcgtgggaccgagtttcaggcagctggaataaagagagacatcgggggaaagccgcgagaaggccagcgtccctggctgggagcagagctagccgagtagggcgcccggctgtcaaactggccggcgcagtgcacgctgggccgccccggagcggtcgcagagcccgtcgggagtcgtagtccgggacgggcccgcggcattgtccgcgacgcagctcgggatccgggtcggggtgtcggccgggttgctgccgggcaccgtcgagcgttagccacccagcattgagctgccagcggctgttctccctaagcaccctcgctcacgtcgcctcgcctcgcctcgcctgaccggccgcagccttggataccagccttaaatcgagccgactacggcccagccccgcccgcggcgaggtgcgcggggttcggtgccagccgctcgcccctggcggggccagcctcttgatgcaccggggacgggcgcccccatccgactcttcgaggggcggcagggccccatctgtgtctttcgctctcgagcccccagctagagttggcttcagcggaatacctactgtgcgggattattcaacaagccgattgatcacattcttcagctctagcagtgcaaaggcttcactgaaaaagaacattacaaattttttttgaaagaaatttgggggtaaatttaattttaaatactgatttttgataacatttgatcttatgacagcatttgtatttttaattacagataggattacactaaaagtcatttctgacctgctcccttacccttatggctaaaataaactgctaggccctgaagcaaaggcgagccatgttctagagcaatgtctttcttgtattaaaata

SEQ ID NO: 225099 - DNA, 1000 bp, Homo Sapiens; identical to SEQ ID NO: 119369

SEQ ID NO: 225100 - DNA, 1000 bp, Homo Sapiens
cacagtcgcctctggcgacccgtgcgggccggagccgttcgcgcacaggcagggcgggtgctgagcgtggaaacggggctggaattggccgagccatgcctttccgggatgcccaccgccagtcaaagggttgggggtggtctctgcaccttaagtactaacctgccgcccacgcgcctcctgaccacagcaccccgtcggctttctaattctgtgagctgccctcgtgggcgtggcctccctgtggagctccccatgtgcctccccttggtccagcctgcagctaggaagtgggtcacagcgacggggctgggctgggccaggccaggctccgggagatgtggaattggcgaaacaactgccccagtagtatcctccgcctaggactccaagaggtggcgaattggggcactacgcccgggaaccagggtggcagggctagatgtcctctcaccagactgcccagtgaaggtgctgtcactttgatgaattatcaaggctttgtagtgggtcttctactggacaaaggacaaactggagactccctggatcaaatgtgttgaaaatgttatagtgctgtcaggaagtgctgttctggaatacagaatgtggctgccgtgagtggagtgtgactatgagatagtcgcctgactggagacaatgaagcctcaggccaaggatgctccctcctactcagccctgtttagtgggatttttcagcccactgtaaagcctactgctgcctgtaaagccacctaagtgcatcacttgctggtgttcaccatgataacaacaatttatggggacagaatatgtttctagagctgctggtgccactgctgatgttactgggttccctgaaataaaacaccacagtgcaggctggtctcgaactcctggcttcaagtgatcctcccaccttggactccgaaagtgctgggatgtgctcaatattaaatgtcatgaagatactgttaaaataataattgtgctcaatagt

SEQ ID NO: 225101 - DNA, 1000 bp, Homo Sapiens
aaaatggaggtgatggtagatgcctggacagattaccagatcatcattactcagcctcagaaccagagccatacacctgaaggagggatggaaagactaggagagcctgggatcctcagagatggagatctggatgtgaagagaaagagaaaaacaaaagtcaacagacagtactgtgaccaagtcagtgatggtgagatcagcagcatctctaggacccttctgattgacatgaagtcaccatcaagtaggcagaactcacaggacttatggagcaaggatgactgacacaaacacaaaaatcattctgcctgttgaatgaatcataaaatactgtctttgatccaggaggcttgtgtcatctgccagcatttatgaaactgtgctccaagtaggctcctgtatcagcagtgcttgcccctgatagatgatgatcatggggggaccaggagcctctagacttagagaactttccccaccctccctgtggagtgtttccctccccagcaccccctgctggtcagtttgacaaacagatgaacagaagttctcaaatacacagtaagcagataaccccaacatcaccagaaatatcaacttgtgatggcattttgtcaagttgtctttgttatcggcatcatctgttgctttctgagggaagtattttgagttctcctactgagactgtggatttgcctatttctttttgtatgtcagcttttgccatatgtattttgtagttgtgttgtgaggaagattcatgacttatcttgtgggagaattctgtatttagcagattttcgtcttaagttctgttttgcttagtattgatgttattactttgctttttcagtttcaaaatcatttagtatatctttttcctttcttttagcctttgtgtttttatttcagatgtgctttcttatgtactgactgtgatccccaaattcatatgttgaagtcccaactccaaatgtatttggaggtgggcctttcagac

SEQ ID NO: 225102 - DNA, 1000 bp, Homo Sapiens; identical to SEQ ID NO: 119370

SEQ ID NO: 225103 - DNA, 1000 bp, Homo Sapiens
gcaggggcctcttcccctctccttcctggcctggccccacacccaccagtgttggtttcactctgtggctacgattcttcctgggtgccctttccattgcacaactcctctaggctctacgaacagaacttctccccgcccccaagcctcttagggtgagacatgttgtcggtctgccattgttgctggtccctaaatagcagcaccctttgaaggatccttgaaccatgaccacaccgcaacaaagagtccttcatcaaactcgcttccaaatcccctcccaagaacaccttcagtttcctgcaagaaccctgactgctgaagccggattttgactaagcttctaccttgtaaaccgtgactgtgggattggggtcgaggcgcaatcagaggttgtataaggcactagatcaaggctgcctgtctgtcaggagtgtctgctttattcagtagtaaatgtgaattgtttttcattctgttgtgaatactgttggttgacaatgcagcagccatgccctctctatccttgctggttcaggtatccactctgtgtggctaagggtaaactctgtctcttgagaaaatcttggtaactccatttctctttccaacaattggcttcaaacaagctcaagtcaatgagtcccaacaggaagcctgctgggggttgtctggcaaaggttttctcactcctacaggaacataaagaggaaatgctcctttttccctggtgaatgttgcattccctgtctggatgcaatgcctggtgctccgcagccctttgcacttataagagaaggtggccggaagagcatcttcaccctggggtggccgcctgggaagatgagaagagcaggagtccttggtggcacaaccaggcaattcaccaaaatcctgctgccctcacctggaatttcctgctatgagagacgtctccgtttaaaccacatgagctggattttctgtttctaacacatgtcagcatcttcacggtaaatct

SEQ ID NO: 225104 - DNA, 1000 bp, Homo Sapiens
ttttactttcaaatatttaaatttccatcattataacaaaatcaatttttcagagtaatgattctcactgtggagtcatttgattattaagacccgttggcataagattacatcctctgactataaaaatcctggaagaaaacctaggaaatattcgtctggacattgcacttggcaatgaatttatgggtaaccactgatccacttccagtcactatccatgagtttttatttccaaatacatgaaatcatatgagttgaaactttcttttgattgagcagtttggaaaccgtctttttgtagaatctgcaagtggatatttggaaccctttgaggcctatgctgaaaaaagaaatatcttcactacatgatgaccaccagcagcagctggggaaaccagcaccctgtggaattccatacggtgcatagaatacatcctcccttcagtcggcttgggtcaacttaggtcatgggccacctggctgatagcagtttccacagaaatgcttcaagatgaaagtggatgaccgggccaccctccaccactgccctgtaagaccatgggacacacaggccaccagttcttttcatgtggtcatcccctgttagatgggagaaaatacacctgcctcatttttgtaccttctgtgtgaacattccacggcagagcttcactaaatgtgtgatgaagaattgaatgaatgaatgaatatgagagaaaatgaataaatggttcagatcctgggctggaaggctgtgtatgaggatggtgggtagaggagggtctgtttttcttgcctttaagtcactaattgtcactttggggcaggagcacaggctttgaatgcagaccgactggactttaattctggctttactagttgtgattgtgtgaccttgtgcaagttacttaaaccctctgtgcctgtttctttatctgtaaaatggagataataagatgtcaaaggactgtggtaagaattaaatgctttaaaaaaa

SEQ ID NO: 225105 - DNA, 1000 bp, Homo Sapiens
gggatgaggagacaaggaaacaggacctgagaaaggacactatccaaaatctgatgctctcagaagtcaactttaaaactgccctgctccgcggtggctcacgcctgtaatcccagcactttgggaggccgaggcgggcggatcacgaggtcaggagatcgagaccatcccggctaaaacggtgaaaccccgtctctactaaaaatacaaaaaattagccgggcgtagtggcgggcgcctgtagtcccagctacttgggaggctgaggcaggagaatggcgtgaacccgggaggcggagcttgcagtgagccgagatcccgccactgcactccagcctgggcgacagagcgagactccgtctcaaaaaaaaaaaaaaaaaaaaaactgccctgctcttttcatccaaagatgaatatatgaagccagctgttactggttgaaagtgtgcctcttgtttgcatggcaaaggaattcagttttgtgtttatttacagctgaagctctcttgaaataattgtctcagtcacagcttttacattttggggaaccatgccattagaactgaatattaggaactgtgatcttttgtcttttcacaattgacaatacattcagaacttatttctgataaaactgggcagtttctaaggatactgtacttatgatttaaagtcataactccatgatgcaaaagagaacaagaaatatgtttcaatgactgccttttaaattagcggtactccagcactttgggaggccgaggtgacaggatcgtttgaggccgggagttcaagacagcctgggcatcatagccagaccttgtttctactaaaaataaaaaataaataaattttccgggcatggtggcccatgcctgtagccccagctactcaggaggctgaggtgggaggatggcttgggcctaggaggttgaggccacagtgaattatgattacaccacgggactctagcctgggtgacagagtgagaccctgtctg

SEQ ID NO: 225106 - DNA, 1000 bp, Homo Sapiens; identical to SEQ ID NO: 119374

SEQ ID NO: 225107 - DNA, 958 bp, Homo Sapiens
atgcagtggggagccagggagcgcacctgctgggcctgggccctctcccctgggctgggcggcctctgctggccctggggagggcggggctggttgccaaggcctcaggtggtgtggagccggaagcaggaagcagcctgtgctccccaggacctgcctggttgggggaattggaggcttctaggaggtggcacggtgcacgccaagatggctgtgtccacagaggagctggaggccacggttcaggaagtcctggggagactgaagagccaccagtttttccagtccacatgggacactgttgccttcattgttttcctcaccttcatgggcaccgtgctgctcctgctgctgctggtcgtcgcccactgctgctgctgcagctcccccgggccccgcagggaaagccccaggaaggtgagcccctggaaggaaagacccaagggagtggataacttggccctggaaccctgaccctgtgtctcctgcccggtggcagtaacaaagccttctgtctgcccagagcctgagtctgcagtgtcttccagtccccgtctgggtgggtgacgcgggactcgccgccccactcaggtggccacctggcctctccaagccttcagtcagcacgactgtgccaggtcatcctcagtcacctagctgggaggggagctggtctcaggccgggcgcggtggctcacacctataatcccagcactttgggaggccgaggtgggcggatcacgaggtcaggagatcgagaacatcctggttaacgtggtgaatccccgtctctactaaaaatacaaaaaattagccgggcgtggtggcgggcacctgtagtcccagctactcgggaggctgaggcaggagaatcacttgaacccgggaggcggagcctgcagtgagccgagatcgcgccactgcactccagcttgggcgatagagcgagactccgtct

SEQ ID NO: 225108 - DNA, 466 bp, Homo Sapiens
ggcaaagagaagggagcatgaagctgtcattttgaacatgcctagtcccagagatgcatgcggggagaactctatgtgaaggtgaaggcagagatgcttcattaagccaaggaatgccaaaggtggccagcaaaccaccagaaaccaggcaagatgcatggaacagattctgtctcgtagctctcagaaggaaccaaccctgccatcgcacattgattttggacttctggcttccagaactgtgtgggtttgtcatccagcgaggagatgaggagaaagtgctgggccactccactggagaaattggagacctttcttctggctgtgtctagggagccaagagagtgagagaaaactctttgaggaattggctcagacagaggagggagacaaggtaccacgttaacaacaggactgaaatttcgcccagagtacagagagctcagcagattcctggcatttctga

SEQ ID NO: 225109 - DNA, 855 bp, Homo Sapiens; identical to SEQ ID NO: 119378

SEQ ID NO: 225110 - DNA, 1000 bp, Homo Sapiens
ccgacggcggcccggcgtggggaagcaacggtggcagggacaggatggaagggccgcgctccgcatcctactgggaggggacgagttcaggctgcggcggctgcggtcgcgggacactgggcgctcccggcctggctccgggataaccgggcggggcctgggccattcactgcctcggtttcccccggttggcctcgcgcgtaggcgccggcgcccccatccccgcccagagctgtggggccgcagagacccagccggggcgaccccggagcctggcccggggtccctcgggcggccgagtcctcccgccgccaggggccgcccccgcccctttgcggcccacgaggctggcggcggcgtccgggcacgcggtctccaggcccggccgcgaggctgcggggaggagcctgcacgagggcccggcagccccggcagcccccccagccctcggcgcctctgcaaccctgcgacgggctggggaggccggtatgcgtggttcccggagcacccgtcccccgaggctccacgtactcaagcgtttctggggcggaattctgtgggcagcaacgggggccccctctccaacaagcgcacctcatttctcacgccggaggcacagccggcgagagacggccactcgctttggagcggcggcgaggccggcgccttcccgggcaccagggactgcgtggcttggccggaaatcaggctagaagcagctccgggaagcacagcccttagcccagcgccttcccacactgtggcaggaatagcactggcggcccacgcgcttgtcagggaacagaacagctctcgcccgacgcctggcaggggagcagggaggctgcagcttccccagcgaccagctgtttcccaggctggcggactccacggaccggctccgcgtctcctctccagccttctgttctctctagaggaagatctgcgttttgtctgcactgtgggccgactctctagtggggagcgtcagaccctctaa

SEQ ID NO: 225111 - DNA, 1000 bp, Homo Sapiens
gcgtttccaggctgggcagtgcagcgagctctggagagtgcgccctgacccggggtccaggcccggtcagtgtgaccttgcgcgagtcacggtcgtcctccgcccgccaggccccggacggcgtctgcagggtccgattcctggggatttcccgacgccccttcccccgaggttcaggggctgcctggggtgccggggaggggggccgagggatgggggacctggggctagaaggccaggcgccaccacctgccgcccaggcagccaggcgactcttctttcgcgggtcacgcggcctgactcaggcccctgctcctgtggccccgaaactcgccgttcgctgggccttgcgttgcactcggcgtgcagttccccctcggctcgcggccacttggtccgcgccgcctgcgtcctgtgtgccgagcccgcccgcactgcggggacaggccgggcgccgcccacgccgcgctctgccgggcgcacagtctgcctgggaagcgcgcggccgggcgggcggccatggcgcggcacgctgggaggtagcgcggcggctgcaggagcgcacagtcggccatggcccggcggcggcgccgcgcctgcatcgctctgttcctggtgctgctcttcgccttcggcaccctcatgggtctgcgcacgctcaaggctccggacggactcccggcgctgggcccgggcctggagctggcgccctttgagcgacgcccagagggggcccccgcgcccgctgccagggccccggcagcccctgccgcgccgcccccgccgccgccgccgccccgcaccgcggaccctggcggctcccctgggccggcacccgcggaggccgagcccgcccccgtgcagagcctgcgcgtctactcggacctgcacgccttctactactcgtggtacgggagcccgcggcgcgagggccactacattcactgggaccacgtcatggtgccgcactgggaccccaagatctcggccagctaccccc

SEQ ID NO: 225112 - DNA, 1000 bp, Homo Sapiens
gccccatcaaaggggatgttcaactcggtgacttgaatgcaatcatcacaaagcagcttctgagaatgcttccatgtagctttgatgagaagatatttccttttccaccccaggcctcgaagccctccaaatgtccccttgcagatgctagaaagagggggtttcaaagctgctctatcaaaaggaaagtacaactctgtgagttgaatgcaaacatcacaaggaagttcctgagcatgcttccgtttagcttttacgggaagattatcccttttccatcgaaatgttcaaagaggtccacatatccgcttgcagattccaccgaaagagtgtttccaaactgctgcatccaaaggaatcctcagctccgtgagttgaatgcaatcatcaccaagaagtttctgacaatgcttctctctagtttttatgtgaagatatttccttttccaccgcaggcctgaaagcgctccaaatgtccacttggaggctctacgaaaagaatgtttcaaaactgctctatgaaaagcaatgttatactctgggggttgaacacaagcctcacaaaggagtttctgagaatgcttctgtttactttttacgtgaggatattcccgtttccaaagaagtcttcacagagttccacctatccatttgcagatgctagcaaaagagagtttcaaaactgctccatcaaaaggaatgttcaactctgtgagttgcatgcaatcatcacagagaagtttctgagaaggcttctgtctagattttacgtgaagatatagccgtttcgaacgaaggccacaaagtgctccaaatatccacttgcaggtcctccaaaaagagtgtttcaaacgtgaactaccaaaggaaggctcaactctagactttgaaggccaacgtcagaaggatgtttctgcgaaagcttctgtttagttaggtgacgttatcccgtttccaacgaaatcctcagagaggtccaaatatccacctgcagagtcta

SEQ ID NO: 225113 - DNA, 830 bp, Homo Sapiens
ttttttttttttttttttgattttttttagtagaatcttttttattcataaaaaatccatcaaaacaaaaaagttttccagccacacacaggaggggtatgggtgggggaaggtgtctgtccatctatccctggcccccagcccatgtggttttggcagcaataaggtgtgtggggtaatgactcctgaaattaaaatggtgtgtgtatgtgaaggaaaggcgggcaaagctgtggggagcggtggagtggaaggaacaaaggaggtcagtactgggaacgctgaaggtgggaggccatttcataacattacttgttgatgaaattgccatggataccttctttgcccatcagcaggcctagcgtcttggcagtcatggtgacaatgacgttgaaggtgggggctccaccgatgctcttcatacaaagatccgtggtcaattccccatcctgcagcagtgagtccaggaccacagtatatttctggccccccagtgtcagcccattcatgacaaagcttgaccagtctttgccaaccaggacaccaacctcagctggcgtgatgttgaggaaggttttccctgggacggtggcacagatggaaggtgggtccttgttgcccacaatggccgtgtcctaacaggtcccgtccgccacgaggctgtagatggaggtgtccacctggcctttgcgttgctgcaggggctcctctggtcgctgctgctggggccgcctgggctggcgggttggggaggcggagagctcgatgcaggtgctgtcctcctcgccacgactctgctagctgtgcagtagccctcgctccgccactta

SEQ ID NO: 225114 - DNA, 1000 bp, Homo Sapiens
aagacacactgaaaagccacacctgcattggaagagcttgcatcaaatgggaccttaattgtatgaggacacagccatctgagaacgcacaatatgtcgtcacacgcagaccacagggtgtgcaaccactgcagggaaggaggtgtggctggactgtgggggctgcctggctaggtccccagtccacagaatacccatgtggccacagatggagccccacccaccttctcccacacctgtcctccttctggggcatggcactcagcacatggagggtgccgcctgctcatctggctggaagtcatgagaggggaagggccccatttcattaattaccctccttggcaacaacctgtcactgagtgaatgggatggatgtttggggctttcagatgtctgcgcagctgggcccctggggcatggctgaggtggcagccttgactgaatgccctgtgactggacagatttggtcccagccaggctaatcaatgagaaatcccgctggaagcctagacaggatgagactgggtggatgtggatgggatgcacctctcctcacatccctgagtgtccgtggcagctttggcccagactgttttccagaatgcctgcgtggcgagcagcctggggctgcgactggtttctccctcttggccagagagaggatgtgagccgggtactaaggatgccgtctcctctgggggcagagcaacacagcaccaaccacagcacgccaccgtggcaggcttgtaagtgacagagatgacataaggctgatggcaggacgcacagagaggacacgtgataccacgccacttcacaccagggacctcggcgtctgcaggaggtcctgggaccaaaccacaggtactgaaggtcggctgtacctgagattaggagaagctgaaaaggaagctgctatattaagtaagagaattctatcatcaacacacaataagatacgagacttacaaataataaaaatgtcagggttcgaggg

SEQ ID NO: 225115 - DNA, 1000 bp, Homo Sapiens
aagcagtgacagctcttgggctttgagggaaatgattcagcgggagaaagaaggtggagaggggctaatatgcagataccattgctgcaggtggctctgcccctaagcactgaggagggcactggtccctctggccccacccagccttcaccccaaggtgaagtacgctttctcaggtccccaaggatgggtggccaggtcccccactgggagtggaggtctcactcccttccttgggttctgacctccacattatctggctgtgagggtgacctgcctggctttccccaccaagtgcagctccccgcagctgaaagccacactctcaacacaggactcctgagatctgacactggccaattcacaccctgcttgaagctggcatttgagaggccttcaggttgacaacagcagcaacaagtttgctgttcaaagtaggccaagtcacggctttgagcggcatcatttgaaaagtgctgggatcagccaggcgcagtggctcactcctgtatcccagcactttgggaagccaacgcaggtggagcacttgaggtcaggagttcaagaacagcctggccaacatggagaaaccccgtctctactaaaaatacgaaaattagtcgggtgtggtggcaggcctctgtaatcccagctactcgggaggctgaggcaggagaattgcttgaacccgggaggcggaggttgcagtacctgaagtcctagttactcagaaggctgaggcaggaggatcgcttaagcccgggagtttaaggatacagtgagttatgattgcaccacttcgctccaggctgggtgattctctaaaaaaaagaaaaaagaaaaagatgggaggatgggaggcggggctaggggactgggaaggtccctcaaccctttctacatgccttacccagggtatctcccatcatggctggttactgtgctaaaattataattttttttctttgagacagagtatcactcggtcacccaggctgga

SEQ ID NO: 225116 - DNA, 1000 bp, Homo Sapiens
cttagagttaagtgaagagttaacactgtgactttagatgcatttttctcagtgtaagtgtctgagctcatctccagttctggactcgtgcccccactcccgggtgctgacagcaagctctgaagatatgctgagagagctccctgactctcctgactcaggtctgccagttgatgaagacagcacagttgttaccaaaaacaaaacctggcagatggtcctaggtcaggatcaggggaaacacagtcataggctgcaagtctataagataattccattggggagggagcccatttgtcatgcatggctgcaaggggcagatacaagtgtggagtaagcttgcaagagctgatcctggtcccagagagggaaaaatatgccttggtgggtaatgaaccttttgttcccagaggcagaaggattgggactaggccaacatagagattggcgatggttgtgagattctaagagtgtgtgtgcatcttgacaatattagaggaggctgagcccaagcaggcacattctcttcgacccctccctcattcagtctgctttggagtctactgaacatcaagcttgctatgagcaggatcttagagctgaggaattggcctcccaatccgaacaggtgttataatcctttcttaataggttgtgctgtggacccaatgtgagggctgtgctggtgtaaatggtgacatgttgagctggggggatgctttcggggtggggggactggttccattccatcaaaggccctcttgagagtctatccagggacccattgttttactttaacagaccagaaaagatgtttgttttccatgtcattacccccaggggataccgaatgtgtgggtagaaatttctctgtagattaaaaatcagatttttacatggattcaacaaaggagcgtcacttggatttttgttttcatccatgaatgtagctgcttctgtgtaaaatgccattttgctattaaaaatcaattcacgctgg

SEQ ID NO: 225117 - DNA, 886 bp, Homo Sapiens
atgggacccgggtgcagggcctgtgaggaagtgcccgggccttggccaggactgggtcatcttccatcagccaaggtggggcgcgcccagccggaaggagcatgtggcagccgtgggggcagggaggacagccttggcttcaccccagcaggaaaggcaggttctgacgaggaagcaactgggcgggtccagcccccatcaggtggtgcccagggaggcagtccaggcacccgcctggcctggctccaggcttcggccacagtcttccaccaggatgtgactgaaggcctggccgaggtctgcaggccacctggagggcacctggagagccaggagcgttgctgggccctgggtctaccccacgacccctctgcctctccccaggctgtgagctccccgaggacgacgccccctctgcttacaccacctgcaggcgctccagccccggcactggaaggccttggccaccgacacagcagcctcatcttctggctggataaactcacctcagagccaagcggccccggagaagctgcctctgtggcccggtctgcagggtggagttaccgtgggtccctcgcatcagacatctgcctgcggaccagacacctgctctcctccaaggagcctcaatgtccagagaagggatcctgcggtgaccgagggacaggcctgtcttctgggtcaccacatcttggcatttattatttgcccccaggaaggtctgaaggattttacttttaaaaaccatagtcagccgggcgcggtggctaacgcctgtaatcccagcacttagggaggccgaggcgggtggatcacctgaggtcaggagttcaagaacaatctgaccaacatgcagaaaccctgtctctactaatactacaaa

SEQ ID NO: 225118 - DNA, 1000 bp, Homo Sapiens
tgggcagctcattgtaactggagaaaaacatggctatatgactggtgtcactttaaatttatcatcgtcacccgttgcaagtgatctctctatgctgcctaacaatcccagtgtcttcacttatctctttgaggagtcaataataggctcttttttttttttaatctgttttttcttcctgcatagccttgatttgccgagaccagctcgtttggggagaccctaacctagcggcgctagaggaattaaagacacacacagaaatatagaggtgtaaagtgggaaatcaggggtctcacaggcttcagagctgagaccccggaacagagatttactcaagtgtctattaacagcaagccagccattaacattgtttctacagatattcgattagctaaaagtatcccttatgggaaacgaaggggtatgctgaaacaaaggggtgggtctggctagttctgtgcagcaggaacatgcccttaaggcgcagatcgctcatggtattgtttgtggtttaagagcgcctttaagcggttttcaggccaggtgttccttgccctcattcgggtttcgttatggccatcatgaacatgtcacagtgctgcagagattttatttatggccagttttggagccagttcccaacattgattcaacttactttttattgtctgtgtattttatattctgtctttaaaagtagatatggcccggcatggtggttcacgcctgtaatcccagcacgttgggaagctgaggtgggtggatcacctgaggtcaggagttccagactagcctggccaacatggtgaaaccccgtttctactaaacactgctaaaagtacgaaaattagccaggcgtggtcgtgggcgcctgtaatcccagctactggggaggctgaggcaggagaatcgcttgagccggaaaggcagaggttgcaaggagccgagatcgcactaatgcactccagcccgggggacaagagtgaaactccatctg

SEQ ID NO: 225119 - DNA, 1000 bp, Homo Sapiens
catcctcctggtgcacagaaaaactgctgaattctggcaagatactcaaaggattctgacgggtgaccatctcaggccggagatatgcccaaccaactggaaaagcagagacagccatggacagatctgctgacgctaaagtttatagacagctgaggtgcaacccatataatcacccagatgttattaggccatgatcattctgtagtaagctacctcccttctgtgtttcctctcacctgacagcctattgtgggcactttcaaggccccactgtgtccaaatcacaccaccaccaaagctcacagaagcacgctggtagatttctcctctttggtggtttcccatgaccagccaagggaaatacccaacaatcattctcagtgtgcacagatttaccttcagcttttttggttatattgtcattattattttctttgtccagtgggagagttaaggggcctgctatggactgaactctgtccccctcaaattcatatgttgaagccccaaccttcaacatgactatatttgaaaacagtccctttatggaggtaaagttaaatgagatcataagagtggggcccttgttcgatagaactggtgtccttacaagaagaggaagaggctgagtgcagtggctcaagcctataatcccagcactttgggaagctgaggcaggaggtacgcttgggcccaggagttcaagaccagcttgggcaacataacaagaccctatctctacagaaaaaaattaaaaattaaccaggtgtgatggcatgtgcttgtggtaccagctactcaggaggctgagatgggtggatggcttgagcctgggaggtcaaggttgcagtgagctgtgatagcactgcactccagcctgggtaacagagcaagaccctgtccctccccacaccaccccaactccccccaaaaaggaagagataccagagtgcactctctcgatctctctctctctcttccacgtgaggacacagaa

SEQ ID NO: 225120 - DNA, 1000 bp, Homo Sapiens
atggaccctacatcactccattctgcccttcctttccctcctcccattctcccgaaagcctcagtgtatgggcgctgttcatcctctggtgctgaagcagccaagagacccaagtctgcctggctgcctcttaggatatgacagcagagccagtggcctctactagatcctgtacaacctcacaaaacacccagacatcgggagtgctgccagcctgtgatgcaagagtcctaatcctgaagacattgaatgacctgtcgttgtgctgtttttaccaaaaaggatcatgaggatcagagaggaaaagtcacttgcccaaagtcacacagctgaacagtggtggagttcaactttgaccgtgggctgtctggccccaaggtgtatgcttgcttctctcccaagagactcctttcttatcaggctcaaatgaatgaaaggaggatgttaaagttcctagaagctttaattgaatgaaagttcctagtagatctgtacctactaaaaaccacacttctgaagctacgtggccaccagaagacacagctagtctgccatgtaaaaaaggaaaggtggcgtgtgccctgaaggtgcaggggtgagaggcagggaaatggagacccccacagccagcatcagtggccctcatcacagccctccaggagatatcaaaggagacaacgccattattgacgagatcactcccaagcggattggagattgtcccaatatttagacctatagcaaggccttgggagaaatggtggtgcagcaggagagcaggaacctaaccattgccatcctaaggccctccattgtgtggagcaacgtggcaccagcttttcctgggttgggttgataatctaaatggatgtagccgactcattattgcggtatgtatagggatgaagaagtaactgtaatgtagtggaggaatagtaagaaaattcttagtgctggcttagcttaattgatccaaaaacataaatgctactttactatc

SEQ ID NO: 225121 - DNA, 1000 bp, Homo Sapiens
acttcatacaaaacccaccatcttcctggagtctgcgttgttctcttccagaatagatgttgagcttttaaacaaacctgcagtagaagcaagccctctccaggaaatcccaatctctttccaaacagggacagcaaaggttctctctgttgtggctgtttttccctctcttctgggaattggtttgccttctgagagcatcccaggaaggggaggtgcgccccaaattggcgaggctctgccaaataccaaaggctcttctttggaagaagactcctcctttggacgtgaggcgcccctaccagagcgcccgcgtacagaaacggaaaccactagctgcgctgaaaaaccacatgagccagcagttgctgccctcccgaagtggtcctcggaggcagcgcaccccttcattttggcgaaccgaggaggaagggaggaaccgtgtgggggaaatctagaacttctggttccccaaggacccagcagactgtgttctggctacaaggtgatcactgccaccaggtcagtgcaggattcctccaatgtagatgggccgggagccacaacttgcgcggagcagcagcctcgccgaccactcagagagaagccgcgcgacagccaggcttggcccggacggcgcccccaccctgcgcgcgcgatccaaggttctcacctggagcgctcaggtagggctggggcggggcgggaggctggcgcgcaggcgcggaagtggggcctcgcccctgccgacgtcgcaggctggagctcacctgggagactccaagtggaagccgagcctcggttctgcctctccaggcaacgcgggaggcccagcgggaaggcaggaggcggcggcggaggaggagctctactgagccgcaactgtggcgacagcaaccggagtcgcagccgccgccacctgcacctggcgcctagcccacgtccagcgcctgcccggccgccgcttcccgccaccctgccctgcccacccgccaggtaa

SEQ ID NO: 225122 - DNA, 1000 bp, Homo Sapiens
gatgcgaccctcgcgggggcgaccctgaggggaggcggcccatgtgctgagcggcggcccagaagcctaggcgtccggggaccaacttcctgccgcctgggaactcgagcctcccggtgtcgcgcctcgctcggtccgcaccggcctgcggagccgggtccccgccctggtcgcggggacgctcgccaggtgcccaggagtcccgacttggccactgcccgcgccccgccggcctccacgcctcgcgcggagaacctcagccaccgccgtctcggatcgtgccaggccggggaccgcgtcccccttcccggggcggcctccgctcagcaggggcgatgcagactgtcccgccggccgtctagagcccctccgtctccgtcacctctcgccccttcactccgggcgaggactggcggtggctgcccagaggtgcccagccacaccttccttcggcccaaaaggactttcctggccgcgccgaaccgacccttcattcatgctgcagtgctgcaacgtttccgccaccaagggggaaaagcggccgcgatctcaaaccaaacacaagaattggcgtgtgactcatctgcttggatacctccagtccccaaactgtgttccaggagttttcttggccgaagctgcccgatgtttgagccttttcttcccagagaagaagatggactgaaagctgccagttggggactttttgtgatcacggcgttgcagcgttttaaaggaggtgatggggcttgcgctggcttgtcttcccacccaagtgaagagttgatgttcactggttatgcttagacaatgtgcagtttgtgttaatttaaaattttgggtgggataggggcataggcttgtgaagggcagtccggatccggaggaactcctctttgtccctggtaggagagacacccccagtctatcctcgatgccgtcagccttggccatcttcacttgccgcccgaactcgcacccgtttcaggagcgtcatgtc

SEQ ID NO: 225123 - DNA, 1000 bp, Homo Sapiens
tctgcaggggcttgaaatgtccagtgtgtaccctgcctctctctgtcatagctaacaggaatgtgctccgtgtcttcttcctgctcaaagtaccgtctaccaacctgcacaggcagcactttcagccgagggggatgcgagaacttcccaccatttcccacttatgcactgcattcctcaggaacctgcctcacaaattacaagagtgccacggcagacacaccacgttccagcgggtggccatgtcttcatgtcagcttgaaagatcttcgccagggaaatatctatatctcggcagagagagcttcagcctgtgtagtccagctgtgctcaaatggaaatccagaaacccagatcttggtcaaaacaccctgtcttggagagccggctctgcaggtcccgagcgtgggagtgaactgggtgggccacctgccctgcctgcccacatccctgcctcctggaatcctggaccctgagaacaagggggatgtggtggggaacaggcaagtcttgtgcaggaagccaagatgccacccaaatccactctgcagtataggtgggtgatattctggtctgcaccacaccagcgcatgaggggatggaggatggagtctagacaagccaaatgtaaaaagatattgcccaagtattttgtgctttgtctgtgttacaatgctatgcctagcccagcatggtggctcacacctgtgatctcagcaccttgggaggccgaggcaggcagatcaccttaggtcaggagtttgagaccagcctgaccaacgtggtgaaaccccatctctactaaaaatacaaaaattagccgggtgtggtgttgggcacctgtaatcccagctactctggaggctgaggcaggagaaacacctgagcccaggaggtggaggttgcactgagcggagatcatgccactgcattctagcctgggcaacagagtaagactccgtcttaaaaaataaataaataaataaattctatgcccagc

SEQ ID NO: 225124 - DNA, 576 bp, Homo Sapiens
atgaccaatgccttctcatctttactctacatgcagctgggccagcctggggcttggttctatgtccctgcgggtcggtgcgagggcgaagaggaacccgtgggcccgggggatcccggggggccggaccagtgttccccagttgtgggagcagacgcgtgggcgcatcgcgggcgggcagggcctgaagtgcaggtgcaggccgcggaccctggcgggggctgggaggacaggcgtggggtcccggcagtgaagcgggttctagaggcgcaggagcggctatgtttccagtgttctctggctgtttccaagagctacaagaaaagaataaatctctgtggaaacggtcatcgtccgctaaagcacggcatgttgtgcagtggaaatggtcatctgctgctaaagcatagtgtgttgtgtagtggaaatggtcatctgccgctaaagcacagtgtgttgtgcagtggaaatggtcatctgccgctaaagcacagcttccatcataagcacgtcactcccattgctttggatcctggtttagcacgactctcccattgttttgggttctggttttag

SEQ ID NO: 225125 - DNA, 1000 bp, Homo Sapiens; identical to SEQ ID NO: 119381

SEQ ID NO: 225126 - DNA, 1000 bp, Homo Sapiens
tgttgcttttctgacagggcagcaatgagttccaatgctaagtcccacaatcactgcactctccccaccaagagcacagatcttctctcagcaccacatggcagctgctgggagttgagggtagggtggtgtcagcaattcaaggctgtcttttctatcttcttaagtgcctctttcagtgatctgaggttaaaaccaggtaccgtggtcactcacctgatttttggatattatgaaggtgcttttttgtgtgggcaattattcaatttagcgttctatggggaggacaatcagtagaggtttccatttggccatctcgctcctcctcctctgttccaattctgagtccagcaaacaaaaatagcgccctttggaaagaagctactataggacaagcttagcagggagctatgcttcacctccatgagagcagactacctacctaactatttactttggaaaagagctccagatgaaggcctgatgagattcccatgcttactctgaaatcatcattttggaatcagtcattaaagcttcgtaaatatccaagatatttattgtacacactactgttcaatgtaattaataaaatattaatttataacatgctcttagcccaaccaaaagatcatgctaattagttttcttcaaaaaatattaataagtagtaaaaatcctaccttgagtattcagccaatattaagagttatgcctggtggggtgtggtggctcatgcctgtaatcctagcactttgggggaccaagtcaggcagatcactttaggtcaggagttcaacgccagcctggccaacatggtgaaacccgctgtctactaaaaatacaaaaaagttagctgagtatggtggcggtcacctgtaacccaagctacttgggagtctgaagcagtagaatcgcttaaacccaggaggtggaggttgcagtgagccgagtcacgccactgcactccagcctgggtgacagagcaagactccatctc

SEQ ID NO: 225127 - DNA, 1000 bp, Homo Sapiens
agccctaggggcctgccattctgagtgagttattagcatgaagaagaggaagatctggatcaaacgtgggtgatggtactcagagacccaagataggatagggatggaacaaaatccatctgggcaacggctctatgaaaatttggctaagtaattatttcagtattcattgtattcattgtccttcgtgttccataagttaaatgactgtctaatttttccaaaaatttatttctgacttgagaataagtgtgtcatgattttcccagtgtaaagacactgatataactgtagataccagacattttatgtagtgtctatgacacattttagtatgtatgagccaacaatagacatgtctttgtcttgaggagtgtccatctgaattgaaaatgtgtcagcttttttttaacatcatcaacagacttcttaattaagctgccaatacatactgccaatagcactgtgtgctgtctgagaaatgcattgtgtaagtgctatttccatcttattaaataaacaatgttgctctgtataaactggatttaaagtgttctttgaatgaggcattatattgctccataaataatgtgatgtgaattctcatatgatcccttttaacttaatttctaaaaaaatattatttgctcctcagtaaggaatagctctaattggactggtaactttagtgatatgatttgtctgtaacaggctgaatcgccccactcccaaactcctggtcgtgatactggatatttgttatgccacttttagtttgcatgaggtatcttccaggaagtattagttattaacttgtgttctactaaactgtagatatttatttcctgttctggaagatttcttggagtgtccatctgtgcattcctggtgcctagtgtagtcttgctaatggaatagcacctttattggtgctacttaggggttggtagcttacaatcaatctacttggaacgtatccaaataaactggatatttttat

SEQ ID NO: 225128 - DNA, 765 bp, Homo Sapiens
atgaatcagcgacccggcgtgtggaactgcctcgcggctaccgcccccactcaccgcacaccatcagcagcaggacgatcagcagcgtggccacgaacacaagcagagtcagcccgacgctgtgccacatcttgggggcagaagggcagtcggctcggggcggctggcgcggacggcggcgggcactgtgggaccgcccgcccgcccgatccttttcccgccggggtggccagagcgcgggaggcaggcgggcctcagggcgcctctagtccctcatcgccccggagagccgaggccgcggcacccagagaccccagcggtcggatgcgcttccatggcggacgccgcgcgcctgtagggaggacagagggtaagcacgggtacacacggcggccacaaggccctcgtcgctgtccacccgtgtctctgagaccccagggatgccagatgtcagcgtcgcccggccgcggctgtagcggcttctccgccccaggccccctaccgctggggcagctcatcaccaagctcgcctcctccgcggcgcggggtcggctgggagatggagtgcagagcctggtggagtcgggacggcgttgtctcgcagggactacaactcccagaatgcaccgccactcgggcttcgctgctttcattctcgggcggctctgcctttggtcttgctcaagtcgcctcagtcggacgaccgtgggctggccttctccaaagccgcggatctggctgcccgtcctgctgaggcgccagtga

SEQ ID NO: 225129 - DNA, 1000 bp, Homo Sapiens
catgggtaactaaccatagcgagatcctgaacacatatcctctaggtgcaggtggagggaacgatgtccaatacctgaagcagaatctcacatggacggaacgtctgtatttccctctcctgcacgaatcactcatcattcttggagggcttctctgcattcctccttttcttctctcccctcccctgccttttgtcttttctaaagagtctgaactccgatttccatgctctcctgctacattaataagcaaaacctgcttgtgtgtacggttctttactggaaacatgactttttgtttctgtattggttttactgtcatccagttttctagtttaatatctagcaaaactaaatctgaatgtactcgctttttccgttaagtatgccaagcacctcggttgaaaggcttgactcaaaccagaagtcttgctggaattcgtctctgaacacttgaaaaacagaaaccctgagccgcaacaaacatgcctctgtgtgtcgggattgcctttgtctctgcttccatgtggcttttccttttgtagctatgcttagtgacataatcttccctcttctagccttctcctttcaagcctgtctgttaattaaccatgtcagtattggcaagcatttatcttcccccaccctaacatgcaatcttctaagaattttgcaaaattctaaacaaatatagagatggtatatagaattcatatctagaaaactttgattttaatgtgagcttatcaaatttgttctggcttttttggcactaaggcaaaaacatgttaaccagaaataatttattcttcatgtatgtaaaatatttgagaatgtttagccttttattagaattttatttggaaaatatttatctttctacacattttacacttatgttcctttgcttataacccaatttcttaacttttttgttacttaagcaaatatcaattatgttttattatctaataaagtgtaagattcttactatctaaaa

SEQ ID NO: 225130 - DNA, 637 bp, Homo Sapiens
tgtcaggttttaaccaagcgattttccattaaatattctcccagatgttctggaagttttttcgtgtatcttttgcatcttcagagctgctccactgtgccactgaagacagcgccattgttcctgcgggaaatcggtatttaagcattctcgcagaaatgtcacactccaaggcgtttttccacacaaaacccttccccttcattaatccgaattgcacacaacgccgccttcgaacagctcagtttcaatacagggtcgaggcttcccattttaaaacaacgccgacggaaggccttcgccattttagtaaaggccctttgctgttaaaactaaccctccgccccaattaaggtggtttttccgccgccgctcaggcacatgccggaggccagcaagttcggcgcccgtggccgatcagcggttcctcacgccaaaactcggagcctgtggccgtcacgactcaacctcagtacatgtggcagtccggccgcacgtttcccacgtgcaagctttcaactctcagcactctaaactcttcactaagatgtcttcacaggattaaagctcttaactcggcctgcgccaccatcttttgctcggatactagcccgcaatacccactcacctaccaccc

SEQ ID NO: 225131 - DNA, 1000 bp, Homo Sapiens
tagaggacgctaatcctatgtgcgagcggcggaccccgcccggatttcccggaggcgcccggttagtgaggcgacggcgcccacccgcgttcgcgggctcccgaccgccactccccggagccgccggcccgccccagccccgcgcgtcgccccggagggcgggctgcactccctccacgcacctggctggcagagcgtctccagggacaaaaggtgccctggcatcaaagccgagcccccgcccccgccgggatgctgccctccggaaggaggggcgctgcccccaaggtactctccccgggcacccagggggaggttccatttcaacctccgatgaaaaacacggccctcccgggtatttaggagggtctgagggtaagtgccaagatggagaaaacacaccggcccctcacagagtatctcctgaggaatgacaactatctagtgggcaaggagggcttcctgcatagcagagggcaccccctctgatcccccaacgccaagggaaaaaaatcactcttcaccggctcccctgagccaggacaggctccagtgcagccacccaccttataattttccgcggatgctgccttgatcagatagatctgaagatgactttaaggactacaagcaaatctcaagggaaaaattcagaccttgaacaacagccttgaactttttcagggttagacaagtactcccctgtggagtttctgcccttatttcttcgttcttctgttaattcttccatattttaacagaacacagacctgccgaaacgacacaggatggcgctttgctttttgttagttctccaaccttccaaacccttggggcacatgcaagcactgtggaaaaactccattaaaccaagagtcatcttactccagatcccagactgcttgggaagttggacatgcatattcccaaagagaacagtgttggaaggagacaggagagcagctcgggggttgggggtagagggtaggaaaagagggca

SEQ ID NO: 225132 - DNA, 1000 bp, Homo Sapiens
tggtggggaaaagggatgtgggaggagatggtacctcttcatctttttctctgggttttctgtcagaaagggatgttgcttactccagtggcaaaaaatgccagtgtcttctgccagagtgggttactgagggccttggtggttccaccttgtggctgatacagatagtccctttctgtttttgtttctagccaaaaaagatgtttctggcatctcaggtatgctgatttcagcagctgttttttctatatggctagttttttttctttcactctctctttctctcttttttttttttttttttttttgtcttcactgtgttgtcatagtttcttaaatggtcccttgaaccctgccagggctagtttggtttgtacataactatctatatatttttttcttgcggggagggtgtagagctaaaggctggtatatcctgctcctgctccccaaaagtgacgttattcccccaagctaatatttcaggctttcaatttattcatgctttcatctgtttaaacataagtagaaattactttttctctccacatttagatttgatctatctactttaattgctagtagtgtcttaggcatagaatagattagttagaaaaaagtgtttttgacattataaatgattctttcaatttgtgtctaaaagtggaaaatactagaaagcttaacatttattattgtattcagaccagtatttcctccagatgacctttattacaacaaagataatttaaggaagatctctctaatggcaaagctgagggctttgtgttattacaatatccttcaaataaagtgacggtctggtggaaataacaagtaaagcaaggattaggaagaaaacagttaataccttcattttggtctcactctgcattaagagttttcattgtgttaaggatttattatacattaagtaatttaatgttcatttaataataaatggatcctattaaatatgatttttaaaattataatcaca

SEQ ID NO: 225133 - DNA, 1000 bp, Homo Sapiens
cgttctcctccccttctcctccccttctcttccccttctcttccccttcccttccacttcctttccttccccttctttccccttgccttccttcctgccttctttcttttccttctttctgtcttttctaatacaaggcttgaccactggggtaaaattgtcaaaatgtaaaaaggagataattaaaaaataaatagtacctaagtagtatgctaaaatatacatggggcaagatcatctttgcattttatccttgggtgcattctggaccaccttaatctttttttttcttccctaagacagagtctctctctgtcatgcaggctggaatgcagtggcaccatgaagactcactacagccttcacctctgaggctcaagtgattaatcttaaatagtgcaattattctatttaatcacaaatgtcagcatctcttttctttagttttggcacatgattttcaccttttatcctctctctctctctctctctccatgcttcattatattagttccctaggctatcacaacaaattgacacaaactaaatgacttcaacaacagcaatgtattctaaaacagttctagaggctagaagtcctaaatacagtgaggccacactcactctgaggtccctagagagaatccattctgtggatcttccagcttctgggggctgccagcattcctttactcatgccagcattcctttaccccagcttctgggggttgcaccactccaatctctgctccctggtcacaggccgaggagggcgaataacttgaggtcaggagtttgagaccagcctggctaacatgctgaaacccttcctctaataaaagtataaaaattatctgggcatgatggcaggtgcttgtaatcccactcctcaggaggctgaggcaggagaattgcttgaacctgggaggcagaggttgcagtgagcagagattgcaccactgcactcctccagcctgggcgaaagaacaagactccatct

SEQ ID NO: 225134 - DNA, 1000 bp, Homo Sapiens
gcaaatggccgctgctcctcgagctcggggagcatcagggcgccgcgcctcgcgcgcactcgccctgcacggccggcccggccgctccggacccttcttccgagccccttcttcctcggtcttctttcttttccttccttcaccttcgtgtgcttctccgcaaagggcgctccagcccactgcaaagttctctcaccacccgagggacgacatccacgagatggtgggagaaacagcaggagtgcgctccgccaatcggccaccctccccggcgggcaaactctgccggcgagtccggagtagtcacagcggtgcggccagcggagattttggtcgccgcgggacgacggaggtccgggctggtggcgcgggtcccgcccggccgtgcgagggtggggtggcgcagtcggctgcctccgggacgcagagcacagagtacccgccgctgcttctgctgctgctgctcctgcagccgccgctcctaccgccgccgccgccgcccgcgcctctggcgtgggttacactaacacgcgggttgagaccaaaaagtggtggctatgagaaggaaaactacctcgaagggaatagagagccgcgagcagatgtgggagaggcgtcagaagcttctgcaggagaaagcagcgattcgctcgcctcctggggccacggaggccggaaaggcgcactagaaccgagcgagtgcggtgccactactcacccctactctcctatggtccccgtcgtcgccctgctcgacgcagcccctgcaggggggagcccctcccccgcccgccgcagggggtgggctcggcgggcgagagaaggcggcggcgcaggtgtccaacagccggggccagagaggagctgggtgcaagggagacagcttggtgccttgcgctccgtggcgccgccaacttcaccaccatcgacgtggagggacgaggggaggcgatggggggaaggcgctcgcccagcggcccggaccctcctggggtactag

SEQ ID NO: 225135 - DNA, 1000 bp, Homo Sapiens
gctgggaaatccacgcaggcccagtgcccagtgccccagggccccagtgctatgggtcccacaggatccgctatttggggtgaaggccctgggtgtccccggggagcagagctgggctctctcctgcttggagaaggcgtcatcaccatcatcaccatcataatcattataatcatcatcaccaccaccatcattatcatcataatcacaataatcatcaccatcatcattatcatcatcaccaccatcaccatcatcatcatcaccaccatcaccatcatcattatcatcatcaccaccatcaccatcatcatcatcatcaccatcatcatcatcatgatgacaatcatgaccgacagcccagctgcagcccgtcctcaccagcgacccctgggcccttcgcctcagggccaggcaagcggggagcagacagcagtgtgtgaggagggaaaagagccggactacggggacccccagccgcccgccagcccctcccctgcagcctctcttcccagatgtcaaggtccctgagctgccccgtgcagggagcagggtcaggggaaccagacaccatcatgacccaaaagggctgcacttctcggggtttgcagaatgtggcagaggtggaaaaactcgaaagtccctaaacacagccacgcagctggtgcagcacagcagacctgcactgaaatgcatcggggagaaaaagggagaggaggctctttgccttctcaggctcttcaggaaacagattccactcgtcaccgataaaccagctccaggtttcgttgtccttgctgccaggctgcccggctgtgtctggccttacctgatggtctggcaccacaagtggcaatcactgaagaccatcatctacacctgcagcagcatcgtcaccttgcagcagcaactcagggtcactgacttgcccctgccacctgcagcaaccactcgggctgactcacctgcccctgccacctgctgcaaccactcggggtga

SEQ ID NO: 225136 - DNA, 645 bp, Homo Sapiens
atgaacagcttgagtgttcctttaaaatcagaacagttccgccagtattatcacctttgccagtattcagatccacgggcagactcaaaagatgagcccccaaatctggaccaagtgatgagtcaggagaaaaggagttcccattacctgtgggaacccctgatttggactctccttcctgtccttctccagatgcaggtgtgggacacagctggccaggagcgcttccgcaccatcacccaaagctactaccgcagtgcccacgcagccatcatcgcctatgacctcacccggcggtccacgttcgagtccatccctcactggattcatgagatagagaaatatggagctgcaaatgtggtcattatgctgattggaaataaatgtgacctctgggaaaagcggcacgtcctgttcgaggatgcctgcacactggctgagaagtacggcctcctggccgttttggagacatctgccaaggagtcaaagaacatagaagaagtcttcgtgctcatggccaaggagctgatcgcgcgcaacagcctgcacctatatggggagagtgccctgaacggcctccccctggactccagccccgttcttatggcccagggtccaagtgaaaagacccactgcacttgctaa

SEQ ID NO: 225137 - DNA, 1000 bp, Homo Sapiens
caccctcacaccagaaacaataccagccatctagccacccttcagttcaccaacacaaccattgtcttattcatgaaacttctgcagacccaccttaacctccattggtgacttctacctgaagccctctgattgttgcccagtggtgctttttaaaataatttccatagtttcttctacacctttagttggcattctactgtaaaggagagattttattttcttactcatttatttgttagtttatagtcaccaccatatggatgcagagttctgtctcattcactgggaagtattctgttgcagtcatgatttattttgatgttcacatgccagatttggtgagtgagcgccccttcacgctggctcccgagtgctgacgtgtccccgtccttctctgcacttttccttacctcctggcctcagatattccagggtcatttgttctctccctgctccaaccctgcagtcagccatctccctagggacgttggttcctttatggaaggtggcatttagaagccaggatttgggctgagcactgtggctcacgcttgtaatcccagcactttgggaggccgaagtgggcggatcgctggaggccaagagtctgagtccagcctggctaacatggtgaaacccttccccgtctctactacaaataaaaaattagctgggtgtgttggcgcgtgcctgtaatcccagttactcaggaggctgaagcaccagaatctcttgaacccgggaggccgaggttgcagtgagccaagattgcaccactgcactacagcttgggtgacagcgcgagacaccgtctcaaaaaggataataatttaaaaaacagcaggatttgggtgagcagtgcgctcattgcttctgggctctctcagtggacataggctaggaatgtaagatgtatgtgcctgtgtatatacacacgtctgtagctatgtctatgttgcatacatgtgtttttccaaaaaacaaatccataaccatg

SEQ ID NO: 225138 - DNA, 1000 bp, Homo Sapiens
cccagcgggtgggaggaggggccttcgccctcccccaggccgttgcccagctccaggaagcgccgttccggcgcggggtccaccttgccgctgggggtgggcgccgccaccgccgcctcctctctctcctcggccgcggcctccgcctctccgtccgcctcgccaacttcagatccctctgcccccgccgcgtcggtggcgctggaagtcggcgcgcaggcggaaggcctggccgcagtcgggacagcagtgcggcggtcggcgtgtgcaccgcctggtgccgtgccagcgccgagctctggctgaagctgcggccgcagtgcgaacacgggtagggtcgctcgccggtgtgcgtgcgctggtgcgtgaccaggtaggagcggcgcccgaagcccgcgccgcagaaggcgcagcggtagggccgctcgccagtatggatgcgtcggtgcgtaaccaggtgcgacttgtagacgaagcgcttgccgcagtccgggcacgggaagggcttctcgccggtgtgcgtgcgctggtggatggccaagtgcgagcggtacacgaagcccttgccgcactcctcgcagccgaagggcttgacggccgcgtggtagcgctggtgcttggccagccgcgagcggtgcgggaagaccttgccgcacacgtcgcacgtggtctccggcctcccggccggcggggccactgcggcggggaacgcccagggcgacagcaggttcgcacccggctcccggccgggcaggaaaggcttcgcttcagagccgtcggccaggacccccaggccgcctgggtcgggtccccacccctctggagtctgcgccgaatccgagtcgtcgggcccccacgtcccaggcacgtcccccacgccgtaggccgccgaccagagccctgggggctcgttctcctcctcggccacctccgccaggaagtcctcgtcgtcttcctcctcgtggtcctctatgtcgtccgtccagaaccaggctcctga

SEQ ID NO: 225139 - DNA, 1000 bp, Homo Sapiens
tcaaccttttaaaaattatagcaaccgtgcttgcagacagtccaaaaatacaccatgggccatactttgcctatcctggtataaaacaagtaaatcttctgagaagtatttaagataagcccagggcagttagtagtataggaaaagatctggataagcatggttgagaatttcaacattgcaattttttaattttaaaaaatttaatttcttcaacaattattaaattaatttgcatttattttgttagccaagaggagtaatttttgaatttttaagaggctattattggtggtttataagacgacttgccaagtatatttgggataaccataagaaataccattataaaatctcagaagggaggtaggacttctggaatagccaaggaaatgcactcctccatgatgacaatgaaaatacttggaaaattatcaaaatcattttcttcaaaactttggaagttaaccaaaggtttacaacaatctaaagggcattaattcaagaaaagctgctgaacctctataagaacagcaaagtctgtggtgttttaacttgttctattccccacttttctctctccagctccatggtacccttgaaaacaagcaattccccaacgaaacaggggcacaggctgcgtttgcagctctggtaaaagctccatacccagagcagtgtctcccagctccctggtgaagtcttacgtatacatggggtgctggcacaggtgcctccagataagtctcctaggccatctagtagttcctaagtctgggcgcttgcaaagagcttgcaattcatcaagggttgagttgcacaatggggcttttagatgtgctgctgaggaagtgattgcctgcatttaatcgtcttctgatgaatgctagagaaactgatctagagtggctcctcttggttagaacgagctgaagcatactgtatatatttacttctttaaaaaatttcatataaaggaatagaatactaaaaagaaaaa

SEQ ID NO: 225140 - DNA, 1000 bp, Homo Sapiens
gtggtgctgcccaaggctttgggagcccaccccttgtaccagcacgcccttgatgtgggataggaggtcaaaggaagttattttggagctttaagatttaatgactgctctgcttggttttggacttgtgtaggcttgtagcccctttcttttggccaatttcttccttttagaatgggaatgttgatccaatgcctatacccccattgtatcttggaagtaacaaacttgtttcttattttacagggtcataggcagaagggactagccctgtctcagataagactttggactgtggacttttgagttaatgctggaatgagttaaatatttgcaggactgttgagaaggcatggtagtttgtttgtttgtttgtttgtttgtttgtttgtttgttttttgagacagagtctccctctgtcaccaggctggagtgcagtggtgcgatcgcagctcactgcaatctctgcctcctgggttcagatgattcccctgcctcagcctccccagtagctgggactacaggcctccatcaccatgcctggctaattttttgtatttttgtagagatgaggtttcaccttgttggccaggatggtctcgatctcctgaccttctgatctgcctgcctcggccacccaaagtgctgggattacaggcgtgaaccactgcacgcagccggaaaattagccaggcacggtggcgggcgcctgtagtcccagctactcgggaggctgaggcaggagaatggcgtgaacctgggaggcggagcttgcggtgagccgagatcgcgccactgcacttccgcctgggcgaaagagcgagactccatctcaaaaaaaaaaaaaaaaaaaaagcaaagacgtgcctgctacgctttcaccttccaccatcattgaaagtttcctaaggcctctccagaagccgaatagataccagcatcatgcttcctgtacagcctttagaaccatgagccaattaaacctcttttctttataaa

SEQ ID NO: 225141 - DNA, 1000 bp, Homo Sapiens
cttccctcaggcacaccagcagggcatgtcactggagcaattgctgtaatccaccagactccaggattcacagagggaagttgtgggactatacctggagccatgatgtagccagatcatagttttctgaaggccaacctttgtgttcagcctttctcaatcaagcagcagatttaagacatctaagctgggtagcacgattatagttattttttagaaagattaatacattggtgggatgcaagatggattgaaagatgacattagagatataaaggaatgagccagaatttatctttgacctatgttgaggtgtgtttctacaccttcctccaatttaaccatctttcaaatactggatttgattgggcatttgtagtagtctaattaaatatttgtttcctacaaaatcaactttactattgtaacaacaaaaggaaaaaattatttagcacttactaggagctgagaattgttccatatgttttgcatgtgttaactcattttatccacccatcctcctgccccccagttctgctgtggaaatactagtgttatgcacattttagcaaacagggacaaaaaggtaaaacttcatctctggtaaatggtagaactaggacttgaacccaagaaatgggactctagagtgtgctcttaactactacactacagcaacaacttaagctttctctgggatctctccagagaaagatctttgctatcatggggatctttgcaatcatctagtatctaaagaagtttcctctttttaattcagtgttatttttcacatagtatttattgtaatatttattacctacataatattgcatctatgcacataatgttccacgcacctagttgttcaaacaagacagctcagagtcaacttttactaccttttcccttaaccttgcatttcaataatacttaaatcctgtcaataatctctggtttttttcaatatcaataaaatgatgatttattgctgccttcc

SEQ ID NO: 225142 - DNA, 1000 bp, Homo Sapiens; identical to SEQ ID NO: 119394

SEQ ID NO: 225143 - DNA, 1240 bp, Homo Sapiens
ccttataaaagccaactttgtacaaaaaagttgggaggagaagcaggagctgtcgggaagatcagaagccagtcatggatgaccagcgcgaccttatctccaacaatgagcaactgcccatgctgggccggcgccctggggccccggagagcaagtgcagccgcggagccctgtacacaggcttttccatcctggtgactctgctcctcgctggccaggccaccaccgcctacttcctgtaccagcagcagggccggctggacaaactgacagtcacctcccagaacctgcagctggagaacctgcgcatgaagcttcccaagcctcccaagcctgtgagcaagatgcgcatggccaccccgctgctgatgcaggcgctgcccatgggagccctgccccaggggcccatgcagaatgccaccaagtatggcaacatgacagaggaccatgtgatgcacctgctccagaatgctgaccccctgaaggtgtacccgccactgaaggggagcttcccggagaacctgagacaccttaagaacaccatggagaccatagactggaaggtctttgagagctggatgcaccattggctcctgtttgaaatgagcaggcactccttggagcaaaagcccactgacgctccaccgaaagagtcactggaactggaggacccgtcttctgggctgggtgtgaccaagcaggatctgggcccagtccccatgtgagagcagcagaggcggtcttcaacatcctgccagccccacacagctacagctttcttgctcccttcagcccccagcccctcccccatctcccaccctgtacctcatcccatgagaccctggtgcctggctctttcgtcacccttggacaagacaaaccaagtcggaacagcagataacaatgcagcaaggccctgctgcccaatctccatctgtcaacaggggcgtgaggtcccaggaagtggccaaaagctagacagatccccgttcctgacatcacagcagcctccaacacaaggctccaagacctaactcatggacgagatgggaaggcacagggagaagggataactctacacccagaccccaggctggacatgctgactgtcctctcccctccagcctttggccttggcttttctagcctatttacctgcaggctgagccactctcttccctttccccagcatcactccccaaggaagagccaatgttttccacccataatcctttctgcc

SEQ ID NO: 225144 - DNA, 930 bp, Homo Sapiens; identical to SEQ ID NO: 190360

SEQ ID NO: 225145 - DNA, 871 bp, Homo Sapiens; identical to SEQ ID NO: 190361

SEQ ID NO: 225146 - DNA, 1440 bp, Homo Sapiens; identical to SEQ ID NO: 190362

SEQ ID NO: 225147 - DNA, 1680 bp, Homo Sapiens; identical to SEQ ID NO: 190368

SEQ ID NO: 225148 - DNA, 1179 bp, Homo Sapiens; identical to SEQ ID NO: 190369

SEQ ID NO: 225149 - DNA, 820 bp, Homo Sapiens
ttgggtcacatctttacagtctcgtatgttatagaatacaaaataagttgatggttttgtttggtgtgagctttttgtttgtttgtttagttttgccttcataggttatatgccaagatagtatttgataagtcaatgacatttggatgttttcttcaaagaattttatttgacccagatttcttataaagttatcttacattaaggatgtcattttcatcagaccttctttctacatattattcatgaagcataatgttgcatttctccaaattttatgcctgaaagggtagtgttgcttcctaaggtatcatgttgtctttgtgctttgtccatctcttccgtggcgaagctttatatctgttcctaaaacagttaatcctgtgaaataaatattgaacataatccagaagaatctctctgtttcccttggggaatgccatatttaattcaccagcagtaatcctttaataactggcagagcactttattcttctggtgagctccctgaatatttatttttctgattataaattttctatattagtagcattttttaattattacttcttcactatagagcatttacttttagtctctagatgtatattttggaatgctatacttggcataacatagattaaaatcataatgcatgactaaaaactccttggatttatttcccattttaaaatttttagcggtaagttcagatttataatctttctctagacttccatggtctgaatgttgcctgctgaagtagcaacctaaaaagtatcccctgcttatgcttctccagttggccctccatgtccat

SEQ ID NO: 225150 - DNA, 937 bp, Homo Sapiens; identical to SEQ ID NO: 190371

SEQ ID NO: 225151 - DNA, 1342 bp, Homo Sapiens
  misc_feature (369)..(389): n is a, c, g, or t
  misc_feature (1008)..(1016): n is a, c, g, or t
ccaactttgtacaaaaaagttggatcttcagcccaggcttttgctagatggaatggaaaagcaacttcatttgacacaaagcttctaaagcaggtaaattgtcgggggagagagttagcatgtatgaatgtaaggatgagggaagcgaagcaagaggaacctctcgccatgatcagacatacagctgcctacctaatgaggacttcaagccccaccacatagcatgcttcctttctctcctggctcggggtaaaaagtggctgcggtgtttggcaatgctaattcaatgccgcaacatatagttgaggccgaggataaagaaaagacattttaagtttgtagtaaaagtggtctctgctggggaagggnnnnnnnnnnnnnnnnnnnnnaataacaaggagatttcttagttcatatatcaagaagtcttgaagttgggtgtttccagaattggtaaaaacagcagctcatagaattttgagtattccatgagctgctcattacagttctttcctctttctgctctgccatcttcaggatattggttcttcccctcatagtaataagatggctgtggcatttccaaacatccaaaaaaagggaaggatttaaggaggtgaagtcgggtcaaaaataaaatatatatacatatatacattgcttagaacgttaaactattagagtatttcccttccaaagagggatgtttgaaaaaaactctgaaggagaggaggaattagttgggatgccaatttcctctccactgctggacatgagatggagaggctgagggacaggatctataggcagcttctaagagcgaacttcacataggaagggatctgagaacacgttgccaggggcttgagaaggttactgagtgagttattgggagtcttaataaaataaactagatattaggtccattcattaattagttccagtttctccttgaaatgagtaaaaactagaaggcttctctccacagtgttgtgccccttcactcannnnnnnnngaggagaagggggtctctgttaacatctagcctaaagtatacaactgcctggggggcagggttaggaatctcttcactaccctgattcttgattcctggctctaccctgtctgtcccttttctttgaccagatctttctcttccctgaacgttttcttctttccctggacaggcagcctcctttgtgtgtattcagaggcagtgatgacttgctgtccaggcagctccctcctgcacacagaatgctcagggtcactgaaccactgcttctcttttgaaagtagagctagctgccactttcacgtggcctccgcagtgtctccacc

SEQ ID NO: 225152 - DNA, 1104 bp, Homo Sapiens; identical to SEQ ID NO: 190372
  misc_feature (214)..(222): n is a, c, g, or t
  misc_feature (841)..(861): n is a, c, g, or t

SEQ ID NO: 225153 - DNA, 1184 bp, Homo Sapiens; identical to SEQ ID NO: 190373
  misc_feature (87)..(95): n is a, c, g, or t
  misc_feature (929)..(941): n is a, c, g, or t

SEQ ID NO: 225154 - DNA, 1298 bp, Homo Sapiens; identical to SEQ ID NO: 190374
  misc_feature (223)..(231): n is a, c, g, or t
  misc_feature (850)..(870): n is a, c, g, or t

SEQ ID NO: 225155 - DNA, 1643 bp, Homo Sapiens; identical to SEQ ID NO: 190375
  misc_feature (174)..(186): n is a, c, g, or t
  misc_feature (1070)..(1084): n is a, c, g, or t
  misc_feature (1251)..(1369): n is a, c, g, or t

SEQ ID NO: 225156 - DNA, 1277 bp, Homo Sapiens; identical to SEQ ID NO: 190376
  misc_feature (282)..(290): n is a, c, g, or t
  misc_feature (910)..(930): n is a, c, g, or t

SEQ ID NO: 225157 - DNA, 1447 bp, Homo Sapiens; identical to SEQ ID NO: 190378
  misc_feature (449)..(469): n is a, c, g, or t
  misc_feature (1088)..(1096): n is a, c, g, or t

SEQ ID NO: 225158 - DNA, 1060 bp, Homo Sapiens; identical to SEQ ID NO: 190380
  misc_feature (905)..(921): n is a, c, g, or t

SEQ ID NO: 225159 - DNA, 1096 bp, Homo Sapiens; identical to SEQ ID NO: 190381
  misc_feature (181)..(201): n is a, c, g, or t
  misc_feature (820)..(828): n is a, c, g, or t

SEQ ID NO: 225160 - DNA, 1178 bp, Homo Sapiens; identical to SEQ ID NO: 190382
  misc_feature (102)..(114): n is a, c, g, or t
  misc_feature (998)..(1012): n is a, c, g, or t

SEQ ID NO: 225161 - DNA, 850 bp, Homo Sapiens; identical to SEQ ID NO: 190383
  misc_feature (327)..(343): n is a, c, g, or t

SEQ ID NO: 225162 - DNA, 1114 bp, Homo Sapiens; identical to SEQ ID NO: 190384
  misc_feature (75)..(85): n is a, c, g, or t
  misc_feature (919)..(931): n is a, c, g, or t

SEQ ID NO: 225163 - DNA, 1554 bp, Homo Sapiens; identical to SEQ ID NO: 190385
  misc_feature (592)..(612): n is a, c, g, or t
  misc_feature (1231)..(1239): n is a, c, g, or t

SEQ ID NO: 225164 - DNA, 1127 bp, Homo Sapiens; identical to SEQ ID NO: 190386
  misc_feature (51)..(63): n is a, c, g, or t
  misc_feature (945)..(961): n is a, c, g, or t

SEQ ID NO: 225165 - DNA, 960 bp, Homo Sapiens; identical to SEQ ID NO: 190388
  misc_feature (779)..(791): n is a, c, g, or t

SEQ ID NO: 225166 - DNA, 521 bp, Homo Sapiens; identical to SEQ ID NO: 190389
  misc_feature (340)..(355): n is a, c, g, or t

SEQ ID NO: 225167 - DNA, 845 bp, Homo Sapiens; identical to SEQ ID NO: 190390
  misc_feature (664)..(679): n is a, c, g, or t

SEQ ID NO: 225168 - DNA, 1137 bp, Homo Sapiens; identical to SEQ ID NO: 190391
  misc_feature (133)..(145): n is a, c, g, or t
  misc_feature (979)..(987): n is a, c, g, or t

SEQ ID NO: 225169 - DNA, 1409 bp, Homo Sapiens; identical to SEQ ID NO: 190392
  misc_feature (462)..(482): n is a, c, g, or t
  misc_feature (1101)..(1109): n is a, c, g, or t

SEQ ID NO: 225170 - DNA, 814 bp, Homo Sapiens; identical to SEQ ID NO: 190393
  misc_feature (192)..(206): n is a, c, g, or t
  misc_feature (373)..(491): n is a, c, g, or t

SEQ ID NO: 225171 - DNA, 944 bp, Homo Sapiens; identical to SEQ ID NO: 190394
  misc_feature (739)..(751): n is a, c, g, or t

SEQ ID NO: 225172 - DNA, 1024 bp, Homo Sapiens
  misc_feature (685)..(786): n is a, c, g, or t
  misc_feature (806)..(815): n is a, c, g, or t
ttgggagtgaggaggctgcgtctggctcccgctctcacagccattgcagtacattgagctccatagagacagcgccggggcaagtgagagccggacgggcactgggcgactctgtgcctcgctgaggaaaaataactaaacatgggcaaaggagatcctaagaagccgagaggcaaaatgtcatcatatgcattttttgtgcaaacttgtcgggaggagcataagaagaagcacccagatgcttcagtcaacttctcagagttttctaagaagtgctcagagaggtggaagaccatgtctgctaaagagaaaggaaaatttgaagatatggcaaaagcggacaaggcccgttatgaaagagaaatgaaaacctatatccctcccaaaggggagacaaaaaagaagttcaaggatcccaatgcacccaagaggcctccttcggccttcttcctcttctgctctgagtatcgcccaaaaatcaaaggagaacatcctggcctgtccattggtgatgttgcgaagaaactgggagagatgtggaataacactgctgcagatgacaagcagccttatgaaaagaaggctgcgaagctgaaggaaaaatacgaaaaggatattgctgcatatcgagctaaaggaaagcctgatgcagcaaaaaagggagttgtcaaggctgaaaaaagcnnnnnnnnnnnnnnnnnnnnnnnnnnnnnnnnnnnnnnnnnnnnnnnnnnnnnnnnnnnnnnnnnnnnnnnnnnnnnnnnnnnnnnnnnnnnnnnnnnnnnntaagttggttctagcgcagnnnnnnnnnncttgtctataaagcatttaacccccctgtacacaactcactccttttaaagaaaaaaattgaaatgtaaggctgtgtaagatttgtttttaaactgtacagtgtctttttttgtatagttaacacactaccgaatgtgtctttagatagccctgtcctggtggtattttcaataggccactaaccttgcctggtacagtatgggggttg

SEQ ID NO: 225173 - DNA, 1234 bp, Homo Sapiens; identical to SEQ ID NO: 190395
  misc_feature (553)..(566): n is a, c, g, or t
  misc_feature (929)..(938): n is a, c, g, or t
  misc_feature (958)..(1050): n is a, c, g, or t

SEQ ID NO: 225174 - DNA, 923 bp, Homo Sapiens; identical to SEQ ID NO: 190400
  misc_feature (800)..(809): n is a, c, g, or t

SEQ ID NO: 225175 - DNA, 1326 bp, Homo Sapiens; identical to SEQ ID NO: 190402

SEQ ID NO: 225176 - DNA, 1143 bp, Homo Sapiens; identical to SEQ ID NO: 190403
  misc_feature (883)..(900): n is a, c, g, or t

SEQ ID NO: 225177 - DNA, 868 bp, Homo Sapiens; identical to SEQ ID NO: 190408

SEQ ID NO: 225178 - DNA, 1106 bp, Homo Sapiens; identical to SEQ ID NO: 190410

SEQ ID NO: 225179 - DNA, 943 bp, Homo Sapiens; identical to SEQ ID NO: 190411

SEQ ID NO: 225180 - DNA, 668 bp, Homo Sapiens
gtaatggggggaaggatgagttagagtgattcagaggggaccactgagggacggatttcacctaccaggacgtgagattttcatagctggcactcggggctatggctgaagtgtctgagaaaagaggaacgtggaaaagcaacctgatatcactccactgggaggccagaggggctctcaaataggacctgggttccaggcatgcttccccagggagagcaggagctgctttctcagtggggtgagaggccagcaggctgggtgggctggctggcatgtgcccaaggctcctgttcagctgggcttttctctcccgataggaagaggtgaaaaacttcatcacccgagagaacctggaggcacgggtggaagcagcattggactcccggaagaactacaactgggccatcaccagagaggggctggtggtcaggccacaacgcagggactcctaggggccgagtaaggacagtgcccgccagggaccatgtatgtatcatggcggaagagttggccctgacctggaataaagcagttggtgttgcttatgaggaaggttcagccttatccagcacagccttcacgttttgccctctgctgtcaccacttggtcagaaacttccaaacgcagtgccctgttctgccggtgtatacagcctcagcgcacc

SEQ ID NO: 225181 - DNA, 850 bp, Homo Sapiens; identical to SEQ ID NO: 190412

SEQ ID NO: 225182 - DNA, 1394 bp, Homo Sapiens
caactttgtacaaaaaagttggctgggtatctgaaactctaggaggtgtctttaccaaacttattaataggaataccactattccaaccaagaagagccaggtattctctactgccgctgatggtcaaacgcaagtggaaattaaagtgtgtcagggtgaaagagagatggctggagacaacaaactccttggacagtttactttgattggaattccaccagcccctcgtggagttcctcagattgaagttacatttgacattgatgccaatgggatagtacatgtttctgctaaagataaaggcacaggacgtgagcagcagattgtaatccagtcttctggtggattaagcaaagatgatattgaaaatatggttaaaaatgcagagaaatatgctgaagaagaccggcgaaagaaggaacgagttgaagcagttaatatggctgaaggaatcattcacgacacagaaaccaagatggaagaattcaaggaccaattacctgctgatgagtgcaacaagctgaaagaagagatttccaaaatgagggagctcctggctagaaaagacagcgaaacaggagaaaatattagacaggcagcatcctctcttcagcaggcatcactgaagctgttcgaaatggcatacaaaaagatggcatctgagcgagaaggctctggaagttctggcactggggaacaaaaggaagatcaaaaggaggaaaaacagtaataatagcagaaattttgaagccagaaggacaacatatgaagcttaggagtgaagagacttcctgagcagaaatgggcgaacttcagtctttttactgtgtttttgcagtattctatatataatttccttaatttgtaaatttagtgaccattagctagtgatcatttaatggacagtgattctaacagtataaagttcacaatattctatgtccctagcctgtcatttttcagctgcatgtaaaaggaggtaggatgaattgatcattataaagatttaactattttatgctgaagtgaccatattttcaaggggtgaaaccatctcgcacacagcaatgaaggtagtcatccatagacttgaaatgagaccacatatggggatgagatccttctagttagcctagtactgctgtactggcctgtatgtacatggggtccttcaactgaggccttgcaagtcaagctggctgtgccatgtttgtagatggggcagaggaatctagaacaatgggaaacttagctatttatattagtacagctattaaaacaaggtaggaatgaggctagacctttaacttccctaagcatacttttctagctaccttctgccctgtgtctggcacctacatccttgatgattgttctcttacccattctggaa

SEQ ID NO: 225183 - DNA, 899 bp, Homo Sapiens; identical to SEQ ID NO: 190418

SEQ ID NO: 225184 - DNA, 893 bp, Homo Sapiens
ctttgtacaaaaaagttggggaagtgacatcgtctttaaaccctgcgtggcaatccctgacgcaccgccgtgatgcccagggaagacagggcgacctggaagtccaactacttccttaagatcatccaactattggatgattatccgaaatgtttcattgtgggagcagacaatgtgggctccaagcagatgcagcagatccgcatgtcccttcgcgggaaggctgtggtgctgatgggcaagaacaccatgatgcgcaaggccatccgagggcacctggaaaacaacccagctctggagaaactgctgcctcatatccgggggaatgtgggctttgtgttcaccaaggaggacctcactgagatcagggacatgttgctggccaataaggtgccagctgctgcccgtgctggtgccattgccccatgtgaagtcactgtgccagcccagaacactggtctcgggcccgagaagacctcctttttccaggctttaggtatcaccactaaaatctccaggggcaccattgaaatcctgggtgtccgcaatgttgccagtgtctgtctgcagattggctacccaactgttgcatcagtaccccattctatcatcaacgggtacaaacgagtcctggccttgtctgtggagacggattacaccttcccacttgctgaaaaggtcaaggccttcttggctgatccatctgcctttgtggctgctgcccctgtggctgctgccaccacagctgctcctgctgctgctgcagccccagctaaagttgaagcccaggaagagtctgaagagtcggacgaagatatgggatttggtctctttgactaatcaccaaaaagcaaccaacttaaccagttttatttgcaaaacaaggaaataaa

SEQ ID NO: 225185 - DNA, 890 bp, Homo Sapiens; identical to SEQ ID NO: 190421

SEQ ID NO: 225186 - DNA, 1000 bp, Homo Sapiens
ttggcgtggaaggcccgggaccgcgggatgggtgtcggcgtgaccaggcctgagctccctgtctctcctcagtgacatcgtctttaaaccctgcgtggcaatccctgacgcaccgccgtgatgcccagggaagacagggcgacctggaagtccaactacttccttaagatcatccaactattggatgattatccgaaatgtttcattgtgggagcagacaatgtgggctccaagcagatgcagcagatccgcatgtcccttcgcgggaaggctgtggtgctgatgggcaagaacaccatgatgcgcaaggccatccgagggcacctggaaaacaacccagctctggagaaactgctgcctcatatccgggggaatgtgggctttgtgttcaccaaggaggacctcactgagatcagggacatgttgctggccaataaggtgccagctgctgcccgtgctggtgccattgccccatgtgaagtcactgtgccagcccagaacactggtctcgggcccgagaagacctcctttttccaggctttaggtatcaccactaaaatctccaggggcaccattgaaatcctgagtgatgtgcagctgatcaagactggagacaaagtgggagccagcgaagccacgctgctgaacatgctcaacatctcccccttctcctttgggctggtcatccagcaggtgttcgacaatggcagcatctacaaccctgaagtgcttgatatcacagaggaaactctgcattctcgcttcctggagggtgtccgcaatgttgccagtgtctgtctgcagattggctacccaactgttgcatcagtaccccattctatcatcaacgggtacaaacgagtcctggccttgtctgtggagacggattacaccttcccacttgctgaaaaggtcaaggccttcttggctgatccatctgcctttgtggctgctgcccctgtggctgctgccaccacagcttgctcctgctgctgctggc

SEQ ID NO: 225187 - DNA, 983 bp, Homo Sapiens; identical to SEQ ID NO: 190422

SEQ ID NO: 225188 - DNA, 1064 bp, Homo Sapiens; identical to SEQ ID NO: 190423

SEQ ID NO: 225189 - DNA, 708 bp, Homo Sapiens; identical to SEQ ID NO: 190424

SEQ ID NO: 225190 - DNA, 616 bp, Homo Sapiens; identical to SEQ ID NO: 190425
  misc_feature (435)..(487): n is a, c, g, or t

SEQ ID NO: 225191 - DNA, 1240 bp, Homo Sapiens
caaattgatgagcaatgctttttttttaaatgccaactttgtacaaaaaagttggcgctctcagctctcggcgcacggcccagcttccttcaaaatgtctactgttcacgaaatcctgtgcaagctcagcttggagggtgatcactctacacccccaagtgcatatgggtctgtcaaagcctatactaactttgatgctgagcgggatgctttgaacattgaaacagccatcaagaccaaaggtgtggatgaggtcaccattgtcaacattttgaccaaccgcagcaatgcacagagacaggatattgccttcgcctaccagagaaggaccaaaaaggaacttgcatcagcactgaagtcagccttatctggccacctggagacggtgattttgggcctattgaagacacctgctcagtatgacgcttctgagctaaaagcttccatgaaggggctgggaaccgacgaggactctctcattgagatcatctgctccagaaccaaccaggagctgcaggaaattaacagagtctacaaggaaatgtacaagactgatctggagaaggacattatttcggacacatctggtgacttccgcaagctgatggttgccctggcaaagggtagaagagcagaggatggctctgtcattgattatgaactgattgaccaagatgctcgggatctctatgacgctggagtgaagaggaaaggaactgatgttcccaagtggatcagcatcatgaccgagcggagcgtgccccacctccagaaagtatttgataggtacaagagttacagcccttatgacatgttggaaagcatcaggaaagaggttaaaggagacctggaaaatgctttcctgaacctggttcagtgcattcagaacaagcccctgtattttgctgatcggctgtatgactccatgaagggcaaggggacgcgagataaggtcctgatcagaatcatggtctcccgcagtgaagtggacatgttgaaaattaggtctgaattcaagagaaagtacggcaagtccctgtactattatatccagcaagacactaagggcgactaccaaaagcgctgctgtacctgtgtggtggagatgactgaagcccgacacggcctgagcgtccagaaatggtgctcaccatgcttccagctaacaggtctagaaaaccagcttgcgaataacagtccccgtggccatccctgtgagggtgacgtttagcataccccc

SEQ ID NO: 225192 - DNA, 947 bp, Homo Sapiens
tgtacaaaaagttggctcagctctcggcgcacggcccaggttatcttgtagcatagcaacttcggatttcactctacccggagagtttcccgcttggttgaacacattggcctcaggaagcttccttcaaaatgtctactgttcacgaaatcctgtgcaagctcagcttggagggtgatcactctacacccccaagtgcatatgggtctgtcaaagcctatactaactttgatgctgagcgggatgctttgaacattgaaacagccatcaagaccaaaggtgtggatgaggtcaccattgtcaacattttgaccaaccgcagcaatgcacagagacaggatattgccttcgcctaccagagaaggaccaaaaaggaacttgcatcagcactgaagtcagccttatctggccacctggagacgttgattttgggcctattgaagacacctgctcagtatgacgcttctgagctaaaagcttccatgaaggggctgggaaccgacgaggactctctcattgagatcatctgctccagaaccaaccaggagctgcaggaaattaacagagtctacaaggaaatgtacaagactgatctggagaaggacattatttcggacacatctggtgacttccgcaagctgatggttgccctggcaaagggtagaagagcagaggatggctctgtcattgattatgaactgattgaccaagatgctcgggatctctatgacgctggagtgaagaggaaaggaactgatgttcccaagtggatcagcatcatgaccgagcggagcgtgccccacctccagaaagtatttgataggtacaagagttacagcccttatgacatgttggaaagcatcaggaaagaggttaaaggagacctggaaaatgctttcctgaacctggttcagtgcattcagaacaagcccctgtattttgctgat

SEQ ID NO: 225193 - DNA, 1078 bp, Homo Sapiens; identical to SEQ ID NO: 190426

SEQ ID NO: 225194 - DNA, 953 bp, Homo Sapiens; identical to SEQ ID NO: 190427

SEQ ID NO: 225195 - DNA, 508 bp, Homo Sapiens; identical to SEQ ID NO: 190428

SEQ ID NO: 225196 - DNA, 1246 bp, Homo Sapiens
ttgggaggccggtacagctgcgcgtctgcgggaataggtgcagcgggcccttggcgggggactctgagggaggagctggggacggcgaccctaggagagttctttggggtgactttcaagatggactctactctaacagcaagtgaaatccggcagcgatttatagatttcttcaagaggaacgagcatacgtatgttcactcgtctgccaccatcccattggatgaccccactttgctctttgccaatgcaggcatgaaccagtttaaacccattttcctgaacacaattgacccatctcaccccatggcaaagctgagcagagctgccaatacccagaagtgcatccgggctgggggcaaacataatgacctggacgatgtgggcaaggatgtctatcatcacaccttcttcgagatgctgggctcttggtcttttggagattactttaaggaattggcatgtaagatggctctggaactcctcacccaagagtttggcattcccattgaaagactttatgttacttactttggcggggatgaagcagctggcttagaagcagatctggaatgcaaacagatctggcaaaatttggggctggatgacaccaaaatcctcccaggcaacatgaaggataacttctgggagatgggtgacacgggcccctgtggtccttgcagtgagatccactacgaccggattggtggtcgggacgccgcacatcttgtcaaccaggacgaccctaatgtgctggagatctggaaccttgtgttcatccagtataacagggaagctgatggcattctgaaacctcttcccaagaaaagcattgacacagggatgggcctggaacgactggtatctgtgctgcagaataagatgtccaactatgacactgacctttttgtcccttactttgaagccattcagaagggcacaggtgcccgaccatacactgggaaagttggtgctgaggatgccgatgggattgacatggcctaccgggtgctggctgaccacgctcggaccatcactgtggcactggctgatggtggccggcctgacaacacagggcgtggatatgtgttgagacggattctccgccgagctgtccgatacgcccatgaaaagctcaatgccagcacgggcttctttgctacgttagtggatgttgtcgtccagtccctgggagatgcatttcctgagctgaagaaggacccagacatggtgaaggacatcatta

SEQ ID NO: 225197 - DNA, 1565 bp, Homo Sapiens; identical to SEQ ID NO: 190432

SEQ ID NO: 225198 - DNA, 572 bp, Homo Sapiens; identical to SEQ ID NO: 190433
  misc_feature (79)..(105): n is a, c, g, or t

SEQ ID NO: 225199 - DNA, 937 bp, Homo Sapiens
ctttgtacaaataatctgattttattttcacaactaacatccattccccttcatttaaacaccttttgtgttttacttcagtgaggagattggagtctgaatggatctgttttccaagagattctgagaaatttttgtattcagcagttggaaagctctctattctagttgataaaacttcccttttttgatgtagatgcagatattctatacagttctgttgtcttttactaggactgtaaacttttgtgataaaattcaaataagattttatttcttggtaattttggctttcacaatttatctttaaatccttgagcaatctgtatacaattaagagatttctgacatttattcttacactaaatggatcaactctaggatttaggcatgttaacttctgttgtgttttgaatctctccagagttgcatgtagatagcatttatttctgtgcccttaaacccatttagaaaataactacaaagtaaaaatgtagaggaaatagaaatgtattttttcatgaacattttgatacaaatttcatcatttaatgattcaccaatttcttgcattaatttgaatttaagcatttaattcaaagagaggggagcatccattattgatacatgtgggcttttaaaaactccatcctttataaatagtcaaggtttgggccacacaaagtatatttttatcatggaaaaatttcaactcctcaagccgtaatgttgaacagaattggagtattttctttataatttcttgaacaggcaaatgaaagcttattatagaatgcatgtattttcttttatctttggaacatcagcaccagtatattgctggcagctattgtattaaaaaataaagtatattttcactatcataaaggattcttttttcccccctcatgaaaataaacaacaacttggggtaaaa

SEQ ID NO: 225200 - DNA, 1288 bp, Homo Sapiens; identical to SEQ ID NO: 190435
  misc_feature (446)..(454): n is a, c, g, or t
  misc_feature (923)..(953): n is a, c, g, or t

SEQ ID NO: 225201 - DNA, 1208 bp, Homo Sapiens; identical to SEQ ID NO: 190437

SEQ ID NO: 225202 - DNA, 1231 bp, Homo Sapiens; identical to SEQ ID NO: 190438
  misc_feature (83)..(91): n is a, c, g, or t

SEQ ID NO: 225203 - DNA, 1521 bp, Homo Sapiens; identical to SEQ ID NO: 190440
  misc_feature (566)..(596): n is a, c, g, or t
  misc_feature (1065)..(1073): n is a, c, g, or t

SEQ ID NO: 225204 - DNA, 1270 bp, Homo Sapiens
ttgggtttcaaagggagcgcacttccgctgccctttctttcgccagccttacgggcccgaaccctcgtgtgaagggtgcagtacctaagccggagcggggtagaggcgggccggcacccccttctgacctccagtgccgccggcctcaagatcagacatggcccagaacttgaaggacttggcgggacggctgcccgccgggccccggggcatgggcacggccctgaagctgttgctgggggccggcgccgtggcctacggtgtgcgcgaatctgtgttcaccgtggaaggcgggcacagagccatcttcttcaatcggatcggtggagtgcagcaggacactatcctggccgagggccttcacttcaggatcccttggttccagtaccccattatctatgacattcgggccagacctcgaaaaatctcctcccctacaggctccaaagacctacagatggtgaatatctccctgcgagtgttgtctcgacccaatgctcaggagcttcctagcatgtaccagcgcctagggctggactacgaggaacgagtgttgccgtccattgtcaacgaggtgctcaagagtgtggtggccaagttcaatgcctcacagctgatcacccagcgggcccaggtatccctgttgatccgccgggagctgacagagagggccaaggacttcagcctcatcctggatgatgtggccatcacagagctgagctttagccgagagtacacagctgctgtagaagccaaacaagtggcccagcaggaggcccagcgggcccaattcttggtagaaaaagcaaagcaggaacagcggcagaaaattgtgcaggccgagggtgaggccgaggctgccaagatgcttggagaagcactgagcaagaaccctggctacatcaaacttcgcaagattcgagcagcccagaatatctccaagacgatcgccacatcacagaatcgtatctatctcacagctgacaaccttgtgctgaacctacaggatgaaagtttcaccaggggaagtgacagcctcatcaagggtaagaaatgagcctagtcaccaagaactccacccccagaggaagtggatctgcttctccagtttttgaggagccagccaggggtccagcacagccctaccccgccccagtatcatgcgatgggtcccccacaccgggttccctgaacccctcttggattaaggaagactgaagactagccccttttctggggaattactttcctcctccctgtgttaactggg

SEQ ID NO: 225205 - DNA, 872 bp, Homo Sapiens; identical to SEQ ID NO: 190441

SEQ ID NO: 225206 - DNA, 926 bp, Homo Sapiens
ttgggaaggaaagacaatccttcacaggacagtctggcctctaactgctctgccaaagaaattggccccaccccccttcccagacatatatttccagtacctgacagtgtgctgaacatgttcccgggcaccgaggaggggcctgaaaatgacagcacaaaacacgggggacgggtgcgcaccttcccccacgagcgaggcaactgggccacccacgtctatgtaccatatgaagccaaggatgagttcctggatctgcttgatgtgttgctgccccatgcccatacatatgtcccccggctggtaaggatgaaggtgttccacctcagcctgtcccagagtgtggttctgcgccaccactggatcctccccttcgtgcaggctctgaaagcccgtatgacctccttccacagattcttctttactgccaaccaggtaaagatttacaccaatcaagagaaaaccaggacctttattgggcttgaggtcacttcagggcatgcccagttcctggacctggtttcagaggtggacagagtcatggaggaattcaacctcaccactttctaccaggatccttctttccacctcagcctggcctggtgtgtgggtgatgcacgtctccagctggaggggcagtgcctgcaggaactacaggcaatcgtggatgggtttgaagatgctgaggtgctgctgcgcgtgcacactgagcaagtccgctgcaagtctgggaacaagttcttctcgatgcctttgaagtgagcaccagaggccttcctcctccagggccctctgcagaccaggctgagatggaggaacctgctaaaatcgatggagatgcttctagcctcccagtaggaggccccagccatgccttcaacctggcaggaggtgtagccactcctcatcctccctgagtgctgata

SEQ ID NO: 225207 - DNA, 955 bp, Homo Sapiens
ttgggaagaaatccacaaagactcacagtctgctggtgggcagagaagacagaaacgacatgagcacagcaggaaaagtaatcaaatgcaaagcagctgtgctatgggaggtaaagaaacccttttccattgaggatgtggaggttgcacctcctaaggcttatgaagttcgcattaagatggtggctgtaggaatctgtcgcacagatgaccacgtggttagtggcaacctggtgaccccccttcctgtgattttaggccatgaggcagccggcatcgtggagagtgttggagaaggggtgactacagtcaaaccaggtgataaagtcatcccgctctttactcctcagtgtggaaaatgcagagtttgtaaaaacccggagagcaactactgcttgaaaaatgatctaggcaatcctcgggggaccctgcaggatggcaccaggaggttcacctgcagggggaagcccattcaccacttccttggcaccagcaccttctcccagtacacggtggtggatgagaatgcagtggccaaaattgatgcagcctcgcccctggagaaagtctgcctcattggctgtggattctcgactggttatgggtctgcagttaacgttgccaaggtcaccccaggctctacctgtgctgtgtttggcctgggaggggtcggcctatctgctgttatgggctgtaaagcagctggagcagccagaatcattgcggtggacatcaacaaggacaaatttgcaaaggccaaagagttgggtgccactgaatgcatcaaccctcaagactacaagaaacccatccaggaagtgctaaaggaaatgactgatggaggtgtggatttttcgtttgaagtcatcggtcggcttgacaccatgatggcttccctgttatgttgtcatgaggcatgtggcacaagcgtcatcgtagggtacctctgcttccc

SEQ ID NO: 225208 - DNA, 932 bp, Homo Sapiens
  misc_feature (656)..(669): n is a, c, g, or t
  misc_feature (855)..(864): n is a, c, g, or t
ttggctgagttattggtatgaccctgtggaaacacacattattttatgtaaatataggctaaagacttaatgtcctttagcttgtgtatataattgtgttgtatagtctcagagtacattctaaccctacatttctaatcattgttattggtaatcttttctgtgaatattaggtttcctccagaaatagtccgttatttgggaaagttaactgtgtgcacttttagatattaactacatttacaggcaaatcactgtaatgagaatggtactggaaaaatactgaatagacttgctaaatggcacatgcactacaagaggaaccttttgggttatttaatatgtacagaaaacattagaaaaaatttattacagaattctaattccagtatgaatagtggaaacccatctgtaaattagatggatgttggatggaaaatgacattgctaaatttgagaatttctttttacctactaatgtagattgctttgtataataaaacacagggtttggaaggttttgttacagggagcatggtctgttgaagatttttaaaatgtatttttctagattaacttctgtacatgaaatgtctaataaaactataagaggtttagagatttttccattggaaatgtgcattttggtttctaannnnnnnnnnnnnncatttactggcatactgttatacctcatttttaaaaatcaactgaatccaatatttcctgtggcaaataacactttcctcatttcataccttttctcctctcttccatgccaacatttctccacccacaacgtacactttttatttctccatcaatatttgaaagcgagtgatttgtgaccaggannnnnnnnnncttagggttgcatttataatttacagattgccttccttgggaacaagtatttttttgtatgatctgtc

SEQ ID NO: 225209 - DNA, 824 bp, Homo Sapiens
ttggctcaaggatctgcattcaggcctgctccacaaatgattcatttcagccccagcgccccagcctcaccttctctggtgataactccagcacccagggatggagagtcatggggaccctattaggtctcggtgcagtgttggcctatcaggaccatcggtgtagggctgctcaggagtcaacacacatatacactaaggaggaagtgagttcccacaccagccctgagactgggatctgggtgactctgggctctgaggtctttgatgtcacagaatttgtggacctacatccaggggggccttcaaagctgatgctagcagctgggggtcccctagagcccttctgggccctctatgctgttcacaaccagtcccatgtgcgtgagttactggctcagtacaagattggggagctgaatcctgaagacaaggtagcccccaccgtggagacctctgacccttatgctgatgatcctgtacgtcacccagccctgaaggtcaacagccagcggccctttaatgcagagcctccccctgagctgctgacagaaaactacatcacacccaaccctatcttcttcacccggaaccatctgcctgtacctaacctggatccagacacctatcgcttacacgtagtaagagcacctgggggtcagtcactgtctctttccctggatgacttgcacaactttcccaggtacgagatcacagtcactctgcagtgtgccggcaaccgacgctctgagatgactcaatcaaagaagtaaaagtctggagtggagaacaggagccatcagcactgcacgctgggctggggc

SEQ ID NO: 225210 - DNA, 878 bp, Homo Sapiens
  misc_feature (281)..(321): n is a, c, g, or t
ttggcgcccacgtgcccccatcattgctgtgacccggaatccccagacagctcgtcaggcccacctgtaccgtggcatcttccctgtgctgtgcaaggacccagtccaggaggcctgggctgaggacgtggacctccgggtgaactttgccatgaatgttggcaaggcccgaggcttcttcaagaagggagatgtggtcattgtgctgaccggatggcgccctggctccggcttcaccaacaccatgcgtgttgttcctgtgccgtgatggaccccagagnnnnnnnnnnnnnnnnnnnnnnnnnnnnnnnnnnnnnnnnntccattaggccagcaacgcttgtagaactcactctgggctgtaacgtggcactggtaggttgggacaccagggaagaagatcaacgcctcactgaaacatggctgtgtttgcagcctgctctagtgggacagcccagagcctggctgcccatcatgtggccccacccaatcaagggaagaaggaggaatgctggactggaggcccctggagccagatggcaagagggtgacagcttcctttcctgtgtgtactctgtccagttcctttagaaaaaatggatgcccagaggactcccaaccctggcttggggtcaagaaacagccagcaagagttaggggccttagggcactgggctgttgttccattgaagccgactctggccctggcccttacttgcttctctagctctctaggcctctccagtttgcacctgtccccaccctccactcagctgtcctgcagcaaacactccaccctccaccttccattttcccccactactgcagcacctccaggcctgttgctatagagcctacctgtatgtcaataaacaaca

SEQ ID NO: 225211 - DNA, 760 bp, Homo Sapiens; identical to SEQ ID NO: 190444
  misc_feature (410)..(457): n is a, c, g, or t

SEQ ID NO: 225212 - DNA, 1369 bp, Homo Sapiens; identical to SEQ ID NO: 190445
  misc_feature (113)..(161): n is a, c, g, or t

SEQ ID NO: 225213 - DNA, 933 bp, Homo Sapiens; identical to SEQ ID NO: 190446

SEQ ID NO: 225214 - DNA, 1304 bp, Homo Sapiens; identical to SEQ ID NO: 190447

SEQ ID NO: 225215 - DNA, 909 bp, Homo Sapiens
aaaagttggggaagcttatccttcaacgagcagaagctgctgaagcaggtggacttcctgaactgggaggtcaccgaccacaacctgcacgagctgcgcgtgctgcggcgttaccggctgcagcggcgggaggactacacgcgctacaaccagctgagccgtgccgtgcgtgagctggcgcggcgcctgcgcgacctgcccgaacgcgaccagttccgcgtgcgcgcttcggccgcgctgctggacaagctgtatgctctcggcttggtgcccacgcgcggttcgctggagctctgcgacttcgtcacggcctcgtccttctgccgccgccgcctccccaccgtgctcctcaagctgcgcatggcgcagcaccttcaggctgccgtggcctttgtggagcaagggcacgtacgcgtgggccctgacgtggttaccgaccccgccttccttgtcacgcgcagcatggaggactttgtcacttgggtggactcgtccaagatcaagcggcacgtgctagagtacaatgaggagcgcgatgacttccatctggaagcctagcggatctcccactttgcatggctgtcttttacagatgggaaaactgaggcctgatgctggagattctatgagggtgctctcctcaagggtatcagacggtcgtaggttcttaaaaatttgattcatcagtggcaggccatgcatagagccacgggaggtgcgtccttgtttttccaggaaatgttcttaaaacttggactactgattattaattgactgtgcctttaggaaacattggggaagtaactttgggtgcacccaaggggtactgctgggcttcttgtgtagggaactcttggtaatgtaaaaagggaaaaccgggaaatcccccagccctgtttcccctttatc

SEQ ID NO: 225216 - DNA, 849 bp, Homo Sapiens
tttgtacaaaaaagttggcggagcgcggcggcaagatggcagtgcaaatatccaagaagaggaagtttgtcgctgatggcatcttcaaagctgaactgaatgagtttcttactcgggagctggctgaagatggctactctggagttgaggtgcgagttacaccaaccaggacagaaatcattatcttagccaccagaacacagaatgttcttggtgagaagggccggcggattcgggaactgactgctgtagttcagaagaggtttggctttccagagggcagtgtagagctttatgctgaaaaggtggccactagaggtctgtgtgccattgcccaggcagagtctctgcgttacaaactcctaggagggcttgctgtgcggagggcctgctatggtgtgctgcggttcatcatggagagtggggccaaaggctgcgaggttgtggtgtctgggaaactccgaggacagagggctaaatccatgaagtttgtggatggcctgatgatccacagcggagaccctgttaactactacgttgacactgctgtgcgccacgtgttgctcagacagggtgtgctgggcatcaaggtgaagatcatgctgccctgggacccaactggtaagattggccctaagaagcccctgcctgaccacgtgagcattgtggaacccaaagatgagatactgcccaccacccccatctcagaacaaaaagggtgggaagccagagccgcctgccatgccccagccagtccccacagcataacagggtctccttggcagctgtattctggagtctggatgttgctctctaagacctttaattaaatttttgtacaaggacaaa

SEQ ID NO: 225217 - DNA, 836 bp, Homo Sapiens; identical to SEQ ID NO: 190448

SEQ ID NO: 225218 - DNA, 556 bp, Homo Sapiens; identical to SEQ ID NO: 190449

SEQ ID NO: 225219 - DNA, 664 bp, Homo Sapiens; identical to SEQ ID NO: 190453

SEQ ID NO: 225220 - DNA, 925 bp, Homo Sapiens; identical to SEQ ID NO: 190455

SEQ ID NO: 225221 - DNA, 1222 bp, Homo Sapiens
gaatgagaaaacatttattccgtctccaaacagcatcccaggccgggcatctcccccacgattttataatacactcggcacagacagagtctgggagccatggggcacccctgccctccccaggcttctaagtaacaactgcagaatatttacataaagctgggtgttgtcaggcaaagcccttccctgctgccaggggtgggagcaaggaggaagtgccatgagcaccagccccgccctcacaccacgggaggcagcccagaggccaccggcacagggtggtggcccccagatcatacagcagtgggcacaggggaagcaaacctgagtgaggacacaagagcctggtccggctccgctgcacagggcaggtgtgatggcccccacgagtctttggcagagaacgcagataatagcggctcccacggcctgacccgggccggggggaagctgaggcacttgtcagtagcacatgggcacctgctggcttctagccactgcaggcggggctgaggtcattaaaagcgaggaaaaacactagctaaaaaccctttcctaaaagtgccctggaggagtgagcggctgactgaagccctctgggcacaggcacttggggtgtggctctgccagcccccgccaggctatgaggctccttagctgtgtgtcagctgcacaggatggaacaggtgaaagagaggggctggcagttccaggaggctcatgggaaagtccagggcagaggggagggccctctctgtcccccttcccacgctaaccgccgctcagtacacagggggcggctggtagccctcggtggtctccgcgttctgggtgaagggtggctgttggtagttgtccacagatgcacctgggtaggaggcgtaggcagtgttggggtccggagtggggtcaacgtaattctggatgaagtcgtccacgccagccttgtagcgctggtaggccagggaggccagcacaccctgagaagagcaggtcaccaatgaccaggtacttgcggtcagtggcgttgctgatctgggggaaatacgcgtcgaccaccaagaagaaggccgaggccaggaaggccagcaccccgatggcactgccatagcggcaggcatcctcgttgcggttgaacacgcagtacatctgcttagactcgtgggcattgctgccaacttttttgtacaaagttggctataaatagaaaaagcgattgctc

SEQ ID NO: 225222 - DNA, 999 bp, Homo Sapiens; identical to SEQ ID NO: 190456
  misc_feature (905)..(924): n is a, c, g, or t

SEQ ID NO: 225223 - DNA, 1264 bp, Homo Sapiens; identical to SEQ ID NO: 190457
  misc_feature (1112)..(1140): n is a, c, g, or t

SEQ ID NO: 225224 - DNA, 462 bp, Homo Sapiens; identical to SEQ ID NO: 190458
  misc_feature (252)..(280): n is a, c, g, or t

SEQ ID NO: 225225 - DNA, 864 bp, Homo Sapiens; identical to SEQ ID NO: 190459
  misc_feature (656)..(684): n is a, c, g, or t

SEQ ID NO: 225226 - DNA, 965 bp, Homo Sapiens; identical to SEQ ID NO: 190460
  misc_feature (790)..(818): n is a, c, g, or t

SEQ ID NO: 225227 - DNA, 1334 bp, Homo Sapiens
ttggcgcttgtgtttgcaacactaggtctggatgggaggtgaggggtgtgcgtatggctgccatgccagtgtctgtgcacatccctgtctgttggtctccatggccactgtggactgggacccttgggggaagcctgcccatgtcgggctgtgggaggctgatcagtgcgtgtgagagtggcttcccttctgcctgactccccactccctgacctgccccttccttgtttttcctcctactggtctccaccaaggctttgttagcccccaccctgcctggtgtgcagctaacccctccctccccacagccagaggaggccacagacccctcaggggagttccgcgctggggtctgggctgtgctccctcactaaagggaaggaaaggaagctgggcgtcctctgggccccccaacacacgtcccatttagccctgcacagcggtctccttcccctaagccagcactgctgctccctggagcccgggaaggaggctgcctggctggaggcccgagccgatggcgcctgtgctgaggatttgtgctgtgatttgggcaaatcattccaggtctttgggcctccaccccctcgtctctagtggacatttgagatcagagagcaccacagggctggctttgtgccctaacccctgggatgcagcctgcctttccataaagtcacctaggtgaggataggcgcgggagcctcggcatgacaccatggagatcggggccctcttcccagtgggttcactccttttcacacctgctgggtccctcctcacccagcaggcctggtccacctctcattgcaagccccaagcactgagccagcaggtgccagggagccacccgccccccatcgcttctgcacacctcagactcaccccatcaccttggcagcaaagcactggctctgccgtctgacccctgatccaggcagccccctccgcagagaaaagggttggggagaagcctctgcagtcctggaagatgtggggtgctgggtgagaggcatcagcccccacaagtatgtttttgtgtcttaagatagcagtttactttgaaaaagtgaaaaaggcttccgggctgtcctctgcccagtgagatggaggacgctagagaaagtgctgagtgtcccgagagaggcccccgagccagtgcatggaggtccttcggcctggctcagctgggctgcaggatgcccactttgaggagggaggcacagggcttgggcgaggggcacaggccatcagaactgcccggctttttggaaactgaggacccaacactaaccacgtttacacgacttgagttttgaaccccgattaatgtc

SEQ ID NO: 225228 - DNA, 913 bp, Homo Sapiens
ttgtacaaaaaagttgggtagttttctctgcgcgtgtgcgttttccctcctccccgccctcagggtccacggccaccatggcgtattaggggcagcagtgcctgcggcagcattggcctttgcagcggcggcagcagcaccaggctctgcagcggcaacccccagcggcttaagccatggcgcttctcacggcattcagcagcagcgttgctgtaaccgacaaagacaccttcgaattaagcacattcctcgattccagcaaagcaccgcaacatgaccgaaatgagcttcctgagcagcgaggtgttggtgggggacttgatgtcccccttcgacccgtcgggtttgggggctgaagaaagcctaggtctcttagatgattacctggaggtggccaagcacttcaaacctcatgggttctccagcgacaaggctaaggcgggctcctccgaatggctggctgtggatgggttggtcagtccctccaacaacagcaaggaggatgccttctccgggacagattggatgttggagaaaatggatttgaaggagttcgacttggatgccctgttgggtatagatgacctggaaaccatgccagatgaccttctgaccacgttggatgacacttgtgatctctttgcccccctagtccaggagactaataagcagcccccccagacggtgaacccaattggccatctcccagaaagtttaacaaaacccgaccaggttgcccccttcaccttcttacaacctcttcccctttccccaggggtcctgtcctccactccagatcattcctttagtttagagctgggcagtgaagtggatatcactgaaggagataggaagccagactacactgcttacgttgccatgatccctcagtgcataaaggaggaagaacccc

SEQ ID NO: 225229 - DNA, 990 bp, Homo Sapiens; identical to SEQ ID NO: 190461

SEQ ID NO: 225230 - DNA, 953 bp, Homo Sapiens; identical to SEQ ID NO: 190462

SEQ ID NO: 225231 - DNA, 836 bp, Homo Sapiens; identical to SEQ ID NO: 190463

SEQ ID NO: 225232 - DNA, 1832 bp, Homo Sapiens
ttggggatttatttcccctttgttgactcggccatcggcctgccgggcctggcgtttcccagaaggcccagcgccgggaaggggtttgcagctgctccgtcatcgtgcggcccgacgctatctcgcgctcgtgtgcaggcccggctcggctcctggtccccggtgcgagggttaacgcgaggccccggcctcggtccccggactaggccgtgaccccgggtgccatgaagcaggagggctcggcgcggcgccgcggcgcggacaaggcgaaaccgccgcccggcggaggagaacaagaacccccaccgccgccggccccccaggatgtggagatgaaagaggaggcagcgacgggtggcgggtcgacgggggaggcagacggcaagacggcggcggcagcggctgagcactcccagcgagagctggacacagtcaccttggaggacatcaaggagcacgtgaaacagctagagaaagcggtttcaggcaaggagccgagattcgtgctgcgggccctgcggatgctgccttccacatcacgccgcctcaaccactatgttctgtataaggctgtgcagggcttcttcacttcaaataatgccactcgagactttttgctccccttcctggaagagcccatggacacagaggctgatttacagttccgtccccgcacgggaaaagctgcgtcgacacccctcctgcctgaagtggaagcctatctccaactcctcgtggtcatcttcatgatgaacagcaagcgctacaaagaggcacagaagatctctgatgatctgatgcagaagatcagtactcagaaccgccgggccctagaccttgtagccgcaaagtgttactattatcacgcccgggtctatgagttcctggacaagctggatgtggtgcgcagcttcttgcatgctcggctccggacagctacgcttcggcatgacgcagacgggcaggccaccctgttgaacctcctgctgcggaattacctacactacagcttgtacgaccaggctgagaagctggtgtccaagtctgtgttcccagagcaggccaacaacaatgagtgggccaggtacctctactacacagggcgaatcaaagccatccagctggagtactcagaggcccggagaacgatgaccaacgcccttcgcaaggcccctcagcacacagctgtcggcttcaaacagacggtgcacaagcttctcatcgtggtggagctgttgctgggggagatccctgaccggctgcagttccgccagccctccctcaagcgctcactcatgccctatttccttctgactcaagctgtcaggacaggaaacctagccaagttcaaccaggtcctggatcagtttggggagaagtttcaagcagatgggacctacaccctaattatccggctgcggcacaacgtgattaagacaggtgtacgcatgatcagcctctcctattcccgaatctccttggctgacatcgcccagaagctgcagttggatagccccgaagatgcagagttcattgttgccaaggccatccgggatggtgtcattgaggccagcatcaaccacgagaagggctatgtccaatccaaggagatgattgacatctattccacccgagagccccagctagccttccaccagcgcatctccttctgcctagatatccacaacatgtctgtcaaggccatgaggtttcctcccaaatcgtacaacaaggacttggagtctgcagaggaacggcgtgagcgagaacagcaggacttggagtttgccaaggagatggcagaagatgatgatgacagcttcccttgagct

SEQ ID NO: 225233 - DNA, 338 bp, Homo Sapiens; identical to SEQ ID NO: 190473
  misc_feature (225)..(248): n is a, c, g, or t

SEQ ID NO: 225234 - DNA, 690 bp, Homo Sapiens
tttgtacaaaaaagttggccaaaatatgcccggtgctatccgcccagctgctcctagaccaccatttagtactatgagaccagcttcttcacaggttccacgagtcatgtcaacacagcgtgttgctaacacatcaacacagacaatgggtccacgtcctgcagctgcagccgctgcagctactcctgctgtccgcaccgttccacagtataaatatgctgcaggagttcgcaatcctcagcaacatcttaatgcacagccacaagttacaatgcaacagcctgctgttcatgtacaaggtcaggaacctttgactgcttccatgttggcatctgcccctcctcaagagcaaaagcaaatgttgggtgaacggctgtttcctcttattcaagccatgcaccctactcttgctggtaaaatcactggcatgttgttggagattgataattcagaacttcttcatatgctcgagtctccagagtcactccgttctaaggttgatgaagctgtagctgtactacaagcccaccaagctaaagaggctgcccagaaagcagttaacagtgccaccggtgttccaactgtttaaaattgatcagggaccatgaaaagaaacttgtgcttcaccgaagaaaaatatctaaacatcgaaaaacttaaatattatggaaaaaaaacattgcaaaatat

SEQ ID NO: 225235 - DNA, 1251 bp, Homo Sapiens; identical to SEQ ID NO: 190481
  misc_feature (136)..(175): n is a, c, g, or t

SEQ ID NO: 225236 - DNA, 1563 bp, Homo Sapiens; identical to SEQ ID NO: 190484
  misc_feature (1178)..(1262): n is a, c, g, or t
  misc_feature (1336)..(1378): n is a, c, g, or t

SEQ ID NO: 225237 - DNA, 1341 bp, Homo Sapiens; identical to SEQ ID NO: 190485

SEQ ID NO: 225238 - DNA, 1031 bp, Homo Sapiens; identical to SEQ ID NO: 190486

SEQ ID NO: 225239 - DNA, 1163 bp, Homo Sapiens; identical to SEQ ID NO: 190488

SEQ ID NO: 225240 - DNA, 713 bp, Homo Sapiens; identical to SEQ ID NO: 190489

SEQ ID NO: 225241 - DNA, 1145 bp, Homo Sapiens
tttgtacaaaaaagttggcttttttaatcgttatagataatgtacttcaaaatgatggaaatctcaacagtatgagtatggcttggttaacgagcgctatgttcacagcctactttatctctccttgcttttctcacctctcacttacccccattccctattaccctattcttacctagcctcccccgacttcctcaaaacaaacaagagatggcaaagcagcagttctaccaagcccattggaattatcctttaattttacagataccacttgctgtaggctacggaccaagatgtccaaaattattcttgagcactgatataaattacggtcttctttgaggtcaaaattcagccatcatggtaggcagtgcttgaatgagaaaaggctcctggtgcatcttcaaaatgagtcctaaagaacatactgagtacttagaagtagaagaacataagatgtatttctgactaaaacaaatggctctttcacatgtgctttattagactctgggagagaaaattaaccaagtgcttcagaacaggtttttagtatttaattcttcacggtaagaaaatgaagttctaatgaactgtttctcccaaggttttaaaattgtcaagagttattctgtttgtttaaaaaataagaaacctctttaagcaatagattttgcttgggttttcttttttaaaaacataatactgtgcaggcaaggcactgtaaaagttttaattccttccagaagaaccagtggaagaatttaaatttggcgctacgatcaaaactactgaattagtagaaataatgatgtctaaagcttaccaacaaaagaaccctcagcagaataacaaaaactttgctcaggacatttgaggtcaaattgaagacggaaaccggaaaccgttttcttgtaagcccctagaggcagatcaggtaaagcatacatagtagagggaaaggagagaatggaaataaaactcaatattatgcagatttatgccttattttttagcattttttaaattgggtctttcaagctggttttggtttgtattagatctgtatagtttaattaactggtgatttagttttatatttaagctacaattaatcttttttctttggtgatatttatttatttgcc

SEQ ID NO: 225242 - DNA, 1340 bp, Homo Sapiens
  misc_feature (188)..(234): n is a, c, g, or t
gagaagtggggtgcttttaggatggcaagggacttcctgtaacaacgcatctcatattggaatgactattaaaaaaacaacaatgtgcaatcaaagtcttcggccacattgtgaactttgggggatgctcgctccaaccgactgctgtcactttcaccgttccagtttttaaatcctgagtcaagccnnnnnnnnnnnnnnnnnnnnnnnnnnnnnnnnnnnnnnnnnnnnnnngccatgccaatctcatcttgttttctgcgcaagttaggttttgtcaagaaagggtgtaacgcaactaagtcatagtccgcctagaagcatttgcggtggacgatggaggggccggactcgtcatactcctgcttgctgatccacatctgctggaaggtggacagcgaggccaggatggagccgccgatccacacggagtacttgcgctcaggaggagcaatgatcttgatcttcattgtgctgggtgccagggcagtgatctccttctgcatcctgtcggcaatgccagggtacatggtggtgccgccagacagcactgtgttggcgtacaggtctttgcggatgtccacgtcacacttcatgatggagttgaaggtagtttcgtggatgccacaggactccatgcccaggaaggaaggctggaagagtgcctcagggcagcggaaccgctcattgccaatggtgatgacctggccgtcaggcagctcgtagctcttctccagggaggagctggaagcagccgtggccatctcttgctcgaagtccagggcgacgtagcacagcttctccttaatgtcacgcacgatttcccgctcggccgtggtggtgaagctgtagccgcgctcggtgaggatcttcatgaggtagtcagtcaggtcccggccagccaggtccagacgcaggatggcatgggggagggcatacccctcgtagatgggcacagtgtgggtgaccccgtcaccggagtccatcacgatgccagtggtacggccagaggcgtacagggatagcacagcctggatagcaacgtacatggctggggtgttgaaggtctcaaacatgatctgggtcatcttctcgcggttggccttggggttcaggggggcctcggtcagcagcacggggtgctcctcgggagccaacacgcagctcattgtagaaggtgtggtgccagattttctccatgtcgtcccagttggtgacgatgccgtgctcgatggggtacttcagggtgaggatgcctctcttgctctgggcctcgtcgcccacataggaatccttctgacccatgcccaccatcacgcccccaacttttttgtacaaag

SEQ ID NO: 225243 - DNA, 1018 bp, Homo Sapiens; identical to SEQ ID NO: 190493

SEQ ID NO: 225244 - DNA, 372 bp, Homo Sapiens; identical to SEQ ID NO: 190494
  misc_feature (170)..(216): n is a, c, g, or t
  misc_feature (235)..(261): n is a, c, g, or t

SEQ ID NO: 225245 - DNA, 1559 bp, Homo Sapiens; identical to SEQ ID NO: 190495

SEQ ID NO: 225246 - DNA, 792 bp, Homo Sapiens; identical to SEQ ID NO: 190496

SEQ ID NO: 225247 - DNA, 480 bp, Homo Sapiens; identical to SEQ ID NO: 190498
  misc_feature (107)..(133): n is a, c, g, or t
  misc_feature (152)..(198): n is a, c, g, or t

SEQ ID NO: 225248 - DNA, 1239 bp, Homo Sapiens; identical to SEQ ID NO: 190499
  misc_feature (200)..(234): n is a, c, g, or t

SEQ ID NO: 225249 - DNA, 1364 bp, Homo Sapiens; identical to SEQ ID NO: 190500
  misc_feature (284)..(324): n is a, c, g, or t

SEQ ID NO: 225250 - DNA, 668 bp, Homo Sapiens; identical to SEQ ID NO: 190501
  misc_feature (359)..(399): n is a, c, g, or t

SEQ ID NO: 225251 - DNA, 991 bp, Homo Sapiens
  misc_feature (790)..(834): n is a, c, g, or t
acaaattgatgagcaatgcttttcctataaagagcaactttgtacaaaaaagttgggtcacccacactgtgcccatctacgaggggtatgccctcccccatgccatcctgcgtctggacctggctggccgggacctgactgactacctcatgaagatcctcaccgagcgcggctacagcttcaccaccacggccgagcgggaaatcgtgcgtgacattaaggagaagctgtgctacgtcgccctggcttcgagcaagagatggccacggctgcttccagctcctccctggagaagagctacgagctgcctgacggccaggtcatcaccattggcaatgagcggttccgctgccctgaggcactcttccagccttccttcctgggcatggagtcctgtggcatccacgaaactaccttcaactccatcatgaagtgtgacgtggacatccgcaaagacctgtacgccaacacagtgctgtctggcggcaccaccatgtaccctggcattgccgacaggatgcagaaggagatcactgccctggcacccagcacaatgaagatcaagatcattgctcctcctgagcgcaagtactccgtgtggatcggcggctccatcctggcctcgctgtccaccttccagcagatgtggatcagcaagcaggagtatgacgagtccggcccctccatcgtccaccgcaaatgcttctaggcggactatgacttagttgcgttacaccctttcttgacaaaacctaacttgcgcagaaaacaagatgagattggcatggcnnnnnnnnnnnnnnnnnnnnnnnnnnnnnnnnnnnnnnnnnnnnnggcttgactcaggatttaaaaactggaacggtgaaagtgacagcagtcggttggagcgagcatcccccaaagttcacaatgtggccgaagactttgattgcacattgttgtttttttaataatcaattcaaatatgagatgcgttgttacaagaagt

SEQ ID NO: 225252 - DNA, 616 bp, Homo Sapiens
  misc_feature (341)..(380): n is a, c, g, or t
ggggcgcgaggcctcatcattcaaagtaacacaaattcaaaaagtatataagaaaagattaaaaaaattttgcattacataatttacacgaaagcaatgctatcacctcccctgtgtggacttgggagaggactgggccattctccttagagagaagtggggtggcttttaggatggcaagggacttcctgtaacaatgcatctcatatttggaatgactattaaaaaaacaacaatgtgcaatcaaagtcctcggccacattgtgaactttgggggatgctcgctccaaccgactgctgtcaccttcaccgttccagtttttaaatcctgagtcaagccnnnnnnnnnnnnnnnnnnnnnnnnnnnnnnnnnnnnnnnntaaagccatgccaatctcatcttgttttctgcgcaagttaggttttgtcaagaaagggtgtaacgcaactaagtcatagtccgcctagaagcatttgcggtggacgatggaggggccggactcgtcatactcctgcttgctgatccacatctgctggaaggtggacagcgaggccaggatggagccgccgatccacacggagtacttgcgctcaggaggagcaatgatcttgccaa

SEQ ID NO: 225253 - DNA, 1548 bp, Homo Sapiens
  misc_feature (1409)..(1437): n is a, c, g, or t
ttggcgctgctccgccgcagtcgccgctccagtctatccggcactaggaacagccccgagcggcgagacggtccccgccatgtctgcggccatgagggagaggttcgaccggttcctgcacgagaagaactgcatgactgaccttctggccaagctcgaggccaaaaccggcgtgaacaggagcttcatcgctcttggtgtcatcggactggtggccttgtacctggtgttcggttatggagcctctctcctctgcaacctgataggatttggctacccagcctacatctcaattaaagctatagagagtcccaacaaagaagatgatacccagtggctgacctactgggtagtgtatggtgtgttcagcattgctgaattcttctctgatatcttcctgtcatggttccccttctactacatgctgaagtgtggcttcctgttgtggtgcatggccccgagcccttctaatggggctgaactgctctacaagcgcatcatccgtcctttcttcctgaagcacgagtcccagatggacagtgtggtcaaggaccttaaagacaaggccaaagagactgcagatgccatcactaaagaagcgaagaaagctaccgtgaatttactgggtgaagaaaagaagagcacctaaaccagactggatggaaacttcctgccctctctgtaccttcctactggagcttgatgttatattagggactgtggtataattattttaataatgttgccttggaaacatttttgagatattaaagattggaatgtgttgtaagtttctttgcttacttttactgtctatatatatagggagcactttaaacttaatgcagtgggcagtgtccacgtttttggaaaatgtattttgcctctgggtaggaaaagatgtatgttgctatcctgcaggaaatataaacttaaaataaaattatataccccacaggctgtgtactttactgggctctccctgcacgcattttctctgtagttacatttaggataatctttatggttctacttcctataatgtacaattttatataattctgaaatgtttttaatgtatttgtgcacatgtacatatggaaatgttactgtctgactacaacatgcatcatgctcatggggagggagcaggggaaggttgtatgtgtcatttataacttctgtacagtaagaccacctgccaaaagctggaggaaccattgtgctggtgtggtctactaaataatactttaggaaatacgtgattaatatgcaagtgaacaaagtgagaaatgaaatcgaatggagattggcctggttgtttccctagtatatggcatatgaataccaggatagctttataaagcagttagttagttactcactctagtgataaatcgggaaatttnnnnnnnnnnnnnnnnnnnnnnnnnnnnngagtaacctgtaactctcaattccctgaaaactagtaatactgtcttatctgctataaactttacatatttgtctattgtcagatgctacaatggaaaccatttctggttt

SEQ ID NO: 225254 - DNA, 1579 bp, Homo Sapiens
aaaaagttgggacaatgggccatgggacaagtgggtgcaaagctggttttgctggggacgacgctccccgagccgtgtttccttccatcgtcgggcgccccagacaccagggcgtcatggtgggcatgggccagaaggactcctacgtgggcgacgaggcccagagcaagcgtggcatcctgaccctgaagtaccccattgagcatggcatcgtcaccaactgggacgacatggagaagatctggcaccacaccttctacaacgagctgcgcgtggccccggaggagcacccagtgctgctgaccgaggcccccctgaacccctaggccaacagagagaagatgactcagattatgtttgagaccttcaacaccccggccatgtacgtggccatccaggccgtgctgtccctctacgcctctgggcgcaccactggcattgtcatggactctggagacggggtcacccacacggtgcccatctacgagggctacgccctcccccacgccatcctgcgtctggacctggctggccgggacctgaccgactacctcatgaagatcctcactgagcgaggctacagcttcaccaccacggccgagcgggaaatcgtgcgcgacatcaaggagaagctgtgctacgtcgccctggacttcgagcaggagatggccaccgccgcatcctcctcttctctggagaagagctacgagctgcccgatggccaggtcatcaccattggcaatgagcggttccggtgtccggaggcgctgttccagccttccttcctgggtatggaatcttgcggcatccacgagaccaccttcaactccatcatgaagtgtgacgtggacatccgcaaagacctgtacgccaacacggtgctgtcgggcggcaccaccatgtatccgggcattgccgacaggatgcagaaggagatcaccgccctggcgcccagcaccatgaagatcaagatcatcgcacccccagagcgcaagtactcggtgtggatcggtggctccatcctggcctcactgtccaccttccagcagatgtggattagcaagcaggagtacgacgagtcgggcccctccatcgtccaccgcaaatgcttctaaacggactcagcagatgcgtagcatttgctgcatgggttaattgagaatagaaatttgcccctggcaaatgcacacacctcatgctagcctcacgaaactggaataagccttcgaaaagaaattgtccttgaagcttgtatctgatatcagcactggattgtagaacttgttgctgattttgaccttgtattgaagttaactgttccccttggtatttgtttaataccctgtacatatctttgagttcaacctttagtacgtgtggcttggtcacttcgtggctaagtaaaacgtgcttgtggaagacaagtctgtggcttggtgagtctgtgtggccagcagcctctgatctgtgcagggtattaacgtgtcaaggctgagtgttctgggaattctctagaggctggcaagaccagttgttttgtcttgcgggtctgtcagggttggaaagttccaagccgtag

SEQ ID NO: 225255 - DNA, 1283 bp, Homo Sapiens
  misc_feature (970)..(1009): n is a, c, g, or t
cccactttgtacaaaaaagttggcttctacaccgagctgcgtgtggctcccgaggagcaccccgtgctgctgaccgaggcccccctgaaccccaaggccaaccgcgagaagatgacccagatcatgtttgagaccttcaacaccccagccatgtacgttgctatccaggctgtgctatccctgtacgcctctggccgtaccactggcatcgtgatggactccggtgacggggtcacccacactgtgcccatctacgaggggtatgccctcccccatgccatcctgcgtctggacctggctggccgggacctgactgactacctcatgaagatcctcaccgagcgcggctacagcttcaccaccacggccgagcgggaaatcgtgcgtgacattaaggagaagctgtgctacgtcgccctggacttcgagcaagagatggccacggctgcttccagctcctccctggagaagagctacgagctgcctgacggccaggtcatcaccattggcaatgagcggttccgctgccctgaggcactcttccagccttccttcctgggcatggagtcctgtggcatccacgaaactaccttcaactccatcatgaagtgtgacgtggacatccgcaaagacctgtacgccaacacagtgctgtctggcggcaccaccatgtaccctggcattgccgacaggatgcagaaggagatcactgccctggcacccagcacaatgaagatcaagatcattgctcctcctgagcgcaagtactccgtgtggatcggcggctccatcctggcctcgctgtccaccttccagcagatgtggatcagcaagcaggagtatgacgagtccggcccctccatcgtccaccgcaaatgcttctaggcggactatgacttagttgcgttacaccctttcttgacaaaacctaacttgcgcagaaaacaagatgagattggcatggctttannnnnnnnnnnnnnnnnnnnnnnnnnnnnnnnnnnnnnnnggcttgactcaggatttaaaaactggaacggtgaaggtgacagcagtcggttggagcgagcatcccccaaaagttcacaatgtggccgaggactttgattgcacattgttgtttttttaatagtcattccgaatatgagatgcgttgttacaggaagtcccttgccatcctaaaagccaccccacttctctctaaagagaatgggcccaatcctctcccaagtccacacaggggaagtgataacattgctttccgtgtaaattatgtaatgcaa

SEQ ID NO: 225256 - DNA, 434 bp, Homo Sapiens
  misc_feature (123)..(161): n is a, c, g, or t
ttggcctccatccccctcacacagacaaatgcttctaggcggactatgacttagttgcgttacaccctttcttgacaaaacctaacttgcgcagaaaacaagatgagattggcatggctttannnnnnnnnnnnnnnnnnnnnnnnnnnnnnnnnnnnnnnggcttgactcaggatttaaaaactggaacggtgaaggtgacagcagtcggttggagcgagcatcccccaaagttcacaatgtggccgaggactttgattgcacattgttgtttttttaataatcattccaaatatgaaatgcattgttacaggaattcccttgccatcctaaaagccaccccacttctctctaaggagaatggcccagtcctctcccaagtccacacaggggaggtgatagcattgctttcgtgtaaattatgtaatgcaaaa

SEQ ID NO: 225257 - DNA, 1142 bp, Homo Sapiens
  misc_feature (927)..(967): n is a, c, g, or t
ttggcttccgaatcctgcttagcgctgctgacccaggaccccaggcctggtgggacggtgcccaacaataagaaccatacgttcattcataccttcgttcaatactccttgagcaactaccatgtgcttggcactgttttatatgctggggatacaacagtgaaccaataaaactaaacctcttgtcttctcacactttaagctctggtgagggtggacagacaaatcataaaagagatggtttgtcaggaggtaacaggtgcatcacaggctgagcacggaaaggggatacgaagtggggatgggtgtggagtggggtgtgtagatgagcgggaaatcgtgcgtgacattaaggagaagctgtgctacgtcgccctggacttcgagcaagagatggcacggctgcttccagctcctccctggagaagagctacgagctgcctgacggccaggtcatcaccattggcaatgagcggttccgctgccctgaggcactcttccagccttccttcctgggcatggagtcctgtggcatccacgaaactaccttcaactccatcatgaagtgtgacgtggacatccgcaaagacctgtacgccaacacagtgctgtctggcggcaccaccatgtaccctggcattgccgacaggatgcagaaggagatcactgccctggcacccagcacaatgaagatcaagatcattgctcctcctgagcgcaagtactccgtgtggatcggcggctccatcctggcctcgctgtccaccttccagcagatgtggatcagcaagcaggagtatgacgagtccggcccctccatcgtccaccgcaaatgcttctaggcggactatgacttagttgcgttacaccctttcttgacaaaacctaacttgcgcagaaaacaagatgagattggcatggctttannnnnnnnnnnnnnnnnnnnnnnnnnnnnnnnnnnnnnnnnggcttgactcacgatttaaaaactggaacggtgaaagtgacagcagtccgttggagcgagcatcccccaaagttcacaatgtggccgaggactttgattgcacattgttgttttttttaatactcattccacatatgagatgcattgttacaagaagtcccttgccatcctaaaa

SEQ ID NO: 225258 - DNA, 1054 bp, Homo Sapiens
  misc_feature (899)..(938): n is a, c, g, or t
tttgtacaaaaaagttggcccaaggccaccccgcgagaagatgacccagatcatgtttgagaccttcaacaccccagccatgtacgttgctatccaggctgtgctatccctgtacgcctctggccgtaccactggcatcgtgatggactccggtgacggggtcacccacactgtgcccatctacgaggggtatgccctcccccatgccatcctgcgtctggacctggctggccgggacctgactgactacctcatgaagatcctcaccgagcgcggctacagcttcaccaccacggccgagcgggaaatcgtgcgtgacattaaggagaagctgtgctacgtcgccctggacttcgagcaagagatggccacggctgcttccagctcctccctggagaagagctacgagctgcctgacggccaggtcatcaccattggcaatgagcggttccgctgccctgaggcactcttccagccttccttcctgggcatggagtcctgtggcatccacgaaactaccttcaactccatcatgaagtgtgacgtggacatccgcaaagacctgtacgccaacacagtgctgtctggcggcaccaccatgtaccctggcattgccgacaggatgcagaaggagatcactgccctggcacccagcacaatgaagatcaagatcattgctcctcctgagcgcaagtactccgtgtggatcggcggctccatcctggcctcgctgtccaccttccagcagatgtggatcagcaagcaggagtatgacgagtccggcccctccatcgtccaccgcaaatgcttctaggcggactatgacttagttgcgttacaccctttcttgacaaaacctaacttgcgcagaaaacaagatgagattggcatggctttannnnnnnnnnnnnnnnnnnnnnnnnnnnnnnnnnnnnnnnggcttgactcagatttaaaaactggaacggtgaaggtgacagcagtcggttggagcgagcatcccccaaagttcacaatgtggccgaggactttgattgcacattgttgtttttta

SEQ ID NO: 225259 - DNA, 803 bp, Homo Sapiens
  misc_feature (354)..(362): n is a, c, g, or t
ttggatcagagcatttattttggggaggaaaacagtggtgattaccggcattttattaaacttaaaactttgtagaaagcaaacaaaattgttcttgggagaaaatcaacttttagattaaaaaaattttaagtatctaggagtatttaaatccttttcccataaataaaagtacagttttcttggtggcagaatgaaaatcagcaacttctagcatatagactatataatcagattgacagcatatagaatatattatcagacaagatgaggaggtataaaagttactattgctcataatgacttacaggctaaaattagttttaaaatactatattaaattctgaatgcaannnnnnnnngttcccttgagaccaaaatttaagttaactgttgctggcagtctaagtgtaaatgttaacagcaggagaagttaagaattgagcagttctgttgcatgatttcccaaatgaaatactgccttggctagagtttgaaaaactaattgagcctgtgcctggctagaaaacaagcgtttatttgaatgtgaatagtgtttcaaaggtatgtagttacagaattcctaccaaacagcttaaattcttcaagaaagaattcctgcagcagttattcccttacctgaaggcttcaatcatttggatcaacaactgctactctcgggaagactcctctactcacagctgaagaaaatgagcacacccttcacactgttatcccctatcctgaagatgtgatacactgaatggaaataaatagatgtaaataaaattgagttttcattt

SEQ ID NO: 225260 - DNA, 969 bp, Homo Sapiens
actttgtacaaaaaagttggagcagcccagccaagcactgtcaggaatcctgtgaagcagctccagctatgtgtgaagaagaggacagcactgccttggtgtgtgacaatggctctgggctctgtaaggccggctttgctggggacgatgctcccagggctgttttcccatccattgtgggacgtcccagacatcagggggtgatggtgggaatgggacaaaaagacagctacgtgggtgacgaagcacagagcaaaagaggaatcctgaccctgaagtacccgatagaacatggcatcatcaccaactgggacgacatggaaaagatctggcaccactctttctacaatgagcttcgtgttgcccctgaagagcatcccaccctgctcacggaggcacccctgaaccccaaggccaaccgggagaaaatgactcaaattatgtttgagactttcaatgtcccagccatgtatgtggctatccaggcggtgctgtctctctatgcctctggacgcacaactggcatcgtgctggactctggagatggtgtcacccacaatgtccccatctatgagggctatgccttgccccatgccatcatgcgtctggatctggctggccgagatctcactgactacctcatgaagatcctgactgagcgtggctattccttcgttactactgctgagcgtgagattgtccgggacatcaaggagaaactgtgttatgtagctctggactttgaaaatgagatggccactgccgcatcctcatcctcccttgagaagagttacgagttgcctgatgggcaagtgatcaccatcggaaatgaacgtttccgctgcccagagaccctgttccagccatccttcatcgggatggagtctgctggcatccatgaaaccacctacaacagcatcatgaagtgtgatattggacatcaggaaaggacctctatgctaacaatgt

SEQ ID NO: 225261 - DNA, 1620 bp, Homo Sapiens
  misc_feature (1303)..(1346): n is a, c, g, or t
actttgtacaaaaaagttggccgcgtccgccccgcgagcacagagcctcgcctttgccgatccgccgcccgtccacacccgccgccagctcaccatggatgatgatatcgccgcgctcgtcgtcgacaacggctccggcatgtgcaaggccggcttcgcgggcgacgatgccccccgggccgtcttcccctccatcgtggggcgccccaggcaccagggcgtgatggtgggcatgggtcagaaggattcctatgtgggcgacgaggcccagagcaagagaggcatcctcaccctgaagtaccccatcgagcacggcatcgtcaccaactgggacgacatggagaaaatctggcaccacaccttctacaatgagctgcgtgtggctcccgaggagcaccccgtgctgctgaccgaggcccccctgaaccccaaggccaaccgcgagaagatgacccagatcatgtttgagaccttcaacaccccagccatgtacgttgctatccaggctgtgctatccctgtacgcctctggccgtaccactggcatcgtgatggactccggtgacggggtcacccacactgtgcccatctacgaggggtatgccctcccccatgccatcctgcgtctggacctggctggccgggacctgactgactacctcatgaagatcctcaccgagcgcggctacagcttcaccaccacggccgagcgggaaatcgtgcgtgacattaaggagaagctgtgctacgtcgccctggacttcgagcaagagatggccacggctgcttccagctcctccctggagaagagctacgagctgcctgacggccaggtcatcaccattggcaatgagcggttccgctgccctgaggcactcttccagccttccttcctgggcatggagtcctgtggcatccacgaaactaccttcaactccatcatgaagtgtgacgtggacatccgcaaagacctgtacgccaacacagtgctgtctggcggcaccaccatgtaccctggcattgccgacaggatgcagaaggagatcactgccctggcacccagcacaatgaagatcaagatcattgctcctcctgagcgcaagtactccgtgtggatcggcggctccatcctggcctcgctgtccaccttccagcagatgtggatcagcaagcaggagtatgacgagtccggcccctccatcgtccaccgcaaatgcttctaggcggactatgacttagttgcgttacaccctttcttgacaaaacctaacttgcgcagaaaacaagatgagattggcatggcnnnnnnnnnnnnnnnnnnnnnnnnnnnnnnnnnnnnnnnnnnnnggcttgactcaagatttaaaaactggaacggtgaaggtgacagcagtcggttggagcgagcatcccccaaagttcacaatgtggccgaggactttgattgcacattgttgtttttttaatagtcattccaaatatgagatgcattgttacaggaagtcccttgccatcctaaaagccaccccacttctctctaaagaagaatggcccagtcctctcccaagtccacacagggggaggtgatagcattgctttcgtgtaaattatgtaaatgcaa

SEQ ID NO: 225262 - DNA, 1153 bp, Homo Sapiens
  misc_feature (842)..(884): n is a, c, g, or t
ctttgtacaaaaaagttggccccagccatgttcgttgctatccaggctgtgctatccctgtacgcctctggccgtaccactggcatcgtgatggactccggtgacggggtcacccacactgtgcccatctacgaggggtatgccctcccccatgccatcctgcgtctggacctggctggccgggacctgactgactacctcatgaagatcctcaccgagcgcggctacagcttcaccaccacggccgagcgggaaatcgtgcgtgacattaaggagaagctgtgctacgtcgccctggcttcgagcaagagatggccacggctgcttccagctcctccctggagaagagctacgagctgcctgacggccaggtcatcaccattggcaatgagcggttccgctgccctgaggcactcttccagccttccttcctgggcatggagtcctgtggcatccacgaaactaccttcaactccatcatgaagtgtgacgtggacatccgcaaagacctgtacgccaacacagtgctgtctggcggcaccaccatgtaccctggcattgccgacaggatgcagaaggagatcactgccctggcacccagcacaatgaagatcaagatcattgctcctcctgagcgcaagtactccgtgtggatcggcggctccatcctggcctcgctgtccaccttccagcagatgtggatcagcaagcaggagtatgacgagtccggcccctccatcgtccaccgcaaatgcttctaggcggactatgacttagttgcgttacaccctttcttgacaaaacctaacttgcgcagaaaacaagatgagattggcatggcnnnnnnnnnnnnnnnnnnnnnnnnnnnnnnnnnnnnnnnnnnnggcttgactcaggatttaaaaactggaacggtgaaggtgacagcagtcggttggagcgagcatcccccaaagttcacaatgtggccgaggactttgattgcacattgttgtttttttaatagtcattccaaatatgagatgcattgttacaggaagtcccttgccatcctaaaagccaccccacttctctctaagagaatggcccagtcctctcccaagtccacacaggggagtgatagcattgctttcgtgtaaattatgtaatgcaa

SEQ ID NO: 225263 - DNA, 1539 bp, Homo Sapiens
  misc_feature (1311)..(1348): n is a, c, g, or t
gagcaatgcttttttataatgccaactttgtacaaaaaagttggctctcgcactctgttcttccgccgctccgccgtcgcgtttctctgccggtcgcaatggaagaagagatcgccgcgctggtcattgacaatggctccggcatgtgcaaagctggttttgctggggacgacgctccccgagccgtgtttccttccatcgtcgggcgccccagacaccagggcgtcatggtgggcatgggccagaaggactcctacgtgggcgacgaggcccagagcaagcgtggcatcctgaccctgaagtaccccattgagcatggcatcgtcaccaactgggacgacatggagaagatctggcaccacaccttctacaacgagctgcgcgtggccccggaggagcacccagtgctgctgaccgaggcccccctgaaccccaaggccaacagagagaagatgactcagattatgtttgagaccttcaacaccccggccatgtacgtggccatccaggccgtgctgtccctctacgcctctgggcgcaccactggcattgtcatggactctggagacggggtcacccacacggtgcccatctacgagggctacgccctcccccacgccatcctgcgtctggacctggctggccgggacctgaccgactacctcatgaagatcctcactgagcgaggctacagcttcaccaccacggccgagcgggaaatcgtgcgcgacatcaaggagaagctgtgctacgtcgccctggacttcgagcaggagatggccaccgccgcatcctcctcttctctggagaagagctacgagctgcccgatggccaggtcatcaccattggcaatgagcggttccggtgtccggaggcgctgttccagccttccttcctgggtatggaatcttgcggcatccacgagaccaccttcaactccatcatgaagtgtgacgtggacatccgcaaagacctgtacgccaacacagtgctgtctggcggcaccaccatgtaccctggcattgccgacaggatgcagaaggagatcactgccctggcacccagcacaatgaagatcaagatcattgctcctcctgagcgcaagtactccgtgtggatcggcggctccatcctggcctcgctgtccaccttccagcagatgtggatcagcaagcaggagtatgacgagtccggcccctccatcgtccaccgcaaatgcttctaggcggactatgacttagttgcgttacaccctttcttgacaaaacctaacttgcgcagaaaacaagatgagattggcatggctttannnnnnnnnnnnnnnnnnnnnnnnnnnnnnnnnnnnnnggcttgactcaagatttaaaaactggaacggtgaaggtgacagcagtcggttggagcgagcatcccccaaagttcacaatgtggccgaagactttgattgcacattgttgtcttttttaatagtcattccaaatatgagatgcattgttacagggaagtccccttgccatcccaaaaagcccaccccactt

SEQ ID NO: 225264 - DNA, 721 bp, Homo Sapiens
  misc_feature (412)..(449): n is a, c, g, or t
tttgtacaaaaaagttggcaccacgaaactaccttcaactccatcatgaagtgtgacgtggacatccgcaaagacctgtacgccaacacagtgctgtctggcggcaccaccatgtaccctggcattgccgacaggatgcagaaggagatcactgccctggcacccagcacaatgaagatcaagatcattgctcctcctgagcgcaagtactccgtgtggatcggcggctccatcctggcctcgctgtccaccttccagcagatgtggatcagcaagcaggagtatgacgagtccggcccctccatcgtccaccgcaaatgcttctaggcggactatgacttagttgcgttacaccctttcttgacaaaacctaacttgcgcagaaaacaagatgagattggcatggctttannnnnnnnnnnnnnnnnnnnnnnnnnnnnnnnnnnnnnggcttgactcaggatttaaaaactggaacggtgaaggtgacagcagtcggttggagcgagcatcccccaaagttcacaatgtggccgaggactttgattgcacattgttgttttttttaatagtcattccaaatatgagatgcattgttacaggaagtcccttgccatcctaaaagccaccccacttctctctaaggagaatggcccagtcctctcccaagtccacacaggggaggtgatagcattgctttcgtgtaaattatgtaatgcaa

SEQ ID NO: 225265 - DNA, 972 bp, Homo Sapiens
  misc_feature (660)..(699): n is a, c, g, or t
ctttgtacaaaaaagttgggatcctcaccgagcgcggctacagcttcaccaccacggccgagcgggaaatcgtgcgtgacattaaggagaagctgtgctacgtcgccctggacttcgagcaagagatggccacggctgcttccagctcctccctggagaagagctacgagctgcctgacggccaggtcatcaccattggcaatgagcggttccgctgccctgaggcactcttccagccttccttcctgggcatggagtcctgtggcatccacgaaactaccttcaactccatcatgaagtgtgacgtggacatccgcaaagacctgtacgccaacacagtgctgtctggcggcaccaccatgtaccctggcattgccgacaggatgcagaaggagatcactgccctggcacccagcacaatgaagatcaagatcattgctcctcctgagcgcaagtactccgtgtggatcggcggctccatcctggcctcgctgtccaccttccagcagatgtggatcagcaagcaggagtatgacgagtccggcccctccatcgtccaccgcaaatgcttctaggcggactatgacttagttgcgttacaccctttcttgacaaaacctaacttgcgcagaaaacaagatgagattggcatggctttannnnnnnnnnnnnnnnnnnnnnnnnnnnnnnnnnnnnnnnggcttgactcaggatttaaaaactggaacggtgaaggtgacagcagtcggttggagcgagcatcccccaaagttcacaatgtggccgaggactttgattgcacattgttgtttttttaatagtcattccaaatatgagatgcgttgttacaggaagtcccttgccatcctaaaagccaccccacttctctctaaggaaaatggcccagtcctctcccaagtccacacaggggaggtgatagcattgctttcgtgtaaattatgtaatgcaaaa

SEQ ID NO: 225266 - DNA, 897 bp, Homo Sapiens
tcttctccagagaagaggaaggatgcggccggtggccatctcctgctcgaagtccagggcgacgtagcacagcttctccttgatgtcgcgcacgatttcccgctcggccgtggtggtgaagctgtagcctcgctcagtgaggatcttcatgaggtagtcggtcaggtcccggccagccaggtccagacgcaggatggcgtgggggagggcgtagccctcgtagatgggcaccgtgtgggtgaccccgtctccagagtccatgacaatgccagtggtgcgcccagaggcgtagagggacagcacggcctggatggccacgtacatggccggggtgttgaaggtctcaaacataatctgagtcatcttctctctgttggccttggggttcaggggggcctcggtcagcagcactgggtgctcctccggggccacgcgcagctcgttgtagaaggtgtggtgccagatcttctccatgtcgtcccagttggtgacgatgccatgctcaatggggtacttcagggtcaggatgccacgcttgctctgggcctcgtcgcccacgtaggagtccttctggcccatgcccaccatgacgccctggtgtctggggcgcccgacgatggaaggaaacacggctcggggagcgtcgtccccagcaaaaccagctttgcacatgccggagccattgtcaatgaccagcgcggcgatctcttcttccattgcgaccccgccttttgttcccggggaaggcgcgacgaggcctcggcagctggaagcggggccagccggggtcggggggcgcaggcctgcgacgtccagctcaggccccggggcggggcgctcaccggcagagaaacgcgacggcggagcggcggaagaacagagtgcgagagttgccaa

SEQ ID NO: 225267 - DNA, 1323 bp, Homo Sapiens
  misc_feature (932)..(971): n is a, c, g, or t
actttgtacaaaaaagttggccccgtgctcgctgaccgaggcccccctgaaccccaaggccaaccgcgagaagatgacccagatcatgtttgagaccttcaacaccccagccatgtacgttgctatccaggctgtgctatccctgtacgcctctggccgtaccactggcatcgtgatggactccggtgacggggtcacccacactgtgcccatctacgaggggtatgccctcccccatgccatcctgcgtctggacctggctggccgggacctgactgactacctcatgaagatcctcaccgagcgcggctacagcttcaccaccacggccgagcgggaaatcgtgcgtgacattaaggagaagctgtgctacgtcgccctggacttcgagcaagagatggcacggctgcttccagctcctccctggagaagagctacgagctgcctgacggccaggtcatcaccattggcaatgagcggttccgctgccctgaggcactcttccagccttccttcctgggcatggagtcctgtggcatccacgaaactaccttcaactccatcatgaagtgtgacgtggacatccgcaaagacctgtacgccaacacagtgctgtctggcggcaccaccatgtaccctggcattgccgacaggatgcagaaggagatcactgccctggcacccagcacaatgaagatcaagatcattgctccctcctgagcgcaagtactccgtgtggatcggcggctccatcctggcctcgctgtccaccttccagcagatgtggatcagcaagcaggagtatgacgagtccggcccctccatcgtccaccgcaaatgcttctaggcggactatgacttagttgcgttacaccctttcttgacaaaacctaacttgcgcagaaaacaagatgagattggcatggctttannnnnnnnnnnnnnnnnnnnnnnnnnnnnnnnnnnnnnnnggcttgactcaggatttaaaaactggaacggtgaaggtgacagcagtcggttggagcgagcatcccccaaagttcacaatgtggccgaggactttgattgcacattgttgtttttttaatagtcattccaaatatgagatgcgttgttacaggaagtcccttgccatcctaaaagccaccccacttctctctaaggagaatggcccagtcctctcccaagtccacacaggggagggtgatagcattgctttcgtgtaaattatgtaatgcaaaatttttttaatcttcgccttaatactttttatttggtttatttgaatgatgaggccttcgtgccccccttccccatttt

SEQ ID NO: 225268 - DNA, 904 bp, Homo Sapiens
gagcaatgcttttttataattgccaactttgtacaaaaaagttggcctcctcttctctggagaagagctacgagctgcccgatggccaggtcatcaccattggcaatgagcggttccggtgtccggaggcgctgttccagccttccttcctgggtatggaatcttgcggcatccacgagaccaccttcaactccatcatgaagtgtgacgtggacatccgcaaagacctgtacgccaacacggtgctgtcgggcggcaccaccatgtacccgggcattgccgacaggatgcagaaggagatcaccgccctggcgcccagcaccatgaagatcaagatcatcgcacccccagagcgcaagtactcggtgtggatcggtggctccatcctggcctcactgtccaccttccagcagatgtggattagcaagcaggagtacgacgagtcgggcccctccatcgtccaccgcaaatgcttctaaacggactcagcagatgcgtagcatttgctgcatgggttaattgagaatagaaatttgcccctggcaaatgcacacacctcatgctagcctcacgaaactggaataagccttcgaaaagaaattgtccttgaagcttgtatctgatatcagcactggattgtagaacttgttgctgattttgaccttgtattgaagttaactgttccccttggtatttgtttaataccctgtacatatctttgagttcaacctttagtacgtgtggcttggtcacttcgtggctaagtaagaacgtgcttgtggaagacaagtctgtggcttggtgagtctgtgtggccagcagcctctgatctgtgcagggtattaacgtgtcacggctgagtgttctgggatttctctagaggctggcaagaaccagttgtttt

SEQ ID NO: 225269 - DNA, 666 bp, Homo Sapiens
  misc_feature (155)..(198): n is a, c, g, or t
  misc_feature (496)..(516): n is a, c, g, or t
  misc_feature (535)..(561): n is a, c, g, or t
ttgggcagatgtggatcagcaagcaggagtatgacgagtccggcccctccatcgtccaccgcaaatgcttctaggcggactatgacttagttgcgttacaccctttcttgacaaaacctaacttgcgcagaaaacaagatgagattggcatggcnnnnnnnnnnnnnnnnnnnnnnnnnnnnnnnnnnnnnnnnnnnnggcttgactcaggatttaaaaactggaacggtgaaggtgacagcagtcggttggagcgagcatcccccaaagttcacaatgtggccgaggactttgattgcacattgttgtttttttaatagtcattccaaatatgagatgcattgttacaggaagtcccttgccatcctaaaagccaccccacttctctctaaggagaatggcccagtcctctcccaagtccacacaggggaggtgatagcattgctttcgtgtaaattatgtaatgcaaaatttttttaatcttcgccttaatacnnnnnnnnnnnnnnnnnnnnngaatgatgagccttcgtgnnnnnnnnnnnnnnnnnnnnnnnnnnnaacttgagatgtatgaaggcttttggtctccctgggagtgggtggaggcagccagggcttacctgtacactgacttgagaccagttgaataaaagtgcacacctt

SEQ ID NO: 225270 - DNA, 1003 bp, Homo Sapiens
  misc_feature (689)..(733): n is a, c, g, or t
ctttgtacaaaaaagttggggctggccgggacctgactgactacctcatgaagatcctcaccgagcgcggctacagcttcaccaccacggccgagcgggaaatcgtgcgtgacattaaggagaagctgtgctacgtcgccctggacttcgagcaagagatggccacggctgcttccagctcctccctggagaagagctacgagctgcctgacggccaggtcatcaccattggcaatgagcggttccgctgccctgaggcactcttccagccttccttcctgggcatggagtcctgtggcatccacgaaactaccttcaactccatcatgaagtgtgacgtggacatccgcaaagacctgtacgccaacacagtgctgtctggcggcaccaccatgtaccctggcattgccgacaggatgcagaaggagatcactgccctggcacccagcacaatgaagatcaagatcattgctcctcctgagcgcaagtactccgtgtggatcggcggctccatcctggcctcgctgtccaccttccagcagatgtggatcagcaagcaggagtatgacgagtccggcccctccatcgtccaccgcaaatgcttctaggcggactatgacttagttgcgttacaccctttcttgacaaaacctaacttgcgcagaaaacaagatgagattggcatggcnnnnnnnnnnnnnnnnnnnnnnnnnnnnnnnnnnnnnnnnnnnnnggcttgactcaggatttaaaaactggaacggtgaaggtgacagcagtcggttggagcgagcatcccccaaagttcacaatgtggccgaggactttgattgcacattgttgtttttttaatagtcattccaaatatgagatgcgttgttacaggaagtcccttgccatcctaaaagccaccccacttctctctaaggagaatggcccagtcctcttccaagtccacacaggggacgtgatagcattgctttcgtgtaattatgtaatgcaa

SEQ ID NO: 225271 - DNA, 1199 bp, Homo Sapiens
ctttgtacaaaaaagttggcttcgagcaggagatggccaccgccgcatcctcctcttctctggagaagagctacgagctgcccgatggccaggtcatcaccattggcaatgagcggttccggtgtccggaggcgctgttccagccttccttcctgggtatggaatcttgcggcatccacgagaccaccttcaactccatcatgaagtgtgacgtggacatccgcaaagacctgtacgccaacacggtgctgtcgggcggcaccaccatgtatccgggcattgccgacaggatgcagaaggagatcaccgccctggcgcccagcaccatgaagatcaagatcatcgcacccccagagcgcaagtactcggtgtggatcggtggctccatcctggcctcactgtccaccttccagcagatgtggattagcaagcaggagtacgacgagtcgggcccctccatcgtccaccgcaaatgcttctaaacggactcagcagatgcgtagcatttgctgcatgggttaattgagaatagaaatttgcccctggcaaatgcacacacctcatgctagcctcacgaaactggaataagccttcgaaaagaaattgtccttgaagcttgtatctgatatcagcactggattgtagaacttgttgctgattttgaccttgtattgaagttaactgttccccttggtatttgtttaataccctgtacatatctttgagttcaacctttagtacgtgtggcttggtcacttcgtggctaaggtaagaacgtgcttgtggaagacaagtctgtggcttggtgagtctgtgtggccagcagcctctgatctgtgcagggtattaacgtgtcagggctgagtgttctgggatttctctagaggctggcaagaaccagtttgttttgtcttgcgggtctgtcagggttggaaagtccaagccgtaggacccagtttcctttcttagctgatgtctttggccagaacaccgtgggctgttaacttgccttgagttggaagcggtttgcatttacgcctgtaaatgtattcattcttaatttatgtaaggttttttttgtacgcaattctcgattctttaaagagatgacaacaaattttggttttctactgttatgtgagaacattaggccccagcaacacgtcattgtgtaaggaaaataaaagtgctgccgtaac

SEQ ID NO: 225272 - DNA, 1126 bp, Homo Sapiens
ctttgtacaaaaaagttggctacagcttcaccaccacggccgagcgggaaatcgtgcgcgacatcaaggagaagctgtgctacgtcgccctggacttcgagcaggagatggccaccgccgcatcctcctcttctctggagaagagctacgagctgcccgatggccaggtcatcaccattggcaatgagcggttccggtgtccggaggcgctgttccagccttccttcctgggtatggaatcttgcggcatccacgagaccaccttcaactccatcatgaagtgtgacgtggacatccgcaaagacctgtacgccaacacggtgctgtcgggcggcaccaccatgtatccgggcattgccgacaggatgcagaaggagatcaccgccctggcgcccagcaccatgaagatcaagatcatcgcacccccagagcgcaagtactcggtgtggatcggtggctccatcctggcctcactgtccaccttccagcagatgtggattagcaagcaggagtacgacgagtcgggcccctccatcgtccaccgcaaatgcttctaaacggactcagcagatgcgtagcatttgctgcatgggttaattgagaatagaaatttgcccctggcaaatgcacacacctcatgctagcctcacgaaactggaataagccttcgaaaagaaattgtccttgaagcttgtatctgatatcagcactggattgtagaacttgttgctgattttgaccttgtattgaagttaactgttccccttggtattaacgtgtcagggctgagtgttctgggatttctctagaggctggcaagaaccagttgttttgtcttgcgggtctgtcagggttggaaagtccaagccgtaggacccagtttcctttcttagctgatgtctttggccagaacaccgtgggctgttacttgctttgagttggaagcggtttgcatttacgcctgtaaatgtattcattcttaatttatgtaaggttttttttgtacgcaattctcgattctttgaagagatgacaacaaattttggttttctactgttatgtgagaacattaggccccagcaacacgtcattgtgtaaggaaaaataaaagtgctgccgtaaccaa

SEQ ID NO: 225273 - DNA, 796 bp, Homo Sapiens
  misc_feature (584)..(628): n is a, c, g, or t
tttgtacaaaaaagttggagctgtgctacctcgccctggacttcgagcaagagatggccacggctgcttccagctcctccctggagaagagctacgagctgcctgacggccaggtcatcaccattggcaatgagcggttccgctgccctgaggcactcttccagccttccttcctgggcatggagtcctgtggcatccacgaaactaccttcaactccatcatgaagtgtgacgtggacatccgcaaagacctgtacgccaacacagtgctgtctggcggcaccaccatgtaccctggcattgccgacaggatgcagaaggagatcactgccctggcacccagcacaatgaagatcaagatcattgctcctcctgagcgcaagtactccgtgtggatcggcggctccatcctggcctcgctgtccaccttccagcagatgtggatcagcaagcaggagtatgacgagtccggcccctccatcgtccaccgcaaatgcttctaggcggactatgacttagttgcgttacaccctttcttgacaaaacctaacttgcgcagaaaacaagatgagattggcatggcnnnnnnnnnnnnnnnnnnnnnnnnnnnnnnnnnnnnnnnnnnnnnggcttgactcaggatttaaaaactggaacggtgaaagtgacagcagtcggttggagcgagcatcccccaaaagttcacaatgtggccgaagactttgattgcccatttgttgtttttttaatagtcattccaaatatgagattgcgttgttacaggaagtcccttgcc

SEQ ID NO: 225274 - DNA, 977 bp, Homo Sapiens
  misc_feature (337)..(377): n is a, c, g, or t
caggaaggtctcatctttcaaaataaacaaaataaaaaaggtataagggcgaagattaaaaaattttgcattacatattttccacgaaagcaatgctatcacctcccctgtgtggacttgggagaggactgggccattctccttagagagaagtggggtggcttttagaatgccaagggacttcctgtaacaatgcatctcatatttggaatgactattaaaaaaacaacaatgtgcaatcaaagtcctcggccacattgtgaactttgggggatgctcgctccaaccgactgctgtcaccttcaccgttccagtttttaaatcctgagtcaagccnnnnnnnnnnnnnnnnnnnnnnnnnnnnnnnnnnnnnnnnntaaagccatgccaatctcatcttgttttctgcgcaagttaggttttgtcaagaaagggtgtaacgcaactaagtcatagtccgcctagaagcatttgcggtggacgatggaggggccggactcgtcatactcctgcttgctgatccacatctgctggaaggtggacagcgaggccaggatggagccgccgatccacacggagtacttgcgctcaggaggagcaatgatcttgatcttcattgtgctgggtgccagggcagtgatctccttctgcatcctgtcggcaatgccagggtacatggtggtgccgccagacagcactgtgttggcgtacaggtctttgcggatgtccacgtcacacttcatgatggagttgaaggtagtttcgtggatgccacaggactccatgcccaggaaggaaggctggaagagtgcctcagggcagcggaaccgctcattgccaatggtgatgacctggccgtcaggcagctcgtagctcttctccagggaggagctggaagcagccgtggccatctcttgctcgaagccaacttttttgtacaaagttggcatttaaaaggaaagcattgctcatcaatt

SEQ ID NO: 225275 - DNA, 1036 bp, Homo Sapiens
  misc_feature (980)..(988): n is a, c, g, or t
agcaatgctttctttaaaagaagccaactttgtacaaaaaagttggatcaaggagaagctagtgctacgtcgccctggacttcgagcaggagatggccaccgccgcatcctcctcttctctggagaagagctacgagctgcccgatggccaggtcatcaccattggcaatgagcggttccggtgtccggaggcgctgttccagccttccttcctgggtatggaatcttgcggcatccacgagaccaccttcaactccatcatgaagtgtgacgtggacatccgcaaagacctgtacgccaacacggtgctgtcgggcggcaccaccatgtatccgggcattgccgacaggatgcagaaggagatcaccgccctggcgcccagcaccatgaagatcaagatcatcgcacccccagagcgcaagtactcggtgtggatcggtggctccatcctggcctcactgtccaccttccagcagatgtggattagcaagcaggagtacgacgagtcgggcccctccatcgtccaccgcaaatgcttctaaacggactcagcagatgcgtagcatttgctgcatgggttaattgagaatagaaatttgcccctggcaaatgcacacacctcatgctagcctcacgaaactggaataagccttcgaaaagaaattgtccttgaagcttgtatctgatatcagcactggattgtagaacttgttgctgattttgaccttgtattgaagttaactgttccccttggtattaacgtgtcagggctgagtgttctgggatttctctagaggctggcaagaaccagttgttttgtcttgcgggtctgtcagggttggaaagtccaagtcgtaggacccagtttcctttcttagctgatgtctttggccagaacaccgtgggctgttacttgctttgagttggaagcggtttgcatttacgcctgtaaatgtattcattcttaatttatgtaatgnnnnnnnnngtacgcaattctcgattcttttgaaagatgacaacaaattttggtttt

SEQ ID NO: 225276 - DNA, 1274 bp, Homo Sapiens
  misc_feature (177)..(219): n is a, c, g, or t
gcttttaggatggcaagggacttcctgtaacaatgcatctcatatttggaatgactattaaaaaaacaacaatgtgcaatcaaagtcctcggccacattgtgaactttgggggatgctcgctccaaccgactgctgtcaccttcaccgttccagtttttaaatcctgagtcaagccnnnnnnnnnnnnnnnnnnnnnnnnnnnnnnnnnnnnnnnnnnngccatgccaatctcatcttgttttctgcgcaagttaggttttgtcaagaaagggtgtaacgcaactaagtcatagtccgcctagaagcatttgcggtggacgatggaggggccggactcgtcatactcctgcttgctgatccacatctgctggaaggtggacagcgaggccaggatggagccgccgatccacacggagtacttgcgctcaggaggagcaatgatcttgatcttcattgtgctgggtgccagggcagtgatctccttctgcatcctgtcggcaatgccagggtacatggtggtgccgccagacagcactgtgttggcgtacaggtctttgcggatgtccacgtcacacttcatgatggagttgaaggtagtttcgtggatgccacaggactccatgcccaggaaggaaggctggaagagtgcctcagggcagcggaaccgctcattgccaatggtgatgacctggccgtcaggcagctcgtagctcttctccagggaggagctggaagcagccgtggccatctcttgctcgaagtccagggcgacgtagcacagcttctccttaatgtcacgcacgatttcccgctcggccgtggtggtgaagctgtagccgcgctcggtgaggatcttcatgaggtagtcagtcaggtcccggccagccaggtccagacgcaggatggcatgggggagggcatacccctcgtagatgggcacagtgtgggtgaccccgtcaccggagtccatcacgatgccagtggtacggccagaggcgtacagggatagcacagcctggatagcaacgtacatggctggggtgttgaaggtctcaaacatgatctgggtcatcttctcgcggttggccttggggttcaggggggcctcggtcagcagcacggggtgctcctcgggagccacacgcagctcattgtagaaggtgtggtgccagattttctccatgtcgtcccagttggtgacgatgccgtgctcgatggggtacttcagggtgaggatgcctctcttgctctgggcccaacttttttgtacaaa

SEQ ID NO: 225277 - DNA, 1258 bp, Homo Sapiens
ctttgaagggccccctttgtacaaaaaagttgggtaaggccgcctttgctggggacgatgctcccagggctgttttcccatccattgtgggacgtcccagacatcagggggtgatggtgggaatgggacaaaaagacagctacgtgggtgacgaagcacagagcaaaagaggaatcctgaccctgaagtacccgatagaacatggcatcatcaccaactgggacgacatggaaaagatctggcaccactctttctacaatgagcttcgtgttgcccctgaagagcatcccaccctgctcacggaggcacccctgaaccccaaggccaaccgggagaaaatgactcaaattatgtttgagactttcaatgtcccagccatgtatgtggctatccaggcggtgctgtctctctatgcctctggacgcacaactggcatcgtgctggactctggagatggtgtcacccacaatgtccccatctatgagggctatgccttgccccatgccatcatgcgtctggatctggctggccgagatctcactgactacctcatgaagatcctgactgagcgtggctattccttcgttactactgctgagcgtgagattgtccgggacatcaaggagaaactgtgttatgtagctctggactttgaaaatgagatggccactgccgcatcctcatcctcccttgagaagagttacgagttgcctgatgggcaagtgatcaccatcggaaatgaacgtttccgctgcccagagaccctgttccagccatccttcatcgggatggagtctgctggcatccatgaaaccacctacaacagcatcatgaagtgtgatattgacatcaggaaggacctctatgctaacaatgtcctatcagggggcaccactatgtaccctggcattgccgaccgaatgcagaaggagatcacggccctagcacccagcaccatgaagatcaagatcattgcccctccggagcgcaaatactctgtctggatcggtggctccatcctggcctctctgtccaccttccagcagatgtggatcagcaaacaggaatacgatgaagccgggccttccattgtccaccgcaaatgcttctaaaacactttcctgctcctctctgtctctagcacacaactgtgaatgtcctgtggaattatgccttcagttcttttccaaatcattcctaaccaaagctctgactcgttacctatgtgttttttataaatctgaaataggctactggt

SEQ ID NO: 225278 - DNA, 998 bp, Homo Sapiens
  misc_feature (672)..(711): n is a, c, g, or t
gcttttttataatagcaactttgtacaaaaaagttggcactgagcgaggctacagcttcaccaccacggccgagcgggaaatcgtgcgcgacatcaaggagaagctgtgctacgtcgccctggacttcgagcaggagatggccaccgccgcatcctcctcttctctggagaagagctacgagctgcccgatggccaggtcatcaccattggcaatgagcggttccggtgtccggaggcgctgttccagccttccttcctgggtatggaatcttgcggcatccacgagaccaccttcaactccatcatgaagtgtgacgtggacatccgcaaagacctgtacgccaacacggtgctgtcgggcggcaccaccatgtatccgggcattgctgacaggatgcagaaggagatcaccgccctggcgcccagcaccatgaagatcaagatcattgctcccccagagcgcaagtactccgtgtggatcggcggctccatcctggcctcgctgtccaccttccagcagatgtggatcagcaagcaggagtatgacgagtccggcccctccatcgtccaccgcaaatgcttctaggcgggctatgacttagttgcgttacaccctttcttgacaaaacctaacttgcgcagaaaacaagatgagattggcatggctttannnnnnnnnnnnnnnnnnnnnnnnnnnnnnnnnnnnnnnnggcttgactcaggatttaaaaactggaacggtgaaggtgacagcagtcggttggagcgagcatcccccaaagttcacaatgtggccgaggactttgattgcacattgttgtttttttaatagtcattccaaatatgagatgcattgttacaggaagtcccttgccatcctaaaagccaccccacttctctctaaggagaatggcccagtcctctcccaagtccacacaggggaggtgatagcattgctttcgtgtaaattaagtaatgcaaaatatttttaatcatc

SEQ ID NO: 225279 - DNA, 916 bp, Homo Sapiens
ctttgtacaaaaaagttggacctctcataccctcggtgctccagtccccagctcactcagccacatacaccatgtgtgaagaggagaccaccgcgctcgtgtgtgacaatggctctggcctgtgcaaggcaggcttcgcaggagatgatgccccccgggctgtcttcccctccattgtgggccgccctcgccaccagggtgtgatggtgggaatgggccagaaagacagctatgtgggggatgaggctcagagcaagcgagggatcctaactctcaaataccccattgaacacggcatcatcaccaactgggatgacatggagaagatctggcaccactccttctacaatgagctgcgtgtagcacctgaagagcaccccaccctgctcacagaggctcccctaaatcccaaggccaacagggagaagatgacccagatcatgtttgaaaccttcaatgtccctgccatgtacgtcgccattcaagctgtgctctccctctatgcctctggccgcacgacaggcatcgtcctggattcaggtgatggcgtcacccacaatgtccccatctatgaaggctatgccctgccccatgccatcatgcgcctggacttggctggccgtgacctcacggactacctcatgaagatcctcacagagagaggctattcctttgtgaccacagctgagagagaaattgtgcgagacatcaaggagaagctgtgctatgtggccctggattttgagaatgagatggccacagcagcttcctcttcctccctggaaaagagctatgagctgccagatgggcaggttatcaccattggcaatgagcgcttccgctgccctgagaccttcttccagccttcctttattggcatggagtccgctggaattcttgaagacaacctacaatt

SEQ ID NO: 225280 - DNA, 862 bp, Homo Sapiens
gttacctattggtttgtttctgcctatgtctgtttctctccctctaactgtgatggttagagagagagattggattggaatccatcttttttccctgtatctttctctccctgtgggtatccctgattttggctccatctggtcagacttcctcttcaaattcctggtgattggcagtgcaggaactggcaaatcatgtctccttcatcagttcattgagaataagttcaaacaggactccaaccacacaatcggcgtggagtttggatcccgggtggtcaacgtgggtgggaagactgtgaagctacagatttgggacacggctggccaggagcggtttcggtcagtgacgcggagttattaccgaggggcggctggagccctgctggtgtacgacatcaccagccgggagacatacaactcactggctgcctggctgacggatgcccgcaccctggccagccccaacatcgtggtcatcctctgtggcaacaagaaggacctggaccctgagcgggaggtcactttcctggaggcctcccgctttgcccaggagaatgagctgatgttcctggagaccagcgctctcacaggcgagaacgtggaggaggcgttcctcaagtgtgcccgcactatcctcaacaagattgactcaggcgagctagacccggagaggatgggctctggcattcagtacggggatgcgtccctccgccagcttcggcagcctcggagtgcccaggccgtggcccctcagccgtgtggctgctgagctctgtggagccagctcacctgttctccaggaccagccctgctggggcccaggcccaggctctgagaggccgtgtcctaacctgccctg

SEQ ID NO: 225281 - DNA, 1284 bp, Homo Sapiens
  misc_feature (102)..(111): n is a, c, g, or t
ttggcaagctaatatggaaaccacatgtaacttagccagactataccttgtgtagcttcaagaactcgcagtacattaccagctgtgattctccactgaaannnnnnnnnnaagggagctcaaggtcacaagaagaaatgaaaggaacaatcagcagccctgttcagaaggtggtttgaagacttcattgctgtagtttggattaactcccctcccgcctacccccatcccaaactgcatttataattttgtgactgaggatcatttgtttgttaatgtactgtgcctttaactttagacaactttttattttgatgtcctgttggctcagtaatgctcaagatatcaattgttttgacaaaataaatttactgaacttgggctaaaatcaaaccttggcacacaggtgtgatacaacttaacaggaatcatcgattcatccataaataatataaggaaaaacttatgcggtagcctgcattagggctttttgatacttgcagattgggggaaaacaacaaatgtcttgaagcatattaatggaattagtttctaatgtggcaaactgtattaagttaaagttctgatttgctcactctatcctggataggtatttagaacctgatagtctttaagccattccagtcatgatgaggtgatgtatgaatacatgcatacattcaaagcactgttttcaaagttaatgcaagtaaatacagcaattcctctttcaacgtttaggcagatcattaattatgagctagccaaatgtgggcatactattacagggaaagtttaaaggtctgataacttgaaataggtttttaggagaattcatctacttagactttttaaatgcctgccataaatgaaattgaaatggtagaatggctgaccacagcaatgaccagccctcattagggccctggatgatttttggtctaataacgcatgctagtgttgatgttttttggtcaagagggtatgaacaggaagaattaaatgcagcaggctttattttaaatgccgattcacattactctgttcaagctgcgttgagatgttaaactggcttactatagacttcgtaaaaatggctccagaagagtaacaaactgaaatctttgagatcacacaggttgggaaatatgtacataactgcacaaggtgtcaattctgctctacagtgcagttttagtcagttttagttgcataggtttccattgtatttatagtctggtttatgctaaatctggccaaagatgagcattgtccaccactaaa

SEQ ID NO: 225282 - DNA, 863 bp, Homo Sapiens; identical to SEQ ID NO: 190503
  misc_feature (571)..(584): n is a, c, g, or t

SEQ ID NO: 225283 - DNA, 886 bp, Homo Sapiens; identical to SEQ ID NO: 190508
  misc_feature (724)..(736): n is a, c, g, or t

SEQ ID NO: 225284 - DNA, 1052 bp, Homo Sapiens
  misc_feature (926)..(934): n is a, c, g, or t
  misc_feature (974)..(982): n is a, c, g, or t
tttgtacaaaaaagttgggtttattgtagccgttaaaaactgtagcatctcagcatctgggtggaagctgcctatatttcttcccagtttaactggggaccatctgtgaaattaattttccatccagacagctgctgtgagcaaatgaacataaatgctcgctggaaatttactaaccagtttttatattgacctgcagtgtaaaaagcacatttaattataaacaatatattcaaaatgggcaaattttattttcaaatgcagtgtagagctagattaaaagcaactctttgccacctactctgcccttttggcaaagttaccttgaacaaagaatcttaagggtttattaagaactctttattttcttcataccctgttctctgcagtgctttctaacagcttctgggtgcagattttcttcggcatccttttgcactcagcttattacaggtaggtagtgcttaagaaaagtcatggaggactaaagcctaagtccttttcacttttcctccatctgaaggtaggtgagttcatcctcttcatagtaatgctgttttaccaagactttatagcagatggacccagaaagaattttctgctattgtgttcactacaacaggatagggacatcagacagccccagaaaccccttccagatctgatatgggactattaatttttatgctgttaattggtattcattcacaatgcagttgaagggggaaggctccactgcattctttggctaagcctgaatgcttgctcatctgtaagatctatactcgaggtttgttttccttttaaaattctttagggagagagggatggtttctgaggggttctgaaagtatgattcaatgtgcaacatacaggtaggtcttcagcataagctgaaatatatgcatgtaaaaactttgacatcnnnnnnnnnaattttccactttcttcttaactttacttctctttttgtnnnnnnnnnatcttacagaagttgtgccaaagcagaatggtagggcacggaagaaacatggcaaactgctctgtgcttt

SEQ ID NO: 225285 - DNA, 982 bp, Homo Sapiens; identical to SEQ ID NO: 190509
  misc_feature (773)..(781): n is a, c, g, or t

SEQ ID NO: 225286 - DNA, 1098 bp, Homo Sapiens; identical to SEQ ID NO: 190511

SEQ ID NO: 225287 - DNA, 1025 bp, Homo Sapiens; identical to SEQ ID NO: 190512
  misc_feature (151)..(208): n is a, c, g, or t
  misc_feature (211)..(219): n is a, c, g, or t

SEQ ID NO: 225288 - DNA, 1137 bp, Homo Sapiens; identical to SEQ ID NO: 190513

SEQ ID NO: 225289 - DNA, 1192 bp, Homo Sapiens
ttggccggaacccaagatggctgcgctgttgctgagacacgttggtcgtcattgcctccgagcccactttagccctcagctctgtatcagaaatgctgttcctttgggaaccacggccaaagaagagatggagcggttctggaataagaatataggttcaaaccgtcctctgtctccccacattactatctacagttggtctcttcccatggcgatgtccatctgccaccgtggcactggtattgctttgagtgcaggggtctctctttttggcatgtcggccctgttactccctgggaactttgagtcttatttggaacttgtgaagtccctgtgtctggggccagcactgatccacacagctaagtttgcacttgtcttccctctcatgtatcatacctggaatgggatccgacacttgatgtgggacctaggaaaaggcctgaagattccccagctataccagtctggagtggttgtcctggttcttactgtgttgtcctctatggggctggcagccatgtgaagaaaggaggctcccagcatcatcttcctacacattattacattcacccatctttctgtttgtcattcttatctccagcctgggaaaagttctccttatttgtttagatccttttgtattttcagatctccttggagcagtagagtacctggtagaccataatagtggaaaagggtctagttttccccttgtttctaaagatgaggtggctgcaaaaactccccttttttgcccacagcttgcctactctcggcctagaagcagttattctctctccatattgggctttgatttgtgctgagggtcagcttttggctccttcttcctgagacagtggaaacaatgccagctctgtggcttctgccctggggatgggccgggttggggggtgggttggtgaggctttgggtgccactgcctgtgggttgctggcttaaaggacaattctcttcattggtgagagcccaggccattaacacctacacagtgttattgaaagaagagaggtgggggtggaggggaattagtctgtcccagctagagggagataaagagggctagttagttcttggagcagctgcttttgaggagaaaatatatagctttgggacacgagaagatctagaaaattatcattgaacatataatggttatttctttttcttg

SEQ ID NO: 225290 - DNA, 549 bp, Homo Sapiens; identical to SEQ ID NO: 190515

SEQ ID NO: 225291 - DNA, 964 bp, Homo Sapiens
cttaaaagggccaactttgtacaaaaaagttggctttccctctcccaacatggcggcctcagcaaaaaagaagaataagaaggggaagactatctccctaacagactttctggctgaggatgggggtactggtggaggaagcacctatgtttccaaaccagtcagctgggctgatgaaacggatgacctggaaggagatgtttcgaccacttggcacagtaacgatgacgatgtgtatagggcgcctccaattgaccgttccatccttcccactgctccacgggctgctcgggaacccaatatcgaccggagccgtcttcccaaatcgccaccctacactgcttttctaggaaacctaccctatgatgttacagaagagtcaattaaggaattctttcgaggattaaatatcagtgcagtgcgtttaccacgtgaacccagcaatccagagaggttgaaaggttttggttatgctgaatttgaggacctggattccctgctcagtgccctgagtctcaatgaagagtctctaggtaacaggagaattcgagtggacgttgctgatcaagcacaggataaagacagggatgatcgttcttttggccgtgatagaaatcgggattctgacaaaacagatacagactggagggctcgtcctgctacagacagctttgatgactacccacctagaagaggtgatgatagctttggagacaagtatcgagatcgttatgattcagaccggtatcgggatgggtatcgggatgggtatcgggatggcccacgccgggatatggatcgatatggtggccgggatcgctatgatgaccgaggcagcagagactatgatagaggctatgattcccggataggcagtggcagaagagcatttggcagtgggtatcgcagggatgatgactacagaggaggcggggaccgctatgagaccgatatgacagacggg

SEQ ID NO: 225292 - DNA, 1345 bp, Homo Sapiens; identical to SEQ ID NO: 190516
  misc_feature (74)..(88): n is a, c, g, or t
  misc_feature (798)..(807): n is a, c, g, or t
  misc_feature (1182)..(1193): n is a, c, g, or t

SEQ ID NO: 225293 - DNA, 927 bp, Homo Sapiens; identical to SEQ ID NO: 190517
  misc_feature (229)..(239): n is a, c, g, or t

SEQ ID NO: 225294 - DNA, 1152 bp, Homo Sapiens; identical to SEQ ID NO: 190519
  misc_feature (45)..(59): n is a, c, g, or t
  misc_feature (769)..(778): n is a, c, g, or t

SEQ ID NO: 225295 - DNA, 1009 bp, Homo Sapiens; identical to SEQ ID NO: 190521
  misc_feature (896)..(904): n is a, c, g, or t

SEQ ID NO: 225296 - DNA, 1262 bp, Homo Sapiens; identical to SEQ ID NO: 190522
  misc_feature (155)..(192): n is a, c, g, or t

SEQ ID NO: 225297 - DNA, 1501 bp, Homo Sapiens; identical to SEQ ID NO: 190523
  misc_feature (1147)..(1184): n is a, c, g, or t

SEQ ID NO: 225298 - DNA, 929 bp, Homo Sapiens; identical to SEQ ID NO: 190524
  misc_feature (537)..(574): n is a, c, g, or t

SEQ ID NO: 225299 - DNA, 1021 bp, Homo Sapiens; identical to SEQ ID NO: 190525
  misc_feature (773)..(810): n is a, c, g, or t

SEQ ID NO: 225300 - DNA, 1184 bp, Homo Sapiens; identical to SEQ ID NO: 190526
  misc_feature (529)..(537): n is a, c, g, or t

SEQ ID NO: 225301 - DNA, 502 bp, Homo Sapiens; identical to SEQ ID NO: 190528

SEQ ID NO: 225302 - DNA, 1522 bp, Homo Sapiens
actttgtacaaaaaagttggggaatgattctctctagaaaagaggtgaagatcatgtcgaggctcaaggacccaaacatcattcggctgctgggcgtgtgtgtgcaggacgaccccctctgcatgattactgactacatggagaacggcgacctcaaccagttcctcagtgcccaccagctggaggacaaggcagccgagggggcccctggggacgggcaggctgcgcaggggcccaccatcagctacccaatgctgctgcatgtggcagcccagatcgcctccggcatgcgctatctggccacactcaactttgtacatcgggacctggccacgcggaactgcctagttggggaaaatttcaccatcaaaatcgcagactttggcatgagccggaacctctatgctggggactattaccgtgtgcagggccgggcagtgctgcccatccgctggatggcctgggagtgcatcctcatggggaagttcacgactgcgagtgacgtgtgggcctttggtgtgaccctgtgggaggtgctgatgctctgtagggcccagccctttgggcagctcaccgacgagcaggtcatcgagaacgcgggggagttcttccgggaccagggccggcaggtgtacctgtcccggccgcctgcctgcccgcagggcctatatgagctgatgcttcggtgctggagccgggagtctgagcagcgaccacccttttcccagctgcatcggttcctggcagaggatgcactcaacacggtgtgaatcacacatccagctgcccctccctcagggagcgatccaggggaagccagtgacactaaaacaagaggacacaatggcacctctgcccttcccctcccgacagcccatcacctctaatagaggcagtgagactgcaggtgggctgggcccacccagggagctgatgccccttctccccttcctggacacactctcatgtccccttcctgttcttccttcctagaagcccctgtcgcccacccagctggtcctgtggatgggatcctctccaccctcctctagccatcccttggggaagggtggggagaaatataggatagacactggacatggcccattggagcacctgggccccactggacaacactgattcctggagaggtggctgcgcccccagcttctctctccctgtcacacactggaccccactggctgagaatctgggggtgaggaggacaagaaggagaggaaaatgtttccttgtgcctgctcctgtacttgtcctcagcttgggcttcttcctcctccatcacctgaaacactggacctgggggtagccccgccccagccctcagtcacccccacttcccacttgcagtcttgtagctagaacttctctaaacctatacgtttctgtggagtaaatattgggattgggggggaaagagggagcaacggccccatagccttgggggtgggacatctctagtgtagctgccacattgatttattctataatcacttggagtttg

SEQ ID NO: 225303 - DNA, 617 bp, Homo Sapiens
ctttgtacaaaaaagttggcccaggccctggaccgccaaacagctactcagctgcttaagctggcccacaagtacagaccagagacaaagcaagagaagaagcagagactgttggcccgggccgagaagaaggctgctggcaaaggggacgtcccaacgaagagaccacctgtccttcgagcaggagttaacaccgtcaccaccttggtggagaacaagaaagctcagctggtggtgattgcacacgacgtggatcccatcgagctggttgtcttcttgcctgccctgtgtcgtaaaatgggggtcccttactgcattatcaagggaaaggcaagactgggacgtctagtccacaggaagacctgcaccactgtcgccttcacacaggtgaactcggaagacaaaggcgctttggctaagctggtggaagctatcaggaccaattacaatgacagatacgatgagatccgccgtcactggggtggcaatgtcctgggtcctaagtctgtggctcgtatcgccaagctcgaaaaggcaaaggctaaagaacttgccactaaactgggttaaatgtacactgttgagttttctgtacataaaaataattgaaataatac

SEQ ID NO: 225304 - DNA, 1575 bp, Homo Sapiens; identical to SEQ ID NO: 190541
  misc_feature (309)..(479): n is a, c, g, or t

SEQ ID NO: 225305 - DNA, 880 bp, Homo Sapiens; identical to SEQ ID NO: 190542

SEQ ID NO: 225306 - DNA, 1311 bp, Homo Sapiens
ctttgtacaaaaaagttggcaaaaatgtccatgaaagagagagtcagtgaaatgagtagttttcaacgtaatctgtttattctggcctataattacaaaatggaacagatttcaaaaggacgtaatactccactgtgcgacagctttgttttccggaaagttcgaagcttgctagggggaaatattcgtctcctgttgtgtggtggcgctccactttctgcaaccacgcagcgattcatgaacatctgtttctgctgtcctgttggtcagggatacgggctcactgaatctgctggggctggaacaatttccgaagtgtgggactacaatactggcagagtgggagcaccattagtttgctgtgaaatcaaattaaaaaactgggaggaaggtggatactttaatactgataagccacaccccaggggtgaaattcttattgggggccaaagtgtgacaatggggtactacaaaaatgaagcaaaaacaaaagctgatttctttgaagatgaaaatggacaaaggtggctctgtactggggatattggagagtttgaacccgatggatgcttaaagattattgatcgtaaaaaggaccttgtaaaactacaggcaggggaatatgtttctcttgggaaagtagaggcagctttgaagaatcttccactagtagataacatttgtgcatatgcaaacagttatcattcttatgtcattggatttgttgtgccaaatcaaaaggaactaactgaactagctcgaaagaaaggacttaaagggacttgggaggagctgtgtaacagttgtgaaatggaaaatgaggtacttaaagtgctttccgaagctgctatttcagcaagtctggaaaagtttgaaattccagtaaaaattcgtttgagtcctgaaccgtggacccctgaaactggtctggtgacagatgccttcaagctgaaacgcaaagagcttaaaacacattaccaggcggacattgagcgaatgtatggaagaaaataattattctcttctggcatcagtttgctacagtgagctcagatcaaataggaaaatacttgaaatgcatgtctcaagctgcaaggcaaactccattcctcatattaaactattacttctcatgacgtcaccatttttaactgacaggattagtaaaacattaagacagcaaacttgtgtctgtctcttctttcattttccccgccaccaacttactttacacctatgactgtacttgtcagtatgagaatttttctgaaccatattgggggaaccggtgattttaaacctcaagttttt

SEQ ID NO: 225307 - DNA, 939 bp, Homo Sapiens
tttgtacaaaaaagttggcgctggctcccgatgtacgcacgcgtgttctctctcgtgggcgtgatgcagaggcctctcccgcccccctggtgctgagctttagcgggaaccccctgcactgcaactgtgagctgctgtggctgcggcggctggcgcggccggacgacctggaaacgtgcgcctccccgcccggcctggccggccgctacttctgggcagtgcccgagggcgagttctcctgtgagccgcccctcattgcccgccacacgcagcgcctctgggtgctggaaggccagcgggccacgctgcggtgccgggccctgggtgaccccgcgcctaccatgcactgggtcggtcctgacgaccggttggttggcaactcctcccgagcccgggctttccccaacgggaccttagagattggggcgaccggcgctggggacgctgggggctacacctgcatcgccaccaaccctgctggtgaggccacagcccgagtagaactgcgggtgctggccttgccccatggtgggaacagcagtgccgaggggggccgccccgggccctcggacatcgccgcctccgctcgcactgctgccgagggtgaggggacgctggagtctgagccagccgtgcaggtgacggaggtgaccgccacctcagggctggtgagctggggtcccgggcggccagccgacccagtgtggatgttccaaatccagtacaacagcagcgaagatgagaccctcatctaccggattgtcccagcctccagccaccacttcctgctgaagcacctcgtccccggcgctgactatgacctctgcctgctggccttgtcaccggccgctgggccctctgacctcacggccaccaggctgctgggctgtgcccatttctccactctgccggcctcgcccctgtgccacgccctgcagg

SEQ ID NO: 225308 - DNA, 1252 bp, Homo Sapiens
ctttgtacaaaaaagttggcggagacctccatctcccggccggggtggctggggcctgggcgctgttctccggcccttcccgggaaggggagggggttcccgccagtttcctgcctccccccgcgccacgccggggcggcgccgggaagccactccttctaggagcgcagagccttggccctccctgggagtctggtcggcgggctgtggggtcccaaaatcgtgaccccggcccctctcccctcctcccccaccatgtcccatgtcaggatcagttcgaggtgctcgagcgccacacgcagtgggggctggacctgttggacagatatgtaaagttcgtgaaagaacgcaccgaagtggaacaggcttacgccaaacaactgcggagcctggtgaaaaaatatctgcccaagagacctgccaaggatgatcctgagtccaaattcagccagcaacagtccttcgtacagattctccaggaggtgaatgactttgcaggccagcgggagctggtggctgagaacctcagtgtccgtgtatgtcttgagctgaccaagtactcacaagagatgaaacaggagaggaagatgcacttccaagaagggcggcgggcccagcagcagctggaaaatggctttaaacagctggagaatagtaagcgtaaatttgagcgggactgccgggaggcagagaaggcagcccagactgctgaacggctagaccaggatatcaacgccaccaaggctgatgtggagaaggccaagcagcaagcccaccttcggagtcacatggccgaagaaagcaaaaacgaatatgcggctcaactgcagcgcttcaaccgagaccaagcccacttctatttttcacagatgccccagatattcgataagctccaagacatggatgaacgcagggccacccgcctgggtgccgggtatgggctcctgtcggaggccgagctggaggtggtgcccataatagccaagtgcttggagggcatgaaggtggctgcaaatgctgtggatcccaagaacgactcccacgtccttatagagctgcacaagtcaggttttgcccgcccgggcgacgtggaattcgaggacttcagccagcccatgaaccgtgcaccctccgacagcagtctgggcaccccctcggatggacggcctgaactccgaggcccggggtcgcagccgcaccaagcgctggccttttggcaagaagacaagacagtggtgaccggaggatttta

SEQ ID NO: 225309 - DNA, 1154 bp, Homo Sapiens; identical to SEQ ID NO: 190545
  misc_feature (1070)..(1081): n is a, c, g, or t

SEQ ID NO: 225310 - DNA, 1257 bp, Homo Sapiens
  misc_feature (988)..(1021): n is a, c, g, or t
gccaactttgtacaaaaaagttggcataaagcctgaggcggcggcagcggcggagttggcggcttggagagctcgggagagttccctggaaccagaacttggaccttctcgcttctgtcctccgtttagtctcctcctcggcgggagccctcgcgacgcgcccggcccggagcccccagcgcagcggccgcgtttgaaggatgacctctaggaagaaagtgttgctgaaggttatcatcctgggagattctggagtcgggaagacatcactcatgaaccagtatgtgaataagaaattcagcaatcagtacaaagccacaataggagctgactttctgaccaaggaggtgatggtggatgacaggctagtcacaatgcagatatgggacacagcaggacaggaacggttccagtctctcggtgtggccttctacagaggtgcagactgctgcgttctggtatttgatgtgactgcccccaacacattcaaaaccctagatagctggagagatgagtttctcatccaggccagtccccgagatcctgaaaacttcccatttgttgtgttgggaaacaagattgacctcgaaaacagacaagtggccacaaagcgggcacaggcctggtgctacagcaaaaacaacattccctactttgagaccagtgccaaggaggccatcaacgtggagcaggcgttccagacgattgcacggaatgcacttaagcaggaaacggaggtggagctgtacaacgaatttcctgaacctatcaaactggacaagaatgaccgggccaaggcctcggcagaaagctgcagttgctgagggggcagtgagagttgagcacagagtccttcacaaaccaagaacacacgtaggccttcaacacaattcccctctcctcttccaaacaaaacatacattgatctctcacatccagctgccaaaagaaaaccccatcaaacacagttacaccccacatatctctnnnnnnnnnnnnnnnnnnnnnnnnnnnnnnnnnngatctgacgtaatcaaactccagcccttgcccgtgatggctccttggggtctgcctgcccacccacatgagcccgcgagtatggcagcagacaagccagcggtggaagtcattctgatatggagttggcattggaagcttattctttttgttcactggagagagagagaactgtttacagttaatctgtgtctaattatctgattttttttattgtcttgtgtcttttaccccccc

SEQ ID NO: 225311 - DNA, 1318 bp, Homo Sapiens; identical to SEQ ID NO: 190546
  misc_feature (379)..(395): n is a, c, g, or t
  misc_feature (1179)..(1212): n is a, c, g, or t

SEQ ID NO: 225312 - DNA, 1523 bp, Homo Sapiens; identical to SEQ ID NO: 190547

SEQ ID NO: 225313 - DNA, 517 bp, Homo Sapiens
ctttgtacaaaaaagttggggcagcgcggacgccgcacgatgcctggagttactgtaaaagacgtgaaccagcaggagttcgtcagagctctggcagccttcctcaaaaagtccgggaagctgaaagtccccgaatgggtggataccgtcaagctggccaagcacaaagagcttgctccctacgatgagaactggttctacacgcgagctgcttccacagcgcggcacctgtacctccggggtggcgctggggttggctccatgaccaagatctatgggggacgtcagagaaacggcgtcatgcccagccacttcagccgaggctccaagagtgtggcccgccgggtcctccaagccctggaggggctgaaaatggtggaaaaggaccaagatggcggccgcaaactgacacctcagggacaaagagatctggacagaatcgccggacaggtggcagctgccaacaagaagcattagaacaaaccatgctgggttaataaattgcctcattcgtaaa

SEQ ID NO: 225314 - DNA, 410 bp, Homo Sapiens; identical to SEQ ID NO: 190551

SEQ ID NO: 225315 - DNA, 1500 bp, Homo Sapiens; identical to SEQ ID NO: 190554
  misc_feature (547)..(595): n is a, c, g, or t

SEQ ID NO: 225316 - DNA, 989 bp, Homo Sapiens; identical to SEQ ID NO: 190555
  misc_feature (894)..(911): n is a, c, g, or t

SEQ ID NO: 225317 - DNA, 1074 bp, Homo Sapiens; identical to SEQ ID NO: 190556
  misc_feature (593)..(610): n is a, c, g, or t
  misc_feature (678)..(703): n is a, c, g, or t
  misc_feature (726)..(734): n is a, c, g, or t

SEQ ID NO: 225318 - DNA, 1412 bp, Homo Sapiens; identical to SEQ ID NO: 190558

SEQ ID NO: 225319 - DNA, 1279 bp, Homo Sapiens; identical to SEQ ID NO: 190564

SEQ ID NO: 225320 - DNA, 1610 bp, Homo Sapiens
  misc_feature (150)..(177): n is a, c, g, or t
ttggctaaactggagaacaaaacttcggcgatatgtggccaagaagctgaaagaacaagcaaaggcactggacatcagcctcagctctggagaggaagatgaaggtgatgaggaggactcaacagctggaaccacaaagcagccctctannnnnnnnnnnnnnnnnnnnnnnnnnnnacaactgaaccagaccttggcagaaatgaaggcccaggaggtggcggaattgaagaggaagaaaaagaagctgttgcgtgagcagagaaagcagcgggagcgtgtggagctgaagatggatctgcctggggtttccattgcagacgagggggagactggcatgttctccttgtgcaccatccggggtcaccagttattagaggaagtaacacaaggggatatgagtgcagcagacacatttctgtccgatctgccaagggatgatatctatgtgtcagatgttgaggacgacggtgatgacacatctctggatagtgacctggatccagaggagctggcaggagtcaggggacatcagggtctaagggaccaaaagcgtatgcgacttactgaagtgcaagatgataaagaggaggaggaggaggagaatccactgctggtaccactggaggaaaaggcagtactgcaggaagaacaagccaacctgtggttctcaaagggcagctttgctgggatcgaggacgatgccgatgaggccctggagatcagtcaggcccagctgttatttgagaaccggcggaagggacggcagcagcagcagaagcagcagctgccacagacacccccttcctgtttgaagactgagataatgtctcccctgtaccaagatgaagcccctaagggaacagaggcttcttcggggacagaagctgccactggccttgaaggggaagaaaaggatggcatctcagacagtgatagcagtactagcagtgaggaagaagagagctgggaacccctccgtggtaagaagcgaagccgtgggcctaagtcagatgatgacgggtttgagatagtgcctattgaggacccagcgaaacatcggatactggaccccgaaggccttgctctaggtgctgttattgcctcttccaaaaaggccaagagagacctcatagataactccttcaaccggtacacatttaatgaggatgagggggagcttccggagtggtttgtgcaagaggaaaagcagcaccggatacgacagttgcctgttggtaagaaggaggtggagcattaccggaaacgctggcgggaaatcaatgcacgtcccatcaagaaggtggctgaggctaaggctagaaagaaaaggaggatgctgaagaggctggagcagaccaggaagaaggcagaagccgtggtgaacacagtggacatctcagaacgagagaaagtggcacagctgcgaagtctctacaagaaggctgggcttgacaaggagaaacgccatgtcacctacgttgtagccaaaaaaggtgtgggccgcaaagtgcgccggccagctggagtcagaggtcatttcaacggtggtggactcaaggatgaagaatgaccaaagagcacagcaacgtaacggaacaaagaaaaaa

SEQ ID NO: 225321 - DNA, 921 bp, Homo Sapiens; identical to SEQ ID NO: 190566

SEQ ID NO: 225322 - DNA, 908 bp, Homo Sapiens
ttgggtggcgaagttacttttgagggtatttgagtagcggcggtgtgtcaggggctaaagaggaggacgaagaaaagcagagcaagggaacccagggcaacaggagtagttcactccgcgagaggccgtccacgagacccccgcgcgcagccatgagccccgccccccgctgttgcttggagaggggcgggacctggagagaggctgctccgtgaccccaccatgtcctctcctaccacgagttccctggatacccccctgcctggaaatggcccccctcagcctggcgccccttcttcttcacccactgtaaaggaggagggtccggagccgtggcccgggggtccggaccctgatgtcccaggcactgatgaggccagctcagcctgcagcacagactgggtcatcccagatcccgaagaggaaccagagcgcaagcgaaagaagggcccagccccgaagatgctgggccacgagctttgccgtgtctgtggggacaaggcctccggcttccactacaacgtgctcagctgcgaaggctgcaagggcttcttccggcgcagtgtggtccgtggtggggccaggcgctatgcctgccggggtggcggaacctgccagatggacgctttcatgcggcgcaagtgccagcagtgccggctgcgcaagtgcaaggaggcagggatgagggagcagtgcgtcctttctgaagaacagatccggaagaagaagattcggaaacagcagcagcagagtcacagtcacagtcgcagtcacctgtggggccgcagggcagcagcagctcagcctctgggcctggggcttcccctggtggatctgaggcaggcagccagggctccggggaagcgagggtgtccagctaacagcggctcaagaactaatgatccagc

SEQ ID NO: 225323 - DNA, 791 bp, Homo Sapiens; identical to SEQ ID NO: 190572
  misc_feature (381)..(390): n is a, c, g, or t

SEQ ID NO: 225324 - DNA, 1426 bp, Homo Sapiens
ttggctcttcgccgaccaggctgaaatccttttgagcaaccactacaccagttccgagatcagggtctttggtgccccggaggttctggagaacttggaggtgaaatccgggtccccggccgtgctggcattcgcaaaggagaagtcttttgggtggcccagcttcatcacatacacggtcggcgtctcggaccccgcggctggcagccaagggcctctgtccactaccctgaccttctccagccccgtgaccaaccaagccattgccatcccagtgacagtggcttttgtgatggatcgccgtgggcccggtccttatggagccagcctcttccagcacttcctggattcctaccaggtcatgttcttcacgctcttcgccctgttggctgggacagcggtcatgatcatagcctaccacactgtctgcacgccccgggatcttgctgtgcctgcagccctcacgcctcgagccagccctggacacagcccccactatttcgctgcctcatcacccacatctcccaatgcattgcctcctgctcgcaaagccagccctccctcagggctgtggagcccagcctatgcctcccactaggccgcgtgaaggttcccggaggatgggtctcagccgagcctcgtgcacccccaagatggaacatccctgctgcattcacactggaacaagcccctccagatgagtgccccggccccaggccagcttcactgccgtctcttcacacagagctgtagtttcggctctgcccattagctcattttatgtaggagttttaaatgtgtgtttttttcctttcaagtcttacaaagctaagactttttggctcattcctttttgcatggttgtctagggtttctggacaatgtgctgttgcatttttattttcctagccttgctaaaatctttcccttctcaagactttgagcagttagaagtgctctttagaagttgtctgtgggtgatgttactgtagtggtctcagggaaaggattgtccagttactttagggggtttttggtggggtttttccccctgtgaaaacttactttgcccctagtctggctgctgctaggacttctgaggagcaatgggacatgagtgtccctgtatctgcgccactgccgcaagggaagcctcaggaaccagcacctggaggccaggatagccaagccctgggtgagcgagaggctggagaacacaggagctcacccagggctgctgcccaaccatgggccactgtgaacagacttcagtcctctgtttttgtttcataagccgttgagacatctgatggacttggcttaagccctgctgggacatcccacgtgtgatccctttcactccatcatgacaccaggactgtccttaggaaaatgtccttgagatggcagcaggagtcatattttc

SEQ ID NO: 225325 - DNA, 921 bp, Homo Sapiens
ccaacacccacttctctggttgtataagacagggacctaaaaagggaaaggatgggaggaggatcatccttgcagtgatcatgtagggcttcatgctataaatggttttgcatttccggagatgaaacaagtctcttcaccacagaactactgcagatcatagccctatggtctggctggttttgtcaatctggcagttcagggtcagtgcaaaggacatccccaacacctcaatcacacatacacagatggtgatgattccgatatacaggaaattggaatgaaaccacagtcttgctttcgcatagcaaccctccacttttcgatctgaggggcaagatgctggtgggccactggtccaatcactcgtgccatttataccacaacactgcagaaatgactggatggagtcccacgctgccttggtgctattgtctgagtggtaacggtggatgctgtcggtcagacccttagccacatactcattcagcttctgttcatatacaaagagcaggatggccaaggtcacctcagcaaggaggataatcagcagcaggatgaagaacgacataagcagacacttgttttccttgatagagcccatgcagcccaggaaggcaactaccatgataatagagcccacgatgacaaacacattgcccagcgtgagggaggggaggttatggaagagcactccgaagttgttgtggatcagcaggtagatcccaaagcccaaaatgcagcagccacagatccaaaagagcaagttgaagaaaaacaggacatacttcagcagtttcaagctactcatgcccatgccgtgatattcttgcccttttccaggcaccgttcctcagtcctttcggcagaatttagtgattatccttgaggtggccgagacaaggctggtaacacagccaa

SEQ ID NO: 225326 - DNA, 1453 bp, Homo Sapiens; identical to SEQ ID NO: 190575

SEQ ID NO: 225327 - DNA, 956 bp, Homo Sapiens; identical to SEQ ID NO: 190579

SEQ ID NO: 225328 - DNA, 924 bp, Homo Sapiens
  misc_feature (873)..(881): n is a, c, g, or t
ttggcagcgctgaggacacgatgtcgcggctctcccgctcactgctttgggccgccacctgcctgggcgtgctctgcgtgctgtccgcggacaagaacacgacccagcacccgaacgtgacgactttagcgcccatctccaacgtaacctcggcgccggtgacgtccctcccgctggtcaccactccggcaccagaaacctgtgaaggtcgaaacagctgcgtttcctgttttaatgttagcgttgttaatactacctgcttttggatagaatgtaaagatgagagctattgttcacataactcaacagttagtgattgtcaagtggggaacacgacagacttctgttccgtttccacggccactccagtgccaacagccaattctacagctaaacccacagttcagccctccccttctacaacttccaagacagttactacatcaggtacaacaaataacactgtgactccaacctcacaacctgtgcgaaagtctacctttgatgcagccagtttcattggaggaattgtcctggtcttgggtgtgcaggctgtaattttctttctttataaattctgcaaatctaaagaacgaaattaccacactctgtaaacagacccattgaattaataaggactggtgattcatttgtgtaactcactgaagccaaaatactatcttttaagatgtcccacatggaagacgctattccaggatctttaaatttccatggatgcatataggatgtttgggagcatcatccgtgaagaaaaaatcaattaaatcattgtgttcaacaggaatatttaaaatattctgcatgaatcctgtggctgtcttattttaaatagctgctgctgtgggattatannnnnnnnnccttaacatgcccaaatataacttttctgaaagtgatggaaaa

SEQ ID NO: 225329 - DNA, 1015 bp, Homo Sapiens; identical to SEQ ID NO: 190580

SEQ ID NO: 225330 - DNA, 701 bp, Homo Sapiens; identical to SEQ ID NO: 190582

SEQ ID NO: 225331 - DNA, 895 bp, Homo Sapiens
ttggggacggctctagctaggtgaggggctccggccagttcccttttagactatggcgacatacctggagttcatccagcagaatgaagaacgggatggtgtgcgttttagttggaacgtgtggccttccagccggctggaggctacaagaatggttgtacccctggcttgtctccttactcctttgaaagaacgtccagacctacctcctgtacaatatgaacctgtgctttgcagcaggccaacttgtaaagctgttctcaacccactttgtcaggttgattatcgagcaaaactttgggcctgtaatttctgttttcaaagaaatcagtttcctccagcttatggaggcatatctgaggtgaatcaacctgccgaattgatgccccagttttctacaattgagtacgtgatacagcgaggtgctcagtcccctctgatctttctctatgtggttgacacatgcctggaggaagatgaccttcaagcactcaaagagtccctgcagatgtccctgagtcttcttcctccagatgctctggtgggtctgatcacatttggaaggatggtgcaggttcatgagctaagctgtgaaggaatctccaaaagttatgtcttccgagggaccaaggatttaactgcaaagcaaatacaggatatgttgggcctgaccaagccagccatgcccatgcagcaagcacgacctgcacaaccacaggagcacccttttgcttcaagcagatttctgcagcctgttcacaagattgatatgaacctcactgatcttcttggggagctacagagggacccatggccagtaactcaggggaagagacctttgcgatccactggtgtggctttgtccattgctgttggcttgctggagggcactttt

SEQ ID NO: 225332 - DNA, 1489 bp, Homo Sapiens
ttggcttggcacgctccatactgggagaggcttctgggtcaaaggaccagtctgcagagggatcctgtggctggaagcgaggaggctccacacggccgttgcagctaccgcagccaggatctgggcatccaggcacggccatgacccctccgaggctcttctgggtgtggctgctggttgcaggaacccaaggcgtgaacgatggtgacatgcggctggccgatgggggcgccaccaaccagggccgcgtggagatcttctacagaggccagtggggcactgtgtgtgacaacctgtgggacctgactgatgccagcgtcgtctgccgggccctgggcttcgagaacgccacccaggctctgggcagagctgccttcgggcaaggatcaggccccatcatgctggacgaggtccagtgcacgggaaccgaggcctcactggccgactgcaagtccctgggctggctgaagagcaactgcaggcacgagagagacgctggtgtggtctgcaccaatgaaaccaggagcacccacaccctggacctctccagggagctctcggaggcccttggccagatctttgacagccagcggggctgcgacctgtccatcagcgtgaatgtgcagggcgaggacgccctgggcttctgtggccacacggtcatcctgactgccaacctggaggcccaggccctgtggaaggagccgggcagcaatgtcaccatgagtgtggatgctgagtgtgtgcccatggtcagggaccttctcaggtacttctactcccgaaggattgacatcaccctgtcgtcagtcaagtgcttccacaagctggcctctgcctatggggccaggcagctgcagggctactgcgcaagcctctttgccatcctcctcccccaggacccctcgttccagatgcccctggacctgtatgcctatgcagtggccacaggggacgccctgctggagaagctctgcctacagttcctggcctggaacttcgaggccttgacgcaggccgaggcctggcccagtgtccccacagacctgctccaactgctgctgcccaggagcgacctggcggtgcccagcgagctggccctactgaaggccgtggacacctggagctggggggagcgtgcctcccatgaggaggtggagggcttggtggagaagatccgcttccccatgatgctccctgaggagctctttgagctgcagttcaacctgtccctgtactggagccacgaggccctgttccagaagaagactctgcaggccctggaattccacactgtgcccttccagttgctggcccggtacaaaggcctgaacctcaccgaggatacctacaagccccggatttacacctcgcccacctggagtgcctttgtgacagacagttcctggagtgcacggaagtcacaactggtctatcagtccagacggggcctttggtcaaatattcttctgattacttccaagccccc

SEQ ID NO: 225333 - DNA, 1273 bp, Homo Sapiens; identical to SEQ ID NO: 190585

SEQ ID NO: 225334 - DNA, 750 bp, Homo Sapiens; identical to SEQ ID NO: 190586
  misc_feature (634)..(649): n is a, c, g, or t

SEQ ID NO: 225335 - DNA, 601 bp, Homo Sapiens; identical to SEQ ID NO: 190587
  misc_feature (478)..(493): n is a, c, g, or t

SEQ ID NO: 225336 - DNA, 1399 bp, Homo Sapiens; identical to SEQ ID NO: 190589
  misc_feature (66)..(80): n is a, c, g, or t
  misc_feature (1276)..(1291): n is a, c, g, or t

SEQ ID NO: 225337 - DNA, 1106 bp, Homo Sapiens; identical to SEQ ID NO: 190595
  misc_feature (1005)..(1020): n is a, c, g, or t

SEQ ID NO: 225338 - DNA, 930 bp, Homo Sapiens; identical to SEQ ID NO: 190596
  misc_feature (807)..(822): n is a, c, g, or t

SEQ ID NO: 225339 - DNA, 843 bp, Homo Sapiens; identical to SEQ ID NO: 190599
  misc_feature (745)..(760): n is a, c, g, or t

SEQ ID NO: 225340 - DNA, 795 bp, Homo Sapiens; identical to SEQ ID NO: 190602

SEQ ID NO: 225341 - DNA, 652 bp, Homo Sapiens; identical to SEQ ID NO: 190603

SEQ ID NO: 225342 - DNA, 1113 bp, Homo Sapiens; identical to SEQ ID NO: 190605

SEQ ID NO: 225343 - DNA, 1211 bp, Homo Sapiens; identical to SEQ ID NO: 190606

SEQ ID NO: 225344 - DNA, 955 bp, Homo Sapiens; identical to SEQ ID NO: 190607

SEQ ID NO: 225345 - DNA, 938 bp, Homo Sapiens
tttgtacaaaaaagttggcaagatggcggcgccgaaggggagcctctgggtgaggacccaactggggctcccgccgctgctgctgctgaccatggccttggccggaggttcggggaccgcttcggctgaagcatttgactcggtcttgggtgatacggcgtcttgccaccgggcctgtcagttgacctaccccttgcacacctaccctaaggaagaggagttgtacgcatgtcagagaggttgcaggctgttttcaatttgtcagtttgtggatgatggaattgacttaaatcgaactaaattggaatgtgaatctgcatgtacagaagcatattcccaatctgatgagcaatatgcttgccatcttggttgccagaatcagctgccattcgctgaactgagacaagaacaacttatgtccctgatgccaaaaatgcacctactctttcctctaactctggtgaggtcattctggagtgacatgatggactccgcacagagcttcataacctcttcatggactttttatcttcaagccgatgacggaaaaatagttatattccagtctaagccagaaatccagtacgcaccacatttggagcaggagcctacaaatttgagagaatcatctctaagcaaaatgtcctcgatctgcaaatgagaaattcacaagcgcacaggaattttcttgaagatggagaaagtgatggctttttaagatgcctctctcttaactctgggtggattttaactacaactcttgtcctctcggtgatggtattgctttggatttgttgtgcaactgttgctacagctgtggagcagtatgttccctctgagaagctgagtatctatggtgactttggagtttatgaatgaacaaaaagctaaacagatatccagcttcttctcttgtggttgttagatctaaaactgaa

SEQ ID NO: 225346 - DNA, 518 bp, Homo Sapiens; identical to SEQ ID NO: 190609
  misc_feature (273)..(311): n is a, c, g, or t

SEQ ID NO: 225347 - DNA, 1015 bp, Homo Sapiens; identical to SEQ ID NO: 190610
  misc_feature (328)..(366): n is a, c, g, or t

SEQ ID NO: 225348 - DNA, 991 bp, Homo Sapiens; identical to SEQ ID NO: 190611
  misc_feature (802)..(839): n is a, c, g, or t

SEQ ID NO: 225349 - DNA, 884 bp, Homo Sapiens; identical to SEQ ID NO: 190612
  misc_feature (674)..(712): n is a, c, g, or t

SEQ ID NO: 225350 - DNA, 638 bp, Homo Sapiens; identical to SEQ ID NO: 190613
  misc_feature (398)..(436): n is a, c, g, or t

SEQ ID NO: 225351 - DNA, 777 bp, Homo Sapiens
  misc_feature (604)..(618): n is a, c, g, or t
cctcgtccacctttaaaaccgcctccttcttctgccgctcctggtgctgcttgtgtgctcgtttggtgcggacctggtacctcttttgtgaagcggcagctgaggagactccggcgctcgccatggccgacgaaaagcccaaggaaggagtcaagactgagaacaacgatcatattaatttgaaggtggcggggcaggatggttctgtggtgcagtttaagattaagaggcatacaccacttagtaaactaatgaaagcctattgtgaacgacagggattgtcaatgaggcagatcagattccgatttgacgggcaaccaatcaatgaaacagacacacctgcacagttggaaatggaggatgaagatacaattgatgtgttccaacagcagacgggaggtgtctactgaaaagggaacctgcttctttactccagaactctgttctttaaagaccaagattacattctcaattagaaaactgcaatttggttccaccacatcctgactactaccgtatagttttctctattctttcatttcccccttccccattcctttattgtacataaagtaactggtatatgtgcacaagcatattgcannnnnnnnnnnnnnnaactaaacagccaatggtatgttttgattgacatcaagtggagacgggatggggaaaaatactgattctgtgaaaataccccctttctccattagtggcatgctcattcagctcttatctttatattccagtaagttattttgctctcactgttttaac

SEQ ID NO: 225352 - DNA, 1051 bp, Homo Sapiens; identical to SEQ ID NO: 190614
  misc_feature (648)..(662): n is a, c, g, or t
  misc_feature (822)..(833): n is a, c, g, or t

SEQ ID NO: 225353 - DNA, 1146 bp, Homo Sapiens
cctttaaaagccaactttgtacaaaaaagttgggagttcagagcagcagaagccggcgtcgtcggatgttgtgttgcccgccaccatgagctacacaggctttgtccagggatctgaaaccactttgcagtcgacatactcggataccagcgctcagcccacctgtgattatggatatggaacttggaactctgggacaaatagaggctacgagggctatggctatggctatggctatggccaggataacaccaccaactatgggtatggtatggccacttcacactcttgggaaatgcctagctctgacacaaatgcaaacactagtgcctcgggtagcgccagtgccgattccgttttatccagaattaaccagcgcttagatatggtgccgcatttggagacagacatgatgcaaggaggcgtgtacggctcaggtggagaaaggtatgactcttatgagtcctgcgactcgagggccgtcctgagtgagcgcgacctgtaccggtcaggctatgactacagcgagcttgaccctgagatggaaatggcctatgagggccaatacgatgcctaccgcgaccagttccgcatgcgtggcaacgacaccttcggtcccagggcacagggctgggcccgggatgcccggagcggccggccaatggcctcaggctatgggcgcatgtgggaagaccccatgggggcccggggccagtgcatgtctggtgcctctcggctgccctccctcttctcccagaacatcatccccgagtacggcatgttccagggcatgcgaggtgggggcgccttcccgggcggctcccgctttggtttcgggtttggcaatggcatgaagcagatgagcggacctggaagacctggaccacagccgacttccgaaccaagaagaagaagagaaagcagggcggcagtcctgatgagccagatagcaaagccacccgcacggactgctcggacaacagcgactcagacaatgatgagggcaccgagggggaagccacagagggccttgaaacaccgaggctgtggagaagggctctagagtggacggagaggatgaggagggaaagaggatgggagagaagaagcaaagaggatccagagaaggtgagttttcctggggtg

SEQ ID NO: 225354 - DNA, 931 bp, Homo Sapiens
ttggcgaagactgagcggttgtggccgcgttgccgacctccagcagcagtcggcttctctacgcagaacccgggagtaggagactcagaatcgaatctcttctccctccccttcttggttacaaaacacttgaaatatataagttagtggaactttgcttgagtgagatttttttgatcttcagctacattttcggctttgtgagaaaccttaccatcaaacacgatggccagcaacgttaccaacaagacagatcctcgctccatgaactcccgtgtattcattgggaatctcaacactcttgtggtcaagaaatctgatgtggaggcaatcttttcgaagtatggcaaaattgtgggctgctctgttcataagggctttgccttcgttcagtatgttaatgagagaaatgcccgggctgctgtagcaggagaggatggcagaatgattgctggccaggttttagatattaacctggctgcagagccaaaagtgaaccgaggaaaagcaggtgtgaaacgatctgcagcggagatgtacggctcctcttttgacttggactatgactttcaacgggactattatgataggatgtacagttacccagcacgtgtacctcctcctcctcctattgctcgggctgtagtgccctcgaaacgtcagcgtgtatcaggaaacacttcacgaaggggcaaaagtggcttcaattctaagagtggacagcggggatcttccaagtctggaaagttgaaaggagatgaccttcagccattaagaaggagctgacccagataaaacaaaaagtggattctctcctggaaacctggaaaaaattgaaaaggaacagagcaaacaagcagtaagatgaagaatgatagtcagaagaggagcagagcagcagctccgtgaagaaagatgagactaatgtgaa

SEQ ID NO: 225355 - DNA, 944 bp, Homo Sapiens; identical to SEQ ID NO: 190616

SEQ ID NO: 225356 - DNA, 1296 bp, Homo Sapiens; identical to SEQ ID NO: 190617
  misc_feature (284)..(293): n is a, c, g, or t
  misc_feature (588)..(623): n is a, c, g, or t

SEQ ID NO: 225357 - DNA, 1137 bp, Homo Sapiens; identical to SEQ ID NO: 190618

SEQ ID NO: 225358 - DNA, 978 bp, Homo Sapiens; identical to SEQ ID NO: 190622

SEQ ID NO: 225359 - DNA, 1370 bp, Homo Sapiens; identical to SEQ ID NO: 190623

SEQ ID NO: 225360 - DNA, 1391 bp, Homo Sapiens; identical to SEQ ID NO: 190624

SEQ ID NO: 225361 - DNA, 1060 bp, Homo Sapiens; identical to SEQ ID NO: 190625

SEQ ID NO: 225362 - DNA, 1082 bp, Homo Sapiens; identical to SEQ ID NO: 190626

SEQ ID NO: 225363 - DNA, 987 bp, Homo Sapiens; identical to SEQ ID NO: 190627
  misc_feature (345)..(374): n is a, c, g, or t
  misc_feature (477)..(491): n is a, c, g, or t

SEQ ID NO: 225364 - DNA, 941 bp, Homo Sapiens; identical to SEQ ID NO: 190630
  misc_feature (668)..(697): n is a, c, g, or t
  misc_feature (801)..(814): n is a, c, g, or t

SEQ ID NO: 225365 - DNA, 1108 bp, Homo Sapiens; identical to SEQ ID NO: 190631

SEQ ID NO: 225366 - DNA, 1079 bp, Homo Sapiens; identical to SEQ ID NO: 190635

SEQ ID NO: 225367 - DNA, 1097 bp, Homo Sapiens; identical to SEQ ID NO: 190637
  misc_feature (603)..(662): n is a, c, g, or t

SEQ ID NO: 225368 - DNA, 903 bp, Homo Sapiens; identical to SEQ ID NO: 190639
  misc_feature (618)..(631): n is a, c, g, or t

SEQ ID NO: 225369 - DNA, 1033 bp, Homo Sapiens; identical to SEQ ID NO: 190640

SEQ ID NO: 225370 - DNA, 1069 bp, Homo Sapiens; identical to SEQ ID NO: 190641
  misc_feature (847)..(905): n is a, c, g, or t

SEQ ID NO: 225371 - DNA, 1118 bp, Homo Sapiens; identical to SEQ ID NO: 190644
  misc_feature (1027)..(1053): n is a, c, g, or t

SEQ ID NO: 225372 - DNA, 916 bp, Homo Sapiens; identical to SEQ ID NO: 190646
  misc_feature (338)..(349): n is a, c, g, or t

SEQ ID NO: 225373 - DNA, 1179 bp, Homo Sapiens; identical to SEQ ID NO: 190647
  misc_feature (200)..(212): n is a, c, g, or t

SEQ ID NO: 225374 - DNA, 617 bp, Homo Sapiens; identical to SEQ ID NO: 190648
  misc_feature (268)..(279): n is a, c, g, or t

SEQ ID NO: 225375 - DNA, 1288 bp, Homo Sapiens; identical to SEQ ID NO: 190649
  misc_feature (104)..(116): n is a, c, g, or t
  misc_feature (1192)..(1218): n is a, c, g, or t

SEQ ID NO: 225376 - DNA, 914 bp, Homo Sapiens; identical to SEQ ID NO: 190650
  misc_feature (180)..(191): n is a, c, g, or t

SEQ ID NO: 225377 - DNA, 1375 bp, Homo Sapiens; identical to SEQ ID NO: 190651
  misc_feature (184)..(196): n is a, c, g, or t
  misc_feature (1275)..(1304): n is a, c, g, or t

SEQ ID NO: 225378 - DNA, 1439 bp, Homo Sapiens; identical to SEQ ID NO: 190653
  misc_feature (220)..(232): n is a, c, g, or t
  misc_feature (1308)..(1334): n is a, c, g, or t

SEQ ID NO: 225379 - DNA, 1510 bp, Homo Sapiens; identical to SEQ ID NO: 190655
  misc_feature (178)..(204): n is a, c, g, or t
  misc_feature (1280)..(1292): n is a, c, g, or t

SEQ ID NO: 225380 - DNA, 753 bp, Homo Sapiens; identical to SEQ ID NO: 190658
  misc_feature (70)..(82): n is a, c, g, or t

SEQ ID NO: 225381 - DNA, 819 bp, Homo Sapiens; identical to SEQ ID NO: 190659
  misc_feature (599)..(611): n is a, c, g, or t

SEQ ID NO: 225382 - DNA, 852 bp, Homo Sapiens; identical to SEQ ID NO: 190660
  misc_feature (209)..(221): n is a, c, g, or t

SEQ ID NO: 225383 - DNA, 1272 bp, Homo Sapiens; identical to SEQ ID NO: 190662
  misc_feature (1092)..(1104): n is a, c, g, or t

SEQ ID NO: 225384 - DNA, 759 bp, Homo Sapiens; identical to SEQ ID NO: 190663
  misc_feature (539)..(551): n is a, c, g, or t

SEQ ID NO: 225385 - DNA, 1321 bp, Homo Sapiens; identical to SEQ ID NO: 190664
  misc_feature (1170)..(1182): n is a, c, g, or t

SEQ ID NO: 225386 - DNA, 1371 bp, Homo Sapiens
  misc_feature (1010)..(1028): n is a, c, g, or t
ttggccatttttgctgcccggacgcggagcgagaggctgagagagtcggagacactatccgcttccatccgtcgcgcagaccctgccggagccgctgccgctatggatgatcgagaggatctggtgtaccaggcgaagctggccgagcaggctgagcgatacgacgaaatggtggagtcaatgaagaaagtagcagggatggatgtggagctgacagttgaagaaagaaacctcctatctgttgcatataagaatgtgattggagctagaagagcctcctggagaataatcagcagcattgaacagaaagaagaaaacaagggaggagaagacaagctaaaaatgattcgggaatatcggcaaatggttgagactgagctaaagttaatctgttgtgacattctggatgtactggacaaacacctcattccagcagctaacactggcgagtccaaggttttctattataaaatgaaaggggactaccacaggtatctggcagaatttgccacaggaaacgacaggaaggaggctgcggagaacagcctagtggcttataaagctgctagtgatattgcaatgacagaacttccaccaacgcatcctattcgcttaggtcttgctctcaatttttccgtattctactacgaaattcttaattcccctgaccgtgcctgcaggttggcaaaagcagcttttgatgatgcaattgcagaactggatacgctgagtgaagaaagctataaggactctacacttatcatgcagttgttacgtgataatctgacactatggacttcagacatgcagggtgacggtgaagagcagaataaagaagcgctgcaggacgtggaagacgaaaatcagtgagacataagccaacaagagaaaccatctctgaccaccccctcctccccatcccaccctttggaaactccccattgtcactgagaaccaccaaatctgacttttacatttggtctcagaatttaggttcctgccctgttggnnnnnnnnnnnnnnnnnnnaaacagttttcaaaagttcttaaaggcaagagtgaatttctgtggattttactggtcccagcttttaggttctttaagacactaacaggactacatagaggctttttcagcattactgtgtcgtctccgtgccagatgtggcaagatcaccattagcaaatggaaattacatttgagagccattagacttataggtgatgcaagcatctaagagaagaggtgaatcacactatagaggcataagtggtatcagtttacatttttctaattgtttaaactgtgttttataccagtgtttgcaagtaattgggtgtaaccttgagatggttaaaggtgtttgggg

SEQ ID NO: 225387 - DNA, 663 bp, Homo Sapiens; identical to SEQ ID NO: 190665
  misc_feature (473)..(513): n is a, c, g, or t

SEQ ID NO: 225388 - DNA, 619 bp, Homo Sapiens; identical to SEQ ID NO: 190666
  misc_feature (412)..(456): n is a, c, g, or t

SEQ ID NO: 225389 - DNA, 697 bp, Homo Sapiens; identical to SEQ ID NO: 190667
  misc_feature (135)..(153): n is a, c, g, or t

SEQ ID NO: 225390 - DNA, 237 bp, Homo Sapiens; identical to SEQ ID NO: 190668

SEQ ID NO: 225391 - DNA, 1375 bp, Homo Sapiens
ttggtgtcaccttgggcgcgagcggggccgcgcgcgcacgggacccggagccgagggccattgagtggcgatggcggcgacggcgagtgccggggccggcgggatagacgggaagccccgtacctcccctaagtccgtcaagttcctgtttgggggcctggccgggatgggagctacagtttttgtccagcccctggacctggtgaagaaccggatgcagttgagcggggaaggggccaagactcgagagtacaaaaccagcttccatgccctcaccagtatcctgaaggcagaaggcctgaggggcatttacactgggctgtcggctggcctgctgcgtcaggccacctacaccactacccgccttggcatctataccgtgctgtttgagcgcctgactggggctgatggtactccccctggctttctgctgaaggctgtgattggcatgaccgcaggtgccactggtgcctttgtgggaacaccagccgaagtggctcttatccgcatgactgccgatggccggcttccagctgaccagcgccgtggctacaaaaatgtgtttaacgccctgattcgaatcacccgggaagagggtgtcctcacactgtggcggggctgcatccctaccatggctcgggccgtcgtcgtcaatgctgcccagctcgcctcctactcccaatccaagcagttcttactggactcaggctacttctctgacaacatcttgtgccacttctgtgccagcatgatcagcggtcttgtcaccactgctgcctccatgcctgtggacattgccaagacccgaatccagaacatgcggatgattgatgggaagccggaatacaagaacgggctggacgtgctgttcaaagttgtccgctacgagggcttcttcagcctgtggaagggcttcacgccgtactatgcccgcctgggcccccacaccgtcctcaccttcatcttcttggagcagatgaacaaggcctacaagcgtctcttcctcagtggctgaagcggccgggggctcccattctcctgctgcgcctatagccactgcgccctgggggcctgggctctgctgccctggacccctctatttatttcccttccacagtgtggtttcttcctctgcggtaaaggacttggtctgttctaccccctgctccagcttgccctgctcgtcctgatcctgtgatttctctgtccttggctattcttgcagggagctggaaaacttcctgaggatttctggcctccccctgggttttagtttcagggcacacaggacagcaaaagatcccctttgtcaatggggaaaccaaggcagagctgaggggacagggaggagcagaagccatctatatggtcaaag

SEQ ID NO: 225392 - DNA, 1041 bp, Homo Sapiens; identical to SEQ ID NO: 190669

SEQ ID NO: 225393 - DNA, 1023 bp, Homo Sapiens; identical to SEQ ID NO: 190670

SEQ ID NO: 225394 - DNA, 965 bp, Homo Sapiens; identical to SEQ ID NO: 190671

SEQ ID NO: 225395 - DNA, 1094 bp, Homo Sapiens; identical to SEQ ID NO: 190672

SEQ ID NO: 225396 - DNA, 868 bp, Homo Sapiens; identical to SEQ ID NO: 190673

SEQ ID NO: 225397 - DNA, 852 bp, Homo Sapiens; identical to SEQ ID NO: 190674

SEQ ID NO: 225398 - DNA, 1030 bp, Homo Sapiens
  misc_feature (976)..(985): n is a, c, g, or t
ctttgtacaaaaaagttggagaaactccacgaagaggaaatccaggagctgcaggctcagattcaggaacagcatgtccaaatcgatgtggatgtttccaagcctgacctcacggctgccctgcgtgacgtacgtcagcaatatgaaagtgtggctgccaagaacctgcaggaggcagaagaatggtacaaatccaagtttgctgacctctctgaggctgccaaccggaacaatgacgccctgcgccaggcaaagcaggagtccactgagtaccggagacaggtgcagtccctcacctgtgaagtggatgcccttaaaggaaccaatgagtccctggaacgccagatgcgtgaaatggaagagaactttgccgttgaagctgctaactaccaagacactattggccgcctgcaggatgagattcagaatatgaaggaggaaatggctcgtcaccttcgtgaataccaagacctgctcaatgttaagatggcccttgacattgagattgccacctacaggaagctgctggaaggcgaggagagcaggatttctctgcctcttccaaacttttcctccctgaacctgagggaaactaatctggattcactccctctggttgatacccactcaaaaaggacacttctgattaagacggttgaaactagagatggacaggttatcaacgaaacttctcagcatcacgatgaccttgaataaaaattgcacacactcagtgcagcaatatattaccagcaagaataaaaaagaaatccatatcttaaagaaacagctttcaagtgcctttctgcagtttttcaggagcgcaagatagatttggaataggaataagctctagttcttaacaaccgacactcctacaagatttagaaaaaagtttacaacataatctagtttacagaaaaatcttgtgctagaatactttttaaaaggtattttgaataccattaaaactgcnnnnnnnnnnccagcaagtatccaaccaacttggttctgcttcaataaatctttg

SEQ ID NO: 225399 - DNA, 268 bp, Homo Sapiens; identical to SEQ ID NO: 190677
  misc_feature (206)..(215): n is a, c, g, or t

SEQ ID NO: 225400 - DNA, 503 bp, Homo Sapiens; identical to SEQ ID NO: 190678
  misc_feature (449)..(458): n is a, c, g, or t

SEQ ID NO: 225401 - DNA, 1098 bp, Homo Sapiens; identical to SEQ ID NO: 190679
  misc_feature (1035)..(1044): n is a, c, g, or t

SEQ ID NO: 225402 - DNA, 1271 bp, Homo Sapiens
ttggctcgggtgatccggccgagtggccctgggttagcagctgctgcatttccccggctggctgcggtcactggtggcagtgctcaggcgcccgccgcccttgaccttcggccccgcgagctctaaccctacagcgcaggaagatcggccgccgcggccaggctctgatgctggtgtctggtagaagaaggttactcacagttctgctgcaggctcagaagtggccctttcaaccctccagagacatgagactagtgcagttccgggcaccccacctggtggggcctcacttgggcctggagacagggaatggtggaggggttatcaacctcaatgcctttgaccccacactcccgaagacgatgacgcagttcctagagcagggagaggccaccctctcagtggcaagaagagccctggctgcccagttgccagtcctaccacggtcggaggtaaccttcctggctccagtcacacgaccagataaggtggtgtgtgtgggcatgaattatgtggaccactgcaaagaacagaacgtgcccgtgcccaaggagcccatcatcttcagcaagtttgccagctccatcgtggggccctatgatgaggtggtcctcccaccacagagccaggaggtagattgggaagtggagctggccgtggtcattggaaagaaaggcaagcacatcaaggccacagatgctatggcccacgtggccggcttcactgtggctcatgacgtgagtgctcgtgactggcaaatgagacgtaatgggaaacaatggctgctgggaaaaaccttcgacaccttctgccctctgggccctgccttggtgaccaaggacagtgtagcagatccacacaacttaaagatctgctgccgagtgaatggggaagtggtccagagcggcaacaccaaccagatggtattcaagacagaggacctgatagcctgggtctcccagtttgttaccttttacccaggggatgtcatcctaactgggacccccccaggtgtcggtgtattcaggaaacctcctgtctttctcaagaagggggatgaagtccagtgtgagattgaagaactaggtgtcatcatcaacaaggtggtgtgatggctcctgcacaggccctgcacataggatgagggcatctgctcccactcagcctagcccagggaaaggcccagtgacaggtgtggacaggtgccagccctgcaagccgcctcttctcggtagaagggagaaggacagagctctctttcaataaatttc

SEQ ID NO: 225403 - DNA, 915 bp, Homo Sapiens
ttggcttcggggctgcgagcgcggagggcgacgacgacgaagcgcagacagcgtcatggcagagcaggtggccctgagccggacccaggtgtgcgggatcctgcgggaagagcttttccagggcgatgccttccatcagtcggatacacacatattcatcatcatgggtgcatcgggtgacctggccaagaagaagatctaccccaccatctggtggctgttccgggatggccttctgcccgaaaacaccttcatcgtgggctatgcccgttcccgcctcacagtggctgacatccgcaaacagagtgagcccttcttcaaggccaccccagaggagaagctcaagctggaggacttctttgcccgcaactcctatgtggctggccagtacgatgatgcagcctcctaccagcgcctcaacagccacatgaatgccctccacctggggtcacaggccaaccgcctcttctacctggccttgcccccgaccgtctacgaggccgtcaccaagaacattcacgagtcctgcatgagccagataggctggaaccgcatcatcgtggagaagcccttcgggagggacctgcagagctctgaccggctgtccaaccacatctcctccctgttccgtgaggaccagatctaccgcatcgaccactacctgggcaaggagatggtgcagaacctcatggtgctgagatttgccaacaggatcttcggccccatctggaaccgggacaacatcgcctgcgttatcctcaccttcaaggagccctttggcactgagggtcgcgggggctatttcgatgaatttgggatcatccgggacgtgatgcagaaccacctactgcagatgctgtgtctggtggccatggagaagcccgcctccaccaactcagatgacgtccgtgatga

SEQ ID NO: 225404 - DNA, 1058 bp, Homo Sapiens; identical to SEQ ID NO: 190698

SEQ ID NO: 225405 - DNA, 873 bp, Homo Sapiens
  misc_feature (57)..(91): n is a, c, g, or t
tgtacaaagaagtagctaaggaactttacatcctaacagtataatccagctcagtannnnnnnnnnnnnnnnnnnnnnnnnnnnnnnnnnnacccagaaataagataactccatctcgccccttccctttcatctgaaagaagatacctccctcccagtccacctcatttagaaaaccaaagtgtgggtagaaaccccaaatgtccaaaagcccttttctggtgggtgacccagtgcatccaacagaaacagccgctgcccgaacctctgtgtgaagctttacgcgcacacggacaaaatgcccaaactggagccctcgcaaaaacacggcttgtggcattggcatacttgcccttacaggtggagtatcttcgtcacacatctaaatgagaaatcagtgacaacaagtctttgaaatggtgctatggatttaccattccttattatcactaatcatctaaacaactcactggaaatccaattaacaattttacaacataagatagaatggagacctgaataattctgtgtaatataaatggtttataactgcttttgtacctagctaggctgctattattactataatgagtaaatcataaagccttcatcactcccacatttttcttacggtcggagcatcagaacaagcgtctagactccttgggaccgtgagttcctagagcttggctgggtctaggctgttctgtgcctccaaggactgtctggcaatgacttgtattggccaccaactgtagatgtatatatggtgcccttctgatgctaagactccagaccttttgtttttgctttgcattttctgattttataccaactgtgtggactaagatgcattaaaataaacatcagagt

SEQ ID NO: 225406 - DNA, 1505 bp, Homo Sapiens; identical to SEQ ID NO: 190699

SEQ ID NO: 225407 - DNA, 892 bp, Homo Sapiens
ctttgtacaaaaaagttggctgtggaatccaatcagaagtggtggctggaattccacgcaccgatcagtactgggaaaagatctaatctgccgtgggcctgtcgtgccagtcctgggggcgagatcggggtagaaatgcattttattctttaagttcacgtaagatacaagtttcaggcagggtctgaaggactggattggccaaacatcagacctgtcttccaaggagaccaagtcctggctacatcccagcctgtggttacagtgcagacaggccatgtgagccaccgctgccagcacagagcgtccttccccctgtagactagtgccgtagggagtacctgctgccccagctgactgtggccccctccgtgatccatccatctccagggagcaagacagagacgcaggaatggaaagcggagttcctaacaggatgaaagttcccccatcagttcccccagtacctccaagcaagtagctttccacatttgtcacagaaatcagaggagagatggtgttgggagccctttggagaacgccagtctcccaggccccctgcatctatcgagtttgcaatgtcacaacctctctgatcttgtgctcagcatgattctttaatagaagttttattttttcgtgcactctgctaatcatgtgggtgagccagtggaacagcgggagacctgtgctagttttacagattgcctcctaatgacgcggctcaaaaggaaaccaagtggtcaggagttgtttctgacccactgatctctactaccacaaggaaaatagtttaggagaaaccagcttttactgtttttgaaaaattacagcttccccctgtcaagttaacaaggaatgcctgtgccaataaaaggtttctccaacttga

SEQ ID NO: 225408 - DNA, 1013 bp, Homo Sapiens; identical to SEQ ID NO: 190701

SEQ ID NO: 225409 - DNA, 1554 bp, Homo Sapiens; identical to SEQ ID NO: 190702

SEQ ID NO: 225410 - DNA, 826 bp, Homo Sapiens; identical to SEQ ID NO: 190703

SEQ ID NO: 225411 - DNA, 1038 bp, Homo Sapiens; identical to SEQ ID NO: 190705

SEQ ID NO: 225412 - DNA, 922 bp, Homo Sapiens
ttggcagaagcccccacctccctctcgcccatccgtgtgcacaccgtggtcgacaggcctcagcagcccatgacccatcgagaaactgcacctgtttcccagcctgaaaacaaaccagaaagtaagccaggcccagttggaccagaactccctcctggacacatcccaattcaagtgatccgcaaagaggtggattctaaacctgtttcccagaagcccccacctccctctgagaaggtagaggtgaaagttccccctgctccagttccttgtcctcctcccagccctggcccttctgctgtcccctcttcccccaagagtgtggctacagaagagagggcagcccccagcactgcccctgcagaagctacacctccaaaaccaggagaagccgaggctcccccaaaacatccaggagtgctgaaagtggaagccatcctggagaaggtgcaggggctggagcaggctgtagacaactttgaaggcaagaagactgacaaaaagtacctgatgatcgaagagtatttgaccaaagagctgctggccctggattcagtggaccccgagggacgagccgatgtgcgtcaggccaggagagacggtgtcaggaaggttcagaccatcttggaaaaacttgaacagaaagccattgatgtcccaggtcaagtccaggtctatgaactccagcccagcaaccttgaagcagatcagccactgcaggcaatcatggagatgggtgccgtggcagcagacaagggcaagaaaaatgctggaaatgcagaagatccccacacagaaacccagcagccagaagccacagcagcagcgacttcaaaccccagcagcatgacagacacccctggtaacccagcagcaccgtagcctctgccctgtaaaaatcagactcggaactcgatgtgtg

SEQ ID NO: 225413 - DNA, 473 bp, Homo Sapiens; identical to SEQ ID NO: 190706

SEQ ID NO: 225414 - DNA, 834 bp, Homo Sapiens; identical to SEQ ID NO: 190707
  misc_feature (45)..(53): n is a, c, g, or t

SEQ ID NO: 225415 - DNA, 913 bp, Homo Sapiens
ttggcgcttcccccgagccagcagaacatccagtcatggataaaaatgagctggttcagaaggccaaactggccgagcaggctgagcgatatgatgacatggcagcctgcatgaagtctgtaactgagcaaggagctgaattatccaatgaggagaggaatcttctctcagttgcttataaaaatgttgtaggagcccgtaggtcatcttggagggtcgtctcaagtattgaacaaaagacggaaggtgctgagaaaaaacagcagatggctcgagaatacagagagaaaattgagacggagctaagagatatctgcaatgatgtactgtctcttttggaaaagttcttgatccccaatgcttcacaagcagagagcaaagtcttctatttgaaaatgaaaggagattactaccgttacttggctgaggttgccgctggtgatgacaagaaagggattgtcgatcagtcacaacaagcataccaagaagcttttgaaatcagcaaaaaggaaatgcaaccaacacatcctatcagactgggtctggcccttaacttctctgtgttctattatgagattctgaactccccagagaaagcctgctctcttgcaaagacagcttttgatgaagccattgctgaacttgatacattaagtgaagagtcatacaaagacagcacgctaataatgcaattactgagagacaacttgacattgtggacatcggatacccaaggagacgaagctgaagcatgagaaggaggggaaaattaaccggccttccaacttttgtctgcctcattctaaaatttacacagtagaccatttgtcatcccatgctgtcccacaaatagttttttgtttacgatttatgacaggtttatgttacttctatttgaatttctatatttccc

SEQ ID NO: 225416 - DNA, 1139 bp, Homo Sapiens; identical to SEQ ID NO: 190708
  misc_feature (970)..(1003): n is a, c, g, or t

SEQ ID NO: 225417 - DNA, 1015 bp, Homo Sapiens; identical to SEQ ID NO: 190709

SEQ ID NO: 225418 - DNA, 1524 bp, Homo Sapiens; identical to SEQ ID NO: 190711

SEQ ID NO: 225419 - DNA, 1106 bp, Homo Sapiens; identical to SEQ ID NO: 190712
  misc_feature (857)..(902): n is a, c, g, or t

SEQ ID NO: 225420 - DNA, 812 bp, Homo Sapiens; identical to SEQ ID NO: 190713

SEQ ID NO: 225421 - DNA, 1062 bp, Homo Sapiens; identical to SEQ ID NO: 190715

SEQ ID NO: 225422 - DNA, 965 bp, Homo Sapiens; identical to SEQ ID NO: 190716

SEQ ID NO: 225423 - DNA, 953 bp, Homo Sapiens; identical to SEQ ID NO: 190718
  misc_feature (758)..(791): n is a, c, g, or t

SEQ ID NO: 225424 - DNA, 1044 bp, Homo Sapiens; identical to SEQ ID NO: 190719
  misc_feature (806)..(845): n is a, c, g, or t

SEQ ID NO: 225425 - DNA, 1305 bp, Homo Sapiens; identical to SEQ ID NO: 190721
  misc_feature (207)..(220): n is a, c, g, or t
  misc_feature (1107)..(1149): n is a, c, g, or t

SEQ ID NO: 225426 - DNA, 1436 bp, Homo Sapiens; identical to SEQ ID NO: 190722
  misc_feature (1221)..(1264): n is a, c, g, or t

SEQ ID NO: 225427 - DNA, 1197 bp, Homo Sapiens; identical to SEQ ID NO: 190726

SEQ ID NO: 225428 - DNA, 1356 bp, Homo Sapiens; identical to SEQ ID NO: 190728

SEQ ID NO: 225429 - DNA, 1186 bp, Homo Sapiens
ctttgtacaaaaaagttgggtgctcgctcctgctcggggcgctgcggccccgggcgtcgccatgaccagtgagctggacatcttcgtggggaacacgacccttatcgacgaggacgtgtatcgcctctggctcgatggttactcggtgaccgacgcggtggccctgcgggtgcgctcgggaatcctggagcagactggcgccacggcagcggtgctgcagagcgacaccatggaccattaccgcaccttccacatgctcgagcggctgctgcatgcgccgcccaagctactgcaccagctcatcttccagattccgccctcccggcaggcactactcatcgagaggtactatgcctttgatgaggcctttgttcgggaggtgctgggcaagaagctgtccaaaggcaccaagaaagacctggatgacatcagcaccaaaacaggcatcaccctcaagagctgccggagacagtttgacaactttaaacgggtcttcaaggtggtagaggaaatgcggggctccctggtggacaatattcagcaacacttcctcctctctgaccggttggccagggactatgcagccatcgtcttctttgctaacaaccgctttgagacagggaagaaaaaactgcagtatctgagcttcggtgactttgccttctgcgctgagctcatgatccaaaactggacccttggagccgtcgactcacagatggatgacatggacatggacttagacaaggaatttctccaggacttgaaggagctcaaggtgctagtggctgacaaggaccttctggacctgcacaagagcctggtgtgcactgctctccggggaaagctgggcgtcttctctgagatggaagccaacttcaagaacctgtcccgggggctggtgaacgtggccgccaagctgacccacaataaagatgtcagagacctgtttgtggacctcgtggagaagtttgtggaaccctgccgctccgaccactggccactcagcgacgtgcggttcttcctgaatcagtattcagcgtctgtccactccctcgatggcttccgacaccaggccctctgggaccgctacatgggcaccctccgcggctgcctcctgcgcctgtatcatgactgaggtgcctcccaacgctccgcccacgctgacaataaagttgctctgagtttg

SEQ ID NO: 225430 - DNA, 1595 bp, Homo Sapiens; identical to SEQ ID NO: 190729

SEQ ID NO: 225431 - DNA, 1255 bp, Homo Sapiens; identical to SEQ ID NO: 190730

SEQ ID NO: 225432 - DNA, 905 bp, Homo Sapiens; identical to SEQ ID NO: 190731

SEQ ID NO: 225433 - DNA, 832 bp, Homo Sapiens; identical to SEQ ID NO: 190732

SEQ ID NO: 225434 - DNA, 894 bp, Homo Sapiens
ctttgtacaaaaaagttggcttccattctggcttaaatcttgccttatcagaagacattggaaagagggattccctttggtgtttggtcttctacttagaaaaacctattgcagttagtttatcttgtagtattcatctttgtattctgaagataaggtttgaattaaattgatacacacagaggggaaccgattttttttatccaatgtgaattataaatgagataatccacagttattcattgtggagttgttgagactatgaaagactcattgtctttgtattcagctcttaaatagtgtaactatatccccacctctgcttgctttctttccctcccctccaatgataaagaaaatgataaattttctgttgtgcattcaattcttattttaaataagactaagtataggcattgtacctgacattgctacgtttctaccagtgtttcaatttaaagtgctagtgtttaaaaacattttcaagggataaggccttctgtactttgcttatttgaagaatcagtggtaggagcagtgaagtaaattctatggagtacatttctaaaataccacatttctgaaatcataaataagtttattcaggttctaaccctttgctgtacacaagcagacagaaatgcatctgttacataaatgagaaaaagctattatgctgatggagcatgctttttaaatcctttaaaaacactcaccatataaacttgcatttgagcttgtgtgttcttttgttaatgtgtagagttctcctttctcgaaattgccagtgtgtacttggcttaactcaagaacagtttcttctggattccttatttgatttatttaacctaattatattctaatattgcaaatattaccataagtgggtaaaag

SEQ ID NO: 225435 - DNA, 1167 bp, Homo Sapiens; identical to SEQ ID NO: 190734

SEQ ID NO: 225436 - DNA, 1240 bp, Homo Sapiens; identical to SEQ ID NO: 190736

SEQ ID NO: 225437 - DNA, 205 bp, Homo Sapiens; identical to SEQ ID NO: 190739

SEQ ID NO: 225438 - DNA, 1287 bp, Homo Sapiens; identical to SEQ ID NO: 190741

SEQ ID NO: 225439 - DNA, 1281 bp, Homo Sapiens
gggtgagttcattttaccaggtgctgtagtttcccctcatcaggcaggaagaagatggcggtggcattgcccaggtatttcatcagcagcacccagctggacagcttcttacagtgctggatgttaaacatgcctaaacgcttcatcataggcactttcacggtggtcacctggtccacgtggaagtcctcttcctcggtgtccttgacttcaaagggtctctcccatttgcctttaaagaagatgtaattcaccagagcaaaaactgtgtctctgtcaagctccttgaccaaatccacaattttcccttgagtacccttctccacgtaatcgttgatctgtttcttggcctcttcggtgtccccgaagttgacagtgaaggcttctgagtggtacaactttttaacatcctccaaaaacttatccactagcttcaggccctcgctgaggaacaggccattgccggtggtcagctggagctggctgtctggctggttgagggtacggaggagttcctggaagccttcatggatctgagcctccggaatctccgtgaggttgaaattcaggccctccaggatttcatcgtgagtgtcagccttggtccccagggagagcattgcaaaggctgtagcgatgctcactggggagaagaagatattggtgctgttggactggtgtgccagctggcggtataggctgaaggcgaactcagccaggttgggggtgatcttgttgaaggttgggtgatcctgatcatggtgggatgtatctgtcttctgggcagcatctccctggggatcctcagccagggagacagggaccaggcagcacaggcctgccagcaggaggatgccccacgagacagaagacggcattgtcgattcactgtcccaggtcagtggtggtgcctgaagctgaggagacagggccctgtcctcgtccgtatttaagcagtggatccagaggggcaacgggggaggctgctggtgaatattaaccaaggtcaccccagttatcggaggagcaaacaggggctaagtccactggctgggatctgagtcgcccgcctacgctgcccggacgctttgcctgggcagtgtacagcttccactgcacttaccgaaaggagtcattgtacctggctcagaaaccacagcgtcctgtgtccaaggtggagggggtggcgtgagtcagacagtctctgggagagtaccacttagctggccctctgctctcactgcagaatccttagtggctgttccactggtagcaagccaa

SEQ ID NO: 225440 - DNA, 1356 bp, Homo Sapiens; identical to SEQ ID NO: 190742

SEQ ID NO: 225441 - DNA, 926 bp, Homo Sapiens; identical to SEQ ID NO: 190743

SEQ ID NO: 225442 - DNA, 739 bp, Homo Sapiens; identical to SEQ ID NO: 190744

SEQ ID NO: 225443 - DNA, 1425 bp, Homo Sapiens; identical to SEQ ID NO: 190745
  misc_feature (1188)..(1247): n is a, c, g, or t

SEQ ID NO: 225444 - DNA, 936 bp, Homo Sapiens; identical to SEQ ID NO: 190746
  misc_feature (567)..(626): n is a, c, g, or t

SEQ ID NO: 225445 - DNA, 1386 bp, Homo Sapiens; identical to SEQ ID NO: 190747
  misc_feature (191)..(206): n is a, c, g, or t
  misc_feature (246)..(263): n is a, c, g, or t

SEQ ID NO: 225446 - DNA, 1179 bp, Homo Sapiens; identical to SEQ ID NO: 190748
  misc_feature (616)..(624): n is a, c, g, or t
  misc_feature (822)..(845): n is a, c, g, or t
  misc_feature (971)..(980): n is a, c, g, or t

SEQ ID NO: 225447 - DNA, 914 bp, Homo Sapiens; identical to SEQ ID NO: 190750

SEQ ID NO: 225448 - DNA, 1266 bp, Homo Sapiens; identical to SEQ ID NO: 190751
  misc_feature (440)..(500): n is a, c, g, or t

SEQ ID NO: 225449 - DNA, 1314 bp, Homo Sapiens
ttggcattacctctgcaccgacgtggcccccccgttgatcgtccacaacatacagaatggctgtcatggtccaatctgtacagaatacgccatcaataaattgcggcaagaaggaagcgaggaggggatgtacgtgctgaggtggagctgcaccgactttgacaacatcctcatgaccgtcacctgctttgagaagtctgagcaggtgcagggtgcccagaagcagttcaagaactttcagatcgaggtgcagaagggccgctacagtctgcacggttcggaccgcagcttccccagcttgggagacctcatgagccacctcaagaagcagatcctgcgcacggataacatcagcttcatgctaaaacgctgctgccagcccaagccccgagaaatctccaacctgctggtggctggctaagaaagcccaggagtggcagcccgtctaccccatgagccagctgagtttcgatcggatcctcaagaaggatctggtgcagggcgagcaccttgggagaggcacgagaacacacatctattctgggaccctgatggattacaaggatgacgaaggaacttctgaagagaagaagataaaagtgatcctcaaagtcttagaccccagccacagggatatttccctggccttcttcgaggcagccagcatgatgagacaggtctcccacaaacacatcgtgtacctctatggcgtctgtgtccgcgacgtggagaatatcatggtggaagagtttgtggaagggggtcctctggatctcttcatgcaccggaaaagcgatgtccttaccacaccatggaaattcaaagttgccaaacagctggccagtgccctgagctacttggaggataaagacctggtccatggaaatgtgtgtactaaaaacctcctcctggcccgtgagggcatcgacagtgagtgtggcccgttcatcaagctcagtgaccccggcatccccattacggtgctgtctaggcaagaatgcattgaacgaatcccatggattgctcctgagtgtgttgaggactccaagaacctgagtgtggctgctgacaagtggagctttggaaccacgctctgggaaatctgctacaatggcgagatccccttgaaagacaagacgctgattgagaaagagagattctatgaaagccggtgcacgccagtgacaccatcatgtaagagctggctgacctcatgacccgctgcatgaactatgaccccaatcagaggcctttcttccgagccatcatgagagacattaataagcttgaagagcagaatccagatattgtttc

SEQ ID NO: 225450 - DNA, 1095 bp, Homo Sapiens
  misc_feature (104)..(116): n is a, c, g, or t
acctttaaagagaaatgtaaaactcagtttaatttcaagtttgtatagagaatgtatgccacagtttgtattttataaacacaacctatcttattataaatacnnnnnnnnnnnnngtgatacgttagctgttatgaagggtgaaaacattatataaacttcaaaaggctgctttctgcatctgcatctatgtaatttcatggttctctaccaatttcatttacagaaataatctctatagtcaaattattgttcactttcatgccccaacatgggaagtggtaggtgaatatctgtaggaatacaatttattgtctgctcctccactcagaagtagccctgtgtctgtccagtctacactcagaactttgtcttcatgagcagccagatcatagagaggagccttacaacttcttgtatcccacagcttaacaatgttatctaaagatcctgaaatcagctgctgttcatgggtaggagaccattttactgatgtcacccaaccagtatgtgacgttagggacagcgacaccaaagaaccatctttagttcggggatcccacagtctgatatgcctatctgtgcttccagatgctaaacgtttacaaagtggagaataggaaatacaattaaacactttatttcctgtcaaagttgacttaagactgccagactcaacatcccacactctaattgtatggtcccaagatgcactgcagatttcttcagcatctgaccacagaactgaggaaactgcctccatgtggccagagagggtcactatgggagtccttgttagtcccaactgttctgtcttctgtttctttcttggtcgatttgtggactcctccatttcatcttcttcatctgtagggactgtagaccagatctttagcatcttatcccaggagccactgcaaaatttagttcctgagccatcaacagctatagaatctacacttccagcatgacctctacagcagtgtagggctttcactttgtttctctctacattccactcccataagagaatagtctgatccatagaagcactcaataataagcaggacaaactatcttttttcacccagccaa

SEQ ID NO: 225451 - DNA, 1556 bp, Homo Sapiens
tttgtacaaaaagttgggcttctccgctccttctaggatctccgcctggttcggcccgcctgcctccactcctgcctctaccatgtccatcagggtgacccagaagtcctacaaggtgtccacctctggcccccgggccttcagcagccgctcctacacgagtgggcccggttcccgcatcagctcctcgagcttctcccgagtgggcagcagcaactttcgcggtggcctgggcggcggctatggtggggccagcggcatgggaggcatcaccgcagttacggtcaaccagagcctgctgagcccccttgtcctggaggtggaccccaacatccaggccgtgcgcacccaggagaaggagcagatcaagaccctcaacaacaagtttgcctccttcatagacaaggtacggttcctggagcagcagaacaagatgctggagaccaagtggagcctcctgcagcagcagaagacggctcgaagcaacatggacaacatgttcgagagctacatcaacaaccttaggcggcagctggagactctgggccaggagaagctgaagctggaggcggagcttggcaacatgcaggggctggtggaggacttcaagaacaagtatgaggatgagatcaataagcgtacagagatggagaacgaatttgtcctcatcaagaaggatgtggatgaagcttacatgaacaaggtagagctggagtctcgcctggaagggctgaccgacgagatcaacttcctcaggcagctatatgaagaggagatccgggagctgcagtcccagatctcggacacatctgtggtgctgtccatggacaacagccgctccctggacatggacagcatcattgctgaggtcaaggcacagtacgaggatattgccaaccgcagccgggctgaggctgagagcatgtaccagatcaagtatgaggagctgcagagcctggctgggaagcacggggatgacctgcggcgcacaaagactgagatctctgagatgaaccggaacatcagccggctccaggctgagattgagggcctcaaaggccagagggcttccctggaggccgccattgcagatgccgagcagcgtggagagctggccattaaggatgccaacgccaagttgtccgagctggaggccgccctgcagcgggccaagcaggacatggcgcggcagctgcgtgagtaccaggagctgatgaacgtcaagctggccctggacatcgagatcgccacctacaggaagctgctggagggcgaggagagccggctggagtctgggatgcagaacatgagtattcatacgaagaccaccagcggctatgcaggtggtctgagctcggcctatgggggcctcacaagccccggcctcagctacagcctgggctccagctttggctctggcgcgggctccagctccttcagccgcaccagctcctccagggccgtggttgtgaagaagatcgagacacgtgatgggaagctggtgtctgagtcctctgacgtcctgcccaagtgaacagctgcggcagcccctccca

SEQ ID NO: 225452 - DNA, 895 bp, Homo Sapiens
ttggctcctccagcctctcacactctcctcagctctctcatctcctggaaccatggccagcacatccaccaccatcaggagccacagcagcagccgccggggtttcagtgccaactcagccaggctccctggggtcagccgctctggcttcagcagcgtctccgtgtcccgctccaggggcagtggtggcctgggtggtgcatgtggaggagctggctttggcagccgcagtctgtatggcctggggggctccaagaggatctccattggagggggcagctgtgccatcagtggcggctatggcagcagagccggaggcagctatggctttggtggcgccgggagtggatttggtttcggtggtggagccggcattggctttggtctgggtggtggagccggccttgctggtggctttgggggccctggcttccctgtgtgcccccctggaggcatccaagaggtcaccgtcaaccagagtctcctgactcccctcaacctgcaaatcgatcccaccatccagcgggtgcgggccgaggagcgtgaacagatcaagaccctcaacaacaagtttgcctccttcatcgacaaggtgcggttcctggagcagcagaacaaggttctggaaacaaagtggaccctgctgcaggagcagggcaccaagactgtgaggcagaacctggagccgttgttcgagcagtacatcaacaacctcaggaggcagctggacagcattgtcggggaacggggccgcctggactcagagctcagaggcatgcaggacctggtggaggacttcaagaacaaatatgaggatgaaatcaacaagcgcacagcagcagagaatgaatttgtgactctgaaaaagatgtggatgctgcctacatgaacaagg

SEQ ID NO: 225453 - DNA, 902 bp, Homo Sapiens; identical to SEQ ID NO: 190753

SEQ ID NO: 225454 - DNA, 558 bp, Homo Sapiens; identical to SEQ ID NO: 190756

SEQ ID NO: 225455 - DNA, 542 bp, Homo Sapiens; identical to SEQ ID NO: 190757

SEQ ID NO: 225456 - DNA, 685 bp, Homo Sapiens; identical to SEQ ID NO: 190758

SEQ ID NO: 225457 - DNA, 677 bp, Homo Sapiens; identical to SEQ ID NO: 190759

SEQ ID NO: 225458 - DNA, 1010 bp, Homo Sapiens; identical to SEQ ID NO: 190760

SEQ ID NO: 225459 - DNA, 1133 bp, Homo Sapiens; identical to SEQ ID NO: 190761

SEQ ID NO: 225460 - DNA, 936 bp, Homo Sapiens; identical to SEQ ID NO: 190762

SEQ ID NO: 225461 - DNA, 893 bp, Homo Sapiens
  misc_feature (815)..(823): n is a, c, g, or t
ccactttgtacaaaaaagttggggaagatatagccccttatgtatatagctttttttctttcttgagaattcatcttgagttatcttttatttagataaaaataaagaggcaaggatctactgtcatttgtatgcaatttcctgttaccttgaaaaaataaaaatgttaacaggaatgcagtgtgctcattctccctaaatagtaaatcccactgtatacaaaactgttctcttgttctgccttttaaaatgttcatgtagaaaattaatgaactataggaatagctctaggagaacaaatgtgctttctgtaaaaaggcagaccagggatgtaatgtttttaatgtttcagaagcctaactttttacacagtggttacatttcacatttcactaatgttgatatttggctgatggttgagcagtttctgaaatacacatttagtgtatggaaatacaagacagctaaagggctgtttggttagcatctcatcttgcattctgatcaattggcaagaaagggagatttcaaaattatatttcttgatggtatcttttcaattaatgtatctgtaaaagtttctttgtaaatactatgtgttctggtgtgtcttaaaattccaaacaaaatgatccctgcatttcctgaagatgtttaaacgtgagagtctggtaggcaaagcagtctgagaaagaaataggaaatgcagaaataggttttgtctggttgcatataatctttggctctttttaagctctgtgagctttgaaatatatttttgggttatttcagtgtgtttgccaagacagcttgannnnnnnnncaaacaaatgactttcatattgcaacaatttttgtaagacccactcaaataaaagttttttaaaaaggcc

SEQ ID NO: 225462 - DNA, 737 bp, Homo Sapiens; identical to SEQ ID NO: 190767

SEQ ID NO: 225463 - DNA, 354 bp, Homo Sapiens; identical to SEQ ID NO: 190771

SEQ ID NO: 225464 - DNA, 345 bp, Homo Sapiens; identical to SEQ ID NO: 190780

SEQ ID NO: 225465 - DNA, 1335 bp, Homo Sapiens; identical to SEQ ID NO: 190781

SEQ ID NO: 225466 - DNA, 1353 bp, Homo Sapiens; identical to SEQ ID NO: 190782

SEQ ID NO: 225467 - DNA, 683 bp, Homo Sapiens; identical to SEQ ID NO: 190786

SEQ ID NO: 225468 - DNA, 1265 bp, Homo Sapiens; identical to SEQ ID NO: 190787
  misc_feature (163)..(215): n is a, c, g, or t

SEQ ID NO: 225469 - DNA, 1493 bp, Homo Sapiens
ttgggccaggaggagcgcgcgggcacagggtgccgctgaccgaggcgtgcaaagactccagaattggaggcatgatgaagactctgctgctgtttgtggggctgctgctgacctgggagagtgggcaggtcctgggggaccagacggtctcagacaatgagctccaggaaatgtccaatcagggaagtaagtacgtcaataaggaaattcaaaatgctgtcaacggggtgaaacagataaagactctcatagaaaaaacaaacgaagagcgcaagacactgctcagcaacctagaagaagccaagaagaagaaagaggatgccctaaatgagaccagggaatcagagacaaagctgaaggagctcccaggagtgtgcaatgagaccatgatggccctctgggaagagtgtaagccctgcctgaaacagacctgcatgaagttctacgcacgcgtctgcagaagtggctcaggcctggttggccgccagcttgaggagttcctgaaccagagctcgcccttctacttctggatgaatggtgaccgcatcgactccctgctggagaacgaccggcagcagacgcacatgctggatgtcatgcaggaccacttcagccgcgcgtccagcatcatagacgagctcttccaggacaggttcttcacccgggagccccaggatacctaccactacctgcccttcagcctgccccaccggaggcctcacttcttctttcccaagtcccgcatcgtccgcagcttgatgcccttctctccgtacgagcccctgaacttccacgccatgttccagcccttccttgagatgatacacgaggctcagcaggccatggacatccacttccatagcccggccttccagcacccgccaacagaattcatacgagaaggcgacgatgaccggactgtgtgccgggagatccgccacaactccacgggctgcctgcggatgaaggaccagtgtgacaagtgccgggagatcttgtctgtggactgttccaccaacaacccctcccaggctaagctgcggcgggagctcgacgaatccctccaggtcgctgagaggttgaccaggaaatacaacgagctgctaaagtcctaccagtggaagatgctcaacacctcctccttgctggagcagctgaacgagcagtttaactgggtgtcccggctggcaaacctcacgcaaggcgaagaccagtactatctgcgggtcaccacggtggcttcccacacttctgactcggacgttccttccggtgtcactgaggtggtcgtgaagctctttgactctgatcccatcactgtgacggtccctgtagaagtctccaggaagaaccctaaatttatggagaccgtggcggagaaagcgctgcaggaataccgcaaaaagcaccgggaggagtgagatgtggatgttgcttttgcacctacgggggcatctgagtccagctccccccaagatgagctgcagcccccc

SEQ ID NO: 225470 - DNA, 847 bp, Homo Sapiens; identical to SEQ ID NO: 190788

SEQ ID NO: 225471 - DNA, 892 bp, Homo Sapiens
ttggctgagggtctaggtggactgtctgagatctgaagacagcatgtacacagccattccccagagtggctctccattcccaggctcagtgcaggatccaggcctgcatgtgtggcgggtggagaagctgaagccggtgcctgtggcgcaagagaaccagggcatcttcttctcgggggactcctacctagtgctgcacaatggcccagaagaggtttcccatctgcacctgtggataggccagcagtcatcccgggatgagcagggggcctgtgccgtgctggctgtgcacctcaacacgctgctgggagagcggcctgtgcagcaccgcgaggtgcagggcaatgagtctgacctcttcatgagctacttcccacggggcctcaagtaccaggaaggtggtgtggagtcagcatttcacaagacctccacaggagccccagctgccatcaagaaactctaccaggtgaaggggaagaagaacatccgtgccaccgagcgggcactgaactgggacagcttcaacactggggactgcttcatcctggacctgggccagaacatcttcgcctggtgtggtggaaagtccaacatcctggaacgcaacaaggcgagggacctggccctggccatccgggacagtgagcgacagggcaaggcccaggtggagattgtcactgatggggaggagcctgctgagatgatccaagtcctgggccccaagcctgctctgaaggagggcaaccctgaggaagacctcacagctgacaaggcaaatgcccaggccgcagctctgtataaagtctctgatgccactggacagatgaacctgaccaagtggctgactccagcccctttgcccttgaactgctgatatctgatgactgctttg

SEQ ID NO: 225472 - DNA, 906 bp, Homo Sapiens; identical to SEQ ID NO: 190789

SEQ ID NO: 225473 - DNA, 832 bp, Homo Sapiens; identical to SEQ ID NO: 190799

SEQ ID NO: 225474 - DNA, 781 bp, Homo Sapiens
  misc_feature (248)..(259): n is a, c, g, or t
ttggcacatcttgaaaaataaaacgataatagaactagtgactaattttcccttacagttcctgcttggtcccacccactgaagtagctcatcgtagtgcgggccgtattagaagcagtggggtacgttagactcagatggaaaagtattctaggtgccagtgttaggatgtcagttttacaaaataatgaagcaattagctatgtgattgagagttattgtttggggatgtgtgttgtggttttgcnnnnnnnnnnnnagactgtattaataaacatacaacacaagctggccttgtgttgctggttcctattcagtatttcctggggattgtttgctttttaagtaaaacacttctgacccatagctcagtatgtctgaattccagaggtcacatcagcatctttctgctttgaaaactctcacagctgtggctgcttcacttagatgcagtgagacacatagttggtgttccgattttcacatccttccatgtatttatcttgaagagataagcacagaagagaaggtgctcactaacagaggtacattactgcaatgttctcttaacagttaaacaagctgtttacagtttaaactgctgaatattatttgagctatttaaagcttattatattttagtatgaactaaatgaaggttaaaacctgcttaagaaaaatgcactgatttctgcattatgtgtacagtattggacaaaggattttattcattttgttgcattattttgaatattgtcttttcattttaataaagttataa

SEQ ID NO: 225475 - DNA, 459 bp, Homo Sapiens
  misc_feature (308)..(321): n is a, c, g, or t
ttggtgttatttgatttatttaaaggctaaaatttgtttttttattctttgcacaattgtttcattgtttgacacttaatgcactcgtcatttgcatacgacagtagcattctgaccacacttgtacgctgtaacctcatctacttctgatgtttttaaaaaatgacttttaacaaggagagggaaaagaaacccactaaattttgctttgtttccttgaagaatgtggcaacactgttttgtgattttatttgtgcaggtcatgcacacagttttgataaagggcagtaacaagtattggggcctannnnnnnnnnnnnnccacaaggcattctctaaagctatgtgaaattttctctgcacctctgtacagaaaatacacctgcccctgtatatccttttttcccctcccctccctcccaggggtacttctactaaattgttgtcttgttttttatt

SEQ ID NO: 225476 - DNA, 778 bp, Homo Sapiens; identical to SEQ ID NO: 190810

SEQ ID NO: 225477 - DNA, 890 bp, Homo Sapiens; identical to SEQ ID NO: 190811

SEQ ID NO: 225478 - DNA, 952 bp, Homo Sapiens; identical to SEQ ID NO: 190812

SEQ ID NO: 225479 - DNA, 979 bp, Homo Sapiens; identical to SEQ ID NO: 190813

SEQ ID NO: 225480 - DNA, 1033 bp, Homo Sapiens; identical to SEQ ID NO: 190814

SEQ ID NO: 225481 - DNA, 960 bp, Homo Sapiens
ctttaggccatcatgaaatttcacagtgatttctggggtgggagcagaaggaaggctgtgttaagaatcatcggggctgtggcccagtcagcccgcggaggtgcaggcagggtgggccctcactggggcagctggaggagcacggactgccccgctggcaggtaggtgatgttccgagagcgtgagagctggtacgcgatgtcctctgcagcttccagcttgcgcagctcgatcaggccatcccctgcagtggccagtgagttggcaatcagctcagctgccttggagtcgccctcagcagagatgatggccgcctttttctgttgctcagccttttccaccacaaatctggccctctctgcttcctgctgagccacctgtttggcttccaccgcttctgtgaactccttcccgaaggtcagatgtgtcaaggacacgtcgctcacctgcctggagaccagctctctctgggtgattagttctccagcatcaaagcgagccaccactgacttgaggatctcagttgtgatggacggcagcacacgctcatcatagtcctctccgatgctggtgaagatgcgaggaagctggctggcgacaggccggaagaggatgcgcagtgtgatgttgacattctgtaaatctttgctaccagtgatgactggcacattacgtggtcgagaacggcagtcaaagataattggtttctgtacccacgggatgagaaaatgagtcccttcccctaccacaatgtcctgcactccacggaatcggtcaaagatgacagctctgtgcccagcatccacattatataaggcagagttcaccacgcctcctgcaacagctaaggccaggccaaacttgccaatggactcaaacactttggcagccatgtttccttctgctggaccctctcacacctgcttccactctgacctccccaacttttttgtacaaagt

SEQ ID NO: 225482 - DNA, 1009 bp, Homo Sapiens; identical to SEQ ID NO: 190815

SEQ ID NO: 225483 - DNA, 990 bp, Homo Sapiens
ttgtacaaaaaagttgggtgtggagtcatgggtaacacggggcttccttcagtccgctggtcccgagcacgagctgtgaggggattcacttgtgtgcggaactcctcggaaccatggcgtccctttcccttgcacctgttaacatctttaaggcaggagctgatgaagagagagcagagacagctcgtctgacttcttttattggtgccatcgccattggagacttggtaaagagcaccttgggacccaaaggcatggacaaaattcttctaagcagtggacgagatgcctctcttatggtaaccaatgatggtgccactattctaaaaaacattggtgttgacaatccagcagctaaagttttagttgatatgtcaagggttcaagatgatgaagttggtgatggcactacctctgttaccgttttagcagcagaattattaagggaagcagaatctttaattgcaaaaaagattcatccacagaccatcatagcgggttggagagaagccacgaaggctgcaagagaggcgctgttgagttctgcagttgatcatggttccgatgaagttaaattccgtcaagatttaatgaatattgcgggcacaacattatcctcaaaacttcttactcatcacaaagaccactttacaaagttagctgtagaagcagttctcagactgaaaggctctggcaacctggaggcaattcatattatcaagaagctaggaggaagtttggcagattcctatttagatgaaggcttcctgttggataaaaaaattggagtaaatcaacccaaaacgaattgaaaatgctaaaattcttattgcaaatactgggtatgggatacagacaaaataaagatatttggttccccgggtaagagttgactctacagccaagggttgcagaaatagaacatgccggaaaaggaaaaaatgaaggagaaagttgaccgtattcttaagcatggcaataaattgcttt

SEQ ID NO: 225484 - DNA, 1489 bp, Homo Sapiens
tcagcgccccccgggcatcgcagaatctgtgccagctgtcctgcagcccctcatagtacagctgcgctcgtccagctggttgagcagctccagcagctgcgggtgcatgccgttgatggactggaagagtgagagcacggccgagtcattggtgatgctgcggccccgcatgtggttactcttcatgcggttcacgaaggtggtgacggcgttctgcagcgccttcaggaactgctcgtggctctcctcagactcgccattgtggaactgtggctcactaaaggggccaccagagggaggaatgggctgagagtctgtctccgggagggggttctccaccacgttggtgggggctgcgtgcccttccccaggctgtgcagccggctccgtcaggggcacgggcgcagatggcgtggggctcttgcgagcctcctcctgcttcttctcccagtagttccggttgagataccgtgcgagctcagggtcgatgtcctcagccagaggcgccgacgagttcacaggtgaagagtacaggctgctggcggggggcgctgaggaggccgagggcatgggctccgccttggggtacgaagtgtacgtggacttctgtctcagcctctccttctcctccgcctctgactgtgacagcgccagggccagctgcagctcctcctcctcctgcagggccgtctcgtccctcttggggggcagctgggactgctgagacagggggctggtcaggtactcggggggcagctcagtggtggaagtggcctttccctccgctttcctgttcagctgctcgtagcagggctcacacacgcgcacctccttctcgatgccaaacttggggatggtggagtacttggaagaacactttccacagaatatctgcccacacgcccggcagtggtgcttacgggtcatcaccccgaactgcaccctgcagcggtggcattcctcagcgtccacccagtctggggctctctcggcagcaaacatggcatcgctctctttgaattctggaaagacgtgcccctccaccttcatgatctggtaggtgtcctggaccaccttgtacttgggctcgttccggaaggcatgcgcccaggcctggatcaggtacaggatcttgttacggacgtttacctccacttgtctcttcagcaggtccttcagctcctccatggtctgcttgttggccacctcatcatgaactgtctggccacagttctttaccacagattccatgacctccagggcatacaaggcgacgtgtgggttcttgtcgttgactttcttcttgatggaattcacagcatattttgcttgtgtgtccccttggcggatcaggtcgcagatctgcaaaatggactcccaatctgtctccaacaggagctggctggtcgccttgtctaggagacgctcgaaggtgccgctgcctcgccccatggcgacctccagcccaaacccgacgccgcgggcccaa

SEQ ID NO: 225485 - DNA, 897 bp, Homo Sapiens; identical to SEQ ID NO: 190826
  misc_feature (731)..(739): n is a, c, g, or t

SEQ ID NO: 225486 - DNA, 760 bp, Homo Sapiens; identical to SEQ ID NO: 190830
  misc_feature (185)..(247): n is a, c, g, or t

SEQ ID NO: 225487 - DNA, 332 bp, Homo Sapiens; identical to SEQ ID NO: 190831

SEQ ID NO: 225488 - DNA, 783 bp, Homo Sapiens; identical to SEQ ID NO: 190832

SEQ ID NO: 225489 - DNA, 952 bp, Homo Sapiens
ctttgtacaaaaaagttggagaagatccttctgcagttgctctcaaagagccctggcaggagaaagtacggcggatcagagagggctccccctacggccatctccccaattggcggctcctgtcagtcattgtcaagtgtggggatgaccttcggcaagagcttctggcctttcaggtgttgaagcaactgcagtccatttgggaacaggagcgagtgcccctttggatcaagccatacaagattcttgtgatttcggctgatagtggcatgattgaaccagtggtcaatgctgtgtccatccatcaggtgaagaaacagtcacagctctccttgctcgattacttcctacaggagcacggcagttacaccactgaggcattcctcagtgcacagcgcaattttgtgcaaagttgtgctgggtactgcttggtctgctacctgctgcaagtcaaggacagacacaatgggaatatccttttggacgcagaaggccacatcatccacatcgactttggcttcatcctctccagctcaccccgaaatctgggctttgagacgtcagcctttaagctgaccacagagtttgtggatgtgatgggcggcctggatggcgacatgttcaactactataagatgctgatgctgcaagggctgattgccgctcggaaacacatggacaaggtggtgcagatcgtggagatcatgcagcaaggttctcagcttccttgcttccatggctccagcaccattcgaaacctcaaagagaggttccacatgagcatgactgagagcagctgcagctgctggtggagcagatggtggatggcagtatgcggtctatcaccaccaaactctatgacggcttccagtacctcaccaacggcatcatgtgacacgctcctcagcccaggagtggtggggggtccagggcaccctccctagagggccct

SEQ ID NO: 225490 - DNA, 942 bp, Homo Sapiens; identical to SEQ ID NO: 190845

SEQ ID NO: 225491 - DNA, 1556 bp, Homo Sapiens; identical to SEQ ID NO: 190846

SEQ ID NO: 225492 - DNA, 871 bp, Homo Sapiens
ttgtacaaaaaagttgggaccccctgaccattgaacagcccccagcctgaatatgtgaaccagccagatgttcggccccagcccccttcgccccgagagggccctctgcctgctgcccgacctgctggtgccactctggaaagggccaagactctctccccagggaagaatggggtcgtcaaagacgtttttgcctttgggggtgccgtggagaaccccgagtacttgacaccccagggaggagctgcccctcagccccaccctcctcctgccttcagcccagccttcgacaacctctattactgggaccaggacccaccagagcggggggctccacccagcaccttcaaagggacacctacggcagagaacccagagtacctgggtctggacgtgccagtgtgaaccagaaggccaagtccgcagaagccctgatgtgtcctcagggagcagggaaggcctgacttctgctggcatcaagaggtgggagggccctccgaccacttccaggggaacctgccatgccaggaacctgtcctaaggaaccttccttcctgcttgagttcccagatggctggaaggggtccagcctcgttggaagaggaacagcactggggagtctttgtggattctgaggccctgcccaatgagactctagggtccagtggatgccacagcccagcttggccctttccttccagatcctgggtactgaaagccttagggaagctggcctgagaggggaagcggccctaagggagtgtctaagaacaaaagcgacccattcagagactgtccctgaaacctagtactgccccccatgaggaaaggaacagcaatggtgtcagtatccaggctttgtacagaatgc

SEQ ID NO: 225493 - DNA, 602 bp, Homo Sapiens; identical to SEQ ID NO: 190848

SEQ ID NO: 225494 - DNA, 596 bp, Homo Sapiens; identical to SEQ ID NO: 190852
  misc_feature (367)..(397): n is a, c, g, or t

SEQ ID NO: 225495 - DNA, 990 bp, Homo Sapiens
ataaaagccaactttgtacaaaaaagttggcgtctccctcctggcgcttgtcctcctctcccagtcggcaccacagcggtggctgccgggcgtggtgtcggtgggtcggttggtttttgtctcaccgttggtgtccgtgccgttcagttgcccgccatggctgagctggatccgttcggcgcccctgccggcgcccctggcggtcccgcgctggggaacggagtggccggcgccggcgaagaagacccggctgcggccttcttggcgcagcaagagagcgagattgcgggcatcgagaacgacgaggccttcgccatcctggacggcggcgcccccgggccccagccgcacggcgagccgccggggggtccggatgctgttgatggagtaatgaatggtgaatactaccaggaaagtaatggtccaacagacagttatgcagctatttcacaagtggatcgattgcagtcagagcctgaaagtatccgtaaatggagagaagaacaaatggaacgcttggaagcccttgatgccaattctcggaagcaagaagcagagtggaaagaaaaggcaataaaggagctagaagaatggtatgcaagacaggacgagcagctacagaaaacaaaagcaaacaacagggcagcagaagaagcctttgtaaatgacattgacgagtcgtccccaggcactgagtgggaacgggtggcccggctgtgtgactttaaccccaagtctagcaagcaggccaaagatgtctcccgcatgcgctcagtcctcatctccctcaagcaggccccgctggtgcactgaagagccaccctgtggaaacactacatctgcaatatcttaatcctactcagtgaagctcttcacagtcattggattaattatgttgagttcttttggaccaaaacctttttgtctttagagtgttcattgtttgtgattgcatgtttccttccttcaactgtgttctccctggcattc

SEQ ID NO: 225496 - DNA, 923 bp, Homo Sapiens
ttggctaagatctggcctgtacattttcaaggaattcttgagaggttcttggagagattctgggagccaaacactccattgggatcctagctgttttagagaacaacttgtaatggagccttcatctcttgagctgccggctgacacagtgcagcgcattgcggctgaactcaaatgccacccaacggatgagagggtggctctccacctagatgaggaagataagctgaggcacttcagggagtgcttttatattcccaaaatacaggatctgcctccagttgatttatcattagtgaataaagatgaaaatgccatctatttcttgggaaattctcttggccttcaaccaaaaatggttaaaacatatcttgaagaagaactagataagtgggccaaaatagcagcctatggtcatgaagtggggaagcgtccttggattacaggagatgagagtattgtaggccttatgaaggacattgtaggagccaatgagaaagaaatagccctaatgaatgctttgactgtaaatttacatcttctaatgttatcattttttaagcctacgccaaaacgatataaaattcttctagaagccaaagccttcccttctgatcattatgctattgagtcacaactacaacttcacggacttaacattgaagaaagtatgcggatgataaaagccaagagagggggaagaaaccttaagaatagaggatatccttgaagtaattgagaaggaaggagactcaattgcagtgatcctgttcagtggggtgcatttttacactggacagcactttaatattcctgccatcacaaaagctggacaagcgaaggggttgttatgttggctttgatctagcacatgcagttggaaatgttgaactctacttacatgactggggagttgattttgc

SEQ ID NO: 225497 - DNA, 985 bp, Homo Sapiens
gcttttcttataatagccaactttgtacaaaaaagttggcggccgggaggcggccatcgagacccacccaaggcgcgtccccctcggcctcccagcgctcccaagccgcagcggccgcgccccttcagctagctcgctcgctcgctctgcttccctgctgccggctgcgccatggcgttggcgttggcggcgctggcggcggtcgagccggcctgcggcagccggtaccagcagttgcagaatgaagaagagtctggagaacctgaacaggctgcaggtgatgctcctccaccttacagcagcatttctgcagagagcgcagcatattttgactacaaggatgagtctgggtttccaaagcccccatcttacaatgtagctacaacactgcccagttatgatgaagcggagaggaccaaggctgaagctactatccctttggttcctgggagagatgaggattttgtgggtcgggatgattttgatgatgctgaccagctgaggataggaaatgatgggattttcatgttaacttttttcatggcattcctctttaactggattgggtttttcctgtctttttgcctgaccacttcagctgcaggaaggtatggggccatttcaggatttggtctctctctaattaaatggatcctgattgtcaggttttccacctatttccctggatattttgatggtcagtactggctctggtgggtgttccttgttttaggctttctcctgtttctcagaggatttatcaattatgcaaaagttcggaagatgccagaaactttctcaaatctccccaggaccagagttctctttatttattaaagatgttttctggcaaaggccttcctgcatttatgaattctctctcaagaagcaagagaacacctgcaggaagtgaatcaagatgcagaacacagaggaataatcacctgctttaaaaaataaagtactgttgaaaagatcatttctc

SEQ ID NO: 225498 - DNA, 1148 bp, Homo Sapiens; identical to SEQ ID NO: 190858

SEQ ID NO: 225499 - DNA, 1294 bp, Homo Sapiens
  misc_feature (826)..(838): n is a, c, g, or t
  misc_feature (851)..(907): n is a, c, g, or t
tttgtacaaaaaagttggctgcttccgccctctgaagctgaccacaccaacctacggggatctgaaccaccttgtctcagccaccatgagtggtgtcaccacctgcctccgtttccctggccagctcaatgctgacctccgcaagttggcagtcaacatggtccccttcccacgtctccatttctttatgcctggctttgcccctctcaccagccgtggaagccagcagtatcgagctctcacagtgccggaactcacccagcaggtcttcgatgccaagaacatgatggctgcctgtgacccccgccacggccgatacctcaccgtggctgctgtcttccgtggtcggatgtccatgaaggaggtcgatgagcagatgcttaacgtgcagaacaagaacagcagctactttgtggaatggatccccaacaatgtcaagacagccgtctgtgacatcccacctcgtggcctcaagatggcagtcaccttcattggcaatagcacagccatccaggagctcttcaagcgcatctcggagcagttcactgccatgttccgccggaaggccttcctccactggtacacaggcgagggcatggacgagatggagttcaccgaggctgagagcaacatgaacgacctcgtctctgagtatcagcagtaccaggatgccaccgcagaagaggaggaggatttcggtgaggaggccgaagaggaggcctaaggcagagcccccatcacctcaggcttctcagttcccttagccgtcttactcaactgcccctttcctctccctcagaatttgtgtttgctgcctctatcttgnnnnnnnnnnnnncttctgggggggnnnnnnnnnnnnnnnnnnnnnnnnnnnnnnnnnnnnnnnnnnnnnnnnnnnnnnnnntctccagatcccatttagaaccaaccaggtgctgaaaacacatgtagataatggccatcatcctaagcccaaagtagaaaatggtagaaggtagtgggtagaagtcactatataaggaaggggatgggattttccattctaaaagttttggagagggaaatccaggctattaaagtcactaaatttctaagtatgtccatttcccatctcagcttcaagggaggtgtcagcagtattatctccactttcaatctccctcccagctctactctggaggagtctgtcccactctgtcaagtggaatccttccctttcaactctacctccctcactcagctcctttcccctgatcagagaagggatcaagggggttgggaggggggaaaa

SEQ ID NO: 225500 - DNA, 872 bp, Homo Sapiens; identical to SEQ ID NO: 190860

SEQ ID NO: 225501 - DNA, 1189 bp, Homo Sapiens; identical to SEQ ID NO: 190861
  misc_feature (680)..(692): n is a, c, g, or t
  misc_feature (705)..(761): n is a, c, g, or t

SEQ ID NO: 225502 - DNA, 656 bp, Homo Sapiens; identical to SEQ ID NO: 190862
  misc_feature (441)..(481): n is a, c, g, or t

SEQ ID NO: 225503 - DNA, 1438 bp, Homo Sapiens; identical to SEQ ID NO: 190863

SEQ ID NO: 225504 - DNA, 897 bp, Homo Sapiens; identical to SEQ ID NO: 190864

SEQ ID NO: 225505 - DNA, 1363 bp, Homo Sapiens; identical to SEQ ID NO: 190865

SEQ ID NO: 225506 - DNA, 1654 bp, Homo Sapiens; identical to SEQ ID NO: 190866

SEQ ID NO: 225507 - DNA, 699 bp, Homo Sapiens; identical to SEQ ID NO: 190868

SEQ ID NO: 225508 - DNA, 1318 bp, Homo Sapiens; identical to SEQ ID NO: 190869
  misc_feature (921)..(933): n is a, c, g, or t
  misc_feature (946)..(1002): n is a, c, g, or t

SEQ ID NO: 225509 - DNA, 934 bp, Homo Sapiens; identical to SEQ ID NO: 190871

SEQ ID NO: 225510 - DNA, 1425 bp, Homo Sapiens; identical to SEQ ID NO: 190872
  misc_feature (1149)..(1161): n is a, c, g, or t
  misc_feature (1174)..(1230): n is a, c, g, or t

SEQ ID NO: 225511 - DNA, 1104 bp, Homo Sapiens; identical to SEQ ID NO: 190873
  misc_feature (934)..(952): n is a, c, g, or t

SEQ ID NO: 225512 - DNA, 1223 bp, Homo Sapiens
atcaactcatcacagctgtccatgatgaacacacggcggacatagagtttgatgttgttctttttcttcttgttctcaaaaaggtcaaagggagcccgacgaggaataaatagcaatgcctgaattccaactgacccttctacagaaaagtgcttgactgccaagtggtcttcccagtcattagtgaggctcttgtagaattctccatactcctcttgggtgatgtcatcagggtttctggtccaaataggcttggtcttgtttagttcttcctgatcaatgtatttctctttgatcttcttagttttcttcttcttatccttaccgctgtcatcctcctcatctgaacccacatcttcgatcttgggtttttcttcatcatctttatcttcctcttctttctcacctttctcttcctctgcctcatcatcactaatttccttctctcgttccttctccaaataaagggtgatgggatagcctatgaactgagaatgcttcttcactacttctttgacccgcctctcttctaggtactctgtctgatcttctttaagatggaggatcactttggtacccctgccaatgggctcaccatggtcagcacgcacagtgaaggaacctccagcagaagactcccaagcatactgttcatcatcgttgtgctttgtgatcacaaccactttctctgccaccaagtaggcagaataaaagccaacaccaaactgcccaatcatggagatgtctgcaccagcctgaagagcctccatgaatgctttagtaccagacttggcaatggttcccaaattatttatgagatcagctttggtcatgccaatgcctgtgtctaccaaagtcagggtacgttcctgagggttggggatgatgtcaattttcagctctttaccactgtccaacttcgccaagggtctgtcaggctctcatagcgaatcttgtccaaggcatcagaagcattagagatcaactcccgaaggaaaatctccttgttggaatagaaggtattgatgatgagggacatgagttgggcaatttctgcctgaaaggcaaaagtctccacctcctcctctccatggtgcacttcctcaggcatcttgaaaagaaaaggattatacgtaatagtgagcaacgtaggcttgctttccgatacccagacagtcccaacactgcgccggagccaacttttttgtacaaagttggcttta

SEQ ID NO: 225513 - DNA, 1329 bp, Homo Sapiens
actttgtacaaaaaagttgggaaccattgccaagtctggtactaaagcattcatggaggctcttcaggctggtgcagacatctccatgattgggcagtttggtgttggcttttattctgcctacttggtggcagagaaagtggttgtgatcacaaagcacaacgatgatgaacagtatgcttgggagtcttctgctggaggttccttcactgtgcgtgctgaccatggtgagcccattggcaggggtaccaaagtgatcctccatcttaaagaagatcagacagagtacctagaagagaggcgggtcaaagaagtagtgaagaagcattctcagttcataggctatcccatcaccctttatttggagaaggaacgagagaaggaaattagtgatgatgaggcagaggaagagaaaggtgagaaagaagaggaagataaagatgatgaagaaaaacccaagatcgaagatgtgggttcagatgaggaggatgacagcggtaaggataagaagaagaaaactaagaagatcaaagagaaatacattgatcaggaagaactaaacaagaccaagcctatttggaccagaaaccctgatgacatcacccaagaggagtatggagaattctacaagagcctcactaatgactgggaagaccacttggcagtcaagcacttttctgtagaaggtcagttggaattcagggcattgctatttattcctcgtcgggctccctttgacctttttgagaacaagaagaaaaagaacaacatcaaactctatgtccgccgtgtgttcatcatggacagctgtgatgagttgataccagagtatctcaattttatccgtggtgtggttgactctgaggatctgcccctgaacatctcccgagaaatgctccagcagagcaaaatcttgaaagtcattcgcaaaaacattgttaagaagtgccttgagctcttctctgagctggcagaagacaaggagaattacaagaaattctatgaggcattctctaaaaatctcaagcttggaatccacgaagactccactaaccgccgccgcctgtctgagctgctgcgctatcatacctcccagtctggagatgagatgacatctctgtcagagtatgtttctcgcatgaaggagacacagaagtccatctattacatcactggtgagagcaaagagcagtggccaactcagcttttgtggagcgagtgcggaaacggggcttcgaggtggtatatatgaccgagcccattgacgagtactgtgtgcagcagctcaaggaatttgatgggaagagcctgggtctcagttaccaaagg

SEQ ID NO: 225514 - DNA, 1201 bp, Homo Sapiens; identical to SEQ ID NO: 190875

SEQ ID NO: 225515 - DNA, 1178 bp, Homo Sapiens; identical to SEQ ID NO: 190876
  misc_feature (563)..(623): n is a, c, g, or t

SEQ ID NO: 225516 - DNA, 1285 bp, Homo Sapiens; identical to SEQ ID NO: 190877

SEQ ID NO: 225517 - DNA, 1039 bp, Homo Sapiens; identical to SEQ ID NO: 190878

SEQ ID NO: 225518 - DNA, 966 bp, Homo Sapiens; identical to SEQ ID NO: 190879

SEQ ID NO: 225519 - DNA, 716 bp, Homo Sapiens; identical to SEQ ID NO: 190880

SEQ ID NO: 225520 - DNA, 1009 bp, Homo Sapiens; identical to SEQ ID NO: 190881

SEQ ID NO: 225521 - DNA, 925 bp, Homo Sapiens
gagcaatgcttttctctcataatgccaactttgtacaaaaaagttggcggatctgccctttcccgagatcaccaagatgctgggcgccgagtggagcaagctgcagccaacggaaaagcagcggtacctggatgaggccgagagagagaagcagcagtacatgaaggagctgcgggcgtaccagcagtctgaagcctataagatgtgcacggagaagatccaggagaagaagatcaagaaagaagactcgagctctgggctcatgaacactctcctgaatggacacaagggtggggactgcgatggcttctccaccttcgatgttcccatcttcactgaagagttcttggaccaaaacaaagcgcgtgaggcggagcttcggcgcttgcggaagatgaatgtggccttcgaggagcagaacgcggtactgcagaggcacacgcagagcatgagcagcgcgcgcgagcgtctggagcaggagctggcgctggaggagcggaggacgctggcgctgcagcagcagctccaggccgtgcgccaggcgctcaccgccagcttcgcctcactgccggtgccgggcacgggcgaaacgcccacgctgggcactctggacttctacatggcccggcttcacggagccatcgagcgcgaccccgcccagcacgagaagctcatcgtccgcatcaaggaaatcctggcccaggtcgccagcgagcacctgtgaggagtgggcgggcccacgatgcagaggagaagctgtgggcgcggccctgccacaccccaccccgtggacgagaggctgggggtccaccctttggggcctggtcccatcctgcaccttgggggctccagcccccctaaaattaaatttctgcagcatccctttagctttcaatctccccagccccctgaacccggaaaaagc

SEQ ID NO: 225522 - DNA, 933 bp, Homo Sapiens; identical to SEQ ID NO: 190883

SEQ ID NO: 225523 - DNA, 976 bp, Homo Sapiens
ttggattgagtcctgtttgagctattgttctctttttcctgaaaaatggcactgtcaaagagggagctggatgagctgaaaccatggatagagaagacagtgaagagggtcctgggtttctcagagcctacggtggtcacagcagcattgaactgtgtggggaagggcatggacaagaagaaggcagccgatcatctgaaaccttttcttgatgattctactctccgatttgtggacaaactgtttgaggctgtggaggaaggccgaagctctaggcattccaagtctagcagtgacaggagcagaaaacgagagctaaaggaggtgtttggtgatgactctgagatctctaaagaatcatcaggagtaaagaagcgacgaataccccgttttgaggaggtggaagaagagccagaggtgatccctgggcctccatcagagagccctggcatgctgactaagctccagatcaaacagatgatggaggcagcaacacgacaaatcgaggagaggaaaaaacagctgagcttcattagcccccctacacctcagccaaagactccttcttcctcccaaccagaacgacttcctattggcaacactattcagccctcccaggctgccactttcatgaatgatgccattgagaaggcaaggaaagcagctgaactgcaagctcgaatccaagcccagctggcactgaagccaggactcatcggcaatgccaacatggtgggcctggctaatctccatgccatgggcattgctcccccgaaggtggagttaaaagaccaaacgaaacctacaccactgatcctggatgagcaagggcgcactgtagatgcaacaggcaaggagattgagctgacacaccgcatgcctactctgaaagccaatattcgtgctgtgaagagggaacaattcaagcacaactaaaggaaaagccatcagaagacatggaatccaataccttttt

SEQ ID NO: 225524 - DNA, 1078 bp, Homo Sapiens
ttggcgctcggcgaactgtgtggaccgtctgctgggactccggccctgcgtccgctcagccccgtggccccgcgcacctactgccatggagacgcggcctcgtctcggggccacctgtttgctgggcttcagtttcctgctcctcgtcatctcttctgatggacataatgggcttggaaagggttttggagatcatattcattggaggacactggaagatgggaagaaagaagcagctgccagtggactgcccctgatggtgattattcataaatcctggtgtggagcttgcaaagctctaaagcccaaatttgcagaatctacggaaatttcagaactctcccataattttgttatggtaaatcttgaggatgaagaggaacccaaagatgaagatttcagccctgacgggggttatattccacgaatcctttttctggatcccagtggcaaggtgcatcctgaaatcatcaatgagaatggaaaccccagctacaagtatttttatgtcagtgccgagcaagttgttcaggggatgaaggaagctcaggaaaggctgacgggtgatgccttcagaaagaaacatcttgaagatgaattgtaacatgaatgtgccccttctttcatcagagttagtgttctggaaggaaagcagcagggaagggaatattgaggaatcatctagaacaattaagccgaccaggaaacctcattcctacctacactggaaggagcgctctcactgtggaagagttctgctaacagaagctggtctgcatgtttgtggatccagcggagagtggcagactttcttctccttttccctctcacctaaatgtcaacttgtcattgaatgtaaagaatgaaaccttctgacacaaaacttgagccacttggatgtttactcctcgcacttaagtatttgagtcttttcccatttcctcccactttactcaccttagtggtgaagggagactagtagcatcttttctacacgttaaaattgcagaagtagcttatcattaaaaaacaacaacaacaacaataaccataaatcctaagtgtaaatcagttattc

SEQ ID NO: 225525 - DNA, 926 bp, Homo Sapiens
  misc_feature (712)..(722): n is a, c, g, or t
ctttgtacaaaaaagtttctgcgacttgtgttgggactgctgataggaagatgtcttcaggaaatgctaaaattgggcaccctgcccccaacttcaaagccacagctgttatgccagatggtcagtttaaagatatcagcctgtctgactacaaaggaaaatatgttgtgttcttcttttaccctcttgacttcacctttgtgtgccccacggagatcattgctttcagtgatagggcagaagaatttaagaaactcaactgccaagtgattggtgcttctgtggattctcacttctgtcatctagcatgggtcaatacacctaagaaacaaggaggactgggacccatgaacattcctttggtatcagacccgaagcgcaccattgctcaggattatggggtcttaaaggctgatgaaggcatctcgttcaggggcctttttatcattgatgataagggtattcttcggcagatcactgtaaatgacctccctgttggccgctctgtggatgagactttgagactagttcaggccttccagttcactgacaaacatggggaagtgtgcccagctggctggaaacctggcagtgataccatcaagcctgatgtccaaaagagcaaagaatatttctccagcagaagtgagcgctgggctgttttagtgccaggctgcggtgggcagccatgagaacaaaacctcttctgtannnnnnnnnnnccattagtaaaacacaagacttcagattcagccgaattgtggtgtcttacaaggcaggcctttcctacagggggtggagagaccagctctttcttcctttggtaggaatggcctgagttgggcgttgtgggcaagctactggtttgtatgatgtattagtagagcaacccattaatctttgtagtttgtattaaacttgactga

SEQ ID NO: 225526 - DNA, 919 bp, Homo Sapiens; identical to SEQ ID NO: 190896
  misc_feature (718)..(727): n is a, c, g, or t

SEQ ID NO: 225527 - DNA, 929 bp, Homo Sapiens; identical to SEQ ID NO: 190897
  misc_feature (182)..(191): n is a, c, g, or t

SEQ ID NO: 225528 - DNA, 954 bp, Homo Sapiens; identical to SEQ ID NO: 190898

SEQ ID NO: 225529 - DNA, 764 bp, Homo Sapiens; identical to SEQ ID NO: 190899
  misc_feature (42)..(51): n is a, c, g, or t

SEQ ID NO: 225530 - DNA, 922 bp, Homo Sapiens; identical to SEQ ID NO: 190900
  misc_feature (727)..(736): n is a, c, g, or t

SEQ ID NO: 225531 - DNA, 636 bp, Homo Sapiens; identical to SEQ ID NO: 190901
  misc_feature (439)..(449): n is a, c, g, or t

SEQ ID NO: 225532 - DNA, 544 bp, Homo Sapiens; identical to SEQ ID NO: 190902

SEQ ID NO: 225533 - DNA, 938 bp, Homo Sapiens; identical to SEQ ID NO: 190903
  misc_feature (725)..(734): n is a, c, g, or t

SEQ ID NO: 225534 - DNA, 1381 bp, Homo Sapiens
ttggctgggatttctgcggccgccagctcccgcgaccgcctctcctgcccctcgccggtacctcagcaaggtgccactagaagcgccaggctggggccgcctctgagcgccccgcgggggccatggatggtgaaacagcagaggagcaggggggccctgtgcccccgccagttgcacccggcggacccggcttgggcggtgctccgggggggcggcgggagcccaagaagtacgcagtgaccgacgactaccagttgtccaagcaggtgctgggcctgggtgtgaacggcaaagtgctggagtgcttccatcggcgcactggacagaagtgtgccctgaagctcctgtatgacagccccaaggcccggcaggaggtagaccatcactggcaggcttctggcggcccccatattgtctgcatcctggatgtgtatgagaacatgcaccatggcaagcgctgtctcctcatcatcatggaatgcatggaaggtggtgagttgttcagcaggattcaggagcgtggcgaccaggctttcactgagagagaagctgcagagataatgcgggatattggcactgccatccagtttctgcacagccataacattgcccaccgagatgtcaagcctgaaaacctactctacacatctaaggagaaagacgcagtgcttaagctcaccgattttggctttgctaaggagaccacccaaaatgccctgcagacaccctgctatactccctattatgtggcccctgaggtcctgggtccagagaagtatgacaagtcatgtgacatgtggtccctgggtgtcatcatgtacatcctcctttgtggcttcccacccttctactccaacacgggccaggccatctccccggggatgaagaggaggattcgcctgggccagtacggcttccccaatcctgagtggtcagaagtctctgaggatgccaagcagctgatccgcctcctgttgaagacagaccccacagagaggctgaccatcactcagttcatgaaccacccctggatcaaccaatcgatggtagtgccacagaccccactccacacggcccgagtgctgcaggaggacaaagaccactgggacgaagtcaaggaggagatgaccagtgccttggccactatgcgggtagactacgaccaggtgaagatcaaggacctgaagacctctaacaaccggctcctcaacaagaggagaaaaagcaggcaggcagctcctctgcctcacagggctgcaacaaccagtagctcatggggccttggaggagcctggcctctcagcctgcataacagactgaaatgtgctcacgccctggccaggagggcccagggtcattcttttaacaaaggattattttg

SEQ ID NO: 225535 - DNA, 530 bp, Homo Sapiens; identical to SEQ ID NO: 190909

SEQ ID NO: 225536 - DNA, 916 bp, Homo Sapiens
ccataaagccaactttgtacaaaaaagttggcccgcgggtctttgtcttgcttcaacagtgtttggacggaacagatccggggactctcttccagcctccgaccgccctccgatttcctctccgcttgcaacctccgggaccatcttctcggccatctcctgcttctgggacctgccagcaccgtttttgtggttagctccttcttgccaaccaaccatgagctcccagattcgtcagaattattccaccgacgtggaggcagccgtcaacagcctggtcaatttgtacctgcaggcctcctacacctacctctctctgggcttctatttcgaccgcgatgatgtggctctggaaggcgtgagccacttcttccgcgaattggccgaggagaagcgcgagggctacgagcgtctcctgaagatgcaaaaccagcgtggcggccgcgctctcttccaggacatcaagaagccagctgaagatgagtggggtaaaaccccagacgccatgaaagctgccatggccctggagaaaaagctgaaccaggcccttttggatcttcatgccctgggttctgcccgcacggacccccatctctgtgacttcctggagactcacttcctagatgaggaagtgaagcttatcaagaagatgggtgaccacctgaccaacctccacaggctgggtggcccggaggctgggctgggcgagtatctcttcgaaaggctcactctcaagcacgactaagagccttctgagcccagcgacttctgaagggccccttgcaaagtaatagggcttctgcctaagcctctccctccagccaataggcagctttcttaactatcctaacaagccttggaccaaatggaaataaagctttttgatgcgtaacaaacaagagtaaaaaaccgataa

SEQ ID NO: 225537 - DNA, 433 bp, Homo Sapiens; identical to SEQ ID NO: 190914

SEQ ID NO: 225538 - DNA, 633 bp, Homo Sapiens; identical to SEQ ID NO: 190915

SEQ ID NO: 225539 - DNA, 584 bp, Homo Sapiens; identical to SEQ ID NO: 190916

SEQ ID NO: 225540 - DNA, 949 bp, Homo Sapiens
  misc_feature (760)..(802): n is a, c, g, or t
  misc_feature (804)..(804): n is a, c, g, or t
tttgtacaaaaaagttgggtgccgttggtcctgtgcggtcacttagccaagatgcctgaggaaacccagacccaagaccaaccgatggaggaggaggaggttgagacgttcgcctttcaggcagaaattgcccagttgatgtcattgatcatcaatactttctactcgaacaaagagatctttctgagagagctcatttcaaattcatcagatgcattggacaaaatccggtatgaaagcttgacagatcccagtaaattagactctgggaaagagctgcatattaaccttataccgaacaaacaagatcgaactctcactattgtggatactggaattggaatgaccaaggctgacttgatcaataaccttggtactatcgccaagtctgggaccaaagcgttcatggaagctttgcaggctggtgcagatatctctatgattggccagttcggtgttggtttttattctgcttatttggttgctgagaaagtaactgtgatcaccaaacataacgatgatgagcagtacgcttgggagtcctcagcagggggatcattcacagtgaggacagacacaggtgaacctatgggtcgtggaacaaaagttatcctacacctgaaagaagaccaaactgagtacttggaggaacgaagaataaaggagattgtgaagaaacattctcagtttattggatatcccattactctttttgtggagaaggaacgtgataaagaagtaagcgatgatgaggctgacnnnnnnnnnnnnnnnnnnnnnnnnnnnnnnnnnnnnnnnnnnngnagtcgggaagacaaacctgaaattgaagatgttggttctgatgaggaagagaaaagaagatggtgacaagaagaagagagagattaggaaagtacatcgatcaagaagagctcaacaaacaagcccatctggaccagaatcccga

SEQ ID NO: 225541 - DNA, 912 bp, Homo Sapiens
tttgtacaaaaaagttggctgtgaaggaccctaggaaaatcttgctttatgaaactgcgctcctgtcttctggcttcagtctggaagatccccaaacacatgctaacaggatctacaggatgatcaaacttggtctgggtattgatgaagatgaccctactgctgatgataccagtgctgctgtaactgaagaaatgccaccccttgaaggagatgacgacacatcacgcatggaagaagtagactaatctctggctgagggatgacttacctgttcagtactctacaattcctctgataatatattttcaaggatgtttttctttattttttttataatttaaaagtctgtatggcatgacaactactttagggaagataagatttctgtctactaaatgatgctgtgataccttaggcactaaagcagagctagtaatgctttttgagtttcatgttggtttattttcccagattggggtaacgtgcactgtaagacgtatgtaacatgatgttaactttgtgtggtctaaagtgtttagctgtcaagccggatgcctaagtagacccaatcttgttattgaagggttctgagccgtatcttgatgtttagaaaagtattcgttacctcttgtaggatctactttttgaacttttcattccctgtagttgacaattctgcctgtactagtcctcaagaaataggttaaactgaagcaacctgatggaaagatctctccaccgggcttgttttcccaagaaaagtattgtttgggggggccaagttaaaagcctccctaagccttttgtaaagctgttccaaaataactccgaccccctcttgggggtggaaaagtagtgcccgagtcccctcttgcttaaagttgtaaccaatcccggtgggtttaaagg

SEQ ID NO: 225542 - DNA, 800 bp, Homo Sapiens; identical to SEQ ID NO: 190928

SEQ ID NO: 225543 - DNA, 944 bp, Homo Sapiens; identical to SEQ ID NO: 190929

SEQ ID NO: 225544 - DNA, 956 bp, Homo Sapiens; identical to SEQ ID NO: 190930

SEQ ID NO: 225545 - DNA, 1683 bp, Homo Sapiens; identical to SEQ ID NO: 190932

SEQ ID NO: 225546 - DNA, 1164 bp, Homo Sapiens; identical to SEQ ID NO: 190933

SEQ ID NO: 225547 - DNA, 953 bp, Homo Sapiens; identical to SEQ ID NO: 190934
  misc_feature (760)..(804): n is a, c, g, or t

SEQ ID NO: 225548 - DNA, 1138 bp, Homo Sapiens; identical to SEQ ID NO: 190935

SEQ ID NO: 225549 - DNA, 919 bp, Homo Sapiens; identical to SEQ ID NO: 190936
  misc_feature (752)..(797): n is a, c, g, or t

SEQ ID NO: 225550 - DNA, 1104 bp, Homo Sapiens; identical to SEQ ID NO: 190937

SEQ ID NO: 225551 - DNA, 950 bp, Homo Sapiens; identical to SEQ ID NO: 190938
  misc_feature (770)..(815): n is a, c, g, or t

SEQ ID NO: 225552 - DNA, 1106 bp, Homo Sapiens; identical to SEQ ID NO: 190939
  misc_feature (75)..(121): n is a, c, g, or t
  misc_feature (165)..(207): n is a, c, g, or t

SEQ ID NO: 225553 - DNA, 933 bp, Homo Sapiens; identical to SEQ ID NO: 190940
  misc_feature (758)..(802): n is a, c, g, or t

SEQ ID NO: 225554 - DNA, 912 bp, Homo Sapiens; identical to SEQ ID NO: 190941
  misc_feature (531)..(577): n is a, c, g, or t
  misc_feature (621)..(663): n is a, c, g, or t

SEQ ID NO: 225555 - DNA, 1017 bp, Homo Sapiens; identical to SEQ ID NO: 190942

SEQ ID NO: 225556 - DNA, 605 bp, Homo Sapiens; identical to SEQ ID NO: 190952
  misc_feature (115)..(123): n is a, c, g, or t

SEQ ID NO: 225557 - DNA, 1001 bp, Homo Sapiens
ttggatgcccagggtctcagaagacgtgtaccgcagccacgtggcaggccagatgctgcatgggggcggcagcaggctcaacagcggcaaccgctggttcgacaagacgctgcagttcatcgtggcagaagatggctcctgtgggcttgtgtacgagcatgctgcagcggaggggccccctattgtcacccttctggactatgtcatcgagtacacgaagaaacccgagcttgtgcggtctcccatggtgcccctgcccatgcccaagaagctgcggttcaacatcacccccgagatcaagagcgacatcgagaaggccaagcagaacctcagcatcatgatccaggacctggatatcaccgtgatggtgttccaccattttggaaaagacttccccaagtcggagaagctaagcccagatgccttcatccagatggctttgcagctggcctactacaggatctacggacaggcatgtgccacctatgaaagtgcctccctgcgcatgtttcacctgggccgcaccgacaccatccgctcggcttccatggactcactcacctttgtcaaggccatggatgactccagcgtcacggagcaccagaaggtggagctgctgcggaaggccgtgcaggcccaccgaggctacaccgaccgggccatccgcggggaggcctttgatcgacacctgctgggcctgaagctgcaggccatcgaggacctggtgagcatgcccgacatcttcatggacacctcctacgccatcgccatgcacttccacctctccaccagccaggtccctgccaagacagactgtgtcatgttcttcgggcccgtggtccccgacggctacggtgtctgctataaccccatggaggcccacatcaacttctccctgtcggcctacaacagctgcgcggagaccaacgccgcccgcctgagcgcattacctggagaaggcgctcctggacatgcgtgccctgctgcagagccacccccgg

SEQ ID NO: 225558 - DNA, 1010 bp, Homo Sapiens; identical to SEQ ID NO: 190954

SEQ ID NO: 225559 - DNA, 1254 bp, Homo Sapiens
  misc_feature (193)..(201): n is a, c, g, or t
  misc_feature (1059)..(1098): n is a, c, g, or t
ttggcattagacttgtaaagcaaagcttccattttctatttttatataaaccattattaatgcctttaaaacaactgtgatatctggacaaataaaatagaaatgacttcttaagatgattgcaacttttagtcttgatttataaaaattattctacataattttagtagggtaactgataatttttctcacnnnnnnnnngttgtagggtgaaaatcctatttataagagtgccgtaacaactgtggtcaatccgaagtatgagggaaaatgagtactgcccgtgcaaatcccacaacactgaatgcaaagtagcaatttccatagtcacagttaggtagctttagggcaatattgccatggttttactcatgtgcaggttttgaaaatgtacaatatgtataatttttaaaatgttttattattttgaaaataatgttgtaattcatgccagggactgacaaaagacttgagacaggatggttattcttgtcagctaaggtcacattgtgcctttttgaccttttcttcctggactattgaaatcaagcttattggattaagtgatatttctatagcgattgaaagggcaatagttaaagtaatgagcatgatgagagtttctgttaatcatgtattaaaactgatttttagctttacaaatatgtcagtttgcagttatgcagaatccaaagtaaatgtcctgctagctagttaaggattgttttaaatctgttattttgctatttgcctgttagacatgactgatgacatatctgaaagacaagtatgttgagagttgctggtgtaaaatacgtttgaaatagttgatctacaaaggccatgggaaaaattcagagagttaggaaggaaaaaccaatagctttaaaacctgtgtgccattttaagagttacttaatgtttggtaacttttatgccttcactttacaaattcaagccttagataaaagaaccgagcaattttctgctaaaaagtccttgatttagcactatttacatacaggccatactttacaaagtatttgctgaatggggacnnnnnnnnnnnnnnnnnnnnnnnnnnnnnnnnnnnnnnnnatgtctggtgctttctatcacctcttctaatctttttaatgtatttgtttgcaattttggggtaagactttttttatgagtactttttctttgaagttttagcgggtcaattgcctttttaatgaacatgtggagttatactgtggctatgcaaca

SEQ ID NO: 225560 - DNA, 727 bp, Homo Sapiens; identical to SEQ ID NO: 190956
  misc_feature (344)..(381): n is a, c, g, or t

SEQ ID NO: 225561 - DNA, 655 bp, Homo Sapiens; identical to SEQ ID NO: 190957
  misc_feature (354)..(393): n is a, c, g, or t

SEQ ID NO: 225562 - DNA, 1215 bp, Homo Sapiens; identical to SEQ ID NO: 190958

SEQ ID NO: 225563 - DNA, 234 bp, Homo Sapiens; identical to SEQ ID NO: 190959

SEQ ID NO: 225564 - DNA, 1280 bp, Homo Sapiens; identical to SEQ ID NO: 190962

SEQ ID NO: 225565 - DNA, 702 bp, Homo Sapiens; identical to SEQ ID NO: 190963
  misc_feature (511)..(539): n is a, c, g, or t

SEQ ID NO: 225566 - DNA, 1291 bp, Homo Sapiens; identical to SEQ ID NO: 190964
  misc_feature (927)..(975): n is a, c, g, or t

SEQ ID NO: 225567 - DNA, 922 bp, Homo Sapiens; identical to SEQ ID NO: 190965

SEQ ID NO: 225568 - DNA, 1147 bp, Homo Sapiens; identical to SEQ ID NO: 190966

SEQ ID NO: 225569 - DNA, 501 bp, Homo Sapiens; identical to SEQ ID NO: 190967

SEQ ID NO: 225570 - DNA, 963 bp, Homo Sapiens; identical to SEQ ID NO: 190972

SEQ ID NO: 225571 - DNA, 1103 bp, Homo Sapiens; identical to SEQ ID NO: 190974

SEQ ID NO: 225572 - DNA, 1432 bp, Homo Sapiens; identical to SEQ ID NO: 190983

SEQ ID NO: 225573 - DNA, 1527 bp, Homo Sapiens
ttggctccgttggccgagggggccgtacggaggtggcagctgtgggaggaggcggcgtggaaggccgaggagctcaagcccggaccaatccccacgttccgggccgcgaccctgaccctgcagcgtaccgggaagcgaaaccggccggatgggccgctgagcccgaatcgggcactgtgtggagccccctggagctgagatcaggatgttccgcttcatgagggacgtggagcctgaggatcccatgttcctgatggatccctttgctattcaccgtcagcatatgagccgtatgttgtcaggtggctttggatatagccccttcctcagcatcacagatggcaacatgccagggaccaggcctgccagccgccggatgcagcaggctggagctgtctccccctttgggatgctgggaatgtcgggtggtttcatggacatgtttgggatgatgaatgacatgattggaaacatggaacacatgacagctggaggcaattgccagaccttctcatcttccactgtcatctcctactccaatacgggtgatggtgcccccaaggtctaccaagagacatcagagatgcgctcggcaccaggcgggatccgggagacacggaggactgttcgggattcagacagtggactggagcagatgtccattgggcatcacatccgggacagggctcacatcctccagcgctcccgaaaccatcgcacgggggaccaggaggagcggcaggactatatcaacctggatgagagtgaggccgcagcgtttgatgacgagtggcggcgggagacctcccgattccggcagcagcgtcccctggagtttcggcggcttgagtcctcaggggctgggggacgaagggcggaggggcctccccgcctggccatccagggacctgaggactccccttcccgacagtcccgccgctatgactggtgagggccccgggccctcagcctctcttgtacaggctgagaggctgagaaatcatcccctgaataactttttcctctcgattcccatccccaatttaatattaaattaacaggcaagccggcccccacctctccctgggggtctcagggagaacctttcacggcaccctttccctaccttttccttctttaatctcctggtttaccattgatgacttcgcctctgcatctactgacttgatttttcattctgccactccatcttcaaaccccctcacctttcccatcctactcctgccatgcattgaagggtcaatgcattttggggtgagctctgggtttaggggccccctccatccctcagctaccctggatctttgcccacctcttcctcagagcccccactgaggggccgtagccctatctagggctgtggaaggagcagactggttcctaactctctccctcctcctgcccacacacatcaaaagaatcttccctacacccttctctgcctttattttttgatttgtgcaacttgtaactaggtgtttatggaataaaggagaatggaaaaaa

SEQ ID NO: 225574 - DNA, 1387 bp, Homo Sapiens; identical to SEQ ID NO: 190987
  misc_feature (1307)..(1315): n is a, c, g, or t

SEQ ID NO: 225575 - DNA, 791 bp, Homo Sapiens; identical to SEQ ID NO: 190990

SEQ ID NO: 225576 - DNA, 1045 bp, Homo Sapiens; identical to SEQ ID NO: 190991

SEQ ID NO: 225577 - DNA, 1036 bp, Homo Sapiens; identical to SEQ ID NO: 190992

SEQ ID NO: 225578 - DNA, 309 bp, Homo Sapiens; identical to SEQ ID NO: 190995

SEQ ID NO: 225579 - DNA, 446 bp, Homo Sapiens; identical to SEQ ID NO: 190996

SEQ ID NO: 225580 - DNA, 593 bp, Homo Sapiens; identical to SEQ ID NO: 190997

SEQ ID NO: 225581 - DNA, 1078 bp, Homo Sapiens
ctttaaaagccaactttgtacaaaaaagttggctcctgttggctcttgggttttttgtggcttccttcgttattggagccaggcctacaccccagcaaccatgtccaagggacctgcagttggtattgatcttggcaccacctactcttgtgtgggtgttttccagcacggaaaagtcgagataattgccaatgatcagggaaaccgaaccactccaagctatgtcgcctttacggacactgaacggttgatcggtgatgccgcaaagaatcaagttgcaatgaaccccaccaacacagtttttgatgccaaacgtctgattggacgcagatttgatgatgctgttgtccagtctgatatgaaacattggccctttatggtggtgaatgatgctggcaggcccaaggtccaagtagaatacaagggagagaccaaaagcttctatccagaggaggtgtcttctatggttctgacaaagatgaaggaaattgcagaagcctaccttgggaagactgttaccaatgctgtggtcacagtgccagcttactttaatgactctcagcgtcaggctaccaaagatgctggaactattgctggtctcaatgtacttagaattattaatgagccaactgctgctgctattgcttacggcttagacaaaaaggttggagcagaaagaaacgtgctcatctttgacctgggaggtggcacttttgatgtgtcaatcctcactattgaggatggaatctttgaggtcaagtctacagctggagacacccacttgggtggagaagattttgacaaccgaatggtcaaccattttattgctgagtttaagcgcaagcataagaaggacatcagtgagaacaagagagctgtaagacgcctccgtactgcttgtgaacgtgctaagcgtaccctctcttccagcacccaggccagtattgagatcgattctctctatgaaggaatcgacttctatacctccattacccgtgcccgatttgaagaactgaatgctgacctgttccgtggcaccctggacccagtagagaaagctcttcgagatgccaaacta

SEQ ID NO: 225582 - DNA, 950 bp, Homo Sapiens; identical to SEQ ID NO: 190999

SEQ ID NO: 225583 - DNA, 1191 bp, Homo Sapiens; identical to SEQ ID NO: 191000

SEQ ID NO: 225584 - DNA, 1184 bp, Homo Sapiens; identical to SEQ ID NO: 191001

SEQ ID NO: 225585 - DNA, 908 bp, Homo Sapiens; identical to SEQ ID NO: 191002

SEQ ID NO: 225586 - DNA, 1066 bp, Homo Sapiens; identical to SEQ ID NO: 191003

SEQ ID NO: 225587 - DNA, 1416 bp, Homo Sapiens; identical to SEQ ID NO: 191004

SEQ ID NO: 225588 - DNA, 895 bp, Homo Sapiens
  misc_feature (806)..(814): n is a, c, g, or t
ttggcgcgttaggaggctcgggtcgttgtggtgcgctgtcttcccgcttgcgtcagggacctgcccgactcagtggccgccatggcatcagatgaaggcaaactttttgttggagggctgagttttgacaccaatgagcagtcgctggagcaggtcttctcaaagtacggacagatctctgaagtggtggttgtgaaagacagggagacccagagatctcggggatttgggtttgtcacctttgagaacattgacgacgctaaggatgccatgatggccatgaatgggaagtctgtagatggacggcagatccgagtagaccaggcaggcaagtcgtcagacaaccgatcccgtgggtaccgtggtggctctgccgggggccggggcttcttccgtgggggccgaggacggggccgtgggttctctagaggaggaggggaccgaggctatggggggaaccggttcgagtccaggagtgggggctacggaggctccagagactactatagcagccggagtcagagtggtggctacagtgaccggagctcgggcgggtcctacagagacagttatgacagttacgctacacacaacgagtaaaaacccttcctgctcaagatcgtccttccaatggctgtgtgtttaaagattgtgggagcttcgctgaacgttaatgtgtagtaaatgcacctccttgtattcccactttcgtagtcatttcggttctgatcttgtcaaacccagcctgaccgcttctgacgccgggatggcctcgttactagacttttctttttaagaagtgctgnnnnnnnnngagggtttccaaacattttgaaaagcatttacttttttgaccacgagccatgagttttcaaaaaatccgggggtgtgtggg

SEQ ID NO: 225589 - DNA, 867 bp, Homo Sapiens; identical to SEQ ID NO: 191005

SEQ ID NO: 225590 - DNA, 885 bp, Homo Sapiens; identical to SEQ ID NO: 191006
  misc_feature (796)..(804): n is a, c, g, or t

SEQ ID NO: 225591 - DNA, 1524 bp, Homo Sapiens; identical to SEQ ID NO: 191008
  misc_feature (1176)..(1184): n is a, c, g, or t
  misc_feature (1267)..(1314): n is a, c, g, or t

SEQ ID NO: 225592 - DNA, 891 bp, Homo Sapiens; identical to SEQ ID NO: 191009
  misc_feature (823)..(832): n is a, c, g, or t

SEQ ID NO: 225593 - DNA, 712 bp, Homo Sapiens; identical to SEQ ID NO: 191012

SEQ ID NO: 225594 - DNA, 1103 bp, Homo Sapiens
  misc_feature (963)..(983): n is a, c, g, or t
ctttgtacaaaaaagttggtgtcctttctgcagctgcctttcagcacaggtggttccactgggggcagctaacgctgagtgacaaggatgggaagccacaggtgcattttactcaagtcttctctagtcaatgaggggcacccagtgcttctagggcaggctgggtggtggtcccctaggtatcagcctctcttactgtactctccgggaatgttaacctttctattttcagcctgtgccacctgtctaggcaagctggcttccccattggcccctgtgggtccacagcagcgtggctgccccccagggccaccgcttctttcttgatcctctttccttaacagtgacttgggcttgagtctggcaaggaaccttgcttttagcttcaccaccaaggagagaggttgacatgacctccccgccccctcaccaaggctgggaacagaggggatgtggtgagagccaggttcctctggccctctccagggtgttttccactagtcactactgtcttctccttgtagctaatcaatcaatattcttcccttgcctgtgggcagtggagagtgctgctgggtgtacgctgcacctgcccactgagttggggaaagaggataatcagtgagcactgttctgctcagagctcctgatctaccccaccccctaggatccaggactgggtcaaagctgcatgaaaccagaccctggcagcaacctggcaatggctggaggtgggagagaacctgacttctctttccctctccctcctccaacattactggaactctatcctgttaggatcttctgagcttgtttccctgctgggtgggacagaggacaaaggagaagggagggtctagaagaggcagcccttctttgtcctctggggtaaatgagcttgacctagagtaaatggagagaccaaaagcctctgatttttaatttccataaaatgttagaagnnnnnnnnnnnnnnnnnnnnnttctttaaatttttgagtctttgatatgtctaaaaatccattccctctgccctgaagcctgagtgagacacatgaagaaaactgtgtttcatttaaagatgttaattaaatgattgaaac

SEQ ID NO: 225595 - DNA, 924 bp, Homo Sapiens
gatagagcaatgcttttcctataatagccaactttgtacaaaaaagttggtgttttcctgcgcaggagccgcagggccgtaggcagccatggcgcccagccggaatggcatggtcttgaagccccacttccacaaggactggcagcggcgcgtggccacgtggttcaaccagccggcccgtaagatccgcagacgtaaggcccggcaagccaaggcgcgccgcatcgccccgcgccccgcgtcgggtcccatccggcccatcgtgcgctgccccacggttcggtaccacacgaaggtgcgcgccggccgcggcttcagcctggaggagctcagggtggccggcattcacaagaaggtggcccggaccatcggcatttctgtggatccgaggaggcggaacaagtccacggagtccctgcaggccaacgtgcagcggctgaaggagtaccgctccaaactcatcctcttccccaggaagccctcggcccccaagaagggagacagttctgctgaagaactgaaactggccacccagctgaccggaccggtcatgcccgtccggaacgtctataagaaggagaaagctcgagtcatcactgaggaagagaagaatttcaaagccttcgctagtctccgtatggcccgtgccaacgcccggctcttcggcatacgggcaaaaagagccaaggaagccgcagaacaggatgttgaaaagaaaaaataaagccctcctggggacttggaatcagtcggcagtcatgctgggtctccacgtggtgtgtttcgtgggaacaactgggcctgggatggggcttcactgctgtgacttcctcctgccaggggatttggggcctttcttgaaagacagtccaagccctggataatgctttactttctgtgttgaagcactgttggttgtttggt

SEQ ID NO: 225596 - DNA, 944 bp, Homo Sapiens; identical to SEQ ID NO: 191024

SEQ ID NO: 225597 - DNA, 1030 bp, Homo Sapiens
aaaatcaaatgttgcttataccagagaatgtatgacaatcacgggattcaagtgacaagcagtaagatctcaaaattaatactggtcaaaagataatgggaatatttttgcatttcactgaaaatacattgactactagaatacgaaatctagcaggaactcagggaaaaaaattacaaaatctaaagccaattacttaatatttcttattacctaaacaacagcatgacattaacagaaaactgcacctgcatttcaattgccaatctcacgttaattaagttctccaaaaatgaaatgcaaccaaaacgggttcaaactccaaatgaaagtctgcaaggctcagattaaaacatggaatgtttcagatgaaagtaataaaaacactattggttttgttctttattgaatggaataaaatgttgacatttctttgaaacttggaactactaaatttcatttttccaaatggttctacatttttttcttagtggtgcaagttgtcttaagtagcttaggaagtcaatctctacaaagtacttctgtctgttgccattctgataaaacaaaaactattcattaacttaaccatatgtgtattttttttgctataacacttaacacatgaacagacatctattatttctccactaaaacaaaagagtacaatagttttcttctaactatcagtattgtatttaaaaaaggttaacattaaaaacaaagaaccattattttctttgaaatcattaaatctccttgcacatcttaagtttccttcttctgtctgcgttcttctgccaatttattcagaaatttctttaatttctgataatgaggaaggctgctgcaatgagtattctttgcaacttcttcatttgtataaaagagtgaacacagcttacagtaaaaccctgttttaggtatcacatagtctatacctagaaatacaaacatacattcttacaaattaaactgaagattttatttagtattcacaatttcacccaacttttttgtacaaagttgg

SEQ ID NO: 225598 - DNA, 1512 bp, Homo Sapiens; identical to SEQ ID NO: 191026

SEQ ID NO: 225599 - DNA, 1278 bp, Homo Sapiens; identical to SEQ ID NO: 191028

SEQ ID NO: 225600 - DNA, 931 bp, Homo Sapiens; identical to SEQ ID NO: 191030

SEQ ID NO: 225601 - DNA, 1033 bp, Homo Sapiens
aactttgtacaaacgtcctggcactaactcaacaggccctgcacccatggcccctccaagagccccagggcccctgagcaagcagggctctggcagcagccagcccatggaggtgcaggaaggctatggctttgggtcaggagatgatccctactcaagtgcagagccccatgtgtcaggtgtgaaacggtcccgctcaggtgagggcgaggtgagcggccttatgcgcaaggtgccacgagtgagccttgaacgcctggacctggacctcacagctgacagccagccacccgtcttcaaggtcttcccaggcagtaccactgaggactacaaccttattgttattgaacgtggcgctgccgctgcagctaccggccagccagggactgcgcctgcaggaacccctggtgccccacccctggctggcatggccattgtcaaggaggaggagacggaggctgccattggagcccctcctactgccactgagggccctgagaccaaacctgtgcttatggctcttgcggagggtcctggtgctgagggtccccgcctggcctcacctagtggcagcaccagctcagggctggaggtggtggctcctgagggtacctcagccccaggtggtggcccgggaaccctggatgacagtgccaccatttgccgtgtctgccagaagccaggcgatctggttatgtgcaaccagtgtgagttttgtttccacctggactgtcacctgccggccctgcaggatgtaccaggggaggagtggagctgctcactctgccatgtgctccctgacctgaaggaggaggatggcagcctcagcctggatggtgcagacagcactggcgtggtggccaagctctcaccagccaaccagcggaaatgtgagcgtgtactgctggccctattctgtcacgaaccctgccgccccctgcatcagctggctaccgactccaccttctccctggaccagcccggtggcaccctggatctgaccctgatccgtgcccgcctccaggagaagttg

SEQ ID NO: 225602 - DNA, 1573 bp, Homo Sapiens; identical to SEQ ID NO: 191035

SEQ ID NO: 225603 - DNA, 1430 bp, Homo Sapiens
  misc_feature (814)..(844): n is a, c, g, or t
  misc_feature (903)..(917): n is a, c, g, or t
  misc_feature (1250)..(1284): n is a, c, g, or t
ttgtacaaaaaagttggcttctccacggccacaaaaaaaacagcccccccactccagtccttccccaaggatgcagcctcagccttctccacaccacgtttccccacagacaagttccccacatcctggactggtagctgcccaggccaaccccatggaacaagggcattttgccagcccggaccagaattcaatgctttctcagcttgctagcaatccaggcatggcaaacctccatggtgcaagcgccacggacctgggactcagcaccgataactcagacttgaattcaaacctctcacagagtacactagacatacactagagacaccttgtagtattttgggagcaaaaaaattattttctcttaacaagactttttgtactgaaaacaatttttttgaatctttcgtagcctaaaagacaattttccttggaacacataagaactgtgcagtagccgtttgtggtttaaagcaaacatgcaagatgaacctgagggatgatagaatacaaagaatatatttttgttatggctggttaccaccagcctttcttcccctttgtgtgtgtggttcaagtgtgcactgggaggaggctgaggcctgtgaagccaaacaatatgctcctgccttgcacctccaataggttttattattttttttaaattaatgaacatatgtaatattaatagttattatttactggtgcagatggttgacatttttccctattttcctcactttatggaagagttaaaacatttctaaaccagaggacaaaaggggttaatgttactttaaaattacattcnnnnnnnnnnnnnnnnnnnnnnnnnnnnnnntaaaataccagttttttttctctgggtgcaaagatgttcattcttttaaaaaatgtttnnnnnnnnnnnnnnnctgcctttcttcccctcaagtcaacttttgtgctccagaaaattttctattctgtaagtctgagcgtaaaacttcaagtattaaaataatttgtacatgtagagagaaaaatgactttttcaaaaatatacaggggcagctgccaaattgatgtattatatattgtggtttctgtttcttgaaagaatttttttcgttatttttacatctaacaaagtaaaaaaattaaaaagagggtaagaaacgattccggtgggatgattttaacatgcaaaatgtccctgggggtttcttctttgcttgctttcttcctccttaccctacccccccccnnnnnnnnnnnnnnnnnnnnnnnnnnnnnnnnnnntttctataaaacttgaaaatagcaaaaaccctcaactgttgtaaatcatgcaattaaagttgattacttataaatatgaactttggatcactgtatagactgttaaatttgatttcttattacctattgttaaataaactgtgtga

SEQ ID NO: 225604 - DNA, 979 bp, Homo Sapiens
  misc_feature (88)..(96): n is a, c, g, or t
  misc_feature (666)..(674): n is a, c, g, or t
ttgggtctattcatggtgaggagtacatcccagtgcctttaacctggatttctaatcttaagtgaaatgggtgcagcattcctttggnnnnnnnnntctttttattttcaagtgataattttgtgtttttctcatataagttttctccagagcacccaccttctcttccttcttggtctgtcattatattgcaaaatatttttcctctgaatgaaattatcacaggttgtctcaagcacaaccaactgaatgtctcttaactgtggggaccaaaagggagagagcctggggtctacaagaggagacacatcatcaaatgtttgaatgatcacaaattaagacattatcagcccagtaaatttcttgcttaatgtttttccaagttctggcttgaatatttcttattaaagctatcttatgtgggtattttattttgaaaggtattatagtttgtatatttaacagtaaggaggaaactgtaaccaaaattagtatttctctatacgtattggtacttgaagattcctttcaaaagaaatccagcgttttcctaattttagtacttaatttctctttttaatttaagtgatctttctaattcgaaagctgtgttctttttgaataccgtgcatgggggttaagctgatgttaaaacagtttgcaatnnnnnnnnntgaatcagcttaagtcatttaatcatttcaagtgcattctgcatcctttaaaaataagtttaagaaatttaagagaattgtgttttcattaagttttgcatatcttttgttatgccatgtaaattccctttttcgtatgattaaaggaaggttatgataaaatgattagttcatttacattcacttgtagcaattacatgagaatttgaattttgtcgtgtttgggtttgttcattcctgtgaatgatggtacagttagtgagattttctgttatggtacccaaactcaccatttggtcctcttt

SEQ ID NO: 225605 - DNA, 1338 bp, Homo Sapiens
ttggcgcggtcattttgagcccctgtctggatgacttcttgcggctgttctacccctccccctccccgcggtaccttgcacttttctccctccctgccccctctcgagtccaccctccgggccttctgcccctgatcgcttggttttccttgcagtcgcctgctgctgtcgtcgggaggaaagatgaatgggagggctgattttcgagagccgaatgcagaggttccaagaccaattccccacatagggcctgattacattccaacagaggaagaaaggagagtcttcgcagaatgcaatgatgaaagcttctggttcagatctgtgcctttggctgcaacaagtatgttgattactcaaggattaattagtaaaggaatactttcaagtcatcccaaatatggttccatccctaaacttatacttgcttgtatcatgggatactttgctggaaaactttcttatgtgaaaacttgccaagagaaattcaagaaacttgaaaattccccccttggagaagctttacgatcaggacaagcacgacgatcttcaccacctgggcactattatcaaaagtcaaaatatgactcaagtgtgagtggtcaatcatcttttgtgacatccccagcagcagacaacatagaaatgcttcctcattatgagccaattccattcagttcttctatgaatgaatctgctcccactggtattactgatcatattgtccaaggacctgatcccaaccttgaagaaagtcctaaaagaaaaaatattacatatgaggaattaaggaataagaacagagagtcatatgaagtatctttaacacaaaagactgacccctcagtcaggcctatgcatgaaagagtgccaaaaaaagaagtcaaagtaaacaagtatggagatacttgggatgagtgaaaaattacatcattggacatgaaggagtttcaacatccagcttcatctaggtggtcatgattacctgcatgctttgagctcagcagcagtcttcataaacacatttaaaacaagatcctgggtttttgtggtttgacttctatggtgttttaaaaaaacacagatttttagtggtaatattgtgtaaatgtactcaccttagggattcatttgaatgatggtattataccatgattgtatacagtttgtgaaattgttgcaagggcaaagataactcttaaaagaccgtcgagattacaatgctctagaatcagcatataagaaaataaatgatatctgcatgttgaattgggggtggatgggggggagcaagcataatttttaagtgtgagctttgcatcaagaaattattaaaaa

SEQ ID NO: 225606 - DNA, 1026 bp, Homo Sapiens
ttgggtccgtccgcccgtccgcccgcccagccatgactgcgccggtccccgcgccgcggatcctgttgccgttgctgttgctgctgctgctaacgccgcctccgggtgcacgtggtgaggtgtgtatggcttcccgtggactcagcctcttccccgagtcctgtccagatttctgctgtggtacctgtgatgaccaatactgctgctctgacgtgctgaagaaatttgtgtggagcgaggaaaggtgtgctgtgcctgaggccagcgtgcctgccagtgtagagccggtggagcagctgggctcggcgctgaggtttcgccctggctacaacgaccccatgtcagggttcggagcgaccttggccgttggcctgaccatctttgtgctgtctgtcgtcactatcatcatctgcttcacctgctcctgctgctgcctttacaagacgtgccgccgaccacgtccggttgtcaccaccaccacatccaccactgtggtgcatgccccttatcctcagcctccaagtgtgccgcccagctaccctggaccaagctaccagggctaccacaccatgccgcctcagccagggatgccagcagcaccctacccaatgcagtacccaccaccttacccagcccagcccatgggcccaccggcctaccacgagaccctggctggaggagcagccgcgccctaccccgccagccagcctccttacaacccggcctacatggatgccccgaaggcggccctctgagcattccctggcctctctggctgccacttggttatgttgtgtgtgtgcgtgagtggtgtgcaggcgcggttccttacgccccatgtgtgctgtgtgtgtccaggcacggttccttacgccccatgtgtgctgtgtgtgtcctgcctgtatatgtggcttcctctgatgctgacaaggtggggaacaaatccttgccagagtgggctgggaccagactttgttctcttcctcacctgaaattatgcttcctaaaatctcaagccaaactcaa

SEQ ID NO: 225607 - DNA, 1183 bp, Homo Sapiens; identical to SEQ ID NO: 191047

SEQ ID NO: 225608 - DNA, 1040 bp, Homo Sapiens; identical to SEQ ID NO: 191048

SEQ ID NO: 225609 - DNA, 638 bp, Homo Sapiens; identical to SEQ ID NO: 191052

SEQ ID NO: 225610 - DNA, 1181 bp, Homo Sapiens; identical to SEQ ID NO: 191053

SEQ ID NO: 225611 - DNA, 1303 bp, Homo Sapiens; identical to SEQ ID NO: 191062
  misc_feature (1146)..(1199): n is a, c, g, or t

SEQ ID NO: 225612 - DNA, 874 bp, Homo Sapiens
ttggcacacctgcctgctgtccccctgccccgcatgtctcttgtactcagccacaggctcacctatcaccctttccatttcccccttgcatttgatcctcatcttccccaggccattcagggtggtgggaagactggcctggtacctgggtgggggtaaatcaggggtgctgctattcccccagctacctggaccagccctgccttgagaccgtcaaccgcatcaagttgtacagtgagtccctggcccggtatggcaagagcccatatttatacccgctctacggcttgggcgagctgccccagggttttgcaagattgagtgccatctatggggggacatatatgctgaacaaacctgtggatgacatcatcatggagaacggcaaggtggtgggcgtgaagtctgagggagaggtggcccgctgcaagcagctgatctgtgaccccagctacatcccggaccgtgtgcggaaggctggccaggttatccgcatcatctgtatccttagccaccccatcaagaacaccaacgacgccaactcctgccaaataatcatcccccagaaccaggtcaacaggaagtcagacatctacgtgtgcatgatctcctatgcacacaacgtggcggcccagggcaagtacatagctattgccagcactactgtggagaccacggaccctgaaaaggaggtggagccggctctggagctgttggagcccattgaccagaagtttgtggctatcagtgacttgtatgaacccattgatgatggttgtgagagccaggtgttctgttcctgctcctacgatgccaccacacactttgagacaacctgcaacgacatcaaagacatctacaaacgcatggctgg

SEQ ID NO: 225613 - DNA, 1044 bp, Homo Sapiens; identical to SEQ ID NO: 191066

SEQ ID NO: 225614 - DNA, 1007 bp, Homo Sapiens; identical to SEQ ID NO: 191067

SEQ ID NO: 225615 - DNA, 684 bp, Homo Sapiens; identical to SEQ ID NO: 191068

SEQ ID NO: 225616 - DNA, 994 bp, Homo Sapiens; identical to SEQ ID NO: 191070

SEQ ID NO: 225617 - DNA, 702 bp, Homo Sapiens
  misc_feature (86)..(114): n is a, c, g, or t
aactcattagcattcagtgaaaagtaacagtcttttgtcacagagaatctgaaagtagcagcaaagacagagggctcatgacaggnnnnnnnnnnnnnnnnnnnnnnnnnnnnnaaagagtaaaagtactgatgcttctgatactggatgtttagcttcttactgcaaaaacataagtaaaacagtcaactttaccatttccgtattctccatagattgaagaaatttataccacatatcgcatatgaccatctttccatcaaatcaatgtagagataatgtaaactgaaaaaaaatctgcaagataatgtaactgaatgttttaaaaacagaacttgtcactttatataaaagaatagtatgctctatttcctgaatggatgtggaaatgaaagctagcgcacctcactttgaattcttgcttcttttttattactgttatgattttgctttttacagatgttggacgattttttcttctgattgttgaattcataatcatggtctcatttcctttgcttctttggaatatttctttgacacattcctttattttattatacattgtgtcctttttttagctattgctgctgttgttttttattctatctacaggatgatttttaaactgtcaaatgaagtagtgttaacctcaaataggctaaatgtgaacaaataaaaatacagcacatactcagatac

SEQ ID NO: 225618 - DNA, 1025 bp, Homo Sapiens
tgtacaaaaaagttgggattatgttacggacactgcacaaagatattgctagatataatcagatggactctacggaagatgcccaggaagaatttggctggaaacttgttcatggtgatatattccgtcctccaagaaaagggatgctgctatcagtctttctaggatccgggacacagattttaattatgacctttgtgactctatttttcgcttgcctgggatttttgtcacctgccaaccgaggagcgctgatgacgtgtgctgtggtcctgtgggtgctgctgggcacccctgcaggctatgttgctgccagattctataagtcctttggaggtgagaagtggaaaacaaatgttttattaacatcatttctttgtcctgggattgtatttgctgacttctttataatgaatctgatcctctggggagaaggatcttcagcagctattccttttgggacactggttgccatattggccctttggttctgcatatctgtgcctctgacgtttattggtgcatactttggttttaagaagaatgccattgaacacccagttcgaaccaatcagattccacgtcagattcctgaacagtcgttctacacgaagcccttgcctggtattatcatgggagggattttgccctttggctgcatctttatacaacttttcttcattctgaatagtatttggtcacaccagatgtattacatgtttggcttcctatttctggtgtttatcattttggttattacctgttctgaagcaactatacttctttgctatttccacctatgtgcagaggattatcattggcaatggcgttcattccttacgagtggctttactgcagtttatttcttaatctatgcagtacactacttcttttcaaaactgcagatcacgggaacagcaagcacaattctgtactttggttataccatgataatggttttgatcttctttcttttttacaggaacatttgccttctttgcatgcttttggtttgttaccaaata

SEQ ID NO: 225619 - DNA, 1380 bp, Homo Sapiens; identical to SEQ ID NO: 191079

SEQ ID NO: 225620 - DNA, 815 bp, Homo Sapiens; identical to SEQ ID NO: 191080

SEQ ID NO: 225621 - DNA, 672 bp, Homo Sapiens; identical to SEQ ID NO: 191085

SEQ ID NO: 225622 - DNA, 348 bp, Homo Sapiens
ctttgtacaaaaaagttgggtataggtagcctctcaaatccagactgtaagatgttgttttaggggctaaaggggagaaactgaaagtgttttactctttttctaaagtgttggtctttctaatgtagctatttttcttgttgcatcttttctacttcagtacacttggtgtactgggttaatggctagtactgtattggctctgtgaaaacatatttgtgaaaagagtatgtagtggcttcttttgaactgttagatgctgaatatctgttcacttttcaatcccaattctgtcccaatcttaccagatgctactggacttgaatggttaataaaactgcacagtgc

SEQ ID NO: 225623 - DNA, 992 bp, Homo Sapiens; identical to SEQ ID NO: 191089

SEQ ID NO: 225624 - DNA, 982 bp, Homo Sapiens; identical to SEQ ID NO: 191090

SEQ ID NO: 225625 - DNA, 989 bp, Homo Sapiens; identical to SEQ ID NO: 191092
  misc_feature (84)..(104): n is a, c, g, or t

SEQ ID NO: 225626 - DNA, 906 bp, Homo Sapiens
ttgggtccaccgcgcggagattctcagcttccccaggagcaagacctctgagcccgccaagcgcggccgcacggccctcggcagcgatggcactgaaggactacgcgctagagaaggaaaaggttaagaagttcttacaagagttctaccaggatgatgaactcgggaagaagcagttcaagtatgggaaccagttggttcggctggctcatcgggaacaggtggctctgtatgtggacctggacgacgtagccgaggatgaccccgagttggtggactcaatttgtgagaatgccaggcgctacgcgaagctctttgctgatgccgtacaagagctgctgcctcagtacaaggagagggaagtggtaaataaagatgtcctggacgtttacattgagcatcggctaatgatggagcagcggagtcgggaccctgggatggtccgaagcccccagaaccagtaccctgctgaactcatgcgcagattgtgagtggtctctgtcgggaaagatgtagggattggttctccaggatcttgtttgtgactgttttctccccttagtgagctgtattttcaaggccctagcagcaacaagcctcgtgtgatccgggaagtgcgggctgactctgtggggaagttggtaactgtgcgtggaatcgtcactcgtgtctctgaagtcaaacccaagatggtggtggccacttacacttgtgaccagtgtggggcagagacctaccagccgatccagtctcccactttcatgcctctgatcatgtgcccaagccaggagtgccaaaccaaccgctcagagggcggctgtatctgcagacacggggctccagattcatcaaattccaggagatgaagatgcaagaacatagtgatctggtgcctgtgggaaatat

SEQ ID NO: 225627 - DNA, 1128 bp, Homo Sapiens
  misc_feature (896)..(956): n is a, c, g, or t
ctttgtacaaaaaagttggcactaatcttgaatccaaataatagttttgaaatactggttgaccaatctgtggtgaatagtggaaatctgctcaatgacatgactcctcctgtaaatccttcacgtgaaattgaggacccagaagaccggaagcccgaggattgggatgaaagaccaaaaatcccagatccagaagctgtcaagccagatgactgggatgaagatgcccctgctaagattccagatgaagaggccacaaaacccgaaggctggttagatgatgagcctgagtacgtacctgatccagacgcagagaaacctgaggattgggatgaagacatggatggagaatgggaggctcctcagattgccaaccctagatgtgagtcagctcctggatgtggtgtctggcagcgacctgtgattgacaaccccaattataaaggcaaatggaagcctcctatgattgacaatcccagttaccagggaatctggaaacccaggaaaataccaaatccagatttctttgaagatctggaacctttcagaatgactccttttagtgctattggtttggagctgtggtccatgacctctgacattttttttgacaactttatcatttgtgctgatcgaagaatagttgatgattgggccaatgatggatggggcctgaagaaagctgctgatggggctgctgagccaggcgttgtggggcagatgatcgaggcagctgaagagcgcccgtggctgtgggtagtctatattctaactgtagcccttcctgtgttcctggttatcctcttctgctgttctggaaagaaacagaccagtggtatggagtataagaaaactgatgcacctcaaccggatgtgaaggaagaggaagaagagannnnnnnnnnnnnnnnnnnnnnnnnnnnnnnnnnnnnnnnnnnnnnnnnnnnnnnnnnnnnacagaaaagtgatgctgaagaagatggtggcactgtcagtcaagaggaggaagacagaaaatctaaagcagaggaggatgaaattttgagcagatcaccatgaaacagaaagccacgaagagagtgaaacaatcttaagagcttgatctgtgatttcttctccctcctcccc

SEQ ID NO: 225628 - DNA, 1037 bp, Homo Sapiens; identical to SEQ ID NO: 191102

SEQ ID NO: 225629 - DNA, 1272 bp, Homo Sapiens; identical to SEQ ID NO: 191104
  misc_feature (789)..(797): n is a, c, g, or t
  misc_feature (1092)..(1106): n is a, c, g, or t

SEQ ID NO: 225630 - DNA, 607 bp, Homo Sapiens; identical to SEQ ID NO: 191108
  misc_feature (233)..(247): n is a, c, g, or t

SEQ ID NO: 225631 - DNA, 728 bp, Homo Sapiens; identical to SEQ ID NO: 191109
  misc_feature (79)..(93): n is a, c, g, or t

SEQ ID NO: 225632 - DNA, 1048 bp, Homo Sapiens; identical to SEQ ID NO: 191111
  misc_feature (90)..(151): n is a, c, g, or t
  misc_feature (562)..(574): n is a, c, g, or t

SEQ ID NO: 225633 - DNA, 977 bp, Homo Sapiens; identical to SEQ ID NO: 191115

SEQ ID NO: 225634 - DNA, 1168 bp, Homo Sapiens
atgctttccttataaagccaactttgtacaaaaaagttggcggcattcactctgcaggatccatttgcccctacccagcatttagttttaaatcttttagatgcttggagagttcccttaaaactgtctgcagagttgttgatgagtataagactacctcccaaactgaaacagaatgaagtagctaatgtccagccttcttccaaaagagccagaattgaagacgtaccacctcccactaaaaagctaactccagaattgaccccttttgtgcttttcactggattcgagcctgtccaggttcaacagtatattaagaagctctacattcttggtggagaggttgcggagtctgcacagaagtgcacacacctcattgccagcaaagtgactcgcaccgtgaagttcctgacggcgatttctgtcgtgaagcacatagtgacgccagagtggctggaagaatgcttcaggtgtcagaagttcattgatgagcagaactacattctccgagatgctgaggcagaagtacttttctctttcagcttggaagaatccttaaaacgggcacacgtttctccactctttaaggcaaaatatttttacatcacacctggaatctgcccaagtctttccactatgaaggcaatcgtagagtgtgcaggaggaaaggtgttatccaagcagccatctttccggaagctcatggagcacaagcagaactcgagtttgtcggaaataattttaatatcctgtgaaaatgaccttcatttatgccgagaatattttgccagaggcatagatgttcacaatgcagagttcgttctgactggagtgctcactcaacgctggactatgaatcatataagtttaactgatggcgtctaggctgccgtgcatgtcgactcctgcggtgcggggctggctgtctggctggcgaggagctgctgcgcttccttcacatgctcttgttttccagctgctttcctgggggatcagactgtgtagcacgaagacagatataataaatatactgcatctttttaagatgtgcaatttttattctgaggaaacataaattatgtttttgtattatatgactttagagcccacattaagttttatgatttcatttgccaggtttttaatgttttcccaaactgttacagga

SEQ ID NO: 225635 - DNA, 1324 bp, Homo Sapiens
tttcccttcctttcccgagcaccaggtaaacatcccttgagtaaggtctgcacagggccagcccggggcgggagtcttagttaaggctttagacaggcaaggatgccggctctggacggacagatggatggaggcgcaggcggactcaggggctccttccttggttgggggagtcggcagccgccctgctcctgcagggccgttcctgtggctcgctgggacctgacaccgcccgcctccccccgccctgttctgagtcactcgctgtcggagagtgtctcgtactgcgagcagagcagtggcttgggctcctcgtcccaggcgtggtgggggccagcgaggggcccgctgcccgcggggaggcccggtgggggtggggaagccatgacacccgcctgcagccgcatgatcagggggttgtaggggaatggcgtggaacctgcggacgagggcctgtcctcccacacgcggttggtgagcggcgtccggcggttgcagtctccctccgagtgcactgaggagacagagggtggccggtccccagatgccaggcccggggccggggacttggcttttcggctgctgggtctgccagagaccttggccttcccgccgccacctggcgaggtgagtgtgtggtcactccgtccgtcagcagcggttatgggcatagcagcgggcaggctggcactggcattcagagggttaaaagcattggcgctgagcggcggggactcttcccactggtcatatttacccatgagtgcctttctaattatggcctccagccccatgttggtgctggcatgttcctgcaccgcctggcttctataggtcataaggcctgttccggtgatggcgggcatattgaagatctccgtcccaggctggctgatattgtattcaggctcattccggttgtgggtgttcagcttcttgttgatctcttgcttcttggacttgaccatggcggagttgctctcggtcagcttgctgaagaaggctggcggctggctggtgttgcctggagacttggagcccatcctgctgggctccgtctgttccccatcccggtacagcagcgggtacacagcactccgggagtgccctggctccgtcatgccctccggtggggacacaggttcaataccgtcctcaccaccacccaagaccgacgtcttgtttggctctggagacctcttgcccccttcgctgtggggggagccacgggccggggcaccatggtccgggggcgggaggtagaggtcactgggtgggcggcggaggtccaggacggggcagctggccccagggaaggagccaa

SEQ ID NO: 225636 - DNA, 874 bp, Homo Sapiens; identical to SEQ ID NO: 191125
  misc_feature (212)..(245): n is a, c, g, or t

SEQ ID NO: 225637 - DNA, 781 bp, Homo Sapiens
tttgtacaaaaaagttgggattttagggcccagggagaagtgtcagcttcaggcatcgcgaggcgtggcggccccatggccccgctgggaggcgccccgcggctggtactgctgttcagcggcaagaggaaatccgggaaggacttcgtgaccgaggcgctgcagagcagacttggagctgatgtctgtgctgtcctccggctctctggtccactcaaggaacagtatgctcaggagcatggcttgaacttccagagactcctggacaccagcacctacaaggaggcctttcggaaggacatgatccgctggggagaggagaaacgccaggctgacccaggcttcttttgcaggaagattgtggagggcatctcccagcccatctggctggtgagtgacacacggagagtgtctgacatccagtggtttcgggaggcctatggggccgtgacgcagacggtccgcgttgtagcgttggagcagagccgacagcagcggggctgggtgttcacgccaggggtggacgatgctgagtcagaatgtggcctggacaacttcggggactttgactgggtcatcgagaaccatggagttgaacagcgcctggaggagcagttggagaacctgatagaatttatccgctccagactttagtcactaggttctaggagtgagctggggcctgctgaggtgggggtggggctgactctgcaaaatgggggtgtcccccgatcctggccgaggtgaggaacagacagggggggtctagattctgaggggg

SEQ ID NO: 225638 - DNA, 962 bp, Homo Sapiens; identical to SEQ ID NO: 191128

SEQ ID NO: 225639 - DNA, 1258 bp, Homo Sapiens
  misc_feature (1116)..(1125): n is a, c, g, or t
ttggcctccgcgcgctgggacaggctgcttcttcgccagaaccaaccggttgcttgctgtcccagcggcgccccctcatcaccgtcgccatgcccggaggtctgcttctcggggacgtggctcccaactttgaggccaataccaccgtcggccgcatccgtttccacgactttctgggagactcatggggcattctcttctcccaccctcgggactttaccccagtgtgcaccacagagcttggcagagctgcaaagctggcaccagaatttgccaagaggaatgttaagttgattgccctttcaatagacagtgttgaggaccatcttgcctggagcaaggatatcaatgcttacaattgtgaagagcccacagaaaagttaccttttcccatcatcgatgataggaatcgggagcttgccatcctgttgggcatgctggatccagcagagaaggatgaaaagggcatgcctgtgacagctcgtgtggtgtttgtttttggtcctgataagaagctgaagctgtctatcctctacccagctaccactggcaggaactttgatgagattctcagggtagtcatctctctccagctgacagcagaaaaaagggttgccaccccagttgattggaaggatggggatagtgtgatggtccttccaaccatccctgaagaagaagccaaaaaacttttcccgaaaggagtcttcaccaaagagctcccatctggcaagaaatacctccgctacacaccccagccttaagtctcttggagaagctggtgctgtgagccagaggatgtcagctgccaattgtgttttcctgcagcaattccataaacacatcctggtgtcatcacagccaaggtttttaggttgctataccaatggcttattaaatgaaaatggcactaaaagtttcttgagattctttatactctctgccttcagcaatcaattccattcatacatcagcactctgctggttctgtttgaaatatgttctgtatttaaaactcaaatcttgttggatctctgcagggcttgtgaccaatgaagtcatatttgttgatggttgacaaagcttgcttcactccatcagagaatgactatcaannnnnnnnnnaactgtcctatcacgtcctctcctgtcacccattttgaagagtggcagaacttgaagttcaacttcctctgtaaatatccaagtataaagcccaggaacttctaggaatacccagatgcgctttaattttttt

SEQ ID NO: 225640 - DNA, 689 bp, Homo Sapiens; identical to SEQ ID NO: 191130
  misc_feature (98)..(106): n is a, c, g, or t

SEQ ID NO: 225641 - DNA, 1159 bp, Homo Sapiens; identical to SEQ ID NO: 191131
  misc_feature (1020)..(1028): n is a, c, g, or t

SEQ ID NO: 225642 - DNA, 1321 bp, Homo Sapiens
gggttgagcacagggtactttattgatggtacatgacaaggtgcggctccctaggcccctcccctcttcaaggggtctacatggcaactgtgaggaggggagattcagtgtggtgggggactgagtgtggcagggactccccagcagtgagggtctctctcttcctcttgtgctcttgctggggctggtggtccaggggtcttactccttggaggccatgtgggccatgaggtccaccaccctgttgctgtagccaaattcgttgtcataccaggaaatgagcttgacaaagtggtcgttgagggcaatgccagccccagcgtcaaaggtggaggagtgggtgtcgctgttgaagtcagaggagaccacctggtgctcagtgtagcccaggatgcccttgagggggccctccgacgcctgcttcaccacttcttgatgtcatcatatttggcaggtttttctagacggcaggtcaggtccaccactgacacgttggcagtggggacacggaaggccatgccagtgagcttcccgttcagctcagggatgaccttgcccacagccttggcagcgccagtagaggcagggatgatgttctggagagccccgcggccatcacgccacagtttcccggaggggccatccacagtcttctgggtggcagtgatggcatggactgtggtcatgagtccttccacgataccaaagttgtcatggatgaccttggccaggggtgctaagcagttggtggtgcaggaggcattgctgatgatcttgaggctgttgtcatacttctcatggttcacacccatgacgaacatgggggcatcagcagagggggcagagatgatgacccttttggctcccccctgcaaatgagccccagccttctccatggtggtgaagacgccagtggactccacgacgtactcagcgccagcatcgccccacttgattttggagggatctcgctcctggaagatggtgatgggatttccattgatgacaagcttcccgttctcagccttgacggtgccatggaatttgccatgggtggaatcatattggaacatgtaaaccatgtagttgaggtcaatgaaggggtcattgatggcaacaatatccactttaccagagttaaaagcagccctggtgaccaggcgcccaatacgaccaaatccgttgactccgaccttcaccttccccatggtgtctgagcgatgtggctcggctggcgacgcaaaagaagatgcggctgactgtcgaacagccaacttttttgtacaaagttggctttatgggaaaagcattgctcatcaat

SEQ ID NO: 225643 - DNA, 1266 bp, Homo Sapiens; identical to SEQ ID NO: 191132
  misc_feature (842)..(862): n is a, c, g, or t

SEQ ID NO: 225644 - DNA, 921 bp, Homo Sapiens
actttgtacaaaaaagttgggtggatattgttgccatcaatgaccccttcattgacctcaactacatggtttacatgttccaatatgattccacccatggcaaattccatggcaccgtcaaggctgagaacgggaagcttgtcatcaatggaaatcccatcaccatcttccaggagcgagatccctccaaaatcaagtggggcgatgctggcgctgagtacgtcgtggagtccactggcgtcttcaccaccatggagaaggctggggctcatttgcaggggggagccaaaagggtcatcatctctgccccctctgctgatgcccccatgttcgtcatgggtgtgaaccatgagaagtatgacaacagcctcaagatcatcagcaatgcctcctgcaccaccaactgcttagcacccctggccaaggtcatccatgacaactttggtatcgtggaaggactcatgaccacagtccatgccatcactgccacccagaagactgtggatggcccctccgggaaactgtggcgtgatggccgcggggctctccagaacatcatccctgcctctactggcgctgccaaggctgtgggcaaggtcatccctgagctgaacgggaagctcactggcatggccttccgtgtccccactgccaacgtgtcagtggtggacctgacctgccgtctagaaaaacctgccaaatatgatgacatcaagaaggtggtgaagcaggcgtcggagggccccctcaagggcatcctgggctacactgagcaccagtggtctcctctgacttcaacagcgacacccactcctccacctttgacgctggggctggcattgccctcaacgaccactttgtcaagctcatttcctggtatgacaacgaaatttggctacagcaacaaggtggtggacctca

SEQ ID NO: 225645 - DNA, 967 bp, Homo Sapiens; identical to SEQ ID NO: 191133

SEQ ID NO: 225646 - DNA, 767 bp, Homo Sapiens; identical to SEQ ID NO: 191134

SEQ ID NO: 225647 - DNA, 1484 bp, Homo Sapiens
ttggtgttttcaggccgggtctggcttggtcttcccccgtaaggaaatggccggggagctccaggggacccaggcgccgtcgcttcggcggagcctgggctgaccagccaggacagcggggtaaacccgaacaattctgcgcgaggtagggaggccatggcgtccggcagtaactggctctccggggtgaatgtcgtgctggtgatggcctacgggagcctggacttgaaagaggagattgatattcgactctccagggttcaggatatcaagtatgagccccagctccttgcagatgatgatgctagactactacaactggaaacccagggaaatcaaagttgctacaactatctgtataggatgaaagctctggatgccattcgtacctctgagatcccatttcattctgaaggccggcatccccgttccttaatgggcaagaatttccgctcctacctgctggatctgcgaaacactagtacgcctttcaagggtgtacgcaaagcactcattgatacccttttggatggctatgaaacagcccgctatgggacaggggtctttggccagaatgagtacctacgctatcaggaggccctgagtgagctggccactgcggttaaagcacgaattgggagctctcagcgacatcaccagtcagcagccaaagacctaactcagtcccctgaggtctccccaacaaccatccaggtgacatacctcccctccagtcagaagagtaaacgtgccaagcacttccttgaattgaagagctttaaggataactataacacattggagagtactctgtgacggagctgaaggactcttgccgtagattaagccagtcagttgcaatgtgcaagacaggctgcttgccgggccgccctcggaacatctggcccagcaggcccagactgtatccatccaagttcccgttgtatccagagttcttagagcttgtgtctaaagggtaattccccaacccttccttatgagcatttttagaacattggctaagactattttcccccagtagcgcttttttctggatttgcattcaggtgttattcttaatgtttctgtcaaagcttcttaaaaatcttcacttggtttcagccatagttcaccttccctgttccaggtttatttaattccaaaggtgagagttggagtgagatgtcttccatatctatacctttgtgcacagttgaatgggaactgtttgggtttagggcatcttaaagttgattgatggaaaaagcagacaggaactggtgggaggtcaagtggggaagtttggtgaatgtggaataacttacctttgtgctccacttaaaccagatgtgttgcagctttcctgacatgcaagatctactttaattcccacactctcattataaattgaataaaaggaatgtttttggcaccctgatattatctgccaggctatgtgacagttaggaaggaatggtttcccc

SEQ ID NO: 225648 - DNA, 980 bp, Homo Sapiens; identical to SEQ ID NO: 191135

SEQ ID NO: 225649 - DNA, 906 bp, Homo Sapiens
actttgtacaaaaaagttggcggtgtgctaagcgaggagtccgagtgtgtgagcttgagagccgcgcgctagagcgacccggcgagggatggcggccaccgggaccgcggccgccgcagccacgggcaggctcctgcttctgctgctggtggggctcacggcgcctgccttggcgctggccggctacatcgaggctcttgcagccaatgccggaacaggatttgctgttgctgagcctcaaatcgcaatgttttgtgggaagttaaatatgcatgtgaacattcagactgggaaatgggaacctgatccaacaggcaccaagagctgctttgaaacaaaagaagaagttcttcagtactgtcaggagatgtatccagagctacagatcacaaatgtgatggaggcaaaccagcgggttagtattgacaactggtgccggagggacaaaaagcaatgcaagagtcgctttgttacacctttcaagtgtctcgtgggtgaatttgtaagtgatgtcctgctagttccagaaaagtgccagtttttccacaaagagcggatggaggtgtgtgagaatcaccagcactggcacacggtagtcaaagaggcatgtctgactcagggaatgaccttatatagctacggcatgctgctcccatgtggggtagaccagttccatggcactgaatatgtgtgctgccctcagacaaagattattggatctgtgtcaaagaagaggagaggaagatgaagaggacgaggaagaggaagatgaagaggaagactatgatgtttataaaagtgaatttcctactgaagcagatctggaagacttcacagaagcagctgtggatgaggatgatgaggatgaggaagaagggaggaagtggtggaggaccgagattacta

SEQ ID NO: 225650 - DNA, 1122 bp, Homo Sapiens; identical to SEQ ID NO: 191140

SEQ ID NO: 225651 - DNA, 1332 bp, Homo Sapiens; identical to SEQ ID NO: 191144

SEQ ID NO: 225652 - DNA, 919 bp, Homo Sapiens; identical to SEQ ID NO: 191145
  misc_feature (706)..(757): n is a, c, g, or t

SEQ ID NO: 225653 - DNA, 941 bp, Homo Sapiens; identical to SEQ ID NO: 191146
  misc_feature (728)..(770): n is a, c, g, or t

SEQ ID NO: 225654 - DNA, 873 bp, Homo Sapiens; identical to SEQ ID NO: 191150
  misc_feature (122)..(139): n is a, c, g, or t
  misc_feature (152)..(205): n is a, c, g, or t

SEQ ID NO: 225655 - DNA, 791 bp, Homo Sapiens; identical to SEQ ID NO: 191151

SEQ ID NO: 225656 - DNA, 1092 bp, Homo Sapiens; identical to SEQ ID NO: 191152

SEQ ID NO: 225657 - DNA, 805 bp, Homo Sapiens
gagcaatgctttccttataatagccaactttgtacaaaaaagttggccaaagccacaggcaggtgcaggcgcagccgcggcgagagcgtgtggagccgagccgttagcgcgcgccgtcggtgagtcagtccgtccgtccgtccgtccgtcggggcgccgcagctcccgccaggcccagcggccccggcgcctcgtctccccgcacccggagccacccggtggagcgggccttgccgcggcagccatgtccatgggcctggagatcacgggcaccgcgctggccgtgctgggctggctgggcaccatcgtgtgctgcgcgttgcccatgtggcgcgtgtcggccttcatcggcagcaacatcatcacgtcgcagaacatctgggagggcctgtggatgaactgcgtggtgcagagcaccggccagatgcagtgcaaggtgtacgactcgctgctggcactgccacaggaccttcaggcggcccgcgccctcatcgtggtggccatcctgctggccgccttcgggctgctagtggcgctggtgggcgcccagtgcaccaactgcgtgcaggacgacacggccaaggccaagatcaccatcgtggcaggcgtgctgttccttctcgccgccctgctcaccctcgtgccggtgtcctggtcggccaacaccattatccgggacttctacaaccccgtggtgcccgaggcgcagaagcgcgagatgggcgcgggcctgtacgtgggctgggcggccgcgggcgctgcagctgctggggggcgcgctgctctgctgctcgtgtcccccacg

SEQ ID NO: 225658 - DNA, 1595 bp, Homo Sapiens; identical to SEQ ID NO: 191154

SEQ ID NO: 225659 - DNA, 945 bp, Homo Sapiens; identical to SEQ ID NO: 191155

SEQ ID NO: 225660 - DNA, 862 bp, Homo Sapiens; identical to SEQ ID NO: 191157

SEQ ID NO: 225661 - DNA, 504 bp, Homo Sapiens; identical to SEQ ID NO: 191158

SEQ ID NO: 225662 - DNA, 1144 bp, Homo Sapiens
atccgcctgtaagtcctcctcctcctgcttcccgccccgctcccgctcttcctgctcccgtgaagacaactccagggccaggcgcagatgctcttcaaagctgggtggaccgggggctgggggtgtcctgggaggggatcctgggcccctgggctctgtggacagctgcaggctttcctggagggcccgctccagctgaagctgttcctcataaaccgtggcctggggaggagggcgggcaccgggccgggtgttggtcagggcttcccagacggtcacctgctccgcctcagtgcccgcttcaagcaggctctgctggatggcgaactgcaggaggtcatcgtcctcgtcccggaggggctcgttgcgctccatgcccagcacgctgtacccgttgggcacttcaaacacggtggggtccacctcgcacgggaaagggttccctgatgcggcgacagcagagctgggggccggcacccacacggagctcaggggctcatcacagccacacaggttgctgaaggtgatgcgggcattgagcacgtggaaaaggggaatctcaattttgacggggaagccaggtggaaggcgcagagtgatgaagtcgcgcagcttggcaaagtgagcgttgctgatggccattaggtcgatgatgggggtcacctggtcacccagggagagcgggtgctcttcactcagccacagtgttgccttgaacctctgtactttgctggacatctcgatggggcggccaatgttccgtgactccaggctgaagttggggtcgaagtactcctcgacttgtcctgatcagagaggtgctccgtgcgtgtgcgtgtcaccagctccacgttggtggcactgtacaccttggcctcgtagccgctaacagtttccatcttctcagaccgccagccccagataccacatttgttcctctcaaaggccacattacgagtgtccaggtgggtggagacgataggagaggtgaggcgactggccacatgctcctcgctgggccgcatggcggccagcagtgtttcgggctcctgcagagtgagccccagtgtctccacatgcaccacctgccggtcatggtccacttccatcaccagggctcctgcctcctggcccttgaagccaa

SEQ ID NO: 225663 - DNA, 960 bp, Homo Sapiens
ttggagaatcgcgggcctgtctgcaagacttgagttcaggactcccaatccttcgccatccgaacctggagggcatccagtcgacacctacaggggtcggacatgtccaaggctaactgagaggccttccagacgcttcatttttgttgtttgggtttgcggcagggcacaaagaggatggcgggtgaaaaagttgagaagccagatactaaagagaagaaacccgaagccaagaaggttgatgctggtggcaaggtgaaaaagggtaacctcaaagctaaaaagcccaagaaggggaagccccattgcagccgcaaccctgtccttgtcagaggaattggcaggtattcccgatctgccatgtattccagaaaggccatgtacaagaggaagtactcagccgctaaatccaaggttgaaaagaaaaagaaggagaaggttctcgcaactgttacaaaaccagttggtggtgacaagaacggcggtacccgggtggttaaacttcgcaaaatgcctagatattatcctactgaagatgtgcctcgaaagctgttgagccacggcaaaaaacccttcagtcagcacgtgagaaaactgcgagccagcattacccccgggaccattctgatcatcctcactggacgccacaggggcaagagggtggttttcctgaagcagctggctagtggcttattacttgtgactggacctctggtcctcaatcgagttcctctacgaagaacacaccagaaatttgtcattgccacttcaaccaaaatcgatatcagcaatgtaaaaatcccaaaacatcttactgatgcttacttcaagaagaagaagctgcggaagcccagacaccaggaaggtgagatcttcgacacagaaaaagagaaatatgagattacggagcagcgcaagattgatcagaaagctgtggactcacaaattttaccaaaaatc

SEQ ID NO: 225664 - DNA, 956 bp, Homo Sapiens; identical to SEQ ID NO: 191159

SEQ ID NO: 225665 - DNA, 1353 bp, Homo Sapiens; identical to SEQ ID NO: 191160
  misc_feature (790)..(798): n is a, c, g, or t
  misc_feature (1234)..(1243): n is a, c, g, or t

SEQ ID NO: 225666 - DNA, 702 bp, Homo Sapiens; identical to SEQ ID NO: 191161

SEQ ID NO: 225667 - DNA, 1142 bp, Homo Sapiens
caagaaaatgcatgctcatttcagttcgtgtaaaactcacttcaaggagtaatcacgtttttcagtaattccccttggtaaagcacaagtttctttgctcaaaatttgatcattgaagacagagcatttgttaatggaagcataagacccacataagaaaatattatgactctggcaactgattcctcctgtttctacttttccgactatgatgagggcctttaacttgccatagtcccctctcattttctgtgattcatctccctgctgatgttgctgccgagtgtctttgcagtattggttaatcatctgcatttctgagtggctgaatgcccccatgatgtccttcgggtggaagggtaaagccctcacagagctggcccaggtccacggggaccatttgtccgtcacaacagccaccatttctgaatctaaaactttgaagttgatcttggctatggtctgcttgaaactattttctgtagcaatgcagtgataaagtccttggtcagaaccctgaacagagcggatcaggagtccctgtgaagtggctattattcgttcattcagcttaacctctttcctcctgtctttgtctttctgtaacagccacttgatagatgcctgcggagacttgggggcacactccagaaaagtggtgttattttttactccatactgcacaatttcagctgcatttctgtatgcttttagattaaatcctctgcattgagtcagtgggtttccatgtctcacatcttgtcttcggctcctccgtttcccagttgggtagaatctggaacaggaatggccatcccaggcgcaataagggtcccgcgccaggcagcagtcagcacaggctgtaccatagatgtggcagcggtgcagagatacctgggaaaccccttcattggaactcacatacaactgttgctttttagatgaaattttcattgttgttataggagcatgattcttaaagacttccagctcctccagaatgagctcgccactgacagagttgttagtaggaagaacaaccactttttgcacagtaccccgatctgttccgagaaacaggacatggtatctcccatcagcagcgttcactcgatccacagctatctttgtgtacttgccaa

SEQ ID NO: 225668 - DNA, 885 bp, Homo Sapiens
ccaactttgtacaaaaaggcttggccattccagaccaaaattgaaaaaatggttgacctcacccaggtaatggatgatgaagtattcatggcttttgcatcctatgcaacaattattctttcaaaaatgatgcttatgagtactgcaactgcattctatagattgacaagaaaggtttttgccaatccagaagactgtgtagcatttggcaaaggagaaaatgccaagaagtatcttcgaacagatgacagagtagaacgtgtacgcagagcccacctgaatgaccttgaaaatattattccatttcttggaattggcctcctgtattccttgagtggtcccgacccctctacagccatcctgcacttcagactatttgtcggagcacggatctaccacaccattgcatatttgacaccccttccccagccaaatagagctttgagtttttttgttggatatggagttactctttccatggcttacaggttgctgaaaagtaaattgtacctgtaaagaaaatcatacaactcagcatccagttggctttttaagaattctgtacttccaatttataatgaatactttcttagattttaggtaggaggggagcagaggaattatgaactggggtaaacccattttgaatattagcattgccaatatcctgtattcttgttttacatttggattagaaatttaacatagtaattcttaagtcttttgtctgatttttaaagtactttcttataaatttggatcatgttatgatttgtaacattcacacaacacctcacttttgaatctataaaagaattgcacgtatgagaaacctatatttcaatactgctgaaacagacatgaaataaagaatttaaagaatga

SEQ ID NO: 225669 - DNA, 1377 bp, Homo Sapiens
ctttgtacaaaaaagttgggcacattggcctccaggccctgcaccagttctgtgctcagcatggccggccacctcggccccgcaatgaggaggatgcagcagaactggtagccttagcacaggctgtgaatgctcgagccctgccagcagtgcagcaaaataacctggacgaggacctcatccggaagctggcatatgtggctgctggggatctggcacccataaacgccttcattgggggcctggctgcccaggaagtcatgaaggcctgctccgggaagttcatgcccatcatgcagtggctatactttgatgcccttgagtgtctccctgaggacaaagaggtcctcacagaggacaagtgcctccagcgccagaaccgttatgacgggcaagtggctgtgtttggctcagacctgcaagagaagctgggcaagcagaagtatttcctggtgggtgcgggggccattggctgtgagctgctcaagaactttgccatgattgggctgggctgcggggagggtggagaaatcatcgttacagacatggacaccattgagaagtcaaatctgaatcgacagtttcttttccggccctgggatgtcacgaagttaaagtctgacacggctgctgcagctgtgcgccaaatgaatccacatatccgggtgacaagccaccagaaccgtgtgggtcctgacacggagcgcatctatgatgacgattttttccaaaacctagatggcgtggccaatgccctggacaacgtggatgcccgcatgtacatggaccgccgctgtgtctactaccggaagccactgctggagtcaggcacactgggcaccaaaggcaatgtgcaggtggtgatccccttcctgacagagtcgtacagttccagccaggacccacctgagaagtccatccccatctgtaccctgaagaacttccctaatgccatcgagcacaccctgcagtgggctcgggatgagtttgaaggcctcttcaagcagccagcagaaaatgtcaaccagtacctcacagaccccaagtttgtggagcgaacactgcggctggcaggcactcagcccttggaggtgctggaggctgtgcagcgcagcctggtgctgcagcgaccacagacctgggctgactgcgtgacctgggcctgccaccactggcacacccagtactcgaacaacatccggcagctgctgcacaacttccctcctgaccagctcacaagctcaggagcgccgtttctggtctgggcccaaacgctgtccacacccgctcacctttgatgtcaacaatcccctgcatctggactatgtgatggctgctgccaacctgtttgcccgacctacgggctgacaggctctc

SEQ ID NO: 225670 - DNA, 1287 bp, Homo Sapiens; identical to SEQ ID NO: 191164

SEQ ID NO: 225671 - DNA, 1583 bp, Homo Sapiens; identical to SEQ ID NO: 191165

SEQ ID NO: 225672 - DNA, 891 bp, Homo Sapiens
tttgtacaaaaaagttggggtcagagctcgagccagcggcgcccggagagattcggagatgcaggcggctcggatggccgcgagcttggggcggcagctgctgaggctcgggggcggaagctcgcggctcacggcgctcctggggcagccccggcccggccctgcccggcggccctatgccgggggtgccgctcagctggctctggacaagtcagattcccacccctctgacgctctgaccaggaaaaaaccggccaaggcggaatctaagtcctttgctgtgggaatgttcaaaggccagctcaccacagatcaggtgttcccatacccgtccgtgctcaacgaagagcagacacagtttcttaaagagctggtggagcctgtgtcccgtttcttcgaggaagtgaacgatcccgccaagaatgacgctctggagatggtggaggagaccacttggcagggcctcaaggagctgggggcctttggtctgcaagtgcccagtgagctgggtggtgtgggcctttgcaacacccagtacgcccgtttggtggagatcgtgggcatgcatgaccttggcgtgggcattaccctgggggcccatcagagcatcggtttcaaaggcatcctgctctttggcacaaaggcccagaaagaaaaatacctccccaagctggcatctggggagactgtggccgctttctgtctaaccgagccctcaagcgggtcagatgcagcctccatccgaacctctgctgtgcccagcccctgtggaaaatactataccctcatggaagcaagctttggatcagcaacctgcctcccatttctccccttctcctccgcccaattccaggccccactgctccccgtcctccacgccctgaatatccc

SEQ ID NO: 225673 - DNA, 1396 bp, Homo Sapiens; identical to SEQ ID NO: 191169

SEQ ID NO: 225674 - DNA, 555 bp, Homo Sapiens
ctttgtacaaaaaagttggggcctttaccgtccctttgacgagaccgtcaataggtacaagcaatcccgggacatctccaccctcaacagtggcaagaagagcctggagactgaacacaaggccttgaccagtgagattgcactgctgcagtccaggctgaagacagagggctctgatctgtgcgacagagtgagcgaaatgcagaagctggatgcacaggtcaaggagctggtgctgaagtcggcggtggaggctgagcgcctggtggctggcaagctcaagaaagacacgtacattgagaatgagaagctcatctcaggaaagcgccaggagctggtcaccaagatcgaccacatcctggatgccctgtagcccctgcccgcatcctccagggggcccagggtgcctgcactttgctgtggcaggcagattgggtggtagtgggaggttgtgcatggaggccagtgaaagctgacatctgtaaaaggccttcaaggaagagaaaccaggccctgcgtcaggcagtgtgagtttgccgtttgtccttaactttc

SEQ ID NO: 225675 - DNA, 1411 bp, Homo Sapiens; identical to SEQ ID NO: 191170

SEQ ID NO: 225676 - DNA, 1542 bp, Homo Sapiens; identical to SEQ ID NO: 191171

SEQ ID NO: 225677 - DNA, 889 bp, Homo Sapiens
agcaatgcttttcttttaaaagccaactttgtacaaaaaagttggcttcagcctcccacagcgcagggtcccagcatctccacgcgcgcccgtgggaggtgggtccggccggagaggcctcccgcggacgccgtctctccagaactccgcttccaagagggagcctttggctgctttctctccttaaacttagatcaaattttttggtttttaatcagttatcttgggaacttaacctggcccctcacctcttctgcaccccccgcccccgaaactgtctcgtaatgaatttctgctgtcctcctgggagtggacggccgggtcccgtcccccgggagcatcgctcggctcagcaccttggctcccagtgggggccccgtggagggcgcccgtagtgataagcacaccggcacgaacgtcaggtccattcctcgaagtcggagccctcactctgccctgtcctggggctggctgagggcgaacgccccacctcactttctagagccctgtctgtcctagctcctatctgaccttgtgtgtaaatacgtacatctgtttttaaagtggatgggcccctgagaactcagtgaaatgcagagttctccatgcacctaaagctcctttgtcgctctcatggctgtcagatcctggtccctccacactgggtgctggggagggaggaccctcggggctaccgcgcgcccccccatcccacagatccgagccaaggagggagaacagggcagcctgtggggactctaagatgcttcagaagaagcgacggcaccgtcaaccctctgttttttaaaggtggttgggagactgttaacactgagctcattgacttctagagattttatttttactgggtgatctcttggtgggtttc

SEQ ID NO: 225678 - DNA, 630 bp, Homo Sapiens
taaaagccaactttgtacaaaaaagttggatcacataagttttcctcatctgttgtgatatacaccaatggataaactaacggaaactgctttttgacattaaaagacaggagaaattatatttaactaagtaaaagttaagtcagaattacttgggtgatgtgattcaatttagttaaaggatgatatagagaaaatacattatttagcattatttcttcagctataatgaattgctatagaaatcaggcagatctttctaatgtgtattgattggtcttttcagctactctgaacagattactaaggccatctcctcatctctaagggagaaaaatagtctgtagatgaataatgtaaggtaaagagttgcatgtcagtctttgtaattatttacactttaactttctccagaactcagacatgatttcaacatggtgttagatttgtgcattttattttcctgaccacctcattccagccaatgtatggttatccactctgtgtgccaaaaccaatcatgcctttcacggccctttagttcagagaagttctgcactgatttttagtctcttgatgtctcaatcttacatgtataccaatcacaatggaataaagtgttgagttgta

SEQ ID NO: 225679 - DNA, 861 bp, Homo Sapiens; identical to SEQ ID NO: 191177
  misc_feature (103)..(151): n is a, c, g, or t

SEQ ID NO: 225680 - DNA, 1133 bp, Homo Sapiens; identical to SEQ ID NO: 191179

SEQ ID NO: 225681 - DNA, 901 bp, Homo Sapiens
aagtttcttcagtgatcttctctctaagaaaacaccatcaccttccatgtgccttacagaggcccccttgcgatgtgctgcattgcttttgcgcactcccttgatgatgaaagatggtcccaataatgatgcccaccagacccacagtcaggcccagggcacacaccacgttctctgtagtctctgggagagggcttggagcatcaaactcccagtgcttgagaagaggctcatccaagccccagtgctccaccctgcagtcgtaaacgtcctcagttgagggcaggaaggggagatagtggaacttgcggaaaaggtggtcttccctgggcaggaagactgtctctgacactcctgtggtgacaggttttccatttcgaagccacgtgacattgaccactggtggggtgaacttgtcgatgaaacagatgaggacgttgggctctctcagttccacagggctgttcgtgagcacagttacctctggaggtacattggtgatcggagtatagttggagcgctttgtcatgatttccaggttggctttgtccacagctatgttggccaatgcaccttgagcctcaaagctggcaaatcgtccaaattcttcaagccgccagaccgtctccttctttgccatatccacatggaaaatctcatcaccatcaaagtcaaacataaactcgcctgattggtcaggattcagatagaactcggcctggatgatcacatgttcttctttgatagcccatgattcctgagcgctcatcagcacagctatgatgaaaaatcctagcacagggactccacttatggccattttcttcttgggcgctcttttgggagtcagtagagctcgggagtgaggcagaacagacaagaataaaagaaaagagaattt

SEQ ID NO: 225682 - DNA, 996 bp, Homo Sapiens; identical to SEQ ID NO: 191182

SEQ ID NO: 225683 - DNA, 1073 bp, Homo Sapiens; identical to SEQ ID NO: 191183

SEQ ID NO: 225684 - DNA, 945 bp, Homo Sapiens; identical to SEQ ID NO: 191184

SEQ ID NO: 225685 - DNA, 1502 bp, Homo Sapiens; identical to SEQ ID NO: 191188

SEQ ID NO: 225686 - DNA, 1077 bp, Homo Sapiens
tacaaaaaagttggcgcggggaccatgcagcggaggtgggtcttcgtgctgctcgacgtgctgtgcttactggtcgcctccctgcccttcgctatcctgacgctggtgaacgccccgtacaagcgaggattttactgcggggatgactccatccggtacccctaccgtccagataccatcacccacgggctcatggctggggtcaccatcacggccaccgtcatccttgtctcggccggggaagcctacctggtgtacacagaccggctctattctcgctcggacttcaacaactacgtggctgctgtatacaaggtgctggggaccttcctgtttggggctgccgtgagccagtctctgacagacctggccaagtacatgattgggcgtctgaggcccaacttcctagccgtctgcgaccccgactggagccgggtcaactgctcggtctatgtgcagctggagaaggtgtgcaggggaaaccctgctgatgtcaccgaggccaggttgtctttctactcgggacactcttcctttgggatgtactgcatggtgttcttggtgctgtatgtgcaggcacgactctgttggaagtgggcacggctgctgcgacccacagtccagttcttcctggtggcctttgccctctacgtgggctacacccgcgtgtctgattacaaacaccactggagcgatgtccttgttggcctcctgcagggggcactggtggctgccctcactgtctgctacatctcagacttcttcaaagcccgacccccacagcactgtctgaaggaggaggagctggaacggaagcccagcctgtcactgacgttgaccctgggcgaggctgaccacaaccactatggatacccgcactcctcctcctgaggcccggacccccgcccaggcagggagctgctgtgagtccagctgaggcccacccaggtggtccctccagccctgttaggcactgagggctctggacgggctccaggaaccctgggctgatgggagcagtgagcgggctccgctgccccctgccctgcactggaccaggagtctggagatgcctgg

SEQ ID NO: 225687 - DNA, 540 bp, Homo Sapiens
  misc_feature (393)..(425): n is a, c, g, or t
ttgggtgtgtgtgtgccggggggggttcccagatattcagggcaagggaccagtcggaagggattctggctattgggggagcccagagacaggggaaggcagcctgtccatctgtgcataaggagaggaaagttccagggtgtgtatgtttcaggggcttcacatggaggagctgcagatagatatgtgtttctgtgtatgtgtatgtctgcctttttttctaagtgggggcttctacaggcttttgggaagtagggtggatgtgggtagggctgggaggagggggccacagcttaggtttggagctctggatgtacatacataagtaggagcagtgggacgtgtttctgtcataatgcaggcatgaagggtggagtgaagtcaggtcataannnnnnnnnnnnnnnnnnnnnnnnnnnnnnnnnaatgtatgtagcagatgttacagtcttagggatccgggatgggagaccccactttagaaagggtcgtcactcctttaatcctctactcaacaatgtactcttttacttttatatt

SEQ ID NO: 225688 - DNA, 1052 bp, Homo Sapiens
ttggcgggagggtcctcagctaaagccaaaagcagatcaaagtggtgggactcgcgtcgcggccgcggagacgtgaagctctcgaggctcctcccgctgcgggtcggcgctcgccctcgctctcctcgccctccgccccggccccggccccgcgcccgccatggagaagactgagctgatccagaaggccaagctggccgagcaggccgagcgctacgacgacatggccacctgcatgaaggcagtgaccgagcagggcgccgagctgtccaacgaggagcgcaacctgctctccgtggcctacaagaacgtggtcgggggccgcaggtccgcctggagggtcatctctagcatcgagcagaagaccgacacctccgacaagaagttgcagctgattaaggactatcgggagaaagtggagtccgagctgagatccatctgcaccacggtgctggaattgttggataaatatttaatagccaatgcaactaatccagagagtaaggtcttctatctgaaaatgaagggtgattacttccggtaccttgctgaagttgcgtgtggtgatgatcgaaaacaaacgatagataattcccaaggagcttaccaagaggcatttgatataagcaagaaagagatgcaacccacacacccaatccgcctggggcttgctcttaacttttctgtattttactatgagattcttaataacccagagcttgcctgcacgctggctaaaacggcttttgatgaggccattgctgaacttgatacactgaatgaagactcatacaaagacagcaccctcatcatgcagttgcttagagacaacctaacactttggacatcagacagtgcaggagaagaatgtgatgcggcagaaggggctgaaaactaaatccatacagggtgtcatccttctttccttcaagaaacctttttacacatctccattcctttattcaccttggatttcctatagcaaagaaacccattccatgtgtatggaatcaactgttatagtcttttccactgcagcttttgggaaaact

SEQ ID NO: 225689 - DNA, 1158 bp, Homo Sapiens; identical to SEQ ID NO: 191199

SEQ ID NO: 225690 - DNA, 1300 bp, Homo Sapiens; identical to SEQ ID NO: 191200

SEQ ID NO: 225691 - DNA, 863 bp, Homo Sapiens; identical to SEQ ID NO: 191202

SEQ ID NO: 225692 - DNA, 1180 bp, Homo Sapiens
ttggcgacgagatttgtctcacaaggagaaactctacctgagagagctaaatgtcattactgaaactcagtgcactctaggcttaacagcattgcgcagtgatgaagtgattgatttaatgataaaagaatatccagccaaacatgctgagtattctgttattctacaagaaaaagaacgtcaacgaattacagaccattataaagagtattcccaaatgcaacaacagaatactcagaaagttgaagccagtaaagtgcctgagtatattaagaaagctgccaaaaaagcagcagaatttaatagcaacttaaaccgggaacgcatggaagaaagaagagcttattttgacttgcagacacatgttatccaggtacctcaagggaagtacaaagttttgccaacagagcgaacaaaggtcagttcttacccagtggctctcatccccggacagttccaggaatattataagaggtactcaccagatgagctgcggtatctgccattaaacacagccctgtatgagccccctctggatcctgagctccctgctctagacagtgatggtgattcagatgatggcgaagatggtcgaggtgatgagaaacggaaaaataaaggcacttcggacagctcctctggcaatgtatctgaaggggaaagccctcctgacagccaggaggactctttccagggaagacagaaatcaaaagacaaagctgccactccaagaaaagatggtcccaaacgttctgtactgtccaagtcagttcctgggtacaagccaaaggtcattccaaatgctatatgtggaatttgtctgaagggtaaggagtccaacaagaaaggaaaggctgaatcacttatacactgctcccaatgtgagaatagtggccatccttcttgcctggatatgacaatggagcttgtttctatgattaagacctacccatggcagtgtatggaatgtaaaacatgcattatatgtggacaaccccaccatgaagaagaaatgatgttctgtgatatgtgtgacagaggttatcatacttttttgtgtgggccttggtgctattccatcaggtcgctggatttgtgactgttgtcagcgggcccccccaacacccaggaaagtgggcagagggggaaaaaccgcaaagagggataaaatagtttttga

SEQ ID NO: 225693 - DNA, 1312 bp, Homo Sapiens
ctttgtacaaaaaagttggctaagatggaagcgtttttggggtcgcggtccggactttgggcggggggtccggccccaggacagttttaccgcattccgtccactcccgattccttcatggatccggcgtctgcactttacagaggtccaatcacgcggacccagaaccccatggtgaccgggacctcagtcctcggcgttaagttcgagggcggagtggtgattgccgcagacatgctgggatcctacggctccttggctcgtttccgcaacatctctcgcattatgcgagtcaacaacagtaccatgctgggtgcctctggcgactacgctgatttccagtatttgaagcaagttctcggccagatggtgattgatgaggagcttctgggagatggacacagctatagtcctagagctattcattcatggctgaccagggccatgtacagccggcgctcgaagatgaaccctttgtggaacaccatggtcatcggaggctatgctgatggagagaggttcatatgaatacaaataacttatttcctttaccacccaacctagtacctgtgtagtatctcttctgtctcttctccccaagtgaatcccactttaactcagaccccatggtccccttcttcagctaagatgaacctaaggtgaaatgagttttgacccattgtgtcctgttagcttcctcggttatgtggacatgcttggtgtagcctatgaagccccttcgctggccactggttatggtgcatacttggctcaggtaagtagtaagtctagaggtgggggaaagggaagacaaaaggaaatggattagtggttgtctgcttttctcctgaaattctgatatgagggatgggctgggatcgctattactgggcagatggttttctttgtagtctgggggctgtaggtgttgacactgattccagtgacaagatgacatgactgggagtcagtagacatgcaaagagaggacaccctagaacttcttcctgaagtggctcttagcttattttctaagcagagttcattctggtgaggcaagaagtagaatgtcatctttcactctaatgctttttataccatagatttgagacaactagcctgttattcagcccaatatccccccatggttttcccccaatctccctagcctctgctgcgagaagttctggagaagcagccagtgctaagccaggaccgaggcccgcgacttagtagaacgctgcatgcgagtgctgtactaccgagatgcccgttcctaacaaccggtttcaaatcgccactgtcaccgaaa

SEQ ID NO: 225694 - DNA, 940 bp, Homo Sapiens; identical to SEQ ID NO: 191208

SEQ ID NO: 225695 - DNA, 1555 bp, Homo Sapiens; identical to SEQ ID NO: 191210
  misc_feature (642)..(651): n is a, c, g, or t
  misc_feature (1102)..(1124): n is a, c, g, or t

SEQ ID NO: 225696 - DNA, 824 bp, Homo Sapiens; identical to SEQ ID NO: 191212
  misc_feature (105)..(114): n is a, c, g, or t
  misc_feature (565)..(588): n is a, c, g, or t

SEQ ID NO: 225697 - DNA, 1117 bp, Homo Sapiens; identical to SEQ ID NO: 191214
  misc_feature (279)..(288): n is a, c, g, or t
  misc_feature (739)..(758): n is a, c, g, or t

SEQ ID NO: 225698 - DNA, 971 bp, Homo Sapiens; identical to SEQ ID NO: 191215
  misc_feature (301)..(325): n is a, c, g, or t

SEQ ID NO: 225699 - DNA, 1616 bp, Homo Sapiens; identical to SEQ ID NO: 191217
  misc_feature (755)..(764): n is a, c, g, or t
  misc_feature (1215)..(1239): n is a, c, g, or t

SEQ ID NO: 225700 - DNA, 1224 bp, Homo Sapiens; identical to SEQ ID NO: 191218

SEQ ID NO: 225701 - DNA, 909 bp, Homo Sapiens
  misc_feature (405)..(450): n is a, c, g, or t
tgggagctgtcaccccccaagggccaccagaagcgcaaggccctcaagaccacagtcatcctcatcctggctttcttcgcctgttggctgccttactacattgggatcagcatcgactccttcatcctcctggaaatcatcaagcaagggtgtgagtttgagaacactgtgcacaagtggatttccatcaccgaggccctagctttcttccactgttgtctgaaccccatcctctatgctttccttggagccaaatttaaaacctctgcccagcacgcactcacctctgtgagcagagggtccagcctcaagatcctctccaaaggaaagcgaggtggacattcatctgtttccactgagtctgagtcttcaagttttcactccagctaacacagatgtaaaagnnnnnnnnnnnnnnnnnnnnnnnnnnnnnnnnnnnnnnnnnnnnnncagatataaaagactgaccaatattgtacagtttttattgcttgttggatttttgtcttgtgtttctttagtttttgtgaagtttaattgacttatttatataaattttttttgtttcatattgatgtgtgtctaggcaggacctgtggccaagttcttagttgctgtatgtctcgtggtaggactgtagaaaagggaactgaacattccagagcgtgtagtgaatcacgtaaagctagaaatgatccccagctgtttatgcatagataatctctccattcccgtggaacgtttttcctgttcttaagacgtgattttgctgtagaagatggcacttataaccaaagcccaaagtggtatagaaatgctggtttttcagttttcaggagtgggttgatttcagcacctacagtgtacagtcttgtattaagttgttaataaaagtacatgttaaactta

SEQ ID NO: 225702 - DNA, 1377 bp, Homo Sapiens; identical to SEQ ID NO: 191220
  misc_feature (1150)..(1195): n is a, c, g, or t

SEQ ID NO: 225703 - DNA, 582 bp, Homo Sapiens; identical to SEQ ID NO: 191223
  misc_feature (47)..(70): n is a, c, g, or t

SEQ ID NO: 225704 - DNA, 912 bp, Homo Sapiens; identical to SEQ ID NO: 191225

SEQ ID NO: 225705 - DNA, 830 bp, Homo Sapiens; identical to SEQ ID NO: 191226
  misc_feature (67)..(90): n is a, c, g, or t

SEQ ID NO: 225706 - DNA, 1012 bp, Homo Sapiens; identical to SEQ ID NO: 191227

SEQ ID NO: 225707 - DNA, 961 bp, Homo Sapiens
aaaaaaatttttcctagtcgttattaagctttcggacaccataatacaatagaacagaaaaagtatgttaaaagaaaaatattaggtagaatgttgtaaaacttttaatttacccatcatatttaacatttccaagactattttcctgcgcctcatctgccctcagagagaatgatccccacagtgatgaggggtcagcactctgaaagccagttgacgccagacaagctgctggaacagctggggcacagctccgcctctcctccagcccctcggtcccatgaggccaaacaatgaggacagaggggctgaggggtgtgtccagggcccagtcccacctcagcaggaaggtggcgtcagcactcgcagtcccagcctcacgccgcatcgcagtcccgggggatcttcacacagggagggtgagctggttaagaaggcgggtgatcctccccccggatgcttcgatacttagccatgtcttccggaaatactttagaaagttcttgaatcaacaggcttttaaatttcttcatggtgtcgatcttgcctttaacttgctcatttttagctagagccctctccaggcactctttggtgtagagctggggatttcgaccttgatctatatattcaaaaacttctaacggtacagtaatatcatgaagctgctgtctgcacttgtcaatatcctgtaagccagtaacaataaaattcagcttttggttgagcccggcctggctgctgggctggaagtcactgacgatgatgccgagctgccgaatgttctccacgaacttctccaggtgctcctctaggtggtcaaacttctccgccatcgcctcggcccgtcccccacccatttacctcttaacggtttcacgccctcttgaactctctcttcaaagttcttttcaactttcccttacggtagtggttgtcgtcggggctaacttttttgtac

SEQ ID NO: 225708 - DNA, 851 bp, Homo Sapiens; identical to SEQ ID NO: 191228

SEQ ID NO: 225709 - DNA, 942 bp, Homo Sapiens; identical to SEQ ID NO: 191230

SEQ ID NO: 225710 - DNA, 624 bp, Homo Sapiens; identical to SEQ ID NO: 191236
  misc_feature (527)..(552): n is a, c, g, or t

SEQ ID NO: 225711 - DNA, 920 bp, Homo Sapiens
actttgtacaaaaaagttggcgcggtgcgacgaaggagtaggtggtgggatctcaccgtgggtccgattagccttttctctgccttgcttgcttgagcttcagcggaattcgaaatggctggcggtaaggctggaaaggactccggaaaggccaagacaaaggcggtttcccgctcgcagagagccggcttgcagttcccagtgggccgtattcatcgacacctaaaatctaggacgaccagtcatggacgtgtgggcgcgactgccgctgtgtacagcgcagccatcctggagtacctcaccgcagaggtacttgaactggcaggaaatgcatcaaaagacttaaaggtaaagcgtattacccctcgtcacttgcaacttgctattcgtggagatgaagaattggattctctcatcaaggctacaattgctggtggtggtgtcattccacacatccacaaatctctgattgggaagaaaggacaacagaagactgtctaaaggatgcctggattccttgttatctcaggactctaaatactctaacagctgtccagtgttggtgattccagtggactgtatctctgtgaaaaacacaattttgcctttttgtaattctatttgagcaagttggaagtttaattagctttccaaccaaccaaatttctgcattcgagtcttaaccatatttaagtgttactgtggcttcaaagaagctattgattctgaagtagtgggttttgattgagttgactgtttttaaaaaactgtttggattttaattgtgatgcagaagttatagtaacaaacatttggttttgtacagacattatttccactctggtggataagttcaataaaggtcatatcccaaattagttgtgtataaatttgcttggttgtaataagaaacttgtttt

SEQ ID NO: 225712 - DNA, 823 bp, Homo Sapiens
ctttgtacaaaaaagttggagaatctatccgttaatgattttgcctacatgaagaagagagaagaggagatgcgtgataccaacgagtcaacaaacactcgggtcctatacttcagcatcttttcaatgttctgtctcattggactagctacctggcaggtcttctacctgcgacgcttcttcaaggccaagaaattgattgagtaatgaatgaggcatattctcctcccaccttgtacctcagccagcagaacatcgctgggacgtgcctggcctaaggcatcctaccaacagcaccatcaaggcacgttggagctttcttgccagaactgatctcttttggtgtgggaggacatggggtaccacctacacccaacaagtcaatgagggacttctttttaatttggtaggattttgactggttttgcaacaataggtctattattagagtcacctatgacaaaaaataggggttacctagataatgccaaagtcagcatttgtcctgggttcccttgtgtgatctgtttggactatgttttcttttcttctcccacttgctcagcagcttgggcttccattctagttcttttaccaagatttttgtgtgaccatgttgacttcatttggattgccctctttcaatttccttgtgaaaacacccttaactttctctttaccccttagctgaaatgtttacatagcttctggtgatatcttttcatgattttatatctcttaaaatggtgatggatgtgacacctcataaagtgaactttgaactgtagataactcttaaagaaaaatgtctttttagacaatt

SEQ ID NO: 225713 - DNA, 868 bp, Homo Sapiens
tgtacaaaaaagttggctagcatgtgataatagagtaaactaaaactattttcagcttttctcaattaacattttggtagtatacttcagagtgatgttatctaagtttaagtagtttaagtatgttaaatgtggatcttttacaccacatcacagtgaacacactggggagacgtgcttttttggaaaactcaaaggtgctagctccctgattcaaagaaatatttctcatgtttgttcattctagtttatattttcatttaaaatcctttaggttaagtttaagctttttaaaagttagttttgagaattgagacacaatactaatactgtaggaattggtgaggccttgacttaaaactttctttgtactgtgatttccttttgggtgtattttgctaagtgaaacttgttaaattttttgttaactaaatttttttcttaaaataaagactttttcacaatgactggcacagattactcagcaaaagatagcaaaacgggtggttgaagataattcattttaatcgtaatgtattttagtgtgaatttaaaaatttcatacatcaaatctatgatctcccttatattcttatgatgaggctaaataaaagtctaataaaaatgttaaatatgtgaatggtggaaatggtgactagcagcacacattctgggaagcatcaaatagacacacggccccagccacctgcaacttatgtgcactgttgtaaaccattcagaattttcctgctaggcccttgatgctggagtcacatctgttgatagctggagaactttagtttcaagtactacattgtgaaagcaattattttgtttctagtttttataaaatgctgatttaaacttt

SEQ ID NO: 225714 - DNA, 919 bp, Homo Sapiens; identical to SEQ ID NO: 191239

SEQ ID NO: 225715 - DNA, 915 bp, Homo Sapiens; identical to SEQ ID NO: 191240

SEQ ID NO: 225716 - DNA, 1113 bp, Homo Sapiens
  misc_feature (124)..(136): n is a, c, g, or t
ttggggcttcgcggttcggtcctcgcacccggcagccgccactggtgctgagctgctaggaagcccctatcgccgagctcgttggagcttgaacccattgtcacccctccgactcaccggcccnnnnnnnnnnnnncatggttgaagcagatcgcccaggaaagctcttcattggtgggcttaatacggaaacaaatgagaaagctcttgaagcagtatttggcaaatatggacgaatagtggaagtactcttgatgaaagaccgtgaaaccaacaaatcaagaggatttgcttttgtcacctttgaaagcccagcagacgctaaggatgcagccagagacatgaatggaaagtcattagatggaaaagccatcaaggtggaacaagccaccaaaccatcatttgaaagtggtagacgtggaccgcctccacctccaagaagtagaggccctccaagaggtcttagaggtggaagaggaggaagtggaggaaccaggggacctccctcacggggaggacacatggatgacggtggatattccatgaattttaacatgagttcttccaggggaccactcccagtaaaaagaggaccaccaccaagaagtgggggtcctcctcctaagagatctgcaccttcaggaccagttcgcagtagcagtggaatgggaggaagagctcctgtatcacgtggaagagatagttatggaggtccacctcgaagggaaccgctgccctctcgtagagatgtttatttgtccccaagagatgatgggtattctactaaagacagctattcaagcagagattacccaagttctcgtgatactagagattatgcaccaccaccacgagattatacttaccgtgattatggtcattccagttcacgtgatgactatccatcaagaggatatagcgatagagatggatatggtcgtgatcgtgactattcagatcatccaagtggaggttcctacagagattcatatgagagttatggtaagatactggttagggtctttagtatcaccagcttgagtttttaggttcgtgagccagtttattagctgtgtggtgcttgcttttaaagggatgtttgcttgcttttaa

SEQ ID NO: 225717 - DNA, 1127 bp, Homo Sapiens; identical to SEQ ID NO: 191243
  misc_feature (124)..(136): n is a, c, g, or t

SEQ ID NO: 225718 - DNA, 1299 bp, Homo Sapiens
aaaatctctggtcctccaagcagttgttcaaggtaaaaaagtaaagcaaagtccttctcatagggaactgaagaataagctacatcagggtctatatctgtcagatcaaccacaagtttggtgaaaggatgtgtctccccaaatgtctttaccgaattctgtagttctccccatcctcccagagcattaaaatgtctgaacttttcaccaaacaatcgtccgcaaatgtggcgttccaagtacacagtatgtccctcatttaaccaaaagtgatcccaagttttgttggtcactagattccctgtccagctatgagatatttcatgtgcaatgacattggagagtgacttgtcgcctgccagtagagtaggagttacaaaagtaaggcaaggattctccatgccaccataagggaaggatggtggcaggaccaataggtcatactgtccccatacatacggtcctcccagatcttctgctattttaagcatagattcagtctcagaaaactcataagcagacttttccacctgctctttctcagaccacaccaaagttcttgggccaatttgcctgctttctaaagctccaacaactaaagcaatcaggtagcagggtattggaactttttggatgaatttgtatattttcctgcttgggtcttctgggtcaggtgtttctccatcacgaatagcactcataagtgccaccagttctttagggacagacacctctgcagtataggttaatttcacagaaggagtgtcctgacaaggaaggattgctctgcagtggatggcctggcactgactaaagagatatgggtgttccttcccagaagtctgttcaggagtgagccactggagagcagaagattttggagaggtctcaaaagaaatttctataacaatttcttgatttttgctcaaagcgataggaagagagatttccattggcgatcccttgtaactttgtctttctccaagagcatatttgacttcttgtccattgatcactactttttctattgtaaggtcctttgtatccaaaaccaggctgcgcagattgtcctcctgagactggaccgtgagagcagcagtcccggtcagcgtccggcgagtaaagtcgacgctgcagcgcaggtgcaggtgcttggtccggcagacggaagccggagaggccaacgaacaggtatccactatctcgggcatggctctgggggatcacacagcacagcgacctacagcccaacgctcagctaccagactcgtcgatagagaacctgaggaggagggccaa

SEQ ID NO: 225719 - DNA, 835 bp, Homo Sapiens
actttgtacaaaaaagttgggcttgacttcctcccagcacattcctgcactctgccgtgtccacactgccccacagacccagtcctccaagcctgctgccagctccctgcaagcccctcaggttgggccttgccacggtgccagcaggcagccctgggctgggggtaggggactccctacaggcacgcagccctgagacctcagagggccaccccttgagggtggccaggcccccagtggccaacctgagtgctgcctctgccaccagccctgctggcccctggttccgctggccccccagatgcctggctgagacacgccagtggcctcagctgcccacacctcttcccggcccctgaagttggcactgcagcagacagctccctgggcaccaggcagctaacagacacagccgccagcccaaacagcagcggcatgggcagcgccagcccgggtctgagcagcgtatcccccagccacctcctgctgccccccgacacggtgtcgcggacaggcttggagaaggcggcagcgggggcagtgggtctcgagagacgggactggagtcccagtccacccgccacgcccgagcagggcctgtccgccttctacctctcctactttgacatgctgtaccctgaggacagcagctgggcagccaaggcccctggggccagcagtcgggaggagccacctgaggagcctgagcagtgcccggtcattgacagccaagccccagcgggcagcctggacttggtgcccggcgggctgaccttggaggagcactcgctgggagcaggtgcagtccatggtggtgggcgaagtgctcaaggac

SEQ ID NO: 225720 - DNA, 1006 bp, Homo Sapiens
ttgggtaaaaataagcgaaaagctctttgcccagaccatgactcagatagttcaggtaaagatcctagaaacagccaggggaaaggagctcaccgaccagaacatgccagtggtagaaggaatgtcaaggacagtgttagtgctagtgaagtgacctcaactgtgtacaacactgtctctgaaggaactcactttctagagacaatagagactccaagacctggaaaactcttccccaaagatgtaagcagctccactccacccagtgtcacatcaaagagccgggtgagccggctggctggtaggaaaacaaatgaatctgtgagtgagccccgaaaaggctttatgtattccagaaacacaaatgaaaatcctcaggagtgtttcaatgcatcaaagctactgacatctcatggcatgggcatccaggttccgctgaatgcaacagagttcaactatctctgtccagccatcatcaaccaaattgatgctagatcttgtctgattcatacaagtgaaaagaaggctgaaatccctccaaagacctattcattacaaatagcctgggttggtggttttatagccatttccatcatcagtttcctgtctctgctgggggttatcttagtgcctctcatgaatcgggtgtttttcaaatttctcctgagtttccttgtggcactggccgttgggactttgagtggtgatgcttttttacaccttcttccacattctcatgcaagtcaccaccatagtcatagccatgaagaaccagcaatggaaatgaaaagaggaccacttttcagtcatctgtcttctcaaaacatagaagaaagtgcctattttgattccacgtggaagggtctaacagctctaggaggcctgtatttcatgtttcttgttgaacatgtcctcacattgatcaaacaatttaaagataagaagaaaaagaatcagaagaacctgaaaatgatgatgatgtggagattaagaagcagttgtccaa

SEQ ID NO: 225721 - DNA, 1148 bp, Homo Sapiens; identical to SEQ ID NO: 191252

SEQ ID NO: 225722 - DNA, 1293 bp, Homo Sapiens
  misc_feature (68)..(78): n is a, c, g, or t
  misc_feature (112)..(140): n is a, c, g, or t
ttggcaagtttttctatgatattaaaaaatgtacagtgttaggtattatttgaatggaaagacacccnnnnnnnnnnntgtgctccgactagggggaaaacagtagttccgnnnnnnnnnnnnnnnnnnnnnnnnnnnnnctggttgccctagcttccccccctatttttgtgtcttttattaactagtgcattgtcttattaaatcttcactgtatttaatgcaggatgtgtgcttcagttgctctgtgtattttgatattttaatttagaggttttgtttgctttttgacactagttgtaagttactttgttatagatggtatcctttaccccttcttaatattttacagcagtacgtttttttgtaacgtgagactgcagagtttgtttttctatatgtgaaggattacaacacaaaaagttatcctgccattcgagtgctcagaactgaatgtttctgcagatcttgtggcatttgtctctagtgtgatatataaaggtgtaattaagacagagttctgttaatctaatcaagtttgctgttagttgtgcattagcagtataaaagctaatatatactatatggtcttgcaacagttttaaagcctctgcataattgataataaaaatgcatgacattcttgtttttaatagacttttaaaatcataattttaggtttaacacgtagatctttgtacagttgactttttgacatagcaaggccaaaaataactttctgaatatttttttcttgtgtataagtggaaagggcatttttcacatataagtgggctaaccaatattttcaaaagaacttcatcattgtacaactaacaacagtaactagcccttaattatggtgacagttccttattggtgtgtgtgagattactctagcaactattacagtataacacagatgatcttctccacacaccccatcacccagataatttacagttctgttaacagtgaggttgataaagtattactgataaaaaattatctaaggaaaaaaacagaaaattatttggtgtggccatcttacctgcttatgtctcctacacaaagctaaatattctagcagtgatgtaatgaaaaattacatcttactgttgatatatgtatgctctggtacacagatgtcattttgttgtcacagcactacagtgaaatacacaaaaaatgaaattcatataatgacttaaatgtattatatgttaagaattgacaacataaactacttttgctttgaaatgatgtatgcttcagtaaaatcatattcaaatt

SEQ ID NO: 225723 - DNA, 541 bp, Homo Sapiens; identical to SEQ ID NO: 191257

SEQ ID NO: 225724 - DNA, 428 bp, Homo Sapiens; identical to SEQ ID NO: 191258
  misc_feature (132)..(186): n is a, c, g, or t

SEQ ID NO: 225725 - DNA, 1063 bp, Homo Sapiens
ctttgtacaaaaaagttggcgattccgttacctgatgggggaaaggctgggagttcacccattaagctgtcatgggtgggtccttggggaacatggagattccagtgtgcctgtatggagtggaatgaatgttgctggtgtctctctgaagactctgcacccagatttagggactgataaagataaggaacagtggaaagaggttcacaagcaggtggttgagagtgcttatgaggtgatcaaactcaaaggctacacatcctgggctattggactctctgtagcagatttggcagagagtataatgaagaatcttaggcgggtgcacccagtttccaccatgattaagggtctttacggaataaaggatgatgtcttccttagtgttccttgcattttgggacagaatggaatctcagaccttgtgaaggtgactctgacttctgaggaagaggcccgtttgaagaagagtgcagatacactttgggggatccaaaaggagctgcaattttaaagtcttctgatgtcatatcatttcactgtctaggctacaacaggattctaggtggaggttgtgcatgttgtcctttttatctgatctgtgattaaagcagtaatattttaagatggactgggaaaaacatcaactcctgaagttagaaataagaatggtttgtaaaatccacagctatatcctgatgctggatggtattaatcttgtgtagtcttcaactggttagtgtgaaatagttctgccacctctgacgcaccactgccaatgctgtacgtactgcatttgccccttgagccaggtggatgtttaccgtgtgttatataacttcctggctccttcactgaacatgcctagtccaacattttttcccagtgagtcacatcctgggatccagtgtataaatccaatatcatgtcttgtgcataattcttccaaaggatcttattttgtgaactatatcagtagtgtacattaccatataatgtaaaaagatctacatacaaacatgcaaccaactatccaagtgttataccaactaaaccccattaa

SEQ ID NO: 225726 - DNA, 1373 bp, Homo Sapiens; identical to SEQ ID NO: 191259

SEQ ID NO: 225727 - DNA, 850 bp, Homo Sapiens; identical to SEQ ID NO: 191260

SEQ ID NO: 225728 - DNA, 856 bp, Homo Sapiens
tttgtacaaaaaagttgggatatttataccaaaatatagagagactggcagctattaacattgcaaaactggaccatatttcccttatttaataagcaaaatatgtttttggaataagtggtgggtgaataccactgccaagttatagctttgtttttgcttgcctcctgattatctgtactgtgggtttaagtatgctactttctctcagcatccaataatcatggcccctcaatttatttgtggtcacccagggttcagagcaagaagtcttgctttatacaaatgtatccataaaatatcagagcttgttgggcatgaacatcaaacttttgttccactaatatggctctgtttggaaaaaactgcaaatcagaaagaatgatttgcagaaagaaagaaaaactatggtgtaatttaaactctgggcagcctctgaatgaaatgctactttctttagaaatataatagctgccttagacattatgaggtatacaactagtatttaagataccatttaatatgccccgtaaatgtcttcagtgttcttcagggtagttgggatctcaaaagatttggttcagatccaaacaaatacacattctgtgttttagctcagtgttttctaaaaaaagaaactgccacacagcaaaaaattgtttactttgttggacaaaccaaatcagttctcaaaaaatgaccggtgcttataaaaagttataaatatcgagtagctctaaaacaaaccacctgaccaagagggaagtgagcttgtgcttagtatttacattggatgccagttttgtaatcactgacttatgtgcaaactggtgcagaaattctataaactctttgc

SEQ ID NO: 225729 - DNA, 1128 bp, Homo Sapiens; identical to SEQ ID NO: 191262
  misc_feature (873)..(905): n is a, c, g, or t

SEQ ID NO: 225730 - DNA, 911 bp, Homo Sapiens; identical to SEQ ID NO: 191263

SEQ ID NO: 225731 - DNA, 685 bp, Homo Sapiens; identical to SEQ ID NO: 191264

SEQ ID NO: 225732 - DNA, 738 bp, Homo Sapiens; identical to SEQ ID NO: 191265

SEQ ID NO: 225733 - DNA, 979 bp, Homo Sapiens
attgatgagcaatgctttcttttaaaggccaactttgtacaaaaaagttgggttcgtactgggcagaacgcgacgggtctgcggcttaggtgaaaatgcctcgtgtaaaagcagctcaagctggaagacagagctctgcgaagagacatcttgcagaacaatttgcagttggagagataataactgacatggcaaaaaaggaatggaaagtaggattacccattggccaaggaggctttggctgtatatatcttgctgatatgaattcttcagagtcagttggcagtgatgcaccttgtgttgtaaaagtggaacccagtgacaatggacctctttttactgaattaaagttctaccaacgagctgcaaaaccagagcaaattcagaaatggattcgtacccgtaagctgaagtacctgggtgttcctaagtattgggggtctggtctacatgacaaaaatggaaaaagttacaggtttatgataatggatcgctttgggagtgaccttcagaaaatatatgaagcaaatgccaaaaggttttctcggaaaactgtcttgcagctaagcttaagaattctggatattctggaatatattcacgagcatgagtatgtgcatggagatatcaaggcctcaaatcttcttctgaactacaagaatcctgaccaggtgtacttggtagattatggccttgcttatcggtactgcccagaaggagttcataaagaatacaaagaagaccccaaaagatgtcacgatggcactattgaattcacgagcatcgatgcacacaatggcgtggccccatcaagacgtggtgatttggaaatacttggttattgcatgatccaatggcttactggccatcttccttgggaggataatttgaaagatcctaaatatgttagagattcccaaattagatacagagaaaatattgcaagtttgatggacaattgttttcctgagaaaacaac

SEQ ID NO: 225734 - DNA, 829 bp, Homo Sapiens; identical to SEQ ID NO: 191270
  misc_feature (457)..(517): n is a, c, g, or t

SEQ ID NO: 225735 - DNA, 837 bp, Homo Sapiens
  misc_feature (578)..(598): n is a, c, g, or t
ttggcaaatggcccattgtgcacagggaccaagccacagccacactcttcaacagttaccaaactgtttttggaaattcacaccaaggtcgggcccactgcaggcagctggcacagcgtggcccgaggggctgtggaacgggtcccggaactgtcagacatgtttgattttagcgtttcctttgttcttcaaatcaggtgcccaaataagtgatcagcacagctgcttccaaataggagaaaccataaaataggatgaaaatcaagtaaaatgcaaagatgtccacactgttttaaacttgaccctgatgaaaatgtgagcactgttagcagatgcctatgggagaggaaaagcgtatctgaaaatggtccaggacaggaggatgaaatgagatcccagagtcctcacacctgaatgaattatacatgtgccttaccaggtgagtggtctttcgaagataaaaaactctagtccctttaaacgtttgcccctggcgtttcctaagtacgaaaaggtttttaagtcttcgaacagtctcctttcatgactttaacaggattctgccccctgaggtgtannnnnnnnnnnnnnnnnnnnnccacgtactccacagccaacatcacgaggtgtaatttttaatttgatcagaactgttaccaaaaaacaactgtcagttttattgagatgggaaaaatgtaaacctatttttattacttaagactttatgggagagattagacactggaggtttttaacagaacgtgtatttattaatgttcaaaacactggaattacaaatgagaagagtctacaataaattaagatttttgaatttgt

SEQ ID NO: 225736 - DNA, 1476 bp, Homo Sapiens
ttggcccgtcagggagccccgtgctggccagctacaagccagcgccccccaaagacaagctacccgaaacgcctcgccgccgcatgaaaaagagcctctcagcccccttgcacccggaatttgaagaggtctacagattcggggcagagagcaggaaactccttttgcgggaaccagtggatgctatgcccgaccccaccccatttctgctggctagggagtccgccgaggtccacctcatcaaagagaggcccctcgtcatcccccccatcgcctccgaccgaagcggcgagcagcacagcccggcccgcgaaaagccgcacaaggcccacgtcggggtggcacatcggatccaccacgccaccccgccgcaggcccagcccgaggtgaagaccctggcggtcgaccaggtgaacggaggcaaggtggtgaggaagcactcagggacggacagaactgtgtgaagcccgccgtgccccaccccgcgctgtccatgcactgtgagcaccactgggaaatctcagccacaccttttctgtttaatcccatgcatgccaaacacttttcacacctaccgacccattctccttctgcttctcttgccctcttcttcacgccaaaatatgatcgtgtccctgccgcagaatatgtatttcctaattgctgtggccaaacgcctgtgtgccgaatcgcttgcttctgatcccgctccgtgtaacctaagtgcgctgcaggcaaagcccaggccacggctgcgtcactactgatgttcacgatgccacacagtcacacacctaattcattctcaagtcggagcaacacataccaaccttgaccttatcctcaagctccagggcagcctggccgagcagcccctgctccctcctggagacccttgtcacctcccgagctcctcctggagacccctgtcacctcctgaccaacctttcccagggcggcaccgatcaccgagcagccgtgcgtgtatctcaaggaactaaataagatgacgctactcctcatagcaccacaacctgaatgtgtgttcatatttttttgttagttttatccaaaatgtttaagatcccaacaaactttattttctaaacctgccttccttctgttttgtgtcttttattaaacaaacacctgaaggagggctaggagactgcaggagggagagcaatcacaggtcccagaagcgactccggcctcctcccggcccagagctagtccttagaatgtgctgcgctcctgagcttctgtgggaagctgcttttgcctctgatggcccctgcccactgtgctgcccgtgctagcccctctcctccctcatggagtgaagccacccctcacctccaggtggccagccagggctccaggccagcctcatggtgcacagagggaagggtgcccagtgaccactggtcctggaggttctgtgtccttacctgaccccacacagacccaggcagg

SEQ ID NO: 225737 - DNA, 862 bp, Homo Sapiens; identical to SEQ ID NO: 191274

SEQ ID NO: 225738 - DNA, 1225 bp, Homo Sapiens
  misc_feature (770)..(844): n is a, c, g, or t
  misc_feature (1018)..(1071): n is a, c, g, or t
gccaactttgtacaaaaaagttggcgacatctgtccgccctggcaccaagaaggttcatgtcatcttcaactacaagggcaagaacgtgctgatcaacaaggacatccgttgcaaggatgatgagtttacacacctgtacacactgattgtgcggccagacaacacctatgaggtgaagattgacaacagccaggtggagtccggctccttggaagacgattgggacttcctgccacccaagaagataaaggatcctgatgcttcaaaaccggaagactgggatgagcgggccaagatcgatgatcccacagactccaagcctgaggactgggacaagcccgagcatatccctgaccctgatgctaagaagcccgaggactgggatgaagagatggacggagagtgggaacccccagtgattcagaaccctgagtacaagggtgagtggaagccccggcagatcgacaacccagattacaagggcacttggatccacccagaaattgacaaccccgagtattctcccgatcccagtatctatgcctatgataactttggcgtgctgggcctggacctctggcaggtcaagtctggcaccatctttgacaacttcctcatcaccaacgatgaggcatacgctgaggagtttggcaacgagacgtggggcgtaacaaaggcagcagagaaacaaatgaaggacaaacaggacgaggagcagaggcttaaggaggaggaagaagacaagaaacgcaaagaggaggaggaggcnnnnnnnnnnnnnnnnnnnnnnnnnnnnnnnnnnnnnnnnnnnnnnnnnnnnnnnnnnnnnnnnnnnnnnnnnnnagatgtccccggccaggccaaggacgagctgtagagaggcctgcctccagggctggactgaggcctgagcgctcctgccgcagagcttgccgcgccaaataatgtctctgtgagactcgagaactttcatttttttccaggctggttcggatttggggtggattttggttttgnnnnnnnnnnnnnnnnnnnnnnnnnnnnnnnnnnnnnnnnnnnnnnnnnnnnnnaaactggtattttatctttgattctccttcagccctcacccctggttctcatctttcttgatcaacatcttttcttgcctctgtccccttctctcatctcttagctcccctcccacctgggggggcagtgggtgtggagaagccacaagcctga

SEQ ID NO: 225739 - DNA, 1608 bp, Homo Sapiens; identical to SEQ ID NO: 191277
  misc_feature (1202)..(1286): n is a, c, g, or t
  misc_feature (1497)..(1514): n is a, c, g, or t

SEQ ID NO: 225740 - DNA, 1634 bp, Homo Sapiens; identical to SEQ ID NO: 191278
  misc_feature (1162)..(1279): n is a, c, g, or t
  misc_feature (1490)..(1508): n is a, c, g, or t

SEQ ID NO: 225741 - DNA, 1028 bp, Homo Sapiens
ctttgtacaaaaaagttgggaaaatggtagcgatggcggctgggccgagtgggtgtctggtgccggcgtttgggctacggttgttgttggcgactgtgcttcaagcggtgtctgcttttggggcagagttttcatcggaggcatgcagagagttaggcttttctagcaacttgctttgcagctcttgtgatcttctcggacagttcaacctgcttcagctggatcctgattgcagaggatgctgtcaggaggaagcacaatttgaaaccaaaaagctgtatgcaggagctattcttgaagtttgtggatgaaaattgggaaggttccctcaagtccaagcttttgttaggagtgataaacccaaactgttcagaggactgcaaatcaagtatgtccgtggttcagaccctgtattaaagcttttggacgacaatgggaacattgctgaagaactgagcattctcaaatggaacacagacagtgtagaagaattcctgagtgaaaagttggaacgcatataaatcttgcttaaattttgtcctatccttttgttaccttatcaaatgaaatattacagcacctagaaaataatttagttttgcttgcttccattgatcagtcttttacttgaggcattaaatatctaattaaatcgtgaaatggcagtatagtccatgatatctaaggagttggcaagcttaacaaaacccattttttataaatgtccatcctcctgcatttgttgataccactaacaaaatgctttgtaacagacttgcggttaattatgcaaatgatagtttgtgataattggtccagttttacgaacaacagatttctaaattagagaggttaacaagacagatgattactatgcctcatgtgctgtgtgctctttgaaaggaatgacagcagactacaaagcaaataaaatatactgagcctcaacagattgcctgctccttcaagtctctcctatttttgtattacccagctttctttttaataacaaatgttatttatagttt

SEQ ID NO: 225742 - DNA, 1302 bp, Homo Sapiens; identical to SEQ ID NO: 191282
  misc_feature (1187)..(1224): n is a, c, g, or t

SEQ ID NO: 225743 - DNA, 1622 bp, Homo Sapiens
actttgtacaaaaaagttggaacctttccaagggagtggttgtgtgatcgccatcttagggaaaagatgttctcgtccgtggcgcacctggcgcgggcgaaccccttcaacacgccacatctgcagctggtgcacgatggtctcggggacctccgcagcagctccccagggcccacgggccagccccgccgccctcgcaacctggcagccgccgccgtggaagagtacagttgtgaatttggctccgcgaagtattatgcactgtgtggctttggtggggtcttaagttgtggtctgacacacactgctgtggttcccctggatttagtgaaatgccgtatgcaggtggacccccaaaagtacaagggcatatttaacggattctcagttacacttaaagaggatggtgttcgtggtttggctaaaggatgggctccgactttccttggctactccatgcagggactctgcaagtttggcttttatgaagtctttaaagtcttgtatagcaatatgcttggagaggagaatacttatctctggcgcacatcactatatttggctgcctctgccagtgctgaattctttgctgacattgccctggctcctatggaagctgctaaggttcgaattcaaacccagccaggttatgccaacactttgagggatgcagctcccaaaatgtataaggaagaaggcctaaaagcattctacaagggggttgctcctctctggatgagacagataccatacaccatgatgaagttcgcctgctttgaacgtactgttgaagcactgtacaagtttgtggttcctaagccccgcagtgaatgttcaaagccagagcagctggttgtaacatttgtagcaggttacatagctggagtcttttgtgcaattgtttctcaccctgctgattctgtggtatctgtgttgaataaagaaaaaggtagcagtgcttctctggtcctcaagagacttggatttaaaggtgtatggaagggactgtttgcccgtatcatcatgattggtaccctgactgcactacagtggtttatctatgactccgtgaaggtctacttcagacttcctcgccctcctccacccgagatgccagagtctctgaagaagaagcttgggttaactcagtagttagatcaaagcaaatgtggactgaatctgcttgttgatcagtgttgaagaaagtgcaaaaggaacttttatatatttgacagtgtaggaaattgtctattcctgatataattactgtagtactcttgcttaaggcaagagtttcagatttactgttgaaataaacccaactcttcatgatttgcctgtgacttatttttaaaacttttttaaaaaagatttagctttaaaatagttggaaagaatgaagtatataagttaaggaaaaaatacaaaactgaccatgaccattgttggttgaatattccagttgctattcagaaattgtcatatgtctcaagttttatcacacaaagttcctgtatttctagggaagcagactttaaatttctaaaaacttgatttaattatagttaaatatgtgtagtcatttgtgggttattttggcaagtaaatgtcagtgtatactt

SEQ ID NO: 225744 - DNA, 1407 bp, Homo Sapiens
ttggcccggcgcagctgggagcggctgcttcctccggggtcgtatctccgcccggcatggggctgctggacctttgcgaggaagtgttcggcaccgccgacctttaccgggtgctgggcgtgcgacgcgaggcctccgacggcgaggtccgacgaggctaccacaaggtgtccctgcaggtacacccggaccgggtgggtgagggcgacaaggaggacgccacccgccgcttccagatcctgggaaaagtctattccgttctcagtgacagagaacagagagcagtgtacgatgagcagggaacagtggacgaggactctcctgtgctcacccaagaccgagactgggaggcgtattggcggctactctttaaaaagatatctttagaggacattcaagcttttgaaaagacatacaaaggttcggaagaagagctggctgatattaagcaggcctatctggacttcaagggtgacatggatcagatcatggagtctgtgctttgcgtgcagtacacagaggaacccaggataaggaatatcattcagcaagctattgacgccggagaggtcccatcctataatgcctttgtcaaagaatcgaaacaaaagatgaatgcaaggaaaaggagggctcaggaagaggccaaagaagcagaaatgagcagaaaggagttggggcttgatgaaggcgtggatagcctgaaggcagccattcagagcagacaaaaggatcggcaaaaggaaatggacaattttctggctcagatggaagcaaagtactgcaaatcttccaaaggaggagggaaaaaatctgctctcaagaaagaaaagaaataatggaatttttctcttcaaaggtccttaggtgtaaattgatgccatcgtaggcaaggtgcaggcaggatttgaaggcaaaagtcaattcagctcttgagaaaaggtgtctttccagcctgaatttttcagattgactagaccaagcagaatctctcaacctgatcttagtatttcctagaaagcacttgacattgtgtgaggtctcacctgaaggaacttggtggtgacatttgggagggtggagggaggcagtgtccttcctgacagcacttgcctccatggatcttctgtacacagaactcttatctaggatgtggttctgttcatgctgctttctgcgatgtgcgtgtctgttagaataggctctctacccagctagaacaccttccagacacttgctggacagctatcttccacatacttcccagtttacatttggtcttaatgatcttgaatagatcctctcttcattttactcagccaggttttgtactgatgtacaggtgttaaattacttcaagcatttttgtaagaggtgtatataattcaatactttttgtaaaacatg

SEQ ID NO: 225745 - DNA, 1298 bp, Homo Sapiens
  misc_feature (231)..(243): n is a, c, g, or t
cccagagagcgtgaagttgctcacttgcaaggaagaggtgcagagcattgcaatctgctaccacacctctcacacctggtgagaatcagttctgatctccaaagctctgacctctgagagtgacgttaagtccagagagccacaccactacaccctgagagaccttcagcaaaaggcccgtgagctcaaagaaattggggtcaggatgcttttaaagcaaaaaatgctttnnnnnnnnnnnnncagatggtggttaggagaagatttgggggtaggtattgaaaaggaagaatgggactggtatgtaaacccagctgacaggacagggtcaggccaggcagagcctggaggaatcacgttttgtggctctggattgcctggtatctgtcgtgaggctgcacttgctacctcagacatgggtaggaggtttcctaaaaaaatatcttgagtctctaagttcaggtagatcttagaaaataaacatgggaagaaagaaaaacacaattcaaacggctcagatgtaatctgcttgccatgtttcttctcttcctctaagactcatctgaatgccccctgtgctataaagccttctctgatccacaaacacagttttaagtgcgtggccctcctgggtgcacagagagagcaagcccatctctctccaaatccccagtgcactgagcacactgaatcctacctgcctgttcagatgtctgcctctctcactgaaccgtagcaacttgaggatagacactgtatccttctctaccttccatctccacatggagagggaaagtgggctaaccaagaccctttaatcataagcacccagtctaaggaccccaaccagccagagtgataggaacacgttccaggggcatggacctcgggagcaacttttctctggaggcgcggagcatgtttccaatcccctgtaccacctacttgccccccagagccaccctgcattgggcacaattgtaatttaagagaatttctttaaaacgtgaaatcaatatttagatgcagacttcaagcaatatagagcattggtttgtgagaatggcatcattctgctgggaaaaacaaagcccagctttggcagccctgatgggagagatagaccttgcatctaccaaggtggaaggcggggaggatgctgtctggaaagaatgctagatatgtgtgcatgtgtgtggcaggaggctctgggctcataaactgtctggctacagggaaggctggacctgatttcctgaccacaggctcttgaagtccccatggtcttgctgacccaa

SEQ ID NO: 225746 - DNA, 890 bp, Homo Sapiens; identical to SEQ ID NO: 191305
  misc_feature (337)..(348): n is a, c, g, or t

SEQ ID NO: 225747 - DNA, 1018 bp, Homo Sapiens; identical to SEQ ID NO: 191307
  misc_feature (542)..(569): n is a, c, g, or t
  misc_feature (849)..(862): n is a, c, g, or t

SEQ ID NO: 225748 - DNA, 865 bp, Homo Sapiens
ttggctcggtgagcgggctccgcgcgccgggctgggctccgggaccgcggaggctccccggcccatcgacgagggagagaggcgagcggcgcggggaggcccgggggccggggaatctcggggcccgcagcctacctgcgtgaaacaagctcacatcttcctgtgggaaaccttctagcaacaggatgagtctgcagtggactgcagttgccaccttcctctatgcggaggtctttgttgtgttgcttctctgcattcccttcatttctcctaaaagatggcagaagattttcaagtcccggctggtggagttgttagtgtcctatggcaacaccttctttgtggttctcattgtcatccttgtgctgttggtcatcgatgccgtgcgcgaaattcggaagtatgatgatgtgacggaaaaggtgaacctccagaacaatcccggggccatggagcacttccacatgaagcttttccgtgcccagaggaatctctacattgctggcttttccttgctgctgtccttcctgcttagacgcctggtgactctcatttcgcagcaggccacgctgctggcctccaatgaagcctttaaaaagcaggcggagagtgctagtgaggcggccaagaagtacatggaggagaatgaccagctcaagaagggagctgctgttgacggaggcaagttggatgtcgggaatgctgaggtgaagttggaggaagagaacaggagcctgaaggctgacctgcagaagctaaaggacgagctggccagcactaagcaaaactagagaaagctgaaaaccaggttctgggcatgcggaagcagtctgagggctcacaacgagtacgaccgcttgctgga

SEQ ID NO: 225749 - DNA, 1275 bp, Homo Sapiens; identical to SEQ ID NO: 191310

SEQ ID NO: 225750 - DNA, 882 bp, Homo Sapiens
ttggcgcagttcttgtttgtggatcgctgtgatcgtcacttaacaatgcagatcttcgtgaagactctgactggtaagaccatcaccctcgaggttgagcccagtgacaccatcgagaatgtcaaggcaaagatccaagataaggaaggcatccctcctgaccagcagaggctgatctttgctggaaaacagctggaagatgggcgcaccctgtctgactacaacatccagaaagagtccaccctgcacctggtgctccgtctcagaggtgggatgcaaatcttcgtgaagacactcactggcaagaccatcacccttgaggtcgagcccagtgacaccatcgagaacgtcaaagcaaagatccaggacaaggaaggcattcctcctgaccagcagaggttgatctttgccggaaagcagctggaagatgggcgcaccctgtctgactacaacatccagaaagagtctaccctgcacctggtgctccgtctcagaggtgggatgcagatcttcgtgaagaccctgactggtaagaccatcactctcgaagtggagccgagtgacaccattgagaatgtcaaggcaaagatccaagacaaggaaggcatccctcctgaccagcagaggttgatctttgccggaaaacagctggaagatggtcgtaccctgtctgactacaacatccagaaagagtccaccttgcacctggtgctccgtctcagaggtgggatgcagatcttcgtgaagaccctgactggtaagaccatcactctcgaggtggacccgagtgacaccattgagaatgtcaaggcaaagatcccagacaaggaaggcatccctcttgacagcaaaggttgatctttgctggggaaacagctggaa

SEQ ID NO: 225751 - DNA, 993 bp, Homo Sapiens; identical to SEQ ID NO: 191312

SEQ ID NO: 225752 - DNA, 1127 bp, Homo Sapiens; identical to SEQ ID NO: 191313

SEQ ID NO: 225753 - DNA, 1183 bp, Homo Sapiens; identical to SEQ ID NO: 191314

SEQ ID NO: 225754 - DNA, 673 bp, Homo Sapiens; identical to SEQ ID NO: 191315

SEQ ID NO: 225755 - DNA, 461 bp, Homo Sapiens; identical to SEQ ID NO: 191316

SEQ ID NO: 225756 - DNA, 956 bp, Homo Sapiens; identical to SEQ ID NO: 191317

SEQ ID NO: 225757 - DNA, 1367 bp, Homo Sapiens; identical to SEQ ID NO: 191318

SEQ ID NO: 225758 - DNA, 895 bp, Homo Sapiens; identical to SEQ ID NO: 191319

SEQ ID NO: 225759 - DNA, 931 bp, Homo Sapiens; identical to SEQ ID NO: 191320

SEQ ID NO: 225760 - DNA, 1028 bp, Homo Sapiens
ccttaaaaagccaactttgtacaaaaaagttggctagacatggcgcttgccagcgtgttggagagaccgctaccggtgaaccagcgcgggtttttcggacttgggggtcgtgcagatctgctggatctaggtccagggagtctcagtgatggtctgagcctggccgcgccaggctggggtgtcccagaagagccaggaatcgaaatgcttcatggaacaaccaccctggccttcaagttccgccatggagtcatagttgcagctgactccagggctacagcgggtgcttacattgcctcccagacggtgaagaaggtgatagagatcaacccatacctgctaggcaccatggctgggggcgcagcggattgcagcttctgggaacggctgttggctcggcaatgtcgaatctatgagcttcgaaataaggaacgcatctctgtagcagctgcctccaaactgcttgccaacatggtgtatcagtacaaaggcatggggctgtccatgggcaccatgatctgtggctgggataagagaggccctggcctctactacgtggacagtgaagggaaccggatttcaggggccaccttctctgtaggttctggctctgtgtatgcatatggggtcatggatcggggctattcctatgacctggaagtggagcaggcctatgatctggcccgtcgagccatctaccaagccacctacagagatgcctactcaggaggtgcagtcaacctctaccacgtgcgggaggatggctggatccgagtctccagtgacaatgtggctgatctacatgagaagtatagtggctctaccccctgaaagagggtggatgcagctgcttgtgtttcttggggtgactgtcattggtaatacggacacagtgacccatcctccatcctatttatagtggaaagggccttcaattgtatcagtacttttttttaagctctggcaccattgacctctatgtgttaccagtcattaaatgagctgctgcagaggtgactattttgttt

SEQ ID NO: 225761 - DNA, 928 bp, Homo Sapiens
ttggatttgaaataaaaatggatgcaagtttaggaaatctatttgcaagatcagcattggacacagctgcacgttctacaaagcctcccagatataagtgtgggatctcaaaagcttgccctgagaagcattttgcttttaaaatggcaagtggagcagccaacgtggtgggacccaaaatctgcctggaagataatgttttaatgagtggtgttaagaataatgttggaagagggatcaatgttgccttggcaaatggaaaaacaggagaagtattagacactaaatattttgacatgtggggaggagatgtggcaccatttattgagtttctgaaggccatacaagatggaacaatagttttaatgggaacatacgatgatggagcaaccaaactcaatgatgaggcacggcggctcattgctgatttggggagcacatctattactaatcttggttttagagacaactgggtcttctgtggtgggaagggcattaagacaaaaagcccttttgaacagcacataaagaacaataaggatacaaacaaatatgaaggatggcctgaagttgtagaaatggaaggatgcatcccccagaagcaagactaatggaaatgtggagagaattgaagaaagcgcactttcactcttaatgggagagctataaatggcagagctatgtgtaaatattttaagagcatgcagccatcttggtgtgtgcatgagtattgtctcttttgatatcaggattatttattgctaacgtaaatagatagcattgtaaataatcatcacaatgatcaaatcactgaaccatgtctccgcacatttccctaaaagtacaatgtttagactgctatggtaatacatattttaaattctaaaagcatacacaatgtgtaactgaatggtttgtgaaaatatat

SEQ ID NO: 225762 - DNA, 1102 bp, Homo Sapiens
actttgtacaaaaaagttgggccattaagatcattcggcagttaatggagaagtttaacttggatctatcaacagttacacaggccttcctaaaaaatagtggtgagctggaggctacttccgccttcttagcgtctggtcagagagctgatggatatcccatttggtcccgacaagatgacatagatttgcaaaaagatgatgaggataccagagaggcattggtcaaaaaatttggtgctcagaatgtagctcggaggattgaatttcgaaagaaataattggcaagataatgagaaaagaaaaaagtcatggtaggtgaggtggttaaaaaaaattgtgaccaatgaactttagagagttcttgcattggaactggcacttattttctgaccatcgctgctgttgctctgtgagtcctagatttttgtagccaagcagagttgtagagggggataaaaagaaaagaaattggatgtatttacagctgtccttgaacaagtatcaatgtgtttatgaaaggaagatctaaatcagacaggagttggtctacatagtagtaatccattgttggaatggaacccttgctatagtagtgacaaagtgaaaggaaatttaggaggcataggccatttcaggcagcataagtaatctcctgtcctttggcagaagctcctttagattgggatagattccaaataaagaatctagaaataggagaagatttaattatgaggccttgaacacggattatccccaaacccttgtcatttcccccagtgagctctgatttctagactgctttgaaaatgctgtattcattttgctaacttagtatttgggtaccctgctctttggctgttctttttttggagcccttctcagtcaagtctgccggatgtctttctttacctacccctcagttttccttaaaacgcgcacacaactctagagagtgttaagaataatgttacttggttaatgtgttatttattgagtattgtttgtgctaagcattgtgttagatttaaaaaattagtggattgactccactttgttgtgttgttttcattgttgaaaataaatataactttgtattcga

SEQ ID NO: 225763 - DNA, 1251 bp, Homo Sapiens
ttgggtttcttttgcggctccacgtcggcaccagctgcggggcaagatggaggcgctgattttggaaccttccctgtatactgtcaaagccatcctgattctggacaatgatggagatcgactttttgccaagtactatgacgacacctaccccagtgtcaaggagcaaaaggcctttgagaagaacattttcaacaagacccatcggactgacagtgaaattgccctcttggaaggcctgacagtggtatacaaaagcagtatagatctctatttctatgtgattggcagctcctatgaaaatgagctgatgcttatggctgttctgaactgtctcttcgactcattgagccagatgctgaggaaaaatgtagaaaagcgagcactgctggagaacatggaggggctgttcttggctgtggatgaaattgtagatggaggggtgatcctagagagtgatccccagcaggtggtacaccgggtggcattaaggggtgaagatgtcccccttacggagcagaccgtgtctcaggtgctgcagtcagccaaagaacagatcaagtggtcactccttcggtgaagacctcactgttcctggctcttcatcctcttcaaaaaatttgcatgtctgctgtgaattttcatctagttccccaatcgatgctctcagggtcatctcggggatcacagggatccttaaatctccattctgtttgtggttgccccctcaacctcccctacacccttcctattctttttcattcttcttgcagttctgggagtaaagctcccagcatatttagataatagggcaggggaagcaccctctttctttctagactggattatgctcacatgctcccttgccctgacatttttgtaaattctgtgccctttgctgtagctacacttcagattaaagtaggagaaagaatgtgctgagtgttttcctccctttgcctctacctggccctcatcccaacagcccagcaaggggagagagaaagagaattcttttctatagaacgagtgggggcggggatgggtagggatttatccaatctaagccctaaccccacttagtgacctcagtgttttcttccattccttcttactgccctgtcctctgccttggaagaggctttgggaatagttcatagggaagggacaacatggaaaaacagcgatttaaattgtattgaacagggcatataaaatgcattctgtaccctgatctggcatataccttca

SEQ ID NO: 225764 - DNA, 1132 bp, Homo Sapiens; identical to SEQ ID NO: 191328

SEQ ID NO: 225765 - DNA, 738 bp, Homo Sapiens
ctttgtacaaaaaagttggcggctccggaatcactgcagcccccctcgccctgagccagagcaccccgggtcccgccagcccctcacactcccagcaaaatgggcaaggagaagacccacatcaacatcgtggtcatcggccacgtggactccggaaagtccaccaccacgggccacctcatctacaaatgcggaggtattgacaaaaggaccattgagaagttcgagaaggaggcggctgagatggggaagggatccttcaagtatgcctgggtgctggacaagctgaaggcggagcgtgagcgcggcatcaccatcgacatctccctctggaagttcgagaccaccaagtactacatcaccatcatcgatgcccccggccaccgcgacttcatcaagaacatgatcacgggtacatcccaggcggactgcgcagtgctgatcgtggcggcgggcgtgggcgagttcgaggcgggcatctccaagaatgggcagacgcgggagcatgccctgctggcctacacgctgggtgtgaagcagctcatcgtgggcgtgaacaaaatggactccacaaagccggcctacagcgagaagcgctacgacgagatcgtcaaggaagtcatcgcctagatcaagaggatcggctacaacccggtcaccatgccctttgtgcccatctgccggctggcacggtgacaattgctggagccctctcccaacatgccgaggttcaagggc

SEQ ID NO: 225766 - DNA, 1267 bp, Homo Sapiens; identical to SEQ ID NO: 191333
  misc_feature (865)..(865): n is a, c, g, or t
  misc_feature (1065)..(1100): n is a, c, g, or t

SEQ ID NO: 225767 - DNA, 1294 bp, Homo Sapiens
ttggcccagaccggtgcgctggaggtcgaagcttccaggtagcggcccgcagagcctgacccaggctctggacatcctgagcccaagtcccccacactcagtgcagtgatgagtgcggaagtgaaggtgacagggcagaaccaggagcaatttctgctcctagccaagtcggccaagggggcagcgctggccacactcatccatcaggtgctggaggcccctggtgtctacgtgtttggagaactgctggacatgcccaatgttagagagctggctgagagtgactttgcctctaccttccggctgctcacagtgtttgcttatgggacatacgctgactacttagctgaagcccggaatcttcctccactaacagaggctcagaagaataagcttcgacacctctcagttgtcaccctggctgctaaagtaaagtgtatcccatatgcagtgttgctggaggctcttgccctgcgtaatgtgcggcagctggaagaccttgtgattgaggctgtgtatgctgacgtgcttcgtggctccctggaccagcgcaaccagcggctcgaggttgactacagcatcgggcgggacatccagcgccaggacctcagtgccattgcccgaaccctgcaggaatggtgtgtgggctgtgaggtcgtgctgtcaggcattgaggagcaggtgagccgtgccaaccaacacaaggagcagcagctgggcctgaagcagcagattgagagtgaggttgccaaccttaaaaaaaccattaaagttacgacggcagcagcagccgcagccacatctcaggaccctgagcaacacctgactgagctgagggaaccagctcctggcaccaaccagcgccagcccagcaagaaagcctcaaagggcaaggggctccgagggagcgccaagatttggtccaagtcgaattgaaaggactgtcgtttcctccctggggatgtggggtcccagctgcctgcctgcctcttaggagtcctcagagagccttctgtgcccctggccagctgataatcctaggttcatgacccttcacctcccctaaccccaaacatagatcacaccttctctagggaggaggcaaatgtagtcatgtttttgttggtactttctgttttttgtgacttcatgtgttccattgctccccgctgccatgctctctcccttgtttccttaagagctcagcatctgtccctgttcattacatgtcattgagtagtgggtagccctgatgggggtcgctctgtctggagcataaccacaggcgtttttt

SEQ ID NO: 225768 - DNA, 642 bp, Homo Sapiens; identical to SEQ ID NO: 191337

SEQ ID NO: 225769 - DNA, 935 bp, Homo Sapiens
  misc_feature (519)..(532): n is a, c, g, or t
ttggggataactgttcaggaggagatgatgactggacccatctgtcttcaaaagaagtggacccgtctacaggtgaactccagtccctacagatgccagaatccgaagggccaagctctctggacccctcccaggagggacccacagggctgaaggaagctgccttgtacccacatctcccgccagaggctgacccgcggctgattgagtccctctcccagatgctgtccatgggcttctctgatgaaggcggctggctcaccaggctcctgcagaccaagaactatgacatcggagcggctctggacaccatccagtattcaaagcatcccccgccgttgtgaccacttttgcccacctcttctgcgtgcccctcttctgtctcatagttgtgttaagcttgcgtagaattgcaggtctctgtacgggccagtttctctgccttcttccaggatcaggggttagggtgcaagaagccatttagggcagcaaaacaagtgacatgaagggagggtcccnnnnnnnnnnnnnnctgatgtttcctgggtgccctggctccttgcagcagggctgggcctgcgagacccaaggctcactgcagcgcgctcctgacccctccctgcaggggctacgttagcagcccagcacatagcttgcctaatggctttcactttctcttttgttttaaatgactcataggtccctgacatttagttgattattttctgctacagacctggtacactctgattttagataaagtaagcctaggtgttgtcagcaggcaggctggggaggccagtgttgtgggcttcctgctgggactgagaaggctcacgaagggcatccgcaatgttggtttcactgagagctgcctcctggtctcttcaccactgtagttctctcatttccaaaccatcagctgcttttaaaat

SEQ ID NO: 225770 - DNA, 959 bp, Homo Sapiens; identical to SEQ ID NO: 191346

SEQ ID NO: 225771 - DNA, 666 bp, Homo Sapiens
atgagcaatgctttccttataaatgccaactttgtacaaaaaagttggcagaaataccatatcctattatataatggagatgtagacatggcctgcaatttcatgggggactcgagtggtttgtggattccctcaaccagaagatggaggtgcagcgccggccctggttagtgaagtacggggacagcggggagcagattgccggcttcgtgaaggagttctcccacatcgcctttctcacgatcaagggcgccggccacatggttcccaccgacaagcccctcgctgccttcaccatgttctcccgcttcctgaacaagcagccatactgatgaccacagcaaccagctccacggcctgatgcagcccctcccagcctctcccgctaggagagtcctcttctaagcaaagtgcccctgcaggccgggttctgccgccaggactgcccccttcccagagccctgtacatcccagactgggcccagggtctcccatagacagcctgggggcaagttagcactttattcccgcagcagttcctgaatggggtggcctggccccttctctgcttaaagaatgccctttatgatgcactgattccatcccaggaacccaacagagctcaggacagcccacagggaggtggtggacggactgtaattgata

SEQ ID NO: 225772 - DNA, 970 bp, Homo Sapiens; identical to SEQ ID NO: 191356

SEQ ID NO: 225773 - DNA, 959 bp, Homo Sapiens
gccaactttgtacaaaaaagttggccgctgtcccggcggcgccaaccgaagcgccccgcctgatccgtgtccgacatgctgcgccgcgctctgctgtgcctggccgtggccgccctggtgcgcgccgacgcccccgaggaggaggaccacgtcctggtgctgcggaaaagcaacttcgcggaggcgctggcggcccacaagtacctgctggtggagttctatgccccttggtgtggccactgcaaggctctggcccctgagtatgccaaagccgctgggaagctgaaggcagaaggttccgagatcaggttggccaaggtggacgccacggaggagtctgacctggcccagcagtacggcgtgcgcggctatcccaccatcaagttcttcaggaatggagacacggcttcccccaaggaatatacagctggcagagaggctgatgacatcgtgaactggctgaagaagcgcacgggcccggctgccaccaccctgcctgacggcgcagctgcagagtccttggtggagtccagcgaggtggctgtcatcggcttcttcaaggacgtggagtcggactctgccaagcagtttttgcaggcagcagaggccatcgatgacataccatttgggatcacttccaacagtgacgtgttctccaaataccagctcgacaaagatggggttgtcctctttaagaagtttgatgaaggccggaacaactttgaaggggaggtcaccaaggagaacctgctggactttatcaaacacaaccagctgccccttgtcatcgagttcaccgagcagacagccccgaagatttttggaggtgaaatcaagactcacatcctgctgttcttgcccaagagtgtgtctgactatgacggcaaactgagcaacttcaaacagcagccgagagcttcaagggcaagatcctgttcatcttcatcgacagcgaccac

SEQ ID NO: 225774 - DNA, 1188 bp, Homo Sapiens; identical to SEQ ID NO: 191357

SEQ ID NO: 225775 - DNA, 1176 bp, Homo Sapiens
ttgggactatggtagcgagattcataataatgtcctgaatccagctgtgtccccccatcgcctcagcacccctcacccagggtcaggacggtctcatatcaggacgactgcaagagcctcccgggcctactctccctgaggcctgccccatcaggctgttctccaccccactggcagagtcatctttgtaagatgtgtggatgtgtgggggccgcatggaggacatcccctgctccagggtgggccatatctacaggaagtatgtgccctacaaggtcccggccggagtcagcctggcccggaaccttaagcgggtggccgaagtgtggatggatgagtacgcagagtacatttaccagcgccggcctgaataccgccacctctccgctggggatgtcgcagtccagaaaaagctccgcagctcccttaactgcaagagtttcaagtggtttatgacgaagatagcctgggacctgcccaaattctacccacccgtggagcccccggctgcagcttggggggagatccgaaatgtgggcacagggctgtgtgcagacacaaagcacggggccttgggctccccactaaggctagagggctgcgtccgaggccgtggggaggctgcctggaacaacatgcaggtattcaccttcacctggagagaggacatccggcctggagacccccagcacaccaagaagttctgctttgatgccatttcccacaccagccctgtcacgctgtacgactgccacagcatgaagggcaaccagctgtggaaataccgcaaagacaagaccctgtaccaccctgtcagtggcagctgcatggactgcagtgaaagtgaccataggatcttcatgaacacctgcaacccatcctctctcacccagcagtggctgtttgaacacaccaactcaacagtcttggaaaaattcaataggaactgagccctcatgtccccttggcaggccccccagggtctggcactcactgcagacttcctctttcacaagaggccccacagggagcagagactgctttaatccctgctgacatcacggaaaagcaacagagccttttcaactttgtcactatgtccccttgaacattatgtgggagaacaccaacgtagcctacgccacccaaaagtgagtcctgcgaggttgcccagcc

SEQ ID NO: 225776 - DNA, 1252 bp, Homo Sapiens
  misc_feature (952)..(952): n is a, c, g, or t
actttgtacaaaaaagttggagaagatcaggccttctatcctgggctgcaacatccttcgagttgaatattccttactgatctatgttagcgttcctggatccaagaaggtcatccttgacctgcccctggtaattggcagcagatcaggtctaagcagcagaacatccagcatggccagccgaaccagctctgagatgagttgggtagatctgaacatccctgataccccagaagctcctccctgctatatggatgtcattcctgaagatcaccgattggagagcccaaccactcctctgctagatgacatggatggctctcaagacagccctatctttatgtatgcccctgagttcaagttcatgccaccaccgacttatactgaggtggatccctgcatcctcaacaacaatgtgcagtgagcatgtggaagaaaagaagcagctttacctacttgtttctttttgtctctcttcctggacactcactttttcagagactcaacagtctctgcaatggagtgtgggtccaccttagcctctgacttcctaatgtaggaggtggtcagcaggcaatctcctgggccttaaaggatgcggactcatcctcagccagcgcccatgttgtgatacaggggtgtttgttggatgggtttaaaaataactagaaaaactcaggcccatccattttctcagatctccttgaaaattgaggccttttcgatagtttcgggtcaggtaaaaatggcctcctggcgtaagcttttcaaggttttttggaggctttttgtaaattgtgataggaactttggaccttgaacttacgtatcatgtggagaagagccaatttaacaaactaggaagatgaaaagggaaattgtggccaaaactttgggaaaaggaggttcttaaaatcagtgtttcccctttgtgcacttgtagaaaaaaagngaaaaccttctagagctgatttgatggacaatggagagagctttccctgtgattataaaaaaggaagctagctgctctacggtcatctttgcttagagtatactttaacctggcttttaaagcagtagtaactgccccaccaaaggtcttaaaagccatttttggagcctattgcactgtgttctcctactgcaaatattttcatatgggaggatggttttctcttcatgtaagtccttggaattgattctaagtgatggtcttagcactttaattcctgtccaattttttgttctccct

SEQ ID NO: 225777 - DNA, 683 bp, Homo Sapiens; identical to SEQ ID NO: 191364

SEQ ID NO: 225778 - DNA, 987 bp, Homo Sapiens; identical to SEQ ID NO: 191365
  misc_feature (130)..(143): n is a, c, g, or t

SEQ ID NO: 225779 - DNA, 855 bp, Homo Sapiens; identical to SEQ ID NO: 191366
  misc_feature (484)..(497): n is a, c, g, or t

SEQ ID NO: 225780 - DNA, 974 bp, Homo Sapiens; identical to SEQ ID NO: 191367

SEQ ID NO: 225781 - DNA, 755 bp, Homo Sapiens; identical to SEQ ID NO: 191369

SEQ ID NO: 225782 - DNA, 683 bp, Homo Sapiens
actttgtacaaaaaagttggcgtactaaggaaggcgcacagcccgccgcgctcgcctctccgccccgcgtccagctcgcccagctcgcccagctcgcccagcgtccgccgcgcctcggccaaggcttcaacggaccacaccaaaatgccatctcaaatggaacacgccatggaaaccatgatgtttacatttcacaaattcgctggggataaaggctacttaacaaaggaggacctgagagtactcatggaaaaggagttccctggatttttggaaaatcaaaaagaccctctggctgtggacaaaataatgaaggacctggaccagtgtagagatggcaaagtgggcttccagagcttcttttccctaattgcgggcctcaccattgcatgcaatgactattttgtagtacacatgaagcagaagggaaagaagtaggcagaaatgagcagttcgctcctccctgataagagttgtcccaaagggtcgcttaaggaatctgccccacagcttcccccatagaaggatttcatgagcagatcaggacacttagcaaatgtaaaaataaaatctaactctcatttgacaagcagagaaagaaaagttaaataccagataagcttttgatttttgtattgtttgcatccccttgccctcaataaataaagttcttttttagttcc

SEQ ID NO: 225783 - DNA, 715 bp, Homo Sapiens; identical to SEQ ID NO: 191370

SEQ ID NO: 225784 - DNA, 628 bp, Homo Sapiens; identical to SEQ ID NO: 191371

SEQ ID NO: 225785 - DNA, 813 bp, Homo Sapiens
aattgatgagcaatgcttttcgataaaaggcaactttgtacaaaaaagttggctcagttctgcggtttctgcggcggctggagaggtggtcggagaagtaggaacctcctgccgggctcgtggcggcttctgtccgctccgcggcgggaagcgccttccccacaggacatcaatgcaagcttgaataagaaaaacaaattcttcctcctaagccatggcatatcagttatacagaaatactactttgggaaacagtcttcaggagagcctagatgagctcatacagtctcaacagatcaccccccaacttgcccttcaagttctacttcagtttgataaggctataaatgcagcactggctcagagggtcaggaacagagtcaatttcaggggctctctaaatacgtacagattctgcgataatgtgtggacttttgtactgaatgatgttgaattcagagaggtgacagaacttattaaagtggataaagtgaaaattgtagcctgtgatggtaaaaatactggctccaatactacagaatgaatagaaaaaatatgacttttttacaccatcttctgttattcattgcttttgaagagaagcatagaagagactttttatttattctagaattgcagaaatgactacactgtgctataccagagaattccagtagaaagaaacttgtaactctgtagcctcttacatcacctttattatacagcatgaaaaaccataacttttttttaaggacaaaagttgttgccttccttaagaaccttctttaataaactcattttaaaactctgaaa

SEQ ID NO: 225786 - DNA, 993 bp, Homo Sapiens
cccactttgtacaaaaaagttgggtctctaatatttcaaacaggagctccctttagcgagtccttcttttcctgactgcagctcttttcattttgccatccttttccagctccatgatggttctgcaggtttctgcggccccccggacagtggctctgacggcgttactgatggtgctgctcacatctgtggtccagggcagggccactccagagaattaccttttccagggacggcaggaatgctacgcgtttaatgggacacagcgcttcctggagagatacatctacaaccgggaggagttcgcgcgcttcgacagcgacgtgggggagttccgggcggtgacggagctggggcggcctgctgcggagtactggaacagccagaaggacatcctggaggagaagcgggcagtgccggacaggatgtgcagacacaactacgagctgggcgggcccatgaccctgcagcgccgagtccagcctagggtgaatgtttccccctccaagaaggggcccttgcagcaccacaacctgcttgtctgccacgtgacggatttctacccaggcagcattcaagtccgatggttcctgaatggacaggaggaaacagctggggtcgtgtccaccaacctgatccgtaatggagactggaccttccagatcctggtgatgctggaaatgaccccccagcagggagatgtctacacctgccaagtggagcacaccagcctggatagtcctgtcaccgtggagtggaaggcacagtctgattctgcccggagtaagacattgacgggagctgggggcttcgtgctggggctcatcatctgtggagtgggcatcttcatgcacaggaggagcaagaaagttcaacgaggatctgcataaacagggttcctgagctcactgaaaagactattgtgccttaagaaaagcatttgctgtgtttcgttagcatctggctccaggacagaccttcaacttccaaatt

SEQ ID NO: 225787 - DNA, 1151 bp, Homo Sapiens; identical to SEQ ID NO: 191375

SEQ ID NO: 225788 - DNA, 1188 bp, Homo Sapiens; identical to SEQ ID NO: 191376

SEQ ID NO: 225789 - DNA, 877 bp, Homo Sapiens; identical to SEQ ID NO: 191377

SEQ ID NO: 225790 - DNA, 896 bp, Homo Sapiens; identical to SEQ ID NO: 191379

SEQ ID NO: 225791 - DNA, 901 bp, Homo Sapiens; identical to SEQ ID NO: 191380

SEQ ID NO: 225792 - DNA, 1033 bp, Homo Sapiens; identical to SEQ ID NO: 191381

SEQ ID NO: 225793 - DNA, 931 bp, Homo Sapiens; identical to SEQ ID NO: 191382

SEQ ID NO: 225794 - DNA, 912 bp, Homo Sapiens; identical to SEQ ID NO: 191383

SEQ ID NO: 225795 - DNA, 877 bp, Homo Sapiens; identical to SEQ ID NO: 191384

SEQ ID NO: 225796 - DNA, 914 bp, Homo Sapiens; identical to SEQ ID NO: 191385

SEQ ID NO: 225797 - DNA, 909 bp, Homo Sapiens; identical to SEQ ID NO: 191386

SEQ ID NO: 225798 - DNA, 1217 bp, Homo Sapiens; identical to SEQ ID NO: 191387

SEQ ID NO: 225799 - DNA, 1198 bp, Homo Sapiens; identical to SEQ ID NO: 191388

SEQ ID NO: 225800 - DNA, 898 bp, Homo Sapiens; identical to SEQ ID NO: 191389

SEQ ID NO: 225801 - DNA, 907 bp, Homo Sapiens; identical to SEQ ID NO: 191390

SEQ ID NO: 225802 - DNA, 861 bp, Homo Sapiens; identical to SEQ ID NO: 191391

SEQ ID NO: 225803 - DNA, 1743 bp, Homo Sapiens
ttggcgaccactttaaagcttttcaagccaggccaagaagctgtgaagtaccagggtcctcgggacttccagacactggaaaactggatgctgcagacactgaacgaggagccagtgacaccagagccggaagtggaaccgcccagtgcccccgagctcaagcaagggctgtatgagctctcagcaagcaactttgagctgcacgttgcacaaggcgaccactttatcaagttcttcgctccgtggtgtggtcactgcaaagccctggctccaacctgggagcagctggctctgggccttgaacattccgaaactgtcaagattggcaaggttgattgtacacagcactatgaactctgctccggaaaccaggttcgtggctatcccactcttctctggttccgagatgggaaaaaggtggatcagtacaagggaaagcgggatttggagtcactgagggagtacgtggagtcgcagctgcagcgcacagagactggagcgacggagaccgtcacgccctcagaggccccggtgctggcagctgagcccgaggctgacaagggcactgtgttggcactcactgaaaataacttcgatgacaccattgcagaaggaataaccttcatcaagttttatgctccatggtgtggtcattgtaagactctggctcctacttgggaggaactctctaaaaaggaattccctggtctggcgggggtcaagatcgccgaagtagactgcactgctgaacggaatatctgcagcaagtattcggtacgaggctaccccacgttattgcttttccgaggagggaagaaagtcagtgagcacagtggaggcagagaccttgactcgttacaccgctttgtcctgagccaagcgaaagacgaactttaggaacacagttggaggtcacctctcctgcccagctcccgcaccctgcgtttaggagttcagtcccacagaggccactgggttcccagtggtggctgttcagaaagcagaacatactaagcgtgaggtatcttctttgtgtgtgtgttttccaagccaacacactctacagattctttattaagttaagtttctctaagtaaatgtgtaactcatggtcactgtgtaaacattttcagtggcgatatatcccctttgaccttctcttgatgaaatttacatggtttcctttgagactaaaatagcgttgagggaaatgaaattgctggactatttgtggctcctgagttgagtgattttggtgaaagaaagcacatccaaagcatagtttacctgcccacgagttctggaaaggtggccttgtggcagtattgacgttcctctgatcttaaggtcacagttgactcaatactgtgttggtccgtagcatggagcagattgaaatgcaaaaacccacacctctggaagataccttcacggccgctgctggagcttctgttgctgtgaatacttctctcagtgtgagaggttagccgtgatgaaagcagcgttacttctgaccgtgcctgagtaagagaatgctgatgccataactttatgtgtcgatacttgtcaaatcagttactgttcaggggatccttctgtttctcacggggtgaaacatgtctttagttcctcatgttaacacgaagccagagcccacatgaactgttggatgtcttccttaaaaagggtaggcatggaaaattccacgaggctcattctcagtatctcattaactcattgaaa

SEQ ID NO: 225804 - DNA, 1264 bp, Homo Sapiens; identical to SEQ ID NO: 191398

SEQ ID NO: 225805 - DNA, 1224 bp, Homo Sapiens; identical to SEQ ID NO: 191399

SEQ ID NO: 225806 - DNA, 1214 bp, Homo Sapiens; identical to SEQ ID NO: 191400
  misc_feature (831)..(839): n is a, c, g, or t

SEQ ID NO: 225807 - DNA, 431 bp, Homo Sapiens; identical to SEQ ID NO: 191401

SEQ ID NO: 225808 - DNA, 1055 bp, Homo Sapiens
tatcatcctgagcactgaggtatgctttccatggccgagacccagccctactcattgcgatggtctggatgttcactacttgaaagagccatctggaggggtgtcaggatggaattctccccggccaaggcaacacttgctgatgagcaactttaaggctaagccaagttttctcaaaataatcagcagtaagctggcgattggggactagcatgagggctccagaatcagggagttcttgtaccctctccttgttctcttcaggaatcaagggtcctgatgcggcaaaggatgaagttttaggaagctctgggtcacaacgctctgccccctggcatttagagatagttgcccagtgggctttgccatacactggcaccagtgtgttgaagtctgaggcccagctattcacaggtctttctgccggatcctccaaaagtccaagagtagggtcagatttagggctacacagaatccgcttaacttcatcaatgccaactaagaggaggcgataatagaagagacctcggtcccgtacagccatatctttttcttcctctatgcagtaatacaacaaacgtcctagcatgtcctggcactcagcaggtcgggagaggaaaaggcgcagcaaagcagtgagcagctccatcttaacagctggaaatgtttccgacttcacattctcaacaaagtcctctaacacataaggagcattaggaattctttccccatggacaccaagtagccaaataagtgcttgcttcccctcactatcttgaatgttctcttcacagccgggcagggcctgacatacagcttcagtacactgaggacacaaccaaaccaggtctcggaaagtctgcaccaccactgtggtaatgtgctcttgtcgaagacccagcaactctgttaaaatctgaacacattgatctgtgtaagtcctggcaatgccacctatggcaaagatggcagcctgtgcaaagtccgcagacacatccgtgcagtaccctcgaagctcctctagcacctgctgcacattctcatcgttcacccaa

SEQ ID NO: 225809 - DNA, 1396 bp, Homo Sapiens
  misc_feature (723)..(731): n is a, c, g, or t
aacacatattggtttttgaatgcagtcaatctccaggggaaaagttaacaagttatctttcgtagcagaaaccattttgctgccacaaaattttcatcatcagaactaataaatcaagtgttccaaatacaatttgcactaaaaagattggcattattttcctcatcagcagaatttataacagtgtgtggtatctagaaatacttatatatacaattccacactggaagacactcagcaattaatgaagttaattactgggccaacttgagaggaaaaaatggaaaagaaactaaaatgttgggtgaattctaccaaagtcagccgtggtggctgcactggcacagaatactaaactgagtgtgactattttcactgcaacaaatgaaaaaaacaaaatgtgcctgtttaaagcactcagtagagggctgatgaaactaattttttttcctttaagacatgcactcttgagtcctacagtaactgagtgtttgtttagacagcacaagaaggggtgagagtgcgtctcctagccttaatgtgggagggtagtttcagtcactcatcggctttcattattgtgcggaaatattagaaaacctcattgatcaattttatgtatttgaatatcagcaaattgaaattttccataattatcattaatttgtaaccacatccagtgtcatgcttactccttagagttcagatgaattcttaaaattnnnnnnnnnctccatagtactaattttgtttctttatatagtttgcgtttgatattagtgcttgcaattgtattaaagtcaaaagctgatttttatggcatacacaagaatgccactttttcttttatttcataccaataatttaaagattgatatgctaaaaacaatttgcacagcactaaagcatgagctactttcatctaaacctgtaaaaatatgaaagatttttatattttttcactgggaagaaattcttcctggatgaaattacaaatatgtgtagaatatatttaataaaagacttataaaatacctaactacaggacttaaaatatagattggcgcgtagtatatagaacaatattccatataaataagtttagcctttataaaaatgaagttgcaggctgacattacattctgtacttactaagtgtcaacagcccttacaaacattaaatgtaaatggtttcaaatggtcagcgttgtttaaatgtaatcatgttattttattcattgttaatgctttgatgaaaaggctttatatgcagtagatctacgaaaatattgttcatactgatcagaattaaatttgtatagagcagagttttaaaatgaatgtaaatagcactaaacgttttctttctgcaacctgtacttacagattcttcctg

SEQ ID NO: 225810 - DNA, 970 bp, Homo Sapiens; identical to SEQ ID NO: 191403
  misc_feature (878)..(893): n is a, c, g, or t

SEQ ID NO: 225811 - DNA, 1461 bp, Homo Sapiens
ttggctggtgccgcccgcttgcccgtcggtcgctagctcgctcggtgcgcgtcgtcccgctccatggcgctcttcgtgcggctgctggctctcgccctggctctggccctgggccccgccgcgaccctggcgggtcccgccaagtcgccctaccagctggtgctgcagcacagcaggctccggggccgccagcacggccccaacgtgtgtgctgtgcagaaggttattggcactaataggaagtacttcaccaactgcaagcagtggtaccaaaggaaaatctgtggcaaatcaacagtcatcagctacgagtgctgtcctggatatgaaaaggtccctggggagaagggctgtccagcagccctaccactctcaaacctttacgagaccctgggagtcgttggatccaccaccactcagctgtacacggaccgcacggagaagctgaggcctgagatggaggggcccggcagcttcaccatcttcgcccctagcaacgaggcctgggcctccttgccagctgaagtgctggactccctggtcagcaatgtcaacattgagctgctcaatgccctccgctaccatatggtgggcaggcgagtcctgactgatgagctgaaacacggcatgaccctcacctctatgtaccagaattccaacatccagatccaccactatcctaatgggattgtaactgtgaactgtgcccggctcctgaaagccgaccaccatgcaaccaacggggtggtgcacctcatcgataaggtcatctccaccatcaccaacaacatccagcagatcattgagatcgaggacacctttgagacccttcgggctgctgtggctgcatcagggctcaacacgatgcttgaaggtaacggccagtacacgcttttggccccgaccaatgaggccttcgagaagatccctagtgagactttgaaccgtatcctgggcgacccagaagccctgagagacctgctgaacaaccacatcttgaagtcagctatgtgtgctgaagccatcgttgcggggctgtctgtagagaccctggagggcacgacactggaggtgggctgcagcggggacatgctcactatcaacgggaaggcgatcatctccaataaagacatcctagccaccaacggggtgatccactacattgatgagctactcatcccagactcagccaagacactatttgaattggctgcagagtctgatgtgtccacagccattgaccttttcagacaagccggcctcggcaatcatctctctggaagtgagcggttgaccctcctggctcccctgaattctgtattcaaagatggaacccctccaattgatgcccatacaaggaatttgcttcggaaccacataattaaagaccagctggcctctaagtatctgtaccatggacagaccctggaaactctgggcggcaaaaactgagagtttttg

SEQ ID NO: 225812 - DNA, 924 bp, Homo Sapiens; identical to SEQ ID NO: 191406

SEQ ID NO: 225813 - DNA, 1493 bp, Homo Sapiens
ttggcttgttagatctctaaaccaacaaaccaactggactcttttttaagaacgtctcaaacacccgggcttctggttctttcatgcgttaccttattttgagcaaggtccttactctgctttttaacttttcctggtgctttacaggaaatgtaaggaggtaacggatgttatggagttgttggcatatttcagaggcttatatgcacattgaaggctctttcatcataaatgttttttctttcttcccccactgttgatagctgcaaaacaattagcatcagccttgaccagctgcacgtactagattttaaaatgtgtgcattttcattttggagaagatgtaatggaccaacattaatcattgtttttttctttacccaacctggcatagaagtaagaggaagagaatgaacaagaaatatattggttatttttaggttctttataagaaagatggaggaagacagtgggtggggaagaatgggtttgaaaaaggcaggcaaataggaaatgaagttatttttggtgatttttctaaggtagttggataataatctaaataaaggactcttattattttgggtctttgaattcataaaaagtaattttctctgtagatgctaattgagtgtggtaagatgtcttgttgcttgaaagttgtattttcgttgctctacctggagagcatataacagtgcttttatgtttcaggatgccactggagtcatcctcttcaatgccactatccttcccatctctcttaccctcagtaccacacaatactaacccttcccctcctctgatgtcttacatcacctcccaggagatgaagtgtattcttcactggtttgccaattggtcaggtccccagcgtgaacgtttcctagaggacctggtagctaaggcagtgccagaaaaattacaaccactgctggatagtctggagcagcttagtgtgtctggggcagaccgaccaccttctatctttgagtgccagctacatctttgggatcagtggtttcgaggctgggctgagcaggagcgcaatgaatttgtcagacagctggagttcagtgagccagacttcgtggcaaagttttaccaagcagtggctgctacagctggtaaggactgataggcattcagaccaaagaagataaccatagctgatggagccatgactctctacaatgataactcaattcaaatgtgtcgcctaaagctctggaactggtattccaaccagctgaccgaactcactgaccagtacaggcatggttatttcaacattaatagcatgtcaactggactcctatttgtaaatgttatcaatctaagcaatccagctcatcagtctactagtttgcttctttccgagagatgtcaagtcctcaagaatttgatggcttcttctgcagctataaccacaaggaacctacacattgtaactcaagtccactgctggctcatgaaatgtgtaaagtagaacc

SEQ ID NO: 225814 - DNA, 938 bp, Homo Sapiens; identical to SEQ ID NO: 191407

SEQ ID NO: 225815 - DNA, 1553 bp, Homo Sapiens
ttggcggagaggcagattcgctgctccgcagcacggccggagctggtcgggtcaagagtcgggatttgtggggagaggttttccactggtcaagagaaggctttaagaaagacggtattaatctcccgttgcggctcccgcctggtcccatcttctgcccgctcctccaggaaatgaatctgctgccgaatattgagagtccagtgactcggcaggagaagatggcgaccgtgtgggatgaggccgagcaagatggaattggggaggaggtgctcaagatgtccacggaggagatcatccagcgcacacggctgctggacagtgagatcaagatcatgaagagtgaagtgttgagagtcacccatgagctccaagccatgaaggacaagataaaagagaacagtgagaaaatcaaagtgaacaagaccctgccgtaccttgtctccaacgtcatcgagctcctggatgttgatcctaatgaccaagaggaggatggtgccaatattgacctggactcccagaggaagggcaagtgtgctgtgatcaaaacctctacacgacagacgtacttccttcctgtgattgggttggtggatgctgaaaagctaaagccaggagacctggtgggtgtgaacaaagactcctatctgatcctggagacgctgcccacagagtatgactcgcgggtgaaggccatggaggtagacgagaggcccacggagcaatacagtgacattgggggtttggacaagcagatccaggagctggtggaggccattgtcttgccaatgaaccacaaggagaagtttgagaacttggggatccaacctccaaaaggggtgctgatgtatgggcccccagggacggggaagaccctcctggcccgggcctgtgccgcacagactaaggccaccttcctaaagctggctggcccccagctggtgcagatgttcattggagatggtgccaagctagtccgggatgcctttgccctggccaaggagaaagcgccctctatcatcttcattgatgagttggatgccatcggcaccaagcgctttgacagtgagaaggctggggaccgggaggtgcagaggacaatgctggagcttctgaaccagctggatggcttccagcccaacacccaagttaaggtaattgcagccacaaacagggtggacatcctggaccccgccctcctccgctcgggccgccttgaccgcaagatagagttcccgatgcccaatgaggaggcccgggccagaatcatgcagatccactcccgaaagatgaatgtcagtcctgacgtgaactacgaggagctggcccgctgcacagatgacttcaatggggcccagtgcaaggctgtgtgtgtggaggcgggcatgatcgcactgcgcaggggtgccacggagctcacccacgaggactacatggaaggcatcctggaggtgcaggccaagaagaaagccaacctacaatactacgcctagggcacacaggccagccccagtctcacggctgaagtgcgcaataaaagatggtttaaggtc

SEQ ID NO: 225816 - DNA, 1096 bp, Homo Sapiens; identical to SEQ ID NO: 191408

SEQ ID NO: 225817 - DNA, 1046 bp, Homo Sapiens
ttggcagggatcctccgccaggaaggcagggacactcccgagcgcaggcgagaaggctgggggagggggcgcggtgggaggagtaggagaagacaaaagccgaaagcgaagagggcccgggctgcacacaccggctgggaggcagccgtctgtgcagcgagcagccggcgcggggaggccgcagtgcacggggcgtcacagtcggcaggcagcatggggaagggagggaaccagggcgagggggccgccgagcgcgaggtgtcggtgcccaccttcagctgggaggagattcagaagcataacctgcgcaccgacaggtggctggtcattgaccgcaaggtttacaacatcaccaaatggtccatccagcacccggggggccagcgggtcatcgggcactacgctggagaagatgcaacggatgccttccgcgccttccaccctgacctggaattcgtgggcaagttcttgaaacccctgctgattggtgaactggccccggaggagcccagccaggaccacggcaagaactcaaagatcactgaggacttccgggccctgaggaagacggctgaggacatgaacctgttcaagaccaaccacgtgttcttcctcctcctcctggcccacatcatcgccctggagagcattgcatggttcactgtcttttactttggcaatggctggattcctaccctcatcacggcctttgtccttgctacctctcaggcccaagctggatggctgcaacatgattatggccacctgtctgtctacagaaaacccaagtggaaccaccttgtccacaaattcgtcattggccacttaaagggtgcctctgccaactggtggaatcatcgccacttccagcaccacgccaagcctaacatcttccacaaggatcccgatgtgaacatgctgcacgtgtttgttctgggcgaatggcagcccatcgagtacggcaagaagaagctgaaatacctgccctacaatcaccagcacgaatacttcttcctgattgggccgccgctgctcatccccatgta

SEQ ID NO: 225818 - DNA, 927 bp, Homo Sapiens; identical to SEQ ID NO: 191413

SEQ ID NO: 225819 - DNA, 863 bp, Homo Sapiens; identical to SEQ ID NO: 191424

SEQ ID NO: 225820 - DNA, 502 bp, Homo Sapiens; identical to SEQ ID NO: 191426

SEQ ID NO: 225821 - DNA, 1186 bp, Homo Sapiens
actttgtacaaaaaagttggctcacacaaagcccaaacgcggagaaaatggcggcaggggtcgaagcggcggcggaggtggcggcgacggagatcaaaatggaggaagagagcggcgcgcccggcgtgccgagcggcaacggggctccgggccctaagggtgaaggagaacgacctgctcagaatgagaagaggaaggagaaaaacataaaaagaggaggcaatcgctttgagccatatgccaatccaactaaaagatacagagccttcattacaaacataccttttgatgtgaaatggcagtcacttaaagacctggttaaagaaaaagttggtgaggtaacatacgtggagctcttaatggacgctgaaggaaagtcaaggggatgtgctgttgttgaattcaagatggaagagagcatgaaaaaagctgcggaagtcctaaacaagcatagtctgagcggaagaccactgaaagtcaaagaagatcctgatggtgaacatgccaggagagcaatgcaaaaggtgatggctacgactggtgggatgggtatgggaccaggtggcccaggaatgattactatcccacccagtatcctaaataatcccaacatcccaaatgagattatccatgcattacaggctggaagacttggaagcacagtatttgtagcaaatctggattataaagttggctggaagaaactgaaggaagtatttagtatggctggtgtggtggtccgagcagacattcttgaagataaagatggaaaaagtcgtggaataggcactgttacttttgaacagtccattgaagctgtgcaagctatatctatgttcaatggccagctgctatttgatagaccaatgcacgtcaagatggatgagagggccttaccaaaaggagatttcttccctcctgagcgtccacaacaacttccccatggccttggtggtattggcatggggttaggaccaggagggcaacccattgatgccaatcacctgaataaaggcatcggaatgggaaacatatgtcccgcagaatgggaatggaaggcataggatttggaataaataaatgggaggaatggaggggcctttggtggtggtatggaaaacatgggtcgatttggatctgggatgaacatgggcaggataaatgaaatcctaagtaatgcactgaa

SEQ ID NO: 225822 - DNA, 1083 bp, Homo Sapiens; identical to SEQ ID NO: 191428

SEQ ID NO: 225823 - DNA, 1636 bp, Homo Sapiens; identical to SEQ ID NO: 191429

SEQ ID NO: 225824 - DNA, 612 bp, Homo Sapiens; identical to SEQ ID NO: 191431

SEQ ID NO: 225825 - DNA, 975 bp, Homo Sapiens
  misc_feature (822)..(830): n is a, c, g, or t
actttgtacaaaaaagttgggcaagatggcggaggagccgcagtctgtgttgcagcttcctacttcaattgctgctggaggggaaggacttacggatgtctccccagaaacaaccaccccggagcccccgtcttccgctgcagtttccccgggaacagaggaacctgctggcgacaccaagaaaaaaattgacattttgctaaaggctgtgggagacactcctattatgaaaacaaagaagtgggcagtagagcgaacacgaaccatccaaggactcattgacttcatcaaaaagtttcttaaacttgtggcctcagaacagttgtttatttatgtgaatcagtcctttgctccttccccagaccaagaagttggaactctctatgagtgttttggcagtgatggtaaactggttttacattactgcaagtctcaggcgtggggatgaaccacaaagaaaatcaacttgctactacatgaaatggattttcacggaagagacagctctgaaaagttttgatgcttgtggcaagagacttaacagatgtgatctatttagtatgtgtctactctatgtttatgcataagaaaacatccatagcatgaatggactcagaaaaatgtgatttgtattaatgcaccagtcatcataaaagatggtcatgatagtacacccattgctcctacttgttactattattgctgcagatctgcctccaaggttgaaaaggagactaagactgtataaacatcttcattgtcagttctcaaaatgactgaaattgttttcatggtaaaagttaatatactaaaagggttccnnnnnnnnnaatgtttacatttatctctatgtttacctttttagtcacattgacctgctggctgaatactcaaatagtccagtagagggcagtccaccaggcagaaaagttagcgttttggtttcacatctttgctggggaataataagggaaa

SEQ ID NO: 225826 - DNA, 1049 bp, Homo Sapiens; identical to SEQ ID NO: 191440

SEQ ID NO: 225827 - DNA, 961 bp, Homo Sapiens; identical to SEQ ID NO: 191441
  misc_feature (173)..(279): n is a, c, g, or t

SEQ ID NO: 225828 - DNA, 1418 bp, Homo Sapiens
ttggagaagttgcaaagccctccgcatcatcgtccggattggcagtggttttgacaacatcgacatcaagtcggccggggatttaggcattgccgtctgcaacgtgcccgcggcgtctgtggaggagacggccgactcgacgctgtgccacatcctgaacctgtaccggcgggccacctggctgcaccaggcgctgcgggagggcacacgagtccagagcgtcgagcagatccgcgaggtggcgtccggcgctgccaggatccgcggggagaccttgggcatcatcggacttggtcgcgtggggcaggcagtggcgctgcgggccaaggccttcggcttcaacgtgctcttctacgacccttacttgtcggatggcgtggagcgggcgctggggctgcagcgtgtcagcaccctgcaggacctgctcttccacagcgactgcgtgaccctgcactgcggcctcaacgagcacaaccaccacctcatcaacgacttcaccgtcaagcagatgagacaaggggccttcctggtgaacacagcccggggtggcctggtggatgagaaggcgctggcccaggccctgaaggagggccggatccgcggcgcggccctggatgtgcacgagtcggaacccttcagctttagccagggccctctgaaggatgcacccaacctcatctgcaccccccatgctgcatggtacagcgagcaggcatccatcgagatgcgagaggaggcggcacgggagatccgcagagccatcacaggccggatcccagacagcctgaagaactgtgtcaacaaggaccatctgacagccgccacccactgggccagcatggaccccgccgtcgtgcaccctgagctcaatggggctgcctataggtaccctccgggcgtggtgggcgtggcccccactggcatcccagctgctgtggaaggtatcgtccccagcgccatgtccctgtcccacggcctgccccctgtggcccacccgccccacgccccttctcctggccaaaccgtcaagcccgaggcggatagagaccacgccagtgaccagttgtagcccgggaggagctctccagcctcggcgcctgggcagagggcccggaaaccctcggaccagagtgtgtggaggaggcatctgtgtggtggccctggcactgcagagactggtccgggctgtcaggaggcgggagggggcagcgctgggcctcgtgtcgcttgtcgtcgtccgtcctgtgggcgctctgccctgtgtccttcgcgttcctcgttaagcagaagaagtcagtagttattctcccatgaacgttcttgtctgtgtacagtttttagaacattacaaaggatctgtttgcttagctgtcaacaaaaagaaaaacctgaaggagcatttggaagtcaatttgagg

SEQ ID NO: 225829 - DNA, 564 bp, Homo Sapiens; identical to SEQ ID NO: 191458

SEQ ID NO: 225830 - DNA, 594 bp, Homo Sapiens; identical to SEQ ID NO: 191459

SEQ ID NO: 225831 - DNA, 1304 bp, Homo Sapiens
  misc_feature (1000)..(1013): n is a, c, g, or t
ttggcttgtcttgttcccgaagaagtagaagcatcgaaagcgttggagaggtgttaccggaacggcggcgacaagggtgttcccgaactagagtggggcatacataatcttgctgctatgcttcgaagctgtagtctgaatcaacctaagttttaaacagaaggtgaacctctgagatagaaaatcaagtatattttaaaagaagggatgtgggatcaaggaggacagccttggcagcagtggcccttgaaccagcaacaatggatgcagtcattccagcaccaacaggatccaagccagattgattgggctgcattggcccaagcttggattgcccaaagagaagcttcaggacagcaaagcatggtagaacaaccaccaggaatgatgccaaatggacaagatatgtctacaatggaatctggtccaaacaatcatgggaatttccaaggggattcaaacttcaacagaatgtggcaaccagaatggggaatgcatcagcaacccccacacccccctccagatcagccatggatgccaccaacaccaggcccaatggacattgttcctccttctgaagacagcaacagtcaggacagtggggaatttgcccctgacaacaggcatatatttaaccagaacaatcacaactttggtggaccacccgataattttgcagtggggccagtgaaccagtttgactatcagcatggggctgcttttggtccaccgcaaggtggatttcatcctccttattggcaaccaggacctccaggacctccagcacctccccagaatcgaagagaaaggccatcatcattcagggatcgtcagcgttcacctattgcacttcctgtgaagcaggagcctccacaaattgacgcagtaaaacgcaggactcttcccgcttggattcgcgaaggtcttgaaaaaatggaacgtgaaaagcagaagaaattggagaaagaaagaatggaacaacaacgttcacaattgtccnnnnnnnnnnnnnnggccacagaagatgctgaaggaggggatggccctcgtttacctcagagaagtaaatttgatagtgatgaggaagaagaagacactgaaaatgttgaggctgcaagtagtgggaaagtcaccagaagtccatccccagttcctcaagaagagcacagtgaccctgagatgactgaagaggagaaagagtatcaaatgatgttgctgacaaaaatgcttctaacagaaattctgctggatgtcacagatgaagaaatttattacgtagccaaagatgcacaccgcaaagcaac

SEQ ID NO: 225832 - DNA, 1136 bp, Homo Sapiens
ttgggtgtgtctgcgggagaaagaggagaatcgcccaagcggcctcggaagtcccagggagtggaggcccccgccgtggagccgtgtggtgtatgtgtggtaacaccatgtctgtgcccctgctcaccgatgctgccaccgtgtctggagctgagcgggaaacggccgcggttatttttttacatggacttggagacacagggcacagctgggctgacgccctctccaccatccggctccctcacgtcaagtacatctgtccccatgcgcctaggatccctgtgaccctcaacatgaagatggtgatgccctcctggtttgacctgatggggctgagtccagatgccccagaggacgaggctggcatcaagaaggcagcagagaacatcaaggccttgattgagcatgaaatgaagaacgggatccctgccaatcgaatcgtcctgggaggcttttcacagggcggggccctgtccctctacacggccctcacctgcccccaccctctggctggcatcgtggcgttgagctgctggctgcctctgcaccgggccttcccccaggcagctaatggcagtgccaaggacctggccatactccagtgccatggggagctggaccccatggtgcccgtacggtttggggccctgacggctgagaagctccggtctgttgtcacacctgccagggtccagttcaagacatacccgggtgtcatgcacagctcctgtcctcaggagatggcagctgtgaaggaatttcttgagaagctgctgcctcctgtctaactagtcgctggccccagtgcagtaccccagctcatgggggactcagcaagcaagcgtggcaccatcttggatctgagccggtcgagcccctgtccccacccttcctgacctgtccttttcccacaggcctctgggggcaggtggcaaggcctggccgggccttccttcctggccttagccacctggctctgtctgcagcaggggcaggctgctttcttatccatttccctggaggcgggcccccctggcagcagtatttggaggggctacaggcagctggagaaagggcccagccgctgacccactcactcaggacctcactcacctagccccgctttgggcccccct

SEQ ID NO: 225833 - DNA, 686 bp, Homo Sapiens; identical to SEQ ID NO: 191463
  misc_feature (186)..(210): n is a, c, g, or t

SEQ ID NO: 225834 - DNA, 750 bp, Homo Sapiens; identical to SEQ ID NO: 191465
  misc_feature (189)..(213): n is a, c, g, or t

SEQ ID NO: 225835 - DNA, 777 bp, Homo Sapiens; identical to SEQ ID NO: 191466
  misc_feature (412)..(444): n is a, c, g, or t

SEQ ID NO: 225836 - DNA, 885 bp, Homo Sapiens
ttggggcgtggagtcgacggctggagagaagccgggagcgagcccaggcggcagtcttgattcccttttggccagcagtttttaggtctgtcagtactgcactgcaagaatggcagattttgggatctctgctggccagtttgtggcagtggtctgggataagtcatccccagtggaggctctgaaaggtctggtggataagcttcaagcgttaaccggcaatgagggccgcgtgtctgtggaaaacatcaagcagctgttgcaatctgcccacaaagaatccagctttgacattattttgtcaggtttagtcccaggaagcaccactctgcacagtgctgagattttggctgaaatcgcccggatccttcggcctggtggatgtctttttctgaaggagccagtagagacagctgtagataacaatagcaaagtgaagacagcatctaagctgtgttcagccctgactctttctggtcttgtggaagtgaaagagctgcagcgggagcccctaacccctgaggaagtacagtctgttcgagaacaccttggtcatgaaagtgacaacctgctgtttgttcagatcacaggcaaaaaaccaaactttgaagtgggttcttctaggcagcttaagctttccatcaccaagaagtcttctccttcagtgaaacctgctgtggaccctgctgctgccaagctgtggaccctctcagccaacgatatggaggacgacagcatggatctcattgactcagatgagctgctggatccagaagatttgaagaagccagatctagcttccctgcgggctgcttcttgtggggaagggaaaaagaggaaggcctgtaagaactgcacctgtggccttgccgaagaactggaaaa

SEQ ID NO: 225837 - DNA, 1608 bp, Homo Sapiens
gttggctttatgagtataaagtctttggtgttctggaggactgctcaccaactctactggcagacatctatatggactcagattacagaaaacaatgggaccagtatgttaaagaactctatgaacaagaatgcaacggagagactgtggtctactgggaagtgaagtacccttttcccatgtccaacagagactatgtctaccttcggcagcggcgagacctggacatggaagggaggaagatccatgtgatcctggcccggagcacctccatgcctcagcttggcgagaggtctggggtgatccgggtgaagcaatacaagcagagcctggcgattgagagtgacggcaagaaggggagcaaagttttcatgtattacttcgataacccgggtggccaaattccgtcctggctcattaactgggccgccaagaatggagttcctaacttcttgaaagacatggcaagagcctgtcagaactacctcaagaaaacctaagaaagagaactgggaacattgcatccatgggttgatgtctctggaagtgcaaccacccaatgtctctggaagtgccacctggaagtgccacctgggtgtctctggaagagcacccaccactgttcagccttcccctgctgtttctgtcttcagaggcctacacactaccacatcctttctaagcatgtttgcctgacatccagctcactcgtctgcttcctttctcgctccccccatcctgggctgggctgccttcttctacagttcaatatggggcagactagggaaacctttgcttgcttactattaggaggggaagtcttcagtagggaacacgatcattccattgtgcaattttacggggatgggtgggcggagggacacaacaaaatttaagaatgactatttgggcgggctggctcttttgcagcttgtgatttcttccagcttgggaggggctgctggaagtggcatttcgttcagagctgactttcagtgcacccaaactggatgacgtgccaatgtccatttgccttatgctttgtggagctgattaggctgggatttgaggtgataatccagtaagtctttcctcgttcctacttgtggaggatcagtagctgttatgatgccagaccatttggagaagtatcagaggcctgaccggacacataatacgacaaccacatttttcctcatcatccatgaggaaatggatgatttctcttttccatatgtcactgggggaaaggctgcctgtacctctcaagctttgcattttactggaaactgaggcgtcaagatggctgtggcagctagcaaaagcaaagatgctttgtgcatagccttgtgaaaaagtatctttctatgcaataagatgaattttcctcccagaatatttagaaatgtagaagggataacagttcacagccaggtaaaatttaactggtggcttaatgactctgcacctttttctcaggaattctgcctaagttgtctgccttttctaccaccaaaaagacttttagttttctatgctttctcctgaattttggtagggtaaggtatttctatgtcaaaggcacagccttgatgatctcagggaaaa

SEQ ID NO: 225838 - DNA, 1267 bp, Homo Sapiens
  misc_feature (189)..(197): n is a, c, g, or t
  misc_feature (970)..(978): n is a, c, g, or t
ttggctcagaagatgattttaacagttcagaacagatgtgtgcaatattggtgcatgtaataatgttgagtggcagtcaaaagtcatgatttttatcttagttcttcattactgcattgaaaaggaaaacctgtctgagaaaatgcctgacagtttaatttaaaactatggtgtaagtctttgacaagnnnnnnnnncaaacaaacacttctttccatcagtaacactggcaatcttcctgttaaccactctccttagggatggtatctgaaacaacaatggtcaccctcttgagattcgttttaagtgtaattccataatgagcagaggtgtacgcgaaattgtgttatgactgatagccttcagctacaaaaagataggactgacctggtttaaagtgttctattttgtaaatcattccatttgagtctttctgatgaacttggctatactgaaatctgttattttagtgaggctccaaaatgagcaaagctaggcctgattagagtagagtgactattaaaaaacataactttctaggagctataaatcaaagttttaaaaagatgtttggatatatttgagtattccgatcatgaaaacagaaattgccctgcctactacaaggacagactgatgggaaattatgcacctggtcaacttagcttttaagcagacgatgctgtaaaaactaacggcttctctgatatttattgtaagttttagtactgatctccttttccagtgctgcacactcctggtttggaactttaatagcgttgcaacgaaatcctatatccagtttcctgtaatttaattgaagaaaaatacatccaaataaagactttattattaacagaccagatagcatcagaaatcatgtgactgttatgattatcagaatgtcttaactttttagggcaaagttaacactgaaagttctagcttaagtgttgaaacttttgtgggnnnnnnnnntcacttttgaaactcagacttcagtgtatacccaataatttaaaattatgtgaaatgttttaaatttgtgaactcgtaattactgttttaatgattcagtttcttcagagtggtaattgtataaaattgctattgcagctttacattcaatatgatgtgcctgtaaaccaaggagttttccccgtttgtaaaaagacattgtagataattgaatgtttgattttagaaaggtcattagtttcttgttacacattttgttagtctggtttttgttgcttatcgggtttaa

SEQ ID NO: 225839 - DNA, 968 bp, Homo Sapiens; identical to SEQ ID NO: 191473
  misc_feature (484)..(492): n is a, c, g, or t

SEQ ID NO: 225840 - DNA, 1190 bp, Homo Sapiens; identical to SEQ ID NO: 191475
  misc_feature (55)..(63): n is a, c, g, or t
  misc_feature (836)..(845): n is a, c, g, or t

SEQ ID NO: 225841 - DNA, 810 bp, Homo Sapiens; identical to SEQ ID NO: 191477
  misc_feature (444)..(452): n is a, c, g, or t

SEQ ID NO: 225842 - DNA, 1303 bp, Homo Sapiens; identical to SEQ ID NO: 191478
  misc_feature (182)..(190): n is a, c, g, or t
  misc_feature (963)..(971): n is a, c, g, or t

SEQ ID NO: 225843 - DNA, 912 bp, Homo Sapiens; identical to SEQ ID NO: 191479
  misc_feature (71)..(115): n is a, c, g, or t

SEQ ID NO: 225844 - DNA, 1193 bp, Homo Sapiens; identical to SEQ ID NO: 191480
  misc_feature (791)..(800): n is a, c, g, or t

SEQ ID NO: 225845 - DNA, 1364 bp, Homo Sapiens; identical to SEQ ID NO: 191481

SEQ ID NO: 225846 - DNA, 1621 bp, Homo Sapiens
actttgtacaaaaaagttggccagataacaacacaaccagaggattaaggctgctgtcccaagcatcaaattctgcttggacaatggagccaagtcggtagtccttatgagccacctaggccggcctgatggtgtgcccatgcctgacaagtactccttagagccagttgctgtagaactcaaatctctgctgggcaaggatgttctgttcttgaaggactgtgtaggcccagaagtggagaaagcctgtgccaacccagctgctgggtctgtcatcctgctggagaacctccgctttcatgtggaggaagaagggaagggaaaagatgcttctgggaacaaggttaaagccgagccagccaaaatagaagctttccgagcttcactttccaagctaggggatgtctatgtcaatgatgcttttggcactgctcacagagcccacagctccatggtaggagtcaatctgccacagaaggctggtgggtttttgatgaagaaggagctgaactactttgcaaaggccttggagagcccagagcgacccttcctggccatcctgggcggagctaaagttgcagacaagatccagctcatcaataatatgctggacaaagtcaatgagatgattattggtggtggaatggcttttaccttccttaaggtgctcaacaacatggagattggcacttctctgtttgatgaagagggagccaagattgtcaaagacctaatgtccaaagctgagaagaatggtgtgaagattaccttgcctgttgactttgtcactgctgacaagtttgatgagaatgccaagactggccaagccactgtggcttctggcatacctgctggctggatgggcttggactgtggtcctgaaagcagcaagaagtatgctgaggctgtcactcgggctaagcagattgtgtggaatggtcctgtgggggtatttgaatgggaagcttttgcccggggaaccaaagctctcatggatgaggtggtgaaagccacttctaggggctgcatcaccatcataggtggtggagacactgccacttgctgtgccaaatggaacacggaggataaagtcagccatgtgagcactgggggtggtgccagtttggagctcctggaaggtaaagtccttcctggggtggatgctctcagcaatatttagtactttcctgccttttagttcctgtgcacagcccctaagtcaacttagcattttctgcatctccacttggcattagctaaaaccttccatgtcaagattcagctagtggccaagagatgcagtgccaggaacccttaaacagttgcacagcatctcagctcatcttcactgcaccctggatttgcatacattcttcaagatcccatttgaattttttagtgactaaaccattgtgcattctagagtgcatatatttatattttgcctgttaaaaagaaagtgagcagtgttagcttagttctcttttgatgtaggttattatgattagctttgtcactgtttcactactcagcatggaaacagatgaaattccatttgtaggtagtgagacaaaattgatgatccctttaagtaaacataaaagtgtcccttgaaaccctg

SEQ ID NO: 225847 - DNA, 1165 bp, Homo Sapiens; identical to SEQ ID NO: 191482

SEQ ID NO: 225848 - DNA, 970 bp, Homo Sapiens; identical to SEQ ID NO: 191483

SEQ ID NO: 225849 - DNA, 770 bp, Homo Sapiens; identical to SEQ ID NO: 191484

SEQ ID NO: 225850 - DNA, 138 bp, Homo Sapiens
gggcgcagagcgctgggccggagcggcctccccctccccgagctcgggggtcctttagccgctggggaccggggctgcagcctctgcagctgggtttcccactctgacaggcgccattttaccgtccaaaggacccaa

SEQ ID NO: 225851 - DNA, 826 bp, Homo Sapiens; identical to SEQ ID NO: 191494

SEQ ID NO: 225852 - DNA, 1190 bp, Homo Sapiens; identical to SEQ ID NO: 191496
  misc_feature (1062)..(1096): n is a, c, g, or t

SEQ ID NO: 225853 - DNA, 725 bp, Homo Sapiens
  misc_feature (89)..(149): n is a, c, g, or t
  misc_feature (638)..(650): n is a, c, g, or t
ttggaattttaaactttagatgatcattcctaaattgtccaatttatacaactgtgggagacttattcaaggttgtataaattggacannnnnnnnnnnnnnnnnnnnnnnnnnnnnnnnnnnnnnnnnnnnnnnnnnnnnnnnnnnnngttaatgcaaacaggacttaaatgaactttgatctctgttttaaagattattaaaaaacattgtgtatctatacatatggctcttgaggacttagctttcactacactacaggatatgatctccatgtagtccatataaacctgcagagtgattttccagagtgctcgatactgttaattacatctccattagggctgaaaagaatgacctacgtttctgtatacagctgtgttgcttttgatgttgtgttactgtacacagaagtgtgtgcactgaggctctgcgtgtggtccgtatggaaagcctggtagccctgcgagttaagtactgcttccattcattgtttacgctggaatttttctccccatggaatgtaagtaaaacttaagtgtttgtcatcaataaatggtaatactaaatttttttgttaatttattctcaaatgccactactgctaggttggtcccctcccaacttgcccctatccnnnnnnnnnnnnnaagaaaaaactttgtaatgcttgtgattccatctgggcaaaagtctgaagatctgaaataactttatatcaaacc

SEQ ID NO: 225854 - DNA, 1375 bp, Homo Sapiens
  misc_feature (1059)..(1078): n is a, c, g, or t
  misc_feature (1283)..(1291): n is a, c, g, or t
ttgggggagttctcctgagggaagaggagtggagtaggggggacgcggcggcggcgttgacaatgagttttcttggaggcttttttggtccaatttgtgagatcgatattgttcttaatgatggggaaaccaggaaaatggcagaaatgaaaactgaagatggcaaagtagaaaaacactatctcttctatgacggagaatccgtttcaggaaaggtaaacctagcctttaagcaacctggaaagaggctagaacaccaaggaattagaattgaatttgtaggtcaaattgaacttttcaatgacaagagtaatactcatgaatttgtaaacctagtgaaagaactagccttacctggagaactgactcagagcagaagttatgattttgaatttatgcaagttgaaaagccatatgaatcttacatcggtgccaatgtccgcttgaggtattttcttaaagtgacaatagtgagaagactgacagatttggtaaaagagtatgatcttattgttcaccagcttgccacctatcctgatgttaacaactctattaagatggaagtgggcattgaagattgtctacatatagaatttgaatataataaatcaaagtatcatttaaaggatgtgattgttggaaaaatttacttcttattagtaagaataaaaatacaacatatggagttacagctgatcaaaaaagagatcacaggaattggacccagtaccacaacagaaacagaaacaatcgccaaatatgaaataatggatggtgcaccagtaaaaggtgaatcaattccaataaggctatttttagcaggatatgacccaactccaacaatgagagatgtgaacaaaaaattttcagtaaggtactttttgaatttagtgcttgttgatgaggaagaccggaggtacttcaaacagcaggagataattttatggagaaaagctcctgaaaaactgaggaaacagagaacaaactttcaccagcgatttgaatctccagaatcacaggcatctgccgaacagcctgaaatgtgaactgaacaggagnnnnnnnnnnnnnnnnnnnnctcctgtaacccttgagattaagttcagcaggtcaaagatggttgcagctggagggggcggaaaaaggccaaaactccatatatgttagtcttcctttatcttacagcgcagcatttattttatgatataatgaaatgttcgttcatgtatatacatttttaaaagtgcttttctttgaaacactggaactttgttaagctgccnnnnnnnnnaaacttcctactttgatgataagcactcagatatatatcagccgtaaacatgaaaaatttttcatgtgagtaggctggtatttg

SEQ ID NO: 225855 - DNA, 907 bp, Homo Sapiens; identical to SEQ ID NO: 191511

SEQ ID NO: 225856 - DNA, 896 bp, Homo Sapiens; identical to SEQ ID NO: 191512

SEQ ID NO: 225857 - DNA, 1055 bp, Homo Sapiens
ttggcagaaaagggggcgggaagggctgtagggtacttgtcaattcgccgccatgaacgtggtttttgctgtgaagcagtacatttccaaaatgatagaggacagcgggcctggtatgaaagtacttctcatggataaagagacgactggcatagtgagtatggtatacacacaatcggagattctacagaaggaagtgtacctctttgaacgcattgattctcaaaatcgagagatcatgaaacacctgaaggcaatttgttttcttcgacctacaaaggagaatgtggattatattattcaggagctccgaagacccaaatacactatatatttcatttatttcagtaatgtgatcagcaagagtgacgtgaagtcattggctgaagctgatgaacaggaagttgtggctgaggttcaggaattttatggtgattacattgctgtgaacccacatttgttttccctcaatattttgggttgctgccagggtcgaaattgggatccagcccagctatctagaacaactcaagggcttacagctctccttttatctctgaagaagtgtcccatgattcgttatcagctctcatcagaggcagcaaagagacttgcagagtgcgttaagcaagtgataactaaagaatatgaactgtttgaattccgtcggacagaggttcctccattgctccttattttagatcgctgtgatgatgccatcaccccattgctaaaccagtggacatatcaggccatggtccacgaactactaggcataaacaacaatcggattgatctttccagagtgccgggaatcagtaaagacttaagagaagtggtcctatctgctgaaaatgatgaattctatgctaataatatgtacctgaactttgctgagattggtagcaatataaagaatctcatggaagattttcagaagaagaaaccaaaagaacagcaaaaactagaatcaatagcagacatgaaggcgtttgttgagaattatccacagttcaagaaaatgtctgggactgtttcaaagcatgtgacagtgg

SEQ ID NO: 225858 - DNA, 917 bp, Homo Sapiens; identical to SEQ ID NO: 191519
  misc_feature (806)..(826): n is a, c, g, or t

SEQ ID NO: 225859 - DNA, 955 bp, Homo Sapiens; identical to SEQ ID NO: 191520
  misc_feature (385)..(409): n is a, c, g, or t

SEQ ID NO: 225860 - DNA, 461 bp, Homo Sapiens; identical to SEQ ID NO: 191521

SEQ ID NO: 225861 - DNA, 739 bp, Homo Sapiens; identical to SEQ ID NO: 191524
  misc_feature (172)..(193): n is a, c, g, or t

SEQ ID NO: 225862 - DNA, 931 bp, Homo Sapiens; identical to SEQ ID NO: 191525

SEQ ID NO: 225863 - DNA, 1119 bp, Homo Sapiens; identical to SEQ ID NO: 191527
  misc_feature (126)..(145): n is a, c, g, or t

SEQ ID NO: 225864 - DNA, 1312 bp, Homo Sapiens; identical to SEQ ID NO: 191528
  misc_feature (778)..(778): n is a, c, g, or t

SEQ ID NO: 225865 - DNA, 1301 bp, Homo Sapiens; identical to SEQ ID NO: 191529

SEQ ID NO: 225866 - DNA, 869 bp, Homo Sapiens; identical to SEQ ID NO: 191530
  misc_feature (735)..(755): n is a, c, g, or t

SEQ ID NO: 225867 - DNA, 946 bp, Homo Sapiens; identical to SEQ ID NO: 191531

SEQ ID NO: 225868 - DNA, 932 bp, Homo Sapiens
ctttgtacaaaaaagttggcgtctatctccctgttgttcttcccatcggcgaagatggccctggagacggtgccgaaggacctgcggcatctgcgggcctgtttgctgtgttcgctggtcaagactatagaccagtttgaatatgatggttgtgacaattgtgatgcatatctacaaatgaagggtaaccgagagatggtatatgactgcactagctcttcctttgatggaatcattgcgatgatgagtccagaggacagctgggtctccaagtggcagcgagtcagtaactttaagccaggtgtatatgcggtgtcagtcactggtcgcctgccccaaggaatcgtgcgggagctgaaaagtcgaggagtggcctacaaatccagagacacagctataaagacctagcaagatgcaaggctgccagcatctttgctctccacctcctgcctctgcttatttcttgttctggaactaaatgaacagaacttcaaatacttcctaccctccaattcagactcagctgactgttgagagagcagcacatcattttatcattttatcttctttggactacaggtggggtgggagggatttgggttggtggattaacagatggaattgaggagagagtaggatgctgattttcctacccgtggcccaggtctgtgccttccccatgccaaggactctaggtcaaatgtcaataaatatgaacctcgagaaagttctgaaggccatgacacctgccttgcctccctcttccattctcttaggcacagtaatagcttatttgccctataagaaccttcccagagcagcagaggcccttctactccctcttgactgtctcagcctctgggattgcagcctttgtagtgtgcttccttgcttcctatcggagggtgctgatccagaaggctcagtaaccc

SEQ ID NO: 225869 - DNA, 1139 bp, Homo Sapiens
gagcaatgctttttctataatagccaactttgtacaaaaaagttggctccgtctccgcaggtcagctccgccgaaggcgccgccaaggaagagcccaagaggagatcggcgcggttgtcagctaaacctcctgcaaaagtggagcgaagccgaaaaaggcagcagcgaaggataaatcttcagacaaaaaagtgcaaacaaaagggaaaaggggagcaaagggaaaacaggccgaagtggctaaccaagaaactaaagaagacttacctgcggaaaacggggaaacgaagactgaggagagtccagcctctgatgaagcaggagagaaagaagccaagtctgattaataaccatataccatgtcttatcagtggtccctgtctcccttcttgtacaatccagaggaatatttttatcaactattttgtaaatgcaagttttttagtagctctagaaacatttttaagaaggagggaatcccacctcatcccattttttaagtgtaaatgcttttttttaagaggtgaaatcatttgctggttgtttattttttggtacaaccagaaaatagtgtgggatattgaattatgggaggctctgactgtctcgggtgtcagcttaacattccacagatggggggttagtttttatatcctataatacaaagcatattaaatggcaatatggagtcagtcctgcatttaatgtcttgaacattttaaattacttctattaccatgttgttttttagtagaattgtttcctaaagaaaaccactctttgatcatggctctctctgccagaattgtgtgcactctgtaacatctttgtggtagtcctgttttcctaataactttgttactgtgctgtgaaagattacagatttgaacatgtagtgtacgtgctgttgagttgtgaactggtgggccgtatgtaacagctgaccaacgtgaagatactggtacttgatagcctcttaaggaaaatttgcttccaaattttaagctggaaagtcactggaataactttaaaaaagaattacaatacatggctttttaaaatttcgttacgtatgttaagatttgtgtacaaattgaaatgtctgtactgatcctcaaccaataaaatctcactttatg

SEQ ID NO: 225870 - DNA, 1004 bp, Homo Sapiens; identical to SEQ ID NO: 191540

SEQ ID NO: 225871 - DNA, 1692 bp, Homo Sapiens
ctttgtacaaaaaagttggctaaaagcctccctggatcgccctttcacaaatttggaatctgccttctactccatcgtgggactcagcagccttggtgctcaggtgccagatgcaaagaaagcatgtacctacatcagatctaaccttgatcccagcaatgtggattccctcttctacgctgcccaggccagccaggccctctcaggatgtgagatctctatttcaaatgagaccaaagatctgcttctggcagctgtcagtgaggactcatctgttacccagatctaccatgcagttgcagctctaagtggctttggccttcccttggcatcccaagaagcactcagtgcccttactgctcgtctcagcaaggaggagactgtgctggcaacagtccaggctctgcagacagcatcccacctgtcccagcaggctgacctgaggagcatcgtggaggagattgaggaccttgttgctcgcctggatgaactcgggggcgtgtatctccagtttgaagaaggactggaaacaacagcgttatttgtggctgccacctacaagctcatggatcatgtggggactgagccatccattaaggaggatcaggtcatccagctgatgaacgcgatcttcagcaagaagaactttgagtccctctccgaagccttcagcgtggcctctgcagctgctgtgctctcgcataatcgctaccacgtgccagttgtggttgtgcctgagggctctgcttccgacactcatgaacaggctatcttgcggttgcaagtcaccaatgttctgtctcagcctctgactcaggccactgttaaactagaacatgctaaatctgttgcttccagagccactgtcctccagaagacatccttcacccctgtaggggatgtttttgaactaaatttcatgaacgtcaaattttccagtggttattatgacttccttgtcgaagttgaaggtgacaaccggtatattgcaaataccgtagagctcagagtcaagatctccactgaagttggcatcacaaatgttgatctttccaccgtggataaggatcagagcattgcacccaaaactacccgggtgacatacccagccaaagccaagggcacattcatcgcagacagccaccagaacttcgccttgttcttccagctggtagatgtgaacactggtgctgaactcactcctcaccagacatttgtccgactccataaccagaagactggccaggaagtggtgtttgttgccgagccagacaacaagaacgtgtacaagtttgaactggatacctctgaaagaaagattgaatttgactctgcctctggcacctacactctctacttaatcattggagatgccactttgaagaacccaatcctctggaatgtggctgatgtggtcatcaagttccctgaggaagaagctctctcgactgtcttgtcccagaaccttttcactccaaaacaggaaattcagcacctgttccgcgagcctgagaagaggccccccaccgtggtgtccaatacattcactgccctgatcctctcgccgttgcttctgctcttcgctctgtggatccggattggtgccaatgtctccaacttcacttttgctcctagcacgattatatttcacctgggacatgctgctatgctgggactcatgtatgtctactg

SEQ ID NO: 225872 - DNA, 1276 bp, Homo Sapiens; identical to SEQ ID NO: 191547
  misc_feature (1094)..(1124): n is a, c, g, or t

SEQ ID NO: 225873 - DNA, 1148 bp, Homo Sapiens; identical to SEQ ID NO: 191548

SEQ ID NO: 225874 - DNA, 1041 bp, Homo Sapiens; identical to SEQ ID NO: 191549

SEQ ID NO: 225875 - DNA, 878 bp, Homo Sapiens; identical to SEQ ID NO: 191550

SEQ ID NO: 225876 - DNA, 976 bp, Homo Sapiens
acaaaaaagttgggaacctttagcgcttgtctcggcccatttgaagaccaggaagttgatcaatcccgaggctgctgagagacggtggcgcgattgggacagtcgccagggatggctgagcgtgaagatgcagcgggtgtccgggctgctctcctggacgctgagcagagtcctgtggctctccggcctctctgagccgggagctgcccggcagccccggatcatggaagagaaagcgctagaggtttatgatttgattagaactatccgggacccagaaaagcccaatactttagaagaactggaagtggtctcggaaagttgtgtggaagttcaggagataaatgaagaagaatatctggttattatcaggttcacgccaacagtacctcattgctctttggcgactcttattgggctgtgcttaagagtaaaacttcagcgatgtttaccatttaaacataagttggaaatctacatttctgaaggaacccactcaacagaagaagacatcaataagcagataaatgacaaagagcgagtggcagctgcaatggaaaaccccaacttacgggaaattgtggaacagtgtgtccttgaacctgactgatagctgttttaagagccactggcctgtaattgtttgatatatttgtttaaactctttgtataatgtcagagactcatgtttaatacataggtgatttgtacctcagagcattttttaaaggattctttccaagcgagatttaattataagggagtacctaatttgttcaatgtataacattctcaggatttgtaacacttaaatgatcagacagaataatattttctagttattatgtgtaagatgagttgctatttttctgatgctcattctgatacaactatttttcgtgtcaaatatctactgtgcccaaatgtactcaattttaatcattactctgtaaaataaataagcagatgattcttt

SEQ ID NO: 225877 - DNA, 869 bp, Homo Sapiens; identical to SEQ ID NO: 191551

SEQ ID NO: 225878 - DNA, 1354 bp, Homo Sapiens; identical to SEQ ID NO: 191552

SEQ ID NO: 225879 - DNA, 1638 bp, Homo Sapiens
  misc_feature (1367)..(1377): n is a, c, g, or t
ttggcggccatcttgtgggaagagctgaagcaggcgctcttggctcggcgcggcccgctgcaatccgtggaggaacgcgccgccgagccaccatcatgcctgggcacttacaggaaggcttcggctgcgtggtcaccaaccgattcgaccagttatttgacgacgaatcggaccccttcgaggtgctgaaggcagcagagaacaagaaaaaagaagccggcgggggcggcgttgggggccctggggccaagagcgcagctcaggccgcggcccagaccaactccaacgcggcaggcaaacagctgcgcaaggagtcccagaaagaccgcaagaacccgctgccccccagcgttggcgtggttgacaagaaagaggagacgcagccgcccgtggcgcttaagaaagaaggaataagacgagttggaagaagacctgatcaacaacttcagggtgaagggaaaataattgatagaagaccagaaaggcgaccacctcgtgaacgaagattcgaaaagccacttgaagaaaagggtgaaggaggcgaattttcagttgatagaccgattattgaccgacctattcgaggtcgtggtggtcttggaagaggtcgagggggccgtggacgtggaatgggccgaggagatggatttgattctcgtggcaaacgtgaatttgataggcatagtggaagtgatagatcttctttttcacattacagtggcctgaagcacgaggacaaacgtggaggtagcggatctcacaactggggaactgtcaaagacgaattaactgacttggatcaatcaaatgtgactgaggaaacacctgaaggtgaagaacatcatccagtggcagacactgaaaataaggagaatgaagttgaagaggtaaaagaggagggtccaaaagagatgactttggatgagtggaaggctattcaaaataaggaccgggcaaaagtagaatttaatatccgaaaaccaaatgaaggtgctgatgggcagtggaagaagggatttgttcttcataaatcaaagagtgaagaggctcatgctgaagattcggttatggaccatcatttccggaagccagcaaatgatataacgtctcagctggagatcaattttggagaccttggccgcccaggacgtggcggcaggggaggacgaggtggacgtgggcgtggtgggcgcccaaaccgtggcagcaggaccgacaagtcaagtgcttctgctcctgatgtggatgacccagaggcattcccagctctggcttaactggatgccataagacaaccctggttcctttgtgaacccttctgttcaaagcttttgcatgcttaaggattccaaacgactaagaaattnnnnnnnnnnngactgtcattcataccattcacacctaaagactgaattttatctgttttaaaaatgaacttctcccgctacacagaagtaacaaatatggtagtcagttttgtatttagaaatgtattggtagcagggatgttttcataattttcagagattatgcattcttcatgaatacttttgtattgctgcttgcaaatatgcatttccaaacttgaaatatagtgtgaacagtgtgtaccagtttaaagctttcacttcatttgtg

SEQ ID NO: 225880 - DNA, 1229 bp, Homo Sapiens; identical to SEQ ID NO: 191553

SEQ ID NO: 225881 - DNA, 978 bp, Homo Sapiens; identical to SEQ ID NO: 191554

SEQ ID NO: 225882 - DNA, 1489 bp, Homo Sapiens; identical to SEQ ID NO: 191556
  misc_feature (270)..(280): n is a, c, g, or t

SEQ ID NO: 225883 - DNA, 886 bp, Homo Sapiens; identical to SEQ ID NO: 191557

SEQ ID NO: 225884 - DNA, 814 bp, Homo Sapiens; identical to SEQ ID NO: 191558
  misc_feature (588)..(598): n is a, c, g, or t

SEQ ID NO: 225885 - DNA, 1075 bp, Homo Sapiens
ttggcaggacaatgcataccaccgcctcccgactgtaaacataggggatatgtgttcacttagcatggacttctgggaggggccaaggaagggcggtctggagttttattgaatagagcagtgtgtattcggctgcctgcctgcccgcctgcttgctctctggctgtgctcctgcttaaagaaatcagtccttcctttccgacttagtcctcgggaagaagtttcagactacaaggtatcattggaacatttcaagatcatcaaatcaaattccacagggattggtgaccaaccagaaggctcagacatctgattgctgacctgtccagacatcatctggtctccctgaacctgaaatcacaccatggatgattttgagcgtcgcagagaacttagaaggcaaaagagggaggagatgcgactcgaagcagaaagaatcgcctaccagaggaatgacgatgatgaagaggaggcagcccgggaacggcgccgccgagcccgacaggaacggctgcggcagaagcaggaggaagaatccttgggacaggtgaccgaccaggtggaggtgaatgcccagaacagtgtgcctgacgaggaggccaagacaaccaccacaaacactcaagtggaaggggatgatgaggccgcattcctggagcgcctggctcggcgtgaggaaagacgccaaaaacgccttcaggaggctctggagcggcagaaggagttcgacccaacaataacagatgcaagtctgtcgctcccaagcagaagaatgcaaaatgacacagcagaaaatgaaactaccgagaaggaagaaaaaagtgaaagtcgccaagaaagatacgagatagaggaaacagaaacagtcaccaagtcctaccagaagaatgattggagggatgctgaagaaaacaagaaagaagacaaggaaaaggaggaggaggaagaggagaagccaaagcgagggagcattggagaaaatcagatcaagatgaaaagattaaaaaggacaaagacccaaagaagaagttaagagcttcatggatcgaaagaagggatttacagaagttaagtc

SEQ ID NO: 225886 - DNA, 855 bp, Homo Sapiens; identical to SEQ ID NO: 191564
  misc_feature (609)..(659): n is a, c, g, or t

SEQ ID NO: 225887 - DNA, 646 bp, Homo Sapiens; identical to SEQ ID NO: 191571
  misc_feature (497)..(524): n is a, c, g, or t

SEQ ID NO: 225888 - DNA, 954 bp, Homo Sapiens
ttggcatccgcgcacaccaggaagcggatcccgtggagtgaaggtcgcaccgcggcggattgacttctaaagacttggtacgtgaggaaaaaacacggaagaggaagaggaaagcaaaggagtcagggatggctcttcctcagggtctactgacattcagggatgtggccatagaattctctcaggaggagtggaaatgcctggaccctgctcagaggactctatacagagacgtgatgctggagaattataggaacctggtctccctggatacctcttccaaatgcatgatgaagatgttctcatcaacaggacaaggcaatacagaagtggtccacacagggacattgcaaatacatgcaagtcatcacattggagatacttgcttccaggaaattgagaaagatattcatgactttgtgtttcagtggcaagaaaatgaaacaaatggccatgaagcactcatgacaaaaatcaaaaagttgatgagtagtacagagcgacatgatcaaaggcatgctggaaacaaacctattaaaaatgagcttggatcaagctttcattcgcatctgcctgaagtgcacatatttcaccccgaagggaaaattggtaatcaagttgagaaggccatcaacgatgctttctcagtttcagcatcccaacgaatttcctgtaggccaaaaactcgtatttctaataagtataggaataatttcctccagtcttcattactcacacaaaaacgggaagtacacacaagagaaaaatctttccaacgtaatgagagtggcaaagcctttaatggtagctcactcttaaaaaaacatcagataatccatttagagacaaacagtataaatgtgatgtatgcggcaaggactttcatcagaagcgataccttgcatgccatagatgtcacactggtgagaatccttacaagtgtaatgagtgtgg

SEQ ID NO: 225889 - DNA, 1217 bp, Homo Sapiens; identical to SEQ ID NO: 191576

SEQ ID NO: 225890 - DNA, 1322 bp, Homo Sapiens
  misc_feature (1220)..(1238): n is a, c, g, or t
ttggggagtctcagaaaggacacggctggctgcttttctcagcgccgaagccgcgccatgctcgtcctcagaagcgccctgactcgggcgctggcctcacggacgctggcgcctcagatgtgctcatcttttgctacgggacccagacaatacgatggaatattctatgaatttcgttcttattaccttaagccctcaaagatgaatgagttcctggaaaattttgagaaaaacgctcatcttcggacagctcactctgaattggttggatactggagtgtagaatttggaggcagaatgaatacagtgtttcatatttggaagtatgataattttgctcatcgaactgaagttcagaaagccttggccaaagataaggaatggcaagaacaattcctcattccaaatttggctctcattgataaacaagagagtgagattacttatctggtaccatggtgcaaattagaaaaacctccaaaagaaggagtctatgaactggccacttttcagatgaaacctggtgggccagctctgtggggtgatgcatttaaaagggcagttcatgctcatgtcaatctaggctacacaaaactagttggagtgttccacacagagtacggagcactcaacagagttcatgttctttggtggaatgagagtgcagatagtcgtgcagctgggagacataagtcccatgaggatcccagagttgtggcagctgttcgggaaagtgtcaactacctagtatctcagcagaatatgcttctgattcctacatcgttttcaccactgaaatagttttctactgaaatacaaaacatttcattaactgctataggatctgtctgctaatggtgcttaaattctcccagaggttctcacttttatttgaaggaggtggtaagttaatttgctatgtttcttgcattatgaaggctacatctgtgctttgtaagtaccacttcaaaaaatagttctgtttactttctgcatggtatttcagtgtctgtcatacattaaaaatacttgtcactgttttaagatactcgactcttcatttgtttcagaatagctcttctactgtattctgacaactctttgctttatagcattttgttgtattcaaatgataatggtagcatttccatgcttgtgacagcatttttaagttattaatatattttatcaacctttccatcatgtctgttttcctgggnnnnnnnnnnnnnnnnnnngaccagtaaaatttattttgtaataccaataggatttagaaaattaacgtatttctttactatggaaaaccacattgtcatttg

SEQ ID NO: 225891 - DNA, 895 bp, Homo Sapiens
acaaaaaagttgggtcttgtgtcttgttgcgggcaccgcagtcgccgtgaagatggcgtctaccagccgtttggatgctcttccaagagtcacatgtccaaaccatccagatgcgattttagtggaggactacagagccggtgatatgatctgtcctgaatgtggcttggttgtaggtgaccgggttattgatgtgggatctgaatggcgaactttcagcaatgacaaagcaacaaaagatccatctcgagttggagattctcagaatcctcttctgagtgatggagatttgtctaccatgattggcaagggcacaggagctgcaagttttgacgaatttggcaattctaagtaccagaatcggagaacaatgagcagttctgatcgggcaatgatgaatgcattcaaagaaatcactaccatggcagacagaatcaatctacctcgaaatatagttgatcgaacaaataatttattcaagcaagtatatgaacagaagagcctgaagggaagagctaatgatgctatagcttctgcttgtctctatattgcctgtagacaagaaggggttcctaggacatttaaagaaatatgtgccgtatcacgaatttctaagaaagaaattggtcggtgttttaaacttattttgaaagcgctagaaaccagtgtggatttgattacaactggggacttcatgtccaggttctgttccaacctttgtcttcctaaacaagtacagatggcagctacacatatagcccgtaaagctgtggaattggacttggttcctgggaggagccccatctctgtggcagcggcagctatttacatggcctcacaggcatcagctgaaaagaggacccaaaaagaaattggagatattgctggtgttgct

SEQ ID NO: 225892 - DNA, 705 bp, Homo Sapiens; identical to SEQ ID NO: 191582

SEQ ID NO: 225893 - DNA, 792 bp, Homo Sapiens; identical to SEQ ID NO: 191583
  misc_feature (129)..(142): n is a, c, g, or t

SEQ ID NO: 225894 - DNA, 979 bp, Homo Sapiens; identical to SEQ ID NO: 191586

SEQ ID NO: 225895 - DNA, 1006 bp, Homo Sapiens
  misc_feature (152)..(201): n is a, c, g, or t
gctatcaaaccaacaaaccttccccctgaaaagtgagcagcaacgtaaaaacgtatgtgaagcctctcttgaatttctagttagcaatcttaaggctctttaaggttttctccaatattaaaaaatatcaccaaagaagtcctgctatgttnnnnnnnnnnnnnnnnnnnnnnnnnnnnnnnnnnnnnnnnnnnnnnnnnncagaaatagagctctaagttatgtgaaatttgatttgagaaactcggcatttcctttttaaaaaagcctgtttctaactatgaatatgagaacttctaggaaacatccaggaggtatcatataactttgtagaacttaaatacttgaatattcaaatttaaaagacactgtatcccctaaaatatttctgatggtgcactactctgaggcctgtatggcccctttcatcaatatctattcaaatatacaggtgcatatatacttgttaaagctcttatataaaaaagccccaaaatattgaagttcatctgaaatgcaaggtgctttcatcaatgaaccttttcaaacttttctatgattgcagagaagctttttatatacccagcataacttggaaacaggtatctgacctattcttatttagttaacacaagtgtgattaatttgatttctttaattccttattgaatcttatgtgatatgattttctggatttacagaacattagcacatgtaccttgtgcctcccattcaagtgaagttataatttacactgagggtttcaaaattcgactagaagtggagatatattatttatttatgcactgtactgtatttttatattgctgtttaaaacttttaagctgtgcctcacttattaaagcacaaaatgttttacctactccttatttacgacgcaataaaataacatcaatagatttttaggctgaattaatttgaaagcagcaatttgctgttctcaaccattctttcaaggcttttcattgttcaaagttataaaaaa

SEQ ID NO: 225896 - DNA, 974 bp, Homo Sapiens
  misc_feature (251)..(280): n is a, c, g, or t
  misc_feature (896)..(906): n is a, c, g, or t
ttggcaaagttttcccttattgtaaaaaagtatgcatgtttattacaggaaatttagaaaatatgtaaacataatgaattgaagtttaacacagtcccaccacccagaaataaccaccgttactatgttggtaggatctattttctttctccagccagaaaacaccagtgtttttatatgttttattttctgttctttaaataatccttatttcttaacagggaggcctcgtgggtctggtagattatccnnnnnnnnnnnnnnnnnnnnnnnnnnnnnnagataaggaagatacgttaccattgtcaaagaaagcaaaatttgattcataataatggcaacgggctaggatcagtacctgttgaaaaaaactggttctccacccctcccccatacaaaatccacaaaaaagcgcagtggtctcttgtgaatgactgacacagatcagcctcttacacttgacttctgctcatcaagtgccaattcaatggagcaggaggaggggatatcatatatttaggggaaagacttaagcctttgagctctccagcttggaccacacattgcccttttctcagggaaggaaatggaaacaaaaagccaacagggcaggggttttgtaagtggaactctggattgactggtcagttgctacaatcagaatatgctttcttggaccatgtttgagactcagaagaatgggcctttctgccataattcttcactagtcaagaatgccagcagtttctttgtataaagagacctgcctttaaaatcatacattctgaacattttagtcaagctacaacaggtttggaaaacctctgtgggggaggggcgagtataaagttttcctcttttttaactgttccctttgcccttcaaactgcagatannnnnnnnnnnaagtggggacttctccctacttgattaaagattgagtggaattctagatgtggtcatttgtgtcataa

SEQ ID NO: 225897 - DNA, 1265 bp, Homo Sapiens; identical to SEQ ID NO: 191594
  misc_feature (276)..(310): n is a, c, g, or t
  misc_feature (379)..(390): n is a, c, g, or t
  misc_feature (1006)..(1035): n is a, c, g, or t

SEQ ID NO: 225898 - DNA, 963 bp, Homo Sapiens; identical to SEQ ID NO: 191599
  misc_feature (600)..(643): n is a, c, g, or t
  misc_feature (682)..(738): n is a, c, g, or t

SEQ ID NO: 225899 - DNA, 1444 bp, Homo Sapiens
ttgggtcctcaagcaaatgtacatcacgtatgtgaggaactgcaagttcacctcgcctggtgccctccccttcatcagtttcatgcagtggaccttgacggagctgctggccctggagccgggtgtggcctaccagcacgccttcctctacatccgccagctcgccatacacctgcgcaacgccatgaccacccgcaagaaggaaacataccagtctgtgtacaactggcagtatgtgcactgcctcttcctgtggtgccgggtcctgagcactgcgggccccagcgaagccctccagcccttggtctacccccttgcccaagtcatcattggctgtatcaagctcatccccactgcccgcttctacccgctgcgaatgcactgcatccgtgccctgacgctgctctcggggagctcgggggccttcatcccggtgctgcctttcatcctggagatgttccagcaggtcgacttcaacaggaagccagggcgcatgagctccaagcccatcaacttctccgtgatcctgaagctgtccaatgtcaacctgcaggagaaggcgtaccgggacggcctggtggagcagctgtacgacctcaccctggagtacctgcacagccaggcacactgcatcggcttcccggagctggtgctgcctgtggtcctgcagctgaagtcgttcctccgggagtgcaaggtggccaactactgccggcaggtgcagcagctgcttgggaaggttcaggagaactcggcatacatctgcagccgccgccagagggtttccttcggcgtctctgagcagcaggcagtggaagcctgggagaagctgacccgggaagaggggacacccttgaccttgtactacagccactggcgcaagctgcgtgaccgggagatccagctggagatcagtggcaaagagcggctggaagacctgaacttccctgagatcaaacgaaggaagatggctgacaggaaggatgaggacaggaagcaatttaaagacctctttgacctgaacagctctgaagaggacgacaccgagggattctcggagagagggatactgaggcccctgagcactcggcatggggtggaagacgatgaagaggacgaggaggagggcgaggaggacagcagcaactcggagggtgaatggtcttgggatggagacccagacgcagaggcggggctggcccctggggagctgcagcagctggcccaggggccggaggacgagctggaggatctgcagctctcagaggacgactgaggcagcccatctggggggcctgtatgggctgccgggctggtggccagtgtttccacctccctggcagtcacgcctagaggctggcgtctgtgcagttgggggaggcagtagacacgggacaggctttattatttatttttcagcatgaagaccaaacgtatcgagagc

SEQ ID NO: 225900 - DNA, 798 bp, Homo Sapiens; identical to SEQ ID NO: 191600

SEQ ID NO: 225901 - DNA, 1524 bp, Homo Sapiens
  misc_feature (92)..(110): n is a, c, g, or t
  misc_feature (1236)..(1265): n is a, c, g, or t
ttggctccctctgagccttgtagaaatgggagcgagaaaccccagctgagctgcgttccagcctcagctgagtctttttggtctgcacccannnnnnnnnnnnnnnnnnngcccacatgctccccagcttgcaggaggaatcggtgaggtcctgtcctgaggctgctgtccggggccggtggctgccctcaaggtcccttccctagctgctgcggttgccattgcttcttgcctgttctggcatcaggcacctggattgagttgcacagctttgctttatccgggcttgtgtgcagggcccggctgggctccccatctgcacatcctgaggacagaaaaagctgggtcttgctgtgccctcccaggcttagtgttccctccctcaaagactgacagccatcgttctgcacggggctttctgcatgtgacgccagctaagcatagtaagaagtccagcctaggaagggaaggattttggaggtaggtggctttggtgacacactcacttctttctcagcctccaggacactatggcctgttttaagagacatcttatttttctaaaggtgaattctcagatgataggtgaacctgagttgcagatataccaacttctgcttgtatttcttaaatgacaaagattacctagctaagaaacttcctagggaactagggaacctatgtgttccctcagtgtggtttcctgaagccagtgatatgggggttaggataggaagaactttctcggtaatgataaggagaatctcttgtttcctcccacctgtgttgtaaagataaactgacgatatacaggcacattatgtaaacatacacacgcaatgaaaccgaagcttggcggcctgggcgtggtcttgcaaaatgcttccaaagccaccttagcctgttctattcagcggcaaccccaaagcacctgttaagactcctgacccccaagtggcatgcagcccccatgcccaccgggacctggtcagcacagatcttgatgacttccctttctagggcagactgggagggtatccaggaatcggcccctgccccacgggcgttttcatgctgtacagtgacctaaagttggtaagatgtcataatggaccagtccatgtgatttcagtatatacaactccaccagacccctccaacccatataacaccccacccctgttcgcttcctgtatggtgatatcatatgtaacatttactcctgtttctgctgannnnnnnnnnnnnnnnnnnnnnnnnnnnnnacatcagctgtaatcattcctgtgctgtgttttttattacccttggtaggtattagacttgcacttttttaaaaaaaggtttctgcatcgtggaagcatttgacccagagtggaacgcgtggcctatgcaagtggattccttcaatctttcctttggttctttgagcatctttgctttcattcgtctcccgtctttggttctccagttcaaattattgcaaagtaaagatctttgagtaggttcggtctgaaaggtgtg

SEQ ID NO: 225902 - DNA, 954 bp, Homo Sapiens; identical to SEQ ID NO: 191601
  misc_feature (788)..(817): n is a, c, g, or t

SEQ ID NO: 225903 - DNA, 959 bp, Homo Sapiens; identical to SEQ ID NO: 191603
  misc_feature (757)..(786): n is a, c, g, or t

SEQ ID NO: 225904 - DNA, 1355 bp, Homo Sapiens; identical to SEQ ID NO: 191605
  misc_feature (1011)..(1040): n is a, c, g, or t

SEQ ID NO: 225905 - DNA, 584 bp, Homo Sapiens; identical to SEQ ID NO: 191609

SEQ ID NO: 225906 - DNA, 1426 bp, Homo Sapiens; identical to SEQ ID NO: 191614
  misc_feature (1112)..(1177): n is a, c, g, or t

SEQ ID NO: 225907 - DNA, 1513 bp, Homo Sapiens; identical to SEQ ID NO: 191615
  misc_feature (1229)..(1294): n is a, c, g, or t

SEQ ID NO: 225908 - DNA, 902 bp, Homo Sapiens; identical to SEQ ID NO: 191616
  misc_feature (372)..(427): n is a, c, g, or t

SEQ ID NO: 225909 - DNA, 723 bp, Homo Sapiens
ttgtacaaaaaagttgggtgttgtgcccatggtggagaagaaaacttcggttcgctcccaggaccccgggcagcggcgggtgctggaccgggctgcccggcagcgtcgcatcaaccggcagctggaggccctggagaatgacaacttccaggatgacccccacgcgggactccctcagctcggcaagagactgcctcagtttgatgacgatgcggacactggaaagaaaaagaagaaaacccgaggtgatcattttaaacttcgcttccgaaaaaactttcaggccctgttggaggagcagaacttgagtgtggccgagggccctaactacctgacggcctgtgcgggacccccatcgcggccccagcgccccttctgtgctgtctgtggcttcccatccccctacacctgtgtcagctgcggtgcccggtactgcactgtgcgctgtctggggacccaccaggagaccaggtgtctgaagtggactgtgtgagcctgggcattcccagagaggaagggccgctgtgcactgcccggccttcagaaagacagaatttcatcacccaatgcagggggagctcttcctggaccaagggaggagccgctcattcacccaacaaaactgtgtcttatctgccaggaaagaccagcctcactcctgggaactgtctggcaggtaggctgggccccccagtgctgttagaataaaaagcctcgtgccgg

SEQ ID NO: 225910 - DNA, 1019 bp, Homo Sapiens
aaagccaactttgtacaaaaaagttggctagtgtttgggtttcttcgcggctgctcaagatgaaccgactcttcgggaaagcgaaacccaaggctccgccgcccagcctgactgactgcattggcacggtggacagtagagcagaatccattgacaagaagatttctcgattggatgctgagctagtgaagtataaggatcagatcaagaagatgagagagggtcctgcaaagaatatggtcaagcagaaagccttgcgagttttaaagcaaaagaggatgtatgagcagcagcgggacaatcttgcccaacagtcattcaacatggaacaagccaattataccatccagtctttgaaggacaccaagaccacggttgatgctatgaaactgggagtaaaggaaatgaagaaggcatacaagcaagtgaagatcgaccagattgaggatttacaagaccagctagaggatatgatggaagatgcaaatgaaatccaagaagcactgagtcgcagttatggcaccccagaactggatgaagatgatttagaagcagagttggatgcactaggtgatgagcttctggctgatgaagacagttcttatttggatgaggcagcatctgcacctgcaattccagaaggtgttcccactgatacaaaaaacaaggatggagttctggtggatgaatttggattgccacagatccctgcttcatagatttgcatcattcaagcatatcttgtaaaacaaacacatattatgggactaggaaatatttatctttccaaatttgccataacagatttaggtttctttcctttctttgaaggaaagtttaattacattgctcttttattttttccattaagagactcattgcttgggaaatgctttcttcgtactaaaatttgattcctttttttcttatgaaaaacgaactcagtttaaaagtatttttagctcgtatgacttgttttcattcattaataataatttgaaataaaactaaggaaatgg

SEQ ID NO: 225911 - DNA, 1008 bp, Homo Sapiens; identical to SEQ ID NO: 191619

SEQ ID NO: 225912 - DNA, 852 bp, Homo Sapiens; identical to SEQ ID NO: 191620

SEQ ID NO: 225913 - DNA, 995 bp, Homo Sapiens
ctttgtacaaaaaagttggctcagcgcctgcccgccctctcgccgcgtcgccggtgcctgcgcctcccgctccacctcgcttcttctctcccggccgaggcccgggggaccagagcgagaagcggggaccatgttccgacgcaagttgacggctctcgactaccacaaccccgccggcttcaactgcaaagatgaaacagaatttagaaacttcatcgttggcttgaagaccagaaaatcaggcactacaagattgaagacagagggaatttaagaaacatccacagcagcgactggcccaagttctttgaaaagtatctcagagatgttaactgtcctttcaagattcaagatcgacaagaagctattgactggcttcttggtttagctgttagacttgaatatggagataatgctgaaaaatacaaggatttagtacctgataattcaaaaactgctgacaatgcaactaaaaatgcagaaccattgatcaatttggatgtaaataatcctgattttaaggctggtgtgatggctttggctaacctgcttcagattcagcgtcatgatgattacctggtaatgcttaaggcaattcggattttggttcaggagcgcctgacacaggatgcagttgctaaggcaaatcaaacaaaagagggcttacctgttgctttagacaaacatattcttggttttgacacaggagatgcagttcttaatgaagctgctcaaattctgcgattgctgcacatagaggagctcagagagctacagacaaaaatcaacgaagccatagtagctgttcagcaattattgctgatccaaagacagaccacagactgggaaaagttggaagatgaacacttgaggacttcagcttctcacctactttagtacagttgggaaccatacacttctggcatgtttggaaatcaaatgtcacattctcggggaggaagcccagaaaattggggtatgttctagagatttac

SEQ ID NO: 225914 - DNA, 990 bp, Homo Sapiens; identical to SEQ ID NO: 191621

SEQ ID NO: 225915 - DNA, 1143 bp, Homo Sapiens
tttgtacaaaaaagttggttttgtttttccgcttataattatggctcgtaaattggatatttcatctggagtggacaagtacaacagtggcaagtacatggaataataaagaagactttgatcttaaatctaaagaacttggctaattcgggagatagccatatgaaaactttaaaacagaagtatgggtagctgacttgaagtaactctatgtcaaatagtcgtaggttaagtatcttcaaagaacttcgatattatttcagaggatacaaaataaaaatacaaactggaaaataaagattacagagaaaaaaccaacaccttcctgtgcagtcctgttggaatttggacttgccatgaggtgttgaagccttgtttcactgagttggagagactggacctaaatggcgcagcatgactttgctccagcctggcttaatttccctactccaccatcatcaacaaagtcgtcattgaattttgagaagcattctgaaaactttgcatggacagagaatcgttatgatgtgaaccgtcgacgacacaactcttcagatggctttgattctgctattggacgtcctaatggaggtaactttggaaggaaagaaaaaaatggatggcgtacacatggaagaaatggtacagaaaacataaatcatcgaggtggataccatggtggaagttcccgttctcgtagcagtattttccatgcaggaaaaagccaaggactacatgaaaacaacatacctgacaatgaaaccgggaggaaagaagacaagagagaacgcaaacagtttgaagctgaggattttccgtctttaaatcctgagtatgagagagaaccaatcacaataagtctttagctgcagaatatcctccgaatcctaaatctagagctccaaggatgctggtcattaagaaaggtaatacaaaagacttacagctatctggattcccagtagtcgaaatcttccgtcacagccagttaagaatggaactggtccaagtgtttataaaggtttagtccctaaacctgctgctccacctacaaaacctacacaatggaaaagccaaacaaagaaaataaagttggaacttctttccctcatgagtccacatttggcgttggcaactttaatg

SEQ ID NO: 225916 - DNA, 1086 bp, Homo Sapiens; identical to SEQ ID NO: 191623

SEQ ID NO: 225917 - DNA, 950 bp, Homo Sapiens; identical to SEQ ID NO: 191626
  misc_feature (793)..(815): n is a, c, g, or t

SEQ ID NO: 225918 - DNA, 956 bp, Homo Sapiens; identical to SEQ ID NO: 191627

SEQ ID NO: 225919 - DNA, 894 bp, Homo Sapiens; identical to SEQ ID NO: 191629

SEQ ID NO: 225920 - DNA, 907 bp, Homo Sapiens; identical to SEQ ID NO: 191631

SEQ ID NO: 225921 - DNA, 890 bp, Homo Sapiens; identical to SEQ ID NO: 191632

SEQ ID NO: 225922 - DNA, 899 bp, Homo Sapiens
  misc_feature (227)..(267): n is a, c, g, or t
  misc_feature (791)..(818): n is a, c, g, or t
ttggatcttcggagcctgctgcatcggacctcggccagtcataaaagatgacaacagcagccaggccaacctttgaacctgccagaggtggaaggggaaaaggagaaggtgatttgagccaactttcaaagcagtattcaagcagagacctaccctctcatacaaagataaaatacagacagactactcaggatgcccctgaagaggttcgtaaccgtgacttcagnnnnnnnnnnnnnnnnnnnnnnnnnnnnnnnnnnnnnnnnnaaaatagggatcgtccaacccgagaacatacaacctcctcttcagtgtcaaaaaagccacggttagaccagattcctgccgccaaccttgatgcagatgaccctctaacagatgaggaagatgaagattttgaagaagaaagtgatgatgatgatactgcagctcttcttgcagaactggaaaaaattaaaaaagaaagagctgaagagcaggccaggaaggaacaagaacaaaaagctgaagaagagaggattcgtatggaaaacattctgagcggaaaccctctccttaatctcactggcccatcccagcctcaggccaacttcaaagttaaaagaaggtgggatgatgacgttgtcttcaagaactgtgcaaaaggtgtagatgaccagaagaaagacaaaagatttgtaaatgacacactgcgatctgaatttcacaaaaagttcatggagaaatatattaaatagtacagttttatgtgcttaattaaagactgtaaaacgtaaaggatcattctgacnnnnnnnnnnnnnnnnnnnnnnnnnnnncccctgtctaaattgtgtgtgggctgtcccaagttttaaacctcctatctttttctttagttgatacccttacttggataa

SEQ ID NO: 225923 - DNA, 1479 bp, Homo Sapiens
aactttgtacaaaaaagttggctcagtttgtgtgtcttaattattatttgtgttttaatttaaacacctcctcatgtacataccctggccgccccctgccccccagcctctggcattagaattatttaaacaaaaactaggcggttgaatgagaggttcctaagagtgctgggcatttttattttatgaaatactatttaaagcctcctcatcccgtgttctccttttcctctctcccggaggttgggtgggccggcttcatgccagctacttcctcctccccacttgtccgctgggtggtaccctctggaggggtgtggctccttcccatcgctgtcacaggcggttatgaaattcaccccctttcctggacactcagacctgaattctttttcatttgagaagtaaacagatggcactttgaaggggcctcaccgagtgggggcatcatcaaaaactttggagtcccctcacctcctctaaggttgggcagggtgaccctgaagtgagcacagcctagggctgagctggggacctggtaccctcctggctcttgatacccccctctgtcttgtgaaggcagggggaaggtggggtcctggagcagaccaccccgcctgccctcatggcccctctgacctgcactggggagcccgtctcagtgttgagccttttccctctttggctcccctgtaccttttgaggagccccagctacccttcttctccagctgggctctgcaattcccctctgctgctgtccctcccccttgtcctttcccttcagtaccctctcagctccaggtggctctgaggtgcctgtcccacccccacccccagctcaatggactggaaggggaagggacacacaagaagaagggcaccctagttctacctcaggcagctcaagcagcgaccgccccctcctctagctgtgggggtgagggtcccatgtggtggcacaggcccccttgagtggggttatctctgtgttaggggtatatgatgggggagtagatctttctaggagggagacactggcccctcaaatcgtccagcgaccttcctcatccaccccatccctccccagttcattgcactttgattagcagcggaacaaggagtcagacattttaagatggtggcagtagaggctatggacagggcatgccacgtgggctcatatggggctgggagtagttgtctttcctggcactaacgttgagcccctggaggcactgaagtgcttagtgtacttggagtattggggtctgaccccaaacaccttccagctcctgtaacatactggcctggactgttttctctcggctccccatgtgtcctggttcccgtttctccacctagactgtaaacctctcgagggcagggaccacaccctgtactgttctgtgtctttcacagctcctcccacaatgctgaatatacagcaggtgctcaataaatgattcttagtgacttt

SEQ ID NO: 225924 - DNA, 898 bp, Homo Sapiens; identical to SEQ ID NO: 191636

SEQ ID NO: 225925 - DNA, 965 bp, Homo Sapiens; identical to SEQ ID NO: 191637

SEQ ID NO: 225926 - DNA, 894 bp, Homo Sapiens; identical to SEQ ID NO: 191638

SEQ ID NO: 225927 - DNA, 410 bp, Homo Sapiens
tgtacaaaaaagttggctccttcttccccctggcctgttctgtctctgagctctgtgtcctccgttcattccatggctgggagtcactgatgctgcctctgccttctgatgctggactggccttgcttctacaagtatgcttctcccacagctgtggctgcaggaacttaatttatagggaggagcctgtggcagctgctgccccagccacagctgcactgactgtgctcaccacacatctggggcagccttccctggcaggggccctcgtggcttctcattttccattcccttcactgtggctaaggggtggggtgagggtatgtatagggagggctgcctaccatggtctggggcttgacgaacatgagtttgttgatttaaataaagaattttcaatttttgaatgg

SEQ ID NO: 225928 - DNA, 1258 bp, Homo Sapiens; identical to SEQ ID NO: 191639

SEQ ID NO: 225929 - DNA, 993 bp, Homo Sapiens; identical to SEQ ID NO: 191640

SEQ ID NO: 225930 - DNA, 986 bp, Homo Sapiens; identical to SEQ ID NO: 191641

SEQ ID NO: 225931 - DNA, 1252 bp, Homo Sapiens
aaggttttagccctttttattgacatcttttcttcatgattctctctcaaaggataaattgtacatttttgtatttgaaaacatcagatatccaagccatattactatagttctcagaaacaattcatttcttcagcttttcatgcacagctggattggtgcaggcattagcttggagctcttctgtttctccctttaaaacaaactcagcagaggctgggtgttcctggaccctggatttcacagcatgagctgcatagttaaggctggtattttcactccaatgccagtaacctgagaaggggttatagagcattcctaccactgtttgaactgacagaccatttgattccagaatgctctctagtgtttcaggtgaaacaaacttctcccatgtatgagtaccttttggtacaatacttgcaatttgctctgaaaaaacaattcccaaggcataggaaagttgtgttttgttgattgtagtaatgaataaagaaccaccgggttttaacacttgacagcagcactgtaaaaatgtttctagatcaatcacatgttctacaacttcagaagctacaacagcatcaaatgtttctgcagtctcttccacaatctcttccagggaacacactctgtactctattctcttatccaggactggatcaaatgatttatggcattgtgctgttttaatgttctcatccacagggtcgattccaataactgaagccccaagccgccctagaggttcagttaacagcccaccaccacagccaacgtcaagaatcttcatccccaacaaaggttttcctggctggtgattaggaattgtttccagaagattgtccctaataaatggcaccctcaggtcattcatggaatgaagaggtgcatatactccttgttcatcccaccatttgtgagccagggccaagaaggtttttacctcaccgctgtcgacagtggtttgggaagtactgtacagtctcgcccaagggtacctgaaactctttattctgttcaaacaggaaaagatcgtcctgtaggatttgaaccatatggttctgtattcattgaaaacccctggtttaatctgtagagtcccactgagctggttcttcacataaaccgccgaggaaattaagggacgcgcagcttttgtattacagcctccaggccccagcactcttaaaaaccaacccccggaggagcccagcttacggccactccacatcgcgacaaacgatcccaa

SEQ ID NO: 225932 - DNA, 1130 bp, Homo Sapiens
  misc_feature (169)..(178): n is a, c, g, or t
  misc_feature (961)..(1004): n is a, c, g, or t
taaacatgccaattataaacatcaaaacaaaatatattctaaccaaccacgggaaacagtctggtatcaggaaaagcaacaaggattacacacattattttataaaccagcacacaaaggtttaaaacagttctgaaaatgaagttagctgtcttgagtcaagggaatnnnnnnnnnngtcagtatgaccatttacaatctctgacctttgtggagacggtaagaatctgttgtagtgcagctacatacagtacaattcaggcaattttgttttttcacttgggttcagattgcaaattcattgctgtgagaaaaggatggaggcaaattttagcagcaacctccacctgactgcttgactggagtgctctgaattttaacattggacttctcagcaccaccagctgttgctccgggacccattcgctttttaatctcagctgccatcgtcatgaaagactgttctacattcgttgcattcttagcactggtttccaaaaacggaattccaagggaatcagcaaattccttcgctgttgtgtagtctactactttctttgtggtcagatcacatttgttccctaccaacaatttgttgacattttcactggcataacgatctatttcctgcagccactgtttaacattattgaaggactcctgatctgtcacatcatacacaactatgatgccatgggctcctctgtaataactggaggtgattgttcgaaatctttcctggcctgctgtgtcccatatttgaagcttgattgttttcccgtctaactctatagttcttattttgaaatccacaccaattgtgctgatgtagctttctgtatatgtatcatctgcaaacctaagaagaaggcaagactttccaacccctgagtcgccaatcagaagtaacttgaataaataatcatattcgggattcatgctggacatgtcactgcagctnnnnnnnnnnnnnnnnnnnnnnnnnnnnnnnnnnnnnnnnnnnngactctccgcgccacgggtaatcgaaagaaaggaatgagataggctgttccgggagagcaaacgtcttcccctactccgtcccctagaacacaatcagcagccgccgccactcagctatcgcccaa

SEQ ID NO: 225933 - DNA, 1195 bp, Homo Sapiens; identical to SEQ ID NO: 191650
  misc_feature (103)..(146): n is a, c, g, or t
  misc_feature (930)..(938): n is a, c, g, or t

SEQ ID NO: 225934 - DNA, 1425 bp, Homo Sapiens; identical to SEQ ID NO: 191651
  misc_feature (966)..(974): n is a, c, g, or t

SEQ ID NO: 225935 - DNA, 1202 bp, Homo Sapiens; identical to SEQ ID NO: 191652
  misc_feature (129)..(172): n is a, c, g, or t
  misc_feature (956)..(964): n is a, c, g, or t

SEQ ID NO: 225936 - DNA, 1222 bp, Homo Sapiens
ttggctgtcagactgtggcggccggtcgcgcggtgcgctctccctccctgcccgcagcctggagaggcgcttcgtgctgcacacccccgcgttcctgccggcaccgcgcctgccctctgccgcgctccgccctgccgccgaccgcacgcccgccgcgggacatggcacacgcaccggcacgctgccccagcgcccggggctccggggacggcgagatgggcaagcccaggaacgtggcgctcatcaccggtatcacaggccaggatggttcctacctggctgagttcctgctggagaaaggctatgaggtccatggaattgtacggcggtccagttcatttaatacgggtcgaattgagcatctgtataagaatccccaggctcacattgaaggaaacatgaagttgcactatggcgatctcactgacagtacctgccttgtgaagatcattaatgaagtaaagcccacagagatctacaaccttggagcccagagccacgtcaaaatttcctttgacctcgctgagtacactgcggacgttgacggagttggcactctacgacttctagatgcagttaagacttgtggccttatcaactctgtgaagttctaccaagcctcaacaagtgaactttatgggaaagtgcaggaaataccccagaaggagaccacccctttctatccccggtcaccctatggggcagcaaaactctatgcctattggattgtggtgaacttccgtgaggcgtataatctctttgcagtgaacggcattctcttcaatcatgagagtcccagaagaggagctaatttcgttactcgaaaaattagccggtcagtagctaagatttaccttggacaactggaatgtttcagtttgggaaatctggatgccaaacgagattggggccatgccaaggactatgtggaggctatgtggttgatgttgcagaatgatgagccggaggacttcgttatagctactggggaggtccatagtgtccgggaatttgtcgagaaatcattcttgcacattggaaaaaccattgtgtgggaaggaaagaatgaaaatgaagtgggcagatgtaaagagaccggcaaagttcacgtgactgtggatctcaagtactaccgggccaactgaagtggactttctgcagggcgactgcaccaaagcgaaacagaaagctgaactggaaggccccgggtcgctttcgatga

SEQ ID NO: 225937 - DNA, 709 bp, Homo Sapiens; identical to SEQ ID NO: 191653

SEQ ID NO: 225938 - DNA, 927 bp, Homo Sapiens; identical to SEQ ID NO: 191654

SEQ ID NO: 225939 - DNA, 1344 bp, Homo Sapiens
ttgggcctctttggcagctggtcacatggtgagggtgggggtgagggggcctctctagcttgcggcctgtgtctatggtcgggccctctgcgtccagctgctccggaccgagctcgggtgtatggggccgtaggaaccggctccggggccccgataacgggccgcccccacagcaccccgggctggcgtgagggtctcccttgatctgagaatggctacctctcgatatgagccagtggctgaaattggtgtcggtgcctatgggacagtgtacaaggcccgtgatccccacagtggccactttgtggccctcaagagtgtgagagtccccaatggaggaggaggtggaggaggccttcccatcagcacagttcgtgaggtggctttactgaggcgactggaggcttttgagcatcccaatgttgtccggctgatggacgtctgtgccacatcccgaactgaccgggagatcaaggtaaccctggtgtttgagcatgtagaccaggacctaaggacatatctggacaaggcacccccaccaggcttgccagccgaaacgatcaaggatctgatgcgccagtttctaagaggcctagatttccttcatgccaattgcatcgttcaccgagatctgaagccagagaacattctggtgacaagtggtggaacagtcaagctggctgactttggcctggccagaatctacagctaccagatggcacttacacccgtggttgttacactctggtaccgagctcccgaagttcttctgcagtccacatatgcaacacctgtggacatgtggagtgttggctgtatctttgcagagatgtttcgtcgaaagcctctcttctgtggaaactctgaagccgaccagttgggcaaaatctttgacctgattgggctgcctccagaggatgactggcctcgagatgtatccctgccccgtggagcctttccccccaaagggccccgcccagtgcagtcggtggtacctgagatggaggagtcgggagcacagctgctgctggaaatgctgacttttaacccacacaagcgaatctctgcctttcgagctctgcagcactcttatctacataaggatgaaggtaatccggagtgagcaatgggagtggctgccatggaaggaagaaaagctgccatttcccttctggacactgagagggcaatctttgcctttatctctgagctatggagggtcctcctccatctttctacagagattactttgctgccttaatgacattcccctcccacctctccttttgaggcttctccttctcctttcccatttctctacactaaggggtatgttccctcttg

SEQ ID NO: 225940 - DNA, 1443 bp, Homo Sapiens; identical to SEQ ID NO: 191655

SEQ ID NO: 225941 - DNA, 625 bp, Homo Sapiens; identical to SEQ ID NO: 191658
  misc_feature (540)..(559): n is a, c, g, or t

SEQ ID NO: 225942 - DNA, 919 bp, Homo Sapiens
aattgatgagcaatgcttttcttttaaagccaactttgtacaaaaaagttggcgcacccactggctcgtggtcccaagaagcatctgaagcgggtggcagctccaaagcattggatgctggataaattgaccggtgtgtttgctcctcgtccatccaccggtccccacaagttgagagagtgtctccccctcatcattttcctgaggaacagacttaagtatgccctgacaggagatgaagtaaagaagatttgcatgcagcggttcattaaaatcgatggcaaggtccgaactgatataacctaccctgctggattcatggatgtcatcagcattgacaagacgggagagaatttccgtctgatctatgacaccaagggtcgctttgctgtacatcgtattacacctgaggaggccaagtacaagttgtgcaaagtgagaaagatctttgtgggcacaaaaggaatccctcatctggtgactcatgatgcccgcaccatccgctaccccgatcccctcatcaaggtgaatgataccattcagattgatttagagactggcaagattactgatttcatcaagttcgacactggtaacctgtgtatggtgactggaggtgctaacctaggaagaattggtgtgatcaccaacagagagaggcaccctggatcttttgacgtggttcacgtgaaagatgccaatggcaacagctttgccactcgactttccaacatttttgttattggcaagggcaacaaaccatggatttctcttccccgaggaaagggtatccgcctcaccattgctgaagagagagacaaaagactggcggccaaacagagcagtgggtgaaatgggtccctgggtgacatgtcagatctttgtacgtaattaaaaatattgtggccggattaatagc

SEQ ID NO: 225943 - DNA, 988 bp, Homo Sapiens; identical to SEQ ID NO: 191663

SEQ ID NO: 225944 - DNA, 772 bp, Homo Sapiens; identical to SEQ ID NO: 191664

SEQ ID NO: 225945 - DNA, 749 bp, Homo Sapiens; identical to SEQ ID NO: 191665

SEQ ID NO: 225946 - DNA, 809 bp, Homo Sapiens; identical to SEQ ID NO: 191666

SEQ ID NO: 225947 - DNA, 306 bp, Homo Sapiens
tctcccacctcccagcaaacaagctcctttggctcagctcccgcctgcgtttgtagaccccgaagtttctgcaaccaagctcttcagacccacatcccttctcccagtgactgaacagtcccagctctggctggagaagggtgtctgcagaccccgctgttgcctcccaggggagtctccaggcccctgggaggcaagggcggggcccgcagaggctgttctccaaccagtgctagaactgtacaggccaccaggaggcaggaggtgggccctcagagcttggctggagaaagttcggggccccaa

SEQ ID NO: 225948 - DNA, 1431 bp, Homo Sapiens; identical to SEQ ID NO: 191668

SEQ ID NO: 225949 - DNA, 840 bp, Homo Sapiens; identical to SEQ ID NO: 191670

SEQ ID NO: 225950 - DNA, 1113 bp, Homo Sapiens
ttggatctaaggtcacggctctgcttgctgctcccacccgctccagtttaaaacctgcggttccagggttctccagcccctccctttttcacgctccgaagccgagaaggcccaaagcgaagacagagaggacccggaagtagggaaaacctctgagcacgtgatgggggaacacgcgggtgctgtcacgtgatccgacaaacggcctctgcatagtgcagaacattctgctgctcttaaagaccctcatccctcccgtgggagccccctttggacactctatgaccctggaccctcgggggacctgaacttgatgcgatgggaggctgtgcaggctcgcggcggcgcttttcggattccgagggggaggagaccgtcccggagccccggctccctctgttggaccatcagggcgcgcattggaagaacgcggtgggcttctggctgctgggcctttgcaacaacttctcttatgtggtgatgctgagtgccgcccacgacatccttagccacaagaggacatcgggaaaccagagccatgtggacccaggcccaacgccgatcccccacaacagctcatcacgatttgactgcaactctgtctctacggctgctgtgctcctggcggacatcctccccacactcgtcatcaaattgttggctcctcttggccttcacctgctgccctacagcccccgggttctcgtcagtgggatttgtgctgctggaagcttcgtcctggttgccttttctcattctgtggggaccagcctgtgtggtgtggtcttcgctagcatctcatcaggccttggggaggtcaccttcctctccctcactgccttctaccccagggccgtgatctcctggtggtcctcagggactgggggagctgggctgctgggggccctgtcctacctgggcctcacccaggccggcctctcccctcagcagaccctgctgtccatgctgggtatccctgccctgctgctggccagctatttcttgttgctcacatctcctgaggcccaggaccctggaagggaaaaataagcagagagcgcaccccggcagcctcctcataagaaccgaggccccggagtcgaagccaggctc

SEQ ID NO: 225951 - DNA, 1093 bp, Homo Sapiens
  misc_feature (185)..(238): n is a, c, g, or t
ttgggttgtgaacgccgcggactccggagccgcacaaaccagggctcgccatgaagccaggattcagtccccgtgggggtggctttggcggccgagggggctttggtgaccgtggtggtcgtggaggccgagggggctttggcgggggccgaggtcgaggcggaggctttagaggtcgtggacgnnnnnnnnnnnnnnnnnnnnnnnnnnnnnnnnnnnnnnnnnnnnnnnnnnnnnncttccattctggtggcaaccggggtcgtggtcggggaggaaaaagaggaaaccagtcggggaagaatgtgatggtggagccgcatcggcatgagggtgtcttcatttgtcgaggaaaggaagatgcactggtcaccaagaacctggtccctggggaatcagtttatggagagaagagagtctcgatttcggaaggagatgacaaaattgagtaccgagcctggaaccccttccgctccaagctagcagcagcaatcctgggtggtgtggaccagatccacatcaaaccgggggctaaggttctctacctcggggctgcctcgggcaccacggtctcccatgtctctgacatcgttggtccggatggtctagtctatgcagtcgagttctcccaccgctctggccgtgacctcattaacttggccaagaagaggaccaacatcattcctgtgatcgaggatgctcgacacccacacaaataccgcatgctcatcgcaatggtggatgtgatctttgctgatgtggcccagccagaccagacccggattgtggccctgaatgcccacaccttcctgcgtaatggaggacactttgtgatttccattaaggccaactgcattgactccacagcctcagccgaggccgtgtttgcctccgaagtgaaaaagatgcaacaggagaacatgaagccgcaggagcagttgacccttgagccatatgaaagagaccatgccgtggtcgtgggagtgtacaggccaccccccaaggtgaagaactgaagttcagcgctgtcaggattgcaagagatgtgtgttgatactgttgcacgtgtgtttttctattaaaagactcatcc

SEQ ID NO: 225952 - DNA, 936 bp, Homo Sapiens
ttggcgcctcttcacgaggtggaaacaagatggaggattcggcctcggcctcgctgtcttctgcagccgctactggaacctccacctcgactccagcggccccgacagcacggaagcagctggataaagaacaggttagaaaggcagtggacgctctcttgacgcattgcaagtccaggaaaaacaattatgggttgcttttgaatgagaatgaaagtttatttttaatggtggtattatggaaaattccaagtaaagaactgagggtcagattgaccttgcctcatagtattcgatcagattcagaagatatctgtttatttacgaaggatgaacccaattcaactcctgaaaagacagaacagttttatagaaagcttttaaacaagcatggaattaaaaccgtttctcagattatctccctccaaactctaaagaaggaatataaatcctatgaagccaagctccgccttctgagcagttttgatttcttccttactgatgccagaattaggcggctcttaccctcactcattgggagacatttctatcaaagaaagaaagttccagtatctgtaaaccttctgtccaagaatttatcaagagagatcaatgactgtataggtggaacggtcttaaacatttctaaaagtggttcttgcagtgctatacgtattggtcacgttggaatgcaaattgagcacatcattgaaaacattgttgctgtcaccaaaggactttcagaaaaattgccagagaagtgggagagcgtgaaactcctgtttgtgaaaactgagaaatcggctgcacttcccatcttttcctcgtttgtcagcaattgggatgaagccaccaaaagatctttgcttaataagaagaaaaaagaggcaaggagaaaacgaagagaaagaaattttgaaaacaaaaggagaggaa

SEQ ID NO: 225953 - DNA, 908 bp, Homo Sapiens; identical to SEQ ID NO: 191679

SEQ ID NO: 225954 - DNA, 886 bp, Homo Sapiens; identical to SEQ ID NO: 191682

SEQ ID NO: 225955 - DNA, 918 bp, Homo Sapiens
tttgtacaaaaaagttggcgcaggccgccgaaaaacctctgcctgagcggcttcatgggcatggacatcccgccacccagcgggccactctggatcctgggcgacgtcttcatcggccgctactacactgtgtttgaccgtgacaacaacagggtgggcttcgccgaggctgcccgcctctagttcccaaggcgtccgcgcgccagcacagaaacagaggagagtcccagagcaggaggcccctggcccagcggcccctcccacacacacccacacactcgcccgcccactgtcctgggcgccctggaagccggcggcccaagcccgacttgctgttttgttctgtggttttcccctccctgggttcagaaatgctgcctgcctgtctgtctctccatctgtttggtgggggtagagctgatccagagcacagatctgtttcgtgcattggaagaccccacccaagcttggcagccgagctcgtgtatcctggggctcccttcatctccagggagtcccctccccggccctaccagcgcccgctgggctgagcccctaccccacaccaggccgtcctcccgggccctcccttggaaacctgccctgcctgagggcccctctgcccagcttgggcccagctgggctctgccaccctacctgttcagtgtcccgggcccgttgaggatgaggccgctagaggcctgaggatgagctggaaggagtgagaggggacaaaacccaccttgttggagcctgcagggtggtgctgggactgagccagtcccaggggcatgtattggcctggaggtggggttgggattgggggctggtgccagccttcctctgcagctgacctctgttgtcctccccttgggcggctgagagccccagctgacatggaaatacagttgttggcct

SEQ ID NO: 225956 - DNA, 806 bp, Homo Sapiens; identical to SEQ ID NO: 191684

SEQ ID NO: 225957 - DNA, 1725 bp, Homo Sapiens; identical to SEQ ID NO: 191685

SEQ ID NO: 225958 - DNA, 1054 bp, Homo Sapiens
ttgtacaaaaaagttgggtcatcttttcctccaaagtgataattaacatggtaagccttaacagcaaacattcttcctaaaaggaagacttcattttctcaagaaatgggattagttgggggtattataataccaaattgtaaatcatgagcgttttctccactgtgcacctgaggcagatcatgcatctttgagtgcagtttggtctgacccctcaggagaaaagcatggtgccgtagggctgctatggtttgaatggatgccatcactcttttctccacatacagtgcagagagctgtctggagtcacaatctgaacagattctcgggcgctccttctctccttccatcactacagtaagtaaaaggaccatagaggggaaccaggaatctgagaatcagctgtgctcaatagccaacctccctgtccagatgcagctattttggtatctcctatcacatgcactctgaatcagggtttttctataagaaatctttcagaatcagcaaaagtggggatgacccaggcatcttgatttgcaaaatcacaaaactaagttgtcagttatcactgtagatgagcaactcatctttttaaagtatagttactgaactgattctgagaaatctttagagagaaaaaactcaacagtacaaattaactaattgggaaagttagaatgtcctttctgaatttttcattaaaaaaattacattatctgaaataacataaagctactaaactgctttgtattctattaagaaatagctcctaaggatgtagtcttgtttcatagttgttgcactatatcaaaacttaaaatgtaagcccagttcttctctgtatagaaaggaaacattgtgttacttaatgaattatttatacagagcatttgttgccaactgttgttccagccatccacacagggagtctgttctgaggtggcaatagcacatgggaagatgaactttccctgtttgtttacccgttcttctttggctgtatctgatgacagtataagatgttcttaataaagttttatgttcttttttg

SEQ ID NO: 225959 - DNA, 958 bp, Homo Sapiens; identical to SEQ ID NO: 191694

SEQ ID NO: 225960 - DNA, 977 bp, Homo Sapiens; identical to SEQ ID NO: 191697

SEQ ID NO: 225961 - DNA, 968 bp, Homo Sapiens; identical to SEQ ID NO: 191698

SEQ ID NO: 225962 - DNA, 1007 bp, Homo Sapiens; identical to SEQ ID NO: 191702
  misc_feature (470)..(480): n is a, c, g, or t
  misc_feature (816)..(845): n is a, c, g, or t

SEQ ID NO: 225963 - DNA, 1089 bp, Homo Sapiens; identical to SEQ ID NO: 191703
  misc_feature (203)..(232): n is a, c, g, or t
  misc_feature (568)..(578): n is a, c, g, or t

SEQ ID NO: 225964 - DNA, 1290 bp, Homo Sapiens; identical to SEQ ID NO: 191706
  misc_feature (234)..(245): n is a, c, g, or t

SEQ ID NO: 225965 - DNA, 938 bp, Homo Sapiens; identical to SEQ ID NO: 191718

SEQ ID NO: 225966 - DNA, 1407 bp, Homo Sapiens; identical to SEQ ID NO: 191720
  misc_feature (1262)..(1271): n is a, c, g, or t

SEQ ID NO: 225967 - DNA, 1076 bp, Homo Sapiens
ttggcctcaatctgaccaacaagatcgtgtttgtggtgagcttcgtgggcaaccgtggcaccttcatccggggctataaggccatggtcatggacatggaattcctctaccacgtgggctacatcctgaccagtgtcctgggcctctttgctcatgagctgttctacagcatcctgctctttgacctcatctaccgcgaggagacgctgttcaacgtcatcaagagtgtgacccgcaatggccgctccatcctgctgacagccctgctggccctcatcctggtctacctcttctccatcgtcggcttcctcttcctcaaggatgacttcattctcgaggtcgaccggctgcccaacaaccactccacagccagccccctggggatgccacatggagctgctgcatttgtggacacctgcagtggggacaagatggactgtgtctcagggctctcggtgcctgaggtcctggaagaggacagggagctggacagcacagagcgggcctgtgacactctgttgatgtgcatcgtcactgtcatgaaccatgggctacgcaacggtggtggcgtgggcgacattctccgcaagccctccaaagatgagtctctcttcccagcccgagtggtctatgacctcctgttcttcttcatcgtcatcatcattgtgctgaacctcatctttggggtaatcatcgacaccttcgctgacctgcgtagtgagaagcagaagaaggaggagattcttaagacgacatgcttcatctgtggtctggagagggacaagtttgataacaagacagtgtcatttgaggaacacatcaagctggagcacaacatgtggaactacttgtacttcattgtgctggtccgcgtgaagaacaagaccgactacacgggccctgagagctacgtggcccagatgatcaagaacaagaacctgggactggttcccccggatgcgggccatgtcccttgtcagcaatgagggcgaggaggagcagaatgagattcggattctccaggacaagctcactccacccatgaagctggtgtcccacctcactgcccagctcaa

SEQ ID NO: 225968 - DNA, 973 bp, Homo Sapiens; identical to SEQ ID NO: 191725

SEQ ID NO: 225969 - DNA, 762 bp, Homo Sapiens; identical to SEQ ID NO: 191727

SEQ ID NO: 225970 - DNA, 910 bp, Homo Sapiens
ttggctttctgccgctgtcgccaccatggctccgcaccgccccgcgcccgcgctgctttgcgcgctgtccctggcgctgtgcgcgctgtcgctgcccgtccgcgcggccactgcgtcgcggggggcgtcccaggcgggggcgccccaggggcgggtgcccgaggcgcggcccaacagcatggtggtggaacaccccgagttcctcaaggcagggaaggagcctggcctgcagatctggcgtgtggagaagttcgatctggtgcccgtgcccaccaacctttatggagacttcttcacgggcgacgcctacgtcatcctgaagacagtgcagctgaggaacggaaatctgcagtatgacctccactactggctgggcaatgagtgcagccaggatgagagcggggcggccgccatctttaccgtgcagctggatgactacctgaacggccgggccgtgcagcaccgtgaggtccagggcttcgagtcggccaccttcctaggctacttcaagtctggcctgaagtacaagaaaggaggtgtggcatcaggattcaagcacgtggtacccaacgaggtggtggtgcagagactcttccaggtcaaagggcggcgtgtggtccgtgccaccgaggtacctgtgtcctgggagagcttcaacaatggcgactgcttcatcctggacctgggcaacaacatccaccagtggtgtggttccaacagcaatcggtatgaaagactgaaagccacacaggtgtccaagggcatccgggacaacgagcggagtggccgggcccgagtgcacgtgtctgaggagggcactgagcccgaggcgatgctccaggtgctgggccccaagccggctctgcctgcaggtaccgaggacaccgccaaggaggatgcggccaaccgc

SEQ ID NO: 225971 - DNA, 1162 bp, Homo Sapiens; identical to SEQ ID NO: 191737

SEQ ID NO: 225972 - DNA, 942 bp, Homo Sapiens; identical to SEQ ID NO: 191738

SEQ ID NO: 225973 - DNA, 1068 bp, Homo Sapiens; identical to SEQ ID NO: 191739
  misc_feature (94)..(124): n is a, c, g, or t

SEQ ID NO: 225974 - DNA, 984 bp, Homo Sapiens
ttggcagcgttttctgggcttctgtctggttctctcctccagaaggttctgccggttcccccagctctgggtacccggctctgcatcgcgtcgccatgatgggccatcgtccagtgctcgtgctcagccagaacacaaagcgtgaatccggaagaaaagttcaatctggaaacatcaatgctgccaagactattgcagatatcatccgaacatgtttgggacccaagtccatgatgaagatgcttttggacccaatgggaggcattgtgatgaccaatgatggcaatgccattcttcgagagattcaagtccagcatccagcggccaagtccatgatcgaaattagccggacccaggatgaagaggttggagatgggaccacatcagtaattattcttgcaggggaaatgctgtctgtagctgagcacttcctggagcagcagatgcacccaacagtggtgatcagtgcttaccgcaaggcattggatgatatgatcagcaccctaaagaaaataagtatcccagtcgacatcagtgacagtgatatgatgctgaacatcatcaacagctctattactaccaaagccatcagtcggtggtcatctttggcttgcaacattgccctggatgctgtcaagatggtacagtttgaggagaatggtcggaaagagattgacataaaaaaatatgcaagagtggaaaagatacctggaggcatcattgaagactcctgtgtcttgcgtggagtcatgattaacaaggatgtgacccatccacgtatgcggcgctatatcaagaaccctcgcattgtgctgctggattcttctctggaatacaagaaaggagaaagccagactgacattgagattacacgagaggaggacttcacccgaattctccagatggaggaagagtacatccagcagctctgtgaggacattatccaactgaagcccgatgtggtcatcactgaaaagggcatct

SEQ ID NO: 225975 - DNA, 1067 bp, Homo Sapiens; identical to SEQ ID NO: 191740

SEQ ID NO: 225976 - DNA, 1001 bp, Homo Sapiens; identical to SEQ ID NO: 191741

SEQ ID NO: 225977 - DNA, 1017 bp, Homo Sapiens; identical to SEQ ID NO: 191742

SEQ ID NO: 225978 - DNA, 970 bp, Homo Sapiens; identical to SEQ ID NO: 191743

SEQ ID NO: 225979 - DNA, 996 bp, Homo Sapiens; identical to SEQ ID NO: 191744

SEQ ID NO: 225980 - DNA, 1074 bp, Homo Sapiens
gacacaaatgctaaagcagtagacagttcccaaccacccgtaaatatgatggcatcccacccctctccctatcacactagccgttaccctcatttattcttcttcatggtactcatcacttgacactctctatacatttattacttaaaatgcttgtctaacttcctccactagaatataagctctgaaacaggagggggttttaaaaagctatatcctcagggtctaggataaaatctggcatatggtaggcatacaatagttgagtgaatttagtgtagtactttccttatgtggggtatttggtaccttgaggttacttcattctaagtgaatgatttagcaggctttaacatatataaaaatgtgttcattattctataatacaccagagtaaaaagcattttaactgccatggtctacaaattattctccaactgtgtgggggatggaaagttgtataaaaagcacccagtactaccctcataattgtaccaaccagtgagaccaagtggtctaccagggtcacgaaggtaaaatgaagtttccaacttcttaagagaaagttctcttttctcaggttcagaatctaaacactttactcctctcaggatggcatatatccctatatgccttgtcagccactggtatagagggcatagcagtttggaatccaatagcaacaactttttgtgcaaagtttggcatttagaatcatgcctcattaattcaaaaacattactaagggcctaccatgcattaagcactatgtatacaggtaaatttttaaaatatggagtttaccaacaataaagaaaataattacaaagcagtgtgatcagtgcgacaacatgggaggggaagagtaaaggaccagaacaaaggagcatctaatttgactgaaaagggctttaaaaagcctatgaaaacagaatcactgaagctgagtcctaagaggtaggtaggtattcacttggtcacaaagaaggatgcagaagtaatgatgtgtgcaaggctactgaggtggaaaacacacaaagcgcatttagggaagaagtggaagtacttgcccaa

SEQ ID NO: 225981 - DNA, 980 bp, Homo Sapiens
ttggcttccggcaccggcagctcaagtggccaaggcaagatgggtcaaagtcagagtggtggtcatggtcctggaggtggcaagaaggatgacaaggacaagaaaaagaaatatgaacctcctgtaccaactagagtggggaaaaagaagaagaaaacaaagggaccagatgctgccagcaaactgccactggtgacacctcacactcagtgccggttaaaattactgaagttagagagaattaaagactatcttctcatggaggaagaattcattagaaatcaggaacaaatgaaaccattagaagaaaagcaagaggaggaaagatcaaaagtggatgatctgagggggaccccgatgtcagtaggaaccttggaagagatcattgatgacaatcatgccatcgtgtctacatctgtgggctcagaacactacgtcagcattctttcatttgtagacaaggatctgctggaacctggctgctcggtcctgctcaaccacaaggtgcatgccgtgataggggtgctgatggatgacacggatcccctggtcacagtgatgaaggtagaaaaggccccccaggagacctatgcagatattggggggttggacaaccaaattcaggaaattaaggaatctgtggagcttcctctcacccatcctgaatattatgaagagatgggtataaagcctcctaagggggtcattctctatggtccacctggcacaggtaaaaccttgttagccaaagcagtagcaaaccaaacctcagccactttcttgagagtggttggctctgaacttattcagaagtacctaggtgatgggcccaaactcgtacgggaattgttccgagttgctgaagaacatgcaccgtccatcgtgtttattgatgaaattgacgccattgggacaaaagatatgactccaattctggtggtgagagagaaatcagcgaacaatgttggaactgctgaacc

SEQ ID NO: 225982 - DNA, 982 bp, Homo Sapiens; identical to SEQ ID NO: 191746

SEQ ID NO: 225983 - DNA, 1466 bp, Homo Sapiens; identical to SEQ ID NO: 191747

SEQ ID NO: 225984 - DNA, 890 bp, Homo Sapiens; identical to SEQ ID NO: 191748

SEQ ID NO: 225985 - DNA, 868 bp, Homo Sapiens; identical to SEQ ID NO: 191749

SEQ ID NO: 225986 - DNA, 943 bp, Homo Sapiens
gaaaattatgtcttcattcttaaataaatctcgataggatggagtttgatggtcaatcaagcagtagaatgggatgaaaatctgcaatagttaaaaaatctttgcgtgtaaggaaaagaacggcaatgacaagggagataagagagccttctctttttcttaaataagacaggaaactgcattatttcccttgctggagtggcagcagcctcattggttttcataaaacatcatttttgcagtgcggcctgttgataaggttgttccaagatgggaggacagacacgaggccgactactcatgacagaactaggccttctctcaaagcctctaacgtgtgctgtttctcacgaggaacctgacacttcagttaaagcttctgaaatattgcaatggcataattgacaggttttttggtgcgatgactttcttgcacatgtaaactctttgagaaaagttggagaaaaaaggaccggggagagtttggtttaatattccagacgccagccatggatgcctctgccctgtgtcactacatgttcttttctgagaaacattcaaatgctgagtgttacacactgtggctgaaagaaatgatccactcaccaccatccaccctctctcattgtctgtgtgaagctctcaatagcagaggctgaagacagaaaggttgtctctgtttcctcgcaccagggacattacttggtgacctggtgaatggcatgggcaaggtagcccacgttgctggaggtgacccctgccacagagatgcggccatcttttgtcatgtagatggagaactccttgatcagccgctccacctgttcaggctttagccctgtgaaacagaacatgccaatttggtcggtgatgtgttgccaattgtgggtggaaccctccttcttgaggttggagaccagttgagccaacttttttgtacaaa

SEQ ID NO: 225987 - DNA, 1195 bp, Homo Sapiens; identical to SEQ ID NO: 191753

SEQ ID NO: 225988 - DNA, 1231 bp, Homo Sapiens; identical to SEQ ID NO: 191754

SEQ ID NO: 225989 - DNA, 931 bp, Homo Sapiens
ttttggatgagtctcaagatggacaaccgggatgttgcaggaaaggctaaccggtggtttggggttgctccccctaaatctggaaaaatgaacatgaacatccttcaccaggaagagctcatcgctcagaagaaacgggaaattgaagccaaaatggaacagaaagccaagcagaatcaggtggccagccctcagcccccacatcctggcgaaatcacaaatgcacacaactcttcctgcatttccaacaagtttgccaacgatggtagcttcttgcagcagtttctgaagttgcagaaggcacagaccagcacagacgccccgaccagtgcgcccagcgcccctcccagcacacccacccccagcgctgggaagaggtccctgctcatcagcaggcggacaggcctggggctggccagcctgccgggccctgtgaagagctactcccacgccaagcagctgcccgtggcgcaccgcccgagtgtcttccagtcccctgacgaggacgaggaggaggactatgagcagtggctggagatcaaagtttcacccccagagggagccgagactcggaaagtgatagagaaattggcccgctttgtggcagaaggaggccccgagttagaaaaagtagctatggaggactacaaggataacccagcatttgcatttttgcacgataagaatagcagggaattcctctactacaggaagaaggtggctgagataagaaaggaagcacagaagtcgcagcagcctctcagaaagtttcacccccagaggacgaagaggtcaagaaccttgcagaaaagttggccaggttcatagcggacgggggtcccgaggtggaaaccattgccctccagaacaaccgtgagaaccaggcattcagctttctgtatgagcccaatagccaagggtacaagtacta

SEQ ID NO: 225990 - DNA, 807 bp, Homo Sapiens; identical to SEQ ID NO: 191765
  misc_feature (726)..(742): n is a, c, g, or t

SEQ ID NO: 225991 - DNA, 986 bp, Homo Sapiens
tgtacaaaaagttgggctgaggtggaggcaggctgcggcagacggcgacagtggcggcggcgccatggcagggcttgcaggatccctgctgccttggtgatcccgggctgacagccagagagcacagcggctcagctcctggagagtgagggttgaagaaagcggagggcagccgcctgcgcccgctggctcccattaggtcggttcctgcagcggtgcccggcagccttggtgaaggccctgcccggcagagatcatgtattgcctccagtggctgctgcccgtcctcctcatccccaagcccctcaaccccgccctgtggttcagccactccatgttcatgggcttctacctgctcagcttcctcctggaacggaagccttgcacaatttgtgccttggttttcctggcagccctgttccttatctgctatagctgctggggaaactgtttcctgtaccactgctccgattccccgcttccagaatcggcgcatgatcccggcgttgtgggcacctaacggcctgccctgttagctttccaaggaagcagaagacgggaggggaggcattgacataggtcataaagcattggagtttcaaatcccgcagcctcgcgggtgtcacattcctgacggcgcctttttggcctgtgatgttttatccttacaatgtgaataatggcactgaccggtgcttttattgtaaagtcctatagtcgtgggtggtcttgtggttgtgtgtgttctgtccccatctaggtcctggctggccgcatgaccacccctctcgcctcattactgtgaggagtctgggtccatcctggtcagctgccccaatgtgacctggggcagataaaatgccagtctcattgtcacctctgtgacccctccttgtcaggtctccttccttcccagaatgttactgactcctcagtccctcttctggtttccctttatttctcttctacccttttcctttttgggg

SEQ ID NO: 225992 - DNA, 1391 bp, Homo Sapiens
ttgggaccggagctgaggcaggaagagccggcgccatggtggagaaggaggaggctggcggcggcattagcgaggaggaggcggcacagtatgaccggcagatccgcctgtggggactggaggcccagaaacggctgcgggcctctcgggtgcttcttgtcggcttgaaaggacttggggctgaaattgccaagaatctcatcttggcaggagtgaaaggactgaccatgctggatcacgaacaggtaactccagaagatcccggagctcagttcttgattcgtactgggtctgttggccgaaatagggctgaagcctctttggagcgagctcagaatctcaaccccatggtggatgtgaaggtggacactgaggatatagagaagaaaccagagtcatttttcactcaattcgatgctgtgtgtctgacttgctgctccagggatgtcatagttaaagttgaccagatctgtcacaaaaatagcatcaagttctttacaggagatgtttttggctaccatggatacacatttgccaatctaggagagcatgagtttgtagaggagaaaactaaagttgccaaagttagccaaggagtagaagatgggcccgacaccaagagagcaaaacttgattcttctgagacaacgatggtcaaaaagaaggtggtcttctgccctgttaaagaagccctggaggtggactggagcagtgagaaagcaaaggctgctctgaagcgcacgacctccgactactttctccttcaagtgctcttaaagttccgtacagataaaggaagagatcccagttctgatacatatgaggaagattctgagttgttgctccagatacgaaatgatgtgcttgactcactgggtattagtcctgacctgcttcctgaggactttgtcaggtactgcttctccgagatggccccagtgtgtgcggtggttggagggattttggcacaggaaattgtgaaggccctgtctcagcgggaccctcctcacaacaacttcttcttcttcgatggcatgaaggggaatgggattgtggagtgccttggccccaagtgaactcaagatttggcagccccagagatgccaactgcagcatgcccacctgtattccctgtccccttccttcatgaaggcatctccaggcaaggaaaactgaagtcattggcccgatacaaaacatttcctgcaacgaaggaggtggtgccgacgtgctgcttcccatcaccagcagctgctcgacaaggggcgcaggtggctgtctttgttccagcactgttcagctgcctgtcatcccgggcctgccagctcccctgagtgatgagcacttctagcacccctctgccctttctctgtccttatgctgtcccgggc

SEQ ID NO: 225993 - DNA, 1167 bp, Homo Sapiens; identical to SEQ ID NO: 191773

SEQ ID NO: 225994 - DNA, 872 bp, Homo Sapiens
  misc_feature (502)..(510): n is a, c, g, or t
acaaaaaagttggcaccaagcaagatggcagcttccgagacggttaggctacggcttcaatttgattacccgccgccagctaccccgcactgtacggccttctggcttctggtcgacttgaacagatgccgagtcgtcacagatctcattagtctcatccgccagcgcttcggcttcagttctggggccttcctaggcctctacctggagggggggctcttgccccccgccgagagcgcgcgccttgtgagagacaacgactgcctcagagttaaattagaagagagaggagttgctgagaattctgtagtcatcagtaatggtgacattaatttatctcttagaaaagcaaagaagcgggcatttcagttagaggagggtgaagaaactgaaccagattgcaaatattcaaagaagcattggaagagtcgagagaacaataacaataatgagaaggtcttggatctggaaccaaaagctgtcacagatcagactgtcagcnnnnnnnnnctagaaaaaagtaaagcaacctgtggcacagtgggtgatgataacgaagaggccaaaagaaaatcaccaaagaaaaaggagaaatgtgaatataaaaaaaaggctaagaatcccaagtctccgaaagtacaggcagtgaaagactgggccaatcagagatgtagttctccaaaaggttctgctagaaacagccttgttaaagccaaaaggaaaggtagtgtaagcgtttgctcaaaagagagtcccagttcctcctcggagtctgaatcttgtgatgaatctatcagtgatggtcccagcacagtcactttggaagccagaaatacctcagagaaattaccaactgagttatcaaaggaaga

SEQ ID NO: 225995 - DNA, 988 bp, Homo Sapiens; identical to SEQ ID NO: 191776

SEQ ID NO: 225996 - DNA, 818 bp, Homo Sapiens; identical to SEQ ID NO: 191777

SEQ ID NO: 225997 - DNA, 1034 bp, Homo Sapiens; identical to SEQ ID NO: 191778

SEQ ID NO: 225998 - DNA, 915 bp, Homo Sapiens
ttggctatcatattcatcggcgtaaatctaactttcttcccacaacactttctcggcctatccggaatgccccgccgccttccgacccctgcgccccggccccggtcccccgggccatgcagcctcggccccgcgggcgcccgccgcgcacccgaggagatgaggctccgcaatggcaccttcctgacgctgctgctcttctgcctgtgcgccttcctctcgctgtcctggtacgcggcactcagcggccagaaaggcgacgttgtggacgtttaccagcgggagttcctggcgctgcgcgatcggttgcacgcagctgagcaggagagcctcaagcgctccaaggagctcaacctggtgctggacgagatcaagagggccgtgtcagaaaggcaggcgctgcgagacggagacggcaatcgcacctggggccgcctaacagaggacccccgattgaagccgtggaacggctcacaccggcacgtgctgcacctgcccaccgtcttccatcacctgccacacctgctggccaaggaaagcagtctgcagcccgcggtgcgcgtgggccagggccgcaccggagtgtcggtggtgatgggcatcccgagcgtgcggcgcgaggtgcactcgtacctgactgacactctgcactcgctcatctccgagctgagcccgcaggagaaggaggactcggtcatcgtggtgctgatcgccgagactgactcacagtacacttcggcagtgacagagaacatcaaggccttgttccccacggagatccattctgggctcctggaggtcatctcaccctccccccacttctaccctgacttctcccgcctccgagagtcctttggggaccccaaggagagagtcacgtggaggaccaaacagaacctcgattactgcttcctc

SEQ ID NO: 225999 - DNA, 1333 bp, Homo Sapiens
  misc_feature (995)..(1145): n is a, c, g, or t
ttgggtactattagccatggtcaaccccaccgtgttcttcgacattgccgtcgacggcgagcccttgggccgcgtctcctttgaggtaaggggcctggataccaagaagtgactgctcatctaatccataaagctatgttaacagattggagctgtttgcagacaaggtcccaaagacagcagaaaattttcgtgctctgagcactggagagaaaggatttggttataagggttcctgctttcacagaattattccagggtttatgtgtcagggtggtgacttcacacgccataatggcactggtggcaagtccatctatggggagaaatttgaagatgagaacttcatcctaaagcatacgggtcctggcatcttgtccatggcaaatgctggacccaacacaaatggttcccagtttttcatctgcactgccaagactgagtggttggatggcaagcatgtggtgtttggcaaagtgaaagaaggcatgaatattgtggaggccatggagcgctttgggtccaggaatggcaagaccagcaagaagatcaccattgctgactgtggacaactcgaataagtttgacttgtgttttatcttaaccaccagatcattccttctgtagctcaggagagcacccctccaccccatttgctcgcagtatcctagaatctttgtgctctcgctgcagttccctttgggttccatgttttccttgttccctcccatgcctagctggattgcagagttaagtttatgattatgaaataaaaactaaataacaattgtcctcgtttgagttaagtgttgatgtaggctttattttaagcagtaatgggttacttctgaaacatcacttgtttgcttaattctacacagtacttagattttttttactttccagtcccaggaagtgtcaatgtttgttgagtggaatattgaaaatgtaggcagcaactgggcatggtggctcactgtctgtaatgtattacnnnnnnnnnnnnnnnnnnnnnnnnnnnnnnnnnnnnnnnnnnnnnnnnnnnnnnnnnnnnnnnnnnnnnnnnnnnnnnnnnnnnnnnnnnnnnnnnnnnnnnnnnnnnnnnnnnnnnnnnnnnnnnnnnnnnnnnnnnnnnnnnnnnnnnntagagtgagctattatcatgccactgtacagcctgggtgttcacagatcttgtgtctcaaaggtaggcagaggcaggaaaagcaaggagccagaattaagaggttgggtcagtctgcagtgagttcatgcatttagaggtgttcttcaagatgactaatgtcaaaaattgagacatctgttgcggttc

SEQ ID NO: 226000 - DNA, 791 bp, Homo Sapiens; identical to SEQ ID NO: 191784

SEQ ID NO: 226001 - DNA, 728 bp, Homo Sapiens; identical to SEQ ID NO: 191786

SEQ ID NO: 226002 - DNA, 1422 bp, Homo Sapiens
tgtacaaagaagaagaagagatgatggtgccagggatggaaggcaaagaggaggtgtgtggggaaggggagcaatgagtcttgaaaagccacaaggcaggtgtgaatcccctaattttgattttgagacaggggatccccctgatactttaggatggaagtaatagtcatggggatttattctgcaaggggaatgagatggtaagcctttggggttgaattatctaaaaacaagggagagggagtgtgctgctgtctctagaaagatgaaatgtgtgcttctcctgtttgttaaagctcttttgggggtcccagtgaaagcaagcataggtgaacgatcaggagcacatcagtgaggaacgcatgttcagaagcccccatgatgctccttttcttcctcttaagcctggctctgacagtggtacaacagcggtggtggccctgatacgagggaagcagttgattgtagccaacgcaggagactctcgctgtgtggtatctgaggctggcaaagctttagacatgtcctatgatcacaaaccagaggatgaagtagaactagcacgcatcaagaatgctggtggcaaggtcaccatggatgggcgagtcaacgggggcctcaacctctccagagccattggggaccacttctataagagaaacaagaacctgccacctgaggaacagatgatttcagcccttcctgacatcaaggtgctgactctcactgacgaccatgaattcatggtcattgcctgtgatggcatctggaatgtgatgagcagccaggaagttgtagatttcattcaatcaaagatcagccagcgtgatgaaaatggggagcttcggttattgtcatccattgtggaagagctgctggatcagtgcctggcaccagacacttctggggatggtacagggtgtgacaacatgacctgcatcatcatttgcttcaagccccgaaacacagcagagctccagccagagagtggcaagcgaaaactagagaggtgctctctactgagggggctgaagaaaatggcaacagcgacaagaagaagaaggccaagcgagactagcagtcatccagacccctgcccacctagactgttttctgagccctccggacctgagactgagttttgtctttttcctttagccttagcagtgggtatgaggtgtgcagggggagctgggtggcttcactccgcccattccaaagagggctctccctccacactgcagccgggagcctctgctgtcctccccagccgcctctgctcctcgggctcatcaccggttctgtgcctgtgctctgttgtgttggagggaaaggactggcggttctggtttttactctgtgaactttatttaaggacattctttttattggcggctccatggccctcggccgcttgcaccc

SEQ ID NO: 226003 - DNA, 942 bp, Homo Sapiens; identical to SEQ ID NO: 191788

SEQ ID NO: 226004 - DNA, 1493 bp, Homo Sapiens; identical to SEQ ID NO: 191789

SEQ ID NO: 226005 - DNA, 1043 bp, Homo Sapiens
  misc_feature (889)..(939): n is a, c, g, or t
ctttgtacaaaaaagttggctttttaaaagtgcagccggagaccagcctacagccgcctgcatctgtatccagcgccaggtcccgccagtcccagctgcgcgcgccccccagtcccgcacccgttcggcccaggctaagttagccctcaccatgccggtcaaaggaggcaccaagtgcatcaaatacctgctgttcggatttaacttcatcttctggcttgccgggattgctgtccttgccattggactatggctccgattcgactctcagaccaagagcatcttcgagcaagaaactaataataataattccagcttctacacaggagtctatattctgatcggagccggcgccctcatgatgctggtgggcttcctgggctgctgcggggctgtgcaggagtcccagtgcatgctgggactgttcttcggcttcctcttggtgatattcgccattgaaatagctgcggccatctggggatattcccacaaggatgaggtgattaaggaagtccaggagttttacaaggacacctacaacaagctgaaaaccaaggatgagccccagcgggaaacgctgaaagccatccactatgcgttgaactgctgtggtttggctgggggcgtggaacagtttatctcagacatctgccccaagaaggacgtactcgaaaccttcaccgtgaagtcctgtcctgatgccatcaaagaggtcttcgacaataaattccacatcatcggcgcagtgggcatcggcattgccgtggtcatgatatttggcatgatcttcagtatgatcttgtgctgtgctatccgcaggaaccgcgagatggtctagagtcagcttacatccctgagcaggaaagtttacccatgaaattggtgggannnnnnnnnnnnnnnnnnnnnnnnnnnnnnnnnnnnnnnnnnnnnnnnnnnccactaattttagtattcattctgcattgctagataaaagctgaagttactttatgtttgtcttttaatgcttcattcaatattgacatttgtagttgagcggg

SEQ ID NO: 226006 - DNA, 1049 bp, Homo Sapiens; identical to SEQ ID NO: 191792
  misc_feature (894)..(943): n is a, c, g, or t

SEQ ID NO: 226007 - DNA, 1168 bp, Homo Sapiens; identical to SEQ ID NO: 191793
  misc_feature (849)..(899): n is a, c, g, or t

SEQ ID NO: 226008 - DNA, 1085 bp, Homo Sapiens; identical to SEQ ID NO: 191795
  misc_feature (707)..(757): n is a, c, g, or t
  misc_feature (859)..(913): n is a, c, g, or t

SEQ ID NO: 226009 - DNA, 1048 bp, Homo Sapiens; identical to SEQ ID NO: 191797
  misc_feature (874)..(925): n is a, c, g, or t

SEQ ID NO: 226010 - DNA, 1073 bp, Homo Sapiens
caggtagtaaaccgttttattggaaactggttaaaaattaaggcactccaagctttatggtttccttgaggttacagttttgtggctgctcttagtgtatttcagaaaaaagcagatggacgaagaccgaccttacagacgtgggtttctacactgagcgcaagggctgactacgctgtatttcacaaccgagccctagcgccagctcagcaccctacgctcaggaagcggattttgcacgcacactactgcattcatacagagttcactgaagtctattaccaagtgtcttttatgaataaacaatacaaagtccaattttgatggctgctataaaatacttaggaatctctgcaatactttactacaaatacaaatgcccaagaggtcagggaaatcagcctgaagaactgggtacaggttctattctttgtggaaatttcagcctaggaatgttattcccggtacagatgtacacagtcaaaaaggcttatcgagctgtttgacgagttcttgaagtgttctggatcagtgatctgcctgtgaactttagttcacgctgaagacagtcttctcagttttcatgactgtgaagtgtgaaaatggaacgcatccttgatcttaggtgctgctgacctactttcccaaagcaaaatgttttaaaattcaaggcaatctggaacggggactatttccaaacttccttaggcagcacttttcagtgacttccccgcacgctgctttccctgccacgaagcgcttggtctgcttactaaagccacgtatcctgattttacagaaacgtgggcaggtccagcagtgccactggagagctcccagagaagcccactcagaaggaagtgctcagaccaccctcgagccagagcggctggaagctggactggtcccatgaggcagaaggagcaccagcgcctgctgggtggtgtggggagagccctcagctgactctggacacacctgcttccggggcacgtggcccagagccgggcctgtggacgggcctttctttcttcttggggtggaccccgtccccacccaacttttttgtacaa

SEQ ID NO: 226011 - DNA, 1118 bp, Homo Sapiens; identical to SEQ ID NO: 191798

SEQ ID NO: 226012 - DNA, 1168 bp, Homo Sapiens; identical to SEQ ID NO: 191799

SEQ ID NO: 226013 - DNA, 676 bp, Homo Sapiens; identical to SEQ ID NO: 191801

SEQ ID NO: 226014 - DNA, 808 bp, Homo Sapiens; identical to SEQ ID NO: 191802

SEQ ID NO: 226015 - DNA, 971 bp, Homo Sapiens
  misc_feature (891)..(909): n is a, c, g, or t
actttgtacaaaaaagttggcagcctttgctgtctatgacaagttcagcgtgggagatgccaagactcgctacaagctgaaggtggaggggtacagtgggacagcaggtgactccatggcctaccacaatggcagatccttctccacctttgacaaggacacagattcagccatcaccaactgtgctctgtcctacaaaggggctttctggtacaggaactgtcaccgtgtcaacctgatggggagatatggggacaataaccacagtcagggcgttaactggttccactggaagggccacgaacactcaatccagtttgctgagatgaagctgagaccaagcaacttcagaaatcttgaaggcaggcgcaaacgggcataaattccagggaccactgggtgagagaggaataaggcccagagcgaggaaaggattttaccaaagcatcaatacaaccagcccaaccatcggtccacacctgggcatttggtgagagtcaaagctgaccatggatccctggggccaacggcaacagcatgggcctcacctcctctgtgatttctttctttgcaccaaagacatcagtctccaacatgtttctgttttgttgtttgattcagcaaaaatctcccagtgacaacatcgcaatagttttttacttctcttaggtggctctgggaatgggagaggggtaggatgtacaggggtagtttgttttagaaccagccgtattttacatgaagctgtataattaattgtcattatttttgttagcaaagattaaatgtgtcattggaagccatccctttttttacatttcatacaacagaaaccagaaaagcaatactgtttccattttaaggatatgattaatattattaatataatannnnnnnnnnnnnnnnnnnaaactaaggatttttcaagagatctttctttccaaaacatttctggacagtaccggattgtg

SEQ ID NO: 226016 - DNA, 1199 bp, Homo Sapiens
ttggggacctccgactcccccctgttgccttattaccttccgaccacctctcggacctcttgcccagcccttccccgtagacatcaccccagatacggtggtgacaccattgctatgggcccacgtagggcgcagtgcgagccagggcaggacgcacttggtacgacccacgccgcgccccgcgccgccggaagtgaggtgtctgacccccgaagttccggttcgcagggggtggggagtgttgttaaccggaggggcagccgcagtcgcgcggattgagcgggctcgcggcgctgggttcctggtctccgggccagggcaatgttccgcacggcagtgatgatggcggccagcctggcgctgaccggggctgtggtggctcacgcctactacctcaaacaccagttctaccccactgtggtgtacctgaccaagtccagccccagcatggcagtcctgtacatccaggcctttgtccttgtcttccttctgggcaaggtgatgggcaaggtgttctttgggcaactgagggcagcagagatggagcaccttctggaacgttcctggtacgccgtcacagagacttgtctggccttcaccgtttttcgggatgacttcagcccccgctttgttgcactcttcactcttcttctcttcctcaaatgtttccactggctggctgaggaccgtgtggactttatggaacgcagccccaacatctcctggctctttcactgccgcattgtctctcttatgttcctcctgggcatcctggacttcctcttcgtcagccacgcctatcacagcatcctgacccgtggggcctctgtgcagctggtgtttggctttgagtatgccatcctgatgacgatggtgctcaccatcttcatcaagtatgtgctgcactccgtggacctccagagtgagaacccctgggacaacaaggctgtgtacatgctctacacagagctgtttacaggcttcatcaaggttctgctgtacatggccttcatgaccatcatgatcagggtgcacaccttcccactctttgccatccggcccatgtacctggccatgagacagttcaagaaagctgtgacagatgccatcatgtctcgccgagccatccgcaacatgaacaccctgtatccagatgccaccccagaggagctccaggcaatggacatgtctgcatcatc

SEQ ID NO: 226017 - DNA, 1004 bp, Homo Sapiens; identical to SEQ ID NO: 191805
  misc_feature (299)..(354): n is a, c, g, or t

SEQ ID NO: 226018 - DNA, 638 bp, Homo Sapiens; identical to SEQ ID NO: 191806

SEQ ID NO: 226019 - DNA, 1014 bp, Homo Sapiens; identical to SEQ ID NO: 191812

SEQ ID NO: 226020 - DNA, 985 bp, Homo Sapiens
  misc_feature (877)..(895): n is a, c, g, or t
tttgtacaaaaaagttggggagaaaatccttgaaattgtttttgccaagccaccagatcagaaaaggaaagaaagaaaagctcagaggcaagcagcaaaaaatcaaatgtatgacgattactactattatggtccacctcatatgccccctccaacaagaggtcgagggcgtggaggtagaggtggttatggatatcctccagattattatggatatgaagattattatgattattatggttatgattaccataactatcgtggtggatatgaagatccatactatggttatgaagattttcaagttggagctagaggaaggggtggtagaggagcaaggggtgctgctccatccagaggtcgtggggctgctcctccccgcggtagagccggttattcacagagaggaggtcctggatcagcaagaggcgttcgaggtgcgagaggaggtgcccaacaacaaagaggccgcggggtacgtggtgcgaggggtggccgcggtggaaatgtaggaggaaagcgcaaagctgatgggtacaaccagccagattccaagcggcgccagaccaataatcagaactggggctcccaacccattgctcagcaaccgctccaaggtggtgatcattctggtaactatggttacaaatctgaaaaccaggagttttatcaggatacttttgggcaacagtggaagtagaaacagtagggcctctgtaaaattggagactgataggttgatcagaaactcaccctaaatctgaacgggtgccgctataatttgtgacatctggcaagatttccctttatgtatatattttaacaatccgcttggacacgaacaaagccacacttctaactgcttctggcgaactgnnnnnnnnnnnnnnnnnnncaataaagatattcttagatactgaaagaatagttaatgagtttgcatttgtgcttgagaaatttggctcaagtccatttggctgtagtg

SEQ ID NO: 226021 - DNA, 1002 bp, Homo Sapiens
ttttaattcacgaaccacatctccttgaacagccactctattgtaaaggaccaaggaatctcagatgtagtacaattattattcagagaaggtgttggtctttcttaaaaggagcagaggtctcattttttgtgagcttctactttggtcttttcctttgacccctgatgttggcatttcctttgtgtgcccatcaggaatgtatatcaaaacacacggggcttccttgcaactatatgggctaacaggttcataaggttgatcacatatgaagaatcctcttctctagagttgtataatatctccttttttcaaatccttaaggcagggatcccctagcattagctcttcatgcttactgttcttgttgacatactgcttaaagtcctcgtcttttcctagcactggctttgtgatcaagtgctcataagtgacacagattactggaataggaagagcatgtgtagtctctgcaagccaagtgaccttagtggttttcttgtagtctttgttttccaaattcaactttgcatcaagagatatgatttttccatctgcattattgtgtatttttgtaatgttgaggttgccccaatttataaatgtaaccatctcaccctccgaaaaagtctctgcatcagcaccttcaatgaaaactttgggactataccacacaggcttcaagccaacctcaggattctgattgataaagaaaagcagagtgtctgttgaaacaacaacttattgaacccagtatgcaaatttatacattcattctattctttaaccatacaaaagtcttctgtgttactaaactgttagcagttcattgctgtattaggaagaaaatgctttactctttctccatctatgtattttaacataaacatattcccaattctgttcttagcatttaaacaatacatactcggcctcaatagaaatcaatagtttgaattccagctctgtgacatcagatcagcaacctgaccactaatccaa

SEQ ID NO: 226022 - DNA, 1278 bp, Homo Sapiens; identical to SEQ ID NO: 191820

SEQ ID NO: 226023 - DNA, 943 bp, Homo Sapiens; identical to SEQ ID NO: 191822

SEQ ID NO: 226024 - DNA, 940 bp, Homo Sapiens; identical to SEQ ID NO: 191823

SEQ ID NO: 226025 - DNA, 1149 bp, Homo Sapiens
  misc_feature (203)..(253): n is a, c, g, or t
  misc_feature (964)..(996): n is a, c, g, or t
ttggaacaaggagtcctcagaaactccagaccagtttatgacagctgatgagacaaggaacctgcagaatgtggacatgaagattggggtgtaacacctacaccattatcttggaaagaaacaaccgttggaaacataaccattacagggagctgggacacttaacagatgcaatgtgctactgattgtttcattgcgaatcnnnnnnnnnnnnnnnnnnnnnnnnnnnnnnnnnnnnnnnnnnnnnnnnnnnaaagtcaggtccaatttgtaaaaacagcattgctttctgaaattagggcccaattaataatcagcaagaatttgatcgttccagttcccacttggaggcctttcatccctcgggtgtgctatggatggcttctaacaaaaactacacatatgtattcctgatcgccaacctttcccccaccagctaaggacatttcccagggttaatagggcctggtccctgggaggaaatttgaatgggtccattttgcccttccatagcctaatccctgggcattgctttccactgaggttgggggttggggtgtactagttacacatcttcaacagaccccctctagaaatttttcagatgcttctgggagacacccaaagggtgaagctatttatctgtagtaaactatttatctgtgtttttgaaatattaaaccctggatcagtcctttgatcagtataattttttaaagttactttgtcagaggcacaaaagggtttaaactgattcataataaatatctgtacttcttcgatcttcaccttttgtgctgtgattcttcagtttctaaaccagcactgtctgggtccctacaatgtatcaggaagagctgagaatggtaaggagactcttctaagtcttcatctcagagaccctgagttcccactcagacccactcagccaaatctcatggaagaccaaggagggcagcactgnnnnnnnnnnnnnnnnnnnnnnnnnnnnnnnnngacactgtccaaaggttttccatcctgtcctggaatcagagttggaagctgaggagcttcagcctcttttatggtttaatggccacctgttctctcctgtgaaaactttgcaaagtcacattaagtttgcatgacctgttatccctggggccc

SEQ ID NO: 226026 - DNA, 633 bp, Homo Sapiens; identical to SEQ ID NO: 191826

SEQ ID NO: 226027 - DNA, 1100 bp, Homo Sapiens; identical to SEQ ID NO: 191828
  misc_feature (879)..(929): n is a, c, g, or t

SEQ ID NO: 226028 - DNA, 1170 bp, Homo Sapiens; identical to SEQ ID NO: 191829
  misc_feature (174)..(224): n is a, c, g, or t
  misc_feature (935)..(969): n is a, c, g, or t

SEQ ID NO: 226029 - DNA, 451 bp, Homo Sapiens; identical to SEQ ID NO: 191832

SEQ ID NO: 226030 - DNA, 1019 bp, Homo Sapiens; identical to SEQ ID NO: 191833

SEQ ID NO: 226031 - DNA, 708 bp, Homo Sapiens
ctttgtacaaaaaagttgggtcaagcacaagctccagacccacataggccttgttcactccaaagtgcctttgaaggaatttgatcatagtaactgcaagacagagggctgggctgaccagatcgttctgcagtgggagcgtgtgactgcggaagctgtgaagccacgggagacctcggagcctagagcagcagctcagcgcttctatgggaagcggtctcgagcagaagccccactgaagtgtcccctggcagacacccacatgaactcttccgagaaactccagttctataaagagaaagccccagattgccatgggccagtgttgaaacacgaagctatctcaagccaggagtcaaagaagagcaagaagagaccttttgaggagtcagagacagaacagaataactcttcacaaccttcaaagcagaaatatgtatgtcttgctgtggaagactgggacttgttaaattcctattgattagtagatacaagttgacctttctctggcccccagctctagtgtttgagtaaaggagactgaggatgatttactttttgtttgaatttacctatggcattagcatagtaagcagatatttctacttttgtggtgtgggaggggaatgctatggaagtatgtaataatttctaatgtatattttcaatacatagtaattttttcaaataaacatttttgctgtcctt

SEQ ID NO: 226032 - DNA, 916 bp, Homo Sapiens
  misc_feature (706)..(762): n is a, c, g, or t
ctttgtacaaaaaagttgggtctctcttcaccctgccgtcatgtctaagtcagagtctcctaaagagcccgaacagctgaggaagctcttcattggagggttgagctttgaaacaactgatgagagcctgaggagccattttgagcaatggggaacgctcacggactgtgtggtaatgagagatccaaacaccaagcgctccaggggctttgggtttgtcacatatgccactgtggaggaggtggatgcagctatgaatgcaaggccacacaaggtggatggaagagttgtggaaccaaagagagctgtctccagagaagattctcaaagaccaggtgcccacttaactgtgaaaaagatatttgttggtggcattaaagaagacactgaagaacatcacctaagagattattttgaacagtatggaaaaattgaagtgattgaaatcatgactgaccgaggcagtggcaagaaaaggggctttgcctttgtaacctttgacgaccatgactccgtggataagattgtcattcagaaataccatactgtgaatggccacaactgtgaagttagaaaagccctgtcaaagcaagagatggctagtgcttcatccagccaaagaggtcgaagtggttctggaaactttggtggtggtcgtggaggtggtttcggtgggaatgacaacttcggtcgtggaggaaacttnnnnnnnnnnnnnnnnnnnnnnnnnnnnnnnnnnnnnnnnnnnnnnnnnnnnnnnnnggatggctataatggatttggtaatgatggaagcaattttggaggtggtggaagctacaatgattttgggattacaaccatcagtcttcaaattttggacccatgaagggaggaaattttgggaggcagaagctctggcccctatggcggtgga

SEQ ID NO: 226033 - DNA, 1602 bp, Homo Sapiens; identical to SEQ ID NO: 191839
  misc_feature (1275)..(1285): n is a, c, g, or t

SEQ ID NO: 226034 - DNA, 1000 bp, Homo Sapiens; identical to SEQ ID NO: 191840
  misc_feature (809)..(865): n is a, c, g, or t

SEQ ID NO: 226035 - DNA, 912 bp, Homo Sapiens; identical to SEQ ID NO: 191842
  misc_feature (706)..(762): n is a, c, g, or t

SEQ ID NO: 226036 - DNA, 1313 bp, Homo Sapiens; identical to SEQ ID NO: 191844
  misc_feature (548)..(558): n is a, c, g, or t

SEQ ID NO: 226037 - DNA, 1041 bp, Homo Sapiens; identical to SEQ ID NO: 191845
  misc_feature (866)..(920): n is a, c, g, or t

SEQ ID NO: 226038 - DNA, 1326 bp, Homo Sapiens; identical to SEQ ID NO: 191846
  misc_feature (1271)..(1282): n is a, c, g, or t

SEQ ID NO: 226039 - DNA, 883 bp, Homo Sapiens; identical to SEQ ID NO: 191848
  misc_feature (702)..(752): n is a, c, g, or t

SEQ ID NO: 226040 - DNA, 921 bp, Homo Sapiens; identical to SEQ ID NO: 191849

SEQ ID NO: 226041 - DNA, 1291 bp, Homo Sapiens
ttggcaaacatctacttgatcaagggcagtgccctgcccggatgtctattggttccccatcttcacggaggtggcctgtgatgagctggtggaggagatggagcactttggccagtggtctctgggcaacaacaaggacaaccgcatccagggtggctacgagaacgtgccgactattgacatccacatgaaccagatcggctttgagcgggagtggcacaaattcctgctggagtacattgcgcccatgacggagaagctctaccccggctactacaccagggcccagtttgacctggcctttgtcgtccgctacaagcctgatgagcagccctcactgatgccacaccatgatgcctccaccttcaccatcaacatcgccctgaaccgagtcggggtggattacgagggcgggggctgtcggttcctgcgctacaactgttccatccgagccccaaggaagggctggaccctcatgcaccctggacgactcacgcattaccatgaggggctccccaccaccaggggcacccgctacatcgcagtctccttcgtcgatccctaattggccaggcctgaccctcttggacctttcttctttgccgacaaccactgcccagcagcctctgggacctcggggtcccagggaacccagtccagcctcctggctgttgacttcccattgctcttggagccaccaatcaaagagattcaaagagattcctgcaggccagaggcggaacacacctttatggctggggctctccgtggtgttctggacccagcccctggagacaccattcacttttactgctttgtagtgactcgtgctctccaacctgtcttcctgaaaaaccaaggcccccttcccccacctcttccatggggtgagacttgagcagaacaggggcttccccaagttgcccagaaagactgtctgggtgagaagccatggccagagcttctcccaggcacaggtgttgcaccagggacttctgcttcaagttttggggtaaagacacctggatcagactccaagggctgccctgagtctgggacttctgcctccatggctggtcatgagagcaaaccgtagtcccctggagacagcgactccagagaacctcttgggagacagaagaggcatctgtgcacagctcgatcttctacttgcctgtggggaggggagtgacaggtccacacaccacactgggtcaccctgtcctggatgcctctgaagagagggacagaccgtcagaaactggagagtttctattaaaggtcatttaaa

SEQ ID NO: 226042 - DNA, 1539 bp, Homo Sapiens; identical to SEQ ID NO: 191853

SEQ ID NO: 226043 - DNA, 1345 bp, Homo Sapiens; identical to SEQ ID NO: 191854

SEQ ID NO: 226044 - DNA, 1023 bp, Homo Sapiens; identical to SEQ ID NO: 191855

SEQ ID NO: 226045 - DNA, 449 bp, Homo Sapiens
ggcatcattgggactggaaaggaaataaatgactggatggtcgctgctttttaagtttcaaattgacattccagacaagcggtgcctgagcccgtgcctgtcttcagatcttcacagcacagttcctgggaaggtggagccaccagcctctccctgaataactgggagatgaaacaggaagctctatgacacacttgatcgaatatgacagacactgaaaatcacgactcatccccctccagcacctctacctgttgcccgccgatcacagccggaatgcagctgaaagattccctggggcctggttccaactgcccactgtggactctgaggcctctgcatttgcgggtggtctgcctgtgatattttggtcatgggctggtctggtcggtttcccatttgtctggccagtctctgtgtgtcttaatcccttgtccttcattaaaagc

SEQ ID NO: 226046 - DNA, 561 bp, Homo Sapiens
ttcgttgcacaattgatgagcaatgcttactataatgccaactttgtacaaaaaagttggccaaggtgctggctcggtccttccgaggaagctaaggctgcgttggggtgaggccctcacttcatccggcgactagcaccgcgtccggcagcgccagccctacactcgcccgcgccatggcctctgtctccgagctcgcctgcatctactcggccctcattctgcacgacgatgaggtgacagtcacggaggataagatcaatgccctcattaaagcagccggtgtaaatgttgagcctttttggcctggcttgtttgcaaaggccctggccaacgtcaacattgggagcctcatctgcaatgtaggggccggtggacctgctccagcagctggtgctgcaccagcaggaggtcctgccccctccactgctgctgctccagctgaggagaagaaagtggaagcaaagaaagaagaatccgaggagtctgatgatgacatgggctttggtctttttgactaaacctcttttataacatgttcaataaaaagctgaactttaa

SEQ ID NO: 226047 - DNA, 1203 bp, Homo Sapiens
ttggctcccagttgacgctctgggccgccacctccgcggaccctgagcgcaagagccaagccgccagcgctgctatgtgggccacgctgccgctgctctgcgccggggcctggctcctgggagtccccgtctgcggtgccgccgaactgtccgtgaactccttagagaagtttcacttcaagtcatggatgtctaagcaccgtaagacctacagtacggaggagtaccaccacaggctgcagacgtttgccagcaactggaggaagataaacgcccacaacaatgggaaccacacatttaaaatggcactgaaccaattttcagacatgagctttgctgaaataaaacacaagtatctctggtcagagcctcagaattgctcagccaccaaaagtaactaccttcgaggtactggtccctacccaccttccgtggactggcggaaaaaaggaaattttgtctcacctgtgaaaaatcagggtgcctgcggcagttgctggactttctccaccactggggccctggagtctgcgatcgccatcgcaaccggaaagatgctgtccttggcggaacagcagctggtggactgcgcccaggacttcaataatcacggctgccaagggggtctccccagccaggctttcgagtatatcctgtacaacaaggggatcatgggtgaagacacctacccctaccagggcaaggatggttattgcaagttccaacctggaaaggccatcggctttgtcaaggatgtagccaacatcacaatctatgacgaggaagcgatggtggaggctgtggccctctacaaccctgtgagctttgcctttgaggtgactcaggacttcatgatgtatagaacgggcatctactccagtacttcctgccataaaactccagataaagtaaaccatgcagtactggctgttgggtatggaaaaaaaatgggatcccttactggatcgtgaaaaactcttggggtccccagtggggaatgaacgggtacttcctcatcgagcgcggaaagaacatgtgtggcctggctgcctgcgcctcctaccccatccctctggtgtgagccgtggcagccgcagcgcagactggcggagaatgagaggaatgggcagcctggcctgggtggaaatcctgccctggaggaagttgtggggagatccactgggaccccaacattctgccctc

SEQ ID NO: 226048 - DNA, 996 bp, Homo Sapiens
ttggcccacttccggagacctcacacaagatggcggcacccgaggaacacgattctccgaccgaagcgtcccagccgattgtggaagaggaggaaactaaaacatttaaagacctgggtgtgacagatgtgttgtgtgaagcttgtgaccagttgggatggacaaaacccaccaagatccagattgaagctattcctttggccttacaaggtcgtgatatcattgggcttgcagaaactggctctggaaagacaggcgcctttgctttgcccattctaaacgcactgctggagaccccgcagcgtttgtttgccctagttcttaccccgactcgggagctggcctttcagatctcagagcagtttgaagccctggggtcctctattggagtgcagagtgctgtgattgtaggtggaattgattcaatgtctcaatctttggcccttgcaaaaaaaccacatataataatagcaactcctggtcgactgattgaccacttggaaaatacgaaaggtttcaacttgagagctctcaaatacttggtcatggatgaagccgaccgaatactgaatatggattttgagacagaggttgacaagatcctcaaagtgattcctcgagatcggaaaacattcctcttctctgccaccatgaccaagaaggttcaaaaacttcagcgagcagctctgaagaatcctgtgaaatgtgccgtttcctctaaataccagacagttgaaaaattacagcaatattatatttttattccctctaaattcaaggatacctacctggtttatattctaaatgaattggctggaaactcctttatgatattctgcagcacctgtaataatacccagagaacagctttgctactgcgaaatcttggcttcactgccatccccctccatggacaaatgagtcagagtaagcgcctaggatcccttaataagtttaaggccaaggcccgttccattcttctagcaactgacgttg

SEQ ID NO: 226049 - DNA, 939 bp, Homo Sapiens; identical to SEQ ID NO: 191860

SEQ ID NO: 226050 - DNA, 977 bp, Homo Sapiens; identical to SEQ ID NO: 191861
  misc_feature (593)..(632): n is a, c, g, or t
  misc_feature (729)..(739): n is a, c, g, or t

SEQ ID NO: 226051 - DNA, 778 bp, Homo Sapiens
ttggcgacccggagctccgacaaggcattaaagactattccaactggcccaccatcccgcaagtgtacctcaatggcgagtttgtagggggctgtgacattcttctgcagatgcaccagaatggggacttggtggaagaactgaaaaagctggggatccactccgcccttttagatgaaaagaaagaccaagactccaagtgagggcggccaagtcctcgctgagcagagagggagccgttcatgtcagagactcactgccagaaaagccttacccattttggttttcactattgagaccgcaactgcttgcactgatcattttggttcgtgagcagttggtgattttagttggtctggtgttcgggctaagaatattttattgtggacttaattacaaccactgcactgtaatgattcaatgctgtattatgatattgctgtaaacaaaattcattcttatattgtcacttattctttgcctgattcagaagttaaataggagctttggaatcattattcatgacccctctgcaaatgtgtcagtctccaaagagagtatctccccccaaattttgtgtagcttcttttgttatggaaaatggtggacaaaaaaagaaactgtgataactggggcgttgttttttaaaataaactccagcacagggatgctgtgcatgcctgagttgattccgaagtgcatatgtctgtaaggatttggagtgcctgcagtgttttatgtgtgggaagtaagggtgagtctcatattcttctattaa

SEQ ID NO: 226052 - DNA, 919 bp, Homo Sapiens
ttggctatagagccgggtgagagagcgagcgcccgtcggcgggtgtcgagggcgggttgcctcgcgctgacccttcccgccctccttctcgtcacacaccaggtccccgcggaagccgcggtgtcggcgccatggcggagctgacggctcttgagagtctcatcgagatgggcttccccaggggacgcgcggagaaggctctggccctcacagggaaccagggcatcgaggctgcgatggactggctgatggagcacgaagacgaccccgatgtggacgagcctttagagactccccttggacatatcctgggacgggagcccacttcctcagagcaaggcggccttgaaggatctggttctgctgccggagaaggcaaacccgctttgagtgaagaggaaagacaggaacaaactaagaggatgttggagctggtggcccagaagcagcgggagcgtgaagaaagagaggaacgggaggcattggaacgggaacggcagcgcaggagacaagggcaagagttgtcagcagcacgacagcggctacaggaagatgagatgcgccgggctgctgaggagaggcggagggaaaaggccgaggagttagcagccagacaaagagttagagaaaagatcgagagggacaaagcagagagagccaagaagtatggtggcagtgtgggctctcagccacccccagtggcaccagagccaggtcctgttccctcttctcccagccaggagcctcccaccaagcgggagtatgaccagtgtcgcatacaggtcggctgccagatgggacctcactgacccagacgttccgggcccgggaacagctggcagctgtgaggctctatgtggagctccaccgtggggaggaactaggtgggggccaggaccctgtgcaatttgctcagtgg

SEQ ID NO: 226053 - DNA, 912 bp, Homo Sapiens
ttggagcagtgtcactgcgtgggttggtttgtgtagagaggcgtgagcgagcccgttgtccggagtgcacctgctgcctgttctgtccctcccgggagcccccgccgctgtcgccgtcgagtcgccatggaagtgcagaaagaggcacagcgcatcatgaccctgtcggtgtggaagatgtatcactcccgcatgcagcgcggtggcctgcggctgcaccggagtctgcagctgtcgctggtcatgcgcagcgcccgggagctctacctctcggccaaggtggaggccctcgagcccgaggtgtcgttgccggccgccctcccctctgaccctcgcctgcacccgccccgagaagccgagtccacggccgagacagcgacccccgacggtgagcacccgtttccggagccaatggacacgcaggaggcgccgacagccgaggagacctccgcctgctgtgccccgcgccccgccaaagtcagccgcaaacgacgcagcagcagcctgagcgacggcggggacgctggactggtcccgagcaagaaagcccgtctggaagaaaaggaagaagaggagggagcgtcatccgaagtcgccgatcgcctgcagccccctccggcgcaagcggagggcgcctttcccaacctggcccgcgtcctgcagaggcgcttctccggcctcctgaactgcagccccgcggcccctccgacggcgccgcccgcgtgcgaggcaaagcccgcttgccgcccggcggacagcatgctcaacgtgctcgtgcgggccgtggtggccttctgaggaccccgagcggcgctgccggagcccaaagcgcgcgtcgaaccgtcggcccgagggcgcagacctgaggcgaggccacccccctccatcctgggggaagcgcccgcgaaaacc

SEQ ID NO: 226054 - DNA, 423 bp, Homo Sapiens; identical to SEQ ID NO: 191864

SEQ ID NO: 226055 - DNA, 1243 bp, Homo Sapiens; identical to SEQ ID NO: 191867

SEQ ID NO: 226056 - DNA, 239 bp, Homo Sapiens; identical to SEQ ID NO: 191874
  misc_feature (165)..(174): n is a, c, g, or t

SEQ ID NO: 226057 - DNA, 340 bp, Homo Sapiens
gcctacccgccgcagactgatcattctatttccccctctattgatccccacctccaaatatctcatcaccatccgactaatcatcgcccaacattgactaagcagacggacgtcaaaactaatgataaccatacacaactctaaaggacgaacctgatctcttatactagtatccttaatcatttttattgccacaactaacctcctcggactcctgcctcactcatttacaccaaccacccaactatctataaacctagccatggccatccccttatgagcgggcgcattgattataggctttcgctctaagattaaaaatgccctagcccgtttctta

SEQ ID NO: 226058 - DNA, 515 bp, Homo Sapiens; identical to SEQ ID NO: 191889
  misc_feature (312)..(334): n is a, c, g, or t

SEQ ID NO: 226059 - DNA, 765 bp, Homo Sapiens; identical to SEQ ID NO: 191890
  misc_feature (315)..(363): n is a, c, g, or t
  misc_feature (545)..(581): n is a, c, g, or t

SEQ ID NO: 226060 - DNA, 1406 bp, Homo Sapiens
ttgggcagtggcggcagcggcggcgacggcagtaacagcggcagctacagcggggacgcgagcggggcggtgacggtgtgggaggtggtctcactcttgggaaaactgctgggcaccgtcgtcgcgctgaaggtggttctgtacctgctccgagtgtgcttagcgatggcctggaaatccggcggcgccagccactcggagctaatccacaatctccgcaaaaatggaatcatcaagacagataaagtatttgaagtgatgctggctacagaccgctcccactatgcaaaatgtaacccatacatggattctccacaatcaataggtttccaagcaacaatcagtgctccacacatgcatgcatatgcgctagaacttctatttgatcagttgcatgaaggagctaaagctcttgatgtaggatctggaagtggaatccttactgcatgttttgcacgtatggttggatgtactggaaaagtcataggaattgatcacattaaagagctagtagatgactcagtaaataatgtcaggaaggacgatccaacacttctgtcttcagggagagtacagcttgttgtgggggatggaagaatgggatatgctgaagaagccccttatgatgccattcatgtgggagctgcagcccctgttgtaccccaggcgctaatagatcagttaaagcccggaggaagattgatattgcctgttggtcctgcaggcggaaaccaaatgttggagcagtatgacaagctacaagatggcagcatcaaaatgaagcctctgatgggggtgatatacgtgcctttaacagataaagaaaagcagtggtccagggatgaattgtaaaagcaacatcagcttgaccagtataaaattacagtggattgctcatctcagtcctcaaagctttttgaaaaccaacaccatcacagcttgttttggactttgttacactgttattttcagcatgaaaatgtgtgtttttttagggtttctgattcttcaaagaggcacagagccaaattggtagaggaaggatgcaaagtataaatttgtgtaatattactttaacatgcccatattttacttggaaatattaaaagaaagggttctgtaaaatggaaaacttagtttgtgaattgattttgaggagtggtttttcttttcttggacacttaattctgttctgatattaatttatcagattgcttttgtgcattggataacaccaccattcacaagttaagattcttggtatttggatatctgttagatgctactaagaaaatagagatgagctttctttttaaagcttttgatgtggtgtcatagaatagcatgttgtagatacaatcagctgctttgttaccctaaaactaggcatttgtaaatattaaacc

SEQ ID NO: 226061 - DNA, 702 bp, Homo Sapiens; identical to SEQ ID NO: 191891

SEQ ID NO: 226062 - DNA, 421 bp, Homo Sapiens; identical to SEQ ID NO: 191896

SEQ ID NO: 226063 - DNA, 956 bp, Homo Sapiens
ctttgtacaaaaaagttgggaagaaatttgcccattcaactgaaagaaattgacaaagaagaacacctgtatattctcatcagtacccccgagtccctggctggcatactgggaacgaccaaagacacacccaagctcggtctcctcttggtgattctgggtgtcatcttcatgaatggcaaccgtgccagtgaggctgtcctctgggaggcactacgcaagatgggactgcgtcctggggtgagacatcccctccttggagatctaaggaaacttctcacctatgagtttgtaaagcagaaatacctggactacagacgagtgcccaacagcaaccccccggagtatgagttcctctggggcctccgttcctaccatgagactagcaagatgaaagtgctgagattcattgcagaggttcagaaaagagaccctcgtgactggactgcacagttcatggaggctgcagatgaggccttggatgctctggatgctgctgcagctgaggccgaagcccgggctgaagcaagaacccgcatgggaattggagatgaggctgtgtctgggccctggagctgggatgacattgagtttgagctgctgacctgggatgaggaaggagattttggagatccctggtccagaattccatttaccttctgggccagataccaccagaatgcccgctccagattccctcagacctttgccggtcccattattggtcctggtggtacagccagtgccaacttcgctgccaactttggtgccattggtttcttctgggttgagtgagatgttggatattgctatcaatcgcagtagtctttcccctgtgtgaggctgaagcctcagattccttctaaacacagctatctaaagagccacatccttgttgactgaaagtggcatgcaaaataaatttatttgctgtcccttggccactgctttttttc

SEQ ID NO: 226064 - DNA, 1128 bp, Homo Sapiens; identical to SEQ ID NO: 191900

SEQ ID NO: 226065 - DNA, 780 bp, Homo Sapiens; identical to SEQ ID NO: 191904

SEQ ID NO: 226066 - DNA, 889 bp, Homo Sapiens; identical to SEQ ID NO: 191905

SEQ ID NO: 226067 - DNA, 628 bp, Homo Sapiens
ttgtacaaaaaagttggcaggagtggatgcgatctgtctctcctggctccactcttgccgccttccagctctgagtcttgggaatgttgttacccttggaagataaagctgggtcttcaggaactcagtgtctgggaggaaagcatggcccagcattcagcatgtgttcctttctgcagtggttcttatcaccacctccctcccagccccagcgcctcagccccagccccagctccagccctgaggacagctctgatgggagagctgggccccctgagcccactgggtcttcagggtgcactggaagctggtgttcgctgtcccctgtgcacttctcgcactggggcatggagtgcccatgcatactctgctgccggtcccctcacctgcacttgaggggtctgggcagtccctcctctccccagtgtccacagtcactgagccagacggtcggttggaacatgagactcgaggctgagcgtggatctgaacaccacagcccctgtacttgggttgcctcttgtccctgaacttcgttgtaccagtgcatggagagaaaattttgtcctcttgtcttagagttgtgtgtaaatcaaggaagccatcattaaattgttttatttctctc

SEQ ID NO: 226068 - DNA, 1331 bp, Homo Sapiens; identical to SEQ ID NO: 191907

SEQ ID NO: 226069 - DNA, 813 bp, Homo Sapiens; identical to SEQ ID NO: 191908

SEQ ID NO: 226070 - DNA, 1601 bp, Homo Sapiens
ctataaaaagacaactttgtacaaaaaagttggctcttggtggtccaaggttctggagaagtcagaccagaccaacatcctgagtgccctacttgttttgctccaagacagcctgctagcaacagccagttctcccaaattctcagagcttgttatgaagtgtctctggagaatggttcgactgttgcctgataccatcaatagcattaacctagacagaattcttctggatatccacattttcatgaaggtcttccccaaagagaaactgaagcaatgcaaaagtgaatttcccataaggaccctaaagaccctgctacacaccttatgcaaattaaaagggcccaagatcctggaccacctaacgatgatcgacaacaaaaacgagtctgagctggaggcccatctctgccggatgatgaagcacagtatggaccagactgggagcaagtctgataaggaaacagaaaagggagcatctcgaatagatgaaaaatcatcaaaggccaaagtgaatgatttcttagctgagatttttaagaagattggctctaaagaaaacactaaagagggactagcagagttatatgaatataagaagaaatactcagatgctgacattgaaccatttctgaaaaattcctcacagttcttccagagctatgtcgaaagaggccttcgggtgattgagatggagagggagggcaaaggtcgtatttccacttcaacaggcatctcccctcagatggaagtcacatgtgtgcccacgcccacaagcacagtgtcctccataggtaacacaaatggggaagaagtggggccatctgtctacttggaaaggctaaagatcctccgacagcgatgtggtctggacaacacaaagcaagatgaccgacctcctttgacctctttgctctccaaaccagcagttcctactgtcgcctcttccacagacatgctccacagcaaactctctcagctccgggagtcacgggagcagcaccagcattcagacctggattctaaccagactcactcttcaggaactgtgacctcctcctcctccacagctaacatagacgacttgaaaaaaagactggagagaataaagagcagtcgcaaatgaagctgccccactcccccggcaccctgcagctttagtttactaaactagaagtcctcatagtttaaaatggcctcagcaggcctagtgtatacaaactggttgtatgtatcatgccgtggagctagggggaggagtcattgtggcacaagtatttgtacatactctgcttctctctgtcagcgtcctgctgctctagaagactgtccgtggatgagtttagtgtacagacttgtaaacagctgccccctctctgctcagtctagttcccagatccttttcttttaattgctcatttgtaaaattgtcctaatctttcctagctttttaatagttaatattagaaactctttaatagttttcctttcagtttgtgagctcttctctgtcgccctgaagggtcactgtattctgtatgaatgcatggcatgatacaactaatttaagagtcttttataaataaagtttgcattaacta

SEQ ID NO: 226071 - DNA, 1163 bp, Homo Sapiens
ctttgtacaaaaaagttggccatggcctatccatccttgggaaccaggttcctttagagttggtcttattgccttgaagctgggcatgatgcctttatggaccaaggatggtcaaaagcatgtggtcacattacttcaggtacaagactgtcatgtcttaaaatatacgtcaaaggaaaactgtaatggaaaaatggcaaccctgtctgtaggaggaaaaactgtatcacgttttcgtaaagctacatccatattggaattttaccgggaacttggattgccgccgaaacagacagttaaaatctttaatataacagataatgctgcaattaaaccaggcactcctctttatgctgctcactttcgtccaggacagtatgtggatgtcacagccaaaactattggtaaaggttttcaaggtgtcatgaaaagatggggatttaaaggccagcctgctacgcatggtcaaacgaaaacccacaggagacctggagctgttgcaactggtgatattggcagagtctggcctggaactaaaatgcctggaaaaatgggaaacatatacaggacagaatatggactgaaagtgtggagaataaacacaaagcacaacataatctatgtaaatggctctgtacctggacataaaaattgcttagtaaaggtcaaagattctaaactgcctgcatataaggatctcggtaaaaatctaccattccctacatattttcctgatggagatgaagaggaactgccagaagatttgtatgatgaaaacgtgtgtcagcccggtgcgccttctattacatttgcctaacatctttggacgtggcagaaccttacatattctgtgagcttcgatgagccagagtgatatcataaccaccagaaatcatactctcctttcttagtcacaacaaaatcacacatgtcatctttgtcaagggcataaatatatcattcatacccccattaaattttgttagaaaaattaccacattaaatatatgagttaagtagattggatttgctgaaattggtgttgggcatattagcaaaatattcttaatttgtggactcgattcttttttactacatatttcccaagttatcttaagatgtctgtaaatttaacttttattaaagttttgtcaatctttgtg

SEQ ID NO: 226072 - DNA, 1038 bp, Homo Sapiens; identical to SEQ ID NO: 191910

SEQ ID NO: 226073 - DNA, 948 bp, Homo Sapiens; identical to SEQ ID NO: 191911

SEQ ID NO: 226074 - DNA, 1340 bp, Homo Sapiens
ctttgtacaaaaaagttggggaaataatacctatgtatcttcttttcatgtaatttggtcacagaataaggtattcaagttaagtctaatccaagtcttagagatctttaagtatcctaaaatagcagcctaagtagtcatcatgtaaagaagttgactttcaggaatgtcagcattgacctctccttgccactgttactcagctaaacataacttgccattcttaaaaataaaaaagctcccacccagaaactctagtgatactcagttttgacctcttactgcttccatgtgggacttcttttcagcttttaaccattggaattttctacctgctatgttcctctctggaaaatatcaatttggaaatgctgcctttcaaatcaatgccatgatcatccatattgttgagtttgttgttggtgttccagaagtgtccccattttacaactttatgcacacactgtggcaaatcattaacatgagcattcaacagtactgggatgggtggggtgggggtagggggctcaccaacagaactggccagttgacattgcctgaaaaggcaccacctttaagggccagttgtggggttggtaagcacagttatgaaaatttctatctagcctccgttttgaatggttttaagaaattttgtatatggaggatggaaatgcttatatatttattgaaaatccttttatttgaaattaaaattatttggtatataattgtttgatatttggggagggttttggaggggagataatgtcactgataaattaaaagcctgttgattttgcagaaaggtactgttagtgactgataaggatgcctttgttttgtacatgaaccaaatctttgttttacatttcttttatccaaaatatttaggcatctgacattttcaaccagaatttcaattatatactgtgatttttatttgttgcaatacattacaatttcagaggtactttggggctcaaaagctaggatttctaagtcagtatgtgcatttcacacgataaagctgttaatggtgagcaaagtattatatactaactagatttttccacatctgtatagtatattatatgtattttgtggtattgagagtatagaaagtttagagtgtcaaacatgcgtttaatgtgtatttttaaacaaatttatggcaattaaaatatttggagacaagggtatcacatttcaatttgtaaagatctttttaactctactgtgtcattaagatgctttgtacaatgccaaaccatagttggagaaactaagtttaataaatatcaaatagattttctgtattaaagttactgaaacactgt

SEQ ID NO: 226075 - DNA, 1034 bp, Homo Sapiens
ttgggacattgtgccaccctcaatccgacaatcgaagaaatcgatcattcgcacattttccccattgacttttcccatctctgttaacccacgagaatctaatgactggcatctgagaacccagagcctgggaccttagattgctgtaagctttctctggtgctaatatcagcaaaaagggtctgttgccgggtacgttcaagaggaaggtgcctcgtgaacacatctgctggtgggaaggcctaaagaactggaaagcccactctcttggaaccaccacacctgtttaaagaacctaagcaccatttaaagccactggaaatttgttgtctagtggttgtgggtgaataaaggagggcagaatggatgatttcatctccattagcctgctgtctctggctatgttggtgggatgttacgtggccggaatcattcccttggctgttaatttctcagaggaacgactgaagctggtgactgttttgggtgctggccttctctgtggaactgctctggcagtcatcgtgcctgaaggagtacatgccctttatgaagatattcttgagggaaaacaccaccaagcaagtgaaacacataatgtgattgcatcagacaaagcagcagaaaaatcagttgtccatgaacatgagcacagccacgaccacacacagctgcatgcctatattggtgtttccctcgttctgggcttcgttttcatgttgctggtggaccagattggtaactcccatgtgcattctactgacgatccagaagcagcaaggtctagcaattccaaaatcaccaccacgctgggtctggttgtccatgctgcagctgatggtgttgctttgggagcagcagcatctacttcacagaccagtgtccagttaattgtgtttgtggcaatcatgctacataagcaccagctgcttttggactggtttccttcttgatgcatgctggcttagagcggaatcgaatcagaaagcacttgctggtctttgcattggcagcaccagttatgtccatggtga

SEQ ID NO: 226076 - DNA, 1317 bp, Homo Sapiens
tacaaaaaagttggggaggctttaaagcgcctaccctgcctgcaggtgagcagtggtgtgtgagagccaggcgtccctctgcctgcccactcagtggcaacacccgggagctgttttgtcctttgtggagcctcagcagttccctctttcagaactcactgccaagagccctgaacaggagccaccatgcagtgcttcagcttcattaagaccatgatgatcctcttcaatttgctcatctttctgtgtggtgcagccctgttggcagtgggcatctgggtgtcaatcgatggggcatcctttctgaagatcttcgggccactgtcgtccagtgccatgcagtttgtcaacgtgggctacttcctcatcgcagccggcgttgtggtctttgctcttggtttcctgggctgctatggtgctaagactgagagcaagtgtgccctcgtgacgttcttcttcatcctcctcctcatcttcattgctgaggttgcagctgctgtggtcgccttggtgtacaccacaatggctgagcacttcctgacgttgctggtagtgcctgccatcaagaaagattatggttcccaggaagacttcactcaagtgtggaacaccaccatgaaagggctcaagtgctgtggcttcaccaactatacggattttgaggactcaccctacttcaaagagaacagtgcctttcccccattctgttgcaatgacaacgtcaccaacacagccaatgaaacctgcaccaagcaaaaggctcacgaccaaaaagtagagggttgcttcaatcagcttttgtatgacatccgaactaatgcagtcaccgtgggtggtgtggcagctggaattgggggcctcgagctggctgccatgattgtgtccatgtatctgtactgcaatctacaataagtccacttctgcctctgccactactgctgccacatgggaactgtgaagaggcaccctggcaagcagcagtgattgggggaggggacaggatctaacaatgtcacttgggccagaatggacctgccctttctgctccagacttggggctagatagggaccactccttttaggcgatgcctgactttccttccattggtgggtggatgggtggggggcattccagagcctctaaggtacccagttctgttgcccattcccccagtctattaaacccttgatatgccccctaggcctagtggtgatcccagtgctctactgggggatgagagaaaggcattttatagcctgggcataagtgaaatcagcagagcctctgggtggatgtgtagaaggtacttcaaaatg

SEQ ID NO: 226077 - DNA, 1283 bp, Homo Sapiens; identical to SEQ ID NO: 191925

SEQ ID NO: 226078 - DNA, 1143 bp, Homo Sapiens; identical to SEQ ID NO: 191929

SEQ ID NO: 226079 - DNA, 830 bp, Homo Sapiens
tgcaaacatgcttagaaaatgtatagacacaatttgtaggctgagaaaatctctgtgtagttgtgacttcccatacttccgcaaaagtagtaaggacagcgacttttgaacacattaacctaccactgttttgtttagagcgaacacagtgagaatggattcctaaccggcctgtttctataagtgatcgtcgcagttcgctgctttagtctttaagaacaagtggagccttcacttgagccgccacctccttgccattcagggcttcaacaattgcaagcgcaaactcgaagctggtcccaggcccccggcttgtaagaatcaggccgtctttttccacacgattctcagagtaggtgtaatgacctccattcatcattttgtctttagcaagagggtgtgttgtaactttacttccaaaacctatttcatgagccaacagagcagtaggacctgcacagatggcggctatcaggcccttccggttttcctgctccttcagtatctccttcacagcagcagactcagataaattctgtgcgcccagattacctcctggtagaaccaccacatcatatggtccctctttttttgcatcttcaaggctggcatcaggacaaatgaccacatcacggctacactgtactgggtcttttccagccaggcctgcaacggtgaccttaatcccagctcgcctcatgacatctacagggatgaccgtctccatttcctctgctcctttagccaggatgaccagagctcttttggaagccatttttatgttatatgtttacaagccccacaccaggatgaaaatgaacgcacgccaa

SEQ ID NO: 226080 - DNA, 909 bp, Homo Sapiens; identical to SEQ ID NO: 191930

SEQ ID NO: 226081 - DNA, 907 bp, Homo Sapiens; identical to SEQ ID NO: 191931

SEQ ID NO: 226082 - DNA, 835 bp, Homo Sapiens; identical to SEQ ID NO: 191932

SEQ ID NO: 226083 - DNA, 898 bp, Homo Sapiens; identical to SEQ ID NO: 191934

SEQ ID NO: 226084 - DNA, 740 bp, Homo Sapiens; identical to SEQ ID NO: 191935

SEQ ID NO: 226085 - DNA, 893 bp, Homo Sapiens; identical to SEQ ID NO: 191936

SEQ ID NO: 226086 - DNA, 975 bp, Homo Sapiens; identical to SEQ ID NO: 191949
  misc_feature (880)..(892): n is a, c, g, or t

SEQ ID NO: 226087 - DNA, 887 bp, Homo Sapiens; identical to SEQ ID NO: 191950

SEQ ID NO: 226088 - DNA, 896 bp, Homo Sapiens
tttgtacaaaaaagttggggaggacctctacctgaagccaatccagagaacaatcttgatgatgggccgctacgtggagcccatcgaggatgtgccttgtgggaacattgtgggcctcgtgggcgtggaccagttcctggtgaagacgggcaccatcaccaccttcgagcacgcgcacaacatgcgggtgatgaagttcagcgtcagccctgttgtcagagtggccgtggaggccaagaacccggctgacctgcccaagctggtggaggggctgaagcggctggccaagtccgaccccatggtgcagtgcatcatcgaggagtcgggagagcacatcatcgcgggcgccggcgagctgcacctggagatctgcctgaaggacctggaggaggaccacgcctgcatccccatcaagaaatctgacccggtcgtctcgtaccgcgagacggtcagtgaagagtcgaacgtgctctgcctctccaagtcccccaacaagcacaaccggctgtacatgaaggcgcggcccttccccgacggcctggccgaggacatcgataaaggcgaggtgtccgcccgtcaggagctcaagcagcgggcgcgctacctggccgagaagtacgagtgggacgtggctgaggcccgcaagatctggtgctttgggcccgacggcaccggccccaacatcctcaccgacatcaccaagggtgtgcagtacctcaacgagatcaaggacagtgtggtggccggcttccagtgggccaccaaggagggcgcactgtgtgaggagaacatgcgggggtgtgcgcttcgacgtccacgacgtcaccctgcacgccgacgccatccaccgcggagggggccagatcatccccacagcacggcgctgcctctacgcc

SEQ ID NO: 226089 - DNA, 970 bp, Homo Sapiens; identical to SEQ ID NO: 191952

SEQ ID NO: 226090 - DNA, 991 bp, Homo Sapiens; identical to SEQ ID NO: 191959

SEQ ID NO: 226091 - DNA, 1048 bp, Homo Sapiens; identical to SEQ ID NO: 191960
  misc_feature (302)..(452): n is a, c, g, or t
  misc_feature (850)..(863): n is a, c, g, or t

SEQ ID NO: 226092 - DNA, 1419 bp, Homo Sapiens
ttggcgagtgcactgaagatggcggctgctgtaggacggttgctccgagcgtcggttgcccgacatgtgagtgccattccttggggcatttctgccactgcagccctcaggcctgctgcatgtggaagaacgagcttgacaaatttattgtgttctggttccagtcaagcaaaattattcagcaccagttcctcatgccatgcacctgctgtcacccagcatgcaccctattttaagggtacagccgttgtcaatggagagttcaaagacctaagccttgatgactttaaggggaaatatttggtgcttttcttctatcctttggatttcacctttgtgtgtcctacagaaattgttgcttttagtgacaaagctaacgaatttcacgatgtgaactgtgaagttgtcgcagtctcagtggattcccactttagccatcttgcctggataaatacaccaagaaagaatggtggtttgggccacatgaacatcgcactcttgtcagacttaactaagcagatttcccgagactacggtgtgctgttagaaggttctggtcttgcactaagaggtctcttcataattgaccccaatggagtcatcaagcatttgagcgtcaacgatctcccagtgggccgaagcgtggaagaaaccctccgcttggtgaaggcgttccagtatgtagaaacacatggagaagtctgcccagcgaactggacaccggattctcctacgatcaagccaagtccagctgcttccaaagagtactttcagaaggtaaatcagtagatcacccatgtgtatctgcaccttctcaactgagagaagaaccacagttgaaacctgcttttatcattttcaagatggttatttgtagaaggcaaggaaccaattatgcttgtattcataagtattactctaaatgttttgtttttgtaattctggctaagaccttttaaacatggttagttgctagtacaaggaatcctttattggtaacatcttggtggctggctagctagtttctacagaacataatttgcctctatagaaggctattcttagatcatgtctcaatggaaacactcttctttcttagccttacttgaatcttgcctataataaagtagagcaacacacattgaaagcttctgatcaacggtcctgaaattttcatcttgaatgtctttgtattaaactgaattttcttttaagctaacaaagatcataattttccatgattagccgtgtaactcctgcaatgaatgtttatgtgattgaagcaaatgtgaatcgtattattttaaaaagtggcagagtgacttaactgatcatgcatgatccctcatccctgaaattgagtttatgtagtcattttacttattttattcattagctaactttgtctatgtataattc

SEQ ID NO: 226093 - DNA, 965 bp, Homo Sapiens; identical to SEQ ID NO: 191962

SEQ ID NO: 226094 - DNA, 677 bp, Homo Sapiens; identical to SEQ ID NO: 191963

SEQ ID NO: 226095 - DNA, 1279 bp, Homo Sapiens
actttgtacaaaaaagttgggaaggtggcaagatggtgttggaaagcactatggtgtgtgtggacaacagtgagtatatgcggaatggagacttcttacccaccaggctgcaggcccagcaggatgctgtcaacatagtttgtcattcaaagacccgcagcaaccctgagaacaacgtgggccttatcacactggctaatgactgtgaagtgctgaccacactcaccccagacactggccgtatcctgtccaagctacatactgtccaacccaagggcaagatcaccttctgcacgggcatccgcgtggcccatctggctctgaagcaccgacaaggcaagaatcacaagatgcgcatcattgcctttgtgggaagcccagtggaggacaatgagaaggatctggtgaaactggctaaacgcctcaagaaggagaaagtaaatgttgacattatcaattttggggaagaggaggtgaacacagaaaagctgacagcctttgtaaacacgttgaatggcaaagatggaaccggttctcatctggtgacagtgcctcctgggcccagtttggctgatgctctcatcagttctccgattttggctggtgaaggtggtgccatgctgggtcttggtgccagtgactttgaatttggagtagatcccagtgctgatcctgagctggccttggcccttcgtgtatctatggaagagcagcggcagcggcaggaggaggaggcccggcgggcagctgcagcttctgctgctgaggccgggattgctacgactgggactgaagactcagacgatgccctgctgaagatgaccatcagccagcaagagtttggccgcactgggcttcctgacctaagcagtatgactgaggaagagcagattgcttatgccatgcagatgtccctgcagggagcagagtttggccaggcggaatcagcagacattgatgccagctcagctatggacacatccgagccagccaaggaggaggatgattacgacgtgatgcaggaccccgagttccttcagagtgtcctagagaacctcccaggtgtggatcccaacaatgaagccattcgaaatgctatgggctccctggcctcccaggccaccaaggacggcaagaaggacaagaaggaggaagacaagaagtgagactggagggaaagggtagctgagtctgcttaggggactgcatgggaagcacggaatatagggttagatgtgtgttatctgtaaccattacagcctaaataaagcttggcaac

SEQ ID NO: 226096 - DNA, 1170 bp, Homo Sapiens
  misc_feature (242)..(275): n is a, c, g, or t
tttgtacaaaaaagttggccaacatggcttgcaagaaggccctgcggagtggctggtgccgctgtccacggagatgcctcggcagtggaatccaatttctttccagccacaacctaccccatgggtcgacctatcagatgcgccggccgggcggagagctgccactgtccaaatcatattcttctggaaacagaaaaggctttctgtccggcttgctagataatgtcaaacaagaattagcnnnnnnnnnnnnnnnnnnnnnnnnnnnnnnnnnnttccgtgacgaggccagaaggctagaagaatcagacgtgctccaggaggccagaaggaaatacaaaaccatcgagtcagaaaccgtgcggacgagcgaggtgctacggaagaagcttggggagctgacgggcaccgtgaaggagagccttcacgaagtcagtaaaagtgatctcggccggaaaatcaaggagggcgtggaggaagcagccaagacggccaagcagtcggccgagtcggtatccaaaggcggggagaagctgggcaggacagcggccttcagagccctctcccagggggtggagtccgtgaagaaggaaattgacgacagcgtcctgggacagaccgggccctaccggaggccccagcgactccggaagagaacggagtttgcgggagataagttcaaggaggagaaagtgtttgagccaaacgaggaggccctgggggtcgtgctgcacaaggactccaagtggtaccagcagtggaaggacttcaaggagaacaacgtggtgtttaaccggttcttcgagatgaagatgaagtatgacgaaagcgacaacgcgttcatccgggcatcccgggcccttacggacaaggtcaccgacttgctggggggcctgttctccaagacagagatgtcggaggtgctcacggagatcctccgggtggacccagcctttgacaaggaccggtttctgaaacagtgcgagaacgacatcatccccaatgtcctggaggccatgatttctggagagcttgacattctcaaagactggtgctatgaagctacttacagccagctggcccaccctatccagcaaggccaagggcactgggtctccagtttcattctcgcatcctagacatttgacaacgtcgacctggcccatgggc

SEQ ID NO: 226097 - DNA, 1229 bp, Homo Sapiens; identical to SEQ ID NO: 191966

SEQ ID NO: 226098 - DNA, 1607 bp, Homo Sapiens; identical to SEQ ID NO: 191977

SEQ ID NO: 226099 - DNA, 1209 bp, Homo Sapiens
aaaggcaactttgtacaaaaaagttggccgcgcccgaccgagcctgttcgcgtcgactgcccagagtccgcgaatcctccgctccgagcccgtccggactcccccgatcccagctttctctcctttgaaaacactaagaataatgtcactgcatcagtttttactagagccaatcacctgtcatgcctggaacagggatcgtactcagattgccctcagtcccaataatcacgaagtgcacatctataagaagaacgggagccagtgggtgaaagctcatgaactcaaggagcacaacggacacatcacaggtattgactgggctcccaagagcgaccgcattgtcacttgtggggcagaccgcaatgcctatgtctggagtcagaaagatggtgtttggaagccaaccctggtgatcctgagaattaatcgcgcagctacttttgtgaagtggtcccccctagagaacaaatttgctgtgggaagtggagcacgactcatttctgtttgttactttgagtctgaaaatgactggtgggtgagcaagcacattaaaaagccgattcgctccacagtcctcagcttggattggcatcccaacaacgttttgctggcagcaggatcatgtgacttcaaatgcagagtgttttctgcctacattaaagaagtggatgaaaagccagccagcacgccctggggcagcaagatgccttttgggcagctgatgtcagagtttggtggcagtggcactggtggctgggtccacggggtaagcttctctgccagtgggagccgcctggcctgggtcagccacgacagcaccgtgtctgttgctgatgcctcaaaaagtgtgcaggtctcgactctgaagacagagttcctgccgctcctaagtgtgtcatttgtctcagagaacagcgtcgtggctgctggccatgactgctgcccaatgctctttaactacgatgaccgcggctgcctgaccttcgtctccaagttagatattccaaaacagagcatccaacgcaacatgtctgccatggaacgcttccgcacatggacaagagagccacaactgaggaccgcaacacggccttggagacgctgcaccagaatagcatcactcaagtctctatttatgagtggacagcaagattgtcgcaaattttgcactactggcatcgatggagccatgacaatttgggattt

SEQ ID NO: 226100 - DNA, 496 bp, Homo Sapiens
  misc_feature (191)..(217): n is a, c, g, or t
  misc_feature (276)..(292): n is a, c, g, or t
ttggggaaaggatgaaactagaacaagaacgacaacgtcaacaaaaagaagaacaaaaaattatcctgggcaaggggaagtccaggccaaaactgtccttctcattaaaaacccaggattaaattgcaaactctgaactttttacaaagaaaaatggaaaaactttgtatggtagcttcatgttgaagtgnnnnnnnnnnnnnnnnnnnnnnnnnnnaatttgtaaaatctggaaagttagcttgttctaataggggctatgctctgcaattcccnnnnnnnnnnnnnnnnnccttccactaagtcaaatccttatcaaatcattgttgtattctaaggagtgacgtatttttcacctgtttggattctatattagtggtctgaggaaaagcaaatcacattgtaaaactatggatggtctgataaggcttttactgaccccactgacttcaaagttatactctgtttgctacatcataatgctggttttgctgac

SEQ ID NO: 226101 - DNA, 1078 bp, Homo Sapiens
ttggcgtgcagcggggtgggtgccctggtccgcgggcgagctcgagcagccaaccccgggcgcgtcggggccatggacggcctgaggcagcgcgtggagcacttcctggagcaaaggaacctggtcaccgaagtgctgggggcgctggaggccaagaccggggtggagaagcggtatctggctgcaggagccgtcactctgctaagcctgtatctgctgttcggctacggagcgtctctgctgtgcaatctcatcggatttgtgtaccccgcatatgcctcaatcaaagctatcgagagcccaagcaaggacgacgacactgtgtggctcacctactgggtggtgtacgccctgtttgggctggccgagttcttcagcgatctactcctgtcctggttccctttctactacgtgggcaagtgcgccttcctgttgttctgcatggctcccaggccctggaacggggctctcatgctgtatcagcgcgtcgtgcgtccgctgttcctaaggcaccacggggccgtagacagaatcatgaacgacctcagcgggcgagccctggacgcggcggccggaataaccaggaacgtcaagccaagccagaccccgcagcccgaaggacaagtgaagcagccccctgagcctcacaaggacctcctggctggtgaggagggggccgcgccaggctcccaggcctccacagagtcttcagcgcatcccccaacagcagcccctgccagtccctcgggtccaggcaaggccctgggggtctccttaaatgccacctcgggcaagtcccagtcccagtcctcggccacccccagctctggatcccagggccagctgccctctggctctggctgtggctcccgcctgtccggcagggcccaagggccagcgtcgggcacagggcagctcccacaggtctcggcaacacacccagccgcctggtacttcctccagcccctcccagtcaaaacctcacgtcctcggggcccctgcagccacccaaagtcacctcaaagcccggactcactatttgtttatttcacccaacagcagcaaaacccccatttat

SEQ ID NO: 226102 - DNA, 980 bp, Homo Sapiens
tgtacaaaaagttggcaagaataactgtgtgatgcctgaagatgtgaagaacttttacctgatgaccaatggcttccacatgacatggagtgtgaagctggatgagcacatcattccactgggaagcatggcaattaacagcatctcaaaactgactcagctcacccagtcttccatgtattcacttcctaatgcacccactctggcagacctggaggacgatacacatgaagccagtgatgatcagccagagaagcctcactttgactctcgcagtgtgatatttgagctggattcatgcaatggcagtgggaaagtttgccttgtctacaaaagtgggaaaccagcattagcagaagacactgagatctggttcctggacagagcgttatactggcattttctcacagacacctttactgcctattaccgcctgctcatcacccacctgggcctgccccagtggcaatatgccttcaccagctatggcattagcccacaggccaagcaatggttcagcatgtataaacctatcacctacaacacaaacctgctcacagaagagaccgactcctttgtgaataagctagatcccagcaaagtgtttaagagcaagaacaagatcgtaatcccaaaaaagaaagggcctgtgcagcctgcaggtggccagaaagggccctcaggaccctccggtccctccacttcctccacttctaaatcctcctctggctctggaaaccccacccggaagtgagcacccctccctccaactccctaccagctccagagtggtggtttccatgcacagatggccctaggggtgacctccagttttgcgtgtggaccgtaggcctctttctagttgaatgaccaaaattgtaaggcttttagtcccaccgacattagccaggctcgtaatgaggcctccagagcaggttgtgctgtcccctgcctctggaagcaatggggaatttggaatc

SEQ ID NO: 226103 - DNA, 860 bp, Homo Sapiens; identical to SEQ ID NO: 191996
  misc_feature (471)..(487): n is a, c, g, or t

SEQ ID NO: 226104 - DNA, 1071 bp, Homo Sapiens; identical to SEQ ID NO: 191998
  misc_feature (813)..(827): n is a, c, g, or t

SEQ ID NO: 226105 - DNA, 863 bp, Homo Sapiens; identical to SEQ ID NO: 191999
  misc_feature (484)..(498): n is a, c, g, or t

SEQ ID NO: 226106 - DNA, 1025 bp, Homo Sapiens; identical to SEQ ID NO: 192000

SEQ ID NO: 226107 - DNA, 861 bp, Homo Sapiens; identical to SEQ ID NO: 192001
  misc_feature (337)..(361): n is a, c, g, or t

SEQ ID NO: 226108 - DNA, 1348 bp, Homo Sapiens
cagtggaaaataacttttattgagaccccaccaactgcaaaatctgttcctggcattaagctccttcttcctttgcaattcggtctttcttcagtggtcccatgaatgctttcttctcctccatggtctggaagcggccatggccaaacttggaggtggtgtcaatgaacttaaggtcaatcttctccagagcccgccgcttcgtctgcaccagcaaggacttgcggagggtgagcacccgcttcttggttcccaccacacagcctttcagcatgacaaagtcattggtcacttcaccatagtggacaaagccacccagagggttgatgctcttgtcagataggtcatagtcagtggaggcattgttcttgatcagcttgccgtccttgataaggtagccctggccaatcttataaatcttcttgttgatctcagtgcggtgatggtagcctttctgcccagcgcgtgccacagagaaggctacacgagcaggatgccatgccccaatacaggccaccttgcgcaggcctcggtgggtcttgcggggcagcttcttggtgtgccaacgactggtgacccctttgtagcctttgcccttggtcaccccgatgacgtcgatcatctcatcctgcccaaacacttggttcacaggtacctgctgctcaagcctctcgcgggcccagtccagcttctcggccacagtgcctccgttcacctggatctccatcaggtgggccttcttctggcgcagaggaagcaggcgcatctgggtgtgggcaatgacacggatgacttggcagtacttcttcatgctgctgaagtccttctccagctgcttcttgccatcctcatcctgccatttcttgcagtacttggtaaaggccttcttcttagatttatgccaattcttatagaaacgcctcttgcattcatcactgatgtgctcagcaaagacagtcttgaaggtccggaggcctcgaggggtttccacgtagcccacaatgcccacaaccaccatgggtggtgtctctacaatggtcacagcctccaccacctccttcttgttcaccttggatcccggcctgtcgacttcccgcacgatgtgagtcatgccagccttgtatcccaggaaggctgtgaggtggaccggcttggacgggtcatccttagggaagctcttcaccttcccacgatgcctgctgctgcgcttccgaggcaggaagccgagggacccatgtctgggagcggagaactttctgtgagacatcacgccacaaatcccaacttttttgtacaaagttggctttaaaaggggaagcattgctcatcaatttgttgcaacgaacag

SEQ ID NO: 226109 - DNA, 558 bp, Homo Sapiens
actttgtacaaaaaagttgggtgtttgagagatgatcgacgtcatcggggtgaccaagggcaaaggctacaaaggggtcaccagtcgttggcacaccaagaagctgccccgcaagacccaccgaggcctgcgcaaggtggcctgtattggggcatggcatcctgctcgtgtagccttctctgtggcacgcgctgggcagaaaggctaccatcaccgcactgagatcaacaagaagatttataagattggccagggctaccttatcaaggacggcaagctgatcaagaacaatgcctccactgactatgacctatctgacaagagcatcaaccctctgggtggctttgtccactatggtgaagtgaccaatgactttgtcatgctgaaaggctgtgtggtgggaaccaagaagcgggtgctcaccctccgcaagtccttgctggtgcagacgaagcggcgggctctggagaagattgaccttaagttcattgacaccacctccaagtttggccatggccgcttccagaccatggaggagaagaaagcattcctgggacc

SEQ ID NO: 226110 - DNA, 916 bp, Homo Sapiens
ttgggacaggaaaggtttaagggggacagagccctgggaggccgggccgggctcgggggccaccccgggggcccgggccatggatgtgcgccgtctgaaggtgaacgaacttcgcgaggagctgcagcgccgcggcctggacactcgaggcctcaaggccgagcttgctgagcggctgcaggcggcgttggaggccgaggagcctgacgacgagcgggagctcgacgccgacgacgaaccggggcgacccgggcacatcaacgaggaggtcgagaccgaggggggctccgagctggaggggaccgcgcagccaccgccgcccgggctgcagccgcacgcggagcccggcggctactcggggccggacggacattatgccatggacaatattaccaggcagaaccaattctacgatacccaagtcatcaaacaagaaaacgagtcaggctacgagaggagaccactggaaatggagcagcagcaggcctatcgtccagaaatgaagacagagatgaagcaaggagcacccaccagcttcctcccgcctgaagcttctcaactcaagccagacaggcagcaattccagagtcgaaagaggccttatgaagaaaaccggggacgggggtactttgagcaccgagaggataggaggggccgctctcctcagcctcctgctgaagaggatgaagatgactttgatgatacccttgttgctattgacacctataactgcgacctccacttcaaggtggcccgagatcggagtagtggctatccgctcacaattgagggctttgcatacctgtggtcaggagcccgtgccagctatggggtcagaagggccgtgtatgcttcgagatgaagatcaatgaggaaatctccgtgaagcaccttccgtctacagagcctgaccccc

SEQ ID NO: 226111 - DNA, 894 bp, Homo Sapiens
ttggcacaatgtcacctcggcctcaggctctgcatcaggctcagcttctactctggtgcacaacggcacctctgccagggctaccacaaccccagccagcaagagcactccattctcaattcccagccaccactctgatactcctaccacccttgccagccatagcaccaagactgatgccagtagcactcaccatagcacggtacctcctctcacctcctccaatcacagcacttctccccagttgtctactggggtctctttctttttcctgtcttttcacatttcaaacctccagtttaattcctctctggaagatcccagcaccgactactaccaagagctgcagagagacatttctgaaatgtttttgcagatttataaacaagggggttttctgggcctctccaatattaagttcaggccaggatctgtggtggtacaattgactctggccttccgagaaggtaccatcaatgtccacgacgtggagacacagttcaatcagtataaaacggaagcagcctctcgatataacctgacgatctcagacgtcagcgtgagtgatgtgccatttcctttctctgcccagtctggggctggggtgccaggctggggcatcgcgctgctggtgctggtctgtgttctggttgcgctggccattgtctatctcattgccttggctgtctgtcagtgccgccgaaagaactacgggcagctggacatctttccagcccgggatacctaccatcctatgagcgagtaccccacctaccacacccatgggcgctatgtgccccctagcagtaccgatcgtagcccctatgagaaggtttctgcaggtaatggtggcagcagcctctcttacacaaacccagcagtggcaggcacttc

SEQ ID NO: 226112 - DNA, 1095 bp, Homo Sapiens; identical to SEQ ID NO: 192005

SEQ ID NO: 226113 - DNA, 1576 bp, Homo Sapiens
  misc_feature (1389)..(1415): n is a, c, g, or t
ttggggccttcctgcaacctttgcggctccaacatggccgcggctgtgcagcatctctgtgacggcgcggcggctgctggggggcccggggcctcgcgctggggacgttgcgtctgcagctgcggcgcgtttctattccaaggacaatgaaggcagctggttccgctccctctttgttcacaaagtggatccccggaaggatgcccactccaccctgctgtccaagaaggaaaccagcaacctctataagatccagtttcacaatgtaaagcctgaatacctggatgcctacaacagcctcacggaggctgtgctgcccaagcttcacctggatgaggactacccatgctcactcgtgggcaactggaacacgtggtatggggagcaggaccaggcagtgcacctgtggcgattctcaggtggctacccagccctcatggactgcatgaacaagctcaaaaacaataaggagtacctggagttccgaagggagcggagccagatgctgctgtccaggagaaaccagctgctcctcgagttcagcttctggaatgagccacagcccagaatgggtcccaacatctatgagctgaggacatacaagctcaagccaggaaccatgatcgagtgggggaacaactgggctcgggccatcaagtaccggcaggagaaccaggaggcagtgggcggcttcttctcacagataggagagctctacgtggtgcaccatctctgggcctataaagacctgcagtctcgggaggagactcgaaacgctgcctggaggaagagaggctgggatgaaaatgtctactatacagtccccctggtgcgacacatggagtctaggatcatgatccccttgaagatctcgcctctgcagtgatgctgcctacacctccacctccttccccttctccctcaggcaaccccgacagacagtggcactcctggtcctgctgtcttggttttgtcttggctctgggaggactctgaggggcagtgctcagttcagacaagggggaactgaaggctgacaagttctgaggattacagctctgcccaggccctttctactttccctgcctgcctccctccccctgctagaagtagtttctgatttccctgaatgaaagatagtgatcttttaggccttcatatatcttctaaaattcctcatctcaaggccaccagtccccagttatcacccttggaaatcctctgtttagcttagttgcacaaaaggtagtatgtccagtggctagaggtggggtgggaagagaggaggccaggccaggccctcaggaattccctggtttccactgggccacccacttgctggacagtctgagccaagtccctcctgctggagaaaagcctggaactgcnnnnnnnnnnnnnnnnnnnnnnnnnnncctcgtcaccacggtcaggaggaggttcagacattctgcccagaggggctggggaaagggatgggagccaggaaagatttaagggcaggagacagacacgtaacacgaactcgggagggtagaacttagaattcacaacttgggtttcaattgtagaattt

SEQ ID NO: 226114 - DNA, 1039 bp, Homo Sapiens
ttggcatctcaatgcgctgcatggtccagtttgtgggacgggaggccaagtacagtggtgtgctgagctccattgggaagattttcaaagaggaagggctgctgggattcttcgttggattaatccctcacctcctgggcgatgtggttttcttgtggggctgtaacctgctggcccacttcatcaatgcctacctggtggatgacagcttcagccaggccctggccatccggagctataccaagttcgtgatggggattgcagtgagcatgctgacctaccccttcctgctagttggcgacctcatggctgtgaacaactgcgggctgcaagctgggctccccccttactccccagtgttcaaatcctggattcactgctggaagtacctgagtgtgcagggccagctcttccgaggctccagcctgcttttccgccgggtgtcatcaggatcatgctttgccctggagtaacctgaatcatctaaaaaacacggtctcaacctggccaccgtgggtgaggcctgaccaccttgggacacctgcaagacgactccaacccaacaacaaccagatgtgctccagcccagccgggcttcagttccatatttgccatgtgtctgtccagatgtggggttgagcgggggtggggctgcacccagtggattgggtcacccggcagacctagggaaggtgaggcgaggtggggagttggcagaatccccatacctcgcagatttgctgagtctgtcttgtgcagagggccagagaatggcttatgggggcccaggttggatggggaaaggctaatggggtcagaccccaccccgtctacccctccagtcagcccagcgcccatcctgcagctcagctgggagcatcattctcctgctttgtacatagggtgtggtcccctggcacgtggccaccatcatgtctaggcctatgctaggaggcaaatggccaggctctgcctgtgtttttctcaacactacttttctgatatgagggcagcacctgcctctgaatgggaaatcatg

SEQ ID NO: 226115 - DNA, 1484 bp, Homo Sapiens; identical to SEQ ID NO: 192008

SEQ ID NO: 226116 - DNA, 873 bp, Homo Sapiens
gcttttttataatgccaactttgtacaaaaaagttggagcggctggcggagcagaacggattgcagggtcagccatgtcatctgagcctcccccaccaccacagccccccacccatcaagcttcagtcgggctgctggacacccctcggagccgtgagcgctcaccatcccctctgcggggcaacgtggtcccaagcccactgcccactcgccggacgaggaccttctcggcgacggtgcgggcttcacagggccccgtctacaaaggagtctgcaaatgcttctgccggtccaagggccatggcttcattaccccagctgatggcggccccgacatcttcctgcacatctctgatgtggaaggggagtatgtcccagtggaaggcgacgaggtcacctataaaatgtgctccatcccacccaagaatgagaagctgcaggccgtggaggtcgtcatcactcacctggcaccaggcaccaagcatgagacctggtctggacatgtcatcagctcctaggagatggtggaagcaccccttgtcctgtgcttgtgggagactttgcggggaggaggcagcagacactggagatgacattcttccacacgagacggggcttcagccgggcatggtccctctcaagtatctcctggaggaaggggtatggggggcaggtgtggggtgtggggtgttcccggccatcagcacagcctatgaccattgcaaacaacctctcaccatctgaagagcattaaaagcatttaaaaaggagaggtgcccactggtggctgagtggaggttccaaccccatcccagggagtggatcaagggtggtatttctccagctgctcagacacatggggctcaacccaca

SEQ ID NO: 226117 - DNA, 829 bp, Homo Sapiens
ttggggaaggtgaaccgtgtggcccgccatgttcttctccgcggcgctccgggcccgggcggctggcctcaccgcccactggggaagacatgtaaggaatttgcataagacagctatgcaaaatggagctggaggagctttatttgtgcacagagatactcctgagaataaccctgatactccatttgatttcacaccagaaaactataagaggatagaggcaattgtaaaaaactatccagaaggccataaagcagcagctgttcttccagtcctggatttagcccaaaggcagaatgggtggttgcccatctctgctatgaacaaggttgcagaagttttacaagtacctccaatgagagtatatgaagtagcaactttttatacaatgtataatcgaaagccagttggaaagtatcacattcaggtctgcactactacaccctgcatgcttcgaaactctgacagcatactggaggccattcagaaaaagcttggaataaaggttggggagactacacctgacaaacttttcactcttatagaagtggaatgtttaggggcctgtgtgaacgcaccaatggttcaaataaatgacaattactatgaggatttgacagctaaggatattgaagaaattattgatgagctcaaggctggcaaaatcccaaaaccagggccaaggagtggacgcttctcttgtgagccagctggaggtcttacctctttgactgaaccacccaagggacctggatttggtgtacaagcaggcctttaatttatattgaactgtaaatatgtcactagagaaataaaatatgggacttcc

SEQ ID NO: 226118 - DNA, 823 bp, Homo Sapiens; identical to SEQ ID NO: 192011
  misc_feature (42)..(51): n is a, c, g, or t

SEQ ID NO: 226119 - DNA, 921 bp, Homo Sapiens; identical to SEQ ID NO: 192012

SEQ ID NO: 226120 - DNA, 899 bp, Homo Sapiens; identical to SEQ ID NO: 192013
  misc_feature (153)..(162): n is a, c, g, or t

SEQ ID NO: 226121 - DNA, 1121 bp, Homo Sapiens
actttgtacaaaaaagttggcgaagaatggatcaaggtcgaggtgcagctcaaggatctgatcttggctgactacggcaagaaaaacaatgtgaacgtggcatcactgacacaatcagaaattcgagacatcatcctgggtatggagatctcggcaccgtcacagcagcggcagcagatcgctgagatcgagaagcagaccaaggaacaatcgcagctgacggcaacacagactcgcactgtcaacaagcatggcgatgagatcatcacctccaccaccagcaactatgagacccagactttctcatccaagactgagtggagggtcagggccatctctgctgccaacctgcacctaaggaccaatcacatctatgtttcatctgacgacatcaaggagactggctacacctacatccttcccaagaatgtgcttaagaagttcatctgcatatctgaccttcgggcccaaattgcaggatacctatatggggtgagcccaccagataacccccaggtgaaggagatccgctgcattgtgatggtgccgcagtggggcactcaccagaccgtgcacctgcctggccagctgccccagcatgagtacctcaaggagatggaacccttaggttggatccacactcagcccaatgagtccccgcagttatcaccccaggatgtcaccacccatgccaagatcatggctgacaacccatcttgggatggcgagaagaccattatcatcacatgcagcttcacgccaggctcctgtacactgacggcctacaagctgacccccagtggctacgaatggggccgccagaacacagacaagggcaacaaccccaagggctacctgccttcacactatgagagggtgcagatgctgctgtcggaccgtttccttggcttcttcatggtccctgcccagtcctcgtggaactacaacttcatgggtgttcggcatgaccccaacatgaaatatgagctacagctggcgaaccccaaagagttctaccacgaggtgcacaggccctctcacttcctcaactttgctctcctgcaggagggggaggtttactctgcggatcgggaggacctgtatgcctgaccgtttccctg

SEQ ID NO: 226122 - DNA, 1060 bp, Homo Sapiens; identical to SEQ ID NO: 192015

SEQ ID NO: 226123 - DNA, 736 bp, Homo Sapiens
  misc_feature (53)..(63): n is a, c, g, or t
  misc_feature (86)..(94): n is a, c, g, or t
gtggtggtggtggtggttcttaatttttaatttagtttggggaagtagcttgnnnnnnnnnnnataaatatgttgatttcttgtcnnnnnnnnnatttcttactttcccatattaggggtgatagccaaaggggttctggtaagagaaagggggacaaacagaactggtaaagaggcccccctggctccaggcctgtccatcaggaagtaaattttacagggcaccaagctttgccccctaaaatcccttaggtgttctttgttcatgcaggcaggtttctgccgcatttgatgtggaggcagtgaagggcttgccctgctggcctctcatcccccttcttcccacaacccttgggcagggctggactcagtaattttgaggaaattgaagatgccatcttcccctgtgagtgacatgtctttaattttttaaaaaactactatttgaaaattggagggggaagaatgggaagggagttattgccaaatatgttaaatatgggttggggtgcttgtatatgtatcttcctcaatttccccataaatgaggtatctttttgtcacaccaaaatcaaggggtagggagagggaggaggttgcaaaaagccagatgtggggggaaaagtaacatcaacactgtcccatcctcagccctgaactagctaccatctgatcccctcagacattctcaggattttacaagactgtcagagtgggggaacccctcccattaaaa

SEQ ID NO: 226124 - DNA, 1073 bp, Homo Sapiens
ttgggcggctgggagagcggtcggcggggtttcttcgttgcattgcctgagaggagcggagtctgccaggtggtgtccatcatgatgatgcagaacttactcttggaagaaggcggcctggtccaggtggagagcgtcaaccttcaagtggccacctactccaaattccaacctcagagccctgacttcctggatcaccaaccccaaagccgtattagaaaacgcacttaggaactttgcctgtctgaccaccggggatgtgattgccatcaactataatgaaaagatctacgaactgcgtgtgatggagaccaaacccgacaaggcagtgtccatcattgagtgtgacatgaacgtggactttgatgctcccctgggctacaaagaacccgaaagacaagtccagcatgaggagtcgacagaaggtgaagccgaccacagtggctatgctggagagctgggcttccgcgctttctctggatctggcaatagactggatggaaagaagaaaggggtagagcccagcccctccccaatcaagcctggagatattaaaagaggaattcccaattatgaatttaaacttggtaagataactttcatcagaaattcacgtccccttgtcaaaaaggttgaagaggatgaagctggaggcagattcgtcgctttctctggagaaggacagtcattgcgtaaaaagggaagaaagccctaagtgaggactgttggctgattggaaaataataaaagaatcatttgcaacatcttggcttttagttactggcactgacagggacgagcctcatcagagaatactctgttacttaagatttatttagagttacctaagaattattaagtttgacttggaagtggagcagcaggactttgtagttgtatgcttgatttggggaaagacaaagagctgtctctgagggcctgtagatagctgcctcctcacctcttcacgctttcagcttgaggggagctcccactgcctcagcaggagcaattctgcatccctaattctgtcaaaacctatgaaaggtgactaaattgtctaacatgaagtg

SEQ ID NO: 226125 - DNA, 1394 bp, Homo Sapiens
  misc_feature (1002)..(1010): n is a, c, g, or t
  misc_feature (1206)..(1214): n is a, c, g, or t
actttgtacaaaaaagttgggtgagaaggaacaattttagacaatgtatcactgccactggttttggagttgccagttaaaagaattacttctttctcttcattgtcagaaagttggtctgtagatgttgacttcactgatcttagtgagaaccttgctaaaaaattaaagccttcagggactgatgaagcttcctgcacaaaattggtgccctatctattaagttccgttgtggttcactctggtatatcctctgaaagtgggcattactattcttatgccaggaatatcacaagtacagactcttcatatcagatgtaccaccagtctgaggctctggcattagcatcctcccagagtcatttactagggagagatagtcccagtgcagtttttgaacaggatttggaaaataaggaaatgtcaaaagaatggtttttatttaatgacagtagagtgacatttacttcatttcagtcagtccagaaaattacgagcaggtttccaaaggacacagcttatgtgcttttgtataaaaaacagcatagtactaatggtttaagtggtaataacccaaccagtggactctggataaatggagacccacctctacagaaagaacttatggatgctataacaaaagacaataaactatatttacaggaacaagagttgaatgctcgagcccgggccctccaagctgcatctgcttcatgttcatttcggcccaatggatttgatgacaacgacccaccaggaagctgtggaccaactggtggagggggtggaggaggatttaatacagttggcagactcgtattttgatcctgagagagtccaaaatgcactggtcacgaaacgtctaatactatgactgttaaaatgtcagactataacaaatatctatcttttatttttcattagacccttatacttcaagagaacacactcagtgcttgtttttattttcttgacacatttattaacaaaatgcatcatggnnnnnnnnntctacctcttaaaattccatttgcttttatggttagacatgcttgaccaaaaatgttcagaagaaaatatgtacctggtccctaattaagctgcgttaaatttggtagaagcatttaaatggtctatcttcagttttactgaacaaaaaatgtaatttatttagcattctttataaaagaattgatgctagaggtnnnnnnnnntacttgtttttaaaaaatcctttacgtcttgtgtaattaccccattattaaattcaagtccttgaaaatcaactagagattataaagtctctaaagaaggcaataacaaaatttatcaagatatagtacttttcagtttttgtttagtgtcttcagcatcactgtgtctgtatttcaagt

SEQ ID NO: 226126 - DNA, 921 bp, Homo Sapiens; identical to SEQ ID NO: 192022

SEQ ID NO: 226127 - DNA, 970 bp, Homo Sapiens; identical to SEQ ID NO: 192023

SEQ ID NO: 226128 - DNA, 980 bp, Homo Sapiens; identical to SEQ ID NO: 192030

SEQ ID NO: 226129 - DNA, 1122 bp, Homo Sapiens; identical to SEQ ID NO: 192032
  misc_feature (29)..(41): n is a, c, g, or t

SEQ ID NO: 226130 - DNA, 986 bp, Homo Sapiens
ctttgtacaaaaaagttggcaacagtctattgcattgatttataaatagttgtcagttcacatagcaatttaatcaagtaatcattaattagttaccccctatatataaatatatgtaatcaatttcttcaaatagcttgcttacatgataatcaattagccaaccatgagtcatttagaatagtgataaatagaatacacagaatagtgatgaaattcaatttaaaaaatcacgttagcctccaaaccatttaattcaaatgaacccatcaactggatgccaactctggcgaatgtaggacctctgagtggctgtataattgttaattcaaatgaaattcatttaaacagttgacaaactgtcattcaacaattagctccaggaaataacagttatttcatcataaaacagtcccttcaaacacacaattgttctgctgaagagttgtcatcaacaatccaatgctcacctattcagttgctctgtggtcagtgtggctgcatagcagtggattccatgaaaggagtcattttagtgatgagctgccagtccattcccaggccaggctgtcgctggccatccattcagtcgattcagtcataggcgaatctgttctgcccgaggcttgtggtcaagcaaaaattcagccctgaaatcaggcacatctgttcgttggactaaacccacaggttagttcagtcaaagcaggcaacccccttgtgggcactgaccctgccactggggtcatggcggttgtggcagctggggaggtttggccccaacagccctcctgtgcctgcttccctgtgtgtcggggtcctccagggagctgacccagaggtggaggccacggaggcagggtctctggggactgtcggggggtacagagggagaaggctctgcaagagctccctggcaatacccccttgtgtaattgctttgtgtgcgacagggaggaagtttcaataaagcagcaacaagcttc

SEQ ID NO: 226131 - DNA, 959 bp, Homo Sapiens; identical to SEQ ID NO: 192035

SEQ ID NO: 226132 - DNA, 911 bp, Homo Sapiens
ttggcgcacatttttataaaccgctgcagagggagcgtcgcgccggggcggagtgcgggcttgcgcggcaagtgcgcgccgaggtcacgaaatggattggagtgaaccggagaccccgaaaacggaagcgcagggagaaggaagaggtgtttgaaaagcttcttccagaccagctggtcttgcttctggagcatctcttggagcagaagactctgagcccccgaactctgcaaagcctccagaggacataccacctccaggatcaggatgcagaggttcgccatcggtggtgtgaactcattgttaagcacaagttcacgaaagcctacaaaagtgtggagaggttccttcaggaggatcaggccatgggtgtgtacctctacggggagctgatggtgagtgaggacgccagacagcagcagctcgcccgtaggtgcttcgagcggaccaaggagcagatggataggtcctcagcccaggtggtggccgaaatgttattttaacgaggaaagaccacagcaagattctttcattcgtctcctcctagcctgggggaccaggctcgaactgaccctggacatcaaaggagggattatgtggctgctaaagccatcggcccacagccctgttcacgtcttggtgcttctctctctcagaggctggtcccagcccagggcacacacaaaaggcagattctcgtaaacgcagcctccctccctggaggctgcctcctgccctggatctggagtggagctgctctgagattttgagttcttctgcaaagatgattaaatatatccaagagacattggaaaacccgctgaacattttacattggtctgctcagcacatggctggatgcggatatttctataattccagaaagtcacacagctcctctgaatgagacc

SEQ ID NO: 226133 - DNA, 1565 bp, Homo Sapiens; identical to SEQ ID NO: 192040
  misc_feature (983)..(993): n is a, c, g, or t

SEQ ID NO: 226134 - DNA, 1512 bp, Homo Sapiens
ttggattttcatgtgttgcttaaatgtactattttcctttccatttgaaataatagaccttgaagctgatgatgttaagggcagtgtaccactgtcttcaagccctcctgctacacatttcccagatgaaactgaaattacaaacccagttcctaaaaagaatgtgacagtgaagaagacagcagcaaaaagtcagtcttccacctccactaccggtgccaaaaaaagggctgccccaaaaggaactaaaagggatccagctttgaattctggtgtctctcaaaagcctgatcctgccaaaaccaagaatcgccgcaaaaggaagccatccacttctgatgattctgactctaattttgagaaaattgtttcgaaagcagtcacaagcaagaaatccaagggggagagtgatgacttccatatggactttgactcagctgtggctcctcgggcaaaatctgtacgggcaaagaaacctataaagtacctggaagagtcagatgaagatgatctgttttaaaatgtgaggcgattattttaagtaattatcttaccaagcccaagactggttttaaagttacctgaagctcttaacttcctcccctctgaatttagtttggggaaggtgtttttagtacaagacatcaaagtgaagtaaagcccaagtgttctttagctttttataatactgtctaaatagtgaccatctcatgggcattgttttcttctctgctttgtctgtgttttgagtctgctttcttttgtctttaaaacctgatttttaagttcttctgaactgtagaaatagctatctgatcacttcagcgtaaagcagtgtgtttattaaccatccactaagctaaaactagagcagtttgatttaaaagtgtcactcttcctccttttctactttcagtagatatgagatagagcataattatctgttttatcttagttttatacataatttaccatcagatagaactttatggttctagtacagatactctactacactcagcctcttatgtgccaagtttttctttaagcaatgagaaattgctcatgttcttcatcttctcaaatcatcagaggccaaagaaaaacactttggctgtgtctataacttgacacagtcaatagaatgaagaaaattagagtagttatgtgattatttcagctcttgacctgtcccctctggctgcctctgagtctgaatctcccaaagagagaaaccaatttctaagaggactggattgcagaagactcggggacaacatttgatccaagatcttaaatgttatattgataaccatgctcagcaatgagctattagattcattttgggaaatctccataatttcaatttgtaaactttgttaagacctgtctacattgttatatgtgtgtgacttgagtaatgttatcaacgtttttgtaaatatttactatgtttttctattagctaaattccaacaattttgtactttaataaaatgttctaaacattgc

SEQ ID NO: 226135 - DNA, 1098 bp, Homo Sapiens; identical to SEQ ID NO: 192042
  misc_feature (428)..(463): n is a, c, g, or t

SEQ ID NO: 226136 - DNA, 978 bp, Homo Sapiens
ttggcccacttcaacataagggagagctctggacagtttgagcagcattgttagagcctgtggaaaacactttacaactgtgtaactgtcttcatctttacagaggaatagtctacaaaggaagacttgtaacctggagaagagacctgtcatttactccatcctttatagtgatgctacaggacgaagaggaatggataaaaacattggcgagcaactcaataaagcgtatgaagccttccggcaggcatgcatggatagagattctgcagtaaaagaattacagcaaaagactgagaactatgagcagagaatacgtgaacaacaggaacagctgtcacttcaacagactattattgacaagctaaaatctcagttacttcttgtgaattccactcaagataacaattatggctgtgttcctctgcttgaagacagtgaaacaagaaagaataatttgactcttgatcagccacaagataaagtgatttcaggaatagcaagagaaaaactaccaaaggtaagaagacaagaggtttcttctcctagaaaagaaacttcagcaaggagtcttggcagtcctttgctccatgaaaggggtaatatagagaagactttctgggatctgaaagaagaatttcataaaatatgcatgctagcaaaagcacagaaagaccacttaagcaaacttaatataccagacactgcaactgaaacacagtgctctgtgcctatacagtgtacggataaaacagataaacaagaagcgctgtttaagcctcaagctaaagatgatataaatagaggtgcaccatccatcacatctgtcacaccaagaggactgtgcagagatgaggaagacacctcttttgaatcactttctaaattcaatgtcaagtttccacctatggacaatgactcaactttcttacatagcactccagagagacccggcatccttagtcctgccacgtctga

SEQ ID NO: 226137 - DNA, 919 bp, Homo Sapiens; identical to SEQ ID NO: 192043

SEQ ID NO: 226138 - DNA, 1147 bp, Homo Sapiens
ttggatttggaagcctctgaagagaccatgtctttttaaaatctaactcttgagagtgcagcaggggcatggctctgctgggagttgtgttttgctttggcagtctctcttccccccacgaagaaggctgtttaggttttgtgatagaatgggatttgatgaaaaagacaaccaaaggaaaatggggaggcttgggatttcatttaaataatctaagccaagatgataaaaaaaaccttcaactgaaggtactttgtttcttaccaacataatttaggcttcagcatctcaccagcccctccctctgaagaagtattatgttcagaagccaacaaaacagtttgttgccagaccaatgtttgatgggaaaacgtggcactcatagttgaatgtatacttctgtaccaaaacttgaacataaaaagactagaatttgtgagttttagcaaacgctaaaattgatcactgtaactaaccccttctgtccttcctgcctgtttctctgagatgaggaatagcattctttttgtggggatggtgagctttgaatcataaaatgaagttggtgcttgtatggtgtttccttagcctaaagaatgatctgttgtttgaaacctttgtaacttgtttgtatgagtaaagaaaaggtgcaatgcagtgcttttagatggcttgatataccaaataacaatatagaacaacattattatatgtgcttccccaagtttaaaggccctgcagaaatagtaaacatggtttaatttcccttcatttccccctcctttgctggatggggttttgggagctataggttgctaaggaggggagtcagattgtggtcaggtgcctcagtaaatcacagacccaggggccctgtggtccagggtgagagtcacaccacattacacatgtgcttccatacagtggtttctgaagcttttgcagggagagaagatggcttagtgtttagactgttagtagaagccatctggaagcttttctctttgcctttttttgtgatcctgccattaaggctatgtgcagtctgccctcctgctccagtggccttgattttaggccaggaatcttctgctccatgtggcttaagccttccagctgagtgaagctaggcaaatggagtgggggc

SEQ ID NO: 226139 - DNA, 949 bp, Homo Sapiens; identical to SEQ ID NO: 192049

SEQ ID NO: 226140 - DNA, 894 bp, Homo Sapiens; identical to SEQ ID NO: 192051

SEQ ID NO: 226141 - DNA, 710 bp, Homo Sapiens; identical to SEQ ID NO: 192052

SEQ ID NO: 226142 - DNA, 1010 bp, Homo Sapiens
ttggctgaccttcagcgcctcggctccagcgccatggcgccctccaggaagttcttcgttgggggaaactggaagatgaacgggcggaagcagagtctgggggagctcatcggcactctgaacgcggccaaggtgccggccgacaccgaggtggtttgtgctccccctactgcctatatcgacttcgcccggcagaagctagatcccaagattgctgtggctgcgcagaactgctacaaagtgactaatggggcttttactggggagatcagccctggcatgatcaaagactgcggagccacgtgggtggtcctggggcactcagagagaaggcatgtctttggggagtcagatgagctgattgggcagaaagtggcccatgctctggcagagggactcggagtaatcgcctgcattggggagaagctagatgaaagggaagctggcatcactgagaaggttgttttcgagcagacaaaggtcatcgcagataacgtgaaggactggagcaaggtcgtcctggcctatgagcctgtgtgggccattggtactggcaagactgcaacaccccaacaggcccaggaagtacacgagaagctccgaggatggctgaagtccaacgtctctgatgcggtggctcagagcacccgtatcatttatggaggctctgtgactggggcaacctgcaaggagctggccagccagcctgatgtggatggcttccttgtgggtggtgcttccctcaagcccgaattcgtggacatcatcaatgccaaacaatgagccccatccatcttccctacccttcctgccaagccagggactaagcagcccagaagcccagtaactgccctttccctgcatatgcttctgatggtgtcatctgctccttcctgtggcctcatccaaactgtatcttcctttactgtttatatcttcaccctggtaatgggttgggaccaggccaatccccttctccactttactataatgggtgggaactaaacgtc

SEQ ID NO: 226143 - DNA, 948 bp, Homo Sapiens; identical to SEQ ID NO: 192054

SEQ ID NO: 226144 - DNA, 560 bp, Homo Sapiens
gcactccagcctttgataagaaaagcagagggagacactgtctccaaaagaaagaaatcccagcgtagatccaaactgagacactgaggcttcgtccttatagtagtcaggagcaggcgattgaagtaattctgtcctgcggggttcagcatcatgcacgttccccctgggccattctctgatgcagggcacttgctccacactctgggaacccagattcaccagtctgccctgtcacgtagttgaaggagttgcatttatctttctggctcctaattcctttaaaattacatttgttgcagaacctccacaaggctaaataaaattacatttgtgaccatcagagaactgaataaaccattaactggccatcctggttttgcagagatcagttgttgacagttcctggttgacccacagctacccatgtcagttatctccactaacatatccaagaatctttgtaggacaatttctccacctgcaaggtctttcagtagaactcttcttttaagcaattagcccattgccaaagttttactgtcttaagctgtctttct

SEQ ID NO: 226145 - DNA, 868 bp, Homo Sapiens; identical to SEQ ID NO: 192055
  misc_feature (670)..(678): n is a, c, g, or t

SEQ ID NO: 226146 - DNA, 1019 bp, Homo Sapiens; identical to SEQ ID NO: 192056
  misc_feature (689)..(716): n is a, c, g, or t

SEQ ID NO: 226147 - DNA, 1225 bp, Homo Sapiens; identical to SEQ ID NO: 192057

SEQ ID NO: 226148 - DNA, 578 bp, Homo Sapiens
agcaatgctttttccataatagccaactttgtacaaaaaagttggggctaaagctgggagactgaaaaaatgcagaccgccggggcattattcatttctccagctctgatccgctgttgtaccaggggtctaatcaggcctgtgtctgcctccttcttgaatagcccagtgaattcatctaaacagccttcctacagcaacttcccactccaggtggccagacgggagttccagaccagtgttgtctcccgggacattgacacagcagccaagtttattggtgctggggcagccacagttggtgtggctggttcaggggctggcattggaaccgtgtttggcagcttgatcattggctatgccaggaacccgtctctcaagcagcagctcttctcctatgccattcttggctttgccctgtctgaggccatggggcttttctgtttgatggtcgccttcctcatcctcttcgccatgtgaggctccatggggggtcaccggcctgttgctactgcaactccacaccattcttggtgctggggtgtgttaagctttaccattaaacacaacgtttctct

SEQ ID NO: 226149 - DNA, 651 bp, Homo Sapiens; identical to SEQ ID NO: 192059

SEQ ID NO: 226150 - DNA, 469 bp, Homo Sapiens; identical to SEQ ID NO: 192060

SEQ ID NO: 226151 - DNA, 853 bp, Homo Sapiens; identical to SEQ ID NO: 192067

SEQ ID NO: 226152 - DNA, 1267 bp, Homo Sapiens; identical to SEQ ID NO: 192068

SEQ ID NO: 226153 - DNA, 1014 bp, Homo Sapiens
gccaactttgtacaaaaaagttgggttacactgttagaccttatgatagccaagataacgagtgatgagccactcaccaaggatgacatccctgtgtttttgcggcatgctgagttgattgcaagcacctttgtggatcagtgcaagactgtgctcaagctggcctctgaggagcctcctgatgatgaggaggcactggctacaattaggcttctcgacgtcctgtgcgaaatgactgtgaatactgagctgctcggctatctgcaggttttccctggcttgctggaaagagtgattgatcttttgcgggtgattcatgtagctggaaaagaaaccacaaacatcttcagtaattgtggttgcgtgagagcagaaggtgacatctccaatgtggccaatgggtttaagtctcatctcattcgtctgattggaaatctgtgttacaagaataaagataaccaagacaaggtaaatgagctggatggtatcccgttgatcctggacaactgcaacatcagtgacagtaacccctttctgacccagtgggtgatatatgccatccgaaaccttaccgaagacaacagccaaaaccaagatttgattgcaaagatggaggaacaggggctggcagatgcatccctacttaaaaaagtgggttttgaagttgaaaagaaaggcgaaaagctgatcctgaaatctactagagacacccctaagccatgaatgaactacatccaaatacctgaatttttggaatctgtttcatggatttttcatcttctaccgtatgtgaaattgcaagtgtttgaagatttataagtacaaatttgggaacatacaaatcttttaggtagtagagtttaacgtgtataagctaaaagtgaaagtaactgagtgttctcttgtttctttgcattatgtaactgtgtggtttgcctttgtccccctggatagaacgtgcatttaaagaatatattgtacttactgtgacagcagataataaaccagtctctt

SEQ ID NO: 226154 - DNA, 1497 bp, Homo Sapiens
  misc_feature (1159)..(1176): n is a, c, g, or t
ttggacaagttattgcagagtcagggtgcttttatatataagagcagcagccgcctttgtaaagtgtgatctatgagaattggagacacttctttactgttcaccaaagaaatgggtaatctgtgctgatctccttatttttacctttttacagggtttctaggacattgtcattattcttcctccatctatctgattccattccttccacacccagctaaagttagaggagatacatatagaatctattttagattattgttaactatttgcatcaaattaagatacacaaatggccatggatgttgccttagccttaaacattactaatagtttcacatcacctcactgcacgcatcgaaggatctgatttgaatttgtaaaggcaattcttttgagagcaggattctccaggctaaatcaaaggcagctaatcctgtccctgaaggagcagctaggggaacctgaggcttgttcttgaagtgggcaagctggccaaaatattggaacacacagaaccaaaccaggtgtgttctacacctgcatgagtgaaggatttccacgtagacacctaggaagagcccgcatgccctagactcactccagaggaaggattgatttgcaaccagaaagggagctgaaaaccacggagctccatggctcttcattcaaaagggaaaataatgattccacgttgctttttagagttcaaatcaacatctttctggataaatctattttttaacaatctttttattatttgtaaaagatataaaaacaactcccatcagtagcaatacaaggttatacattttaaccagattttctcaggccttttttggatacctttagtagttaactctcttttgtcaaaccctcttgtatataaccatcgcacaacatacagaaccctggggaatacagccaagggcactgctcactgtggcccgtgtattcattcccacaggctgcactgaaataacctggtaaacaacaccctcctccattttgcgtctatttcttctattgtgcttctttggggataggaagagaaacataactactgttccaggtaacgtctgtatcatacagttagtgttgccagtgaaacgttcccagatacaaagaattgtgcttttaattccatttcacaatctgnnnnnnnnnnnnnnnnnngtcattgtctgaccaaaattccttctgcacatgaggccagtataggcaacgtcacatttgtttgtttcaaatatgcagtgtggtattttgtttactttgcatttaccgtgagcaaagatacttcttggaatggctgcagtgaggccgtgtcattggctcacaaaagtgactcataggtaatttctgtgtttgcattccactgctctgctccctaaggtccttgactttctccccaggaattcacttaaaaagggactgagcattgtgtcaacctgttgcagtgtttttcatatatgtgttcactctaaaaatgcaaataaa

SEQ ID NO: 226155 - DNA, 902 bp, Homo Sapiens
ttggggacagtcatggcggcccggcgcggggctctcatagtgctggagggcgtggaccgcgccgggaagagcacgcagagccgcaagctggtggaagcgctgtgcgccgcgggccaccgcgccgaactgctccggttcccggaaagatcaactgaaatcggcaaacttctgagttcctacttgcaaaagaaaagtgacgtggaggatcactcggtgcacctgcttttttctgcaaatcgctgggaacaagtgccgttaattaaggaaaagttgagccagggcgtgaccctcgtcgtggacagatacgcattttctggtgtggccttcaccggtgccaaggagaatttttccctagattggtgtaaacagccagacgtgggccttcccaaacccgacctggtcctgttcctccagttacagctggcggatgctgccaagcggggagcgtttggccatgagcgctatgagaacggggctttccaggagcgggcgctccggtgtttccaccagctcatgaaagacacgactttgaactggaagatggtggatgcttccaaaagcatcgaagctgtccatgaggacatccgcgtgctctctgaggacgccatccgcactgccacagagaagccgctgggggagctatggaagtgacccaaggctgcccactggagacgcctctccctgcagtcccccgagaggtgggagactcgcggaaggccccgtccccagcagagtccagaccccacaacttcaggagctctttcccggcagcagagatctgcaggctgcctcttctgccccggagctggggtgcactggggacccccgtggtggggaccttggcagtgtggacatgagcagagcgatggagccatctcctgccctctcccctgtcctgatgg

SEQ ID NO: 226156 - DNA, 992 bp, Homo Sapiens
ttggcctttttagggagtccaaggtacagtcgccgcgtgcggagcttgttactggttacttggcctcatggcggtccgagcttcgttcgagaacaactgtgagatcggctgctttgccaagctcaccaacacctactgtctggtagcgatcggaggctcagagaacttctacagtgtgttcgagggcgagctctccgataccatccccgtggtgcacgcgtctatcgccggctgccgcatcatcgggcgcatgtgtgtggggaacaggcacggtctcctggtacccaacaataccaccgaccaggagctgcaacacattcgcaacagcctcccagacacagtgcagattaggcgggtggaggagcggctctcagccttgggcaatgtcaccacctgcaatgactacgtggccttggtccacccagacttggacagggagacagaagaaattctggcagatgtgctcaaggtggaagtcttcagacagacagtggccgaccaggtgctagtaggaagctactgtgtcttcagcaatcagggagggctggtgcatcccaagacttcaattgaagaccaggatgagctgtcctctcttcttcaagtcccccttgtggcggggactgtgaaccgaggcagtgaggtgattgctgctgggatggtggtgaatgactggtgtgccttctgtggcctggacacaaccagcacagagctgtcagtggtggagagtgtcttcaagctgaatgaagcccagcctagcaccattgccaccagcatgcgggattccctcattgacagcctcacctgagtcaccttccaagttgttccatgggctcctggctctggactgtggccaaccttctccacattccgcccaatctgtaccggatgctggcagggaggtggcagagagctcactgggaactgaggggctgggcacccaacccttttccacctgtgcttatcgcctggatctatcattactgcaaaacctg

SEQ ID NO: 226157 - DNA, 1063 bp, Homo Sapiens
  misc_feature (297)..(305): n is a, c, g, or t
ttggctgttatcatcttgattaatgctatattgtgcaaagctcaggcctacagacatattcttttcaatactcaaataaatatccatggaaaactctgcatattttgtttgctttgtgaagcatacctgaggtggtggcagcttcaagattccaaccagaatactgcccctgatgacttgatcagatatgctaaggaatgggatttctatagaatgtttgcgattgctgctttagaacaaactgcctattttattggcatttttaccttcctgtgggtagaacggcccatgacggcnnnnnnnnngcccaacttcattttgctgctgaaagcattattattatctagctacggaaaactcttgctgattccagctgtcatttgggaacatgactacacatctgtgtgcctcaaactcattaaagtatttgttcttacatcaaattttcaggcaattagagtgaccctaaacatcaaccgtaagctctccttcttggccgtgttgagtggcttactgctggaaagcatcatggtctacttcttccagagtatggaatgggatgttggaagtgattatgccatctttaaatctcaggacttctgaagagttttattcttcttcactatctgtggcatgaccagctgtatctgaaagagaaaagacatgaaatataaaccaacctcctcatttctgttgagtaaaatgaagcaaagattggaaacactttctgaaaaagaaagcaatgataatagcggtggatacccacccccacaaatgcacccaagagacaagccatttacatacagatattcacagtcacacatagaaacacccacatggacacaaggaatgttgctgcagagactgaatgacatgcaacaggtgaaggtttatacgttatacacaaggccaggtaagcgctcataattcacacataataaaacatctaggtttcattcctttgacatgtttatatctttttaatttaaatgttgttactggcttaaaatattttgtgttcttacaatagaaacgcttttaataaagtctttcagaataaacc

SEQ ID NO: 226158 - DNA, 889 bp, Homo Sapiens
ctttaaaaaagccaactttgtacaaaaaagttggcttgggtgctccctgtcccccaggggagacggtagtacacgggcctggtgaggcaacagctgtggagtgggggccaaacacatggatggtggagtacggccggggcgtcatcccatccaccctggccttcgcgctggccgacactgtcttcagcacccaggacttcctcaccctcttctatactcttcgctcctatgctcggggcctccggcttgagctcaccacctacctctttggccaggacccttgaccagccaggcctgaaggaagacctgcggatggacaggagcgggcaggcccgcacatatccacttgctggagcccatgtttacagacagggacatacaccatgcagatcctgagttcctgctgtatgagcagggatatccatgcttatgtatccaaacacagagacccatgggaacaaatgagacacatatagatactgagacctgtgtgtacagtaggaccatgcactcacacccatctggagagggagcccccggtataccaagggagccagttgtgttcagacacacacctcacagcttgactcactaactgaggcctttccatagctccacagcttcccacctcctccccaccaaactggggttctagagttaaggatgggggagggtattatactgcctcagtctgactcctcaacccagcagcaatttgaggggatgagggggaagaggagctgccttttggaggcccccttcacctgcagctatgatgcccttccccttctcccctgtcctcaccatatgcccttatccccatttctactcccctgctatgcaagtgccccctgtggcttgtccccaaccccctcagcacaaaagctca

SEQ ID NO: 226159 - DNA, 921 bp, Homo Sapiens; identical to SEQ ID NO: 192072

SEQ ID NO: 226160 - DNA, 868 bp, Homo Sapiens
ttggcgccgcggcagctcgagtccaccagcagcgccgtccgcttgaccgagatgctgcgggcctgtcagttatcgggtgtgaccgccgccgcccagagttgtctctgtgggaagtttgtcctccgtccattgcgaccatgccgcagatactctacttcaggcagctctgggttgactactggcaaaattgctggagctggccttttgtttgttggtggaggtattggtggcactatcctatatgccaaatgggattcccatttccgggaaagtgtagagaaaaccataccttactcagacaaactcttcgagatggttcttggtcctgcagcttataatgttccattgccaaagaaatcgattcagtcgggtccactaaaaatctctagtgtatcagaagtaatgaaagaatctaaacagcctgcctcacaactccaaaaacaaaagggagatactccagcttcagcaacagcacctacagaagcggctcaaattatttctgcagcaggtgataccctgtcggtcccagcccctgcagttcagcctgaggaatctttaaaaactgatcaccctgaaattggtgaaggaaaacccacacctgcactttcagaagaagcatcctcatcttctataagggagcgaccacctgaagaagttgcagctcgccttgcacaacaggaaaaacaagaacaagttaaaattgagtctctagccaagagcttagaagatgctctgaggcaaactgcaagtgtcactctgcaggctattgcagctcagaatgctgcggtccaggctgtcaatgcacactccaacatattgaaagccgccatggacaattctgagattgcaggcgagaagaaatctgctc

SEQ ID NO: 226161 - DNA, 721 bp, Homo Sapiens
tgcaacaaattgatgagcaatgcttttcttataatgccacactttgtacaaaaaagttggcgcaccagctctctgctctcccagcgcagcgccgccgcccggcccctccagcttcccggaccatggccaacctggagcgcaccttcatcgccatcaagccggacggcgtgcagcgcggcctggtgggcgagatcatcaagcgcttcgagcagaagggattccgcctcgtggccatgaagttcctccgggcctctgaagaacacctgaagcagcactacattgacctgaaagaccgaccattcttccctgggctggtgaagtacatgaactcagggccggttgtggccatggtctgggaggggctgaacgtggtgaagacaggccgagtgatgcttggggagaccaatccagcagattcaaagccaggcaccattcgtggggacttctgcattcaggttggcaggaacatcattcatggcagtgattcagtaaaaagtgctgaaaaagaaatcagcctatggtttaagcctgaagaactggttgactacaagtcttgtgctcatgactgggtctatgaataagaggtggacacaacagcagtctccttcagcacggcgtggtgtgtccctggacacagctcttcattccattgacttagaggcaacaggattgatcattcttttatagagcatatttgccaataaagcttttggaagccgga

SEQ ID NO: 226162 - DNA, 457 bp, Homo Sapiens; identical to SEQ ID NO: 192074

SEQ ID NO: 226163 - DNA, 909 bp, Homo Sapiens; identical to SEQ ID NO: 192078

SEQ ID NO: 226164 - DNA, 1082 bp, Homo Sapiens; identical to SEQ ID NO: 192079
  misc_feature (836)..(874): n is a, c, g, or t

SEQ ID NO: 226165 - DNA, 1208 bp, Homo Sapiens; identical to SEQ ID NO: 192088
  misc_feature (177)..(187): n is a, c, g, or t
  misc_feature (796)..(808): n is a, c, g, or t

SEQ ID NO: 226166 - DNA, 1098 bp, Homo Sapiens; identical to SEQ ID NO: 192089
  misc_feature (70)..(80): n is a, c, g, or t
  misc_feature (689)..(701): n is a, c, g, or t

SEQ ID NO: 226167 - DNA, 1070 bp, Homo Sapiens
gtacaaaaaagttgggccaagctgtgtgaagaaataggaaagaagaagttaccattaaccaaggatatgagagaacaaggagttaaaagcaatccatgtgactcaagcctttcacatactgacagatggtatctgccagtctcttcaaccctcttctcactttttaaaatcttgttccatgcctccaggtttatctttgtcttatctaccagtttattcctgtgaacttcagattgaaccattcattgcagcagtagccttaaaaaggcttttgtttatttctttggtttgttaactagtgtcatctatttagagaaacatttttgtttttaattgctcaaagctgtcgccgctagtcttatgagctatctactaaaactatggagaaactttgtatgtgcacacaaaagtattcaagagacagtattgctaacatctcatcttaatgtcttttgttattgagaagttttaggtgcttcaaaacaatataaatggataatagttgttatttggggaattgtaatgatgttggtgctgcttccttctaagagctcagacaagtaaagtatgaaacattcttatttcagttagatggggaacattttgctagcccattagaagcacacagaattatccttgtcctcctaatattgactttcaggaataaagttcagtgtgctgatcattcacaatacagtggatagcttgatatcttctgttttcccattgcagttgatttgagaagatgaaggtttaaatattgttgaaagttgcagttttttaaatgtgttcctttttcttctgtgaatatttagggcaatcgtgtcgctaatagaatagtagtagagggggtggggaggtaaattcctctgacttgccaagaaaaagaagggaaccacagtggatatgctagcattttagctgtgcaaagggaggtagtgtgggaaaaagtgtttccattctgggaaaagcccaaaccgaatacggtcagcagtcaactccagggtttgggcttgattcctgttgaataatagttttgagcagtctttgtggttaaataaattcttaaa

SEQ ID NO: 226168 - DNA, 1018 bp, Homo Sapiens; identical to SEQ ID NO: 192090

SEQ ID NO: 226169 - DNA, 1069 bp, Homo Sapiens
ctttgtacaaaaaagttggatttcaacccttgaaaactgcctagtccccatgactgtgtgcccaccgagctcctgagtgttctcattcctttacccacttctgcatagtagcccttgtgctgagactcagattctgcacctgagttcatctctactgagaccatctcttcctttctttccccttcttttacttagaatgtctttgtattcatttgctagggcttccatagcaaagcatcatagattgctgatttaaactgtaattgtattgccgtactgtgggctggaaatcccaaatctagattccagcagagttggttctttctgaggtctgcaaggaagggctctgttccatgcctctctccttggcttgtagaaggcatcttgtccctatgactcttcacattgtctttatgtacatctctgtgcccaagttttccctttttattaagacaccagtcatactggctcagggcccaccgctaatgccttaatgaaatcattttaacattatattctctacaaagaccttatttccaaataagataatatttggaggtattgggaataaaaactccaacatataaatttgaggaaggcacgatttcactcataacaatcttaccctttcttgcaagagatgcttgtacattattttcctaataccttggtttcactagtagtaaacattattattttttttatatttgcaaaggaaacatatctaatccttcctatagaaagaacagtattgctgtaattccttttcttttcttcctcatttcctctgccccttaaaagattgaagaaagagaaacttgtcaactcatatccacgttatctagcaaagtacataagaatctatcactaagtaatgtatccttcaaaatgtgttggtttaccagtgacaccccatattcatcacaaaattaaagcaagaagtccatagtaatttatttgctaatagtggatttttaatgctcagagtttctgaggtcaaattttatcttttcactaccagctctatgatcttaaataatttacttaatgtattttggtgtattttcct

SEQ ID NO: 226170 - DNA, 919 bp, Homo Sapiens; identical to SEQ ID NO: 192093
  misc_feature (168)..(213): n is a, c, g, or t

SEQ ID NO: 226171 - DNA, 449 bp, Homo Sapiens; identical to SEQ ID NO: 192094

SEQ ID NO: 226172 - DNA, 986 bp, Homo Sapiens; identical to SEQ ID NO: 192095

SEQ ID NO: 226173 - DNA, 1271 bp, Homo Sapiens; identical to SEQ ID NO: 192097
  misc_feature (101)..(152): n is a, c, g, or t

SEQ ID NO: 226174 - DNA, 1078 bp, Homo Sapiens; identical to SEQ ID NO: 192098

SEQ ID NO: 226175 - DNA, 941 bp, Homo Sapiens
  misc_feature (726)..(739): n is a, c, g, or t
ccaactttgtacaaaaaagttgggccgcttgccttgctctcagaatcgctgccgccatggctagtcagtctcaggggattcagcagctgctgcaggccgagaagcgggcagccgagaaggtgtccgaggcccgcaaaagaaagaaccggaggctgaagcaggccaaagaagaagctcaggctgaaattgaacagtaccgcctgcagagggagaaagaattcaaggccaaggaagctgcggcattgggatcccgtggcagttgcagcactgaagtggagaaggagacccaggagaagatgaccatcctccagacatacttccggcagaacagggatgaagtcttggacaacctcttggcttttgtctgtgacattcggccagaaatccatgaaaactaccgcataaatggatagaagagagaagcacctgtgctgtggagtggcattttagatgccctcacgaatatgaagcttagcacagctctagttacattcttatgatatggcattaaattatttccatatattatataataggtccttccactttttggagagtagcaaatctagcttttttgtacagacttagaaattatctaaagatttcatctttttacctcatatttcttaggaatttaatggttatatgttgtctttttttcctatgtcttttggctcaagcaacatgtatatcagtgttgactttttctttcttagatctagtttnnnnnnnnnnnnnnccacataacaattctttgaagaaaggaagggattaaataatttttttccctaacactttcttgaaggtcaggggctttatctatgaaaaagtagtaaatagttctttgtaacctgtgtgaagcagcagccagccttaagtagtccattcttgctaatggttagaacagtgaatactagtggaattgtttgggctgcctttta

SEQ ID NO: 226176 - DNA, 958 bp, Homo Sapiens; identical to SEQ ID NO: 192100
  misc_feature (748)..(761): n is a, c, g, or t

SEQ ID NO: 226177 - DNA, 988 bp, Homo Sapiens; identical to SEQ ID NO: 192101
  misc_feature (671)..(685): n is a, c, g, or t

SEQ ID NO: 226178 - DNA, 921 bp, Homo Sapiens; identical to SEQ ID NO: 192102
  misc_feature (706)..(719): n is a, c, g, or t

SEQ ID NO: 226179 - DNA, 1203 bp, Homo Sapiens; identical to SEQ ID NO: 192104
  misc_feature (183)..(241): n is a, c, g, or t

SEQ ID NO: 226180 - DNA, 749 bp, Homo Sapiens
ttggagcattttacccatttatttttttaaacattcaagaactgctgacgtactgtggatgtagagtataaaacttgaaaaatgcagatgttgaaggaataataggtatcttgtgctttaatactttatggcaggattgtactataagcaaatgaattaaacagctatgtaaatcataaagaaaaactaaaaatgaaccaaagtgaaaggataacttccaggcagtatctttctattgtaacctgttatttaaggaaatactagtgatttcttctaaataggatgtaaaacttctttcaaattactcttcctcagtcctgcctgccaagaactcaagtgtaactgtgataaaataacctttcccaggtatattggcaggtatgtgtgtaatctcagaatacacaggtgacatagatatgatatgacaactggtaatggtggattcatttacattgtttacacttctatgaccaggccttaagggaaggtcagttttttaaaaaaccaagtagtgtcttcctacctatctccagatacatgtcaaaaaaagaaaggtgtttgtgcttccgttttgtttctgctcagtaatatagtcaagcaagtttgttccaagtgacccattgagctgtgtatgcatttttgtttatttcaataaaatatatttgtattatttgtccttcatactatccatccataccacactatcttctgtatcaggtagtctaatagaaatatacctgttttgttct

SEQ ID NO: 226181 - DNA, 948 bp, Homo Sapiens
ttggcgtttgtggccctccggcctccctgacatgcagatttccacccagaagacagagaaggagccagtggtcatggaatgggctggggtcaaagactgggtgcctgggagctgaggcagccaccgtttcagcctggccagccctctggaccccgaggttggaccctactgtgacacacctaccatgcggacactcttcaacctcctctggcttgccctggcctgcagccctgttcacactaccctgtcaaagtcagatgccaaaaaagccgcctcaaagacgctgctggagaagagtcagttttcagataagccggtgcaagaccggggtttggtggtgacggacctcaaagctgagagtgtggttcttgagcatcgcagctactgctcggcaaaggcccgggacagacactttgctggggatgtactgggctatgtcactccatggaacagccatggctacgatgtcaccaaggtctttgggagcaagttcacacagatctcacccgtctggctgcagctgaagagacgtggccgtgagatgtttgaggtcacgggcctccacgacgtggaccaagggtggatgcgagctgtcaggaagcatgccaagggcctgcacatagtgcctcggctcctgtttgaggactggacttacgatgatttccggaacgtcttagacagtgaggatgagatagaggagctgagcaagaccgtggtccaggtggcaaagaaccagcatttcgatggcttcgtggtggaggtctggaaccagctgctaagccagaagcgcgtgggcctcatccacatgctcacccacttggccgaggctctgcaccaggcccggctgctggccctcctggtcatcccgcctgccatcacccccgggaccgaccagctgggcatgttcacgcacaaggagtttgagcagctggcccccgtgctggatgg

SEQ ID NO: 226182 - DNA, 1217 bp, Homo Sapiens
taaaagccaactttgtacaaaaaagttggcaaatggtgtcagtatggaccaattgtgtgaccatgagaaggatgcttattttttttaaaaagaaaacacatctaaaagcccaggaactgatttttttaagaggaaaactaatgacagtgtataactgatgtttaaattgtgcatttagtactatttaaatgttttcttatactagtattttatattcttttgttgtcgtttaaaactggagcttcagtgtctcttccctccctctaatagtaatggttcagtaagcactccttaactccttagtatttcatagaaaaatgactgcaacattaaagctaagaggaacacttcaacatatgtggtacaaatttatattgaagatctaaataaaccacgtattttccagtcttcgttgtgtgaagctaaatggtggctaaaaggaacactttttgtgtgattattataaactttgcattgtatttgaatcttagaacttttgtacacactaaatattgatgtcacaccatttctaatctgagcatccttagccagagaatattcattatacttcctaagtgagcaataatttaaatcagaagctattttattttaatgtaattaacctttctttacatttcttatgtgttcacctctaatctgttttaggaagagagttggttattatgttgatcccataatataaatcatatcctttatattttagaatatctcaaatgtattccttttttgtatggtgggtttgcctagggacgtgtaactacaggcttttactaagccaaggaaaaagagaatttttcttttcatcttacaaattccagatatctacaaaagatgtgaaagcactaaaaataccatttttaagcagtactttacctgttttttctttagcaaaccattttatgtggtgtaaaggtttgttatacgtgccacaatatagcatataaatattatgccatcattccttctcttgttaaaggtagaagaataaaattgtgatttttataacctgtgcttattactcaaatggtcttcaacatctttttaataacacatactttttgaatgttcagtttctattttgcttgaggtattttgtacatatgtgccttgtgattgctgctgctttaaaggataaagtactctttgggggaagagtctggtttgttttgttttattttttaatgaaataaacctat

SEQ ID NO: 226183 - DNA, 534 bp, Homo Sapiens; identical to SEQ ID NO: 192109

SEQ ID NO: 226184 - DNA, 1288 bp, Homo Sapiens
ttggctttgtttttcagagggctctgaactcctacttcgagcctccggtggaggagagcgccttggaacgccgacctgaaaccatctctgagcccaagacctatgttgacctaaccaatgaagaaacaactgattccaccacttctaaaatcagcccatctgaagatactcagcaagaaaatggcagcatgttctctctcattacctggaatattgatggattagatctaaacaatctgtcagagagggctcgaggggtgtgttcctacttagctttgtacagcccagatgtgatatttctacaggaagttattcccccatattatagctacctaaagaagagatcaagtaattatgagattattacaggtcatgaagaaggatatttcacagctataatgttgaagaaatcaagagtgaaattaaaaagccaagagattattccttttccaagtaccaaaatgatgagaaaccttttatgtgtgcatgtgaatgtgtcaggaaatgagctttgccttatgacatcccatttggagagcaccagagggcatgctgcggaacgaatgaatcagttaaaaatggttttaaagaaaatgcaagaggctccagagtcagctacagttatatttgcaggagatacaaatctaagggatcgagaggttaccagatgtggtggtttacccaacaacattgtggatgtctgggagtttttgggcaaacctaaacattgccagtatacatgggatacacaaatgaactctaatcttggaataactgctgcttgtaaacttcgttttgatcgaatatttttcagagcagcagcagaagagggacacattattccccgaagtttggaccttcttggattagaaaaactggactgtggtagatttcctagtgatcactggggtcttctgtgcaacttagatataatattgtaaaatgcttttcaagtgtgggttttgccctgattgttgcaaatacaatttccaccttctggaaaggtaggtttgctgtggaggaaataatgtactagatcattgtcacagaaaaaccaactatgatttatggttgtgttttcagaattcaacattaaagattaatgtttatttaaacgaacacattcctgcattcaggatgtgaggccatttaataaaaagggcacaaagcctgtcagagttttcaacggtgcttatagctgccagctggattccaaacaggtaccccattgtctctgagctaatgtttatatttttccattcaggcaccgaaatagtaatatttaaaa

SEQ ID NO: 226185 - DNA, 751 bp, Homo Sapiens; identical to SEQ ID NO: 192114

SEQ ID NO: 226186 - DNA, 1057 bp, Homo Sapiens; identical to SEQ ID NO: 192116
  misc_feature (265)..(285): n is a, c, g, or t

SEQ ID NO: 226187 - DNA, 1086 bp, Homo Sapiens; identical to SEQ ID NO: 192117
  misc_feature (285)..(305): n is a, c, g, or t

SEQ ID NO: 226188 - DNA, 1034 bp, Homo Sapiens; identical to SEQ ID NO: 192119
  misc_feature (158)..(193): n is a, c, g, or t

SEQ ID NO: 226189 - DNA, 637 bp, Homo Sapiens; identical to SEQ ID NO: 192121
  misc_feature (398)..(433): n is a, c, g, or t

SEQ ID NO: 226190 - DNA, 880 bp, Homo Sapiens
  misc_feature (612)..(625): n is a, c, g, or t
gctccagtttttcagaagaagtgaagtcaagatgaagaaccatttgcttttctggggagtcctggcggtttttattaaggctgttcatgtgaaagcccaagaagatgaaaggattgttcttgttgacaacaaatgtaagtgtgcccggattacttccaggatcatccgttcttccgaagatcctaatgaggacattgtggagagaaacatccgaattattgttcctctgaacaacagggagaatatctctgatcccacctcaccattgagaaccagatttgtgtaccatttgtctgacctctgtaaaaaatgtgatcctacagaagtggagctggataatcagatagttactgctacccagagcaatatctgtgatgaagacagtgctacagagacctgctacacttatgacagaaacaagtgctacacagctgtggtcccactcgtatatggtggtgagaccaaaatggtggaaacagccttaaccccagatgcctgctatcctgactaatttaagtcattgctgactgcatagctctttttcttgagaggctctccattttgattcagaaagttagcatatttattaccaatgaatttgaaaccagggcnnnnnnnnnnnnnngggtgatgtaaaaccaactccctgccaccaaaataattaaaatagtcacattgttatctttattaggtaatcacttcttaattatatgttcatactctaagtatcaaaatcttccaattatcatgctcacctgaaagaagtatgctctcttaggaatacagtttctagcattaaacaaataaacaaggggagaaaataaaactcaagagtgaaaatcagaggtgtaataaaatgttcctcggcattcccccccgc

SEQ ID NO: 226191 - DNA, 863 bp, Homo Sapiens; identical to SEQ ID NO: 192123
  misc_feature (256)..(269): n is a, c, g, or t

SEQ ID NO: 226192 - DNA, 1272 bp, Homo Sapiens; identical to SEQ ID NO: 192124
  misc_feature (591)..(604): n is a, c, g, or t
  misc_feature (860)..(875): n is a, c, g, or t

SEQ ID NO: 226193 - DNA, 1044 bp, Homo Sapiens; identical to SEQ ID NO: 192125
  misc_feature (773)..(786): n is a, c, g, or t

SEQ ID NO: 226194 - DNA, 877 bp, Homo Sapiens; identical to SEQ ID NO: 192126
  misc_feature (606)..(620): n is a, c, g, or t

SEQ ID NO: 226195 - DNA, 384 bp, Homo Sapiens; identical to SEQ ID NO: 192127
  misc_feature (271)..(288): n is a, c, g, or t

SEQ ID NO: 226196 - DNA, 1371 bp, Homo Sapiens; identical to SEQ ID NO: 192130

SEQ ID NO: 226197 - DNA, 858 bp, Homo Sapiens
ccctggagcagtcctgactcggcaggggatgcagactgaggggcagcattcccctcaagacctccccttctctctgtctcgaaaggagctggagaacccgtagtgcaaatctgtggaccactcagttatggagggaggcagtgcccaaaagtggacattggggtgcatcccttccaccacctcggcatccaccgctgtcctcagtacagccgcttttcgtaagagtgcaggccatggacaccaccctcaatctgggccgacatggtccgcttctcaaacttgagctctcctgagtacatcatggaccgaaggacagacaggctgcgggccccgatatcctggcagccgtgttggatgcctgctatgaggtagggcacgaacttctgaatggatcctttgtcctggatggagcccgagacaccctgcgcgatcttcactttatccccctcgctgaagtatcgtttctggctgctgctgctcttctccatggcatccagtgagcccatgccccggtacttcttgagccgcaccccgtctgagaagaagtactcgccaggggcctccgtagtggcggccagcagggagcccatcatcactgtggaggctccaagggccagggccttgaccacgtgtcccacggtctggatgccgccatcggctatgatgggcacaccaaagcgccgggcatactcagccaccttgtacacagcagtgccctggggccgaccacaggccatcacttcctgggtgatgcagatggagccgcagcccatgcccacgcgcagcccgtccacaccagcatcaatcaggttcttggcctgggctgctgtcaccacgttccccccaatcacctgccaa

SEQ ID NO: 226198 - DNA, 1030 bp, Homo Sapiens; identical to SEQ ID NO: 192131
  misc_feature (945)..(953): n is a, c, g, or t

SEQ ID NO: 226199 - DNA, 1505 bp, Homo Sapiens
aaatggggaggctgagagagcggtgctgggtacaaaggccgaacgggctgcagctgggaggtgacggcagatgcctggggataagcgtaggcttgcatattgcatagggctgaaaggattgggcatttccagatacagctgagtgggaatcgagagatgacacttgcattaaggcagcagaaggtgcctggagcccagtaacagatggctgaggtgcctgtgaggtcatctgtggtaacgctggatgggccggctgaagagagggctggacggacggagtcaccacaggctgcccacctccttgcagagtgttcacatcttcgatttctgaatcattggaatccagctgtggtggaaggatgggcagcatgggctggcccattttagccatccgagagatcaacttggctttgactgcatcgggacttgtatttattgcaagttgttcactgagggagttagatttggtacgaagagctggctcccctgatttgaaaggtattgatgtgggtggtgacacaacaggatcagcagagaggttgtcagcaccagggatgggagacggagctgcagaatcgcgggaactaacactgtgaccatcagagccagaatctctggcaaacttcacccgcctaacctccacctcgaacaccaggatcgagtccgttgcttgagtccagcctattaccccttctgagccaacagcacaggctggagggacaataagcaatcgctttcctccttttttcatgcccagcattccatcctcccagcccttgatgacttttcctgatcctaacttcaagcgaagcaacttatctttgttagcagtggagtcgaaaacctggcccagcacatgattctgaaagagccagccggtataggccacttccaaagaatctccaacttctacagcagggccgtctgccacaatgaggtcctgggagagcactgcatccagggaagaggtactgttgcacttagcaatgcacacctgcttattgaactccacagcagccttttccgactcaaacatgatggaccagttctgtctctggtcatcataaaaggtgctatagttattgggccgaaccattagctcaaagttcacatgaatcctagcaaccgtaactggctgttgttgactgatataaagaagaatcctatactctctggctgtgtggttccccagaactgcagcaccaaatttgccctgctttacatattgaccatttgtgtatcgatatgcatggactgctgttgcgaccagtattgtgggagtgctcatggtggctggtgctgtttttggtgttgcctgatttcctgttgctgccgttccctggcctttcttaggctgttttggggctgtgtactggaaaaattcatttccatggccagcagctgcctgatccagtccaaaaagtgaggccaatctggcaccgccgctcggcgagaggaaatcggtgtcgtcctcgtcccccgcaccgaacattgcgttggcccaa

SEQ ID NO: 226200 - DNA, 962 bp, Homo Sapiens
ttggctcccatctcccgctattcctaggcaaagagcctcatggctaaggcagcctcaaagccagcccctcctcccacctattctgagtagctgcagaggccttgggtccaggctctaggttcatccctcagttggggggaacgtaggacccagctggagcctcttgagggagatgagaggcctctttgtgaggaggacattagctgtgtggcctctctctctttggccctgtttccttttttgcaaaacaaggacattttctgcagccccttcctctcagtgagctatgattggagggcttaggtctggaggattcaagagtggaagaggaatttaaggggtcccctagtctagtctctgcccctggatagtgtccagccttgtatatttctgaagaggtggatcccagagtggctctgatgtccacattagaaaaacttacttgtaatgatcatgtcagccttcagaagagaatccccaccaacttctgtgcctcctcagatggggatttatctggatctctgtggttccttctcagccgaaacaggtccagtatcccagtcatttcttcaaatgctgataggggtatgttggaatccgaagccacttccccgccttcaagccccagatgggctgctctcctgtaactttctaggagaagagacattttcttctttccctttcctggtccatccctgcaccctggtcctctcccagcctctcccccacattgtccctgactctaggggcacatccagtctccatcgtgctgcagcagctggactgagggcagagcctgtagtgcagaggccctggctcccgaggtccagccactctccctggggcctctggggtgagagcagcttccgataggacctgcccagatttctgcatgtgcacttttgtttactgaaagagagaaaggggggggtcacagcaacatgccctggccctttctgctc

SEQ ID NO: 226201 - DNA, 983 bp, Homo Sapiens
gaaaatgtttcacttcagctcattcccaagtctctatgaagcccgccccacttccacataggggaactgtggctctgggggcagctggcttagggaaaggcctcccatggccaagaagacgatggtggagaggagggggagggcagcagggcaaagcctttggggagggtcagcaaaggggccccctgcccttggctaatggatccgagttagctcctccacaaccttgatgaggtcgtctgcagtggcctctcgcttcataccgctgccatcgtcatactgtaggtttgccaccacctcctgcatcttggggcggctaatatccaggaaactctcaatcaagtcaccgtcgatgaaacctgtggctggttctgtcttccgctcggtgtgaaaggatctccagaaggagtgctcgatcttccccacacttttgatgactttattgagtcgattctgcatgtccagcaggaggttgtaccagctctctgacagtgaggtcaccagccctatcatgccgttgaccgtgccgaagagcaccgagccttgtgtgggggtggaagtctcacccagattctgcattaccagagagccgtggcaaaagacattgacaaactcgcccaggtggaaaagaccaacctcctggaggtgctgccgctcctcgtcagtggtggcagcgctatccttttgacacacaaacaagttaaaggcattttcagcccccagaaaattgtcatcatccaagatttccacagcactcatccagttgggattaaagtctcgagcaatctcttcaaagtttccttccatgggcttgtaggcaagcagcagcactgagcgcataaggtcgcccaccaggatgaagtcgcccttggtcttcaggtagagggccatgatgttgttgtagtggttgcactcagtgcgcagctccttctctgttgtccactcatagagccgcaccgtgctattgatgctggctaacccaa

SEQ ID NO: 226202 - DNA, 1533 bp, Homo Sapiens
gcccttgccagttccgggaattaaggaatgaggttgcaggactgctttcagccagctccagctggggccgtggggtcagagcccaagcttccatgatcatttgatgacttccaggcaggtgggggtcggagatctccagtaatgagtgacacgtctggggtttcccacagctctgactcaggtggtgggagagccacgtggaagggagagccaggcaataagtccgcataatgtgtgaggtggggagccaggcctggaggtggccaggcagggttgcaggcagcttccagctcacatggtgccagtataggctggaagaagctaccagaaagctggggggctagagcacccagaggacaggctaatagcacaaagacatccacctcagggaagttggcaagcttggcaggggtgggccgccccagggccaacacatagctacgcttgccagcagcctgagtcaggttccgcaagtgggccagtgcctcacggtgttgggctacacccagtgtgcctgccagcagccctaccacgcgggcatctctggccctctctaccagatatcgtcttcgtgcccttagccgtccagcccgggcaccctcatcctgagtcttccctgtatctggacagcaggaggagaagggttgacctggtgcccaccccaagagcagccgactcaggtctgggtcaaggtctgggtcagggctggccttagagccccctacatagaaggcaccatactcttctagacgcctccctggggcaagggggaagcggcgcccaaaacgctctaggggcataggctctggactcagggaacccactggttggggaaaagctgggctggagactagcaggtccaggtaccgtgggcgcaggagagtagccaaagcctccagggcatgggcacaggccggctcactcagcagcaccacaggcgctttggggtctgggttctgggcctcaaaggccttgacacagagctccaaggccacagaacgttgacgaagcacgaaggcaacgggcagtgggcgggctggagggcttaagcaggcagggccaaaatgtatgagagcctgagctccagcttgctcagcacccagcacatccacgcagcagctgccgtaggctgtgtcacccagaatgaacatctttgaccctgtcgtctcctccagtcgtgcagccacagccacagcatctcccaatagctggtcagggaactgcaaggcaactcgttcacaccccaggtcgcggacaaatccagcgactcgctccagctcgtacactccgtccaggtccggaagaggagtaagcagtcctggcaccccggtctctcgctgcagcgccgcctcggcagggctgctaaacatcgactccatgaggcacagcttgggtggtgggatgcagcggggacctccctgggacagcttcggggcctgagtcctctagagcagccctcagggggtcaaaatcgccttgtgggggtagggggaatcacagtcggccttcagccggtgagtatccccttcccaa

SEQ ID NO: 226203 - DNA, 920 bp, Homo Sapiens
ttggggcttttgggtctgttacccaaagaatgataaagttggttttatttcaagaagtcgatcaaaaagaaagccccagcgctctagagctcagctgacgggaaagggggtgcgcagcctcgagtttgagagctacccggagctccaagacaggggtgggttccagctgcccgcacgccccgaccttccatcgaccggaccatgggaaccccaaagccacggatcctgccctggctggtgtcgcagctggacctggggcaactggagggcgtggcctgggtgaacaagagccgcacgcgcttccgcatcccttggaagcacggcctacggcaggatgcacagcaggaggatttcggaatcttccaggcctgggccgaggccactggtgcatatgttcccgggagggataagccagacctgccaacctggaagaggaatttccgctctgccctcaaccgcaaagaagggttgcgtttagcagaggaccggagcaaggaccctcacgacccacataaaatctacgagtttgtgaactcaggagttggggacttttcccagccagacacctctccggacaccaatggtggaggcagtacttctgatacccaggaagacattctggatgagttactgggtaacatggtgttggccccactcccagatccgggacccccaagcctggctgtagcccctgagccctgccctcagcccctgcggagccccagcttggacaatcccactcccttcccaaacctggggccctctgagaacccactgaagcggctgttggtgccgggggaagagtgggagttcgaggtgacagccttctaccggggccgccaagtcttccagcagaccatctcctgcccggagggcctgcggctggtggggtccgaagtgggagacggacgctgcctgga

SEQ ID NO: 226204 - DNA, 1214 bp, Homo Sapiens
cctataaaagccaactttgtacaaaaaagttggcccttatttaaccaagtgaattccatactaaaactaggaatgaaagtgagagatttctaaacttttgcgaaagtgggtcattttttgtttgactataatagcaggaagaattatagcaatctgtcattttacctgaaacagacaagcctatgtattatgaatactttcaagcttccctttggaatatacaagacatgcgtttggagttacctttgtttttctatcgtaaatttagattctggaattggggtttggtggtgcaatgtgttgctcacaagtggccagaactcctattcctaaaaggattttgagatggaggaacacatatttaattcccctttatgccttggttcttgctcctctttccacgttggataacaattttttggttgttttgtttaagttggtgctctgaagcttaatctcagtaccctttactctgaattgtcaaattttgataaaacgtgccattttctttggtaagagaaagcaggtcttaatgtctgccagaacacaatttatatgccttattggcttcattaaacttttagaaaactttagcatttgttacttttttccattgcatttactttcaaatgcacctaatgaatttgtcacccagtcgcaacttttcccttctctgtcccattgctttctcctttccccgacgcacagaataaacatgaagctcagcagtagaagcgtaatgatttccctcaggaaaaacttctgacagctaggtttttcaagggtttccctgtgctagctgagatgcaaaacaaatcatggaagattgcatacctgtgtggtattttaaaaacaagttgactttttcagtttcttgaacggttaagggtggatttaaaaactagacagtttagttttggggaacagaagctctcttcgtcttaagccagattctctgattcttttagacgtcatagctccttagttctgctcctgtcgccctaacttggcatgggcaagttgaagttcatccttagactgcagcgttctgagcatggctgaagtattaaaatgtttaatattttttagagcaaaattgatggaaagcatttggctgaatctaaggacctgcagtcagattcttcaatgtggtttacccaactggagtagtgatacacatcttcatcataaaatgaataaaaatcaaaaacacc

SEQ ID NO: 226205 - DNA, 1412 bp, Homo Sapiens
ttggggcccggccgcggctgagtcttcccagggtcagggtcaggcgctttgctgagtccctttgtggccgccatggacaattccgggaaggaagcggaggcgatggcgctgttggccgaggcggagcgcaaagtgaagaactcgcagtccttcttctctggcctctttggaggccattaactgtttgatgcgagcaatcgagatctacacagacatgggccgattcacgattgcggccaagcaccacatctccattgctgagatctatgagacagagttggtggacatcgagaaggccattgcccactacgagcagtctgcagactactacaaaggcgaggagtccaacagctcagccaacaagtgtctgctgaaggtggctggttacgctgcgctgctggagcagtatcagaaggccattgacatctacgaacaggtggggaccaatgccatggacagccccctcctcaagtacagcgccaaagactacttcttcaaggcggccctctgccacttctgcatcgacatgctcaacgccaagctggctgtccaaaagtatgaggagctgttcccagctttctctgattcccgggaatgcaagttgatgaaaaaattgctagaggcccacgaggagcagaatgtggacagctacaccgagtcggtgaaggaatacgactccatctcccggctggaccagtggctcaccaccatgctgctgcgcatcaagaagaccatccagggcgatgaggaggacctgcgctaagccccacccagccccccagtgcccgtcttcctgtcccatctgctcagagagaggtggggccgagacttgctggagagcttccctcctttcccatctggggagtcccgcgggccacagtgggcaggtggcaccgggggtcagcatgcaggggcgccagaggcccaggctgctggccggacagtcaccctctgttctcgctacatcccttgccccctgtccatttatttaagcccccataggtgcccttcacccccaaaaccagctgtacagaatctttgatacagacctatttgctaggggtgctgccggggatttggggtcagcatctggccccctatctcctgaccagctgagtcatgaggccggtttctctctctctcccacttttgtcccccagccaagctctaaagcacatgtagccgctgagacctgctgtttctgctgggggcaggctcctcttcccccagccccgggagcctcccccagcttcctgcagccccgacctctcaggttagaccctgggccctggagcttaggggattctccccaccccagccccacacctgctccttccctaatgctttgaggttttcttggttgaagctgcagctggcccaagaaagaaaataaaaaacaacacttttgcatg

SEQ ID NO: 226206 - DNA, 926 bp, Homo Sapiens; identical to SEQ ID NO: 192140

SEQ ID NO: 226207 - DNA, 1003 bp, Homo Sapiens
actttgtacaaaaaagttggctgaaaggtctggggagaaggcgccgtgtccgggtgtggagaggggcgtcgtggaagcgagaagagtggcccgtccctctcctccccctttccctctttcggaaagtggtttctgcggggcccgggagcctcggagtaccgaacctcgatctccggggcggggtccttggtggggactgagcgccccctcccggggacgggcggtctggccgcggagtcccctgcgggagcgtgattggctggaaacggtcccgaacccccaggggagcccgatccctgggggaccctggcttcggactccagtatctgtcgtcgcagggtccctgccctagtggcctatgtcccttgctcggggccatggagacactgcggccagtacggcggcgcctctgtctgaagaaggggaagtgacctccggcctccaggctctggccgtggaggataccggaggcccctctgcctcggccggtaaggccgaggacgagggggaaggaggccgagaggagaccgagcgtgaggggtccgggggcgaggaggcgcagggagaagtccccagcgctgggggagaagagcctgccgaggaggactccgaggactggtgcgtgccctgcagcgacgaggaggtggagctgcctgcggatgggcagccctggatgcccccgccctccgaaatccagcggctctatgaactgctggctgcccacggtactctggagctgcaagccgagatcctgccccgccggcctcccacgccggaggcccagagcgaagaggagagatccgatgaggagccggaggccaaagaagaggaagaggaaaaaccacacatgcccacggaatttgattttgatgatgagccagtgacaccaaaggacttcctgattgaccggagacgcaccccaggaagctcagcccggagccagaaacgggaggcccgccctggacaaggtgctgtcggacatgaagagacacaacaagctgga

SEQ ID NO: 226208 - DNA, 1558 bp, Homo Sapiens; identical to SEQ ID NO: 192143

SEQ ID NO: 226209 - DNA, 929 bp, Homo Sapiens; identical to SEQ ID NO: 192144

SEQ ID NO: 226210 - DNA, 1077 bp, Homo Sapiens
ttaaaaaagaagcatttcttgggaagtcaggatttattaagaacatcgggatcccagatatttctttttttaccatataccttaacatttgggggattttgattcccacaaaaacctctatcatttaaaaccagatattcgaattacaaggctaacatttttagctaatcaactcttcagtgctgatcccagaaaatagcctccaatgggtctttgagtcatggaaatggacaactttcagccattgacatgagtggtgtcggtggtcacacctttaacattcaagccacaagctctaaagtctggaaagggtgaggtctactgtcctgcattgtcgccatctgctgtcgtattttcagtgctaatggactgtacgttgtctgcaaggttgtgtgcatgctcaagaaacaaatctttgagtacacttaattccttggtcagcaatttgatttttgcttccaaccgttcattctcttctttgagctgattgactctctgcagtgtgtcttgtgctttctgcttgcttttcaaccggctctttttcacagccatgttgttcctctctcggcgttgccgatactcgtcactgtttcgatccatgggcgaactctttttgctctgcttgctgggagccacagctttgcctcctcccccagggccagcaggcaccagctgaggaacctgctgtaagccgctggcatgtgcctgggtatggataacactaattccgttcacccctggagtgctgttttgctgcgatatcttgctcatttgggcactctcccttgccaacacagaacaggtagaaatgagagcagggtgatcaatggtttccacgctaagctgccaaaaaatcttcacatgtacctgctcctctagcccgcctgcccccaggcggcctccactccgagcggccccgcgcggtgcggcccgagccgacccaggcctcacagcccgcgagtcagcgaggaggagcgacggttacgaaaccggcagcctccgcccgttccgcagccgcggccaccggcttcccctgctcgccggggccgcgcgcgccgccgccgccatcccggccaa

SEQ ID NO: 226211 - DNA, 954 bp, Homo Sapiens
ttgggtcagcttccccagcttcagacttagttcatggtttcccccttggccttgcactaacgctctctcttccttttcctttgcccctctgacctgcctggactgctcccgctctgccagagatcacctcctacaccactggattgccctgctggctgactgccccatcactgcacacatgtatgaggatgtggcactgatcaaagaccatacacttgtcaattccttgattcgtgtgctgcagacattgcaggagttcaacatcacgctggagacgtcccttgtcaagggcatcgacatctgacctcccagcaccagccagcagcaggactgagaaagactcaccctgcagctctgaccttttttcccaaagggacttaagcgattgtgcaggagtaggagacaaaatgtacactcactgtaaaaagaaaactagaggatttttggaataaataatctattttagagtttatttgctgatttgctttttacacactttcatgtgaaagagtgatagggagagggagcgaggctggtgccgcttattttgaagctggtgccctccctcgccgtggccacatgctggaagcctgaggcctccctggactgagcctgtggcactgcgtgcgggacagttatgtttccttgccccgtcgcattaatgaggcccttccacatcatttttaaactaatgtttttctatattaacattattatggatatttggctttcataggccacacacaggtgtgctgcgcgggaagccccatgctccaatcaaagggatttttagtagtgcctctaagcaagcaccgatgagtcagtcccacgtattttcttttttgtcagtattgtttgggaaggagacatgccgggatgtgtcatcgtgccaaataccacatttcctgttggcacagtttcacagaagtaaacataagcatggttttaacaagg

SEQ ID NO: 226212 - DNA, 1280 bp, Homo Sapiens; identical to SEQ ID NO: 192147

SEQ ID NO: 226213 - DNA, 925 bp, Homo Sapiens; identical to SEQ ID NO: 192148

SEQ ID NO: 226214 - DNA, 926 bp, Homo Sapiens; identical to SEQ ID NO: 192151

SEQ ID NO: 226215 - DNA, 1137 bp, Homo Sapiens
  misc_feature (1008)..(1018): n is a, c, g, or t
aattgatgagcaatgcttgaccttattaaaagcccctttgtacaaaaaagttggtgaaaacctgcatcaaacgggtgcagaaaagatacatctttgataatgtcgccaaagtctggaaggattatgatagggacaaggatgataaaatttcctgtggagaatacaaacaagccacctatggttactacctaggaaaccccgcagagtttcatgattcttcagatcatcacacctttaaaaagatgctgccacgtgatgagagaagattcaaagctgcagacctcaatggtgacctgacagctactcgggaggagttcactgcctttctgcatcctgaagagtttgaacatatgaaggaaattgtggttttggaaaccctggaggacatcgacaagaacggggatgggtttgtggatcaggatgagtatattgcggatatgttttcccatgaggagaatggccctgagccagactgggttttatcagaacgggagcagtttaacgaattccgggatctgaacaaggacgggaagttagacaaagatgagattcgccactggatcctccctcaagattatgatcacgcacaggctgaggccaggcatctggtatatgaatcagacaaaaacaaggatgagaagctaactaaagaggaaatattggagaactggaacatgtttgttggaagccaagctaccaattacggggaagatctcacaaaaaatcatgatgagctttgatagacactcaccagaatatggcagactgtcataggcattctgttattgtcttggattgttgctacaattgtctaatttacagcagttgtgatcccacaaaaagcaagtttatacctcagattggggtataaaaattgtttttcgctcagtatttactggaaaatggacatcactagtctttcagtaagatttctctcaaaacacgtgaaaaccttgggtaaattgcaattctttctggggatatattggtacaacatgacttaaaacnnnnnnnnnnnctattaaaacttaaagggaacaaaacttgaaaaagccctgttcttcagaagtgagtgggttgaagggaagcagtaatatgaagtgactgctgtgtaattttaactaccagaatttttta

SEQ ID NO: 226216 - DNA, 966 bp, Homo Sapiens
tgtacaaaaaagttggggaggagtgcctcaagaaatgtgccactgtcacagagaatgccacgggtgacctggccaccagcaggaatgcagcggattcctctgtcccaagtgctcccagaaggcaggattctgaagaccactccagcgatatgttcaactatgaagaatactgcaccgccaacgcagtcactgggccttgccgtgcatccttcccacgctggtactttgacgtggagaggaactcctgcaataacttcatctatggaggctgccggggcaataagaacagctaccgctctgaggaggcctgcatgctccgctgcttccgccagcaggagaatcctcccctgccccttggctcaaaggtggtggttctggcggggctgttcgtgatggtgttgatcctcttcctgggagcctccatggtctacctgatccgggtggcacggaggaaccaggagcgtgccctgcgcaccgtctggagctccggagatgacaaggagcagctggtgaagaacacatatgtcctgtgaccgccctgtcgccaagaggactggggaagggaggggagactatgtgtgagctttttttaaatagagggattgactcggatttgagtgatcattagggctgaggtctgtttctctgggaggtaggacggctgcttcctggtctggcagggatgggtttgctttggaaatcctctaggaggctcctcctcgcatggcctgcagtctggcagcagccccgagttgtttcctcgctgatcgatttctttcctccaggtagagttttctttgcttatgttgaattccattgcctcttttctcatcacagaagtgatgttggaatcgtttcttttgtttgtctgatttatggtttttttaagtataaacaaaagttttttattagcattctgaaagaaggaaagtaaaatgtacaagtttaataaaaaggggccttccc

SEQ ID NO: 226217 - DNA, 970 bp, Homo Sapiens; identical to SEQ ID NO: 192161

SEQ ID NO: 226218 - DNA, 1016 bp, Homo Sapiens; identical to SEQ ID NO: 192162

SEQ ID NO: 226219 - DNA, 969 bp, Homo Sapiens; identical to SEQ ID NO: 192163

SEQ ID NO: 226220 - DNA, 930 bp, Homo Sapiens; identical to SEQ ID NO: 192164

SEQ ID NO: 226221 - DNA, 1396 bp, Homo Sapiens
atgagctaccacacctggtttggagagtcttaattaaggaaatttccctaatgttcatttattttctaaatccagaccgtgtttcagaataatccttacttgagagtagccattttcttgcctgtacttgtcagaactagaggaaatagccaagactaatgaaaaagattactctaacccttaaaagacttttaaattcactactagagtggtcattttaaaaatacatccatgttttaacttatttgagccttctttatgagtaaatgattcctccttgttctgtctttcaaaccagctaaatatttgtcacaaaagtgcttttttctcactgttgcctattttcatatatcaggttttaaatagttttaattttttaataaaattttctctacgttctatatgcaattgttatatatctatttgaatagctgaaggactaaaatacttttttaagagataacttcaggaaaccattatattttactatctgcatgctgttaactgtggtacactgtgaaatatgttgattacaaacccattcattacatagtataaggaattcacagtatattgactatatagtgtctaatgatcttgggcagatactgtcaaacttacaatatctatatagatgtaggtctttttaaatttacctagtcattcttctatcatgtatattgatgctgaaagaggaactggtcagctcctctggacaacaaattcttagtctataatattaggagacatcttctgttttgcaaatgtctgtgaatctgagcaacctggcattctgcttactggccagaaagctggcgggtgacatttgtaacatttcctctttgagactctgagttcacctagagaagtctaagcataacagctttctttcccagcacgagcctttatagctctctttagctcaaccactctgtccatccagccaatggatgtcccttcccctgtaccccaatttcaagcttattttaggaagccttgaactaccatgtatcctggctcctagctgagtttattagaggtatggagcagtgcaacttaaactcaagttgcacttacattttgaattttaaaatgatggttttatctgttgtgtgaagtggttcacccttgaggaccaggagcctccatatcctgactgaaaaccttttctgagacttagagtaacagtgcttttggttccttgagttctcctgtctccagataccaaatgaccttgacttttctgccttgtgaattcgtagtccaatcagctgaaattaaatcacttgggagggacgcatagaaggagctctaggaacacagtgccagtgcagaagtttctccaggtggcctccctttccaacaatgtacataataaagtgtatgcactttcact

SEQ ID NO: 226222 - DNA, 1047 bp, Homo Sapiens
  misc_feature (783)..(783): n is a, c, g, or t
ttggctgctggtggtgctgctgctgcttctgaggcactggggctggggcctgtgccttatcggctggaacgagttcatcctgcagcccatccacaacctgctcatgggtgacaccaaggagcagcgcatcctgaaccacgtgctgcagcatgcggagcccgggaacgcacagagcgtgctggaggccattgacacctactgcgagcagaaggagtgggccatgaacgtgggcgacaagaaaggcaagatcgtggacgccgtgattcaggagcaccagccctccgtgctgctggagctgggggcctactgtggctactcagctgtgcgcatggcccgcctgctgtcaccaggggcgaggctcatcaccatcgagatcaaccccgactgtgccgccatcacccagcggatggtggatttcgctggcgtgaaggacaaggtcacccttgtggttggagcgtcccaggacatcatcccccagctgaagaagaagtatgatgtggacacactggacatggtcttcctcgaccactggaaggaccggtacctgccggacacgcttctcttggaggaatgtggcctgctgcggaaggggacagtgctactggctgacaacgtgatctgcccaggtgcgccagacttcctagcacacgtgcgcgggagcagctgctttgagtgcacacactaccaatcgttcctggaatacagggaggtggtggacggcctggagaaggccatctacaagggcccaggcagcgaagcagggccctgactgctcctccggcnctctctctcgggctctctcacccagcctggtactgaaggtgccagacgtgctcctgctgaccttctgcggctccgggctgtgtcctaaatgcaaagcacacctcggccgaggcctgcgccctgacatgctaacctctctgaactgcaacactggattgttcttttttaagactcaatcatgacttctttactaacactggctagctatattatcttatatactaatatcatgttttaaaaatataaaatagaaattaagaatca

SEQ ID NO: 226223 - DNA, 1009 bp, Homo Sapiens; identical to SEQ ID NO: 192166

SEQ ID NO: 226224 - DNA, 1218 bp, Homo Sapiens
ttggcgagagggagacggacgttgagagaacgaggaggaaggagagaaaatggcgtccacggattacagtacctatagccaagctgcagcgcagcagggctacagtgcttacaccgcccagcccactcaaggatatgcacagaccacccaggcatatgggcaacaaagctatggaacctatggacagcccactgatgtcagctatacccaggctcagaccactgcaacctatgggcagaccgcctatgcaacttcttatggacagcctcccactggttatactactccaactgccccccaggcatacagccagcctgtccaggggtatggcactggtgcttatgataccaccactgctacagtcaccaccacccaggcctcctatgcagctcagtctgcatatggcactcagcctgcttatccagcctatgggcagcagccagcagccactgcacctacaagaccgcaggatggaaacaagcccactgagactagtcaacctcaatctagcacagggggttacaaccagcccagcctaggatatggacagagtaactacagttatccccaggtacctgggagctaccccatgcagccagtcactgcacctccatcctaccctcctaccagctattcctctacacagccgactagttatgatcagagcagttactctcagcagaacacctatgggcaaccgagcagctatggacagcagagtagctatggtcaacaaagcagctatgggcagcagcctcccactagttacccaccccaaactggatcctacagccaagctccaagtcaatatagccaacagagcagcagctacgggcagcagagttcattccgacaggaccaccccagtagcatgggtgtttatgggcaggagtctggaggattttccggaccaggagagaaccggagcatgagtggccctgataaccggggcaggggaagagggggatttgatcgtggaggcatgagcagaggtgggcggggaggaggacgcggtggaatgggcagcgctggagagcgaggtggcttcaataagcctggtggacccatggatgaaggaccagatcttgatctacgcccacctgtagatccagatgaagactctgacaacagtgcaatttatgtacaaggattaaatgacagtgtgactctagatgatctggcagacttctttaagcagtgtggggttgttaagatgaa

SEQ ID NO: 226225 - DNA, 942 bp, Homo Sapiens; identical to SEQ ID NO: 192175

SEQ ID NO: 226226 - DNA, 1492 bp, Homo Sapiens
actttgtacaaaaaagttgggtaagatggcggcgctgagggctttgtgcggcttccggggcgtcgcggcccaggtgctgcggcctggggctggagtccgattgccgattcagcccagcagaggtgttcggcagtggcagccagatgtggaatgggcacagcagtttgggggagctgttatgtacccaagcaaagaaacagcccactggaagcctccaccttggaatgatgtggaccctccaaaggacacaattgtgaagaacattaccctgaactttgggccccaacacccagcagcgcatggtgtcctgcgactagtgatggaattgagtggggagatggtgcggaagtgtgatcctcacatcgggctcctgcaccgaggcactgagaagctcattgaatacaagacctatcttcaggcccttccatactttgaccggctagactatgtgtccatgatgtgtaacgaacaggcctattctctagctgtggagaagttgctaaacatccggcctcctcctcgggcacagtggatccgagtgctgtttggagaaatcacacgtttgttgaaccacatcatggctgtgaccacacatgccctggaccttggggccatgacccctttcttctggctgtttgaagaaagggagaagatgtttgagttctacgagcgagtgtctggagcccgaatgcatgctgcttatatccggccaggaggagtgcaccaggacctaccccttgggcttatggatgacatttatcagttttctaagaacttctctcttcggcttgatgagttggaggagttgctgaccaacaataggatctggcgaaatcggacaattgacattggggttgtaacagcagaagaagcacttaactatggttttagtggagtgatgcttcggggctcaggcatccagtgggacctgcggaagacccagccctatgatgtttacgaccaggttgagtttgatgttcctgttggttctcgaggggactgctatgataggtacctgtgccgggtggaggagatgcgccagtccctgagaattatcgcacagtgtctaaacaagatgcctcctggggagatcaaggttgatgatgccaaagtgtctccacctaagcgagcagagatgaagacttccatggagtcactgattcatcactttaagttgtatactgagggctaccaagttcctccaggagccacatatactgccattgaggctcccaagggagagtttggggtgtacctggtgtctgatggcagcagccgcccttatcgatgcaagatcaaggctcctggttttgcccatctggctggtttggacaagatgtctaaggacacatgttggcagatgtcgttgccatcataggtacccaagatattgtatttggagaagtagatcggtgagcaggggagcagcgtttgatcccccctgcctatcagcttcttctgtggagcctgttcctcactggaaattggcctc

SEQ ID NO: 226227 - DNA, 1467 bp, Homo Sapiens
tacaaaaaatttgggattgggtctgtgctcctctctcggctcctcgcggctcgcggcggccgacggttcctgggacacctgcttgcttggcccgtccggcggctcagggcttctctgctgcgctcccggttcgctggacgggaagaagggctgggccgtcccgtcccgtccccatcggaaccccaagtcgcgccgctgacccgtcgcagggcgagatgagcgcggacgcagcggccggggcgcccctgccccggctctgctgcctggagaagggtccgaacggctacggcttccacctgcacggggagaagggcaagttgggccagtacatccggctggtggagcccggctcgccggccgagaaggcggggctgctggcgggggaccggctggtggaggtgaacggcgaaaacgtggagaaggagacccaccagcaggtggtgagccgcatccgcgccgcactcaacgccgtgcgcctgctggtggtcgaccccgagacggacgagcagctgcagaagctcggcgtccaggtccgagaggagctgctgcgcgcccaggaagcgccggggcaggccgagccgccggccgccgccgaggtgcagggggctggcaacgaaaatgagcctcgcgaggccgacaagagccacccggagcagcgcgagcttcggcctcggctctgtaccatgaagaagggccccagtggctatggcttcaacctgcacagcgacaagtccaagccaggccagttcatccggtcagtggacccagactccccggctgaggcttcagggctccgggcccaggatcgcattgtggaggtgaacggggtctgcatggaggggaagcagcatggggacgtggtgtccgccatcagggctggcggggacgagaccaagctgctggtggtggacagggaaactgacgagttcttcaagaaatgcagagtgatcccatctcaggagcacctgaatggtcccctgcctgtgcccttcaccaatggggagatacagaaggagaacagtcgtgaagccctggcagaggcagccttggagagccccaggccagccctggtgagatccgcctccagtgacaccagcgaggagctgaattcccaagacagccccccaaaacaggactccacagcgccctcgtctacctcctcctccgaccccatcctagacttcaacatctccctggccatggccaaagagagggcccaccagaaacgcagcagcaaacgggccccgcagatggactggagcaagaaaaacgaactcttcagcaacctctgagcgccctgctgccacccagtgactggcaggggccgagccagcattccaccccacctttttccttctcccaattactcccctgaatcaatgtacaaatcagcacccacatcccctttcttgacaattgatttttctagagaactatgttcttccctgactttagggaaggtaatgg

SEQ ID NO: 226228 - DNA, 1134 bp, Homo Sapiens; identical to SEQ ID NO: 192178

SEQ ID NO: 226229 - DNA, 1184 bp, Homo Sapiens
  misc_feature (780)..(813): n is a, c, g, or t
ctttgtacaaaaaagttggcttctacctggcctgtgacaagttccctcatgagagtgagctgccccgcgagtgggagaacaacaaggaggcgctgctcaccttcatggagcaggtgcaccgcggcattaagggggtggtgacggacgagcaaggcatccccattgccaacgccaccatctctgtgagtggcattaatcacggcgtgaagacagccagtggtggtgattactggcgaatcttgaacccgggtgagtaccgcgtgacagcccacgcggagggctacaccccgagcgccaagacctgcaatgttgactatgacatcggggccactcattgcaacttcatcctggctcgctccaactggaagcgcatccgggagatcatggccatgaacgggaaccggcctatcccacacatagacccatcgcgccctatgaccccccaacagcgacgcctgcagcagcgacgcctacaacaccgcctgcggcttcgggcacagatgcggctgcggcgcctcaacgccaccaccaccctaggcccccacactgtgcctcccacgctgccccctgcccctgccaccaccctgagcactaccatagagccctggggcctcataccgccaaccaccgctggctgggaggagtcggagactgagacctacacagaggtggtgacagagtttgggaccgaggtggagcccgagtttgggaccaaggtggagcccgagtttgagacccagttggagcctgagtttgagacccagctggaacccgagtttnnnnnnnnnnnnnnnnnnnnnnnnnnnnnnnnnntagccactggccaggcattccccttcacaacagtagagacctacacagtgaactttggggacttctgagatcagcgtcctaccaagaccccagcccaactcaagctacagcagcagcacttcccaagcctgctgaccacagtcacatcacccatcagcacatggaaggcccctggtatggacactgaaaggaagggctggtcctgcccctttgagggggtgcaaacatgactgggacctaagagccagaggctgtgtagaggctcctgctccacctgccagtctcgtaagagatggggttgctgcagtgttggagtaggggcagagggagggagccaaggtcactccaataaaacaagctcatgggcacgg

SEQ ID NO: 226230 - DNA, 1437 bp, Homo Sapiens; identical to SEQ ID NO: 192182
  misc_feature (1069)..(1102): n is a, c, g, or t

SEQ ID NO: 226231 - DNA, 1003 bp, Homo Sapiens; identical to SEQ ID NO: 192183
  misc_feature (366)..(400): n is a, c, g, or t

SEQ ID NO: 226232 - DNA, 1675 bp, Homo Sapiens
ttgggggcgagcgcgggtccccgggtctgacaggagcagcctgtgggcaccgcggcggtagttggaggcgggagagggtccgtagccgcgccgccctgccccgccatgggcctcctgtcggacccggttcgccggcgcgcgctcgcccgcctagtgctgcgcctcaacgcgccgttgtgcgtgctgagctacgtggcgggcatcgcctggttcttggcgctggttttcccgccgctgacccagcgcacttacatgtcggagaacgccatgggctccaccatggtggaggagcagtttgcgggcggagaccgtgcccgggcttttgcccgggacttcgccgcccaccgcaagaagtcgggggctctgccagtggcctggcttgaacggacgatgcggtcagtagggctggaggtctacacgcagagtttctcccggaaactgcccttcccagatgagacccacgagcgctatatggtgtcgggcaccaacgtgtacggcatcctgcgggccccgcgtgctgccagcaccgagtcgcttgtgctcaccgtgccctgtggctctgactctaccaacagccaggctgtggggctgctgctggcactggctgcccacttccgggggcagatttattgggccaaagatatcgtcttcctggtaacagaacatgaccttctgggcactgaggcttggcttgaagcctaccacgatgtcaatgtcactggcatgcagtcgtctcccctgcagggccgagctggggccattcaggcagccgtggccctggagctgagcagtgatgtggtcaccagcctcgatgtggccgtggagggcttaacgggcagctgcccaaccttgacctgctcaatctcttccagaccttctgccagaaagggggcctgttgtgcacgcttcagggcaagctgcagcccgaggactggacatcattggatggaccgctgcaggggcctgcagacactgctgctcatggttctgcggcaggcctccggccgccctcacggctcccatggcctctttcctgcgctaccgtgtggaggccctaaccctgcgtggcatcaatagcttccgccagtacaagtatgacctggtggcagtgggcaaggctttggagggcatgttccgcaagctcaaccacctcctggagcgcctgcaccagtccttcttcctctacttgctccccggcctctcccgcttcgtctccatcggcctctacatgcccgctgtcggcttcttgctcctggtccttggtctcaaggctctggaactgtggatgcagctgcatgaggctggaatgggccttgaggagcccgggggtgcccctggccccagtgtaccccttcccccatcacagggtgtggggctggcctcgctcgtggcacctctgctgatctcacaggccatgggactggccctctatgtcctgccagtgctgggccaacacgttgccacccagcacttcccagtggcagaggctgaggctgtggtgctgacactgctggcgatttatgcagctggcctggccctgccccacaatacccaccgggtggtaagcacacaggccccatacaggggctggatggcactgaagctggtagccctgatctacctagcactgcagctgggctgcatcgccctcacatcttctcactgggcttcctgc

SEQ ID NO: 226233 - DNA, 431 bp, Homo Sapiens; identical to SEQ ID NO: 192187

SEQ ID NO: 226234 - DNA, 838 bp, Homo Sapiens
ctttgtacaaaaaagttggagcagcagcaacaggctggagggagagggaagcaagaccaagatgaggaggggggaaggctgggttttttggatctcagagattctcctctgtgggaaagaggttgagcttcctggtgtccctcagagtaagcctgaggagtcccagcttagggagtcactattggaggcagagaggcatgcaggcggggtcctaggagcccctgcttctccaggcctcttgcctttgagtctttgtggaatggatagcctcccactaggactgggaggagaataacccaggtcttaaggaccccaaagtcaggatgttgtttgatcttctcaaacatctagttccctgcttgatgggaggatcctaatgaaatacctgaaacatatattggcatttatcaatggctcaaatcttcatttatctctggccttaaccctggctcctgaggctgcggccagcagagcccaggccagggctctgttcttgccacacctgcttgatcctcagatgtggagggaggtaggcactgcctcagtcttcatccaaacacctttccctttgccctgagacctcagaatcttccctttaacccaagaccctgcctcttccactccacccttctccagggacccttagatcacatcactccacccctgccaggccccaggttaggaatagtggtgggaggaaggggaaagggctgggcctcaccgctcccagcaactgaaaggacaacactatctggagccacccactgaaagggctgcaggcatgggctgtacccaagctgatttctcatctggtcaataaagctgtttagaccagaaa

SEQ ID NO: 226235 - DNA, 963 bp, Homo Sapiens; identical to SEQ ID NO: 192190

SEQ ID NO: 226236 - DNA, 1102 bp, Homo Sapiens; identical to SEQ ID NO: 192191
  misc_feature (196)..(238): n is a, c, g, or t

SEQ ID NO: 226237 - DNA, 895 bp, Homo Sapiens
ttggcgaggatggtcgggcctggcgttgggcgtgcggcgggctgtcttgcagcttccagggctaactcaggtgagatggagccgctatagtcctgaattcaaggatcccttgattgacaaggaatattatcgcaagccagtggaggagctaactgaggaggagaaatatgttcgggagctcaagaagactcagctcatcaaagctgctccagcagggaaaacaagttctgtgtttgaagacccagtcatcagtaaattcaccaacatgatgatgataggaggaaacaaagtactggccagatccctcatgattcagactctggaagctgtgaaaaggaagcagtttgagaagtaccatgccgcttctgcagaggaacaggcaaccatcgaacgcaacccctacaccatcttccatcaagcactgaaaaactgtgagcctatgattgggctggtacccatcctcaagggaggccgtttctaccaggtccctgtacccctacccgaccggcgtcgccgcttcctagccatgaagtggatgatcactgagtgccgggataaaaagcaccagcggacactgatgccggagaagctgtcacacaagctgctggaggctttccataaccagggccccgtgatcaagaggaagcatgacttgcacaagatggcagaggccaaccgtgccctggcccactaccgctggtggtagagtctccaggaggagcccagggccctctgccgcaagaaacagtgtgagctactgccacgctgaaaactacctgtgggttaaggatgtagttcctttgtaaggtgggcaggcctcgtaagaaagatgtagcagcatattcactatccgttaatccttctttctttgaggctggaacttgctctctctgcc

SEQ ID NO: 226238 - DNA, 1141 bp, Homo Sapiens
atgcttttttataatagccaactttgtacaaaaaagttggtgagaagacagcgaaatggcgcctccggcccccggcccggcctccggcggctccggggaggtagacgagctgttcgacgtaaagaacgccttctacatcggcagctaccagcagtgcataaacgaggcgcagcgggtgaagctgtcaagcccagagagagacgtggagagggacgtcttcctgtatagagcgtacctggcgcagaggaagttcggtgtggtcctggatgagatcaagccctcctcggcccctgagctccaggccgtgcgcatgtttgctgactacctcgcccacgagagtcggagggacagcatcgtggccgagctggaccgagagatgagcaggagcgtggacgtgaccaacaccaccttcctgctcatggccgcctccatctatctccacgaccagaacccggatgccgccctgcgtgcgctgcaccagggggacagcctggagtgcacagccatgacagtgcagatcctgctgaagctggaccgcctggacctcgcccggaaggagctgaagagaatgcaggacctggacgaggatgccaccctcacccagctcgccactgcctgggtcagcctggccacgggtggtgagaagctgcaggatgcctactacatcttccaggagatggctgacaagtgctcgcccaccctgctgctgctcaatgggcaggcggcctgccacatggcccagggccgctgggaggccgctgagggcctgctgcaggaggcgctagacaaggatagtggctacccggagacgctggtcaacctcatcgtcctgtcccagcacctgggcaagccccctgaggtgacaaaccgatacctgtcccagctgaaggatgcccacaggtcccatcccttcatcaaggagtaccaggccaaggagaacgactttgacaggctggtgctacagtacgctcccagcgcctgaggctggcccagagctgtcaggaccatgaagccaggacagaggccaggagccagccctgcagccctccccacccggcatccacctgcatcccctctgggggcaggagcccacccccagcacccccatctgttaataaatatctcaactccagggtgttcc

SEQ ID NO: 226239 - DNA, 1042 bp, Homo Sapiens
acaaaaaagttggcttagtcgcgggccgactggtgtttatccgtcactcgccgaggttccttgggtcatggtgccagcctgactgagaagaggacgctcccgggagacgaatgaggaaccacctcctcctactgttcaagtacaggggcctggtccgcaaagggaagaaaagcaaaagacgaaaatggctaaattcgtgatccgcccagccactgccgccgactgcagtgacatactgcggctgatcaaggagctggctaaatatgaatacatggaagaacaagtaatcttaactgaaaaagatctgctagaagatggttttggagagcaccccttttaccactgcctggttgcagaagtgccgaaagagcactggactccggaaggacacagcattgttggttttgccatgtactattttacctatgacccgtggattggcaagttattgtatcttgaggacttcttcgtgatgagtgattatagaggctttggcataggatcagaaattctgaagaatctaagccaggttgcaatgaggtgtcgctgcagcagcatgcacttcttggtagcagaatggaatgaaccatccatcaacttctataaaagaagaggtgcttctgatctgtccagtgaagagggttggagactgttcaagatcgacaaggagtacttgctaaaaatggcaacagaggagtgaggagtgctgctgtagatgacaacctccattctattttagaataaattcccaacttctcttgctttctatgctgtttgtagtgaaataatagaatgagcacccattccaaagctttattaccagtggcgttgttgcatgtttgaaatgaggtctgtttaaagtggcaatctcagatgcagtttggagagtcagatctttctccttgaatatctttcgataaacaacaaggtggtgtgatcttaatatatttgaaaaaaacttcattctcgtgagtcatttaaatgtgtacaatgtacacactggtacttagagtttctgtttgattcttttttaataaactac

SEQ ID NO: 226240 - DNA, 734 bp, Homo Sapiens; identical to SEQ ID NO: 192193

SEQ ID NO: 226241 - DNA, 973 bp, Homo Sapiens
ttggtctcctttttgtgttccggccgatcccacctttcctcgaccctggacgtctaccttccggaggcccacatcttgcccactccgcgcgcggggctagcgcgggtttcagcgacgggagccctcaagggacatggcaactacagcggcgccggcgggcggcgcccgaaatggagctggcccggaatggggagggttcgaagaaaacatccagggcggaggctcagctgtgattgacatggagaacatggatgatacctcaggctctagcttcgaggatatgggtgagctgcatcagcgcctgcgcgaggaagaagtagacgctgatgcagctgatgcagctgctgctgaagaggaggatggagagttcctgggcatgaagggctttaagggacagctgagccggcaggtggcagatcagatgtggcaggctgggaaaagacaagcctccagggccttcagcttgtacgccaacatcgacatcctcagaccctactttgatgtggagcctgctcaggtgcgaagcaggctcctggagtccatgatccctatcaagatggtcaacttcccccagaaaattgcaggtgaactctatggacctctcatgctggtcttcactctggttgctatcctactccatgggatgaagacgtctgacactattatccgggagggcaccctgatgggcacagccattggcacctgcttcggctactggctgggagtctcatccttcatttacttccttgcctacctgtgcaacgcccagatcaccatgctgcagatgttggcactgctgggctatggcctctttgggcattgcattgtcctgttcatcacctataatatccacctccacgccctcttctacctcttctggctgttggtgggtggactgttccacactgcgcatggtatcagtgttggtgtctcggaccggtgggccccacacagcggctgctccttctgtggg

SEQ ID NO: 226242 - DNA, 926 bp, Homo Sapiens
ttggatcctcacagcacgggagcagggagaggctctagaacaaggtttcacaaccgagatgcctttgacattttgggctgaagtgttctttgtaaggaaaacctgtttcctattttgtgcattacaggatatttagcagcacccctggcccactctagttatgacaaccaaaaatgtctctatacattgccagatttctcctagggggcaaaatcgcctccatttgagaaccacaactctaaagtcaagatatttttctctgaagtgatttctgcttggcacgctaccctcatcatcttactcatcttaagcccgagccatggatcaactaggagcccacataaatgaggctcagtagggctgcacataatctccaaacaattctttattcagtgttttgcttgtgtttgcatgttgctatgatggacaggtccccctcctccattcttgccctctggagaagtggttcctgcagtgtagagatatgaacagggtatggtaggattggggaaaggggagagagaagcagtagatacactccttatcctccccaaattttaagctctatttctgtgccctagtcctagacacacattagactcagggagttttgtctgaagaccaggtcccactgccccctggctgaagagtctgctttaaatgggaaaacaacgtaggagcaggggtttttaggcactttcagtattctcaggtgttcttcgttctggcccttccagggtaattaggaaggcagaacaagacagatgagctcctgcctgctctgagacaagaagggtggggtctcattagctttgcaacaggaaacatcctgttttatggtagtggggtcaggaatgtagaactggtatccattctgccaattccaccacccattcagtttgcttatccctacagaacagtgactg

SEQ ID NO: 226243 - DNA, 1215 bp, Homo Sapiens
  misc_feature (1087)..(1125): n is a, c, g, or t
ttggaaaccagaacttcaaatcctatgctggggagaaaattctgggacctttccataagcgcttttcctgtattatcgggccaaatggcagtggcaaatccaatgttattgattctatgctttttgtgtttggctatcgagcacaaaaaataagatctaaaaaactctcagtattaatacataattctgatgaacacaaggacattcagagttgtacagtagaagttcattttcaaaagataattgataaggaaggggatgattatgaagtcattcctaacagtaatttctatgtatccagaacggcctgcagagataatacttctgtctatcacataagtggaaagaaaaagacatttaaggatgttggaaatcttcttcgaagccatggaattgacttggaccataatagatttttaattttacagggtgaagttgaacaaattgctatgatgaaaccaaaaggccagactgaacacgatgagggtatgcttgaatatttagaagatataattggttgtggacggctaaatgaacctattaaagtcttgtgtcggagagttgaaatattaaatgaacacagaggagagaagttaaacagggtaaagatggtggaaaaggaaaaggatgccttagaaggagagaaaaacatagctatcgaatttcttaccttggaaaatgaaatatttagaaaaaagaatcatgtttgtcaatattatatttatgagttgcagaaacgaattgctgaaatggaaactcaaaaggaaaaaattcatgaagataccaaagaaattaatgagaagagcaatatactatcaaatgaaatgaaagctaagaataaagatgtaaaagatacagaaaagaaactgaataaaattacaaaatttattgaggagaataaagaaaaatttacacagctagatttggaagatgttcaagttagagaaaagttaaaacatgccacgagtaaagccaaaaaactggagaaacaacttcaaaagataaagaaaaggttgaagaatttaaaagtatacctgccaagagtaacaatatcattaatgaaacaacaaccagaaacatgccctcnnnnnnnnnnnnnnnnnnnnnnnnnnnnnnnnnnnnnnnttatgggatagccttaaacaggaaacacaagggcttcagaaagaaaagaagtcgagagaaagaacttatgggtttcagcaaatcggtaaa

SEQ ID NO: 226244 - DNA, 1400 bp, Homo Sapiens; identical to SEQ ID NO: 192203
  misc_feature (500)..(536): n is a, c, g, or t
  misc_feature (1142)..(1165): n is a, c, g, or t

SEQ ID NO: 226245 - DNA, 1264 bp, Homo Sapiens; identical to SEQ ID NO: 192204
  misc_feature (966)..(993): n is a, c, g, or t

SEQ ID NO: 226246 - DNA, 1279 bp, Homo Sapiens; identical to SEQ ID NO: 192205
  misc_feature (371)..(407): n is a, c, g, or t
  misc_feature (1013)..(1036): n is a, c, g, or t

SEQ ID NO: 226247 - DNA, 617 bp, Homo Sapiens; identical to SEQ ID NO: 192208

SEQ ID NO: 226248 - DNA, 978 bp, Homo Sapiens; identical to SEQ ID NO: 192210
  misc_feature (443)..(462): n is a, c, g, or t
  misc_feature (798)..(821): n is a, c, g, or t

SEQ ID NO: 226249 - DNA, 1425 bp, Homo Sapiens
actttgtacaaaaaagttggggaaacagatctttctgatcacgtagcccttttatcagtattccaagcctgggatgatgctagaatgggtggagaagaagcagagatacgtttttgtgagcacaaaagacttaatatggctacactaagaatgacctgggaagccaaagttcagctcaaagagattttgattaattctgggtttccagaagattgtttgttgacacaagtgtttactaacactggaccagataataatttggatgttgttatctccctcctggcctttggtgtgtaccccaatgtatgctatcataaggaaaagaggaagattctcaccactgaagggcgtaatgcacttatccacaaatcatctgttaattgtccttttagtagccaagacatgaagtacccatctcccttctttgtatttggtgaaaagattcgaactcgagccatctctgctaaaggcatgactttagtcacccccctgcagttgcttctctttgcctccaagaaagtccaatctgatgggcagattgtgcttgtagatgactggattaaactgcaaatatctcatgaagctgctgcctgtatcactggtctccgggcagccatggaggctttggttgttgaagtaaccaaacaacctgctatcatcagccagttggaccccgtaaatgaacgtatgctgaacatgatccgtcagatctctagaccctcagctgctggtatcaaccttatgattggcagtacacggtatggagatggtccacgtcctcccaagatggcccgatacgacaatggaagcggatatagaaggggaggttctagttacagtggtggaggctatggcggtggctatagcagtggaggctatggtagcggaggctatggtggcagcgccaactcctttcgggcaggatatggtgcaggtgttggtggaggctatagaggagtttcccgaggtggctttagaggcaactctggaggagactacagagggcctagtggaggctacagaggatctgggggattccagcgaggaggtggtaggggggcctatggaactggctactttggacagggaagaggaggtggcggctattaaaacttggttatgtcagttcctgtgtgtagacagtaaggaaaaaaaggcatgctatgtgttacgtgttttttccagtatgtttatttgccaccaaaaagtaaatgcattttcacccattctgtggttcattgtagtttaaggaaaccaagcatatagatgcattagtgattttgtttatattatgtaaaatataacgatctcttaaaaataccacagtttgtattttttctttaaaggagtaaaggatttgcctttaataacatggtattttcctggctttcctttaatacatagaaaaaataaagtattacaccg

SEQ ID NO: 226250 - DNA, 982 bp, Homo Sapiens
ttggcagacaggagccgaacgggggcttccgctcagcagagaggcaagatggctacggcagggggtggctctggggctgacccgggaagtcggggtctccttcgccttctgtctttctgcgtcctactagcaggtttgtgcaggggaaactcagtggagaggaagatatatatccccttaaataaaacagctccctgtgttcgcctgctcaacgccactcatcagattggctgccagtcttcaattagtggagacacaggggttatccacgtagtagagaaagaggaggacctacagtgggtattgactgatggccccaaccccccttacatggttctgctggagagcaagcattttaccagggatttaatggagaagctgaaagggagaaccagccgaattgctggtcttgcagtgtccttgaccaagcccagtcctgcctcaggcttctctcctagtgtacagtgcccaaatgatgggtttggtgtttactccaattcctatgggccagagtttgctcactgcagagaaatacagtggaattcgctgggcaatggtttggcttatgaagactttagtttccccatctttcttcttgaagatgaaaatgaaaccaaagtcatcaagcagtgctatcaagatcacaacctgagtcagaatggctcagcaccaaccttcccactatgtgccatgcagctcttttcacacatgcatgctgtcatcagcactgccacctgcatgcggcgcagctccatccaaagcaccttcagcatcaacccagaaatcgtctgtgaccccctgtctgattacaatgtgtggagcatgctaaagcctataaatacaactgggacattaaagcctgacgacagggttgtggttgctgccacccggctggatagtcgttcctttttctggaatgtggccccaggggctgaaagcgcagtggcttcctttgtcacccagctggctgctgctgagcttt

SEQ ID NO: 226251 - DNA, 622 bp, Homo Sapiens; identical to SEQ ID NO: 192219

SEQ ID NO: 226252 - DNA, 980 bp, Homo Sapiens; identical to SEQ ID NO: 192221

SEQ ID NO: 226253 - DNA, 1277 bp, Homo Sapiens; identical to SEQ ID NO: 192222

SEQ ID NO: 226254 - DNA, 1355 bp, Homo Sapiens; identical to SEQ ID NO: 192224

SEQ ID NO: 226255 - DNA, 1409 bp, Homo Sapiens
  misc_feature (91)..(122): n is a, c, g, or t
ttggatcacaccccgggaggagccgcagctgccgcagccggccccagtcaccatcaccgcaaccatgagcagcgaggccgagacccagcannnnnnnnnnnnnnnnnnnnnnnnnnnnnnnntcagcgccgccgacaccaagcccggcactacgggcagcggcgcagggagcggtggcccgggcggcctcacatcggcggcgcctgccggcggggacaagaaggtcatcgcaacgaaggttttgggaacagtaaaatggttcaatgtaaggaacggatatggtttcatcaacaggaatgacaccaaggaagatgtatttgtacaccagactgccataaagaagaataaccccaggaagtaccttcgcagtgtaggagatggagagactgtggagtttgatgttgttgaaggagaaaagggtgcggaggcagcaaatgttacaggtcctggtggtgttccagttcaaggcagtaaatatgcagcagaccgtaaccattatagacgctatccacgtcgtaggggtcctccacgcaattaccagcaaaattaccagaatagtgagagtggggaaaagaacgagggatcggagagtgctcccgaaggccaggcccaacaacgccggccctaccgcaggcgaaggttcccaccttactacatgcggagaccctatgggcgtcgaccacagtattccaaccctcctgtgcagggagaagtgatggagggtgctgacaaccagggtgcaggagaacaaggtagaccagtgaggcagaatatgtatcggggatatagaccacgattccgcaggggccctcctcgccaaagacagcctagagaggacggcaatgaagaagataaagaaaatcaaggagatgagacccaaggtcagcagccacctcaacgtcggtaccgccgcaacttcaattaccgacgcagacgcccagaaaaccctaaaccacaagatggcaaagagacaaaagcagccgatccaccagctgagaattcgtccgctcccgaggctgagcagggcggggctgagtaaatgccggcttaccatctctaccatcatccggtttagtcatccaacaagaagaaatatgaaattccagcaataagaaatgaacaaaagattggagctgaagacctaaagtgcttgctttttgcccgttgaccagataaatagaactatctgcattatctatgcagcatggggtttttattatttttacctaaagacgtctctttttggtaataacaaacgtgttttttaaaaaagcctggtttttctcaatacgcctttaaaggtttttaaattgtttcatatctggtcaagttgagatttttaagaacttcatttttaatttgtaataaaagtttacaacttgattttttcaaaaaagtcaacaaactgc

SEQ ID NO: 226256 - DNA, 1136 bp, Homo Sapiens; identical to SEQ ID NO: 192225
  misc_feature (100)..(131): n is a, c, g, or t
  misc_feature (919)..(934): n is a, c, g, or t

SEQ ID NO: 226257 - DNA, 1440 bp, Homo Sapiens; identical to SEQ ID NO: 192230
  misc_feature (194)..(225): n is a, c, g, or t
  misc_feature (1013)..(1028): n is a, c, g, or t

SEQ ID NO: 226258 - DNA, 1243 bp, Homo Sapiens; identical to SEQ ID NO: 192231
  misc_feature (162)..(193): n is a, c, g, or t
  misc_feature (982)..(997): n is a, c, g, or t

SEQ ID NO: 226259 - DNA, 1089 bp, Homo Sapiens; identical to SEQ ID NO: 192232
  misc_feature (63)..(94): n is a, c, g, or t
  misc_feature (882)..(897): n is a, c, g, or t

SEQ ID NO: 226260 - DNA, 1363 bp, Homo Sapiens; identical to SEQ ID NO: 192233
  misc_feature (278)..(293): n is a, c, g, or t
  misc_feature (1081)..(1112): n is a, c, g, or t

SEQ ID NO: 226261 - DNA, 924 bp, Homo Sapiens
  misc_feature (801)..(818): n is a, c, g, or t
ttggccaaatccaagctggaaggccagcaggaggctgatgaaggagcttgaagaaatccgcaaatgtgggatgaaaaacttccgtaacatccaggttgatgaagctaatttattgacttggcaagggcttattgttcctgacaaccctccatatgataagggagccttcagaatcgaaatcaactttccagcagagtacccattcaaaccaccgaagatcacatttaaaacaaagatctatcacccaaacatcgacgaaaaggggcaggtctgtctgccagtaattagtgccgaaaactggaagccagcaaccaaaaccgaccaagtaatccagtccctcatagcactggtgaatgacccccagcctgagcacccgcttcgggctgacctagctgaagaatactctaaggaccgtaaaaaattctgtaagaatgctgaagagtttacaaagaaatatggggaaaagcgacctgtggactaaaatctgccacgattggttccagcaagtgtgagcagagaccccgtgcagtgcattcagacaccccgcaaagcaggactctgtggaaattgacacgtgccaccgcctggcgttcgcttgtggcagttactaactttctacagttttcttaatcaaaagtggtctaggtaacctgtaaagaaaggattaaaaatttaagatgttctagttctgctctctttgtttcaaaaatcactgcttcaatctacttcaaaagaatggtgtttcttttcttgtccaattttatccaaaatcttcaagttacatttaacccataaggtttnnnnnnnnnnnnnnnnnncggttgtggttccctttctttccctacccttgccactcccactttctggcaccgagtttatttttcacttacttacttccccagacccgggctcgcctccacaaag

SEQ ID NO: 226262 - DNA, 891 bp, Homo Sapiens; identical to SEQ ID NO: 192234
  misc_feature (575)..(592): n is a, c, g, or t

SEQ ID NO: 226263 - DNA, 1370 bp, Homo Sapiens
ttggggcctgatccgggcccgttggcggcgtcactgacgcttcgctccggtcctcggatcccgagcgcggggaggcagaccgactgtgagctgcttgtccccatcctgcggccgtcctggggacacagagccctccgtggtgcccggggattggattggagccaggacctcacttcctcctctgcccctgcccctgcccctcccagcacctggcccacaccctgcagcccgccccatggtctggccctgggtggcgatggcgtccaggtggggtcccctcattggcctggctccgtgctgcctctggctcctgggggcagtccttctgatggacgcgtctgcacggcctgccaaccactcgtccactcgagagagagtagccaacagggaggagaatgagatcctgcccccagaccacctgaacggggtgaagctggagatggacgggcacctcaatcgcggcttccaccaggaggtcttcctaggcaaggacctgggtggctttgatgaggacgcggagccgcggcggagccggaggaagctgatggtcatcttttccaaggtggatgtgaacactgaccggaagatcagtgccaaggagatgcagcgctggatcatggagaagacggccgagcacttccaggaggccatggaggagagcaagacacacttccgcgccgtggaccctgacggggacggtcacgtgtcttgggacgagtataaggtgaagtttttggcgagtaaaggccatagcgagaaggaggttgccgacgccatcaggctcaacgaggaactcaaagtggacgaggaaacacaggaagtcctggagaacctgaaggaccgctggtaccaggcggacagcccccctgcagacctgctgctgacggaggaggagttcctgtcgttcctccaccccgagcacagccggggaatgctcaggttcatggtgaaggagatcgtccgggacctggaccaggacggtgacaagcagctctctgtgcccgagttcatctccctgcccgtgggcaccgtggagaaccagcagggccaggacattgacgacaactgggtgaaagacagaaaaaaggagtttgaggagctcattgactccaaccacgacggcatcgtgaccgccgaggagctggagagctacatggaccccatgaacgagtacaacgcgctgaacgaggccaagcagatgatcgccgtcgccgacgagaaccagaaccaccacctggagcccgaggaggtgctcaagtacagcgagttcttcacgggcagcaagctggtggactacgcgcgcagcgtgcacgaggagttttgagcgcccggccgcgccccgcgccgccccccacgcaccaccggggcgg

SEQ ID NO: 226264 - DNA, 955 bp, Homo Sapiens; identical to SEQ ID NO: 192235
  misc_feature (72)..(93): n is a, c, g, or t

SEQ ID NO: 226265 - DNA, 707 bp, Homo Sapiens; identical to SEQ ID NO: 192236

SEQ ID NO: 226266 - DNA, 1522 bp, Homo Sapiens
ttggcgacgccggcgtgatgtggcttccgctggtgctgctcctggctgtgctgctgctggccgtcctctgcaaagtttacttgggactattctctggcagctccccgaatcctttctccgaagatgtcaaacggcccccagcgcccctggtaactgacaaggaggccaggaagaaggttctcaaacaagctttttcagccaaccaagtgccggagaagctggatgtggtggtaattggcagtggctttgggggcctggctgcagctgcaattctagctaaagctggcaagcgagtcctggtgctggaacaacataccaaggcagggggctgctgtcatacctttggaaagaatggccttgaatttgacacaggaatccattacattgggcgtatggaagagggcagcattggccgttttatcttggaccagatcactgaagggcagctggactgggctcccctgtcctctccttttgacatcatggtactggaagggcccaatggccgaaaggagtaccccatgtacagtggagagaaagcctacattcagggcctcaaggagaagtttccacaggaggaagctatcattgacaagtatataaagctggttaaggtggtatccagtggagcccctcatgccatcctgttgaaattcctcccattgcccgtggttcagctcctcgacaggtgtgggctgctgactcgtttctctccattccttcaagcatccacccagagcctggctgaggtcctgcagcagctgggggcctcctctgagctccaggcagtactcagctacatcttccccacttacggtgtcacccccaaccacagtgccttttccatgcacgccctgctggtcaaccactacatgaaaggaggcttttatccccgagggggttccagtgaaattgccttccacaccatccctgtgattcagcgggctgggggcgctgtcctcacaaaggccactgtgcagagtgtgttgctggactcagctgggaaagcctgtggtgtcagtgtgaagaaggggcatgagctggtgaacatctattgccccatcgtggtctccaacgcaggactgttcaacacctatgaacacctactgccggggaacgcccgctgcctgccaggtgtgaagcagcaactggggacggtgcggcccggcttaggcatgacctctgttttcatctgcctgcgaggcaccaaggaagacctgcatctgccgtccaccaactactatgtttactatgacacggacatggaccaggcgatggagcgctacgtctccatgcccagggaagaggctgcggaacacatccctcttctcttcttcgctttcccatcagccaaagatccgacctgggaggaccgattcccaggccggtccaccatgatcatgctcatacccactgcctacgagtggtttgaggagtggcacgcggagctgatgggaaagcggggcagtgactatgagaccttcaaaaactcctttgtggaagcctctatgtcagtggtcct

SEQ ID NO: 226267 - DNA, 1203 bp, Homo Sapiens
  misc_feature (944)..(952): n is a, c, g, or t
ttggatttgattttttagcctcctctagagccaatcaggcagttaagagtaataaaggaaaagggtttggtcacaaaccctaccattatctggagattacttcctgctgcactcctgtcttgccatgcacgtcttgccccctcacttttgctcagcctagcagtctacttcactttattgccttgtaagtgtcaggcctcctgggcgctctggaaaagacagggagccaggccctctcacccctactggtaacaggtcattgctgggtgcacaagagggaggtgatttgcatcatggtcatgctgcatgggcttcactgggatgctcttaaacaccagaggagccaacctatcagaatcccagcagcaaaggaaaactcagattttagaggctttttacaataaagtagcgtaactctaggtcatgattgatttcaaatgcctgccatgaatgatttgtaagtatttatgtaggatccatcaaagcagtattgtaggcttttgaattgtcccagtggatccgggaccccatttcactgtctctcttgatcgtgttaatgatgcaatcagagttcaagacaggccccatgaagtctgactgcactgggatggagaaatgaatttcttcccactgaaggaaactctttctcattcgcagccaagacgggagtgccactgttcctctcttcactcctgagatactgcttctggaagcgggtgtcacttcctctctagtacctcttctcttctctgaagtgtgtgactatctcctagtgtttaaatttggcagttactcgccatgtatgtcagcatagaaaaggaaatgtttttaccttatctcctgtatgtatgatagaacttaaaagaaatgtgcatttgttttcatagccccagcagagaaaatcctcttcatagattaaatgtgctgctgtggacaggaggggnnnnnnnnnccctctacatattgaaaggcaccaaatgtaatatctgacactgttaagatgcccaaaagagcaaagttgtagtggagatgcagggtcatttccccatgccatccacagtgtttgttagtgagtccacggctgacttgcagtgataaagaaaagcatggagctgtgtctgcagacaatggtggctgcatctgtaagtggcttcagaggcagcagccctggggaaattgatgggtgtggcagtggacctgtga

SEQ ID NO: 226268 - DNA, 912 bp, Homo Sapiens
tgcttttttataatagccaactttgtacaaaaaagttggggtagctggcaccaggagccgtgggcaagggaagaggccacaccctgccctgctctgctgcagccagaatgggtgtgaaggcgtctcaaacaggctttgtggtcctggtgctgctccagtgctgctctgcatacaaactggtctgctactacaccagctggtcccagtaccgggaaggcgatgggagctgcttcccagatgcccttgaccgcttcctctgtacccacatcatctacagctttgccaatataagcaacgatcacatcgacacctgggagtggaatgatgtgacgctctacggcatgctcaacacactcaagaacaggaaccccaacctgaagactctcttgtctgtcggaggatggaactttgggtctcaaagattttccaagatagcctccaacacccagagtcgccggactttcatcaagtcagtaccgccatttctgcgcacccatggctttgatgggctggaccttgcctggctctaccctggacggagagacaaacagcattttaccaccctaatcaaggaaatgaaggccgaatttataaaggaagcccagccagggaaaaagcagctcctgctcagcgcagcactgtctgcggggaaggtcaccattgacagcagctatgacattgccaagatatcccaacacctggatttcattagcatcatgacctacgattttcatggagcctggcgtgggaccacaggccatcacagtcccctgttccgaggtcagaggatgcaagtcctgacagattcagcaacactgactatgctgtggggtacatgttgaggctgggggctcctgccagtaagctggtgatgggcatccccaccttcgggaggagcttcactctggcttc

SEQ ID NO: 226269 - DNA, 931 bp, Homo Sapiens; identical to SEQ ID NO: 192239

SEQ ID NO: 226270 - DNA, 937 bp, Homo Sapiens; identical to SEQ ID NO: 192240
  misc_feature (56)..(67): n is a, c, g, or t

SEQ ID NO: 226271 - DNA, 962 bp, Homo Sapiens; identical to SEQ ID NO: 192241

SEQ ID NO: 226272 - DNA, 963 bp, Homo Sapiens
ttggcttttcctggtggctcaagagtgctgctgctaacgcggtccccggcacgcaccatctgttgccatcccggccggccgaggccattgcagattttggaagatggcaaagttcatgacacccgtgatccaggacaacccctcaggctggggtccctgtgcggttcccgagcagtttcgggatatgccctaccagccgttcagcaaaggagatcggctaggaaaggttgcagactggacaggagccacataccaagataagaggtacacaaataagtactcctctcagtttggtggtggaagtcaatatgcttatttccatgaggaggatgaaagtagcttccagctggtggatacagcgcgcacacagaagacggcctaccagcggaatcgaatgagatttgcccagaggaacctccgcagagacaaagatcgtcggaacatgttgcagttcaacctgcagatcctgcctaagagtgccaaacagaaagagagagaacgcattcgactgcagaaaaagttccagaaacaatttggggttaggcagaaatgggatcagaaatcacagaaaccccgagactcttcagttgaagttcgtagtgattgggaagtgaaagaggaaatggattttcctcagttgatgaagatgcgctacttggaagtatcagagccacaggacattgagtgttgtggggccctagaatactacgacaaagcctttgaccgcatcaccacgaggagtgagaagccactgcggagcatcaagcgcatcttccacactgtcaccaccacagacgaccctgtcatccgcaagctggcaaaaactcaggggaatgtgtttgccactgatgccatcctggccacgctgatgagctgtacccgctcagtgtattcctgggatattgtcgtccagagagttgggtccaaactcttctttgacagagagacaactctgactttgac

SEQ ID NO: 226273 - DNA, 1249 bp, Homo Sapiens
ttgggtctcttagcagcgcgcggagaagaacggggagccagcatcatggcagaacaggatgtggaaaacgatcttttggattacgatgaagaggaagagccccaggctcctcaagagagcacaccagctccccctaagaaagacatcaagggatcctacgtttccatccacagctctggcttccgggactttctgctgaagccggagctcctgcgggccatcgtggactgtggctttgagcatccttctgaggtccagcatgagtgcattccccaggccatcctgggcatggacgtcctgtgccaggccaagtccgggatgggcaagacagcggtcttcgtgctggccaccctacagcagattgagcctgtcaacggacaggtgacggtcctggtcatgtgccacacgagggagctggccttccagatcagcaaggaatatgagcgcttttccaagtacatgcccagcgtcaaggtgtctgtgttcttcggtggtctctccatcaagaaggatgaagaagtgttgaagaagaactgtccccatgtcgtggtggggaccccgggccgcatcctggcgctcgtgcggaataggagcttcagcctaaagaatgtgaagcactttgtgctggacgagtgtgacaagatgctggagcagctggacatgcggcgggatgtgcaggagatcttccgcctgacaccacacgagaagcagtgcatgatgttcagcgccaccctgagcaaggacatccggcctgtgtgcaggaagttcatgcaggatcccatggaggtgtttgtggacgacgagaccaagctcacgctgcacggcctgcagcagtactacgtcaaactcaaagacagtgagaagaaccgcaagctctttgatctcttggatgtgctggagtttaaccaggtgataatcttcgtcaagtcagtgcagcgctgcatggccctggcccagctcctcgtggagcagaacttcccggccatcgccatccaccggggcatggcccaggaggagcgcctgtcacgctatcagcagttcaaggatttccagcggcggatcctggtggccaccaatctgtttggccgggggatggacatcgagcgagtcaacatcgtctttaactacgacatgcctgaggactcggacacctacctgcaccgggtggcccgggcgggtcgctttggcaccaaaggcctagccatcacttttgtgtctgacgagaatgatgccaaatcctcaatgacgt

SEQ ID NO: 226274 - DNA, 981 bp, Homo Sapiens
ttgggaggccgagaacggcccttgctgccaccaacatggagactttgtaccgtgtcccgttcttagtgctcgaatgtcccaacctgaagctgaagaagccgccctggttgcacatgccgtcggccatgactgtgtatgctctggtggtggtgtcttacttcctcatcaccggaggaataatttatgatgttattgttgaacctccaagtgtcggttctatgactgatgaacatgggcatcagaggccagtagctttcttggcctacagagtaaatggacaatatattatggaaggacttgcatccagcttcctatttacaatgggaggtttaggtttcataatcctggaccgatcgaatgcaccaaatatcccaaaactcaatagattccttcttctgttcattggattcgtctgtgtcctattgagttttttcatggctagagtattcatgagaatgaaactgccgggctatctgatgggttagagtgcctttgagaagaaatcagtggatactggatttgctcctgtcaatgaagttttaaaggctgtaccaatcctctaatatgaaatgtggaaaagaatgaagagcagcagtaaaagaaatatctagtgaaaaaacaggaagcgtattgaagcttggactagaatttcttcttggtattaaagagacaagtttatcacagaattttttttcctgctggcctattgctataccaatgatgttgagtggcattttctttttagtttttcattaaaatatattccatatctacaactataatatcaaataaagtgattattttttacaaccctcttaacattttttggagatgacatttctgattttcagaaattaacataaaatccagaagcaagattccgtaagctgagaactctggacagttgatcagctttacctatggtgctttgcctttaactagagtgtgtgatggtagataatttcagatatgtatgtaaaa

SEQ ID NO: 226275 - DNA, 704 bp, Homo Sapiens; identical to SEQ ID NO: 192245

SEQ ID NO: 226276 - DNA, 714 bp, Homo Sapiens; identical to SEQ ID NO: 192246

SEQ ID NO: 226277 - DNA, 1394 bp, Homo Sapiens
ctcttggttatgaaaggtcttaccaagctaaagttcgccaaggagccttagtttgttttctttctactataaaatcgatagaaaaaaaagttctttatggctactggtcagcttttattcctgatacgcctgaacttggcagcccacagtcagtgtccttgatgactcttacattgaaagacccttctccaaagacacgtgcctgtgctctgcaagttttatctgccatcttggaaggctcaaagcagtttctttctgttgctgaagataccagtgaccacagaagggcttttacccccttctccgtaatgatcgcttgcagcattagagagttgcacagatgtcttttgttagctttggtggcggagtcatcctcacagaccgttactcagataattaagtgccttgcaaatttagtatcaaatgcaccttatgatcgtctaaaactcagcctgctgaccaaagtctggaaccagataaagccttatattcgccacaaagatgttaatgttcgtgtgtcaagtctcacactcttgggagctatagtgtccacccacgcacctttacctgaagtccaactacttctgcaacagccatgttcttctggactcggtaatagcaattcagcaacccctcacctcagccctcctgattggtggaagaaagcccctgcaggaccctctctggaagaaacgtcagttagctcacctaaggggtcttcagagccctgctggctcattcgactctgcatttccattgtcgtactgcccaaggaggattcctgttcaggtagcgatgctggctctgcagcaggaagcacctacgaaccatcccccatgcgactggaggccttacaggtattgactcttctggcaaggggctacttttcaatgactcaagcctacttgatggagcttggagaggtgatttgcaagtgcatgggggaagcagatccatccattcagcttcatggagcaaagcttctggaagaactgggcacaggcttaatacagcagtataaaccagactccactgcagcacctgatcagagagcaccagtcttcttggtggtgatgttctggactatgatgctgaacggtcctttacccagagccctgcagaattcagaacacccaactctccaggcgagcgcctgtgatgccctgtcttccatcttgccagaggccttcagcaatctgccgaatgacaggcagatgctgtgcatcacagtgctgctcgggctgaatgacagcaagaatcgcttagtgaaagctgcaacttcacgggccctgggagtctatgtgctttttccctgtctcagacaggatgtcatatttgttgcagacgcagcaaatgcatattgatgtcacttgaagacaagtctctgaatgttc

SEQ ID NO: 226278 - DNA, 1184 bp, Homo Sapiens; identical to SEQ ID NO: 192248

SEQ ID NO: 226279 - DNA, 945 bp, Homo Sapiens
  misc_feature (557)..(599): n is a, c, g, or t
aactttgtacaaaaaagttggcaattaggcagaggtcaaaaagtgacaatggtacatgcccaggtaaattcccaaaaggcagaattgacagttgtatctgctgtgcattcactctaagatgaggagaacaaaagaaatgtattctcttgttctgtcagctgcataccagtaataaaactgttatgaaatggattttcaaggtctctaaaccttgaaaatccaaagctattgttgcattgtacagcactgaagggctttatgttacaatattctttattcctatctagtatactaggctatttattgtatccccttaggtaaacttatttatttatgctattttgctttgtttcattttttaaggacaagatcaggatagctttggtgaaggtagggtcatattaatatgatgataatgtgcaaccaatttatactttctgcagggagctatggggtacattccttgatttccaggatagtttttcaaataggaaagcaataatggcagtagttctcaaatgggctaggccttttttatattgaagcaataattccannnnnnnnnnnnnnnnnnnnnnnnnnnnnnnnnnnnnnnnnnngtacaaatagaactatatatatttaggtaaaatagatctatcgtgtttaaaaccaaagaaatcaatggaacccttgcacaaaaaagtgtgataaatatttttaaataaaaacttaatacaaatgtaatttgttaatattgtttcatgttttatgtgtagatctaatagctgaactgattcaaactgtaataagctcatcaatttcatttctatgaaaatgtgctctgttgtcacaggatgtttctgttgattttattcatttcctgggaattggtaaacatcatgttcctgatgataacccagtagcaaaaacatttgtactgagtggtacaagccttggggactg

SEQ ID NO: 226280 - DNA, 1060 bp, Homo Sapiens
ctttgtacaaaaaagttggcaactagtgaatatgaaaaggaaaaactgaatgaacggcttgcaaaactttcagatggagtggctgtgctgaaggttggtgggacaagtgatgttgaagtgaatgaaaagaaagacagagttacagatgcccttaatgctacaagagctgctgttgaagaaggcattgttttgggagggggttgtgccctccttcgatgcattccagccttggactcattgactccagctaatgaagatcaaaaaattggtatagaaattattaaaagaacactcaaaattccagcaatgaccattgctaagaatgcaggtgttgaaggatctttgatagttgagaaaattatgcaaagttcctcagaagttggttatgatgctatggctggagattttgtgaatatggtggaaaaaggaatcattgacccaacaaaggttgtgagaactgctttattggatgctgctggtgtggcctctctgttaactacagcagaagttgtagtcacagaaattcctaaagaagagaaggaccctggaatgggtgcaatgggtggaatgggaggtggtatgggaggtggcatgttctaactcctagactagtgctttacctttattaatgaactgtgacaggaagcccaaggcagtgttcctcaccaataacttcagagaagtcagttggagaaaatgaagaaaaaggctggctgaaaatcactataaccatcagttactggtttcagttgacaaaatatataatggtttactgctgtcattgtccatgcctacagataatttattttgtatttttgaataaaaaacatttgtacattcctgatactgggtacaagagccatgtaccagtgtactgctttcaacttaaatcactgaggcatttttactactattctgttaaaatcaggattttagtgcttgccaccaccagatgagaagttaagcagcctttctgtggagagtgagaataattgtgtacaaagtagagaagtatccaattatgtgacaacctttgtgtaataaaaatttgtttaaagtt

SEQ ID NO: 226281 - DNA, 1367 bp, Homo Sapiens; identical to SEQ ID NO: 192251

SEQ ID NO: 226282 - DNA, 1096 bp, Homo Sapiens; identical to SEQ ID NO: 192252

SEQ ID NO: 226283 - DNA, 979 bp, Homo Sapiens; identical to SEQ ID NO: 192253

SEQ ID NO: 226284 - DNA, 752 bp, Homo Sapiens
  misc_feature (295)..(382): n is a, c, g, or t
gataaacagacatgtttaatgatagcttgctcttcacagagatgtctacggagacttttaatctataatccaggagtatataaccatgcagcacagaccaattagccaaatgcaaaataaactagattcttaccacaactatcctataaacactgcaactattctttccaaaaggaccctaatcttatgtgaaaacacctactgtgggggaaccagaaacctagctatctggccaaaaggaaaaaatagcaattcagtggttaattggtgaaagcaggaaatgtatgccctttannnnnnnnnnnnnnnnnnnnnnnnnnnnnnnnnnnnnnnnnnnnnnnnnnnnnnnnnnnnnnnnnnnnnnnnnnnnnnnnnnnnnnnnttggtcttcttagttttgttctttttgtctctcttcttcagcccatccatgttagctctaaggaggtttgaataagccatctgaaacttattcacttccttggagctcaccacagtgctgatcttcttcttcccatcggtagctcgtaacagacacttgttgtctgcgggctcaaagccctccacagtacctttctttggaatgggtttggttcgaccgtcatacttcttcaaggtgatatagacgctgcccgacgtccggcacttctggaaaagtctggtcagctccgtcaggaactgctcgctctccaacaacaccatcgcggcgacgctggctcgactccctccgcttaagcccctagcagtgccaa

SEQ ID NO: 226285 - DNA, 742 bp, Homo Sapiens; identical to SEQ ID NO: 192254
  misc_feature (276)..(363): n is a, c, g, or t

SEQ ID NO: 226286 - DNA, 643 bp, Homo Sapiens; identical to SEQ ID NO: 192255
  misc_feature (360)..(447): n is a, c, g, or t

SEQ ID NO: 226287 - DNA, 913 bp, Homo Sapiens; identical to SEQ ID NO: 192256
  misc_feature (45)..(71): n is a, c, g, or t

SEQ ID NO: 226288 - DNA, 522 bp, Homo Sapiens; identical to SEQ ID NO: 192258

SEQ ID NO: 226289 - DNA, 1453 bp, Homo Sapiens
ttggcgcctgccccggagagccaggcgctaaccagccgctctgcgccccgcgccctgcttgcccccattatccagccttgccccggcgccctgacctgacgccctggcctgacgccctgcttcgtcgcctcctttctctcccaggtgctggaccagggactgagcgtcccccggagagggtccggtgtgaccccgacaagaagcagaaatggggaagaaactggatctttccaagctcactgatgaagaggcccagcatgtcttggaagttgttcaacgagattttgacctccgaaggaaagaagaggaacggctagaggcgttgaagggcaagattaagaaggaaagctccaagagggagctgctttccgacactgcccatctgaacgagacccactgcgcccgctgcctgcagccctaccagctgcttgtgaatagcaaaaggcagtgcctggaatgtggcctcttcacctgcaaaagctgtggccgcgtccacccggaggagcagggctggatctgtgacccctgccatctggccagagtcgtgaagatcggctcactggagtggtactatgagcatgtgaaagcccgcttcaagaggttcggaagtgccaaggtcatccggtccctccacgggcggctgcagggtggagctgggcctgaactgatatctgaagagagaagtggagacagcgaccagacagatgaggatggagaacctggctcagaggcccaggcccaggcccagccctttggcagcaaaaaaaagcgcctcctctccgtccacgacttcgacttcgagggagactcagatgactccactcagcctcaaggtcactccctgcacctgtcctcagtccctgaggccagggacagcccacagtccctcacagatgagtcctgctcagagaaggcagcccctcacaaggctgagggcctggaggaggctgatactggggcctctgggtgccactcccatccggaagagcagccgaccagcatctcaccttccagacacggcgccctggctgagctctgcccgcctggaggctcccacaggatggccctggggactgctgctgcactcgggtcgaatgtcatcaggaatgagcagctgcccctgcagtacttggccgatgtggacacctctgatgaggaaagcatccgggctcacgtgatggcctcccaccattccaagcggagaggccgggcgtcttctgagagtcagggtctaggtgctggagtgcgcacggaggccgatgtagaggaggaggccctgaggaggaagctggaggagctgaccagcaacgtcagtgaccaggagacctcgtccgaggaggaggaagccaagacgaaaaggcagagcccaacagggacaaatcagttgggcctctctctcaggcggactcggaagtgggcacggctgctcatcaaaccaacagacaggaaaaaa

SEQ ID NO: 226290 - DNA, 1313 bp, Homo Sapiens; identical to SEQ ID NO: 192262

SEQ ID NO: 226291 - DNA, 1164 bp, Homo Sapiens; identical to SEQ ID NO: 192263

SEQ ID NO: 226292 - DNA, 917 bp, Homo Sapiens; identical to SEQ ID NO: 192265

SEQ ID NO: 226293 - DNA, 1635 bp, Homo Sapiens
  misc_feature (580)..(588): n is a, c, g, or t
  misc_feature (919)..(927): n is a, c, g, or t
ttggcttacctcatcctggctcttctctctgtcaccatcagcttcaggatctacaagtccgtcatccaagctgtacagaagtcagaagaaggccatccattcaaagcctacctggacgtagacattactctgtcctcagaagctttccataattacatgaatgctgccatggtgcacatcaacagggccctgaaactcattattcgtctctttctggtagaagatctggttgactccttgaagctggctgtcttcatgtggctgatgacctatgttggtgctgtttttaacggaatcacccttctaattcttgctgaactgctcattttcagtgtcccgattgtctatgagaagtacaagacccagattgatcactatgttggcatcgcccgagatcagaccaagtcaattgttgaaaagatccaagcaaaactccctggaatcgccaaaaaaaaggcagaataagtacatggaaaccagaaatgcaacagttactaaaacaccatttaatagttataacgtcgttacttgtactatgaaggaaaatactcagtgtcagcttgagcctgcattccaagcnnnnnnnnnaatttggtgttttctcccatcctttccctttaaccctcagtatcaagcacaaaaattgatggactgataaaagaactatcttagaactcagaagaagaaagaatcaaattcataggataagtcaataccttaatggggtagagcctttacctgtagcttgaaaggggaaagattggaggtaagagagaaaatgaaagaacacctctgggtccttctgtccagttttcagcactagtcttactcagctatccattatagttttgcccttaagaagtcatgattaacttatgaaaaaattatttggggacaggagtgtgataccttccttggnnnnnnnnngcagccctcaaatcctatcttcctgccccacaatgtgagcagctacccctgatactccttttctttaatgatttaactatcaacttgataaataacttataggtgatagtgataattcctgattccaagaatgccatctgataaaaaagaatagaaatggaaagtgggactgagagggagtcagcaggcatgctgcggtggcggtcactccctctgccactatccccagggaaggaaaggctccgccatttgggaaagtggtttctacgtcactggacaccggttctgagcattagtttgagaactcgttcccgaatgtgctttcctccctctcccctgcccacctcaagtttaataaataaggttgtacttttcttactataaaataaatgtctgtaactgctgtgcactgctgtaaacttgttagagaaaaaataacctgcatgtgggctcctcagttattgagtttttgtgatcctatctcagtctgggggggaacattctcaagaggtgaaatacagaaagccttttttttcttgatctttcccgagattcaaatctcccaattcccattttggggggcagtttttttcttccccttccatatgaaaatttcagcgaacttgaaagaaaaatcatctggtgagttccttcagttctcactcatagtcatgatcccttcagaagggaatatgccctggcgaagtt

SEQ ID NO: 226294 - DNA, 993 bp, Homo Sapiens; identical to SEQ ID NO: 192272
  misc_feature (502)..(510): n is a, c, g, or t
  misc_feature (843)..(851): n is a, c, g, or t

SEQ ID NO: 226295 - DNA, 1299 bp, Homo Sapiens; identical to SEQ ID NO: 192275
  misc_feature (88)..(96): n is a, c, g, or t
  misc_feature (1152)..(1165): n is a, c, g, or t

SEQ ID NO: 226296 - DNA, 875 bp, Homo Sapiens
ttggcttagacaatgccccggagccgccagaccgtcgcgcccctgccccatcgtagtatatgagctcgcctacacaaggacccccgctaaaagccagagctcccagtccccgaggcttgaagacggggactcccttctccaccaactctgtcctcggggggtggggccccagccgagatcacagcgcgacaggagtgggggtggccgctggagacaggtgaagaaacaagaaaactaagaaatccgagcggttggagggggagtctgtgtggatgggatggggacgccgggggaggggctgggccgctgctcccatgccctgatccggggagtcccagagagcctggcgtcgggggaaggtgcgggggctggccttcccgctctggatctggccaaagctcaaagggagcacggggtgctgggaggtaaactgaggcaacgactggggctacagctgctagaactgccacctgaggagtcattgccgctgggaccgctgcttggcgacacggccgtgatccaaggggacacggccctaatcacgcggccctggagccccgctcgtaggccagaggtcgatggagtccgcaaagccctgcaagacctggggctccgaattgtggaaataggagacgagaacgcgacgctggatggcactgacgttctcttcaccggccgggagtttttcgtaagcctctccaaatggaccaatcaccgaggagctgagatcgtggcggacacgttccgggacttcccgtctccactgtgccagtctcgggtccctcccacctgcgcggtctctgcggcatgggggggacctcgcactgttgtggcaaggcagcagcgacgctgccccaaaaggctgtccggggcaa

SEQ ID NO: 226297 - DNA, 892 bp, Homo Sapiens; identical to SEQ ID NO: 192277

SEQ ID NO: 226298 - DNA, 729 bp, Homo Sapiens; identical to SEQ ID NO: 192278

SEQ ID NO: 226299 - DNA, 969 bp, Homo Sapiens
tctgtggatctaacttggccagacacaagtgcctgtcatcctcccgggtggcatagacagcccaaagacttcctcatcagctgccaggtcgatgtaggtgtctgctgtcaagccgtagggggggatcagcccctctgctgggaatactgagctgtccaccactgttcggtttgccaggtggaatttgattagctgcaaagtgttctccatctcaccacctccaccaggtcttccaggaggcctccgagcaaaataaagaaagccaccatataccagctgccctgtgcctacccaggggaagggcacccggactcgggaagctttccgggcagccatggcaagggtgaagtcacgcagccttgggaagacaaaggctgtgtcattctgtgtcccatctaacacgtagatcttctctgtttgccccagtggatccttggtccatagaccagctgggccaccaaatcgcttcagaatcttcattgatctcacttgagagattgtgtagccacagtctgtcaccatatcgtacttctcattccttcttcccttgcctttggtcccagggcctccagtcaccttctcatcaaactctacacagggcagagctgggttctgggtctccagatagtctacctcccgctccagacgatccactctcccggagatggtgtcggcctcagttctgagtgcctcccgctccttctctgccacctccagcagtggcagcatcttgttcttgaagtcccgcagctcagcagcatgccgactactctggtcctggcactgggccagccgttcctctaaagcagctagtcggcgttccatgtactccacaaggtggtgctgctgtccttggaggggtcccgaccatgacaaaaggaacaagatgaggagaggggtgctgggccccatggcagcctggagagtggtgccagagtagaaggaacgtacagtcagcctcttccccaa

SEQ ID NO: 226300 - DNA, 1195 bp, Homo Sapiens
gtatcagccaccgtgcctggcctaataattggaacattttcatcatgaaaatgtcatcagctttgccaaaagaaacaaccaattgacttgtttggcgtttgttttccattttcatgtcaattttatgtatacagttagaatacccaaggagaccactaaaatcagttaaacaagtagggtatatacaaagaaagatgaaacccgaaagtacataaaaaggatttaaatccgattttagatgtacctagtgtgtatttcttatctctagacaagttcatgtttattgtttaatttatgcccaagtgaagttgtaaacttatggttcaactctgacacagaatttgtcacttgtctgaggtcagtggcaggtttctctgctgtcaagcactctgtgtcacccaccagattagtataactattaattcagactgtactcctatgtttaagataatttttacaagagctggctgaagcagcacattagtaacctgacaagatttctttttcccttttcagggggaaagggtcaccttaaaaataaattattttcagggactttgggaatctaatgataaatattacacataatctatgaatagcttaatcctttatatattccttaaaataggaattcctcgacatcactcctggccacactttccttgcctgtgttgttgctatgtgtatttgaaagtaatatctgcattccttttaagatgttctgtaagtcatatttgtcagttatacagagtagtcttccttttccccacgttcagtgtaatctcactgaacagtaataatagcaatagctaacaacatctgcacagcaccttacagtttgcaaagaacgttcacacattctcatttgagttttgcatagtgaacctgttacgagatgtctcttgacgtcgatgctaaaagtgttagaatctttacatcactagagtcattgaatatgctgtagtattgaatagtgccctgactagggggaggatttggatgtgctgcatttcaagccgtgtataatcatcaaaatggggggcttgagttctttagctacttgaatccgatttacttctgttaagtgatgcttttctaaccgttttctggatggattttgtattcactatattgtagcttgtaatttgtataaatgtaccatctgatgtcattaaaaaaagtgtttgtagtgcta

SEQ ID NO: 226301 - DNA, 896 bp, Homo Sapiens; identical to SEQ ID NO: 192280

SEQ ID NO: 226302 - DNA, 770 bp, Homo Sapiens; identical to SEQ ID NO: 192283

SEQ ID NO: 226303 - DNA, 899 bp, Homo Sapiens; identical to SEQ ID NO: 192284

SEQ ID NO: 226304 - DNA, 1461 bp, Homo Sapiens; identical to SEQ ID NO: 192285

SEQ ID NO: 226305 - DNA, 1009 bp, Homo Sapiens; identical to SEQ ID NO: 192287

SEQ ID NO: 226306 - DNA, 1157 bp, Homo Sapiens
ttggccaatgataaaattcaagcggtcatcgatgcgggagtatgtaggagacttgtggaactgctgatgcataatgattataaagtggtttctcctgctttgcgagctgtgggaaacattgtcacaggggatgatattcagacacaggtaattctgaattgctcagctctgcagagtttattgcatttgctgagtagcccaaaggaatctatcaaaaaggaagcatgttggacgatatctaatattacagctggaaatagggcacagatccagactgtgatagatgccaacattttcccagccctcattagtattttacaaactgctgaatttcggacaagaaaagaagcagcttgggccatcacaaatgcaacttctggaggatcagctgaacagatcaagtacctagtagaactgggttgtatcaagccgctctgtgatctcctcacggtcatggactctaagattgtacaggttgccctaaatggcttggaaaatatcctgaggcttggagaacaggaagccaaaaggaatggcactggcattaacccttactgtgctttgattgaagaagcttatggtctggataaaattgagttcttacagagtcatgaaaaccaggagatctaccaaaaggcctttgatcttattgagcattacttcgggaccgaagatgaagacagcagcattgcaccccaggttgaccttaaccagcagcagtacatcttccaacagtgtgaggctcctatggaaggtttccagctttgaagcaatactctgctttcacgttcctgtgtcagaccaggctacccagtcgagtcctcttgtggagcccacagtcctcatggagctaacttctcaaatgttttccataatactgtttgcgctcatttgcttgccttgcgcacctgctctcttacacacatctggaaaacctccggctctctgtggtggaatacccttctaataaaagggtaaccagaacggcccactctcttttacggaaaaatccctaggctttggagatccgcacttacattagagttatgggaatatacacatattaatgtggctccctttttcttgtgggggaataaaagaggactcctcctcattctccttatcatggggggaaaaactgacattaaaagatgaga

SEQ ID NO: 226307 - DNA, 1048 bp, Homo Sapiens; identical to SEQ ID NO: 192289

SEQ ID NO: 226308 - DNA, 1199 bp, Homo Sapiens
ttggcctcctcctagcaggctgctcctggtctgcagtctctgccctcagcacctccagctgcccccttctcaggacccttgatcttcggtgggcagtaggaatcaaggaccctcaaattcgggacttgcttactccaccggctgataaaccaggtcaggacaatcgcagcaagctccggaacatgaccgacttccggctggcaggccttgacatcacagatgccacgcttcgcctcataattcgccacatgcccctcctgtctcgactcgacctcagtcactgcagccaccttacagatcagtcctccaatctactcactgctgtcgggtcttccactcgctactctctcacagagctcaatatggcaggttgcaataaattgacagaccagaccctgatctacctacggcgcattgccaacgtcaccttgatcgaccttcgaggatgcaagcagatcactcgaaaagcctgcgagcacttcatctcagacttgtccatcaacagcctctactgcctgtctgacgagaagctgatacagaagatcagctaagacacacccagcccagattcaacaggaaaccgatcttcccctgactccccaccgaggagagcctctcctcgaccctgcacgggctctgaggccagcgtcacactccctctctgctctcctgtcccttgagcccttcctctacaggtggggcagagagggtggtggacaccaggcttatctgcctgctcctctccctcctaaggaaaagggagtagcagattgatctgaggggaaagcacaggctgtgctgtcgaggcgcctgctcgcttactcgcctgccaggaggccgggctctcagtttggggtgtttgtgcaaccttcatctgcactgggccctgtgcccctcctccccatccatggtccccagcagtgcctggttctgagcaaactcccagggaagaaaacggccctgtctccatggccaggttcttgtggtgtccagtgcgcgtctctcctccatcacactctcccggcttgcgcaggaggggccagcagccccaggagtcccagacccgtgccgatcacactggtgctgttgagatctcccaaacctcacgtccttaactgtgctctccctcctttcctctcccttgagcttgggttctgcccagcactcgtgcttgttcacataattaggtttcccacccc

SEQ ID NO: 226309 - DNA, 931 bp, Homo Sapiens
ttggctgtctctttcttcccgccgtgccccgcggccgggccggggcagccgggaagcgggtggggtggtgtgttacccagtagctcctgggacatcgctcgggtacgctccacgccgtcgcagccactgctgtggtcgccggtcggccgaggggccgcgatactggttgcccgcggtgtaagcagaattcgacgtgtatcgctgccgtcaagatggaggggcctttgtccgtgttcggtgaccgcagcactggggaaacgatccgctcccaaaacgttatggctgcagcttcgattgccaatattgtaaaaagttctcttggtccagttggcttggataaaatgttggtggatgatattggtgatgtaaccattactaacgatggtgcaaccatcctgaagttactggaggtagaacatcctgcagctaaagttctttgtgagctggctgatctgcaagacaaagaagttggagatggaactacttcagtggttattattgcagcagaactcctaaaaaatgcagatgaattagtcaaacagaaaattcatcccacatcagttattagtggctatcgacttgcttgcaaggaagcagtgcgttatatcaatgaaaacctaattgttaacacagatgaactgggaagagattgcctgattaatgctgctaagacatccatgtcttccaaaatcattggaataaatggtgatttctttgctaacatggtagtagatgctgtacttgctattaaatacacagacataagaggccagccacgctatccagtcaactctgttaatattttgaaagcccatgggagaagtcaaatggagagtatgctcatcagtggctatgcactcaactgtgtggtgggatcccagggcatgcccaagagaatcgtaaatgcaaaaattgcttgcctttgacttca

SEQ ID NO: 226310 - DNA, 933 bp, Homo Sapiens; identical to SEQ ID NO: 192295

SEQ ID NO: 226311 - DNA, 845 bp, Homo Sapiens
tttgtacaaaaaagttggtttagatagtggctttccttcttctggattcttttcattgaattctcacagtaaatatttacggagttttcaaattgcagcaaatatactgtatgagaaaatattaatacagattaaaagcctttcttacatcttgaaaattttctaatatttgagaatttcacagggatgttttttatattggacccttttgactttccagtcctgtgactttctacttttagtagagagtcagaatctctggactggagaataatgaagaagttcactgactgtgcactgtgcttagagaccctgccgcaccacagtgccaatgcttgtcagacacatgcccttcggcagcattccagaacaggagggaagagaaagagaaaactttcttcccttctactaaaagattcaggcagcttaaaaccttagtgctttctttcttaacatacccaaatttcaattctttccattatttgaacacttgggtagaactcttgctttgtattaaacctctttgtctacacatgtaaaacttaccttttgttattgagcaggcctatctctttcagatagttttatgattcacacaggtttgaggatgctggggagagggggagggggctgtggtggtgttctgttggttacaagaaagttataccatttaaagctggcaccagagacccgatagggacttattaactatattgaacattttttcctttgcctttgaccctatgtatagttacgatgccagattagatttatagcagcctcaagttgtattaaatgatattttgcttcctgtaatactattataaaataaagtttgtttattc

SEQ ID NO: 226312 - DNA, 1210 bp, Homo Sapiens; identical to SEQ ID NO: 192299
  misc_feature (910)..(921): n is a, c, g, or t

SEQ ID NO: 226313 - DNA, 1079 bp, Homo Sapiens; identical to SEQ ID NO: 192301
  misc_feature (909)..(968): n is a, c, g, or t

SEQ ID NO: 226314 - DNA, 645 bp, Homo Sapiens; identical to SEQ ID NO: 192302
  misc_feature (360)..(419): n is a, c, g, or t
  misc_feature (528)..(567): n is a, c, g, or t

SEQ ID NO: 226315 - DNA, 823 bp, Homo Sapiens; identical to SEQ ID NO: 192303

SEQ ID NO: 226316 - DNA, 951 bp, Homo Sapiens
aatcgttggttggctgttgtggccaagataccatctcctgctgcttgcgggagagtgagcacccgggtggcgtttgggggtgagcccagtggccttgaatctgtcaacggaggtcctatctgtgattggacagtctttctttgcaaagtgctggtgttctcgatgctggcacaagagctgggaatggaagggggcaggcttgggacaggaaccaaactcctctgggggcaagagctggggccagtggcattctctgtcttcacaatgatgccgacggtgtggttctgaaggcccccagccgctggtggcgtgaggggccggggccagccttgccggtgtgagaggcctggtagtggggtgttagcgcctggaagtcgccgggggtccgtggaatcagtagggctgctgtagaggtgtgggccattagctttcacctctgtgttcactggcccattggcagtcccacaaggggttttcttggatttttccgcacaagaactgcagccgatgtcctctagggctggggactggtggggtggagagcagctcagggaattctgggtgctaatccctgaggggcaggacaaggggtagtgggaaggtgtaggtgtcttgtcagctgtttgcagggaggtggtgactgagctgtcagtcacaataacaggcttaatatcagccttctctgtctgttcagagtcccaatgcgaaggcatctgcttagcagataaatgtttcaatatgctgcactggagcgcaacaacactacagagccactcttgctgctctgcttgggtggctaagtgctcagagttcaaaaggtgcatctgtgattcctcagggatcccattgcagatcagctccccgtcccgaatggccgcgggtgcaatgagagggggtggaaactggtactgagattttatagcatcaggaaccttcaagcttcttctccaa

SEQ ID NO: 226317 - DNA, 1600 bp, Homo Sapiens
ttgtacaaaaaagttggcacgtgtcgcgtgtagaagcgtggtgagaggtgtacgagaagccggtacaggtgccctgcggacacgtcttttgctctgcatgcctgcaggaatgtctgaagccgaagaagcctgtctgtggggtgtgtcgcagcgctctggcacctggcgtccgagccgtggagctcgagcggcagatcgagagcacagagacttcttgccatggctgccgtaagaatttcttcctgtccaagatccggtcccacgtggctacttgttccaaataccagaattacatcatggaaggtgtgaaggccaccattaaggatgcatctcttcagccaaggaatgttccaaaccgttacacctttccttgtccttactgtcctgagaagaactttgatcaggaaggacttgtggaacactgcaaattattccatagcacggataccaaatctgtggtttgtccgatatgtgcctcgatgccctggggagaccccaactaccgcagcgccaacttcagagagcacatccagcgccggcaccggttttcttatgacacttttgtggattatgatgttgatgaagaggacatgatgaatcaggtgttgcagcgctccatcatcgaccagtgagcagagtccgtgcttgctatctgtctcatgttacagagcttccattacatattaaacgtgaaatctatgactcctgtaccttacctgttcaacagacctgaaaatgagccatggcattgggacagggtcacttctgacaggggaagtgggtccccaggtcagcccttctcttccctttgggctcttgccaaagctgtcttcccctactgttaaccttgtttgtcacacggtcgagttcgtattggttctcggctacttcctggagcttctgccgcctcctgtggaagataatctagcttctccacctcttgtttcacactcattcctcccatccagtgtttgtctctcgggtccttcaagccagccaggaccttttctgggtcatgaatagcacaatgaagcaagtgtctcctttccttgtccccaaggtgtgcagactttggcagccgtgcacctgaccagagctgaagctcccgctgggctgtggggttgccagaagctggggttgccatcccggggtacatgtcaccagtcctcttggggttttgtaccatctgatgctggaagttttgattagtgatattttctactactacatatttagagttcactggttcagtcttaaatgcctgcatggtgcctttttaggataaggtataaccatacatttttggtggaagtgtttctgggttagggaagttaaagtctgtttatccgtaagtggggaggagggtcagctaagagaagtgggagggccagagctttttggttctgatttacaaattaatgaagtagtttcaaacaacgcggtcatgtttacctctccatttgggagcctgcctacattcttgttctagaagcacaaaaaatcctcagatgaattaaaagaaagaggtttggggactcagcggatactagttcttttaccttctgcttggtaacttagataaaactgagcattgtttttc

SEQ ID NO: 226318 - DNA, 882 bp, Homo Sapiens; identical to SEQ ID NO: 192306

SEQ ID NO: 226319 - DNA, 929 bp, Homo Sapiens
  misc_feature (631)..(645): n is a, c, g, or t
ttggctttgttgtaaggacttgataacctggctacagcgttttctatgaaatctacttggatcccatgcctgaaatttggaagcatatgtacaaaaatcatttttacgttttatttttaataaatcattgtgtttgaccgtacatgtctaacattttttttctaggatccattccgtaccgttttttaagggatatttgtttaagactttacgtgttaattctttattcttgatgtgtacttagagaaacttaagaggtcctgtggtttttttcccctctcctgttgccctgctagttgcgtgttgaattatatcccttacaggcaaaacttttgaagtggtggatgtggctttttaaactcttaagtttctgtgcatccatctcttgtactaagcgaattgtttatcatcttgacatggttggtcatttctatgacaatttacttcaaactgtgtactgtgtagttctatatagtttgtgttaagcatgtcattcatataaactgtttaaaatttttcagatggcctagtttcatccctcttactggtttgtctgtaatgaatggttaaaaataagggttatattttaccctcaaatgcgtttttgtactttcagagcaggtttaaacgnnnnnnnnnnnnnnncctatatccgaactgttggcctcatggaaatccctttcccgatctttgtagcaccatctactggcagaatggcagagtagctgcgaaacaatttgtttaaaaacttgcttaagacaattgcatcagatttggaagttttgccatcaaaattctttgcagaattggaagttaaacacatttgctttgtaactgagatggggcttcacagggaatgtagttgccagttcatatcacaatagccctttctatatgaggtttgaaaatgtaaactgctatgcatagct

SEQ ID NO: 226320 - DNA, 1123 bp, Homo Sapiens; identical to SEQ ID NO: 192307

SEQ ID NO: 226321 - DNA, 1362 bp, Homo Sapiens; identical to SEQ ID NO: 192308

SEQ ID NO: 226322 - DNA, 559 bp, Homo Sapiens; identical to SEQ ID NO: 192313
  misc_feature (497)..(506): n is a, c, g, or t

SEQ ID NO: 226323 - DNA, 556 bp, Homo Sapiens
ctttgtacaaaaaagttggggatgagcctgctaaaagggcaagatcagcgaggccgacaagaagaaggttctggacaagtgtcaagaggtcatctcgtggctggacgccaacaccttggccgagaaggacgagtttgagcacaagaggaaggagctggagcaggtgtgtaaccccatcatcagcggactgtaccagggtgccggtggtcccgggcctgggggcttcggggctcagggtcccaagggagggtctgggtcaggccctaccattgaggaggtggattaggggcctttgttctttagtatgtttgtctttgaggtggactgttgggactcaaggactttgctgctgttttcctatgtcatttctgcttcagctctttgctgcttcacttctttgtaaagttgtaacctgatggtaattagctggcttcattatttttgtagtacaaccgatatgttcattagaattctttgcatttaatgttgatactgtaagggtgtttcgttccctttaaatgaatcaacactgccaccttctgtacgagtttgtttg

SEQ ID NO: 226324 - DNA, 892 bp, Homo Sapiens
ttgggaagttactgtgaggcggcggctaagaaggcggctctggtggcggcggtggggctgaggcggcggccgaggcggcgacggaggaaacagaagatggcagattttttgaaaggactgcctgtctacaacaaaagcaattttagtcgatttcacgcggactccgtgtgcaaagcctcgaaccgacggccctcagtctacctgcctacccgcgagtacccgtctgaacagatcatcgtgacagaaaagacaaacatcctcctgcgctacctgcatcagcaatgggacaaaaagaacgctgccaagaagagagaccaggagcaagtggagctggaaggcgagagctccgcacctccccgcaaggtggcgcggaccgacagcccagacatgcacgaggacacttaagactctcaactccacaggcgcctcctgccaggtctgctcctcggtcgcccacccgcctgcccgccatgtgtaagcaccccgcccgcccgcctccctgccggcccatccacaccctgcgtccacaccacttccaacctcataggagccgatgtatttattttccttgagtttttatttatgctgtaacctgtatcaagcgttggttaaaggggacatcagacccagtagtgtgatgttggtagatgctttttaaaaaaaacaacattgtccccccgacccccgccttccatcgggccagttccccgattcctgcccccagttctccagagaaccagagtgtgtctgtgagagtctctagcgggggctttactgtggccgggtgacaggggcgggcccggggtggcctgacctaccaggacagccgagtggccttctcccccccaacaccggtccaggccattgagactcggtcttggtcccacgcttc

SEQ ID NO: 226325 - DNA, 923 bp, Homo Sapiens
ctttacaagggcccactttgtacaaaaaagttggttcctgtttagggtcttatcctggcattgagggcgccggactggcgcttttggccgacttggcattgggtgggcggcttcttgggacccacatgagccagtggcatcatccccgcagtggctggggccggagacgcgacttttcaggacgctcctcagccaagaagaagggcggaaaccacatccccgaaaggtggaaagactatctcccagttggacagcggatgcctgggactcgtttcattgctttcaaagttcctttgcaaaagagttttgaaaagaaacttgctccagaagaatgcttttcccctttggatctttttaacaaaatccgagaacaaaatgaagaacttggactgattattgatttaacatatactcaacgctattataaaccagaggatttgccagaaactgttccttacttaaaaatttttacagttggacatcaagtgcctgatgatgagactatttttaaattcaaacacgctgttaatgggtttttgaaagaaaataaagataatgataaacttattggtgtccactgtacccatggtttaaacaggactggctacctcatttgcagatatttgattgatgtagaaggcgtgaggccagatgatgcaattgaattattcaataggtgccggggacattgcttagaaagacaaaactacattgaagaccttcagaatggtcctatcagaaagaattggaattccagtgtacccaggtcaagtgattttgaagactcagcacatctcatgcaaccagtccacaataagcctgttaaacaaggacctaggtataatctacatcagatccaggggtcactcagctcctcgacatttccccacccagacccaaagtttgcaacaatcagtcagaaa

SEQ ID NO: 226326 - DNA, 943 bp, Homo Sapiens
tttgtacaaaaaagttggaaagaaacgactcagggactgcggcgcttgcacgtcaacgggaggtgtgagcccaaagaaatgggacgtcggtcatcagatactgaagaagaaagcagaagcaagagaaaaaagaaacaccgtagacggtcctcctcgagcagttcttcagatagtagaacatacagccgaaagaaaggaggaaggaaatcaagatcaaagtcaagatcttggtccagagatcttcagcctcgttcacattcttatgatagaagacgcaggcatcgatcaagcagtagctcttcttatggctccagaaggaaacgaagtcgaagtcgttcaaggggtcgagggaaatcctatagagttcagaggtctaggtcaaaaagcagaacaagaaggtccaggtcaagacctcgtctccgttctcatagtcgtagcagtgaaaggtccagtcacagaagaacgcgtagtcggtctcgggatagagaacgacgtaagggcagagataaagagaaaagagaaaaggagaaggataaagggaaggacaaggaattacataacatcaaacgtggggaatctggaaacatcaaagctggattagaacatctgccaccagctgaacaggccaaagccagactacagctggttcttgaagctgctgcaaaagctgatgaagcattgaaagccaaagaaagaaatgaggaagaagcaaagagaagaaaggaggaagaccaagccaccctggtagaacaagtaaaaagagtaaaagaaattgaagctattgaaagtgattcttttgttcagcagacattcagatcaagtaaagaagtcaaaaagtcagtggaacctagtgaagtgaaacaagcaacttcaacatcaggaccagcatcagcagttgctgatccacccagtactgaaaagaaatagatcctaccagcatccc

SEQ ID NO: 226327 - DNA, 732 bp, Homo Sapiens
ctttgtacaaaaaagttggaacactgtcatcaatgttcagttcaaaagcctgaaagtttagatctagaagctggtaaaaatgacaatatcaatcacattaggggaaccattgttgtcttcacttaatccatttagcactatttaaaataagcacaccaagttatatgactaatataacttgaaaattttttatactgaggggttggtgataactcttgaggatgtaatgcattaataaaaatcaactcatcattttctacttgttttcaatgtgttggaaactgtaaaatgatactgtagaacctgtctcctactttgaaaactgaatgtcagggctgagtgaatcaaagtgtctagacatatttgcatagaggccaaggtattctattctaataactgcttactcaacactaccaccttttccttatactgtatatgattatggcctacaatgttgtatttgttatttattaaattgtgattgttttattattgtttatgccaaatgttaactgccaagcttggagtgacctaaagcattttttaaaagcatggctagatttacttcagtataaattatcttatgaaaaccaaattttaaaagccacaggtgttgattgttataaaataacatgctgccattcttgattgctacagtttttgttagtactttggatgcaattaaaactatgtgctatcacatgtgaaaaagcttaataaattccatctatc

SEQ ID NO: 226328 - DNA, 1128 bp, Homo Sapiens; identical to SEQ ID NO: 192328

SEQ ID NO: 226329 - DNA, 1009 bp, Homo Sapiens; identical to SEQ ID NO: 192330

SEQ ID NO: 226330 - DNA, 1114 bp, Homo Sapiens; identical to SEQ ID NO: 192331

SEQ ID NO: 226331 - DNA, 944 bp, Homo Sapiens
ttgtacaaaaaagttggctcagcggctgccaacagatcatgagccatcagctcctctggggccagctataggacaacagaactctcaccaaaggaccagacacagtgagcaccatgggacagtgtcggtcagccaacgcagaggatgctcaggaattcagtgatgtggagagggccattgagaccctcatcaagaactttcaccagtactccgtggagggtgggaaggagacgctgaccccttctgagctacgggacctggtcacccagcagctgccccatctcatgccgagcaactgtggcctggaagagaaaattgccaacctgggcagctgcaatgactctaaactggagttcaggagtttctgggagctgattggagaagcggccaagagtgtgaagctggagaggcctgtccgggggcactgagaactccctctggaattcttggggggtgttggggagagactgtgggcctggagataaaacttgtctcctctaccaccaccctgtaccctagcctgcacctgtcctcatctctgcaaagttcagcttccttccccaggtctctgtgcactctgtcttggatgctctggggagctcatgggtggaggagtctccaccagagggaggctcaggggactggttgggccagggatgaatatttgagggataaaaattgtgtaagagccaaagaattggtagtagggggagaacagagaggagctgggctatgggaaatgatttgaataatggagctgggaatatggctggatatctggtactaaaaaagggtctttaaaaacctacttcctaatctcttccccaatccaaaccatagctgtctgtccagtgctctcttcctgcctccagctctgccccaggctcctcctaaactctgtccctgggctagggcaggggaggagggaagagcagggttggggg

SEQ ID NO: 226332 - DNA, 551 bp, Homo Sapiens; identical to SEQ ID NO: 192332

SEQ ID NO: 226333 - DNA, 644 bp, Homo Sapiens
tttgtacaaaaaagttgggaatcaatgcccaaatactactcctgtaattcctacctccctgcaaccaactacaaccaagctctctgcatctactcccaagtatggggttcaagagagtaatgggtttcatatttcttatcaccacagtaagttcctactaggcaaaatgagagggcagtgtttcctttttggtacttattactgctaagtatttcccagcacatgaaaccttattttttcccaaagccagaaccagatgagtaaaggagtaagaaccttgcctgaacatccttccttcccacccatcgctgtgtgttagttcccaacatcgaatgtgtacaacttaagttggtcctttacactcaggctttcactatttcctttataatgaggatgattattttcaaggccctcagcatatttgtatagttgcttgcctgatataaatgcaatattaatgcctttaaagtatgaatctatgccaaagatcacttgttgttttactaaagaaagattacttagaggaaataagaaaaatcatgtttgctctcccggttcttccagtggtttgagacactggtttacactttatgccggatgtgcttttctccaatatcagtgctcgagacacagtgaagcaaatt

SEQ ID NO: 226334 - DNA, 964 bp, Homo Sapiens
cttttttataatggcgcaactttgtacaaaaaagttggctccgacatctacaagatccgggagatcgcggacgggttgtgcctggaggtggaggggaagatggtcagtaggacagaaggtaacattgatgactcgctcattggtggaaatgcctccgctgaaggccccgagggcgaaggtaccgaaagcacagtaatcactggtgtcgatattgtcatgaaccatcacctgcaggaaacaagtttcacaaaagaagcctacaagaagtacatcaaagattacatgaaatcaatcaaagggaaacttgaagaacagagaccagaaagagtaaaaccttttatgacaggggctgcagaacaaatcaagcacatccttgctaatttcaaaaactaccagttctttattggtgaaaacatgaatccagatggcatggttgctctattggactaccgtgaggatggtgtgaccccatatatgattttctttaaggatggtttagaaatggaaaaatgttaacaaatgtggcaattattttggatctatcacctgtcatcataactggcttctgcttgtcatccacacaacaccaggacttaagacaaatgggactgatgtcatcttgagctcttcatttattttgactgtgatttatttggagtggaggcattgtttttaagaaaaacatgtcatgtaggttgtctaaaaataaaatgcatttaaactcatttgagagaatgccttttagtttaatgcatatttaaactaaattgatcctgtagtgttcctggagaagctagagcctgattgtaggctactactcatcaattaacttctacagtgggagactacttctgggactggaatataaaaaagaatcaaaggttctgattttgagttgcaataaagggaaagaccatgctcatagcagtgccaacatctgaagtgtggagcccttacccatttc

SEQ ID NO: 226335 - DNA, 850 bp, Homo Sapiens
ttggctccccccgagcgccgctccggctgcaccgcgctcgctccgagtttcaggctcgtgctaagctagcgccgtcgtcgtctcccttcagtcgccatcatgattatctaccgggacctcatcagccgcgcacggtgatgggcggctctgtgtatccggcagacgatgagatgttctccgacatctacaagatccgggagatcgcggacgggttgtgcctggaggtggaggggaagatggtcagtaggacagaaggtaacattgatgactcgctcattggtggaaatgcctccgctgaaggccccgagggcgaaggtaccgaaagcacagtaatcactggtgtcgatattgtcatgaaccatcacctgcaggaaacaagtttcacaaaagaagcctacaagaagtacatcaaagattacatgaaatcaatcaaagggaaacttgaagaacagagaccagaaagagtaaaaccttttatgacaggggctgcagaacaaatcaagcacatccttgctaatttcaaaaactaccagttctttattggtgaaaacatgaatccagatggcatggttgctctattggactaccgtgaggatggtgtgaccccatatatgattttctttaaggatggtttagaaatggaaaaatgttaacaaatgtggcaattattttggatctatcacctgtcatcataactggcttctgcttgtcatccacacaacaccaggacttaagacaaatgggactgatgtcatcttgagctcttcatttattttgactgtgatttatttggagtggaggcattgtttttaagaaaaacatgtcatgtaagttgtctaaaaataaaatg

SEQ ID NO: 226336 - DNA, 856 bp, Homo Sapiens; identical to SEQ ID NO: 192344

SEQ ID NO: 226337 - DNA, 1051 bp, Homo Sapiens; identical to SEQ ID NO: 192347

SEQ ID NO: 226338 - DNA, 721 bp, Homo Sapiens; identical to SEQ ID NO: 192349

SEQ ID NO: 226339 - DNA, 1032 bp, Homo Sapiens
  misc_feature (799)..(809): n is a, c, g, or t
tgatgagcaatgctttttcataaaagcaaactttgtacaaaaaagttgggtaaatgtctattttaatattcacctatgaaagaatctgtgaatatatgtaaatacgtttaataaattttattggtcatgttaaatcattggaaaacttttttacattgcttaatgttttaagcttaatagcctttgcacttttaaaataaaaaccaagtatgcaaatcaaagatatttggtagtcaaaataagtaaaagaaatataggaatattccagtcaatctctgaaatgtttatgaaaaacaggttaatatgttgtatttttttccttgtatcaagatgcaaaacataatttgcaaaattttataattgaaataaaacttggtatgctgttttataataaattagcaatatactttaaaaaaaatccagtttctcctataacatgatgtaaattaaatattcaggaatatttcaggtctgaaatctgctgctgaacttgttagacatttttgaaaggaaaattaggttagcgtacaatttatcataaatatatgaggtaaaatttgcaaaactttccacagtactttcttgaattataatactgaatgttttctgttccgatagagaaaagtgaagcaaatatgtgaggaatgaagtgatctagtgcaagttggtaattccagctaatgggagagaatgtaaatgtgcaaaggtacatattaagcttagggatttttgaatttttacgtcagtttatattttaattcttactgtacttggcatgcgcaataaagcagcacatgtnnnnnnnnnnntacacagtgcaaggactttattataaaggttggatgtagttttccttagaaatttaatgagagattttggccttttttattggataaattgggccagaaaggcagggtagatttcgaagcactggttctgttgaagttaagtttattaagcctgggaacattaaaagctaatttataaaagcaatactttttaatatgaaaacttactgcaagtttgtttata

SEQ ID NO: 226340 - DNA, 1030 bp, Homo Sapiens; identical to SEQ ID NO: 192355
  misc_feature (817)..(827): n is a, c, g, or t

SEQ ID NO: 226341 - DNA, 1012 bp, Homo Sapiens
ttggggctctgatcgcggccgcagtttttccttttttcttctgccgtcgccttctctgcctcttctcatcctttctcgctctgctgctctgcagtgtgacgagtccgaatcctcttcccacccagcccgcgcctttcttcttttgcctgcgctgttctatttctccttcggccgccgccgccactgctgcacacagctggtgtcggtgccgcgcttttacccccaagtcgttcccgcagcctatggcccaggccgccttgggtatttctgctcaaggtaaccacatccctctttaaaaattccgccgaaaaagagaagacgctttacccgactctttgggccgttatctcacggcgaactttctgaccaagtatacaactacccagagggcctaggagaagtgctgtatagagagcagttcgacttcaacgctgagccaccttgggaacctagctgatgataggggggttccatctcccaacttgtccattttgttgcatattctaaggacccagacataggcttggtggcccgtctcttgtctttcctggtttatgactttcggctttgtggaatacggctgagatgaaaggatttattgatgatgcaaactactccgttggcctgttggatgaaggaacaaaccttggaaatgttattgataactatgtttatgaacataccctgacagggaaaaatgcattttttgtgggagatcttggaaagattgtgaagaaacacagtcaatggcagaatgtagtggctcagataaagccattctacacagtgaagtgcaactctgctccagctgtacttgagattttggcagctcttggaaccggatttgcttgttccagtaaaaatgaaatggctttagtgcaagagttgggtgtacctccagaaaacattatttacataagtccttgcaagcagtgtctcagataaagtatgcagcaaaagttggagtgaatatcctgacatgtgacaatgaaattgaattgaagaaaattgc

SEQ ID NO: 226342 - DNA, 1112 bp, Homo Sapiens; identical to SEQ ID NO: 192356

SEQ ID NO: 226343 - DNA, 1156 bp, Homo Sapiens; identical to SEQ ID NO: 192359

SEQ ID NO: 226344 - DNA, 786 bp, Homo Sapiens; identical to SEQ ID NO: 192360

SEQ ID NO: 226345 - DNA, 1060 bp, Homo Sapiens; identical to SEQ ID NO: 192366

SEQ ID NO: 226346 - DNA, 768 bp, Homo Sapiens; identical to SEQ ID NO: 192368
  misc_feature (451)..(465): n is a, c, g, or t

SEQ ID NO: 226347 - DNA, 883 bp, Homo Sapiens
ttgggtttggagctgctgctaaataatttctgctcagccatgtcgccggctccagatgcagccccggctcctgcgtcgatctccctgtttgacctcagcgcggatgctccggtctttcagggcctgagcctggctcaggggagagagaaagcccagaaagaaagctactccagggtcctatggatatttcagagaagttattttgttcaacttgtgaccagaccttccagaaccaccaagaacagagggaacattataagcttgactggcatcggtttaacctaaagcaacgtctcaaggacaagcctctcctgtctgccctggactttgaaaagcagagctccacaggagatctttccagcatctcgggatcagaagactcagactcagccagtgaggaggacttgcagacactggatcgggagagggctacatttgagaagttgagccgacccccaggcttttaccctcatcgagttcttttccagaatgcccagggccagtttctttatgcctaccgctgtgtcctaggccctcatcaggatcccccagaagaggcagaactgctgctacagaacctgcaaagtagaggtcccagagactgcgtggtgctcatggctgcagctgggcactttgctggtgctatatttcaaggaagagaagtggtgacacacaaaacttttcaccgctatacggttcgggccaagcggggcacagcccaggggcttcgggatgcccgaggtgggccatcacactctgctggagccaacctgaggcgctacaatgaagccacactatataaggtgttcgtgacctgctggcagggccaagctgggctaagcgctggaggagctggtacaatactgttgcgtgctccccgctc

SEQ ID NO: 226348 - DNA, 586 bp, Homo Sapiens
aactttgtacaaaaaagttggggtcgtggcgcggcttcccgcggtcttctctgcaaatgggctccgtggcctagcgcccccgtccccgccacccgtgatcgtgcgccgaggcccgcgaggggtcgccgcccagatcccaccagccagcaagctaaagcatggcggccatcccctccagcggctcgctcgtggccacccacgactactaccggcgccgcctgggttccacttccagcaacagctcctgcagcagtaccgagtgccccggggaagccattccccaccccccaggtctccccaaggctgacccgggtcattggtgggccagcttctttttcgggaagtccaccctcccgttcatggccacggtgttggagtccgcagagcactcggaacctccccaggcctccagcagcatgaccgcctgtggcctggctcgggacgccccgaggaagcagcccggcggtcagtccagcacagccagcgctgggcccccgtcctgacctgagcggttaccaccagccccaggcctgcggaggcgctagtccaccagagcccctccccgcccctctccccactccgcatc

SEQ ID NO: 226349 - DNA, 1077 bp, Homo Sapiens
acaaattgatgagcaatgcttctattataaaggccaactttgtacaaaaaagttggcgctggccgtgctggcagtgggccgcctcgatccctctgcagtctttcccttgaggctccaagaccagcaggctccagatggaccctgggaaggacaaagagggggtgccccagccctcagggccgccagcaaggaagaaatttgtgatacccctcgacgaggatgaggtccctcctggagtggccaagcccttattccgatctacacagagccttcccactgtggacacctcggcccaggcggcccctcagacctacgccgaatatgccatctcacagcctctggaaggggctggggccacgtgccccacagggtcagagcccctggcaggagagacgcccaaccaggccctgaaacccggggcaaaatccaacagcatcattgtgagccctcggcagaggggcaatcccgtactgaagttcgtgcgcaacgtgccctgggaatttggcgacgtaattcccgactatgtgctgggccagagcacctgtgccctgttcctcagcctccgctaccacaacctgcacccagactacatccatgggcggctgcagagcctggggaagaacttcgccttgcgggtcctgcttgtccaggtggatgtgaaagatccccagcaggccctcaaggagctggctaagatgtgtatcctggccgactgcacattgatcctcgcctggagccccgaggaagctgggcggtacctggagacctacaaggcctatgagcagaaaccagcggacctcctgatggagaagctagagcaggacttcgtctcccgggtgactgaatgtctgaccaccgtgaagtcagtcaacaaaacggacagtcagaccctcctgaccacatttggatctctggaacagctcatcgccgcatcaagagaagatctgggccttatgcccaggcctgagacctcagaaagcccggaggctgtttgatgtcctgcacgagcccttcttgaaagtaccctgatgacccagctgccaaggaaacccccatgtataataaatcatcctctag

SEQ ID NO: 226350 - DNA, 978 bp, Homo Sapiens
ttggcttggttctgccctgacagattctcctatcggggtcacagggacgctaagattgctacctggactttcgttgaccatgctgtcccgggtggtactttccgccgccgccacagcggccccctctctgaagaatgcagccttcctaggtccaggggtattgcaggcaacaaggacctttcatacagggcagccacaccttgtccctgtaccacctcttcctgaatacggaggaaaagttcgttatggactgatccctgaggaattcttccagtttctttatcctaaaactggtgtaacaggaccctatgtactcggaactgggcttatcttgtacgctttatccaaagaaatatatgtgattagcgcagagaccttcactgccctatcagtactaggtgtaatggtctatggaattaaaaaatatggtccctttgttgcagactttgctgataaactcaatgagcaaaaacttgcccaactagaagaggcgaagcaggcttccatccaacacatccagaatgcaattgatacggagaagtcacaacaggcactggttcagaagcgccattacctttttgatgtgcaaaggaataacattgctatggctttggaagttacttaccgggaacgactgtatagagtatataaggaagtaaagaatcgcctggactatcatatatctgtgcagaacatgatgcgtcgaaaggaacaagaacacatgataaattgggtggagaagcacgtggtgcaaagcatctccacacagcaggaaaaggagacaattgccaagtgcattgcggacctaaagctgctggcaaagaaggctcaagcacagccagttatgtaaatgtatctatcccaattgagacagctagaaacagttgactgactaaatggaaactagtctatttgacaaagtctttctgtgttggtgtctactgaagttatagtttacccttcctaaaatgaaaagtt

SEQ ID NO: 226351 - DNA, 743 bp, Homo Sapiens
  misc_feature (681)..(693): n is a, c, g, or t
caactttgtacaaaaaagttgggtttccggaaacatggcctccggtgtggctgtctctgatggtgtcatcaaggtgttcaacgacatgaaggtgcgtaagtcttcaacgccagaggaggtgaagaagcgcaagaaggcggtgctcttctgcctgagtgaggacaagaagaacatcatcctggaggagggcaaggagatcctggtgggcgatgtgggccagactgtcgacgatccctacgccacctttgtcaagatgctgccagataaggactgccgctatgccctctatgatgcaacctatgagaccaaggagagcaagaaggaggatctggtgtttatcttctgggcccccgagtctgcgccccttaagagcaaaatgatttatgccagctccaaggacgccatcaagaagaagctgacagggatcaagcatgaattgcaagcaaactgctacgaggaggtcaaggaccgctgcaccctggcagagaagctggggggcagtgccgtcatctccctggagggcaagcctttgtgagccccttctggccccctgcctggagcatctggcagccccacacctgcccttgggggttgcaggctgcccccttcctgccagaccggaggggctggggggatcccagcaaggggagggcaatcccttcacccagttgccaaacagannnnnnnnnnnnntggattttcttctccctccatcccttgacgggtctggccttcccaaactg

SEQ ID NO: 226352 - DNA, 516 bp, Homo Sapiens; identical to SEQ ID NO: 192378

SEQ ID NO: 226353 - DNA, 1224 bp, Homo Sapiens; identical to SEQ ID NO: 192379

SEQ ID NO: 226354 - DNA, 907 bp, Homo Sapiens; identical to SEQ ID NO: 192380
  misc_feature (761)..(773): n is a, c, g, or t

SEQ ID NO: 226355 - DNA, 653 bp, Homo Sapiens; identical to SEQ ID NO: 192381

SEQ ID NO: 226356 - DNA, 1119 bp, Homo Sapiens
  misc_feature (300)..(341): n is a, c, g, or t
aaaacgggagaaagggccggggctgctgcgcttcgcgaggtcttgctccctttgggacctggtctcccatctgaccctccaggcttagcttgcctcacatgtcagggcaggtatccacctaaccaggctgcaggggaggaggagggaagccgggaatggggtaggaagaaagctagaggtggcctgcaagctgggctggggcccccgccggcggccaccataaatactatgggagtttagccaatcccgagctccgctgtgtcttgtgctaaacattcctttctctccgtgcctctgtcnnnnnnnnnnnnnnnnnnnnnnnnnnnnnnnnnnnnnnnnnngctaatccgacttctcgccatcatcctcctggtgggtgtcaccatcgtgcccgttcttgtcttccttggagaggtgggcctgggaacccagcgcggacagcgagaggaggccggtgcctgcgctgaccgccggcagcgaaggcggctgcagccccacgggtagtggggtcaagggcagggccagggcctgcagctgggacagctggtgggcttggagctgctgtcggatgatagagttcagctcgggagcggtgacctgcttggccctctcaatggctcccaagacctgctgctggtgctcttgggagaggtagggcaggacctgggcacaaatcccgttcagccttttgacgatctcagcctgtttgtgcatctcgatgttcaagccgtaggacatctcgtagtacatcacatagtgacgctgcatctctgacttctcactggccaacttgtcacattcgagcttgaggctgtggtactgagcttgcagtagctgaaattcgtctttgatgcggtcgcaggagtccgaggtggtgaatttgagttgctggggtaggtgcgaggagccccggcagccggccgggcctcggtttccccatctgtcaaagaaaagggacccggctgcccgcgtcgaagccgccggccctgctgtggcacgacctggacgcgtgccacggacgtgctctgtgaccttggctctggctgggcggtggttcttgctgagcctcagtttccttttctgcagaaaggcagcggtaatgccgccttcctgagccaa

SEQ ID NO: 226357 - DNA, 1373 bp, Homo Sapiens; identical to SEQ ID NO: 192382

SEQ ID NO: 226358 - DNA, 459 bp, Homo Sapiens; identical to SEQ ID NO: 192383

SEQ ID NO: 226359 - DNA, 946 bp, Homo Sapiens
ttggcgtaggacggagggtagtgcgtctagagacacatattccccacggatttgacgatggtgttcggtcttgaatggaaatgtagtcttaggccagtcttaggtttttgaacaggatagtaggtatccggagtcgattgagggccagagcaggcactggggttcggatcctgggcaaagtttcccacgttgagggtctcgaggacgcctagatctctttcccagggccatggcgaacccgaagctgctgggaatggggctaagcgaggcggaggcgatcggtgctgattcggcgcgatttgaggagctgctgctgcaggcctcgaaggagctccagcaagcccagacaaccagaccagaatcgacacaaatccagcctcagcctggtttctgcataaagaccaactcctcggaagggaaggttttcatcaacatctgccactccccctctatccctcctcccgccgacgtgaccgaggaggagctgcttcagatgctagaggaggaccaagctgggtttcgcatccccatgagtctgggagagcctcatgcagaactggatgcaaaaggccagggatgtaccgcctacgacgtagctgtcaacagcgacttctaccggaggatgcagaacagcgatttcttgcgggagctcgtgatcaccatcgccagggagggccttgaggacaaataccacttgcagctgaatccggaatggcgcatgatgaagaaccggccattcatgggctccatctcgcagcagaacatccgctcggagcagcgtcctcggatccaggagctgggggacctgtacacgcccgcccccgggagagctgagtcagggcctgaaaagcctcacctgaacctgtggctggaagcccccgacctcctcttggccgaagttgacctccccaaactggatggagccctggggctgtctctggagatc

SEQ ID NO: 226360 - DNA, 907 bp, Homo Sapiens; identical to SEQ ID NO: 192394

SEQ ID NO: 226361 - DNA, 1024 bp, Homo Sapiens; identical to SEQ ID NO: 192396

SEQ ID NO: 226362 - DNA, 1409 bp, Homo Sapiens; identical to SEQ ID NO: 192399

SEQ ID NO: 226363 - DNA, 941 bp, Homo Sapiens
ttggcggtagcggcggcggcggcggtggatcggcggcagctgtgagggggttccgggaagatggtgctgatcaaggaattccgtgtggttttgccatgttctgttcaggagtatcaggttgggcagctttactctgttgcagaagctagtaagaatgagactggtggtggagaaggaattgaagtcttaaagaatgaaccttatgagaaggatggagaaaagggacagtatacgcacaaaatttatcacctaaagagcaaagtgcctgcattcgtgaggatgattgctcccgagggctccttggtgtttcatgagaaagcctggaatgcgtacccctactgtagaacaattgtaacgaatgaatatatgaaagatgatttcttcattaaaatcgaaacatggcacaaaccagacttgggaacattagaaaatgtacatggtttagatccaaacacatggaaaactgttgaaattgtccatatagatattgcagatagaagtcaagttgaaccagcagactacaaagctgatgaagacccagcattattccagtcagtcaagaccaagagaggccctttgggacccaactggaagaaggagctggcaaacagccctgactgtccccagatgtgtgcctataagctggtgaccatcaaattcaagtggtggggactgcaaagcaaagtagaaaacttcattcaaaagcaagaaaaacggatatttacaaacttccatcgccagcttttttgttggattgacaagtggatcgatctcacgatggaagacattagagaatggaagacgagactcagaaagaactagaaacaatgcgtaagaggggttccgttcgaggcacgtcggctgctgatgtctagatgagtcctctgtagggtcagagacaatgtcaaactgtttacgtaatcaaggtcaagtgaggggaa

SEQ ID NO: 226364 - DNA, 1234 bp, Homo Sapiens; identical to SEQ ID NO: 192401
  misc_feature (1057)..(1082): n is a, c, g, or t

SEQ ID NO: 226365 - DNA, 954 bp, Homo Sapiens
ttggccccctgcgcctcgccgggacaacggggcggcctggcgggtggcatcgagatctgcatcaccttccccaccgagtacgtgaagacgcagctgcagctggacgagcgctcgcacccgccgcggtaccggggcatcggggactgcgtgcggcagacggttcgcagccatggcgtcctgggcctgtaccgcggccttagctccctgctctacggttccatccccaaggcggccgtcaggtttggaatgttcgagttcctcagcaaccacatgcgggatgcccagggacggctggacagcacgcgtgggctgctgtgcggcctgggcgctggcgtggccgaggccgtggtggtcgtgtgccccatggagaccatcaaggtgaagttcatccacgaccagacctccccaaaccccaagtacagaggattcttccacggggttagggagattgtgcgggaacaagggctgaaggggacgtaccagggcctcacagccactgtcctgaagcagggctcgaaccaggccatccgcttcttcgtcatgacctccctgcgcaactggtaccgaggggacaaccccaacaagcccatgaaccctctgatcactggggtcttcggagctattgcaggcgcagccagtgtctttggaaacactcctctggatgtgattaagacccggatgcagggcctggaggcgcacaaataccggaacacgtgggactgcggcttgcagatcctgaagaaggaggggctcaaggcattctacaagggcactgtcccccgcctgggccgggtctgcctggatgtggccatagtgtttgtcatctatgatgaagtggtgaagctgctcaacaaagtgtggaagacggactaagcctagagaggccgcaagggaccgcccagcacggccagagtgtcctgctacctttgtctcacatgattcagtgcagtagtg

SEQ ID NO: 226366 - DNA, 830 bp, Homo Sapiens; identical to SEQ ID NO: 192402

SEQ ID NO: 226367 - DNA, 767 bp, Homo Sapiens
  misc_feature (121)..(145): n is a, c, g, or t
acaaaaaagttggcaattttcgtttttttgtttagaagccagagtttatcttttctataagtttacagcctttttcttatatatacagttattgccacctttgtgaacatggcaagggacnnnnnnnnnnnnnnnnnnnnnnnnnctagtaccagcctaggaattcggttagtactcatttgtattcactgtcactttttctcatgttctaattataaatgaccaaaatcaagattgctcaaaagggtaaatgatagccacagtattgctccctaaaatatgcataaagtagaaattcactgccttcccctcctgtccatgaccttgggcacagggaagttctggtgtcatagatatcccgttttgtgaggtagagctgtgcattaaacttgcacatgactggaacgaagtatgagtgcaactcaaatgtgttgaagatactgcagtcatttttgtaaagaccttgctgaatgtttccaatagactaaatactgtttaggccgcaggagagtttggaatccggaataaatactacctggaggtttgtcctctccatttttctctttctcctcctggcctggcctgaatattatactactctaaatagcatatttcatccaagtgcaataatgtaagctgaatcttttttggacttctgctggcctgttttatttcttttatataaatgtgatttctcagaaattgatattaaacactatcttatcttctcctgaactgttgattttaattaaaattaagtgctaatt

SEQ ID NO: 226368 - DNA, 859 bp, Homo Sapiens; identical to SEQ ID NO: 192405
  misc_feature (210)..(234): n is a, c, g, or t

SEQ ID NO: 226369 - DNA, 943 bp, Homo Sapiens; identical to SEQ ID NO: 192407

SEQ ID NO: 226370 - DNA, 917 bp, Homo Sapiens
  misc_feature (688)..(729): n is a, c, g, or t
gagcaatgctttcttataatagccaactttgtacaaaaaagttggggctgataatgcctgtgttctttttgccgtctctgttcttatgtttataatcagttcaatgctggtttatggagcaatttcttatcaagtgggttggctgattccattcttctgttaccgactttttgacttcgtcctcagttgcctggttgctattagttctctcacctatttgccaagaatcaaagaatatctggatcaactacctgattttccctacaaagatgacctcctggccttggactccagctgcctcctgttcattgttcttgtgttctttgccttattcatcatttttaaggcttatctaattaactgtgtttggaactgctataaatacatcaacaaccgaaacgtgccggagattgctgtgtaccctgcctttgaagcacctcctcagtacgttttgccaacctatgaaatggccgtgaaaatgcctgaaaaagaaccaccacctccttacttacctgcctgaagaaattctgcctttgacaataaatcctataccagctttttgtttgtttatgttacagaatgctgcaattcagggctcttcaaacttgtttgatataaaatatgttgtcttttgtttaagcatttattttcaaacactaaggagctttttgacatctgttaaacgtcnnnnnnnnnnnnnnnnnnnnnnnnnnnnnnnnnnnnnnnnnngaagacaatctaggttaagcaagagcaaagtgccattgtttgcctttaattgggggggtgggaagggaaagagggtacttgccacatagtttcctttttaactgcactttctttatataatcgtttgcaatttgttacttgctaaccctgagtactttcagaaagactgacttaaatattccgggtga

SEQ ID NO: 226371 - DNA, 1210 bp, Homo Sapiens; identical to SEQ ID NO: 192408
  misc_feature (1038)..(1082): n is a, c, g, or t

SEQ ID NO: 226372 - DNA, 726 bp, Homo Sapiens; identical to SEQ ID NO: 192409
  misc_feature (347)..(388): n is a, c, g, or t

SEQ ID NO: 226373 - DNA, 1165 bp, Homo Sapiens; identical to SEQ ID NO: 192410
  misc_feature (985)..(1026): n is a, c, g, or t

SEQ ID NO: 226374 - DNA, 1199 bp, Homo Sapiens; identical to SEQ ID NO: 192411
  misc_feature (936)..(977): n is a, c, g, or t

SEQ ID NO: 226375 - DNA, 1188 bp, Homo Sapiens; identical to SEQ ID NO: 192412
  misc_feature (1018)..(1049): n is a, c, g, or t

SEQ ID NO: 226376 - DNA, 374 bp, Homo Sapiens; identical to SEQ ID NO: 192413

SEQ ID NO: 226377 - DNA, 1195 bp, Homo Sapiens; identical to SEQ ID NO: 192414
  misc_feature (986)..(1027): n is a, c, g, or t

SEQ ID NO: 226378 - DNA, 520 bp, Homo Sapiens; identical to SEQ ID NO: 192416

SEQ ID NO: 226379 - DNA, 1240 bp, Homo Sapiens
  misc_feature (225)..(233): n is a, c, g, or t
ttggcttcagtccatttccccttcctatttcagctgttccttttcacctaactgttcagtcattctggttttcaagcagtgctttatctcatgtccttgaatatagttgtgtaactttattttttaggtaataattagaacagttcccttcagaggctgcatttgccttcttctgccacctaaatattacttcccttcaaatctgcctttgaatcatcatttttnnnnnnnnnttaacatgtttttgttgtagttatcttctggggtttcaattcctcagaaacaacttttttcacaacggaaaggaaagaacactagtgttctttcagtaaagtacaaagtgtttattttacaaaagagtaggtactcttgagagcaattcaaatcatgctgacaaggatactgatagaaaaagtgatttcttcttattataaagtacatttaaagttcaaggactaaccttatttatttgggaaaggggaggaggaaggaaatgatatggtacccagacactgggctaggctgcaactttatctcatttaatactcccagctgtcatgtgagaaagaaagcaggctaggcatgtgaaatcactttcatggattattaatggatttaagagggcatcaatcagctcaactcaagatttcataatcatttttagtatttagattgtgcctcaaagttgtagtacctcacaatacctccactggtttcctgttgtaaaaaccttcagtgagtttgaccattgtgctcttggctcttgggctggagtaccgtggtgagggagtaaacactagaagtctttagtacaaaactgctctagggacacctggtgattcctacacaagtgatgtttatatttctcataaagagtcttccctatcccaaggtcttcatgatgccagtagccatatatgataaattatgttcagtgataacttagttatcagaaatcagctcagtggtcttccccgccatgattcacatttgatgagtttttaaaaatcaaagtgattttgaaaatctctaatggctcagaaaataaaaacatccagtttgtggatgactatatttagatttctctagactctagtggaagacctttggaaaggccatgccaaccgtgcttgtactgctagaagcactttatgtttcctttttgggtgaaatggatttatgtgagtgctttaaacaaatagcaatacttatagactgaaataaaatgaaacttcaataa

SEQ ID NO: 226380 - DNA, 1170 bp, Homo Sapiens; identical to SEQ ID NO: 192417
  misc_feature (972)..(980): n is a, c, g, or t

SEQ ID NO: 226381 - DNA, 799 bp, Homo Sapiens; identical to SEQ ID NO: 192418

SEQ ID NO: 226382 - DNA, 1086 bp, Homo Sapiens; identical to SEQ ID NO: 192419
  misc_feature (952)..(960): n is a, c, g, or t

SEQ ID NO: 226383 - DNA, 946 bp, Homo Sapiens; identical to SEQ ID NO: 192420
  misc_feature (693)..(701): n is a, c, g, or t

SEQ ID NO: 226384 - DNA, 1088 bp, Homo Sapiens; identical to SEQ ID NO: 192421
  misc_feature (958)..(966): n is a, c, g, or t

SEQ ID NO: 226385 - DNA, 1260 bp, Homo Sapiens
ctttgtacaaaaaagttggtgaagatgtcgtttatataacggtcattctcatgaagatgacaatccatttgcagagtacatgtggatggaaaatgaagaagaattcaacagacaaatagaagaggagttatgggaagaagaatttattgaacgctgtttccaagaaatgctggaagaggaagaagagcatgaatggtttattccagctcgagatctcccacaaactatggaccaaatccaagaccagtttaatgaccttgttatcagtgatggctcttctctggaagatcttgtggtcaagagcaatctgaatccaaatgcaaaggagtttgttcctggggtgaagtacggaaatatttgagtagacggggccctcttttggtggatgtagcacaatttccacactgtgaaggcagtattagaagacttaattgtaaaagctctcttgtcactgtgttacacttatgcattgccaaagtttttgttagtcttgcatgcttaataaaagtgctgagactgttactaagtaaaaagctgtcaaacatttactgaaaatagaattggccccatggcttgatgtgaagacagcaaggaaagaagcaccagtcaagttgtgaacaagcaccaaattaaaagacctaaaccttaccaaattgtctttttttgaggctaatctatcacttgttaatgtctaaactttaaaatcagtacatttaatttgagttccaactgttaagcatatttctcagacttaaatttgattatgtccccatcaaaaagaatctccattttctgaaggtctgttagttaatttgagataatttgttaaaggcaagtatgtcatattactgaggctacaagttagtcagcagatgagtgccagtccagccttttctggtatgttattgttagaaatattgagttctaatgttacatctgaggaagtatgtaatttgagaattgtaacttctaagggattcactgcatcatagctatgcctgtatggagtctaacatatgaccaataccaacccataatccagctgaacaaagatactgtaacattatgatttgagtggtgcttttccttgctttgttaaccatcacgagagtctgcagcacacttttaacaaagctagaacagttttggcttcttaacttcatatttgggtaggttaagctgcatacgtggtccgtgtgaatagtgtttaagttgaaatattgtaaaaaattatatttttcaaaatattttaaagaataa

SEQ ID NO: 226386 - DNA, 993 bp, Homo Sapiens; identical to SEQ ID NO: 192430

SEQ ID NO: 226387 - DNA, 580 bp, Homo Sapiens; identical to SEQ ID NO: 192431

SEQ ID NO: 226388 - DNA, 925 bp, Homo Sapiens; identical to SEQ ID NO: 192432

SEQ ID NO: 226389 - DNA, 960 bp, Homo Sapiens; identical to SEQ ID NO: 192433

SEQ ID NO: 226390 - DNA, 1331 bp, Homo Sapiens; identical to SEQ ID NO: 192435
  misc_feature (306)..(321): n is a, c, g, or t

SEQ ID NO: 226391 - DNA, 714 bp, Homo Sapiens; identical to SEQ ID NO: 192436

SEQ ID NO: 226392 - DNA, 863 bp, Homo Sapiens; identical to SEQ ID NO: 192437

SEQ ID NO: 226393 - DNA, 1024 bp, Homo Sapiens; identical to SEQ ID NO: 192438

SEQ ID NO: 226394 - DNA, 986 bp, Homo Sapiens; identical to SEQ ID NO: 192440

SEQ ID NO: 226395 - DNA, 908 bp, Homo Sapiens
atgagcaatgctttcccctataatagccaactttgtacaaaaaagttggacaagatggcgaccgagacggtggagctccataagctaaagcttgccgaactaaagcaagaatgtcttgctcgtggtttggagaccaagggaataaagcaagatcttatccacagactccaggcatatcttgaagaacatgctgaagaggaggcaaatgaagaagatgtactgggagatgaaacagaggaagaagaaacaaagcccattgagctccctgtcaaagaggaagaaccccctgaaaaaactgttgatgtggcagcagagaagaaagtggtgaaaattacatctgaaataccacagactgagagaatgcagaagagggctgaacgattcaatgtacctgtgagcttggagagtaagaaagctgctcgggcagctaggtttgggatttcttcagttccaacaaaaggtctgtcatctgataacaaacctatggttaacttggataagctgaaggaaagagctcaaagatttggtttgaatgtctcttcaatctccagaaagtctgaagatgatgagaaactgaaaaagaggaaggagcgatttgggattgtcacaagttcagctggaactggaaccacagaggatacagaggcaaagaagaggaaaagagcagagcgctttgggattgcctgatgaaaagttcctgatactttctgttctccagtgttttccatttctctccttcttcttggtcacatatatgcctaaatgcacagtcatgtgcctacgtcctgcctcgcaatgagggagcatgtaccccaggtacatccatgaactgcggcagcagtttgacttattgctgtttcagctttaaagttgttgtgtttttgtttttgattatgttgcttgttaat

SEQ ID NO: 226396 - DNA, 1410 bp, Homo Sapiens
  misc_feature (947)..(959): n is a, c, g, or t
  misc_feature (1001)..(1010): n is a, c, g, or t
ttggcggagccgctgtcaactctccaactcagctcagctgatcggttgccgccgccgccgccgccagattctggaggcgaagaacgcaaagctgagaacatggacgttaatatcgccccactccgcgcctgggacgatttcttcccgggttccgatcgctttgcccggccggacttcagggacatttccaaatggaacaaccgcgtagtgagcaacctgctctattaccagaccaactacctggtggtggctgccatgatgatttccattgtggggtttctgagtcccttcaacatgatcctgggaggaatcgtggtggtgctggtgttcacagggtttgtgtgggcagcccacaataaagacgtccttcgccggatgaagaagcgctaccccacgacgttcgttatggtggtcatgttggcgagctatttccttatctccatgtttggaggagtcatggtctttgtgtttggcattacttttcctttgctgttgatgtttatccatgcatcgttgagacttcggaacctcaagaacaaactggagaataaaatggaaggaataggtttgaagaggacaccgatgggcattgtcctggatgccctagaacagcaggaagaaggcatcaacagactcactgactatatcagcaaagtgaaggaataaacataacttacctgagctagggttgcagcagaaattgagttgcagcttgcccttgtccagacctatgttctgcttgcgtttttgaaacaggaggtgcacgtaccacccaattatctatggcagcatgcatgtataggccgaactattatcagctctgatgtttcagagagaagacctcagaaaccgaaagaaaaccaccaccctcctattgtgtctgaagtttcacgtgtgtttatgaaatctaatgggaaatggatcacacgatttctttaagggaattnnnnnnnnnnnnngaattacggcttttacagcaacaatacgattatcttataggnnnnnnnnnntcattgtaaagtatcaagacaatacgagtaaatgaaaaggctgttaaagtagatgacatcatgtgttagcctgttcctaatcccctagaattgtaatgtgtgggatataaattagtttttattattctcttaaaaatcaaagatgatctctatcactttgccacctgtttgatgtgcagtggaaactggttaagccagttgttcatacttcctttacaaatataaagatagctgtttaggatattttgttacatttttgtaaatttttgaaatgctagtaatgtgttttcaccagcaagtatttgttgcaaacttaatgtcattttccttaagatggttacagctatgtaacctgtattattctggacggacttattaaatacaaacagacaaaaataaa

SEQ ID NO: 226397 - DNA, 1018 bp, Homo Sapiens; identical to SEQ ID NO: 192442
  misc_feature (863)..(875): n is a, c, g, or t
  misc_feature (917)..(926): n is a, c, g, or t

SEQ ID NO: 226398 - DNA, 1097 bp, Homo Sapiens; identical to SEQ ID NO: 192443
  misc_feature (889)..(901): n is a, c, g, or t
  misc_feature (943)..(952): n is a, c, g, or t

SEQ ID NO: 226399 - DNA, 849 bp, Homo Sapiens; identical to SEQ ID NO: 192444

SEQ ID NO: 226400 - DNA, 841 bp, Homo Sapiens; identical to SEQ ID NO: 192447
  misc_feature (71)..(101): n is a, c, g, or t
  misc_feature (124)..(138): n is a, c, g, or t

SEQ ID NO: 226401 - DNA, 926 bp, Homo Sapiens
actttgtacaaaaaagttggctggaacctaacccttcccactctgtcaccttctcgatcccgccggcgctttagagccgcagtccagtcttggatccttcagagcctcagccactagctgcgatgcatgtgatcaagcgagatggccgccaagaacgagtcatgtttgacaaaattacatctcgaatccagaagctttgttatggactcaatatggattttgttgatcctgctcagatcaccatgaaagtaatccaaggcttgtacagtggggtcaccacagtggaactagatactttggctgctgaaacagctgcaaccttgactactaagcaccctgactatgctatcctggcagccaggatcgctgtctctaacttgcacaaagaaacaaagaaagtgttcagtgatgtgatggaagacctctataactacataaatccacataatggcaaacactctcccatggtggccaagtcaacattggatattgttctggccaataaagatcgcctgaattctgctattatctatgaccgagatttctcttacaattacttcggctttaagacgctagagcggtcttatttgttgaagatcaatggaaaagtggctgaaagaccacaacatatgttgatgagagtatctgttgggatccacaaagaagacattgatgcagcaattgaaacatataatcttctttctgagaggtggtttactcatgcttcgcccactctcttcaatgctggtaccaaccgcccacaactttctagctgttttcttctgagtatgaaagatgacagcattgaagcatttatgacactctaaagcaatgtgcattgatttctaagtctgctggaggaattggtgttgctgtgagttgtattcgggctactggcagctacattgctgggactaatggcaatt

SEQ ID NO: 226402 - DNA, 1364 bp, Homo Sapiens
ttgggtttcccggcttcatttctcccgactcagcttcccaccctgggctttccgaggtgctttcgccgctgtccccaccactgcagccatgatctccttaacggacacgcagaaaattggaatgggattaacaggatttggagtgtttttcctgttctttggaatgattctcttttttgacaaagcactactggctattggaaatgttttatttgtagccggcttggcttttgtaattggtttagaaagaacattcagattcttcttccaaaaacataaaatgaaagctacaggtttttttctgggtggtgtatttgtagtccttattggttggcctttgataggcatgatcttcgaaatttatggattttttctcttgttcaggggcttctttcctgtcgttgttggctttattagaagagtgccagtccttggatccctcctaaatttacctggaattagatcatttgtagataaagttggagaaagcaacaatatggtataacaacaagtgaatttgaagactcatttaaaatattgtgttatttataaagtcatttgaagaatattcagcacaaaattaaattacatgaaatagcttgtaatgttctttacaggagtttaaaacgtatagcctacaaagtaccagcagcaaattagcaaagaagcagtgaaaacaggcttctactcaagtgaactaagaagaagtcagcaagcaaactgagagaggtgaaatccatgttaatgatgcttaagaaactcttgaaggctatttgtgttgtttttccacaatgtgcgaaactcagccatccttagagaactgtggtgcctgtttcttttctttttattttgaaggctcaggagcatccataggcatttgctttttagaaatgtccactgcaatggcaaaaatatttccagttgcactgtatctctggaagtgatgcatgaattcgattggattgtgtcattttaaagtattaaaaccaaggaaaccccaattttgatgtatggattacttttttttgtaaacatggttaaaataaaacttttgtggttcttctgaatcttaatatttcaaagccaggtgaaaatctgaactagatattctttgttggaatatgcaaaggtccattctttactaacttttagttactaaattatagctaagttttgtcagcagcatactccggaaagtctcatacttcttgggagtctgccctcctaagtatctgtctatatcattcattacgtgtaagtatttaacaaaaaagcattcttgaccatgaatgaagtagtttgtttcatagcttgtctcattgaatagtattattgaagatactaaatgatgcaaaccaaatgga

SEQ ID NO: 226403 - DNA, 914 bp, Homo Sapiens; identical to SEQ ID NO: 192453

SEQ ID NO: 226404 - DNA, 820 bp, Homo Sapiens; identical to SEQ ID NO: 192456
  misc_feature (174)..(184): n is a, c, g, or t

SEQ ID NO: 226405 - DNA, 1391 bp, Homo Sapiens
gccaactttgtacaaaaaagttggcgaactgctcgttgtcatgaagacttgtcaagaggaaaaattgatgggacacttgggtgttgtattgtatgagtatttgggtgaagagtaccctgaagtattgggcagcattcttggagcactgaaggccattgtaaatgtcataggtatgcataagatgactccaccaattaaagatctgctgcctagactcacccccatcttaaagaacagacatgaaaaagtacaagagaattgtattgatcttgttggtcgtattgctgacaggggagctgaatatgtatctgcaagagagtggatgaggatttgctttgagcttttagagctcttaaaagcccacaaaaaggctattcgtagagccacagtcaacacatttggttatattgcaaaggccattggccctcatgatgtattggctacacttctgaacaacctcaaagttcaagaaaggcagaacagagtttgtaccactgtagcaatagctattgttgcagaaacatgttcaccctttacagtactccctgccttaatgaatgaatacagagttcctgaactgaatgttcaaaatggagtgttaaaatcgctttccttcttgtttgaatatattggtgaaatgggaaaagactacatttatgccgtaacaccgttacttgaagatgctttaatggatagagaccttgtacacagacagacggctagtgcagtggtacagcacatgtcacttggggtttatggatttggttgtgaagattcgctgaatcacttgttgaactatgtatggcccaatgtgtttgagacatctcctcatgtaattcaggcagttatgggagccctagagggcctgagagttgctattggaccatgtagaatgttgcaatattgtttacagggtctgtttcacccagcccggaaagtcagagatgtatattggaaaatttacaactccatctacattggttcccaggacgctctcatagcacattacccaagaatctacaacgatgataagaacacctatattcgttatgaacttgactatatcttataattttattgtttattttgtgtttaatgcacagctacttcacaccttaaacttgctttgatttggtgatgtaaacttttaaacattgcagatcagtgtagaactggtcatagaggaagagctagaaatccagtagcatgatttttaaataacctgtctttgtttttgatgttaaacagtaaatgccagtagtgaccaagaacacagtgattatatacactatactgggagggatttcatttttaattcatctttatgaagatttagaactcattccttgtttttaaagggaatgtttaattgagaaataaaccatttgtgt

SEQ ID NO: 226406 - DNA, 1236 bp, Homo Sapiens; identical to SEQ ID NO: 192458

SEQ ID NO: 226407 - DNA, 1053 bp, Homo Sapiens; identical to SEQ ID NO: 192463
  misc_feature (90)..(133): n is a, c, g, or t
  misc_feature (836)..(844): n is a, c, g, or t

SEQ ID NO: 226408 - DNA, 983 bp, Homo Sapiens; identical to SEQ ID NO: 192465
  misc_feature (603)..(611): n is a, c, g, or t

SEQ ID NO: 226409 - DNA, 927 bp, Homo Sapiens
cattaggcttttcataatgcttggtgccatccgcttaataatatgttcaaagataaaagcaggcatgattgtaatagtaactacagtcccagatgttgacagtatgtctgcaatttgagagtccttcaatccaatgacattctgtccattgatttcacagatgttatgttccgtgagaagaccatttctggctgcagagctatctttcactatggatgttatttttccatttttaaagataaaaccaacatgtccagtgctatccttatgcatggtaatcgtccgttcaaagggcctgtcacgaatggtcatggtaatcttctctccaaaagcctgtttgagcaccttgtgcgctttatcagagctccatcctgcacagttttcaccattgatctgaagtacttggtccccaaatctcagaccaaccaatgaggctggagaattagcctggactagctgaacaaatataccattatctattgatttaagcctgagtccaatttttccatcttgatccttacacaaaatgacttcacgaatcccttgcttaatttctgctctacgaattccaacatcattaccagttacaggagccaccatatagtttatactggaaggtcttgctaccaactgcccctgaagtggtgcaccagaaaccacggccacatttgcacgtatttcttcttcatttaaactcagccccatgtattgagagagctctggatacagtctgggatagagatttccatcgtgagggataggagcagaagcttctgacaaaattgctggattggcagggtttgcagaaaaagcagtttgagcctgaattactttgtctaccttcaagtcttcgagagatggatagagagacatttttgcaggattcttctagcccacaagccaacttttttgtacaaagttggcttt

SEQ ID NO: 226410 - DNA, 1060 bp, Homo Sapiens; identical to SEQ ID NO: 192471
  misc_feature (735)..(744): n is a, c, g, or t
  misc_feature (751)..(765): n is a, c, g, or t

SEQ ID NO: 226411 - DNA, 1210 bp, Homo Sapiens; identical to SEQ ID NO: 192472
  misc_feature (728)..(737): n is a, c, g, or t

SEQ ID NO: 226412 - DNA, 837 bp, Homo Sapiens; identical to SEQ ID NO: 192474
  misc_feature (179)..(188): n is a, c, g, or t
  misc_feature (195)..(209): n is a, c, g, or t

SEQ ID NO: 226413 - DNA, 1112 bp, Homo Sapiens
caactttgtacaaaaaagttggctttcaactctgcgctgcccagccttctcagtggacttgcccctcctaagcagagaaggcctatgaggttgcttgctgctgggaagcctggcagagccaattaccaccctctgctgcttagtgcttgggtacctcttgcaataaccagctcttagttgttccctttccctggggcttttccatttaacacatggagcccttcccccagaaggctacttccttgttttagaggaaggtactgcccattgggagatggggacattgggacctcagcaatgaagaacccttgtgaagtaaccaggaggaatggggaaagaagcaagttgggcaggatatggcctacttccataggcttttcttttttcaggtttgatgtaagcatgggcttacatcccccaggtacatacttttacttattgtgggataacctggcactagtaggcaggtaaagtcacaaatttggtgtcttttcaccttttgactgttgacttaatagctcctctcactctgcctggagatacttcctgcctcagatgaggagccagaagaaacagagcccgacttgaatgaactcagctcagagttctaaggaccagcattctgggggccattttctctacaggcaaatggaattgcttttccataacatccaaattgtaatgtggttgctgctgaaggaggaggcagcagcgaggtcctgcggtacccatggggtgatgctacttctgcatgcatctacagggcatctgacacctaacatgagacgtggcatgtgagatgagacttggcatgtgagacatagggtcactagagacccttctgggtcagaggagagagactgaattggactaaacccgtcctctgttcccagcacgtttctcatatagccctcagtcactgagggagtcccccgcacgattggagaggcacattcccttgggacagaggctacaggttggagctttttttcccctgtccccaaccccatccccacctccacttcagaaatggcaccccacccaactggccaagtgttaagtgatgtgcttattgagagcaactccgggtgtctttaaatgtagagaaaagg

SEQ ID NO: 226414 - DNA, 1280 bp, Homo Sapiens
  misc_feature (57)..(97): n is a, c, g, or t
  misc_feature (373)..(406): n is a, c, g, or t
  misc_feature (735)..(748): n is a, c, g, or t
  misc_feature (772)..(781): n is a, c, g, or t
  misc_feature (904)..(923): n is a, c, g, or t
ttggataaactatattttggtggggatggtgattaaacacctcttttgggtatgccnnnnnnnnnnnnnnnnnnnnnnnnnnnnnnnnnnnnnnnnngctaatgctagtatatactgcaatgttaggggaatgaacatgttttcctactgcattggggacttctagataggttaatgaaaggccttttattctgttactggacatgaaaactttgtctaatttcttactctattgtacgtttacagtcgcagcactaaaaatggatgacatcaaacatttttaacaaaatgatgtacaaactaaggactatttattgataatgttttgctactcttgtcagacaatggctataaactgaattaggcagtcttnnnnnnnnnnnnnnnnnnnnnnnnnnnnnnnnnngaacgttgcaaatttgttaaaatgccaaaaaggacagtttaattttgtacagattatgcttacctcaggtttctttagtgtgcttgaatgcccttctttccatataacacttatcttcttcttaattcggcaatggaatatcttttaagttttaaaaaaactggaataattatatctatcttttttgccgtttatatttaggggtttttgttgataaaatcaagtcttggttgtggcttgctgaattaaatatttatgagtggtgcatttttaagtatagtgaacaagacaccatattaagtacagtgataaagcatctatattctgtnnnnnnnnnnnnnntctgcctatgcatgttttttaagnnnnnnnnnntggctgtatcggcctgtatgggactgtaatgcgcttagtggtctgacatatactggaaatgtatgtatactggcgtactttatattctctaaaatgcttaatgcctttgaaattttgtaatcnnnnnnnnnnnnnnnnnnnntctaaaggggagagtattctttaaagtttttaacataagcttgtcaatgcacatgtagatggttagcatgtttagcaaaccttgtgaaattataataagtttgtagttacatgtgaaactctaaatgcatggcaactgttaatgtcataacagtttagttattttgttctgttctgtcatgtgccacaaaatatgtacttttttcacttttttccctttgtatatcagttacgggttacaactggttcattctgaaaacaacaacaacaaaaatccattcatattttttaacaattgtataagtgccccaagtaattcactacagccctaaagccttgccttttgtaatttgacttc

SEQ ID NO: 226415 - DNA, 1488 bp, Homo Sapiens; identical to SEQ ID NO: 192476
  misc_feature (87)..(95): n is a, c, g, or t
  misc_feature (1347)..(1366): n is a, c, g, or t

SEQ ID NO: 226416 - DNA, 1163 bp, Homo Sapiens; identical to SEQ ID NO: 192478

SEQ ID NO: 226417 - DNA, 627 bp, Homo Sapiens; identical to SEQ ID NO: 192479
  misc_feature (149)..(163): n is a, c, g, or t

SEQ ID NO: 226418 - DNA, 633 bp, Homo Sapiens; identical to SEQ ID NO: 192480
  misc_feature (232)..(246): n is a, c, g, or t

SEQ ID NO: 226419 - DNA, 921 bp, Homo Sapiens
ttgtacaaaaaagttggacaaagcggacaacgctggtgggcctgttgtggagtacgctttggactgagaagcatcgaggctataggacgcagctgttgccatgacggcccaggggggcctggtggctaaccgaggccggcgcttcaagtgggccattgagctaagcgggcctggaggaggcagcaggggtcgaagtgaccggggcagtggccagggagactcgctctacccagtcggttacttggacaagcaagtgcctgataccagcgtgcaagagacagaccggatcctggtggagaagcgctgctgggacatcgccttgggtcccctcaaacagattcccatgaatctcttcatcatgtacatggcaggcaatactatctccatcttccctactatgatggtgtgtatgatggcctggcgacccattcaggcacttatggccatttcagccactttcaagatgttagaaagttcaagccagaagtttcttcagggtttggtctatctcattgggaacctgatgggtttggcattggctgtttacaagtgccagtccatgggactgttacctacacatgcatcggattggttagccttcattgagccccctgagagaatggagttcagtggtggaggactgcttttgtgaacatgagaaagcagcgcctggtccctatgtatttgggtcttatttacatccttctttaagcccagtggctcctcagcatactcttaaactaatcacttatgttaaaaagaaccaaaagactcttttctccatggtggggtgacaggtcctagaaaggacaatgtgcatattacgaccaacacaagaaactataccataacccaaggctgaaaataatgtaaaaactttatttttgtttccagtacagaaccaaaacaacaataaaaaac

SEQ ID NO: 226420 - DNA, 915 bp, Homo Sapiens; identical to SEQ ID NO: 192486

SEQ ID NO: 226421 - DNA, 1089 bp, Homo Sapiens
  misc_feature (629)..(867): n is a, c, g, or t
  misc_feature (1040)..(1048): n is a, c, g, or t
ttggcatcttcaaacgactcaagttccttggaaataaagaactctctcagggtctctcgttgctattcctggccctctggcacggcctgcactcaggatacctggtctgcttccagatggaattcctcattgttattgtggaaagacaggctgccaggctcattcaagagagccccaccctgagcaagctggccgccattactgtcctccagcccttctactatttggtgcaacagaccatccactggctcttcatgggttactccatgactgccttctgcctcttcacgtgggacaaatggcttaaggtgtataaatccatctatttccttggccacatcttcttcctgagcctactattcatattgccttatattcacaaagcaatggtgccaaggaaagagaagttaaagaagatggaataatccatttccctggtggcctgtgcgggactggtgcagaaactactcgtctcccttttcacagcactcctttgccccagagcagagaatggaaaagccagggaggtggaagatcgatgcttccagctgtgcctctgctgccagccaagtcttcatttggggccaaaggggaaacttttttttggagaaggcgtcttgctttgtcannnnnnnnnnnnnnnnnnnnnnnnnnnnnnnnnnnnnnnnnnnnnnnnnnnnnnnnnnnnnnnnnnnnnnnnnnnnnnnnnnnnnnnnnnnnnnnnnnnnnnnnnnnnnnnnnnnnnnnnnnnnnnnnnnnnnnnnnnnnnnnnnnnnnnnnnnnnnnnnnnnnnnnnnnnnnnnnnnnnnnnnnnnnnnnnnnnnnnnnnnnnnnnnnnnnnnnnnnnnnnnnnnnnnnnnnnnnnnntgagccaccgtgcccggcccaaaggggaaactcttgtgggaggagcagaggggctcacatctcccctctgattcccccatgcacattgccttatctctccccatctagccaggaatctattgtgtttttcttctgccaatttactatgattgtgtatgtgccgctaccaccannnnnnnnntgggggggtggagaggggtgcgaggccctgcctgctccact

SEQ ID NO: 226422 - DNA, 913 bp, Homo Sapiens
ttggctaccttccttctagcagaaatggcggctgcggcggctcgagtggtgttgtcatccgcggcgcggcggcggctctggggtttcagcgagagtcttctaatccgaggcgctgcgggacggtcattatattttggagagaacagattaagaagtacacaggctgctacccaagttgttctgaatgttcctgaaacaagagtaacatgtttagaaagtggactcagagtagcttcggaagactctgggctctcaacatgcacagttggactctggattgatgctggaagtagatacgaaaatgagaagaacaatggaacagcacactttctggagcatatggctttcaagggcaccaagaagagatcccagttagatctggaacttgagattgaaaatatgggtgctcatctcaatgcctatacctccagagagcagactgtatactatgccaaagcattctctaaagacttgccaagagctgtagaaattcttgctgatataatacaaaacagcacattgggagaagcagagattgaacgtgagcgtggagtaatccttagagagatgcaggaagttgaaaccaatttacaagaagttgtttttgattatcttcatgccacagcttatcaaaatactgcacttggacggacaattttgggaccaactgaaaatatcaaatctataagtcgtaaggacttagtggattatataaccacacattataaggggccaagaatagtgcttgctgctgctggaggtgtttcccatgatgaattgcttgacttagcaaagtttcatttcggtgactctttatgcacacacaaaggagaaataccagctctgcctccctgcaaattcacaggaagtgagattcgtgtgagggatgacaagatgcctttggcgcaccttg

SEQ ID NO: 226423 - DNA, 1033 bp, Homo Sapiens; identical to SEQ ID NO: 192492
  misc_feature (579)..(599): n is a, c, g, or t
  misc_feature (963)..(971): n is a, c, g, or t

SEQ ID NO: 226424 - DNA, 1324 bp, Homo Sapiens
ttgggtgacagctttcggggtttgctgctggctctgactcccgtcctgcgatgggttgcgacgggggaacaatccccaagaggcatgaactggtgaaggggccgaagaaggttgagaaggtcgacaaagatgctgaattagtggcccaatggaactattgtactctaagtcaggaaatattaagacgaccaatagttgcctgtgaacttggcagactttataacaaagatgccgtcattgaatttctcttggacaaatctgcagaaaaggctcttgggaaggcagcatctcacattaaaagcattaagaatgtgacagagctgaagctttctgataatcctgcctgggaaggggataaaggaaacactaaaggtgacaagcacgatgacctccagcgggcgcgtttcatctgccccgttgtgggcctggagatgaacggccgacacaggttctgcttccttcggtgctgcggctgtgtgttttctgagcgagccttgaaagagataaaagcggaagtttgccacacgtgtggggctgccttccaggaggatgatgtcatcgtgctcaatggcaccaaggaggatgtggacgtgctgaagacaaggatggaggagagaaggctgagagcgaagctggaaaagaaaacaaagaaacccaaggcagcagagtctgtttcaaaaccagatgtcagtgaagaagccccagggccatcaaaagttaagacagggaagcctgaagaagccagccttgattctagagagaagaaaaccaacttggctcccaaaagcacagcaatgaatgagagctcttctggaaaagctgggaagcctccgtgtggagccacaaagaggtccatcgctgacagtgaagaatcggaggcctacaagtccctctttaccactcacagctccgccaagcgctccaaggaggagtctgcccactgggtcacccacacgtcctactgcttctgaagcccgcactgccaccgctcctgccccagaaggttgtttagtttccacgtaggcaggtcgctttgtgcctctgagtgcgctgctgtgtgttctctctatagttctgtgtcataaagctgtcctggccagccttcaagctggtgtggccactcttgatgtgaggcgtgtcggttccaggggggacatgggaaggggctgcacagtggcccgaggtcatgcttgcttccacctgcagtgcatttggtcctttccatggccaggaagccctgtgggctgcactttttatgcttgcagtaacaagagactccagagtcctcaccggtgcggagttggcccatattaattacctaaaa

SEQ ID NO: 226425 - DNA, 909 bp, Homo Sapiens; identical to SEQ ID NO: 192494

SEQ ID NO: 226426 - DNA, 929 bp, Homo Sapiens
ttggtggagggcttgaggctatcagatcggtatggcattggcgtccgggcccgcaaggcgggcgctagctggctccgggcagctcggccttgggggcttcggggccccgagacgcggggcgtatgagtggggcgtgcgctccacgcggaagtcggagcctcctcccctggatagggtgtacgagatccctggactggagcccatcacctttgcggggaagatgcacttcgtgccctggctggcgcggccgatctttccgccctgggaccgcggctacaaggacccaaggttctaccgctcgccccctcttcacgagcatccgctgtacaaagaccaggcctgctatatctttcaccaccgttgccgccttctcgagggtgtaaagcaggccctctggctcaccaagaccaagttaatagaaggccttcccgagaaagtgcttagccttgttgatgatccaaggaaccacatagagaaccaagacgagtgcgttctgaatgtgatctctcacgcccgtctctggcagaccactgaggaaatccccaagagagagacctactgcccggtcatcgtggacaacctaatacagctgtgtaaatctcagattctcaagcatccttctctggccaggaggatctgtgtccaaaactccacgttttctgctacctggaaccgagagtctcttctccttcaagtccgtggttctggtggagcccgactgagcactaaggatcctctgcccaccatcgcctccagagaggagattgaagctactaagaatcatgttctagagaccttctaccccatatcacccatcatcgatcttcatgaatgcaatatttatgatggtgaaaaatgacacaggattccaggaaggctatccttacccctatccccataccctgtacttactggacaaagcaatttac

SEQ ID NO: 226427 - DNA, 1007 bp, Homo Sapiens; identical to SEQ ID NO: 192505
  misc_feature (684)..(693): n is a, c, g, or t

SEQ ID NO: 226428 - DNA, 1190 bp, Homo Sapiens
  misc_feature (988)..(1024): n is a, c, g, or t
tgagcaatgctttctcttttaatgccaactttgtacaaaaaagttggccccagggccaagtcaagaaggagctcagccactatctccccactgagccagctcagcgggcagggctgggagggagtgggacagattctgggagtgcagcggggaggggtcccggctgggctgagcgcagggagctgcttggcagtgccagagcccaggccccagagccctgctggagaggaggcagactgaggcagcaggccccgccagcaggcgaagcagggagatgtcagactgctacacggagctggagaaggcagtcattgtcctggtggaaaacttctacaaatatgtgtctaagtacagcctggtcaagaacaagatcagcaagagcagcttccgcgagatgctccagaaagagctgaaccacatgctgtcggacacagggaaccggaaggctgcggataagctcatccagaacctggatgccaatcatgatgggcgcatcagcttcgatgagtactggaccttgataggcggcatcaccggccccatcgccaaactcatccatgagcaggagcagcagagcagcagctagagacccctttggccacaccttccaggcactggcctgatgccccgccctggtgctctccccaggctccctcctcagcctcctgcccacccagggccctttactctcttctccctccagaccttcctctgacccttgctgaactggggtccctttgtgagtgtctcagtctagaggtacctccctccctggggggtctcagctcctggagtcgcaggcccttggggcccctctgtgagatctcaatgctgtctggggaccctaagagttttctcacctgttcagtctcatctaaccttccaatgtctgatgttcctgccaaattcctgcctgattctgggtccgtcctgacctccaaaggtcagcttggtgcttgaggtctccctgctcttggtggcagtggtnnnnnnnnnnnnnnnnnnnnnnnnnnnnnnnnnnnnnaagacctctccactttcccttagcccctctgctgggtagagaggcactttcagggacttccctccagctgcctcttcatctgggaatgagctaagcaaggctgagcctcctcctgttgcttgaaataatgatgatataaaggctggatttggagtttgtatcccct

SEQ ID NO: 226429 - DNA, 808 bp, Homo Sapiens; identical to SEQ ID NO: 192507
  misc_feature (563)..(600): n is a, c, g, or t

SEQ ID NO: 226430 - DNA, 963 bp, Homo Sapiens
actttgtacaaaaaagttggcagcgaggtcggaagcggcacagcgaggtcggcagcggcgcgcgctgtgctcttccgcggactctgaatcatggcgaccacggccacgatggcgacctcgggctcggcgcgaaagcggctgctcaaagaggaagacatgactaaagtggaattctagaccatcgaggaggtggatgtgacccccacgttcgacaccatgggcctgcgggaggacctgctgcggggcatctacgcttacggttttgaaaaaccatcagcaatccagcaaggagcaatcaagccgatcatcaaagggagagatgtcatcgcacagtctcagtccggcacaggaaaaacagccaccttcagtatctcagtcctccagtgtttggatattcaggttcgtgaaactcaagctttgatcttggctcccacaacagagttggctgtgcagatccataaggggctgcttgctctcggtgactacatgaatgtccagtgccatgcctgcattggaggcaccaatgttggcgaggacatcaggaagctggattacggacagcatgttgtcacgggcactccagggcgtgtttttgatatgattcgtcgcacaaccctaaagacacgtgctatcaaaatgttggttttggatgaagctgatgaaatgttgaataaaggtttcaaagagcagatttacgatgtatacaggtacctgcctccagccacacaggtggttctcatcagtgccacgctgccacacgagattctggagatgaccaacaagttcatgaccgacccaatccgcatcttggtgaaaacgtgatgaattgactctggaagtcatccaagcaattttttcgtgggcagtggaagagggaagagtggaattttggacactctgtgtgaccttctaccaacacactggaccaatcattcagggcggtcatcttctgcaaacaccaaa

SEQ ID NO: 226431 - DNA, 1671 bp, Homo Sapiens; identical to SEQ ID NO: 192510

SEQ ID NO: 226432 - DNA, 936 bp, Homo Sapiens
actttgtacaaaaaagttggctcacggtccagctaaggcgaagagtgggtggctgaagccatactattttatagaattaatggaaagcagaaaagacatcacaaaccaagaagaactttggaaaatgaagcctaggagaaatttagaagaagacgattatttgcataaggacacgggagagaccagcatgctaaaaagacctgtgcttttgcatttgcaccaaacagcccatgctgatgaatttgactgcccttcagaacttcagcacacacaggaactctttccacagtggcacttgccaattaaaatagctgctattatagcatctctgacttttctttacactcttctgagggaagtaattcaccctttagcaacttcccatcaacaatatttttataaaattccaatcctggtcatcaacaaagtcttgccaatggtttccatcactctcttggcattggtttacctgccaggtgtgatagcagcaattgtccaacttcataatggaaccaagtataagaagtttccacattggttggataagtggatgttaacaagaaagcagtttgggcttctcagtttcttttttgctgtactgcatgcaatttatagtctgtcttacccaatgaggcgatcctacagatacaagttgctaaactgggcatatcaacaggtccaacaaaataaagaagatgcctggattgagcatgatgtttggagaatggagatttatgtgtctctgggaattgtgggattggcaatactggctctgttggctgtgacatctattccatctgtgagtgactctttgacatggagagaattttcactatattcagagcaagctaggaattgtttcccttctactgggcacaatacacacattgatttttgcctgggaataagcggatagatataaaacaatttgtatgg

SEQ ID NO: 226433 - DNA, 1154 bp, Homo Sapiens
  misc_feature (88)..(117): n is a, c, g, or t
ttggaacaattgttatgtgtttagaatcagaatttgattttgaacttgagtaattcatccttacagctatctgtagaattagtcatcnnnnnnnnnnnnnnnnnnnnnnnnnnnnnngttaataagcaaacttatttgctgcagaatttgggttgactcctgagcatatttaaaacaaagaagctagaaatttagcagtcagattaggtaggtggttttatttcaaagggaaactttaatccaaagaaagattaattactctaacaaacaagagaagcttcatgtttgatgatacagatttaagaatacctgagacttaagagtgttggaagtcatttgatagaaagatgagatcggagacaatgttgtgttatagggcacacattgaaggtatatgccaaatctctcaccagataagtccttttctccctgtgccgttttcttgctcaaagggaacagtgaattagccagctagaatcttcctggtccctttttgaggcagtagcaggtaaggaaagggctgattttcatcaaaaccaagacctttctgcagggatgatagtggaataataatgtgggattagcccgctagcattaggagcagttgggaagttacctggtagatcaagcattacacacaaaaaatcaagttgatcagagtatgggttctccatatagcaatacttcagtgagattaagtataaacagtttttggcaaaaaacaacacagtctactctttctgcttacaaagacaaagccttacaaactcactatgaaggtaaagggaggacgacagcttgcttctttgcccagacatttacaaagttgtttttaaaacacactcataagtaagtttggcaagttgtttaaaaaatgtctctttgttttgtacagttctgttagatgttgttatattttaaaagtttaatttaaaaaatttaatttgtccttcctaagaaggataaatatataaaaaagccactggaatgaaaacttcctatatgctatgctgttgtcttattattatatagaaaaataactttagaaaaatattgaagacattgtattaccacttgtgattcaaacaattttgtggttaaaactggattttaaatttaaaaatcaataaaaatttcaaatgtttattaccttc

SEQ ID NO: 226434 - DNA, 1189 bp, Homo Sapiens
ttggccctatgctggcgtaatcgggttcctccgagccgccgtaggactggttccggcgggctggtgaggaatggagccggtaggctgctgcggcgagtgccgcggctcctccgtagacccgcggagcaccttcgtgttgagtaacctggcggaggtggtggagcgtgtgctcaccttcctgcccgccaaggcgttgctgcgggtggcctgcgtgtgccgcttatggagggagtgtgtgcgcagagtattgcggacccatcggagcgtaacctggatctccgcaggcctggcggaggccggccacctggaggggcattgcttggttcgcgtggtagcagaggagcttgagaatgttcgcatcttaccacatacagttctttacatggctgattcagaaactttcattagtctggaagagtgtcgtggccataagagagcaaggaaaagaactagtatggaaacagcacttgcccttgagaagctattccccaaacaatgccaagtccttgggattgtgaccccaggaattgtagtgactccaatgggatcaggtagcaatcgacctcaggaaatagaaattggagaatctggttttgctttattattccctcaaattgaaggaataaaaatacaaccctttcattttattaaggatccaaagaatttaacattagaaagacatcaactcactgaagtaggtcttttagataaccctgaacttcgtgtggtccttgtctttggttataattgctgtaaggtgggagccagtaattatctgcagcaagtagtcagcactttcagtgatatgaatatcatcttggctggaggccaggtggacaacctgtcatcactgacttctgaaaagaaccctctggatattgatgcctcgggtgtggttggactgtcatttagtggacaccgaatccagagtgccactgtgctcctcaacgaggacgtcagtgatgagaagactgctgaggctgcgatgcagcgcctcaaagcggccaacattccagagcataacaccattggcttcatgtttgcatgcgttggcaggggctttcagtattacagagccaaggggaatgttgaggctgatgcatttagaaagttttttcctagtgttcccttattcggcttctttggaaatggagaaattggatgtgatcggatagtcactgggaacttt

SEQ ID NO: 226435 - DNA, 596 bp, Homo Sapiens; identical to SEQ ID NO: 192521
  misc_feature (401)..(436): n is a, c, g, or t

SEQ ID NO: 226436 - DNA, 333 bp, Homo Sapiens
tggaactgcttgacagccggccggcggcacttgctggccgcgatctcctccaccttcatgatttgaatggagtgggctcgggcgcggtgccgggcacccatgtctcggtagcactgggtgacagcgcctgcggtggtcaggtcccggtattcccggtacattttgtgggtgccgctccgggagtcatagcgcagccagatcccgaagttcttcacccgcaggggggacttctcaaacacctgcccacagtagacaatctcccctgaagtcttctccaacttttttgtacaaagttggcgttaggggaaaagcattgctcatcaatttgtgcaa

SEQ ID NO: 226437 - DNA, 640 bp, Homo Sapiens; identical to SEQ ID NO: 192523

SEQ ID NO: 226438 - DNA, 499 bp, Homo Sapiens
aaagccaactttgtacaaaaaagttggatcttgacgaggctgcggtgtctgctgctattctccgagcttcgcaatgccgcctaaggacgacaagaagaagaaggacgctggaaagtcggccaagaaagacaaagacccagtgaacaaatccgggggcaaggccaaaaagaagaagtggtccaaaggcaaagttcgggacaagctcaataacttagtcttgtttgacaaagctacctatgataaactctgtaaggaagttcccaactataaacttataaccccagctgtggtctctgagagactgaagattcgaggctccctggccagggcagcccttcatgagctccttagtaaaggacttatcaaactggtttcaaagcacagagctcaagtaatttacaccagaaataccaagggtggagatgctccagctgctggtgaagatgcatgaataggtccaaccagctgtacatttggaaaaataaaactttattaaatc

SEQ ID NO: 226439 - DNA, 865 bp, Homo Sapiens
ctttgtacaaaaaagttggctggcttggtgcggagaccccttcgggaggtctccgggctgctgaagaggcgctttcactggaccgcgccggctgcgctgcaggtgacagttcgtgatgctataaatcagggtatggatgaggagctggaaagagatgagaaggtatttctgcttggagaagaagttgcccagtatgatggggcatacaaggttagtcgagggctgtggaagaaatatggagacaagaggattattgacactcccatatcagagatgggctttgctggaattgctgtaggtgcagctatggctgggttgcggcccatttgtgaatttatgaccttcaatttctccatgcaagccattgaccaggttataaactcagctgccaagacctactacatgtctggtggccttcagcctgtgcctatagtcttcaggggacccaatggtgcctcagcaggtgtagctgcccagcactcacagtgctttgctgcctggtatgggcactgcccaggcttaaaggtggtcagtccctggaattcagaggatgctaaaggacttattaaatcagccattcgggataacaatccagtggtggtgctagagaatgaattgatgtatggggttccttttgaatttcctccggaagctcagtcaaaagattttctgattcctattggaaaagccaaaatagaaaggcaaggaacacatataactgtggtttcccattcaagacctgtgggccactgcttagaagctgcagcagtgctatctaaagaaggagttgaatgtgaggtgataaatatgcgtaccattagaccaatggacatggaaaccatagaagccagtgtcatgaagacaa

SEQ ID NO: 226440 - DNA, 1424 bp, Homo Sapiens; identical to SEQ ID NO: 192524

SEQ ID NO: 226441 - DNA, 959 bp, Homo Sapiens
cgtcggtgagcggcgggggtggctccagcaacggctgggcccaagctgtgtagaggccttaaccaacgataacggcggcgacggcgaaacctcggagctcgcagggcgggggcaaggcccgggccttggagatggagaattctcagttgtgtaagctgttcatcggcggcctcaatgtgcagacgagtgagtcgggcctgcgcggccactttgaggcctttgggactctgacggactgcgtggtggtggtgaatccccagaccaagcgctcccgttgctttggcttcgtgacctactccaatgtggaggaggcggacgccgccatggccgcctcgccccatgccgtggacggcaacactgtggagctgaagcgggcggtgtcccgggaggattcggcgcggcccggtgcccacgccaaggttaagaagctctttgtcggaggccttaaaggagacgtggctgagggcgacctgatcgagcacttctcgcagtttggcaccgtggaaaaggccgagattattgccgacaagcagtccggcaagaagcgtggattcggcttcgtgtatttccagaatcacgacgcggcagacaaggccgcggtggtcaagttccatccgattcagggccatcgcgtggaggtgaagaaagcagtccccaaggaggatatctactccggtgggggtggaggcggctcccgatcctcccggggcggccgaggcggccgggggcgcggcggtggtcgagaccagaacggcctttccaagggcggcggcggcggttacaacagctacggtggttacggcggcggcggaggcggcggctacaatgcctacggaggcggcggcggcggttcgtcctacggtgggagcgactacggtaacggcttcggcggcttcggcagctacagccagcatcagtcctcctatgggccgccgcgcacgccatgggagccgtgactg

SEQ ID NO: 226442 - DNA, 659 bp, Homo Sapiens
gtacaaaaaagttggcgcgctacgtactctatagaagacgagcgcgaccctcgctgcgctgtccgcccgttgagcttccctgggccccgcggcgagggcatcggctctcgccggcggatgacgagctgtatcagcggacgcgcatctctctgctgcaacgcgaggccgctcaggcaatgtacatcgacagctacaacagccgcggcttcatgataaacggaaaccgcgtgctcggcccctgcgctctgctcccgcactcggtggtgcagtggaacgtgggatcccaccaggacatcaccgaagacagcttttccctcttctggttgctggagccccggatagagatcgtggtggtggggactggagaccggaccgagaggctgcagtcccaggtgcttcaagccatgaggcagcggggcattgctgtggaagtgcaggacacgcccaatgcctgtgccaccttcaacttcctgtgtcatgaaggccgagtaactggagctgctctcatccctccaccaggagggacttcacttacatctttgggccaagctgctcaatgaaccgccaggaactgacctgctgactgcactctgccaggcttcccaatgctttcactcttatctaccctttggcacttatcttgcttatcaacataataa

SEQ ID NO: 226443 - DNA, 484 bp, Homo Sapiens; identical to SEQ ID NO: 192527

SEQ ID NO: 226444 - DNA, 1027 bp, Homo Sapiens
  misc_feature (943)..(951): n is a, c, g, or t
tttgtacaaaaaagttggctccattgtctgcagtctgcagtgatctgtaggaaggcagctggtcaataatcatgtagtacaatggcttggaattgtaaccactatggttattgattgtcctgtgttgtttcaggcatacttaggtatgtccctggggaaaaagaaaaccattcagctgagagttgctaaccatgttcttttggttagaaataatggttcattttttgcccctggttggaatagtctctaaaaggctctggtgactgaattgaacatgagtccgcatgctgttttctttcaaaaggtatcaaaacggaaagcctctctaaggggaagacctttcaactccattcagaagacaacatttagtaaggaggatggcggaggttactagtaattttcagatgtcttgggctttttctgccaacaaaacccaaaatcaaattagagttggtgaaagctttcttcagtgtttttagaagaggccatcttgaatctgtagaataccatttacacatcaacttcaccctatgctcatttcgtattttgagcttaaatggagtcctctgaagggggggtagtcgtgattctggtggcaaaactagaacttttaacttgtaaaatgaaaaatattaaatggacctttttgtcagttgaggatttagattgattcttttatctgaggagcgtatgttcctcagatgttgcgtagagacctttaggttttcatctactttaagattgctctcttggcaattaggggatttgggaaaagaagaaaaaaagatgccatgtgttgctagtacacagttataggatatggtttctaatggttgaattttgaggaactctccctaaagaatgagttttatatctcctcaaggaaatcatggaaaaatctgtttattcttcagtgagtccttttgaattaatgttcttaaannnnnnnnnaagtctgtgtaagtgcttatgtataagtatataattgtataaatatttataaatatatttatataattacggtttc

SEQ ID NO: 226445 - DNA, 1037 bp, Homo Sapiens
ttggagaaaaggaaaccggaagaagatgaagaaaacaaacctaaggagaattcggaactaccagaggatgaagatgaagaggagaatgatgaagatgtggagcaagaagttcccatagaacctcctagtgcaaccaccaccactacgattggaatctctgcaacatctgcaacattcacaaatgtgtttgggaaaaaaagggccaatgtggtgacaactcccagcaccaatcggaaaaataagaagaacaaaacaaaagaaacccctcctacagcacatttaattttaccagaacaacatatgtctttagcccaacaaaaggcagataaaaataaaataaatggagaacctagaggtggtggtgcaggtgggaatagtgattcagataacttggacagcacagactgcaacagtgagagtagcagtggtggtaaaagccaagagttaaattttgtgatggatgtgaattcctctaaatacccctcactgctccttcattcccaagaagaaaagacaagtactgctacttccaaaactcagacacgacttgaaggtgaagtgactcctaattccttgtcaaccagctacaagacagtgtcattgccattaagctctccaaacataaagctgaatctcactagccctaaaaggggtcagaaaagagaagaagggtggaaagaagttgtacgaaggtcaaagaaattgtctgttccagcctcagtggtgtcgaggataatgggaagaggaggatgcaacatcactgcaatacaggatgttactggtgcccatattgatgtggataaacaaaaagataagaatggcgagagaatgatcacaataaggggtggcacagaatcaacaagatatgcagttcaactaatcaatgcactcattcaagatcctgctaaggaactggaagacttgattcctaaaaatcatatcagaacacctgccagcaccaaatcaattcatgctaacttctcatctggagtagtaccacagcagcttccagtaaaaatgcatttcctttgggtgct

SEQ ID NO: 226446 - DNA, 991 bp, Homo Sapiens
ctttgtacaaaaaagttggctgaaagatgcaataaagtaaagatggtggtctccagagaagaggtggagctggcctatcaggaagccatgttcaatatggctaccctcaacagaactgctgcaggtttaatgcacacatttaatgcccatgcggccacagatatcacaggctttggcattctaggacactcccagaaccttgcaaaacaacaaagaaatgaagtgtcctttgttattcataatctgccaataattgccaagatggctgccgtcagcaaggccagtggacggtttgggcttcttcaaggaacctcagctgaaacctctgggggattactgatttgtctgccaagagaacaggcggctcgcttttgttctgaaatcaaatcctccaagtacggagagggtcaccaagcgtggatcgttggcattgtggaaaagggaaaccgaacggcccggatcattgacaagccgcgagttattgaagtcctgcctcgtggggccacagctgctgttcttgctcctgacagttcaaatgcctcctctgagcctagctcgtgagatgaaagaacagaagttgtttggaccttagagccattgtccacaatcacggatggttctcaagagttgattgtaagaaatttccaaagaaggctgcctgcatagtggttccggctgccctttctaggtgattggaatcagcccatctaaagcagtctttatatgcattccgaggccagagtaacattttgaactttggggggatatttgttcatcacttgggtagaagaggagcaaaaatacctctgttttctcttgccaaagtaagatgaagctattccaggttgagggatttttctttgcacggggttgattaatttctgcacagggagtgagattattaaagtaacacacacacaaagtaaattgcaaaatgaaaaaattagaaccaaatgagttttggaccaatattgttgataaatctaaattg

SEQ ID NO: 226447 - DNA, 980 bp, Homo Sapiens; identical to SEQ ID NO: 192529

SEQ ID NO: 226448 - DNA, 686 bp, Homo Sapiens; identical to SEQ ID NO: 192530

SEQ ID NO: 226449 - DNA, 1108 bp, Homo Sapiens
tttgtacaaaaaagttggcccttacttacctattccagatctgcagtcacttcgtgggatctgcccctccctgcttcaatacccaaatcctctccagctataacagtagggatgagtacccaaaagctcagccagccccatcaggactcttgtgaaaagagaggatatgttcacacctagcgtcagtattttccctgctaggggttttaggtctcttcccctctcagagctacttgggccatagctcctgctccacagccatcccagccttggcatctagagcttgatgccagtaggctcaactagggagtgagtgcaaaaagctgagtatggtgagagaagcctgtgccctgatccaagtttactcaaccctctcaggtgaccaaaatccccttctcatcactcccctccaaagaggtgactgggccctgcctctgtttgacaaacctctaacccaggtcttgacaccagctgttctgtcccttggagctgtaaaccagagagctgctggggattctggcctagtcccttccacacccccaccccttgctctcaacccaggagcatccacctccttctctgtctcatgtgtgctcttcttctttctacagtattatgtactctactgatatctaaatattgatttctgccttccttgctaatgcaccattagaagatattagtcttggggcaggatgattttggcctcattactttaccacccccacacctggaaagcatatactatattacaaaatgacattttgccaaaattattaatataagaagctttcagtattagtgatgtcatctgtcactataggtcatacaatccattcttaaagtacttgttatttgtttttattattactgtttgtcttctccccagggttcagtcctcaaggggccatcctgtcccaccatgcagtgcccctagcttagagcctccctcaattccccctggccaccaccccccactctgtgcctgaccttgaggagtcttgtgtgcattgctgtgaattaactcacttgatgatatgtcctatattggctaaattgaaacctggaattgtggggcaatctattaatagctgccttaaagtcagta

SEQ ID NO: 226450 - DNA, 1399 bp, Homo Sapiens
ttgggtaagggagtgggagctggtccgtgccgcggcggccgcgcagggagctcccgaggcaacgccggggcgcccgagtaatggatcaggagccacaaaatggacaacctgctgaaattaagatcatcagagaagcatataagaaggcctttttatttgttaacaaaggtctgaatacagatgaattaggtcagaaggaagaagcaaagaactactataagcaaggaataggacacctgctcagagggatcagcatttcatcaaaagagtctgaacacacaggtcctgggtgggaatctgctagacagatgcaacagaaaatgaaagaaactctacagaatgtacgcaccaggctggaaattctagagaagggtcttgccacttctctgcagaatgatcttcaggaggtgcccaagttatatccagaatttccacctaaagacatgtgtgaaaaattaccagagcctcagtcttttagttcagctcctcagcatgctgaagtaaatggaaacacctcaactccaagtgcaggggcagttgctgcacctgcttctctgtctttaccatcacaaagttgtccagcagaagctcctcctgcttatactcctcaagctgctgaaggtcactacactgtatcctatggaacagattctggggagttttcatcagttggagaggagttttataggaatcattctcagccaccgcctcttgagaccttagggctggatgcagatgaattgattttgataccaaatggagtacagattttttttgtaaatcctgcaggggaggttagtgcaccttcgtatcctgggtaccttcgaattgtgaggtttttggataattctctcgatacggttctaaaccgtcctcccgggtttcttcaggtttgtgactggttatatcctctagttcctgataaatctccggttctgaaatgtactgcgggagcctacatgtttcctgatacaatgctacaagcagcaggatgctttgtgggggtcgtcctgtcctctgagttaccagaggatgatagagagctctttgaggatctgttaaggcaaatgtctgaccttcggctccaggccaactggaacagagcagaagaagaaaatgaattccaaatccctggaagaactagaccctcctctgaccaactaaaagaagcctctggcactgatgtgaaaacagttggaccaaggcaataaggatgtacgtcataacggaaaacgtggaaaagggctaaagatacttcaagtgaagaagttaactgactcccattgtaccatgtgagccagttccagaagaaagccaaagattacctgatggagtgaaagttggctcacaacatttggccaggggcttcctgggtgagtgggggtttagtccaaggtgc

SEQ ID NO: 226451 - DNA, 1380 bp, Homo Sapiens
  misc_feature (286)..(352): n is a, c, g, or t
  misc_feature (788)..(813): n is a, c, g, or t
ttggcggaacgtagccctggctgcggccccgcccgcctacccacccgcccgtccggcagccggctcccgccgcctccgcgctctgtctggggccagccacctggcgggccgctccggtgcgcctgcccgcgcttttcactgacaggcgctgttccccacagccagcgccgcccgccacgtcccagctctcggccaacggagctgcgcggcgggtgacctttccgagcccagcgcgatgacggctccttgctcccagccggcgcagcttcctggacgccgccagctnnnnnnnnnnnnnnnnnnnnnnnnnnnnnnnnnnnnnnnnnnnnnnnnnnnnnnnnnnnnnnnnnnngccgccgtggcgccggcgcgcggctgggagagcggagacctggagttgtttgacttagtggaggaggtgcagctcaacttctaccagttcctcggggtgcagcaggatgcatcatctgcagacatcagaaaagcatatcgtaagctttcactaactttacatccagacaagaataaagatgaaaatgcagaaactcagtttagacaattggtggccatttatgaagttttaaaggatgatgaacgaaggcagaggtatgatgatattctgatcaatggacttccagattggcgacagcctgtattctactacaggcgggtgagaaaaatgagcaatgctgagctggcattactcttgttcattattctcacagtgggtcattatgctgtggtttggtcaatctacctggaaaaacaactggatgaactactaagtnnnnnnnnnnnnnnnnnnnnnnnnnngactggcagcaagagtgtggatgtatcaaaactcggtgcttcagaaaaaaatgaaagattgctgatgaaaccacagtggcatgatttgcttccatgcaaactggggatttggttttgccttacactaaaagcattacctcacctcatccaggatgctgggcagttttatgctaaatataaagaaacaagattgaaggaaaaggaagatgcactgactagaactgaacttgaaacacttcaaaaacagaagaaagttaaaaaaccaaaacctgaatttcctgtatacacacctttagaaactacatatattcagtcttatgatcatggaacttccatagaagaaattgaggaacaaatggatgattggttggaaaacaggaaccgaacacagaaaaaacaggcacctgaatggacagaagaggacctcagccaactgacaagaagtatggttaagttcccaggagggactccaggtcgatgggaaaagattgcccacgaattgggtcgatctgtgacagatgtgacaacccaagccaagcaactgaaggattcagtgacctgctcccc

SEQ ID NO: 226452 - DNA, 1055 bp, Homo Sapiens; identical to SEQ ID NO: 192539

SEQ ID NO: 226453 - DNA, 1028 bp, Homo Sapiens
aaacatcgagccatcctctactttccccccacttcccacacacctttgggacacagccagatttgggaccagattgagggccaaaggagacagggcactggaggcaaggctggcgatgcccagggtcctcggccattaggctgggtgtggcgtcaatgcatcttgcccagctggatcttcttccaggcctcagaggctgtgaagatgcatgagtccaggatgccggcgacggtgaaggtcccgccaatgatggcacagatcgtggtgatgaatctgtacagcggctgccgtctctctgtgtacttgaccgtgatggggctgaggtcgtagcggaaccagattgcagggatgatgcggcccgtgtggctgtaggcgacgtattccttgttggccaccgtgtactggtaggagtaccgctgcttgccactcttgtcctcataaaccgtgggcacaatcttcaggatgtagtcgtgggaggccagggggttggaggtgagtctgtctgctcccccgagagcattgaaagctccgtggatgttctggacctgtagcgtgtccccaaaggagagcttgtggatgacatgcgtcatgtctgggttctgtggctgggctgtggcactgtgtgtggacacgtggaagttgccggggaccttgttgatgctgaactgcccctcgaagcggcagcctgccccattgttcagcgggatcttcatggagttgtcgatgtggcccacttcgtgcctgcccatctcatcctgaatgtcaagcccaaccaactcgcagtgcagattgggtaaactgatgttcagactgacgtcgatcttgccaccgctgtccttgtctgggtcatcgacatagagctcgttcacaacttctgtcgttataaatccggtgagctccgagaggaagaggaagaggatgaagaggcagcagcagatggagataatggccccggtgtacgttggctgcgtaaggtccttgggcaccttcctgtagatgtcaaacctcctgccaacttttttgaacca

SEQ ID NO: 226454 - DNA, 1300 bp, Homo Sapiens; identical to SEQ ID NO: 192541

SEQ ID NO: 226455 - DNA, 506 bp, Homo Sapiens
tttgtacaaaaaagttggttctttaagtggggtgggaaggggagcacaatttcccttcatactccttttaagcagtgagttatggtggtggtctcatgaagaaaagaccttttggcccaatctctgccatatcagtgaacctttagaaactaaaaaactgagaaatttactacagtagttagaattatatcacttcactgttctctacttgcaagcctcaaagagagaaagtttcgttatattaaaacacttaggtaacttttcgatctttcccatttctacctaagtcagctttcatctttgtggatggtgtctcctttactaaataagaaaataacaaagcccttattctctttttttcttgtcctcattcttgccttgagttccagttcctctttggtgtacagacttcttggtacccagtcacctctgtcttcagcaccctcataagtcgtcactaatacacagttttgtacatgtaacattaaaggcataaatgactcatc

SEQ ID NO: 226456 - DNA, 1392 bp, Homo Sapiens; identical to SEQ ID NO: 192542

SEQ ID NO: 226457 - DNA, 808 bp, Homo Sapiens
ttggagggttttgaggtgaccactcaaaagctgctttcagggcagcctggctccccggggagactcccaagcccccctcagagaaggtggagattctggacgcaaagacaagggagaagctgtgtttcttggacaaggtggagccccacgccaccattgcggagatcaagaacctcttcactaagacccatccgcagtggtaccccgcccgccagtccctccgcctggaccccaagggcaagtccctgaaggatgaggatgttctgcagaagctgcccgtgggcaccacggccacactgtacttccgggacctgggggcccagatcagctgggtgacggtcttcctaacagagtacgcggggccccttttcatctacctgctcttctacttccgagtgcccttcatctatggccacaaatatgactttacgtccagtcggcatacagtggtgcacctcgcctgcatctgtcactcattccactacatcaagcgcctgctggagacgctcttcgtgcaccgcttctcccatggcactatgcctttgcgcaacatcttcaagaactgcacctactactggggcttcgccgcgtggatggcctattacatcaatcaccctctctacactccccctacctacggagctcagcaggtgaaactggcgctcgccatctttgtgatctgccagctcggcaacttctccatccacatggccctgcgggacctgcggcccgctgggtccaagacgcggaagatcccataccccaccaagaaccccttcacgtggctcttcctgctggtgtcctgccc

SEQ ID NO: 226458 - DNA, 1119 bp, Homo Sapiens; identical to SEQ ID NO: 192544

SEQ ID NO: 226459 - DNA, 1387 bp, Homo Sapiens
  misc_feature (1329)..(1338): n is a, c, g, or t
tttttactctgggtactcaggggttaatccatagggctattctggatacagttttctgatcttacagagccagtcaggtacatcagctttcagtttcttgctcatctgccaaagaactttcagctcaggagaaagccctatcctcaatcagacttgaggttctgtttaggagtctatgctacatctgggagtgacagggtcagcagagccagatttgtcaaagttggccctactttctttggtaatcaagtcgtcatcttttttaactcagccgatctctgagaatcatcttacaagcaagtcaaggcctcagattggttgaatggtgctgttcaaagatttagatgagatctgaggcatggagacatggagacagtatacagactcctagatttaagttttaggttttttgcttttctaatcaccaattcttatatacaatgtatattttagactcgagcagatgatcatcttcatcttaagtcattccttttgactgagtatggcaggattagagggaatggcagtatagatcaatgtctttttctgtaaagtataggaaaaaccagagaggaaaaaaagagctgacaattggaaggtagtagaaaattgacgataatttcttcttaacaaataatagttgtatatacaaggaggctagtcaaccagattttatttgttgagggcgagcagtctacagcaaccagacctaggccttgtttgacgagatgtagagtcgagtcatgtaatcacaattggcctagagagagacaaggatataaacaaactatttccaatgtttaaccagtgcattcattcgagtagctcaggatagctggcctttaaattgactgggaagtaaagaatgagttttctcatgacacacatcaaagtctccttgttcaacatgatctggtctgagagttcataaactgaatccttcctgctgaaacagataagttgtctttatgtctgttacaatgcctgccttaaatatatatcatggcaaggaatgaagtcagctgctctgagtcagtgtaaaatgacagtattgagactgatgtggttccactaaaatatccacaaggacaaaagctcttaagtctaccgataaaatccttagctgcagtcttcatagattttgtttttcaaatcagtttgtttccagcaaaaaggtaggcaataagctatcggaaatgcccagcaagtaagctaatggcctgctcaaagggccagcctccaactctccctaccacctatatttggtggtatcagacatcaaaagattcatcttaaaagaacatctctcggcacaaggcagagcaattnnnnnnnnnntctattactggctagaagaaacttttccaaatggtttcattttaaccaa

SEQ ID NO: 226460 - DNA, 1030 bp, Homo Sapiens; identical to SEQ ID NO: 192548

SEQ ID NO: 226461 - DNA, 1145 bp, Homo Sapiens
tgtacaaaaaagttggatttctcaggcagtgtctggcttgtaaacaatggaagggaatatttaactctaaacagaaatctgttctgacattaaaaggaaatgagtgagaacatttgtgcagaccatattttacatccttccacgcctttcaggccttattgaagatgaatggatcaccattgataaatttaccagattcactgatgttcctttagctgcgggatttcagtggtacctttctcaaactcaacttagtaaactaaaaccaggtgactggtctcagcaagacataggtactaatttggtcgaagcagataaccaagcggattggaccgacgttcagaagaagattatcccgtggaacagtcgtgtttccgacttagacctggagctcctgtttcaggatcgtgctgccagacttggaaagtcaattagtagactcatcgttgtggcctcgctcatcgacaaaccgaccaatttaggaggactgtgcaggacctgtgaggtatttggggcttcagtgctcgttgttggcagccttcagtgtatcagcgacaaacagtttcagcacctcagtgtctctgcagaacagtggcttcctctagtggaggtaaaaccacctcagctaattgattatctgcagcagaagaaaacagaaggttataccatcattggagtggaacaaactgccaaaagtttagacctaacccaatattgctttcctgagaaatctctgctcttgttgggaaatgaacgtgagggaattccagcaaatctgatccaacagttggacgtttgtgtggaaattcctcaacagggcattatccgctccctgaatgtccatgtgagtggagccctgctgatctgggagtacaccaggcagcagctgctctcgcacggagataccaagccatgatgtgccttccttagtgaactgctgctgctgttcagacttttttaaaaaaaactatttggactaaagaaacagattctgaaatttattgtgataatttgtatttcttttttcttgcaatttaatgccaaaagtttgccatgtgccttaaacatattactatatattttcccctttaataaaactttttgttaaattgtattcttcctctaataaatattttaagcaattg

SEQ ID NO: 226462 - DNA, 1390 bp, Homo Sapiens; identical to SEQ ID NO: 192550

SEQ ID NO: 226463 - DNA, 1125 bp, Homo Sapiens
ttggctgcgtgcgggtgcgcgatggcatgcggtactggaacatgacggtgcagtggtggctggcgcagtatatctacaagagcgcacctgcccgttcctatgtcctgcggagcgcctggaccatgctgctgagcgcctactggcagggcctccacccgggctactacctgagcttcctgaccatcccgctgtgcctggctgccgagggccggctggagtcagccctgcgggggcggctgagcccagggggccagaaggcctgggactgggtgcactggttcctgaagatgcgcgcctatgactacatgtgcatgggcttcgtgctgctctccttggccgacacccttcggtactgggcctccatctacttctgtatccacttcctggccctggcagccctggggctggggctggctttaggtgggggcagccccagccggcggaaggcagcatcccagcccaccagccttgccccggagaagctccgggaggagtaagctgtcacgacgctccctctgccagctggtcccgggaattctgtgaaccaggctgctgtctcctccccagaaagagtccttaccttggagagggtcctggagagaatttcctcttccccagctaaataccctgcctgcaactgaagcagacccgggggtgtcctccctgccctctgcccagaggccacctccactcctacaaaatagtattgtccagacaagagtcactggcccctgctccagcttctgggtatccagagagcactgcacttccccaaaacggaaggggcccctgggcagtgggttttgggcaaattccctttctttgcatccacaatgtggggtcggagcttgggggcaggtcctgggagtgggaagcctcttccttgtgtctttcgctccacttttagctcatcgcaccaatattgcagacttggaaggaagcataagcttcccatttcacaaaggggaaactgaggtgcgggtgcgcgggcctggggacggccgtcccatggcttccatctgagccacctcggggaccccagcgctcctggcgctctcttctcatcgcttggcctatgacaggtcaccgtgtgtaaatctttcccaataaagtgttgcacaaaga

SEQ ID NO: 226464 - DNA, 930 bp, Homo Sapiens
ccccagtgacgaatttctcccactttgccatacagctcggtaagaagctctctcactgtagcactccgttcattatacaattcagtgttccagtcaggtcctttcatagtatacagcatatagaggatatcagcttgttcctgtaagcttgaggtctccttcaactgtaaaaccagtgctttaaagtccacctccccagactggtctctaggaagatgtatttctacacgaacagagggaacctggttctcctgtcggggatgaggtgaatcaagtaagttgaatgaaggccgggaagcctgaaataacttcgtaggaagatacatgtgaacattctgtacatgcagttccttggccttggtcaccaaggacattaagtcgcaggttgtttgcacagcagcttggaaccgatctagccctcccttctgtgaggtaggggctagtttaggatggggagcagtgtgcgccaaaaggtgatctaaataacgagcaacttcatcaccacagcgagcatgactggttgaatcataatcattcatccagttgccagattccaggtaatcatagttgtcatcataatcttcactgtacagcttaccctcaggtccagggtccatgaagctcaagtgtgtgcaacaagatgttgtcaaaaactctgacaatttacctgtttgaacccttgccccaccaaaatacccatcttgcatttttcggagtgctgccaggatacttgaattcaagcttgttccatcttcatcaagcatgctgtgtgagatggggaaggtgatggtgggctggcctgtcatccgccagcggctacagaggtaggagaggtctgttctaagcatttccactatcatcttgttgtccagagccaggtagaactgttgctggtctataaactgtggagccaacttttttgtacaaagt

SEQ ID NO: 226465 - DNA, 777 bp, Homo Sapiens
ctttgtacaaaaaagttggcactgaagtgcccacagacaccaacaagattgaggaatttctggaggcagtgctgtgccctcccaggtaccccaagctggcagctctgaaccctgagtccaacacagctgggctggacatatttgccaaattttctgcctacatcaagaattcaaacccagcactcaatgacaatctggagaagggactcctgaaagccctgaaggttttagacaattacttaacatcccccctcccagaagaagtggatgaaaccagtgctgaagatgaaggtgtctctcagaggaagtttttggatggcaacgagctcaccctggctgactgcaacctgttgccaaagttacacatagtacaggtggtgtgtaagaagtaccggggattcaccatccccgaggccttccggggagtgcatcggtacttgagcaatgcctacgcccgggaagaattcgcttccacctgtccagatgatgaggagatcgagctcgcctatgagcaagtggcaaaggccctcaaataagcccctcctgggactccctcaaccccctccattttctccacaaaggccctggtggtttccacattgctacccaatggacacactccaaaatggccagtgggcagggaatcctggagcacttgttccgggatggtgtggtggaagaggggatgagggaaagaaatgggggggcctggggtcagatttttattgtgggggtgggatgagtaggacaacatatttcagtaataaaatacagaat

SEQ ID NO: 226466 - DNA, 999 bp, Homo Sapiens; identical to SEQ ID NO: 192557

SEQ ID NO: 226467 - DNA, 1011 bp, Homo Sapiens; identical to SEQ ID NO: 192558

SEQ ID NO: 226468 - DNA, 1255 bp, Homo Sapiens
ttggcccgacgtctcctacctcctcacggctcttcccggcgctctcctggctcccttctgccccagctccgtctcggcggcggcgggcagttgcagtggtgcagaatggctgacctcagtcttgcagatgcattaacagaaccatctccagacattgagggagagataaagcgggacttcattgccacactagaggcagaggcctttgatgatgttgtgggagaaactgttggaaaaacagactatattcctctcctggatgttgatgagaaaaccgggaactcagagtcaaagaagaaaccgtgctcagaaactagccagattgaagatactccatcttctaaaccaacactcctagccaatggtggtcatggagtagaagggagcgatactacagggtctccaactgaattccttgaagagaaaatggcctaccaggaatacccaaatagccagaactggccagaagataccaacttttgtttccaacctgagcaagtggtcgatcctatccagactgatccctttaagatgtaccatgatgatgacctggcagatttggtctttccctccagtgcgacagctgatacttcaatatttgcaggacaaaatgatcccttgaaagacagttacggtatgtctccctgcaacacagctgttgtacctcaggggtggtctgtggaagccttaaactctccacactcagagtcctttgtttccccagaggctgttgcagaacctcctcagccaacggcagttcccttagagctagccaaggagatagaaatggcatcagaagagaggccaccagcacaagcattggaaataatgatgggactgaagactactgacatggcaccatctaaagaaacagagatggccctcgccaaggacatggcactagctacaaaaaccgaggtggcattggctaaagatatggaatcacccaccaaattagatgtgacactggccaaggacatgcagccatccatggaatcagatatggccctagtcaaggacatggaactacccacagaaaaagaagtggccctggttaaggatgtcagatggcccacagaaacagatgtatcttcagccaagaatgtggtactgcccacagaaacagaggtagccccagccaaggatgtgacactgttgaaagaaacagagagggcatctcctataaaaatggacttagccccttccacgacatgggaccacccaaagaaaacaagaaagaaacagagagggcatc

SEQ ID NO: 226469 - DNA, 899 bp, Homo Sapiens; identical to SEQ ID NO: 192564

SEQ ID NO: 226470 - DNA, 823 bp, Homo Sapiens; identical to SEQ ID NO: 192565

SEQ ID NO: 226471 - DNA, 905 bp, Homo Sapiens; identical to SEQ ID NO: 192574

SEQ ID NO: 226472 - DNA, 941 bp, Homo Sapiens
tttgtacaaaaaagttggctcttgtcgcggccgcggcgagttaacatcgtttttccaatctgtccgcggctgccgccacccaagacagagccagaatgttcaggatgctgaacagcagttttgaggatgaccccttcttctctgagtccattcttgcacaccgagaaaatatgcgacagatgataagaagtttttctgaaccctttggaagagacttgctcagtatctctgatggtagagggagagctcataatcgtagaggacataatgatggtgaagattctttgactcatacagatgtcagctctttccagacaatggaccaaatggtgtcaaatatgagaaactatatgcagaaattagaaagaaacttcggtcaactttcagtggatccaaatggacattcattttgttcttcctcagttatgacttattccaaaataggagatgaaccgccaaaggtttttcaggcctcaactcaaactcgtcgagctccaggaggaataaaggaaaccaggaaagcaatgagagattctgacagtggactagaaaaaatggctattggtcatcatatccatgaccgagctcatgtcattaaaaagtcaaagaacaagaagactggagatgaagaggtcaaccaggagttcatcaatatgaatgaaagcgatgctcatgcttttgatgaggagtggcaaagtgaggttttgaagtacaaaccaggacgacacaatctaggaaacactacaatgagaagtgttggccatgagaatactggctcccgagaacttaaaagaagggagaaacctcaacaaagtccagccattgaacatggaaggagatcaaatgttttggggacaaactccacatcaaaggctcatctgtgaaaagcaacaaaaaataaatagcccttgcatttgatttgtttagtttgattgtttaac

SEQ ID NO: 226473 - DNA, 912 bp, Homo Sapiens; identical to SEQ ID NO: 192577

SEQ ID NO: 226474 - DNA, 874 bp, Homo Sapiens; identical to SEQ ID NO: 192587
  misc_feature (385)..(402): n is a, c, g, or t

SEQ ID NO: 226475 - DNA, 1406 bp, Homo Sapiens; identical to SEQ ID NO: 192588

SEQ ID NO: 226476 - DNA, 594 bp, Homo Sapiens; identical to SEQ ID NO: 192589
  misc_feature (193)..(214): n is a, c, g, or t

SEQ ID NO: 226477 - DNA, 1009 bp, Homo Sapiens; identical to SEQ ID NO: 192590
  misc_feature (660)..(676): n is a, c, g, or t
  misc_feature (937)..(945): n is a, c, g, or t

SEQ ID NO: 226478 - DNA, 871 bp, Homo Sapiens; identical to SEQ ID NO: 192591
  misc_feature (89)..(124): n is a, c, g, or t

SEQ ID NO: 226479 - DNA, 957 bp, Homo Sapiens; identical to SEQ ID NO: 192593

SEQ ID NO: 226480 - DNA, 830 bp, Homo Sapiens
gtgtgagccactctgcctggcctaccactaacttgaatacattcagaatcacctcctctccccaaaatttgtagaaatagtttttgaggaagccaaaagcaaagcagaaacctttacagtattgtttcttttctctttgttaactgtgtcattacagcaaaatactagcagtctgcctaaacatgttcattgtacatttctcaggctatcaatgaatggaggtttttaaaaagttgaatatttgtctgaacattttatttcaaagttcaaaaaaacagaggctgcaaaattcattttataatggctattttgtgacgataagatgtagttcatgtttttctgtagcactgggcccaaatattctttgtaaagaaaatcgctgcagcaaaaactgttactgtgtttattatatttgtagaagtattagaaaaatattctattttttattcagtgctgcgtaattacccatggtagccaaccctacaaaagacaggttttcacaaattgaggtggaggtgggcggttcagtatctgccactggacttgattataaactgtatttgaatatcagtggtattatcttttaagttgtcagcaagttaccaaggtattcattaaagaacttgtaatatcaaattactatttattcataacaattgatttgatgctaataataattttctttaaactctaccattcattatgtggtaactgtattgaacttactttatttggattttattttaatgtgactagatgtcaccacttcaaaaaatcaatttgttcttagaacctgggttgaaaataccaggaaactgttacagacgcca

SEQ ID NO: 226481 - DNA, 937 bp, Homo Sapiens
ttggcaacttccggctgtaaagatggcggcttcctagtgagtcggcggctgatttagaaggaggttcaggctacggtgagccgaagccacacaggagccatggaagtggcagagcccagcagccccactgaagaggaggaggaggaagaggagcactcggcagagcctcggccccgcactcgctccaatcctgaaggggctgaggaccgggcagtaggggcacaggccagcgtgggcagccgcagcgagggtgagggtgaggccgccagtgctgatgatgggagcctcaacacttcaggagccggccctaagtcctggcaggtgcccccgccagcccctgaggtccaaattcggacaccaagggtcaactgtccagagaaagtgattatctgcctggacctgtcagaggaaatgtcactgccaaagctggagtcgttcaacggctccaaaaccaacgccctcaatgtctcccagaagatgattgagatgttcgtgcggacaaaacacaagatcgacaaaagccacgagtttgcactggtggtggtgaacgatgacacggcctggctgtctggcctgacctccgacccccgcgagctctgtagctgcctctatgatctggagacggcctcctgttccaccttcaatctggaaggacttttcagcctcatccagcagaaaactgagcttccggtcacagagaacgtgcagacgattcccccgccatatgtggtccgcaccatccttgtctacagccgtccaccttgccagcccccagttctccttgacggagcccatgaagaaaatgttccagtgcccatatttcttctttgacgttgtttacatccacaatggcactgaggagaaggaggaggagatgaattggaaggatatgtttgcctttcatgggcagccctggaataccaagggtaccagctac

SEQ ID NO: 226482 - DNA, 673 bp, Homo Sapiens; identical to SEQ ID NO: 192594

SEQ ID NO: 226483 - DNA, 847 bp, Homo Sapiens
ttgggctgaatctgctgctgctggcgctgcccgtcctggcgagccgcgcctacgcggcccctgccccaggccaggccctgcagcgagtgggcatcgttgggggtcaggaggcccccaggagcaagtggccctggcaggtgagcctgagagtccgcgaccgatactggatgcacttctgcgggggctccctcatccacccccagtgggtgctgaccgcagcgcactgcgtgggaccggacgtcaaggatctggccgccctcagggtgcaactgcgggagcagcacctctactaccaggaccagctgctgccggtcagcaggatcatcgtgcacccacagttctacaccgcccagatcggagcggacatcgccctgctggagctggaggagccggtgaacgtctccagccacgtccacacggttgccctgccccctgcctcagagaccttccccccggggatgccgtgctgggtcactggctggggcgatgtggacaatgatgagcgcctcccaccgccatttcctctgaagcaggtgaaggtccccataatggaaaaccacatttgtgacgcaaaataccaccttggcgcctacacgggagacgacgtccgcatcgtccgtgacgacatgctgtgtgccgggaacacccggagggactcatgccagggcgactccggagggcccctggtgtgcaaggtgaatggcacctggctgcaggcgggcgtggtcagctggggcgagggctgtgcccagcccaaccggcctggcatctacacccgtgtcacctactacttggactggatccaccactatgtccccaaaaagccgtgactcaggcctggggtgtc

SEQ ID NO: 226484 - DNA, 934 bp, Homo Sapiens
ttggatttcatgttatgttttcatttcccctctgtctgagagattgctctgatgtctttccttccataagtcctacggagatcgagcttacctcatttttctcccaggcctaggagctcaattaccaggatcactttcttccccagggtgtactacagacctccacatgttggacagtaggattcagcagagaatgagtcccacatcctcttttcatccataagccactcttcccaactactcttccgccttccattgtccctatgtctactttactgctcaatctggattttggggaacctcctcccaaaaaggcattagaaggaaatgccaagcaccgaaattttgtcaagaagcggaggctcttagaacggagaggctttctgagtaaaaagaaccaaccccctagcaaggcgcctaagttgcactctgaaccttcaaagaaaggggaaactcctacggtcgatggcacttggaagaccccttccttcccaaaaaagaagacagctgcttccagcaatgggtcaggacagcccctggacaagaaagctgcagtgtcttggttgacccctgccccttcaaaaaaggctgattctgttgctgctaaagtagatttgctgggggagttccagagtgcccttccaaagatcaatagccacccaacccgctctcagaagaagagctcccagaagaaatcctctaaaaagaaccatcctcagaagaatgccccacagaactccacccaagctcattcagagaataaatgctccggagcatcccagaagttgccacggaagatggtggcaattgactgtgagatggtgggcacaggaccaaaggggcatgttagttccttggctcgatgtagcattgtcaactacaacggagatgtgctttatgacgagtacattcttcccccctgccacattgtgga

SEQ ID NO: 226485 - DNA, 1402 bp, Homo Sapiens; identical to SEQ ID NO: 192595

SEQ ID NO: 226486 - DNA, 867 bp, Homo Sapiens
ttgtacaaaaaagttgggaaacaagcaggacagcgccttttctaacctagagaatgccctggacctggccccctcctcactggtgcttcctgccgtcgactggtatgcagtcagcactctgaccacttacctgcaggagaagctcggggccagccccttgcatgtggacctggccaccctgcgggagctgaagctcaatgccagcctccctgctctgctgctcattcgcctgccctacacagccagctctggtctgatggcacccagggaagtcctcacaggcaacgatgaggtcatcgggcaggtcctgagcacactcaagtccgaatatgtcccatacacagcggccctcacagcggtccgcccttccagggtggcccgtgatgtagccgtggtggccggagggctaggtcgccagctgctacaaaaacagccagtatcacctgtgatccatcctcctgtgagttacaatgacaccgctccccggatcctgttctgggcccaaaacttctctgtggcgtacaaggaccagtgggaggacctgactcccctcacctttggggtgcaggaactcaacctgactggctccttctggaatgactcctttgccaggctctcactgacctatgaacgactctttggtaccacagtgacattcaagttcattctggccaaccgcctctacccagtgtctgcccggcactggtttaccatggagcgcctcgaagtccacagcaatggctccgtcgcctacttcaatgcttcccaggtcacagggcccagcatctactccttccactgcgagtatgtcagcagcctgagcaagaacggtagtctcctcgtggcccgcacgccgccctctccctg

SEQ ID NO: 226487 - DNA, 1419 bp, Homo Sapiens; identical to SEQ ID NO: 192597

SEQ ID NO: 226488 - DNA, 1098 bp, Homo Sapiens
ctttgtacaaaaaagttggctctcgaacagtgccttggacacatagaatgaaactatgggaccctttggacctcaagatcagaggttccagcttcctgggaacataggttttgattgtcacctcaatgggactgcttcacagaagaaaagcctggttcataaaactttgcctgatgttctagcagaacctttatcaagtgaaagacatgagtttgtgatggcacaatatgtgaatgaatttcagggtaatgatgcacctgttgaacaagaaattaacagtgcagaaacttactttgaaagtgccagagtagagtgtgcaatacaaacatgtccagaattgctgcgaaaagattttgaatcactgtttccagaagtagctaatggcaaactaatgattctgactgtaacacaaaaaactaagaatgatatgactgtttggagtgaagaagtagaaattgaaagagaagtgctcttagaaaagttcatcaatggtgctaaggaaatttgctatgctcttcgagctgagggttattgggctgactttattgacccatcatctggtttggcattttttggaccatatacaaacaacactctttttgaaactgatgaacgctaccgacatttaggattctctgttgatgaccttggatgctgtaaagtgattcgtcatagtctctggggtacccatgtagttgtagggagtatcttcactaatgcaacaccagacagccatattatgaagaaattaagtggaaattagcagaaatatccattcatttgctgtactatttgtatgtaatatttgggttgatctataaacactgtcagactaaagtttttaaaatatacttatttctaagtatttatttcagcatttatgaatttgcaacattggcaagtgatttgggattttaaaattgcaaatgttcatttattcatatcattgaatacacgttgaacacatccacattgtataggatgtggtaattagcttgtaaccagggtatgatctgctattgttatttctcctctttattggaaaaaggcctcagttttaattattttcttcccaaaataaatcacacatttggttac

SEQ ID NO: 226489 - DNA, 987 bp, Homo Sapiens; identical to SEQ ID NO: 192600

SEQ ID NO: 226490 - DNA, 988 bp, Homo Sapiens
actttgtacaaaaaagttggagagcgagctgagtggttgtgtggtcgcgtctcggaaaccggtagcgcttgcagcatggctgaccaactgactgaagagcagattgcagaattcaaagaagctttttcactatttgacaaagatggtgatggaactataacaacaaaggaattgggaactgtaatgagatctcttgggcagaatcccacagaagcagagttacaggacatgattaatgaagtagatgctgatggtaatggcacaattgacttccctgaatttctgacaatgatggcaagaaaaatgaaagacacagacagtgaagaagaaattagagaagcattccgtgtgtttgataaggatggcaatggctatattagtgctgcagaacttcgccatgtgatgacaaaccttggagagaagttaacagatgaagaagttgatgaaatgatcagggaagcagatattgatggtgatggtcaagtaaactatgaagagtttgtacaaatgatgacagcaaagtgaagaccttgtacagaatgtgttaaatttcttgtacaaaattgtttatttgccttttctttgtttgtaacttatctgtaaaaggtttctccctactgtcaaaaaaatatgcatgtatagtaattaggacttcattcctccatgttttcttcccttatcttactgtcattgtcctaaaaccttattttagaaaattgatcaagtaacatgttgcatgtggcttactctggatatatctaagcccttctgcacatctaaacttagatggagttggtcaaatgagggaacatctgggttatgccttttttaaagtagttttctttaggaactgtcagcatgttgttgttgaagtgtggagttgtaactctgcgtggactatggacagtcaacaatatgtacttaaaagttgcactattgcaaacgggtgtattatccaggtactcgtacactaatttttttgtactgc

SEQ ID NO: 226491 - DNA, 1020 bp, Homo Sapiens; identical to SEQ ID NO: 192602

SEQ ID NO: 226492 - DNA, 1114 bp, Homo Sapiens; identical to SEQ ID NO: 192603

SEQ ID NO: 226493 - DNA, 871 bp, Homo Sapiens; identical to SEQ ID NO: 192604

SEQ ID NO: 226494 - DNA, 605 bp, Homo Sapiens; identical to SEQ ID NO: 192606

SEQ ID NO: 226495 - DNA, 959 bp, Homo Sapiens; identical to SEQ ID NO: 192607

SEQ ID NO: 226496 - DNA, 1021 bp, Homo Sapiens
aattgatgagcaatggacctttaaaaaggccaactttgtacaaaaaagttggggtggcgtcccactctccttgaggcgccggttgccggccacaacccttggcggagcctgcctgcaggcctcccgaggagcccagacagctgcagccacagctccccgtatcaagaaatttgccatctatcgatgggacccagacaaggctggagacaaacctcatatgcagacttatgaagttgaccttaataaatgtggccccatggtattggatgctttaatcaagattaagaatgaagttgactctactttgaccttccgaagatcatgcagagaaggcatctgtggctcttgtgcaatgaacatcaatggaggcaacactctagcttgcacccgaaggattgacaccaacctcaataaggtctcaaaaatctaccctcttccacacatgtatgtgataaaggatcttgttcccgatttgagcaacttctatgcacagtacaaatccattgagccttatttgaagaagaaggatgaatctcaggaaggcaagcagcagtatctgcagtccatagaagagcgtgagaaactggacgggctctacgagtgcattctctgtgcctgctgtagcaccagctgccccagctactggtggaacggagacaaatatctggggcctgcagttcttatgcaggcctatcgctggatgattgactccagagatgacttcacagaggagcgcctggccaagctgcaggacccattctctctataccgctgccacaccatcatgaactgcacaaggacctgtcctaagggtctgaatccagggaaagctattgcagagatcaagaaaatgatggcaacctataaggagaagaaagcttcagtttaactgtttccatgctaaacatgatttataaccagctcaaagctgaacataatttatatctaatttgagttcctttaaagatcttggttttccatgaatacagcatgtataataaaaattttaagaaataaaatg

SEQ ID NO: 226497 - DNA, 919 bp, Homo Sapiens
aaaaggtgggtccattttctgcccagtgcagctgtgtcaccagctgatccttctgccacacagaggccttaaggtcccggcccacggttaccaacttgccatcaggccctaaagccaggtcttcaatctccccttcgtgggctttgaactccagaaccttctccaggctgggcaccttccatacacggacgtagccatctgttcctccagtggcaagcagggtattatcgtggttgaagcacacaactttctgcagtggatcggagctaaagtctgtctgcaccgcctgcaaattctctaccctgagttctagcccctcgtgctgggtttccgctccacatttcttctctgctggggctgctcccttcctttgtcgaggcccctgctccttggaaccggccttctctgccttgttgccctgctgttgatgtgcctggaagcgcaggagctgacagtgggcatcctgccctgcagcaaggatgtcaccagccagtgccaagttcatggtggcccgtgtctctgtgtcatgggagtgcagcaaggaggcactcaagcgcccattaatcagctctagctgcagaaagtgcacgccattctttatgcctgtcttggcggcgcctcctccgcccgcagcgatgagcagcccagtgctggggtcgacctgaagcgcgtacaacgggaacggagcccggtacagctctggcgcccggcgccggcccatcccgcccggcgcgcgttcactgcccgcaccgcggcacccaggacatgccgcgccgggccttcgactactgccccggcggctggtgaactcggccccgtcgccgccgggagcactccctacccctctcacaccggggagttgccaaaaccctgaccatcagcaggaagccgagcctcagctcggctccgtccaagccaa

SEQ ID NO: 226498 - DNA, 1296 bp, Homo Sapiens
atttaatagacattattaaataattttacacttagtagaatcttggataaatggttaaaattatagattgacattaagtgtgggcacaggaatattctgtgtataccaatgggtttaacagaagatgtgtttgcactgatttctggtcatcaacttgctttccgtgaatctttaaatacccaattccaaatcttccagctcctggagaagggctgtttctttctgaattttctccaactgatttttttctagctgttttccagttgctgcttgttctttcagttgttcgattgctttcagtttcttctttaggttcttgatttttttgtctatctcagggtccccagaaattgactgagagacagtgtttcgtggtgtgctctgtggggcaggagtaggtgccaaatctggactcttgtcacttcttgcttcctgctttgcagctttcttagcttcatgcttcctttgatttttaagagctgtttttgataatggcttatcgtttcctgattgtggtttcatattctgaggtggttcctcttcatgcaatttggaattggtgattggtttatttcttaaagctgggggtctataagctgttgcaactttaggttcctcattgggtacttcacttggaactgcttggtaagttattgtttttgctggaaatattccatccaaaaatggctgccaagaaacctgccataattctgcatttgatggcacatcatacttgtgcaagatagagccagtataatgccaaattttgtatccattattaacccgtaacctgggagcacatgtagctgttaaaatatgctcaccatccgggcaccaagcaaaatatgtagaatcagaagccaccggtttagaaataagtttgtagtttttcacatcccacacttccatttgtcccctcagatttccaaatccagctaatactaatatatgtccatgagggctatagtaggctgcattacgaggaccagttccaaagtcaaatacaggatcacatttcaagttgaaaattgtcgctttggcaggcataaaaccatatacagcacaaaactcagtagaactagaattccaaactacatcataaatggggccattttttggtaattgcactacagcactttctccatttgttgcaatgtagtgtagagtttgttctccatagtaggaagctcctgtcttgtcaactgctgtgttggtaatagctagcacagatgttgacaagacagcagtagcttttttattccacagcattgtaactttaaggcagataaagtccaa

SEQ ID NO: 226499 - DNA, 1387 bp, Homo Sapiens; identical to SEQ ID NO: 192610

SEQ ID NO: 226500 - DNA, 1135 bp, Homo Sapiens
ttggatctgccgctccctttgccgccgccttagcccgggacccgaacccagcctctcccctacccgaacaccggccccggctccaccgaggcccgggtcccccagcccgtctcgccgccgccatggcggaccctaaatacgccgaccttcccggcattgccaggaatgagccagatgtttatgaaactagcgacctacctgaggatgatcaagcggagttcgatgcggaggagctgacaagcacaagtgtggaacacatcattgtcaatcctaatgctgcctatgacaagttcaaggacaagagagtggggacaaagggacttgatttctcagatcgtattggaaaaaccaagaggacaggatatgaatctggagaatatgagatgcttggagagggtctgggagtgaaggagacaccccagcaaaagtaccagcgcctactgcatgaggtccaagagctgacaactgaagttgaaaaaatcaagacgacagtgaaggagtcagccacagaggagaagctgacccctgtgttgctggctaaacagctggcagccctgaagcagcagctggttgcttcccacctggagaagctgctgggaccagatgctgcaatcaaccttaccgaccccgatggcgccctggctaagcgcctactactgcagctggaagcaacaaagaacagcaaagggggatcagggggaaaaaccactgggacccccccagatagcagccttgtcacttatgaactacattctcggcctgagcaggacaagttctctcaagctgccaaagtcgcagaacttgaaaagcgcctgacagagctggagacagctgtacgttgtgatcaggatgctcagaatcccctttctgcaggtctacagggagcctgtctcatggagactgtagagctgttgcaagcaaaggtgagcgccctagaccttgcagttttggatcaagtggaggctcggctacagagtgtcctgggaaaggtgaacgagattgccaagcataaagcctctgtagaagatgcagatacacaaagcaaggtgcaccagctatatgaaactatacagcgctggagccccattgcctccaccctccctgagctggtgcagagacttgtcaccatcaagca

SEQ ID NO: 226501 - DNA, 1047 bp, Homo Sapiens
  misc_feature (140)..(149): n is a, c, g, or t
  misc_feature (543)..(576): n is a, c, g, or t
ttggctgtaattttcccaatttctaagcagtgtttggtctaatcattatgtacttttcttgttagtgacattttggctagtatacagctccctttttaaacaactttgattttatgacaacttttccaaagtttaaaacnnnnnnnnnnccctaggcaaatcctgatcctaactgttgtcttggagtatttgggctgagcttgtacaccacagaaagagatctaagagaagtgttctctaaatatggtcccattgccgatgtgtctattgtatatgaccagcagtctaggcgttcaagaggatttgcctttgtatattttgaaaatgtagatgatgccaaggaagctaaagaacgtgccaatggaatggagcttgatgggcgtaggatcagagttgatttctctataacaaaaagaccacatacgccaacaccaggaatttacatggggagacctacctatggcagctctcgccgtcgggattactatgacagaggatatgatcggggctatgatgatcgggactactatagcagatcatacnnnnnnnnnnnnnnnnnnnnnnnnnnnnnnnnnnctgcccaagacagggatcagatttatagaaggcggtcaccttctccttactatagtcgtggaggatacagatcacgttccagatctcgatcatactcacctcgtcgctattaaagcatgaagactttctgaaacctgccctagagctgggatattgtttgtgggcaatattttttattgtctcttgtttaaaaagtgaacagtgcctagtgaagttaggtgacttttacaccttttacgatgactacttttggtggagttgaaatgctgttttcattctgcatttgtgtagtttggtgctttgttccaagttaagtgttttcagaaaagtatgttttgcatgtatttttttacagtctaaattttgactgctgagaagtttctattgtacaaaacttcatttaaaaggtttttctactgaatccagggtattctgaagatcgaagcctgtgtaaaatgctaccaaatgggc

SEQ ID NO: 226502 - DNA, 797 bp, Homo Sapiens; identical to SEQ ID NO: 192615
  misc_feature (507)..(545): n is a, c, g, or t
  misc_feature (682)..(692): n is a, c, g, or t

SEQ ID NO: 226503 - DNA, 927 bp, Homo Sapiens; identical to SEQ ID NO: 192617
  misc_feature (754)..(791): n is a, c, g, or t

SEQ ID NO: 226504 - DNA, 870 bp, Homo Sapiens
tttacaccagcagcattaggagccctggaaggaggctttgggagccaagtcccatttgggatgcatgcaggactggccaccactcccccagttcaaccactgacagaccaggtactaacacctcagaacaactgtgctgggtgaggggtgtgtgagtgcacactgaacaccttctcatctgtctacatctctccctacccacctgcagattggaggcctcattgtagaattcccctcggatgtagatataggcagcgcgggcgcccatggcccggccccccaccaggcagccttccagcagcttgtgaggatcatggcgtaagatctcccggtccttgcaggtgcccggctccccctcgtctgcgttcaccaccagatacttgggcctgccatctgagggcttattcatgaagctccacttgaggccagtggggaagccagcgcctccacggcccctcaaacccgatgtcttgatctcgcccaggatccagtcgggccccttcagcaggatctcctttgtcttgtaccagtcacctcgactcagggaacctttcagcctggacagaatagggaaggcaatgaaggggacaccttgctccgggacccaacacactaagggcactgtctcacctccagtcatggcggccgtacaggttggtgaaaatccggtcttcatccttcagcgagccaaatgaggttttcttgggtgctgtctagggagacaaagggtcaggaggcccagagtgctctggggccatgagggattgggccagaagctacagaatcttgggtctccctatttaggaggggctgggctagggctagggaagcatctatagcatcatagataccactgccacttagtaagca

SEQ ID NO: 226505 - DNA, 1171 bp, Homo Sapiens; identical to SEQ ID NO: 192619

SEQ ID NO: 226506 - DNA, 985 bp, Homo Sapiens; identical to SEQ ID NO: 192620

SEQ ID NO: 226507 - DNA, 1343 bp, Homo Sapiens; identical to SEQ ID NO: 192621

SEQ ID NO: 226508 - DNA, 1024 bp, Homo Sapiens
ttggatcttatttttttacttacaggttattaacacggggatcaaagtctggtgtagaaataacagcggtgaagagtttgactgtgctttccggctggcacaggagggaatatatacattgtatccatttattaactcaagaattattactgtatcaatggaagatgttaagatactgttgacccaggaaaatcccttttttagaaaactcagcagtgagacctacagtcaagcaaaggacctggcaaagggaagcatcgtgctgaagtatgaaccagattctgcgaatccagacgctctgcagtgtcccatcgtcttatgcggatggcggggaaaggcctccattcgaacttttgtgcccaagaatgaacggcttcattatctcaggatgatggggctggaggtattgggagaaaagaagaaggaaggggttatcctcacaaatgagagtgcagccagcaccggacagccagacaatgacgtgactgagggacagagagcaggagagcccaacagcccagatgcagaagaggccaacagtccagacgtgacagcaggctgtgacccggcgggggtccatccaccccggtgagcaggcccaaggcagcgggggcccacacccctcacacgcaaaactggcttcttctggtcactggtgtctgaaaccaaatccagagcagcctgtggcctgtaaagcatatatttctaatgactgcagactggtgggatcataggagccttctgaatgaccaggactgctttctttggagctgatgaaaatgtactcttttagcgtgttagaaatcacttgttttattttgtttctttggccaagctgggtctagtgtttcttttgctgggaatagactttcaaagttgtacttctatcaagaaacaaaactgcccttgcagaaatttcaagtcttttgttaagcctgtattggtcttaaggtgcagtattttttaaattattatttatagaaagaatctataaattcttggggaagtgtgttataagctttaa

SEQ ID NO: 226509 - DNA, 975 bp, Homo Sapiens
ttggtgaaggacgcaatgactaccacccgatgttctttacccatgaccgagcctttgaagagctctttggaatctgcatccagctgttgaacaagacctggaaggagatgagggcaacagcagaggacttcaacaaggttatgcaagtcgtccgagagcaaatcactcgagctttgccctccaaacccaactctttggatcagttcaagagcaaattgcgtagcctgagttactctgagattctacgactgcgccagtctgagaggatgagtcaggatgacttccagtccccgccaattgtggagctgagggagaagatccagcccgagatccttgagctgatcaagcagcagcgcctgaaccggctctgtgagggcagcagcttccgaaagattgggaaccgccgaaggcaagaacggttctggtactgccggttggcactgaaccacaaggtccttcactatggtgacttggatgacaacccacaaggggaggtgacatttgaatccctgcaggagaaaattcctgttgcagacattaaggccattgtcactgggaaagattgtccccacatgaaagagaaaagtgctctgaaacagaacaaggaggtgttggaattggccttctccatcctgtatgaccctgatgagaccttaaacttcatcgcacctaataaatatgagtactgcatctggattgacggcctcagtgcccttctggggaaggacatgtccagtgagctgaccaagagtgacctggacaccctgctgagcatggagatgaagctgcggctcctggacctggagaacatccagattcccgaagccccaccccccatccccaaggagcccagcagctatgactttgtctatcactatggctgagcctggagccagaaacgacggtacccaggagatggattttgggcccaggagaaaacacttacattctggtgccttgtcttttgcttgtaca

SEQ ID NO: 226510 - DNA, 1361 bp, Homo Sapiens
ttggagatttgtgaacatctggcctgctctcttctttgcccccaggtcggttgtacgccgtgcagcaagtcttttaagtaaagtagtggacagcctggccccatccattactaatgttttagtgcagggcaaacaggtaactctgggtgcctttgggcatgaagaagaagttatctctaatcctttgtctccaagagtgattcaaaacatcatctattataagtgtaacacccatgatgagagggaagcggtcattcagcaagaactggtcatccatattggctggatcatctccaataaccctgagttattcagtggcatgctgaaaatacgaatcgggtggatcatccatgccatggagtatgaacttcagatccgtggcggagacaagccagccttggacttgtatcagctgtcacctagtgaagttaaacagcttctgctggatattctgcagcctcaacagaatggaagatgttggctgaacaggcgtcagatcgatgggtctttgaatagaactcccaccgggttctatgaccgagtgtggcagattctggagcgcacgcccaatgggatcattgttgctgggaagcatttgcctcagcaaccaaccctgtcagatatgaccatgtatgagatgaatttctctctccttgttgaagacacgttgggaaatattgaccagccacagtacagacagatcgttgtagagttacttatggttgtatccattgtactggaaagaaaccccgagctagaatttcaagacaaagtagatctagacagactggtcaaagaagcatttaatgaatttcaaaaagatcagagtcggctaaaggaaattgaaaaacaagatgacatgacttccttttacaacactcctcccctgggaaaaagaggaacatgcagctatttgacaaaggcggtgatgaatctgctgctggaaggagaagtcaagccaaacaatgatgacccgtgtctgattagctagtggggaaggtgtaggaagctctgttgagacacatgttctgaagtgtgttgtgtttcatgttcaagcttaatcaaggcagccattaatatacgaactgagcatgctggggaggtgaatgccacatccttggcggggttatggacctcttgcatgtcatagccaatctaacggtaatggtaaatgcttttaatcaagcaggaaaaagttctcatgattatgccaactataatagtaatcctcactgagtgataaaaatagtttatgaattgaaaatttgccgctgcatgttgtatgatcaaatagttcatcaaaatgaatctttgctctttggactgaattcttaccatactgccattaaaataaatttgcc

SEQ ID NO: 226511 - DNA, 1069 bp, Homo Sapiens
ttggctagagaatgtgtatcccagaagaagctggcaaggatatgggagcaaccaccatggaccagaagtctctctgggcaggtgtagtggtcttgctgcttctccagggaggatctgcctacaaactggtttgctactttaccaactggtcccaggaccggcaggaaccaggaaaattcacccctgagaatattgaccccttcctatgctctcatctcatctattcattcgccagcatcgaaaacaacaaggttatcatcaaggacaagagtgaagtgatgctctaccagaccatcaacagtctcaaaaccaagaatcccaaactgaaaattctcttgtccattggagggtacctgtttggttccaaagggttccaccctatggtggattcttctacatcacgcttggaattcattaactccataatcctgtttctgaggaaccataactttgatggactggatgtaagctggatctacccagatcagaaagaaaacactcatttcactgtgctgattcatgagttagcagaagcctttcagaaggacttcacaaaatccaccaaggaaaggcttctcttgactgcgggcgtatctgcagggaggcaaatgattgataacagctatcaagttgagaaactggcaaaagatctggatttcatcaacctcctgtcctttgacttccatgggtcttgggaaaagccccttatcactggccacaacagccctctgagcaaggggtggcaggacagagggccaagctcctactacaatgtggaatatgctgtggggtactggatacataagggaatgccatcagagaaggtggtcatgggcatccccacatatgggcactccttcacactggcctctgcagaaaccaccgtgggggcccctgcctctggccctggagctgctggacccatcacagagtcttcaagcttcctggtcttttattagttctgccagttcatgaaaggagccaagatcacctggctccaggatcagcaggttccctacgcagtcaaagggaaccaatgggtgggctatgatgatgtgaaaagtatgga

SEQ ID NO: 226512 - DNA, 1315 bp, Homo Sapiens; identical to SEQ ID NO: 192628
  misc_feature (534)..(543): n is a, c, g, or t

SEQ ID NO: 226513 - DNA, 1084 bp, Homo Sapiens; identical to SEQ ID NO: 192629

SEQ ID NO: 226514 - DNA, 953 bp, Homo Sapiens
ttggctgtcggctgggaggggaggggtagccggtcttttggggtaggcggtagtggcggaagaggttcggcggctgatggcggatcaggatcggaagcctgcgtaactttctcccttgatccgggagtctttccactggattcacaatgacatcctttcaagaagtcccattgcagacttccaactttgcccatgtcatctttcaaaatgtggccaagagttaccttcctaatgcacacctggaatgtcattacaccttaactccatatattcatccacatccaaaagattgggttggtatattcaaggttggatggagtactgctcgtgattattacacgtttttatggtcccctatgcctgaacattatgtggaaggatcaacagtcaattgtgtactagcattccaaggatattaccttccaaatgatgatggagaattttatcagttctgttacgttacccataagggtgaaattcgtggagcaagtacacctttccagtttcgagcttcttctccagttgaagagctgcttactatggaagatgaaggaaattctgacatgttagtggtgaccacaaaagcaggccttcttgagttgaaaattgagaaaaccatgaaagaaaaagaagaactgttaaagttaattgccgttctggaaaaagaaacagcacaacttcgagaacaagttgggagaatggaaagagaacttaaccatgagaaagaaagatgtgaccaactgcaagcagaacaaaagggtcttactgaagtaacacaaagcttaaaaatggaaaatgaagagtttaagaagaggttcagtgatgctacatccaaagcccatcagcttgaggaagatattgtgtcagtaacacataaagcaattgaaaaaaaaccgaattagacagtttaaaggacaaactcagaaggcacacatgaaagagaacaacttgaa

SEQ ID NO: 226515 - DNA, 249 bp, Homo Sapiens
ctttgtacaaaaaagttggctcaaatctaactcctccaatcccaactccctttcccaaacaaaaagccacagaggcagagcaagcattcccctttaagagcttccactgcaccccctcccaagggacacagcggtaggaatggtgcttaaactccacaggtatcagagagggtgtaactaggacatcctcaagggcagctaggccccgaatgtacaatgttaagacagggaattttgtgttccattgac

SEQ ID NO: 226516 - DNA, 905 bp, Homo Sapiens
ttggcgaatcaccgttccacttgtcagtgaagttcaaatagctcagttgcggtttcctgtaccaaagggtgttctaaggatacattttattgaagctcaggatcttcaggggaaagacacttaccttaagggacttgtcaagggaaagtcagacccctatggaatcattagagttggcaaccaaatcttccaaagcagagtcatcaaggagaacctcagtccaaagtggaatgaagtctatgaggctttagtgtatgaacatcctggacaagaattagagattgagctctttgatgaagacccagacaaggatgactttttaggaagtcttatgattgacctcattgaagttgaaaaggagcgccttttagatgaatggttcactctggacgaggttcccaaggggaagctacacttgagactggagtggctcacgttaatgccaaatgcgtcaaacctcgacaaggtgctaacagacatcaaagctgacaaagaccaagccaacgatggtctttcctctgcattgctgatcttgtacttggattcagcaaggaaccttccgagtaacccattagaatttaaccccgatgtcttgaagaagactgcagttcagagagctttaaagtcagggaagaaaataagcagcaacccaaatcctgttgtccagatgtcagttgggcacaaggcccaggagagcaagattcgatacaaaaccaatgaacctgtgtgggaggaaaacttcactttcttcattcacaatcccaagcgccaggaccttgaagttgaggtcagagacgagcagcaccagtgttctctggggaacctgaagtctccctcagccagctgctcaccagtgaggacatgactgtgagccagcgcttccagctcagtaactcgggtccaaa

SEQ ID NO: 226517 - DNA, 1211 bp, Homo Sapiens
acaaaaaagttggctttgcttgtagctgctccccgaactcgccgtcttcctgtcggcggccggcactgtaggtgagcgcgagaggacggaggaaggaagcctgcagacagacgccttctccatcccaaggcgcgggcaggtgccgggacgctgggcctggcggtgttttcgtcgtgctcagcggtgggaggaggcggaagaaaccagagcctgggagattaacaggaaacttccaagatggaaactttgtctttccccagatataatgtagctgagattgtgattcatattcgcaataagatcttaacaggagctgatggtaaaaacctcaccaagaatgatctttatccaaatccaaagcctgaagtcttgcacatgatctacatgagagccttacaaatagtatatggaattcgactggaacatttttacatgatgccagtgaactctgaagtcatgtatccacatttaatggaaggcttcttaccattcagcaatttagttactcatctggactcatttttgcctatctgccgggtgaatgactttgagactgctgatattctatgtccaaaagcaaaacggacaagtcggtttttaagtggcattatcaactttattcacttcagagaagcatgccgtgaaacgtatatggaatttctttggcaatataaatcctctgcggacaaaatgcaacagttaaacgccgcacaccaggaggcattaatgaaactggagagacttgattctgttccagttgaagagcaagaagagttcaagcagctttcagatggtattcaggagctacaacaatcactaaatcaggattttcatcaaaaaacgatagtgctgcaagagggaaattcccaaaagaagtcaaatatttcagagaaaaccaagcgtttgaatgaactaaaattgtcggtggtttctttgaaagaaatacaagagagtttgaaaacaaaaattgtggattctccagagaagttaaagaattataaagaaaaaatgaaagatacggtccagaagcttaaaaatgccagacaagaagtggtggagaaatatgaaatctatggagactcagttgactgcctgccttcatgtcagttggaagtgcagttatatcaaaagaaaatacaggacctttcagataatatggaaaaattagccagtatcttaaaggagagcctgaacttggaggaccaaattga

SEQ ID NO: 226518 - DNA, 940 bp, Homo Sapiens
ttggctcggaagcccgtcaccatgtcgtgcgagtcgtctatggttctcgggtactgggatattcgtgggctggcgcacgccatccgcctgctcctggagttcacggatacctcttatgaggagaaacggtacacgtgcggggaagctcctgactatgatcgaagccaatggctggatgtgaaattcaagctagacctggactttcctaatctgccctacctcctggatgggaagaacaagatcacccagagcaatgccatcttgcgctacatcgctcgcaagcacaacatgtgtggtgagactgaagaagaaaagattcgagtggacatcatagagaaccaagtaatggatttccgcacacaactgataaggctctgttacagctctgaccacgaaaaactgaagcctcagtacttggaagagctacctggacaactgaaacaattctccatgtttctggggaaattctcatggtttgccggggaaaagctcacctttgtggattttctcacctatgatatcttggatcagaaccgtatatttgaccccaagtgcctggatgagttcccaaacctgaaggctttcatgtgccgttttgaggctttggagaaaatcgctgcctacttacagtctgatcagttctgcaagatgcccatcaacaacaagatggcccagtggggcaacaagcctgtatgctgagcagaggcagacttgcagagcttgttttgtttcatcctgtccgtaagggtcagcgctcttgctttgctcttttcaatgaatagcacttatgttactggtgtccagctgagtttctcttgggtataaaggctaaaagggaaaaaggatatgtggagaatcatcaagatatgaattgaatcgctgcgatactggcatttccctactccccaactgagttcaagggctgtaggttcatgcccaa

SEQ ID NO: 226519 - DNA, 1089 bp, Homo Sapiens
  misc_feature (839)..(847): n is a, c, g, or t
ttggattaaagttttagaagatcggttaagagcaggcttatgtgatcgctgtgcagtaactgaagaacatatgcggaaaaaacagcaagagtttgaaaatatccggcagcagaatcttaaacttattacagaacttatgaatgaaaggaatactctacaggaagaaaataaaaagctttctgaacaactccagcagaaaattgagaatgatcaacagcatcaagcagctgagcttgaatgtgaggaagacgttattccagattcaccgataacagccttctcattttctggcgttaaccggctacgaagaaaggagaacccccatgtccgatacatagaacaaacacatactaaattggagcactctgtgtgtgcaaatgaaatgagaaaagtttccaagtcttcaactcatccacaacataatcctaatgaaaatgaaattctagtagctgacacttatgaccaaagtcaatctccaatggccaaagcacatggaacaagcagctatacccctgataagtcatcttttaatttagctacagttgttgctgaaacacttggacttggtgttcaagaagaatctgaaactcaaggtcccatgagcccccttggtgatgagctctaccactgtctggaaggaaatcacaagaaacagccttttgaggaatctacaagaaatactgaagatagtttaagattttcagattctacttcaaagactcctcctcaagaagaattacctactcgagtgtcatctcctgtatttggagctacctctagtatcaaaagtggtttagatttgaatacaagtttgtccccttctcttttacagcctgggnnnnnnnnncatctgaaaacactcccttttagcaacacttgtatatctagattagaaaaaactagatcaaaatctgaagatagtgcccttttcacacatcacagtcttgggtctgaagtgaacaagatcattatccagtcatctaataaacagatacttataaataaaaatataagtgaatccctagtgaacagaataggactgagtacggtaaagattctaacactgataaacatttggagcccctgaaa

SEQ ID NO: 226520 - DNA, 1163 bp, Homo Sapiens
actttgtacaaaaaagttggctcccaacctctttgtctggaatgacatgaacgaaccatctgtgttcaatggtcctgaggtcaccatgctcaaggatgcccagcattatgggggctgggagcaccgggatgtgcataacatctatggcctttatggcacatggcgactgctgatgggctgagacagcgctctgggggcatggaacgcccctttgtcctggccagggccttcttcgctggctcccagcgctttggagccgtgtggacaggggacaacactgccgagtgggaccatttgaagatctctattcctatgtgtctcagcttggggctggtgggactttccttctgtggggcggatgtgggtggcttcttcaaaaacccagagccagagctgcttgtgcgctggtaccagatgggtgcttaccagccattcttccgggcacatgcccacttggacactgggcgacgagagccatggctgttaccatctcagcacaatgatataatccgagatgccttgggccagcgatattctttgctgcccttctggtacaccctcttatatcaggcccatcgggaaggcattcctgtcatgaggcccctgtgggtgcagtaccctcaggatgtgactaccttcaatatagatgatcagtacttgcttggggatgcgttgctggttcaccctgtatcagactctggagcccatggtgtccaggtctatctgcctggccaaggggaggtgtggtatgacattcaaagctaccagaagcatcatggtccccagaccctgtacctgcctgtaactctaagcagtatccctgtgttccagcgtggagggacaatcgtgcctcgatggatgcgagtgcggcggtcttcagaatgtatgaaggatgaccccatcactctctttgttgcacttagccctcagggtacagctcaaggagagctctttctggatgatgggcacacgttcaactatcagactcgccaagagttcctgctgcgtcgattctcattctctggcaacacccttgtctccagctcagcagaccctgaaaggacactttgagacaccaatctggattgagcgggtggtgataataggggctgggaagccagcagctgtggtactccagacaaaaggatctccagaaagccgcc

SEQ ID NO: 226521 - DNA, 976 bp, Homo Sapiens; identical to SEQ ID NO: 192635

SEQ ID NO: 226522 - DNA, 1193 bp, Homo Sapiens; identical to SEQ ID NO: 192636

SEQ ID NO: 226523 - DNA, 1274 bp, Homo Sapiens; identical to SEQ ID NO: 192637

SEQ ID NO: 226524 - DNA, 933 bp, Homo Sapiens; identical to SEQ ID NO: 192638

SEQ ID NO: 226525 - DNA, 1248 bp, Homo Sapiens; identical to SEQ ID NO: 192639

SEQ ID NO: 226526 - DNA, 983 bp, Homo Sapiens; identical to SEQ ID NO: 192640

SEQ ID NO: 226527 - DNA, 1171 bp, Homo Sapiens; identical to SEQ ID NO: 192641

SEQ ID NO: 226528 - DNA, 886 bp, Homo Sapiens; identical to SEQ ID NO: 192642

SEQ ID NO: 226529 - DNA, 1133 bp, Homo Sapiens
ttggggcgctgactcgagctgggcaggagatgagcctagcggccctgaagcaacacgacccctatatcaccagcatcgcagacctcacgggccaggtcgctctgtacaccttctgccccaaggccaaccagtgggagaagactgatatagaagggaccttattcgtatatcgaaggtcagcttccccttaccatggttttaccattgtgaatcgactaaatatgcacaatctagttgaaccagtgaataaagatttggaatttcagctccatgaaccatttcttctgtatagaaatgcaagcttgtcgatatatagtatctggttttatgacaagaatgactgtcaccgcatagcaaaactcatggctgatgtggtagaagaggagacacggcgatcccagcaagctgctcgggacaaacagagtcccagccaggccaatggctgcagcgaccacaggcccatcgacatcctggagatgctgagcagagccaaggatgagtatgagaggaatcagatgggtgactcaaatatctccagccctgggttacagccaagcactcagctctccaatctgggaagcaccgagactctagaagaaatgccctccgggtcacaggataagtctgctccatctggacacaagcatctgacggtagaagagttatttggaacctctttgccaaaggaacaaccagcagttgtgggtctggattcagaagaaatggagaggttgccaggagatgcctcccagaaagagcccaattcattcctaccatttccctttgagcagttaggaggagcccctcaatcagaaaccctgggtgtcccttctgctgcccaccattcagtccagcctgaaatcaccaccccggtgctaatcactccagcctccatcacacagtccaatgaaaagcatgctccaacctacacaatcccgttgagccctgttctcagtcccactctgccagctgaagctcctactgcacaggttctccccagcttatctcgaaacagcaccatgatgcaggcagtgaagaccacgcctagacagaggtctccactcctgaaccagcccagtccctgagctaagccatgccagtctgattgccaaccagagccccttcatggcccc

SEQ ID NO: 226530 - DNA, 645 bp, Homo Sapiens
ttgtacaaaaaagttggggccgagcaggaggcgccatcatgggagtggacatccgccataacaaggaccgaaaggttcggcgcaaggagcccaagagccaggatatctacctgaggctgttggtcaagttatacaggtttctggccagaagaaccaactccacattcaaccaggttgtgttgaagaggttgtttatgagtcgcaccaaccggccgcctctgtccctttcccggatgatccggaagatgaagcttcctggccgggaaaacaagacggccgtggttgtggggaccataactgatgatgtgcgggttcaggaggtacccaaactgaaggtatgtgcactgcgcgtgaccagccgggcccgcagccgcatcctcagggcagggggcaagatcctcactttcgaccagctggccctggactcccctaagggctgtggcactgtcctgctctccggtcctcgcaagggccgagaggtgtaccggcatttcggcaaggccccaggaaccccgcacagccacaccaaaccctacgtccgctccaagggccggaagttcgagcgtgccagaggccgacgggccagccgaggctacaaaaactaaccctggatcctactctcttattaaaaagatttttgctgac

SEQ ID NO: 226531 - DNA, 1078 bp, Homo Sapiens; identical to SEQ ID NO: 192643

SEQ ID NO: 226532 - DNA, 1243 bp, Homo Sapiens; identical to SEQ ID NO: 192644
  misc_feature (812)..(831): n is a, c, g, or t

SEQ ID NO: 226533 - DNA, 813 bp, Homo Sapiens; identical to SEQ ID NO: 192653
  misc_feature (45)..(54): n is a, c, g, or t

SEQ ID NO: 226534 - DNA, 1261 bp, Homo Sapiens
ttggcttcagttcacacgtggcgccagcggaggcaggttgatgtgtttgtgcttccttctacagccaatatgaaaaggcctaagttaaagaaagcaagtaaacgcatgacctgccataagcggtataaaatccaaaaaaaggttcgagaacatcatcgaaaattaagaaaggaggctaaaaagcggggtcacaagaagcctaggaaagacccaggagttccaaacagtgctccctttaaggaggctcttcttagggaagctgagctaaggaaacagaggcttgaagaactaaaacagcagcagaaacttgacaggcagaaggaactagaaaagaaaagaaaacttgaaactaatcctgatattaagccatcaaatgtggaacctatggaaaaggagtttgggctttgcaaaactgagaacaaagccaagtcgggcaaacagaattcaaagaagctgtactgccaagaacttaaaaaggtgattgaagcctccgatgttgtcctagaggtgttggatgccagagatcctcttggttgcagatgtcctcaggtagaagaggccattgtccagagtggacagaaaaagctggtacttatattaaataaatcagatctggtaccaaaggagaatttggagagctggctaaattatttgaagaaagaattgccaacagtggtgttcagagcctcaacaaaaccaaaggataaagggaagataaccaagcgtgtgaaggcaaagaagaatgctgctccattcagaagtgaagtctgctttgggaaagagggcctttggaaacttcttggaggttttcaggaaacttgcagcaaagccattcgggttggagtaattggtttcccaaatgtggggaaaagcagcattatcaatagcttaaaacaagaacagatgtgtaatgttggtgtatccatggggcttacaaggagcatgcaagttgtccccttggacaaacagatcacaatcatagatagtccgagcttcatcgtatctccacttaattcctcctctgcgcttgctctgcgaagtccagcaagtattgaagtagtaaaaccgatggaggctgccagtgccatcctttcccaggctgatgctcgacaggtagtactgaaatatactgtcccaggctacaggaattctctggaattttttactatgcttgctcagagaagaggtatgcaccaaaaatgtggaatcccaaatgttgaagtgctgccaaactgctgtggtctgagtggacagtgcctca

SEQ ID NO: 226535 - DNA, 1092 bp, Homo Sapiens; identical to SEQ ID NO: 192654
  misc_feature (931)..(940): n is a, c, g, or t

SEQ ID NO: 226536 - DNA, 1106 bp, Homo Sapiens; identical to SEQ ID NO: 192655

SEQ ID NO: 226537 - DNA, 937 bp, Homo Sapiens
aactttgtacaaaaaagttggctcagcctggtgaaccacacaggccagcgctctgacatgcagaaggtgaccctgggcctgcttgtgttcctggcaggctttcctgtcctggacgccaatgacctagaagataaaaacagtcctttctactatgactggcacagcctccaggttggcgggctcatctgcgctggggttctgtgcgccatgggcatcatcatcgtcatgagtgcaaaatgcaaatgcaagtttggccagaagtccggtcaccatccaggggagactccacctctcatcaccccaggctcagcccaaagctgatgaggacagaccagctgaaattgggtggaggaccgttctctgtccccaggtcctgtctctgcacagaaacttgaactccaggatggaattcttcctcctctgctgggactcctttgcatggcagggcctcatctcacctctcgcaagagggtctctttgttcaattttttttaatctaaaatgattgtgcctctgcccaagcagcctggagacttcctatgtgtgcattggggtggggcttggggcaccatgagaaggttggcgtgccctggaggctgacacagaggctggcactgagcctgcttgttgggaaaagcccacaggcctgttcccttgtggcttgggacatggcacaggcccgccctctgcctcctcagccatgggaacctcatatgcaatttgggatttactagtagccaaaaggaatgaaagagagctctaaccagatggaacactggaacattccagtggaccctggaccattccaggaaaactggggacatagatcgtcccgctatgatgggaagtgttcagacagtttataatagtaagcccctgtgaccctctcacttaccccgagacctcactttattacaagatctttccaaatacccaa

SEQ ID NO: 226538 - DNA, 567 bp, Homo Sapiens; identical to SEQ ID NO: 192656

SEQ ID NO: 226539 - DNA, 494 bp, Homo Sapiens; identical to SEQ ID NO: 192657

SEQ ID NO: 226540 - DNA, 797 bp, Homo Sapiens; identical to SEQ ID NO: 192659
  misc_feature (657)..(685): n is a, c, g, or t

SEQ ID NO: 226541 - DNA, 899 bp, Homo Sapiens; identical to SEQ ID NO: 192661
  misc_feature (204)..(267): n is a, c, g, or t
  misc_feature (301)..(309): n is a, c, g, or t

SEQ ID NO: 226542 - DNA, 924 bp, Homo Sapiens; identical to SEQ ID NO: 192671

SEQ ID NO: 226543 - DNA, 1033 bp, Homo Sapiens
actttgtacaaaaaagttggcatttgtggtctatttctctgttagtgtttaaccaaccatctgttctaaaagaagggctgaactgatggaaggaatgctgttagcctgagactcaggaagacaacttctgcagggtcactccctggcttctggaggaaagagaaggagggcagtgctccagtggtacagaagtgagacataatggaatcaggcttcacctccaaggacacctatctaagccattttaaccctcgggattacctagaaaaatattacaagtttggttctaggcactctgcagaaagccagattcttaagcaccttctgaaaaatcttttcaagatattctgcctagacggtgtgaagggagacctgctgattgacatcggctctggccccactatctatcagctcctctctgcttgtgaatcctttaaggagatcgtcgtcactgactactcagaccagaacctgcaggagctggagaagtggctgaagaaagagccagaggcctttgactggtccccagtggtgacctatgtgtgtgatcttgaagggaacagagtcaagggtccagagaaggaggagaagttgagacaggcggtcaagcaggtgctgaagtgtgatgtgactcagagccagccactgggggccgtccccttacccccggctgactgcgtgctcagcacactgtgtctggatgccgcctgcccagacctccccacctactgcagggcgctcaggaacctcggcagcctactgaagccagggggcttcctggtgatcatggatgcgctcaagagcagctactacatgattggtgagcagaagttctccagcctccccctgggccgggaggcagtagaggctgctgtgaaagaggctggctacacaatcgaatggtttgaggtgatctcgcaaagttattcttccaccatggccaacaacgaaggacttttctccctggtggcgaggaagctgagcagacccctgtgatgcctgtgacctcaattaaagcaattcctttgacctg

SEQ ID NO: 226544 - DNA, 930 bp, Homo Sapiens; identical to SEQ ID NO: 192673

SEQ ID NO: 226545 - DNA, 721 bp, Homo Sapiens; identical to SEQ ID NO: 192674

SEQ ID NO: 226546 - DNA, 1739 bp, Homo Sapiens
  misc_feature (1449)..(1471): n is a, c, g, or t
  misc_feature (1524)..(1537): n is a, c, g, or t
tgtacaaaagttggtgaccatgccctgctagagataaatcttagttttcaaaatttcttttttaattcataatcacagagaggaggctgcaacgccgagcggaggaggcaggaaccggagcgcgagcagtagctgggtgggcaccatggctgggatcaccaccatcgaggcggtgaagcgcaagatccaggttctgcagcagcaggcagatgatgcagaggagcgagctgagcgcctccagcgagaagttgagggagaaaggcgggcccgggaacaggctgaggctgaggtggcctccttgaaccgtaggatccagctggttgaagaagagctggaccgtgctcaggagcgcctggccactgccctgcaaaagctggaagaagctgaaaaagctgctgatgagagtgagagaggtatgaaggttattgaaaaccgggccttaaaagatgaagaaaagatggaactccaggaaatccaactcaaagaagctaagcacattgcagaagaggcagataggaagtatgaagaggtggctcgtaagttggtgatcattgaaggagacttggaacgcacagaggaacgagctgagctggcagagtcccgttgccgagagatggatgagcagattagactgatggaccagaacctgaagtgtctgagtgctgctgaagaaaagtactctcaaaaagaagataaatatgaggaagaaatcaagattcttactgataaactcaaggaggcagagacccgtgctgagtttgctgagagatcggtagccaagctggaaaagacaattgatgacctggaagataaactgaaatgcaccaaagaggagcacctctgtacacaaaggatgctggaccagaccctgcttgacctgaatgagatgtagaacgccccagtcccaccctgctgctgctcctccctctgacccagactccgcctgaggccagcctgcgggaagctgacctttaactgagggctgatctttaactggaaggctgctttctcctttcaccaccccctccttccctgtgtctttttcgccaaactgtctctgcctcttcccggagaatccagctgggctagaggctgagcacctttggaaacaacatttaagggaatgtgagcacaatgcataatgtctttaaaaagcatgttgtgatgtacacattttgtaattaccttttttgttgttttgtagcaaccatttgtaaaacattccaaataattccacagtcctgaagcagcaatcgaatccctttctcacttttggaaggtgacttttcaccttaatgcatattcccctctccatagaggagaggaaaaggtgtaggcctgccttaccgagagccaaacagagcccagggagactccgctgtgggaaacctcattgttctgtacaaagtactagctaaaccagaaaggtgattccaggaggagttagcnnnnnnnnnnnnnnnnnnnnnnntgtgctgttcaagttttcagctttaagatatctttggataatgttatttctannnnnnnnnnnnnncattagaagttaccaaattaagatggtaagacctctgagaccaaaattttgtcccatctctaccccctcacaactgcttacagaatggatcatgtcccccttatgttgaggtgaccacttaattgctttcctgcctccttgaaagaaagaaagaaagacgactgtgtttttgccactgatttagccatgtgaaactcatctc

SEQ ID NO: 226547 - DNA, 856 bp, Homo Sapiens; identical to SEQ ID NO: 192675
  misc_feature (140)..(162): n is a, c, g, or t
  misc_feature (215)..(228): n is a, c, g, or t

SEQ ID NO: 226548 - DNA, 1584 bp, Homo Sapiens; identical to SEQ ID NO: 192676
  misc_feature (1360)..(1371): n is a, c, g, or t
  misc_feature (1424)..(1437): n is a, c, g, or t

SEQ ID NO: 226549 - DNA, 762 bp, Homo Sapiens; identical to SEQ ID NO: 192678
  misc_feature (302)..(324): n is a, c, g, or t
  misc_feature (377)..(390): n is a, c, g, or t

SEQ ID NO: 226550 - DNA, 975 bp, Homo Sapiens; identical to SEQ ID NO: 192679

SEQ ID NO: 226551 - DNA, 866 bp, Homo Sapiens
ttgtacaaaaaagttgggctgaccccccataaaaatgaccgttacgtgagtcactttgagaccgaggggccccacgtcctgctgtattttgactcggtccccacctcccgggagtgcgtgggctttgaggctgtgcaggaagtgccggtggggctggtgcagccggccagcgcaaccctgtacgactactacaaccccgagcgcagatgttctgtgttttacggggcaccaagtaagagcagactcttggccaccttgtgttctgctgaagtctgccagtgtgctgaggggaagtgccctcgccagcgtcgcgccctggagcggggtctgcaggacgaggatggctacaggatgaagtttgcctgctactacccccgtgtggagtacggcttccaggttaaggttctccgagaagacagcagagctgctttccgcctctttgagaccaagatcacccaagtcctgcacttcaccaaggatgtcaaggccgctgctaatcagatgcgcaacttcctggttcgagcctcctgccgccttcgcttggaacctgggaaagaatatttgatcatgggtctggatggggccacctatgacctcgagggacacccccagtacctgctggactcgaatagctggatcgaggagatgccctctgaacgcctgtgccggagcacccgccagcgggcagcctgtgcccagctcaacgacttcctccaggagtatggcactcaggggtgccaggtgtgagggctgccctcccacctccgctgggaggaacctgaacctgggaaccatgaagctggaagcactgctgtgtccgctttcatgaacacagcctgggaccagggcatattaaaggcttttgg

SEQ ID NO: 226552 - DNA, 941 bp, Homo Sapiens
aaactaaaatggaggctggtttcttgccttaaggagcccattgcctttcccgctgaagtctagatgttgacatgtaataaagcgggcagcaggatggtggtggatgcggccaactccaatgggcctttccagcccgtggtccttctccatattcgagatgttcctcctgctgatcaagagaagctttttatccagaagttacgtcagtgttgcgtcctctttgactttgtttctgatccactaagtgacctaaagtggaaggaagtaaaacgagctgctttaagtgaaatggtagaatatatcacccataatcggaatgtgatcacagagcctatttacccagaagtagtccatatgtttgcagttaacatgtttcgaacattaccaccttcctccaatcctacgggagcggaatttgacccggaggaagatgaaccaacgttagaagcagcctggcctcatctacagcttgtttatgaatttttcttaagatttttagagtctccagatttccaacctaatatagcgaagaaatatattgatcagaagtttgtattgcagcttttagagctctttgacagtgaagatcctcgggagagagattttcttaaaaccacccttcacagaatctatgggaaattcctaggcttgagagcttacatcagaaaacagataaataatatattttataggtttatttatgaaacagagcatcataatggcatagcagagttactggaaatattgggaagtataattaatggatttgccttaccactaaaagaagagcacaagattttcttattgaaggtgttactacctttgcacaaagtgaaatctctgagtgtctaccatccccagctggcatactgtgtagtgcagtttttagaaaagacagcaccctcacggaaccagtggtgatggcacttctcaaatactgg

SEQ ID NO: 226553 - DNA, 1423 bp, Homo Sapiens; identical to SEQ ID NO: 192687

SEQ ID NO: 226554 - DNA, 1251 bp, Homo Sapiens
ttggttgtccttcggcgagcgagcaccttcgacgcggtccggggaccccctcgtcgctgtcctcccgacgcggacccgcgtgccccaggcctcgcgctgcccggccggctcctcgtgtcccactcccggcgcacgccctcccgcgagtcccgggcccctcccgcgcccctcttctcggcgcgcgcgcagcatggcgcccccgcaggtcctcgcgttcgggcttctgcttgccgcggcgacggcgacttttgccgcagctcaggaagaatgtgtctgtgaaaactacaagctggccgtaaactgctttgtgaataataatcgtcaatgccagtgtacttcagttggtgcacaaaatactgtcatttgctcaaagctggctgccaaatgtttggtgatgaaggcagaaatgaatggctcaaaacttgggagaagagcaaaacctgaaggggccctccagaacaatgatgggctttatgatcctgactgcgatgagagcgggctctttaaggccaagcagtgcaacggcacctccatgtgctggtgtgtgaacactgctggggtcagaagaacagacaaggacactgaaataacctgctctgagcgagtgagaacctactggatcatcattgaactaaaacacaaagcaagagaaaaaccttatgatagtaaaagtttgcggactgcacttcagaaggagatcacaacgcgttatcaactggatccaaaatttatcacgagtattttgtatgagaataatgttatcactattgatctggttcaaaattcttctcaaaaaactcagaatgatgtggacatagctgatgtggcttattattttgaaaaagatgttaaaggtgaatccttgtttcattctaagaaaatggacctgacagtaaatggggaacaactggatctggatcctggtcaaactttaatttattatgttgatgaaaaagcacctgaattctcaatgcagggtctaaaagctggtgttattgctgttattgtggttgtggtgatagcagttgttgctggaattgttgtgctggttatttccagaaagaagagaatggcaaagtatgagaaggctgagataaaggagatgggtgagatgcatagggaactcaatgcataactatataatttgaagattatagaagaaggaaatagcaaatggacccaaattacaaatgtgtgtgcgtgggacgaagacatctttgaaggtcatgagtttgttagtttaacatcata

SEQ ID NO: 226555 - DNA, 1120 bp, Homo Sapiens; identical to SEQ ID NO: 192688

SEQ ID NO: 226556 - DNA, 514 bp, Homo Sapiens; identical to SEQ ID NO: 192689

SEQ ID NO: 226557 - DNA, 916 bp, Homo Sapiens; identical to SEQ ID NO: 192691

SEQ ID NO: 226558 - DNA, 928 bp, Homo Sapiens
ttggccggttctgacggacgcttcggccgtaacgatgatcggagacatcctgctgttcgggacgttgctgatgaatgccggggcggtgctgaactttaagctgaaaaagaaggacacgcagggctttggggaggagtccagggagcccagcacaggtgacaacatccgggaattcttgctgagcctcagatactttcgaatcttcatcgccctgtggaacatcttcatgatgttctgcatgattgtgctgttcggctcttgaatcccagcgatgaaaccaggaactcactttcccgggatgccgagtctccattcctccattcctgatgacttcaagaatgtttttgaccagaaaaccgacaaccttcccagaaagtccaagctcgtggtgggtggaaaagtgttcgccgaggtgtgcatggtttcccagccacgtccctgttttcaaagatagtttcactttggtctctgaattgaaatgctgtctactgaaagggtttcaggagcgtttatgtaaggggctgtgatgaaattgcattccccatagataaaagaaaaatcatttctatccagagatctgagcagaaggattggcttgttagtttaacacagccgtatttttggacattcagtgttacttgctgagtctgacagcctctgggcccggccaggggccctgttaacaaactgctttcacatcccaacagggtctgcttggccactcagtgcagctgcgattaaccctaaaggctttaaggaacgggccacctgtaacagagacaccagccttcctgtatagacactaaattgttagcaagagtgttgagctagttcctggtgaagtgtttccacagaagacatgtggagcagttgtggggatattaagggaaactttcctctgccttgacccctttgttaaataaaatga

SEQ ID NO: 226559 - DNA, 971 bp, Homo Sapiens
gttgccagtcatttcttcagaagttcatagaggtggacagcgttccttgggagtaccagccaggtttatccagagatggcagtgcctctgctcctcatcattctcgagtgtccggaaaggtctctgacttggtaagtgggagaagaaaccaggcttcaatgcatttgtaatcacaatgtcaaaaaggtctgtaaaatcattcccaagaatatattcgcagagaagtctacagtaatcactgtgagaactggtaattaacagaagaattttcccagcattctttagctgtcgaagccattttttcacagattcaggacaactatgtaaatatctgcctggatctctttttatttctggaaaatatattccacagttttccttaaaagctgacattttataattgtgttgtatagcagcaactatatccttccaaaaatcaaatgttttttgaccattgttcagttttgttaaatagtccaccaccctggcacacagaagagctcctggcaggtcaaagtagttgtcgtaaaagtaatactttcctgagcggcaagccattccagtgtccgacaagaagtgcttccactctttcttgccatatgcctctgccagcacctctggagtcatcatcttggtgccatggcttgccctgagaacagtgccattatttgcaagtttaaggaagttcccatcttctagatccaatgccaaacctttgcaacagaaatcccaatcctctggggtcacattgagcaattccttatcgtaccctttctccttaactaggaactgggcaaagctattataaatgagcggggcgctctcgggcaggttgtagcgacacagagtgtggtccaggtcgaatccgaccacgtcgcaggcggccagggagaagtgctgagccatggctgcgcggggagcaccagggagcgcctcggccgcgaagggtgcaaggagctggctggcgccaa

SEQ ID NO: 226560 - DNA, 1030 bp, Homo Sapiens; identical to SEQ ID NO: 192694

SEQ ID NO: 226561 - DNA, 1202 bp, Homo Sapiens
aaagccaactttgtacaaaaaagttggctgccggatccttccgcgtctgcatctcggcgtcgccccgcgtaccgtcgcccggctctccgccgctctcccgggggttcggggcacttgggtcccacagtctggtcctgcttcaccttcccctgacctgagtagtcgccatggcacaggttctcagaggcactgtgactgacttccctggatttgatgagcgggctgatgcagaaactcttcggaaggctatgaaaggcttgggcacagatgaggagagcatcctgactctgttgacatcccgaagtaatgctcagcgccaggaaatctctgcagcttttaagactctgtttggcagggatcttctggatgacctgaaatcagaactaactggaaaatttgaaaaattaattgtggctctgatgaaaccctctcggctttatgatgcttatgaactgaaacatgccttgaagggagctggaacaaatgaaaaagtactgacagaaattattgcttcaaggacacctgaagaactgagagccatcaaacaagtttatgaagaagaatatggctcaagcctggaagatgacgtggtgggggacacttcagggtactaccagcggatgttggtggttctccttcaggctaacagagaccctgatgctggaattgatgaagctcaagttgaacaagatgctcaggctttatttcaggctggagaacttaaatgggggacagatgaagaaaagtttatcaccatctttggaacacgaagtgtgtctcatttgagaaaggtgtttgacaagtacatgactatatcaggatttcaaattgaggaaaccattgaccgcgagacttctggcaatttagagcaactactccttgctgttgtgaaatctattcgaagtatacctgcctaccttgcagagaccctctattatgctatgaagggagctgggacagatgatcataccctcatcagagtcatggtttccaggagtgagattgatctgtttaacatcaggaaggagtttaggaagaattttgccacctctctttattccatgattaagggagatacatctggggactataagaaagctcttctgctgctctgtggagaagatgactaacgtgtcacggggaagagctccctgctgtgtgcctgcaccaccccactgccttctttcagcacctttagctgc

SEQ ID NO: 226562 - DNA, 1274 bp, Homo Sapiens; identical to SEQ ID NO: 192695

SEQ ID NO: 226563 - DNA, 910 bp, Homo Sapiens; identical to SEQ ID NO: 192697

SEQ ID NO: 226564 - DNA, 555 bp, Homo Sapiens; identical to SEQ ID NO: 192698

SEQ ID NO: 226565 - DNA, 1235 bp, Homo Sapiens
ttggctgcctcttccagggcgggcggtgtggtggcacgcattgctgtgctccaactccctcagggcctgtgttgccgcactctgctgctatgagcttcctcaaaagtttcccgccgcctgggccagcggaggggctcctgcggcagcagccagacactgaggctgtgctgaacgggaagggcctcggcactggtaccctttacatcgctgagagccgcctgtcttggttagatggctctggattaggattctcactggaataccccaccattagtttacatgcattatccagggaccgaagtgactgtctaggagagcatttgtatgttatggtgaatgccaaatttgaagaagaatcaaaagaacctgttgctgatgaagaagaggaagacagtgatgatgatgttgaacctattactgaatttagatttgtgcctagtgataaatcagcgttggaggcaatgttcactgcaatgtgcgaatgccaggccttgcatccagatcctgaggatgaggattcagatgactacgatggagaagaatatgatgtggaagcacatgaacaaggacagggggacatccctacattttacacctatgaagaaggattatcccatctaacagcagaaggccaagccacactggagagattagaaggaatgctttctcagtctgtgagcagccagtataatatggctggggtcaggacagaagattcaataagagattatgaagatgggatggaggtggataccacaccaacagttgctggacagtttgaggatgcagatgttgatcactgaaaatgatttatgcaagtttaagattctgctcctaagtgtaggagagaacttggtgcctcttccactctggagtgaagttaatgaaagtctttttccttttccaaaacccaacctgaaccagttctttcttgagacagactatactgagacaacaagttgtcaccagcagaagatagataatatgacctttattaacttgatgaattaacttaaccaagagggtatttgtagtttactatttaccctaaaactttctgtgtctgggtaccctctgagtaggcctataattcctacctttgactgtgtgcatcatttgtaagctagcagatctatgtggtgaaaatgcacaggagcttggttagactgcgggggaaagagagagctcctttcgccatgttttaccagtctgctgttataacctcttagttgtat

SEQ ID NO: 226566 - DNA, 970 bp, Homo Sapiens
ttggcgacgggagcgccatggcccagccgccgcccgacgtggagggggacgactgtctccccgcgtaccgccacctcttctgcccggacctgctgcgggacaaagtggccttcatcacaggaggcggctctgggattgggttccggattgctgagattttcatgcggcacggctgccatacggtgattgccagtaggagcctgccgcgagtgctgacggccgccaggaagctggctggggccaccggccggcgctgcctccctctctctatggacgtccgagcgcccccagctgtcatggccgccgtggaccaggctctgaaggagtttggcagaatcgacattctcattaactgtgcggccgggaacttcctgtgccccgctggcgccttgtccttcaacgccttcaagaccgtgatggacatcgataccagcggcaccttcaatgtgtctcgtgtgctctatgagaagttcttccgggaccacggaggggtgatcgtgaacatcactgccaccctggggaaccgggggcaggcgctccaggtgcatgcaggctccgccaaggccgctgtggacgcgatgacgcggcacttggctgtggagtggggtccccaaaacatccgcgtcaacagcctcgcccctggccccatcagtggcacagaggggctccggcgactgggtggccctcaggccagcctgagcaccaaggtcactgccagcccgctgcaaaaggctggggaacaagaccgagatcgcccacagcgtgctctacctggccagccctctggcttcctacgtgacgggggccgtgctggtggccgatggcggggcatggttgacgttcccaaacggtgtcaaagggctggcggatttcgcatccttctctgctaagctctaggaatcttccggccgctgcttcctgccgcctcactcagccagggtggaaagcacccaatcttgaaccagcaatg

SEQ ID NO: 226567 - DNA, 731 bp, Homo Sapiens; identical to SEQ ID NO: 192700

SEQ ID NO: 226568 - DNA, 515 bp, Homo Sapiens; identical to SEQ ID NO: 192701

SEQ ID NO: 226569 - DNA, 927 bp, Homo Sapiens; identical to SEQ ID NO: 192702

SEQ ID NO: 226570 - DNA, 1389 bp, Homo Sapiens
ttggcgggaagctaccggctgctggggtgctccggattttgcggggttcgtcgggcctgtggaagaagcgccgcgcacggacttcggcagagacaggtagagcaggtctctctgcagccatgtcggccaaggcaatttcagagcagacgggcaaagaactcctttacaagttcatctgtaccacctcagccatccagaatcggttcaagtatgctcgggtcactcctgacacagactgggcccgcttgctgcaggaccacccctggctgctcagccagaacttggtagtcaagccagaccagctgatcaaacgtcgtggaaaacttggtctcgttggggtcaacctcactctggatggggtcaagtcctggctgaagccacggctgggacaggaagccacagttggcaaggccacaggcttcctcaagaactttctgatcgagcccttcgtcccccacagtcaggctgaggagttctatgtctgcatctatgccacccgagaaggggactacgtcctgttccaccacgaggggggtgtggacgtgggtgatgtggacgccaaggcccagaagctgcttgttggcgtggatgagaaactgaatcctgaggacatcaaaaaacacctgttggtccacgcccctgaagacaagaaagaaattctggccagttttatctccggcctcttcaatttctacgaggacttgtacttcacctacctcgagatcaatccccttgtagtgaccaaagatggagtctatgtccttgacttggcggccaaggtggacgccactgccgactacatctgcaaagtgaagtggggtgacatcgagttccctccccccttcgggcgggaggcatatccagaggaagcctacattgcagacctcgatgccaaaagtggggcaagcctgaagctgaccttgctgaaccccaaagggaggatctggaccatggtggccgggggtggcgcctctgtcgtgtacagcgataccatctgtgatctagggggtgtcaacgagctggcaaactatggggagtactcaggcgcccccagcgagcagcagacctatgactatgccaagactatcctctccctcatgacccgagagaagcacccagatggcaagatcctcatcattggaggcagcatcgcaaacttcaccaacgtggctgccacgttcaagggcatcgtgagagcaattcgagattaccagggccccctgaaggagcacgaagtcacaatctttgtccgaagaggtggccccaactatcatgagggcttacaggtgatgggagaagtcgggaagaccactgggatccccatccatgtctttggcacagagactcacatgacggccattgtgggcatggccctgggccaccgggccc

SEQ ID NO: 226571 - DNA, 1062 bp, Homo Sapiens
ttggagcggttattcggtgagcggtggtggtttattcttccgcggagttaagggctccgtggacatctcaggtcttcagggtcttccatctggaactatataaagttcagaaaacatgtctcgaagatatgactccaggaccactatattttctccagaaggtcgcttataccaagttgaatatgccatggaagctattggacatgcaggcacctgtttgggaattttagcaaatgatggtgttttgcttgcagcagagagacgcaacatccacaagcttcttgatgaagtctttttttctgaaaaaatttataaactcaatgaggacatggcttgcagtgtggcaggcataacttctgatgctaatgttctgactaatgaactaaggctcattgctcaaaggtatttattacagtatcaggagccaataccttgtgagcagttggttacagcgctgtgtgatatcaaacaagcttatacacaatttggaggaaaacgtccctttggtgtttcattgctgtacattggctgggataagcactatggctttcagctctatcagagtgaccctagtggaaattacgggggatggaaggccacatgcattggaaataatagcgctgcagctgtgtcaatgttgaaacaagactataaagaaggagaaatgaccttgaagtcagcacttgctttagctatcaaagtactaaataagaccatggatgttagtaaactctctgctgaaaaagtggaaattgcaacactaacaagagagaatggaaagacagtaatcagagttctcaaacaaaagaagtggagcagttgatcaaaaaacacgaggaagaagaagccaaagctgagcgtgagaagaaagaaaaagaacagaaagaaaaggataaatagaatcagagattttattactcatttggggcaccatttcagtgtaaagcagtcctactcttccacactacgaaggctttactttttttaactggtgcagtgggaaaataggacattacatactgaattgggtccttgtcatttctgtccaattgaatactttat

SEQ ID NO: 226572 - DNA, 1055 bp, Homo Sapiens; identical to SEQ ID NO: 192704
  misc_feature (764)..(817): n is a, c, g, or t

SEQ ID NO: 226573 - DNA, 930 bp, Homo Sapiens
ttgggttgtctgtgtgatgatagtattggcatttataatactgaactatggacctatgagcatgttggaacaggattccaggagaatgaaccctagtgtgagccctgcaaatcaaaggaggcaccttctaggattttctgctaaagaggcacaggacacatcagatggtattatccagaaaaacagctacagatatgatcattctgtttcaaatgacaaagccctgatggtgctaactgaagaaccattgctttacattcctccacctccttgtcagcccctaattaacacaacagagtctctcaggttaaatcatgaacttcgaggatgggttcatagacatgaagtagaaaggaccaagtcaagaagaatgacaaataatcaacagaaaacccgtattcttcagggtgctctggaacagggctcaaattctcagctgatggctgttcaatacacagaaaccactagtagtatcagcaggaactcagggagtgagctacaagtgtattatgcttcacccagaagttatcaagacttttttgaagccatccgcagaaggggagacacattttatgttgtgtcatttcgaagggatcacctgctgttaccagctaccacccataacaagaccacaagaccaaaaatgtcaattgtgttaccagcaataaacataaatgagaatgtgatcaatgggcaggactacgaagtgatgatgcagattgactgtcacgtgatggacaccaggatcctccatatcaaaagttcgtcagttcctccttacctccaagatcagcaaaggaatcaaacccacaccttctttggctcccctctcgcagccacagaggcaacccacgttgtcagcaccatccctgagtcattacaatagcacccctgcagctatgctggaaaactgagcgtggggaccctgcc

SEQ ID NO: 226574 - DNA, 975 bp, Homo Sapiens
ttgggtctccgtgcgcccgtctgtggccaagcagccagcagcctagcagccagtcagcttgccgccggcggccaagcagccaaccatgctcaacttcggtgcctctctccagcagactgcggaggaaagaatggaaatgatttctgaaaggccaaaagagagtatgtattcctggaacaaaactgcagagaaaagtgattttgaagctgtagaagcacttatgtcaatgagctgcagttggaagtctgattttaagaaatacgttgaaaacagacctgttacaccagtatctgatttgtcagaggaagagaatctgcttccgggaacacctgattttcatacaatcccagcattttgtttgactccaccttacagtccttctgactttgaaccctctcaagtgtcaaatctgatggcaccagcgccatctactgtacacttcaagtcactctcagatactgccaaacctcacattgccgcacctttcaaagaggaagaaaagagcccagtatctgcccccaaactccccaaagctcaggcaacaagtgtgattcgtcatacagctgatgcccagctatgtaaccaccagacctgcccaatgaaagcagccagcatcctcaactatcagaacaattcttttagaagaagaacccacctaaatgttgaggctgcaagaaagaacataccatgtgccgctgtgtcaccaaacagatccaaatgtgagagaaacaccgtggcagatgttgatgagaaagcaagtgctgcactttatgacttttctgtgccttcctcagagacggtcatctgcaggtctcagccagcccctgtgtccccacaacagaagtcagtgttggtctctccacctgcagtatctgcagggggagtgccacctatgccggtcatctgccagatggttccccttctgccacaaccctgttgtgacaacagtcgttcccagcactcctcccagccagc

SEQ ID NO: 226575 - DNA, 835 bp, Homo Sapiens
  misc_feature (260)..(293): n is a, c, g, or t
ttgggacaaaattacaaaggaagaattgaagagatccctatatgccctgttttctcagtttggtcatgtggtggacattgtggctttaaagaccatgaagatgagggggcaggcctttgtcatatttaaggaactgggctcatccacaaatgccttgagacagctacaaggatttccattttatggtaaaccaatgcgaatacagtatgcaaaaacagattcggatataatatcaaaaatgcgtggaacttttgctgacnnnnnnnnnnnnnnnnnnnnnnnnnnnnnnnnnnctgtggaacagactgcaacaaccacaaacaaaaagcctggccagggaactccaaattcagctaatacccaaggaaattcaacaccaaatcctcaggtccctgattaccctccaaactatattttattccttaataacttaccagaagagactaatgagatgatgttatccatgctgtttaatcagttccctggcttcaaggaagtacgtctggtaccagggaggcatgacattgcttttgttgaatttgaaaatgatgggcaggctggagctgccagggatgctttacagggatttaagatcacaccgtcccatgctatgaagatcacctatgccaagaaataacatttgggatagtcgtctttaaaagacttggtgttatttacagtgtttgttttgataacatttggctgggtcattttaatagttagagatgacgaggagtaaaagtgaaatttttgtgaaggacttaaattatcttgtgtttctttagccttggtgaactatgaaatacgaagggccttaatttttgtacaataaact

SEQ ID NO: 226576 - DNA, 774 bp, Homo Sapiens; identical to SEQ ID NO: 192705
  misc_feature (200)..(233): n is a, c, g, or t

SEQ ID NO: 226577 - DNA, 885 bp, Homo Sapiens; identical to SEQ ID NO: 192707

SEQ ID NO: 226578 - DNA, 898 bp, Homo Sapiens
  misc_feature (309)..(317): n is a, c, g, or t
ttgtacaaaaaagttggctatggacctcctggctgtgggaaaactttgttggccaaagccattgctaatgaatgccaggccaacttcatctccatcaagggtcctgagctgctcaccatgtggtttggggagtctgaggccaatgtcagagaaatctttgacaaggcccgccaagctgccccctgtgtgctattctttgatgagctggattcgattgccaaggctcgtggaggtaacattggagatggtggtggggctgctgaccgagtcatcaaccagatcctgacagaaatggatggcatgtccacnnnnnnnnntgtgttcatcattggcgctaccaaccggcctgacatcattgatcctgccatcctcagacctggccgtcttgatcagctcatctacatcccacttcctgatgagaagtcccgtgttgccatcctcaaggctaacctgcgcaagtccccagttgccaaggatgtggacttggagttcctggctaaaatgactaatggcttctctggagctgacctgacagagatttgccagcgtgcttgcaagctggccatccgtgaatccatcgagagtgagattaggcgagaacgagagaggcagacaaacccatcagccatggaggtagaagaggatgatccagtgcctgagatccgtcgagatcactttgaagaagccatgcgctttgcgcgccgttctgtcagtgacaatgacattcggaagtatgagatgtttgcccagacccttcagcagagtcggggctttggcagcttcagattcccttcaaggaaccagggtggagctggccccagtcaggcagtggagcggcacagtggcagtgtatacacagaagacaatgatgatgacctgtatggctaagtggtggtgg

SEQ ID NO: 226579 - DNA, 903 bp, Homo Sapiens
ctttgtacaaaaaagttggctgatggtgggtggatgagtaatgcatccaggaagcctggaggcctgtggtttccgcacccgctgccacccccgcccctagcgtggacatttatcctctagcgctcaggccctgccgccatcgccgcagatccagcgcccagagagacaccagagaacccaccatggccccctttgagcccctggcttctggcatcctgttgttgctgtggctgatagcccccagcagggcctgcacctgtgtcccaccccacccacagacggccttctgcaattccgacctcgtcatcagggccaagttcgtggggacaccagaagtcaaccagaccaccttataccagcgttatgagatcaagatgaccaagatgtataaagggttccaagccttaggggatgccgctgacatccggttcgtctacacccccgccatggagagtgtctgcggatacttccacaggtcccacaaccgcagcgaggagtttctcattgctggaaaactgcaggatggactcttgcacatcactacctgcagtttcgtggctccctggaacagcctgagcttagctcagcgccggggcttcaccaagacctacactgttggctgtgaggaatgcacagtgtttccctgtttatccatcccctgcaaactgcagagtggcactcattgcttgtggacggaccagctcctccaaggctctgaaaagggcttccagtcccgtcaccttgcctgcctgcctcgggagccagggctgtgcacctggcagtccctgcggtcccagatagcctgaatcctgcccggagtggaagctgaagcctgcacagtgtccaccctgttcccactcccatctttcttccggacaatgaaataaagagttaccacccagc

SEQ ID NO: 226580 - DNA, 785 bp, Homo Sapiens; identical to SEQ ID NO: 192712

SEQ ID NO: 226581 - DNA, 1407 bp, Homo Sapiens
acagcaaatagacaaaatgaagttaccttcgtgagatacatggcttactttgtactctgccttttaggagatgaggtaagacatatacatagatggcttttactagccaaggcaatgtaaatggactaagattctcatgtgacttgaggttatctgatgaatttattctcttcaaaaccacctacttttagagggcatgtttaacccctctctttatttaaggagggagagaaaaacacatgtaaccagaattcagagtgggttactcaacctaagagaacatacggagttctctttgggaaaacaacaagactacagtgttcacttcgcaccatgaagtggcactcctgttatggctgtcagagtcctctcacttcttatgaaaggatgcatctgattctgaaattactgatatattcgatcagttagggatgttttaaaaagtgaaaacaaatgccacacatacactttctagctttctgaaatcaccgaacacattacaaaaaatagagaatttaccctattaacttttagagaattttccaataatattcttggttaaagaagccaagtttgtgcatattcccaattttcagtgttcttgtttttatgcacaagagccaaagtagtatacacatatttttaagggctttttacaatgaacgatatataaaatacattctatagttggtgaaagaataatcttaagagttggcattaatctttgaacaaaaaagatttcaagccactttctttacaaagaaaatataatttcattgtgaactatatttctctaattttgccaattttataaaatacagcatatccctgctttaatacaaccaggcatgctgtgctgactggtccaataaatctaagtgttatttaagggaaagcaggcaatctgttcatacccaaattcatacaagtttcaaagaagcatcaaaggatgctacctacattcaagccacattgcaatattagctaagccacagttgcactcatgagagtgaaactacagaataacaactattgaagattttaatagagtcaaaagatgaactggcaaaccaggttgtggaatctattcagcctctctgctctgctggagtggttgatttagtctggtaagtggcatattcagctccaccatctgctttccctttcttcttcctcctttgaagatatctgtacgggacaacacaaattactgcaactccaacaactatggcaataacaatcacagcaatgacccaaacatctgagaaagaaaacagttccaagatgttgaacacatggatctccagatagcatttatttcaatcagatcatctaaacacttgatatggtttggctgtgtccccacccaaatctcatcttgaatcgcaattcccataatccccccaa

SEQ ID NO: 226582 - DNA, 1276 bp, Homo Sapiens; identical to SEQ ID NO: 192714

SEQ ID NO: 226583 - DNA, 598 bp, Homo Sapiens; identical to SEQ ID NO: 192717

SEQ ID NO: 226584 - DNA, 1166 bp, Homo Sapiens; identical to SEQ ID NO: 192719

SEQ ID NO: 226585 - DNA, 1048 bp, Homo Sapiens; identical to SEQ ID NO: 192721

SEQ ID NO: 226586 - DNA, 939 bp, Homo Sapiens
ttggctggtggtcatgccggggttcctggttcgcatcctccttctgctgctggttctgctgcttctgggccctacgcgcggcttgcgcaatgccacccagaggatgtttgaaattgactatagccgggactccttcctcaaggatggccagccatttcgctacatctcaggaagcattcactactcccgtgtgccccgcttctactggaaggaccggctgctgaagatgaagatggctgggctgaacgccatccagacgtatgtgccctggaactttcatgagccctggccaggacagtaccagttttctgaggaccatgatgtggaatattttcttcggctggctcatgagctgggactgctggttatcctgaggcccgggccctacatctgtgcagagtgggaaatgggaggattacctgcttggctgctagagaaagagtctattcttctccgctcctccgacccagattacctggcagctgtggacaagtggttgggagtccttctgcccaagatgaagcctctcctctatcagaatggagggccagttataacagtgcaggttgaaaatgaatatggcagctactttgcctgtgattttgactacctgcgcttcctgcagaagcgctttcgccaccatctgggggatgatgtggttctgtttaccactgatggagcacataaaacattcctgaaatgtggggccctgcagggcctctacaccacggtggactttggaacaggcagcaacatcacagatgctttcctaagccagaggaagtgtgagcccaaaggacccttgatcaattctgaattctatactggctggctagatcactggggccaacctcactccacaatcaagaccgaagcagtggcttcctccctctatgatatacttgcccgtggggcgagtgtgaacttgtacatgtttat

SEQ ID NO: 226587 - DNA, 925 bp, Homo Sapiens
gccaactttgtacaaaaaagttgggcacggagcagggtttctacagctgctccccactttctcggacccggtcctggacccagcccccgactccgacacggctccaccatggaggaggcggaccgaatcctcatccattcgctgcgccaggccggcacggcagttcctccagatgtgcagaccttgcgcgccttcaccactgagctggttgtagaggctgtggtccgctgcctgcgtgtgatcaaccctgcggtgggctctggcctcagccctctgctgcctcttgccatgtctgcccggttccgcctggccatgagcctggctcaggcctgcatggacctgggctatcccttggagcttggctatcagaacttcctctaccccagtgagcctgacctccgagacctgcttctcttcttggctgagcgtctgcccaccgatgcctctgaggatgcagaccagcctgcaggtgactcagctattctcctccgggccattgggagccaaattcgggaccagctggcactgccttgggtcccgccccaccttcgcactcccaagctgcagcacctccagggctcggccctccagaagcctttccatgccagcaggctggtcgtgccagaattgagttccagaggtgagccacgggagttccaggcgagtcccctgctgcttccagtccctacccaggtgcctcagcctgttggaagggtggcctcgctcctcgaacaccatgccctgcagctctgccagcagacgggccgggaccggccaggggatgaggactgggtccaccggacatcccgcctcccaccccacgagacacacgggctcagcggcagcggctgcagaagcaactgactgagcatctgcgccaaagctggggcctgcttggggcccccatacagcccgggacctggga

SEQ ID NO: 226588 - DNA, 897 bp, Homo Sapiens; identical to SEQ ID NO: 192722

SEQ ID NO: 226589 - DNA, 801 bp, Homo Sapiens; identical to SEQ ID NO: 192725
  misc_feature (280)..(334): n is a, c, g, or t
  misc_feature (697)..(723): n is a, c, g, or t

SEQ ID NO: 226590 - DNA, 1074 bp, Homo Sapiens
acaaattgatgagcaatgctttctttatagatagccaactttgtacaaaaaagttgggaatagagccaggcgaggcaggttccgaggttggaacacctggcgagtcctcggtgtcggtggccggcagtcatctcgcggccgttcagaattataaggctgtctgcagagatttgaaaaatggcaacaaatgaaagtgtcagcatctttagttcagcatccttggctgtggaatatgtagattcacttttacctgagaatcctctgcaagaaccatttaaaaatgcttggaactatatgttgaataattatacaaagttccagattgcaacatggggatcccttatagttcatgaagccctttatttcttattctgtttacctggatttttatttcaatttataccttatatgaaaaaatacaaaattcaaaaggataagccagagacatgggaaaaccaatggaagtgtttcaaagttcttctctttaatcacttctgtatccagctgcctttgatttgtggaacctattattttacagagtatttcaatattccttatgattgggaaagaatgccaagatggtattttcttttggcaagatgctttggttgtgcagtcattgaagatacttggcactattttctgcatagactcttacaccacaaaagaatatacaagtatattcataaagttcatcatgagtttcaggctccatttggaatggaagctgaatatgcacatcctttggagactctaattcttggaactggatttttcattggaatcgtgcttttgtgtgatcatgtaattcttctttgggcatgggtgaccattcgtttattagaaactattgatgtccatagtggttatgatattcctctcaaccctttaaatctgatccctttctatgctggttctcggcatcatgatttccaccacatgaacttcattggaaactatgcttcaacatttacatggtgggatcgaatttttgggacagactctcagtataatgcctataatgaaagaggaagaagtttgagaaaagactgaataaatatcctcacgtaaacc

SEQ ID NO: 226591 - DNA, 758 bp, Homo Sapiens; identical to SEQ ID NO: 192731

SEQ ID NO: 226592 - DNA, 1129 bp, Homo Sapiens; identical to SEQ ID NO: 192732
  misc_feature (831)..(878): n is a, c, g, or t

SEQ ID NO: 226593 - DNA, 908 bp, Homo Sapiens; identical to SEQ ID NO: 192733

SEQ ID NO: 226594 - DNA, 993 bp, Homo Sapiens; identical to SEQ ID NO: 192735

SEQ ID NO: 226595 - DNA, 1164 bp, Homo Sapiens; identical to SEQ ID NO: 192736

SEQ ID NO: 226596 - DNA, 697 bp, Homo Sapiens
catcagataaggcctcagaaagcccaggccatcatttttccatgggaccaggctggctcaatgtggaactggccctcccagagcagcaggagaagggctcgcatgggctgcccccgtcacctgtgcctgacaggatgggggggaggcagagagagagcatcagacgccctccctccccataaggggcatgggggatggggacacttcctcccaggacacagggagcctggctgagctggctggctcatgccccatctggtctggaggtcagaggggagtgagacactctggtttgaaaggccttcctttccactttggggaaaacaggcagggagagaggtgagggtgccatgccaaaaaacacccccaaatccagatgcagactttggagccacatgtgggtttgaatctcaactctacctgagtgaccctgggcaagtcacttcacttccctgagactcaagtttcatcaagatgggaacaatgagcatctgcctcacaggcttgtcgtgaggattaagtgagaaggtgcgtgtaatattagcgatgactggatgatacaaaattaagaacaaggctgggcacgattgctcacgcctgtaatcccagcctacctttcagtgcccacttaactccattggttcagaggcactcagtgtatcttgctgaaagggaattccaacttttttgtacaaag

SEQ ID NO: 226597 - DNA, 2219 bp, Homo Sapiens; identical to SEQ ID NO: 192743

SEQ ID NO: 226598 - DNA, 1079 bp, Homo Sapiens
ttggttatctcctgaataaagttaagatataatatcataagtagagcccatcaggtggttgaagatggatatgaattttttgcaaagaggcagttggtcactctgttttctgcgcccaattattgcggagagtttgacaatgcaggtgccatgatgagtgtggatgaaacactaatgtgttcttttcagattttaaagcctgcagagaaaaagaagccaaatgccacgagacctgtaacgcctccaaggggtatgatcacaaagcaagcaaagaaatagatgtcgttttgacactgcctagtcgggacttgtaacatagagtatataaccttcatttttaagactgtaatgtgtactggtcagcttgctcagatagatctgtgtttgtgggggcccttccttccatttttgatttagtgaatggcatttgctggttataacagcaaatgaaagactcttcactccaaaaagaaaagtgttttgttttttaattctctgttccttttgcaaacaattttaatgatggtgttaaagctgtacaccccaggacagtttatcctgtctgaggagtaagtgtacaattgatcttttttaattcagtacaacccataatcatgtaaatgctcattttctttaggacataaagagagccctagggtgctctgaatctgtacatgttcttgtcataaaatgcatactgttgatacaaaccactgtgaacattttttatttgagaattttgtttcaaagggattgctttttcctctcattgtcttgttatgtacaaactagtttttatagctatcaacattaggagtaactttcaaccttgccagcatcactggtatgatgtatatttaattaaagcacacttttccccgaccgtatacttaaaatgacaaagccattcttttaaatatttgtgactctttcctaaagccaaagtttctgttgaattatgttttgacacacccctaaatacaagggggtagggttgtatacacatgcttgccttcttggggattcaaaaccaggtttttgattttgaatagcaattagtgatatagtgctgtttaagc

SEQ ID NO: 226599 - DNA, 879 bp, Homo Sapiens; identical to SEQ ID NO: 192744

SEQ ID NO: 226600 - DNA, 1360 bp, Homo Sapiens; identical to SEQ ID NO: 192745

SEQ ID NO: 226601 - DNA, 943 bp, Homo Sapiens; identical to SEQ ID NO: 192746

SEQ ID NO: 226602 - DNA, 1095 bp, Homo Sapiens; identical to SEQ ID NO: 192752

SEQ ID NO: 226603 - DNA, 947 bp, Homo Sapiens; identical to SEQ ID NO: 192754

SEQ ID NO: 226604 - DNA, 1150 bp, Homo Sapiens
actttgtacaaaaaagttgggggcttgacccccccaaggccgaggtccgcggccaggtgctggcgccgctgcccctccacggagttgctgatcatctgggctgtgatccacaaacccggttctttgtccctcctaatatcaaacagtggattgccttgctgcagaggggaaactgcacgtttaaagagaaaatatcacgggccgctttccacaatgcagttgctgtagtcatctacaataataaatccaaagaggagccagttaccatgactcatccaggcactggagatattattgctgtcatgataacagaattgaggggtaaggatattttgagttatctggagaaaaacatctctgtacaaatgacaatagctgttggaactcgaatgccaccgaagaacttcagccgtggctctctagtcttcgtgtcaatatcctttattgttttgatgattatttcttcagcatggctcatattctacttcattcagaagatcaggtacacaaatgcacgcgacaggaaccagcgtcgtctcggagatgcagccaagaaagccatcagtaaattgacaaccaggacagtaaagaagggtgacaaggaaactgacccagactttgatcattgtgcagtctgcatagagagctataagcagaatgatgtcgtccgaattctcccctgcaagcatgttttccacaaatcctgcgtggatccctggcttagtgaacattgtacctgtcctatgtgcaaacttaatatattgaaggccctgggaattgtgccgaatttgccatgtactgataacgtagcattcgatatggaaaggctcaccagaacccaagctgttaccgaagatcagccctcggcgacctcgccggcgacaactcccttggccttgagccacttcgaacttcggggatctcacctcttcctcacgatggggagctcactccgagaacaggagaaatcaacattgcagtaacaaaagaatggtttattattgccagttttggcctcctcagtgccctcacactctgctacatgatcatcagagccacagctagcttgaatgctaatgaggtagaatggttttgaagaagaaaaaacctgctttctgactgattttgccttgaaggaaaaaagaaccta

SEQ ID NO: 226605 - DNA, 921 bp, Homo Sapiens; identical to SEQ ID NO: 192755

SEQ ID NO: 226606 - DNA, 559 bp, Homo Sapiens
  misc_feature (53)..(66): n is a, c, g, or t
  misc_feature (426)..(461): n is a, c, g, or t
ctaagagaagttattttctacagtggttttatactgaaggaaaaacacaagcnnnnnnnnnnnnnngcatctatctcatctatctcaatcctaatttctcctcccttccttttccctgcttccaggaaactccacatctgccttaaaaccaaagagggcttcctctagaagccaagggaaaggggtgcttttatagaggctagcttctgcttttctgccctggctgctgcccccaccccggggaccctgtgacatggtgcctgaaaggcaggcatataggcttctccgccagcctcctctggacggcaggctcactgccaggccagcctccgagagggaaagagaaagagagaggacagcttgagccgggcccctgggcttgttctgttgtgattccactacacctggctgaggttcctctgcctnnnnnnnnnnnnnnnnnnnnnnnnnnnnnnnnnnnnggggtgagtccattctcccaggtaccagctgcgcttgcttttctgtattttatttagacaagagatgggaatgatgtgggaggtggaaatagggataa

SEQ ID NO: 226607 - DNA, 862 bp, Homo Sapiens
ttggattgacacttcctggtgggatccgagtgaggcgacggggtaggggttggcgctcaggcggcgaccatggcgtatcacggcctcactgtgcctctcattgtgatgagcgtgttctggggcttcgtcggcttcttggtgccttggttcatccctaagggtcctaaccggggagttatcattaccatgttggtgacctgttcagtttgctgctatctcttttggctgattgcaattctggcccaactcaaccctctctttggaccgcaattgaaaaatgaaaccatctggtatctgaagtatcattggccttgaggaagaagacatgctctacagtgctcagtctttgaggtcacgagaagagaatgccttctagatgcaaaatcacctccaaaccagaccacttttcttgacttgcctgttttggccattagctgccttaaacgttaacagcacatttgaatgccttattctacaatgcagcgtgttttcctttgccttttttgcactttggtgaattacgtgcctccataacctgaactgtgccgactccacaaaacgattatgtactcttctgagatagaagatgctgttcttctgagagatacgttactctctccttggaatctgtggatttgaagatggctcctgccttctcacgtgggaatcagtgaagtgtttagaaactgctgcaagacaaacaagactccagtggggtggtcagtaggagagcacgttcagagggaagagccatctcaacagaatcgcaccaaactatactttccaggatgaatttcttctttctgccatcttttggaataaatattttcctccttttctatggaaatctgggctcggtgtt

SEQ ID NO: 226608 - DNA, 824 bp, Homo Sapiens; identical to SEQ ID NO: 192757

SEQ ID NO: 226609 - DNA, 605 bp, Homo Sapiens; identical to SEQ ID NO: 192758

SEQ ID NO: 226610 - DNA, 945 bp, Homo Sapiens
ttggcgaccctggtgccctgggctgccgccctgctcctcgctctgggcgtggaaagggctctggcgctacccgaggtacagaagcaagtttgaggtcgggctgaagcagggtcactggccagccgtgcgtcgcgctcgccagcggctcccccttctcctcggcgggcctgcggttctgatttcgtccctgacgcttcccgaccctgcccagccagatatgcacccaatgtccagggagcgtgcaaaatttgtcaaaagtggccttttattgtaaaacgacacgagagctaatgctgcatgcccgttgctgcctgaatcagaagggcaccatcttggggctggatctccagaactgttctctggaggaccctggtccaaactttcatcaggcacataccactgtcatcatagacctgcaagcaaaccccctcaaaggtgacttggccaacaccttccgtggctttactcagctccagactctgatactgccacaacatgtcaactgtcctggaggaattaatgcctggaatactatcacctcttatatagacaaccaaatctgtcaagggcaaaagaacctttgcaataacactggggacccagaaatgtgtcctgagaatggatcttgtgtacctgatggtccaggtcttttgcagtgtgtttgtgctgatggtttccatggatacaagtgtatgcgccagggctcgttctcactgcttatgttcttcgggattctgggagccaccactctatccgtctccattctgctttgggcgacccagcgccgaaaagccaagacttcatgaactacataggtcttaccattgacctaagatcaatctgaactatcttagcccagtcagggagctctgcttcctagaaaggcatctttccgccagtggattcgcctcaaggttgagccgccattggaagatgaaaaattgc

SEQ ID NO: 226611 - DNA, 930 bp, Homo Sapiens
ttggatagctgtccaaggtctcccccagcactgaggagctcgcctgctgccctcttgcgcgcgggaagcagcaccaagttcacggccaacgccttggcactagggtccagaatggctacaacagtccctgatggttgccgcaatggcctgaaatccaagtactacagactttgtgataaggctgaagcttggggcatcgtcctagaaacggtggccacagctggggttgtgacctcggtggccttcatgctcactctcccgatcctcgtctgcaaggtgcaggactccaacaggcgaaaaatgctgcctactcagtttctcttcctcctgggtgtgttgggcatctttggcctcaccttcgccttcatcatcggactggacgggagcacagggcccacacgcttcttcctctttgggatcctcttttccatctgcttctcctgcctgctggctcatgctgtcagtctgaccaagctcgtccgggggaggaagcccctttccctgttggtgattctgggtctggccgtgggcttcagcctagtccaggatgttatcgctattgaatatattgtcctgaccatgaataggaccaacgtcaatgtcttttctgagctttccgctcctcgtcgcaatgaagactttgtcctcctgctcacctacgtcctcttcttgatggcgctgaccttcctcatgtcctccttcaccttctgtggttccttcacgggctggaagagacatggggcccacatctacctcacgatgctcctctccattgccatctgggtggcctggatcaccctgctcatgcttcctgactttgaccgcagtgggatgacaccatcctcagctccgccttggctgccaatggctgggtgttcctgttggcttatgttagtcccgagttttggctgctcacaaagcaacgaaacc

SEQ ID NO: 226612 - DNA, 857 bp, Homo Sapiens; identical to SEQ ID NO: 192759
  misc_feature (756)..(771): n is a, c, g, or t

SEQ ID NO: 226613 - DNA, 973 bp, Homo Sapiens; identical to SEQ ID NO: 192761

SEQ ID NO: 226614 - DNA, 1442 bp, Homo Sapiens
ttggggatccgctgcgcgagctgtctcggtcccacgtgtgcgagttgctacgatggaagttaaagggaaaaagcaattcacaggaaagagtacaaagacagcacaagaaaaaaacagatttcataaaaatagtgattctggttcttcaaagacatttccaacaaggaaagttgctaaagaaggtggacctaaagtcacatctaggaactttgagaaaagtatcacaaaacttgggaaaaagggtgtaaagcagttcaagaataagcagcaaggggacaaatcaccaaagaacaaattccagccggcaaataaattcaacaagaagagaaaattccagccagatggtagaagcgatgaatcagcagccaagaagcccaaatgggatgacttcaaaaagaagaagaaagaactgaagcaaagcagacaactcagtgataaaaccaactatgacattgttgttcgggcaaagcagatgtgggagattttaagaagaaaagactgtgacaaagaaaaaagagtaaagttaatgagtgatttgcagaagttgattcaagggaaaattaaaactattgcatttgcacacgattcaactcgtgtgatccagtgttacattcagtatggtaatgaagaacagagaaaacaggcttttgaagaattgcgagatgatttggttgagttaagtaaagccaaatattcgagaaatattgttaagaaatttctcatgtatggaagtaaaccacagattgcagagataatcagaagttttaaaggccacgtgaggaagatgctgcggcatgcggaagcatcagccatcgtggagtacgcatacaatgacaaagccattttggagcagaggaacatgctgacggaagagctctatgggaacacatttcagctttacaagtcagcagatcacccaactctggacaaagtgttagagttacagccagaaaaattagaacttattatggatgaaatgaaacagattctaactccaatggcccaaaaggaagctgtgattaagcactcattggtgcataaagtattcttggacttttttacctatgcaccccccaaactcagatcagaaatgattgaagccatccgcgaagcggtggtctacctggcacacacacacgatggcgccagagtggccatgcactgcctgtggcatggcacgcccaaggacaggaaagtgattgtgaaaacaatgaagacttatgttgaaaaggtggctaatggccaatactcccatttggttttactggcggcatttgattgtattgatgatactaagcttgtgaagcagataatcatatcagaaattatcagttcattgcctagcatagtaaatgacaaatatggaaagaagtcctattgtacttactaggccccagagatcctgcacatacagtacgagaaatcattgaagttctgcaaaa

SEQ ID NO: 226615 - DNA, 795 bp, Homo Sapiens
ttggcgcaatgcagaggctgcaggtagtgctgggccacctgaggggtccggccgattccggctggatgccgcaggccgcgccttgcctgagcggtgccccgcaggcctcggccgcggacgtggtggtggtgcacgggcggcgcacggccatctgccgggcgggccgcggcggcttcaaggacaccacccccgacgagcttctctcggcagtcatgaccgcggttctcaaggacgtgaatctgaggccggaacagctgggggacatctgtgtcgtgacatcccggagactgtgcctttgtccactgtcaatagacagtgttcgtcggggctacaggcagtggccagcatagcagggtggagtccatgtccctggctgacagagggaaccctggaaatattacttcgcgcttgatggagaaggagaaggccagagattgcctgattcctatggggataacctctgagaatgtggctgagcggtttggcatttcacgggagaagcaggatacctttgccctggcttcccagcagaaggcagcaagagcccagagcaagggctgtttccaagctgagattgtgcctgtgaccaccacggtccatgatgacaagggcaccaagaggagcatcactgtgatccaggatgagggtatccgccccagcaccaccatggagggcctggcccaactgaagcctgccttcaagaaagatggttctaccacagctggtgagactggtccagggtatgggtatgagaaaacacgccatggccatgctgggtgctgtactctgggaacc

SEQ ID NO: 226616 - DNA, 1461 bp, Homo Sapiens; identical to SEQ ID NO: 192770
  misc_feature (505)..(515): n is a, c, g, or t

SEQ ID NO: 226617 - DNA, 985 bp, Homo Sapiens; identical to SEQ ID NO: 192771
  misc_feature (827)..(838): n is a, c, g, or t

SEQ ID NO: 226618 - DNA, 809 bp, Homo Sapiens; identical to SEQ ID NO: 192772

SEQ ID NO: 226619 - DNA, 1188 bp, Homo Sapiens
aaagccaactttgtacaaaaaagttgggtttggaaatattttacagatctttttgactatcttcctctcactgccttggtggatgggcagatcttctgtctacatggtggtctctcgccatctatagatacactggatcatatcagagcacttgatcgcctacaagaagttccccatgagggtccaatgtgtgacttgctgtggtcagatccagatgaccgtggtggttggggtatatctcctcgaggagctggttacacctttgggcaagatatttctgagacatttaatcatgccaatggcctcacgttggtgtctagagctcaccagctagtgatggagggatataactggtgccatgaccggaatgtagtaacgattttcagtgctccaaactattgttatcgttgtggtaaccaagctgcaatcatggaacttgacgatactctaaaatactctttcttgcagtttgacccagcacctcgtagaggcgagccacatgttactcgtcgtaccccagactacttcctgtaatgaaattttaaacttgtacagtattgccatgaaccatatatcgacctaatggaaatgggaagagcaacagtaactccaaagtgtcagaaaatagttaacattcaaaaaacttgttttcacatggaccaaaagatgtgccatataaaaatacaaagcctcttgtcatcaacagccgtgaccactttagaatgaaccagttcattgcatgctgaagcgacattgttggtcaagaaaccagtttctggcatagcgctatttgtagttacttttgctttctctgagagactgcagataataagatgtaaacattaacacctcgtgaatacaatttaacttccatttagctatagctttactcagcatgactgtagataaggatagcagcaaacaatcattggagcttaatgaacatttttaaaaataattaccaaggcctcccttctacttgtgagttttgaaattgttctttttattttcagggataccgtttaatttaattatatgatttgtctgcactcagtttattccctactcaaatctcagccccatgttgttctttgttattgtcagaacctggtgagttgttttgaacagaactgttttttccccttcctgtaagacgatgtgactgcacaggagcactgcagtgttttt

SEQ ID NO: 226620 - DNA, 1353 bp, Homo Sapiens; identical to SEQ ID NO: 192775

SEQ ID NO: 226621 - DNA, 587 bp, Homo Sapiens
cgcgcacgcaatcgcgtttcctgagagacctggctgctgtgtcccgcggcttgcgctccgtagtggactccgcgggccttcggcagatgcaggcctggggtagtctcctttctggactgagaagagaagaatggagaagcccctcttcccattagtgcctttgcattggtttggctttggctacacagcactggttgtttctggtgggatcgttggctatgtaaaaacaggcagcgtgccgtccctggctgcagggctgctcttcggcagtctagccggcctgggtgcttaccagctgtatcaggatccaaggaacgtttggggtttcctagccgctacatctgttacttttgttggtgttatgggaatgagatcctactactatggaaaattcatgcctgtaggtttaattgcaggtgccagtttgctgatggccgccaaagttggagttcgtatgttgatgacatctgattagcagaagtcatgttccagcttggactcatgaaggattaaaaatctgcatcttccactattttcaatgtattaagagaaataagtgcagcatttttgcatctgacattttacct

SEQ ID NO: 226622 - DNA, 1068 bp, Homo Sapiens; identical to SEQ ID NO: 192776
  misc_feature (799)..(807): n is a, c, g, or t

SEQ ID NO: 226623 - DNA, 882 bp, Homo Sapiens; identical to SEQ ID NO: 192777
  misc_feature (578)..(586): n is a, c, g, or t

SEQ ID NO: 226624 - DNA, 632 bp, Homo Sapiens; identical to SEQ ID NO: 192779
  misc_feature (184)..(213): n is a, c, g, or t

SEQ ID NO: 226625 - DNA, 1254 bp, Homo Sapiens
ttgggagcacttggcaggtcatgaaggggtccaacttctcgggttgttgaacgtctacctggaacaagaagagagattccaacctcgagaaaaagggctgagtttgattgaggctaccccggagaatgataacactttgtgtccaggattgagaaatgccaaagttgaagatttaaggagtttagccaacttttttggatcttgcactgaaacttttgtcctggctgtcaatattttggacaggttcttggctcttatgaaggtgaaacctaaacatttgtcttgcattggagtctgttcttttttgctggctgctagaatagttgaagaagactgcaatattccatccactcatgatgtgatccggattagtcagtgtaaatgtactgcttctgacataaaacggatggaaaaaataatttcagaaaaattgcactatgaattggaagctactactgccttaaactttttgcatttataccatactattatactttgtcatacttcagaaaggaaagaaatactgagccttgataaactagaagctcagctgaaagcttgcaactgccgactcatcttttcaaaagcaaaaccatctgtattagccttgtgccttctcaatttggaagtggaaactttgaaatctgttgaattactggaaattctcttgctagttaaaaaacattccaagattaatgacactgagttcttctactggagagagttggtttctaaatgcctagccgagtattcttctcctgaatgttgcaaaccagatcttaagaagttggtttggatcgtttcaaggcgcacagcccagaacctccacaacagctactatagtgttcctgagctgccaacgatacctgaggggggttgttttgatgaaagtgaaagtgaggactcttgtgaagatatgagttgtggagaggagagtctcagcagctctcctcccagtgatcaagagtgcaccttctttttcaacttcaaagtggcacaaacactgtgctttccatcttagaaatctgattgttctgtcagaatttatatttacaggtttcaaagcaataaatgggggaataggtagtttcctggtttagcccccatctagtcagaatttaatatactggaatacctaccttctatttgttattcagatcagatctggcctattttcatatttatcctaagccatcaaatggggtagtgcttcttaaaccattaacagtactttagacattggcactttatttt

SEQ ID NO: 226626 - DNA, 784 bp, Homo Sapiens
ttgggccccgcgtcccagccatggcgacatcctcggccgcgctgccccgaatactcggcgcgggtgcccgggccccgtcgcgctggttgggctttctcgggaaggcgacccccccggcctgctcggccgagccgcaggacgcttggaagcgcgacggcccttatgatccgcgagtcggaggacagcaccgatttcaacgacaagattttgaatgagcccctcaagcactctgacttcttcaatgtcaaggaactgttttccgtgagaagcctcttcgatgcccgagtccatctgggacacaaagctggctgtcggcacaggtttatggagccgtacatctttgggagccgcctggaccacgacatcatcgacctggaacagacagccacgcacctccagctggccttgaacttcaccgcccacatggcctaccgcaagggcatcatcttgtttataagccgcaaccggcagttctcgtacctgattgagaacatggcccgtgactgtggcgagtacgcccacactcgctacttcaggggcggcatgctgaccaacgcgcgcctcctctttggccccacggtccgcctgccggacctcatcatcttcctgcacacgctcaacaacatctttgagccacacgtggccgtgagagacgcagccaagatgaacatccccacagtgggcatcgtggacaccaactgcaacccctgcctcatcacctaccctgtacccggcaatgacgactctccgctggctgtgcacctctactgcaggctcttccaga

SEQ ID NO: 226627 - DNA, 916 bp, Homo Sapiens; identical to SEQ ID NO: 192782

SEQ ID NO: 226628 - DNA, 1260 bp, Homo Sapiens
ttgggttcctcccggccacgccgcgccggctctgggcactcagcatcgtttccttttcctccgctggagcagctatggcggcggtgaagaccctgaaccccaaggccgaggtggcccgagcgcaggcggcgctggcggtcaacatcagcgcagcgcggggtctgcaggacgtgctaaggaccaacctggggcccaagggcaccatgaagatgctcgtttctggcgctggagacatcaaacttactaaagacggcaatgtgctgcttcacgaaatgcaaattcaacacccaacagcttccttaatagcaaaggtagcaacagcccaggatgatataactggtgatggtacgacttctaatgtcctaatcattggagagctgctgaaacaggcggatctctacatttctgaaggccttcatcctagaataatcactgaaggatttgaagctgcaaaggaaaaggcccttcagtttttggaagaagtcaaagtaagcagagagatggacagggaaacacttatagatgtggccagaacatctcttcgtactaaagttcatgctgaacttgcagatgtcttaacagaggctgtagtggactccattttggccattaaaaagcaagatgaacctattgatctcttcatgattgagatcatggagatgaaacataaatctgaaactgatacaagcttaatcagagggcttgttttggaccacggagcacggcatcctgatatgaagaaaagggtggaggatgcatacatcctcacttgtaacgtgtcattagagtatgagaaaacagaagtgaattctggctttttttacaagagtgcagaagagagagaaaaactcgtgaaagctgaaagaaaattcattgaagatagggttaaaaaaataatagaactgaaaaggaaagtctgtggcgattcagataaaggatttgttgttattaatcaaaagggaattgaccccttttccttagatgctctttcaaaagaaggcatagtcgctctgcgcagagctaaaaggagaaatatggagaggctgactcttgcttgtggtggggtagccctgaattcttttgacgacctaagtcctgactgcttgggacatgcaggacttgtatatgagtatacattgggagaagagaagtttacctttattgagaaatgtaacaaccctcgttctgtcacattattgatcaaaagaccaaattagcacaccctcactctgatcaaagatgccgtgagggacggcttga

SEQ ID NO: 226629 - DNA, 1386 bp, Homo Sapiens; identical to SEQ ID NO: 192786

SEQ ID NO: 226630 - DNA, 928 bp, Homo Sapiens; identical to SEQ ID NO: 192787

SEQ ID NO: 226631 - DNA, 946 bp, Homo Sapiens; identical to SEQ ID NO: 192788

SEQ ID NO: 226632 - DNA, 1334 bp, Homo Sapiens; identical to SEQ ID NO: 192789
  misc_feature (1158)..(1168): n is a, c, g, or t

SEQ ID NO: 226633 - DNA, 1016 bp, Homo Sapiens; identical to SEQ ID NO: 192791
  misc_feature (777)..(787): n is a, c, g, or t

SEQ ID NO: 226634 - DNA, 944 bp, Homo Sapiens; identical to SEQ ID NO: 192792
  misc_feature (774)..(785): n is a, c, g, or t

SEQ ID NO: 226635 - DNA, 1032 bp, Homo Sapiens
tacaaaaaagttgggtccaggttcgggtcggacctgaacccctaaaagcggaaccgcctcccgccctcgccatcccggagctgagtcgccggcggcggtggctgctgccagacccggagtttcctctttcactggatggagctgaactttgggcggccagagcagcacagctgtccggggatcgctgcatgctgagctccctcggcaagacccagcggcggctcgggatttttttgggggggcggggaccagccccgcgccggcaccatgttcctggcgaccctgtacttcgcgctgccgctcttggacttgctcctgtcggccgaagtgagcggcggagaccgcctggattgcgtgaaagccagtgatcagtgcctgaaggagcagagctgcagcaccaagtaccgcacgctaaggcagtgcgtggcgggcaaggagaccaacttcagcctggcatccggcctggaggccaaggatgagtgccgcagcgccatggaggccctgaagcagaagtcgctctacaactgccgctgcaagcggggtatgaagaaggagaagaactgcctgcgcatttactggagcatgtaccagagcctgcagggaaatgatctgctggaggattccccatatgaaccagttaacagcagattgtcagatatattccgggtggtcccattcatatcagtggagcacattcccaaagggaacaactgcctggatgcagcgaaggcctgcaacctcgacgacatttgcaagaagtacaggtcggcgtacatcaccccgtgcaccaccagcgtgtccaatgatgtctgcaaccgccgcaagtgccacaaggccctccggcagttctttgacaagtcccggccaagcacagctacggaatgctcttctgctcctgccgggacatcgcctgcacagagcggaggcgacagaccatcgtgcctgtgtgctcctatgaagagagggaaagcccaactgtttgatttgcaggactcctgcagacgaattacatctgcagatctcgccttgcgg

SEQ ID NO: 226636 - DNA, 500 bp, Homo Sapiens
cccttaaaagccaactttgtacaaaaaagttgggaacttaagcacattttcggtttctagggttgttacgaagctgcaggagcgagatggaggtggacgcaccgggtgttgatggtcgagatggtctccgggagcggcgaggctttagcgagggagggaggcagaacttcgatgtgaggcctcagtctggggcaaatgggcttcccaaacactcctactggttggacctctggcttttcatccttttcgatgtggtggtgtttctctttgtgtattttttgccatgacttgttcgctgatatctaaattaagaagttggttcttgattgtattcttataatggctacaaacttcctgaataatgaacacacccactctccctacaagaatttcacatctccaagggacccttcctttcattttacactttgttactaatttgcagaactctattaattgggtaggatttcacccattcctagctaaattcttaaaattaa

SEQ ID NO: 226637 - DNA, 962 bp, Homo Sapiens; identical to SEQ ID NO: 192793

SEQ ID NO: 226638 - DNA, 1009 bp, Homo Sapiens; identical to SEQ ID NO: 192799

SEQ ID NO: 226639 - DNA, 950 bp, Homo Sapiens; identical to SEQ ID NO: 192800

SEQ ID NO: 226640 - DNA, 1485 bp, Homo Sapiens; identical to SEQ ID NO: 192802

SEQ ID NO: 226641 - DNA, 1197 bp, Homo Sapiens; identical to SEQ ID NO: 192803

SEQ ID NO: 226642 - DNA, 923 bp, Homo Sapiens; identical to SEQ ID NO: 192804

SEQ ID NO: 226643 - DNA, 1247 bp, Homo Sapiens
actttgtacaaaaaagttggggtgttccccgatggcgtccggcctcagccctcttcctccccatcaggggcagtgcccacgtctttggagctgcagcgagggacggatggcggaaccctccagtccccttcagaggcgactgcaactcgcccggccgtgcctggactccctacagtggtccctactctcgtgactccctcggcccctgggaataggactgtggacctcttcccagtcttaccgatctgtgtctgtgacttgactcctggagcctgcgatataaattgctgctgcgacagggactgctatcttctccatccgaggacagttttctccttctgccttccaggcagcgtaaggtcttcaagctgggtttgtgtagacaactctgttatcttcaggagtaattccccgtttccttcaagagttttcatggattctaatggaatcaggcagttttgtgtccatgtgaacaactcaaacttaaactatttccagaagcttcaaaaggtcaatgcaaccaacttccaggccctggctgcagagtttggaggcgaatcattcacttcaacattccaaactcaatcaccaccatctttttacagggctggggaccccattcttacttacttccccaagtggtctgtaataagcttgctgagacaacctgcaggagttggagctgggggactctgtgctgaaagcaatcctgcaggtttcctagagagtaaaagtacaacttgcactcgttttttcaagaacctggctagtagctgtaccttggattcagccctcaatgctgcctcttactataacttcacagtcttaaaggttccaagaagcatgactgatccacagaatatggagttccaggttcctgtaatacttacctcacaggctaatgctcctctgttggctggaaacacttgtcagaatgtagtttctcaggtcacctatgagatagagaccaatgggacttttggaatccagaaagtttctgtcagtttgggacaaaccaacctgactgttgagccaggcgcttccttacagcaacacttcatccttcgcttctagcttttcaacagagcacagctgcttctctcaccagtcctagaagtgggaatcctggctatatagttgggaagccactcttggctctgactgatgatataagttactcaatgaccctcttacagagccagggtaatggaagttgctctgttaaaagacatgaagtgcagtttgga

SEQ ID NO: 226644 - DNA, 949 bp, Homo Sapiens; identical to SEQ ID NO: 192805

SEQ ID NO: 226645 - DNA, 1051 bp, Homo Sapiens; identical to SEQ ID NO: 192806

SEQ ID NO: 226646 - DNA, 1016 bp, Homo Sapiens
gatgagcaatgctttttcctttgtacaaaaactttggcgagcagcgttggcgcggagagacgcagcggaggttttcctggtttcggaccccagcggccggatggtgaaatcctccctgcagcggatcctcaatagccactgcttcgccagagagaaggaaggggataaacccagcgccaccatccacgccagccgcaccatgccgctcctaagcctgcacagccgcggcggcagcagcagtgagagttccagggtctccctccactgctgtagtaacccgggtccggggcctcggtggtgctcctgatgcccctcacccacccctgaagatcccaggtgggcgagggaatagtcagagggatcacaatctttcagctaacttattctactccgatgatcggctgaatgtaacagaggaactaacgtccaacgacaagacgaggattctcaacgtccagtccaggctcacagacgccaaacgcattaactggcgaacagtgctgagtggcggcagcctctacatcgagatcccgggcggcgcgctgcccgaggggagcaaggacagctttgcagttctcctggagttcgctgaggagcagctgcgagccgaccatgtcttcatttgcttccacaagaaccgcgaggacagagccgccttgctccgaaccttcagctttttgggctttgagattgtgagaccggggcatccccttgtccccaagagacccgacgcttgcttcatggcctacacgttcgagagagagtcttcgggagaggaggaggagtagggccgcctcggggctgggcatccggcccctggggccaccccttgtcagccgggtgggtaggaaccgtagactcgctcatctcgcctgggtttgtccgcatgttgtaatcgtgcaaataaacgctcactccgaattagcggtgtatttcttgaagtttaatattgtgtttgtgatactgaagtatttgctttaattctaaataaaaatttatattttacttttttattg

SEQ ID NO: 226647 - DNA, 1015 bp, Homo Sapiens
ttggaggagacgcacgcagctgactttgtcttctccgcacgactgttacagaggtctccagagccttctctctcctgtgcaaaatggcaactcttaaggaaaaactcattgcaccagttgcggaagaagaggcaacagttccaaacaataagatcactgtagtgggtgttggacaagttggtatggcgtgtgctatcagcattctgggaaagtctctggctgatgaacttgctcttgtggatgttttggaagataagcttaaaggagaaatgatggatctgcagcatgggagcttatttcttcagacacctaaaattgtggcagataaagattattctgtgaccgccaattctaagattgtagtggtaactgcaggagtccgtcagcaagaaggggagagtcggctcaatctggtgcagagaaatgttaatgtcttcaaattcattattcctcagatcgtcaagtacagtcctgattgcatcataattgtggtttccaacccagtggacattcttacgtatgttacctggaaactaagtggattacccaaacaccgcgtgattggaagtggatgtaatctggattctgctagatttcgctaccttatggctgaaaaacttggcattcatcccagcagctgccatggatggattttgggggaacatggcgactcaagtgtggctgtgtggagtggtgtgaatgtggcaggtgtttctctccaggaattgaatccagaaatgggaactgacaatgatagtgaaaattggaaggaagtgcataagatggtggttgaaagtgcctatgaagtcatcaagctaaaaggatataccaactgggctattggattaagtgtggctgatcttattgaatccatgttgaaaaatctatccaggattcatcccgtgtcaacaatggtaaaggggatgtatggcattgagaatgaagtcttcctgagccttccatgtatcctcaatgcccggggattaaccagcgttatcaaccagaagctaaagga

SEQ ID NO: 226648 - DNA, 920 bp, Homo Sapiens
  misc_feature (66)..(109): n is a, c, g, or t
ttggcccgcggctgccgccgccatttcgggcgctgctgtgaagctgaaaccggagccggtccgctnnnnnnnnnnnnnnnnnnnnnnnnnnnnnnnnnnnnnnnnnnnnaccccagcgtttaggcgcggaggcagccatggcgggcaacttcgactcggaggagcggagtagctggtactgggggcggttgagtcggcaggaggcggtggcgctgctgcagggccagcggcacggggtgttcctggtgcgggactcgagcaccagccccggggactatgtgctcagcgtctcagagaactcgcgcgtctcccactacatcatcaacagcagcggcccgcgcccgccggtgccaccgtcgcccgcccagcctccgcccggggtgagcccctccagactccgaataggagatcaagagtttgattcattgcctgctttactggaattctacaaaatacactatttggacactacaacgttgatagaaccagtttccagatccaggcagggtagtggagtgattctcaggcaggaggaggcggagtatgtgcgagccctctttgactttaatgggaatgatgaggaagatcttccctttaagaaaggagacatcttgagaatccgggacaagcctgaagagcagtggtggaatgcggaggacagcgaaggcaagagagggatgattccagtcccttacgtcgagaagtatagacctgcctccgcctcagtatcggctctgattggaggtcggtgagctggtaaaggttacgaagattaatgtgagtggtcagtgggaaggggagtgtaatggcaaacgaggtcacttcccattcacacatgtccgtctgctggatcaacagaatcccgatgaggacttcagctgagtatagttcaacagttttgctgacagatgggaacaatc

SEQ ID NO: 226649 - DNA, 910 bp, Homo Sapiens
ttggcccgagtcccgggctcagtatgtggcgccttcctcgcgcgctgtgtgtgcacgctgcaaagaccagcaagctctctggaccttggagcaggcctgccgccttcatgtccactctcctcatcaatcagccccagtatgcgtggctgaaagagctggggctccgcgaggaaaacgagggcgtgtataatggaagctggggaggccggggagaggttattacgacctattgccctgctaacaacgagccaatagcaagagtccgacaggccagtgtggcagactatgaagaaactgtaaagaaagcaagagaagcatggaaaatctgggcagatattcctgctccaaaacgaggagaaatagtaagacagattggcgatgccttgcgggagaagatccaagtactaggaagcttggtgtctttggagatggggaaaatcttagtggaaggtgtgggtgaagttcaggagtatgtggatatctgtgactatgctgttggtttatcaaggatgattggaggacctatcttgccttctgaaagatctggccatgcactgattgagcagtggaatcccgtaggcctggttggaatcatcacggcattcaatttccctgtggcagtgtatggttggaacaacgccatcgccatgatctgtggaaatgtctgcctctggaaaggagctccaaccacttccctcattagtgtggctgtcacaaagataatagccaaggttctggaggacaacaagctgcctggtgcaatttgttccttgacttgtggtggagcagatattggcacagcaatggccaaagatgaacgagtgaacctgctgtccttcactgggagcactcacgtgggaaaacaggtgggcctgatggtgcaggagaggtttgggagaagtctgttgga

SEQ ID NO: 226650 - DNA, 889 bp, Homo Sapiens
  misc_feature (638)..(657): n is a, c, g, or t
ttggatttgatgcccagatagtgattatagagcacaaatccatcatctgcccaggctataatgcggtgctgcatattcatacctgtattgaggaggtggaaataacagccttaatctgcttggtagacaaaaaatcaggagaaaaaagtaagacccgaccccgttttgtcaaacaagatcaagtatgcattgctcgcttaaggacagcaggaaccatctgccttgagacctttaaagacttccctcagatgggtcgtttcaccttaagagatgagggtaagaccattgcaattggaaaagttctgaaactggttccagagaaagactaagcattttcttgatgaccctgcacaatactgtgaggaaaattgactgcagaagcctacttcacaccgccttctcttattttctgcccattgataaacctctccccatattttgcaaagaggaaattcacagcaaaagtccacattatgtcagctttctcatattgagagctctgctatgccactgttgaatttttcccaagattcctgtccctagccctcacttcaaactctgcttccttggacagatttggcaatagctttgtaagtgatgtggacataattgcctacaataatgaaaacctacaggannnnnnnnnnnnnnnnnnnnccccttaggcatatttagtatttttcccccaggcagatcattctgagtgtgcgagtgtgtgtgcacatgttacaaaggcaactaccatgttaataaaatattcaatttgaaatccttttcggtatttgaattgcttttgaataatgttttttatctggatgtaacattgttgcattagctttttaactttcccaagtaattgaatacattttattacttggacttttataaa

SEQ ID NO: 226651 - DNA, 1119 bp, Homo Sapiens
  misc_feature (327)..(336): n is a, c, g, or t
ctttgtacaaaaaagttggcatgcctgaaaatttgaaacagaccattctaacacccaaggcttgtttataaaatacttgagaattacattaatgtggaatcaacagatgcagaagaatataacataacttttaaaagctttcataaataccagcagcaattgtaagcaaatctacaaaggttcttgaacctttctattatatacaaaactgaaaagtcattaaggagttcaactaatcaggaattaaatggtcatttatttcatgcagtatgatttaaggtatttcttgagattctggtcaaatgtcataatcagcaaacgggattnnnnnnnnnnctccaaaatcactaaataattatctaaataatggtattggagaacttgtttcctgctatttggaagagattgttgcttcattgctagtttgtatttctaacttctacagttatagactccactgtgctttgtgtctgaatttctcagtatagacattttgtttactgtatgcttgcatatttattttcaactttgtttgtctttaaaattgcttgaggaaaaatggttgtaattaatttctgctacagaaaagccacctggtacgttttgtctcatcaggattgttttaaattctaaactataagtttgttcagaggggcttttgcaatgatagcagaaaactgtacaaatgtacagttagttatagaggttcttgttgaaatgaacttaccatctgatgatatgtatgtacagctgtgtacttgagtcttttttagtttacttagaaagactagcagtttgacctgttaaacaggactagttcaagtcaagaaactaaggttgttgtatacacctggaggcatctgttattcagcttatcctttgagtgggtatttggcacaatgaggataaacttatgtgacccacttgaatggctgatctaataatgttgacattatgcattctgtacttagtgaaatgtcagatgaaaataactgatgaataatttttttgtattaaagggatgggaaaagaacacatgaatttgttaataaagcactatgatttgcaaacgatggaatgtttcataaagatttaaagaaataaaggaaactttaaaac

SEQ ID NO: 226652 - DNA, 1220 bp, Homo Sapiens; identical to SEQ ID NO: 192825
  misc_feature (69)..(79): n is a, c, g, or t
  misc_feature (1091)..(1099): n is a, c, g, or t

SEQ ID NO: 226653 - DNA, 1580 bp, Homo Sapiens; identical to SEQ ID NO: 192826
  misc_feature (151)..(214): n is a, c, g, or t
  misc_feature (1216)..(1225): n is a, c, g, or t

SEQ ID NO: 226654 - DNA, 927 bp, Homo Sapiens; identical to SEQ ID NO: 192828

SEQ ID NO: 226655 - DNA, 1382 bp, Homo Sapiens; identical to SEQ ID NO: 192829

SEQ ID NO: 226656 - DNA, 1068 bp, Homo Sapiens; identical to SEQ ID NO: 192834

SEQ ID NO: 226657 - DNA, 1502 bp, Homo Sapiens; identical to SEQ ID NO: 192836

SEQ ID NO: 226658 - DNA, 1264 bp, Homo Sapiens
ttggctcccaacctggaccagctggcggcgggagggctgcggttcacagacttctacgtgcctgtgtctctgtgcacaccctctagggccgccctcctgaccggccggctcccggttcggatgggcatgtaccctggcgtcctggtgcccagctcccgggggggcctgcccctggaggaggtgaccgtggccgaagtcctggctgcccgaggctacctcacaggaatggccggcaagtggcaccttggggtggggcctgagggggccttcctgcccccccatcagggcttccatcgatttctaggcatcccgtactcccacgaccaggtaggaaccacccgggccctcagccaccctcccacctcccaaagtcccccagcccttgatgctcccgcagccccacctgccagcccagccctcacggcagctgcccgcctcagggcccctgccagaacctgacctgcttcccgccggccactccttgcgacggtggctgtgaccagggcctggtccccatcccactgttggccaacctgtccgtggaggcgcagcccccctggctgcccggactagaggcccgctacatggctttcgcccatgacctcatggccgacgcccagcgccaggatcgccccttcttcctgtactatgcctctcacgtaagtgatcttggcccaaccccctggctgcccgtgacccctacccagtgctaactccagtctttgcccccagcacacccactaccctcagttcagtgggcagagctttgcagagcgttcaggccgcgggccatttggggactccctgatggagctggatgcagctgtggggaccctgatgacagccataggggacctggggctgcttgaagagacgctggtcatcttcactgcagacaatggacctgagaccatgcgtatgtcccgaggcggctgctccggtctcttgcggtgtggaaagggaacgacctacgagggcggtgtccgagagcctgccttggccttctggccaggtcatatcgctcccggcgtgacccacgagctggccagctccctggacctgctgcctaccctggcagccctggctggggccccactgcccaatgtcaccttggatggctttgacctcagccccctgctgctgggcacaggcaagagccctcggcagtctctcttcttctacccgtcctacccagacgaggtccgtggggtttttgctgtgcggagtggaaagtaccaggctcacttcttcaccagggtaaccc

SEQ ID NO: 226659 - DNA, 622 bp, Homo Sapiens
attcttataaagctgtcatcaacctgggaaggaattcaggctggaaaggagctcgaggagcagcacggcatccactgcaacatgacgttactcttctccttcgcccaggctgtggcctgtgccgaggcgggtgtgaccctcatctccccatttgttgggcgcatccttgattggcatgtggcaaacaccgacaagaaatcctatgagcccctggaagaccctggggtaaagagtgtcactaaaatctacaactactacaagaagtttagctacaaaaccattgtcatgggcgcctccttccgcaacacgggcgagatcaaagcactggccggctgtgacttcctcaccatctcacccaagctcctgggagagctgctgcaggacaacgccaagctggtgcctgtgctctcagccaaggcggcccaagccagtgacctggaaaaaatccacctggatgagaagtctttccgttggttgcacaacgaggaccagatggctgtggagaagctctctgacgggatccgcaagtttgccgctgatgcaatgaagctggaacggatgctgacagaacaaatgttcaatgcagagatggaaaagtaatcgcatccctgatgctgggact

SEQ ID NO: 226660 - DNA, 926 bp, Homo Sapiens; identical to SEQ ID NO: 192846
  misc_feature (851)..(880): n is a, c, g, or t

SEQ ID NO: 226661 - DNA, 950 bp, Homo Sapiens
tcaatggacaggaagaagggggtgaaataggaccatttacaccacagaaaaacctctgtacatgtctagcgcctggcagaggggggcagcagggcagcagcgggctggagccagccctatttgtagaggatatcgtagtgtccaggccggtagagaaggtagaccttgggctcggagccctcagggaagatgtgcggattggtggtgccgccctcgccgcggtccatgtactccacctggatggacacgctgagggcctgggccagcgcaatgatgtggatgtggtcgctctccttgcacatgggctccacctcctgctggcagaactccttgacagtccgtccaccctcgatgaagtgctcgaagaacttgctctcgcgctgcaggtagcccgaggtgagcagccgcaggtagaccacaaggtagtcggaggtgctctggtcattgaaggaggccagcaggtcggcgacagaggtctgcttctccacctgctcaatcaggtccatgaacgtgttgtggaaatcctcaattgtgaattcagtgaagccctgggacaccaggtcttccttgctcttggcagacacagccttgaaccgctgcaactccttgctgtcatccagcagtgcctccaagtgggagaatccgaaagcccgatagaaacagttgccgtcaggcctggtcttgcggatgtacgagtactttttgtggaggtccttgatcttctgttgatagatgttgtcatcttcagcatactccttgtataggaccgagagctccagccgctctgacaccagagggttctgcacagcaatctcttgctgaattcggtcctgctgagccatgatggcttcatcataggccagacagttaacaccttcggagtcgctgcccagcggctcctgcttctgctgctgaggttcctccgccgccatctttaaacagcgccccaa

SEQ ID NO: 226662 - DNA, 945 bp, Homo Sapiens; identical to SEQ ID NO: 192847

SEQ ID NO: 226663 - DNA, 978 bp, Homo Sapiens; identical to SEQ ID NO: 192848
  misc_feature (740)..(749): n is a, c, g, or t

SEQ ID NO: 226664 - DNA, 1180 bp, Homo Sapiens
  misc_feature (792)..(919): n is a, c, g, or t
ccaactttgtacaaaaaagttggctttctttttacacaactgaagaacaaatctatgaactcttcagcaaaagtggtgacataaagaaaatcattatgggtctggataaaatgaagaaaacagcatgtggattctgttttgtggaatattactcacgcgcagatgcggaaaacgccatgcggtacataaatgggacgcgtctggatgaccgaatcattcgcacagactgggacgcaggctttaaggagggcaggcaatacggccgtgggcgatctgggggccaggttcgggatgagtatcggcaggactacgatgctgggagaggaggctatggaaaactggcacagaaccagtgagtggtgagagctctgtcagtgacaaacactcctttggcctgttgaatttgctgaagaacatcacctaaagtctgcacacgagcccatttttaccaagatttgatcagtgtctttactgagctggaagcctctgaaagttattaaaggacagaatccaaaagaatgcctttaattcttgtctgagaatcttggccatgtgtcagattatcagaacaattttgttaccaggtcagaaattgtgttctttgacaacagattggatctgtaatgttgattagtctttagccataaccactacacttttagaaagacagaaaaatgtaagaatttgtttttaccataatgagtcttaagtaggttcatgatctacattggggcctgggattatttttttaattttaagtttgcatgagatagcctaataaatggaggtggnnnnnnnnnnnnnnnnnnnnnnnnnnnnnnnnnnnnnnnnnnnnnnnnnnnnnnnnnnnnnnnnnnnnnnnnnnnnnnnnnnnnnnnnnnnnnnnnnnnnnnnnnnnnnnnnnnnnnnnnnnnnnnnncgaaaaacaacaaatggagttgtgctatgttgtattgctttgcacaaaattaggaacaggtgtttgacaattgaatttgttttctgtgaattctaacctctaaaggcatgcttagaggtcaaggaccttcctgtgtagttggtgcaaaagcaatctccacaggacagcactgcttccatgcttcatacatcaggaaatgaggccagaacttgagtatttactaacacgtttttcaaagatgtcagtgttatacctaaagct

SEQ ID NO: 226665 - DNA, 1368 bp, Homo Sapiens; identical to SEQ ID NO: 192850
  misc_feature (263)..(390): n is a, c, g, or t

SEQ ID NO: 226666 - DNA, 869 bp, Homo Sapiens
ttgggtctctcttttcttagctcagtgagtactgggtatgtgtcacattgccaaatcccggatcacaagtctccatgaactgctggtgagctaggataataaaacccctgacatcaccattccagaagcttcacaagactgcatatataaggggctggctgtagctgcagctgaaggagctgaccagccagctgacccctcacactcacctagccaccatggacatcgccatccaccacccctggatccgccgccccttctttcctttccactcccccagccgcctctttgaccagttcttcggagagcacctgttggagtctgatcttttcccgacgtctacttccctgagtcccttctaccttcggccaccctccttcctgcgggcacccagctggtttgacactggactctcagagatgcgcctggagaaggacaggttctctgtcaacctggatgtgaagcacttctccccagaggaactcaaagttaaggtgttgggagatgtgattgaggtgcatggaaaacatgaagagcgccaggatgaacatggtttcatctccagggagttccacaggaaataccggatcccagctgatgtagaccctctcaccattacttcatccctgtcatctgatggggtcctcactgtgaatggaccaaggaaacaggtctctggccctgagcgcaccattcccatcacccgtgaagagaagcctgctgtcaccgcagcccccaagaaatagatgccctttcttgaaatgcattttttaaacaagaaagtttcccccacagtgaatgaaagtcttgtgactagtgctgaagcttaataatgctaagggcaagccctaaattatcaagctaataaa

SEQ ID NO: 226667 - DNA, 626 bp, Homo Sapiens; identical to SEQ ID NO: 192851

SEQ ID NO: 226668 - DNA, 1154 bp, Homo Sapiens
  misc_feature (161)..(177): n is a, c, g, or t
ttggcccagggctatttgccctggagtcctggattctaaccacaagactccccagccagagctggtagcagggaagggagggatgaggagggctgtcatgagtcaggcttgacttcctgaagaaatgggcttagaagtggcagcgtccaggaacggatggnnnnnnnnnnnnnnnnnctagggtggggggcacggatctaggggtccgcatttggctgagccctaaagggacctctgcaggaggagcagagcgagatcatggagtactcggtgctgctgcctcgaacactcttccagaggacgaaaggccggaggggggaggctgagaagagactcctcctggtggacttcagcagccaagccctgttccaggacaagaattccagccaagtcctgggtgagaaggtcttggggattgtggtacagaacaccaaagtagccaacctcacggagcccgtggtgctcactttccagcaccagctacagccgaagaatgtgactctgcaatgtgtgttctgggttgaagaccccacattgagcagcccggggcattggagcagtgctgggtgtgagaccgtcaggagagaaacccaaacatcctgcttctgcaaccacttgacctactttgcagtgctgatggtctcctcggtggaggtggacgccgtgcacaagcactacctgagcctcctctcctacgtgggctgtgtcgtctctgccctggcctgccttgtcaccattgccgcctacctctgctccaggagcgaaacctcgggactacaccatcaaggtgcacatgaacctgctgctggccgtcttcctgctggacacgagcttcctgctcagcgagccggtggccctgacaggctctgaggctggctgccgagccagtgccatcttcctgcacttctccctgctcacctgcctttcctggatgggcctcgaggggtacaacctctaccgactcgtggtggaggtctttggcacctatgtccctggctacctactcaagctgagcgccatgggctggggcttctccatctttctggtgacgctggtggccctgggtggatgtggacaactatgggccccatcatcttgggctgtgcataaggactccagagggcgtcatctacccttccatgtgctggatccgg

SEQ ID NO: 226669 - DNA, 1185 bp, Homo Sapiens; identical to SEQ ID NO: 192853

SEQ ID NO: 226670 - DNA, 945 bp, Homo Sapiens
tgaacttggctagggcggcaaagcgtttttttggtttcatcatggagtgcagagccacggtggggaagctgaatttgcgcagcatcatgcacagaatctggcaggtcttgcacgtgttggtgaagatgataatggaccagtcctcgtgctcatcctggaagcgctggatcaggtggaccaggtaggcgtccttgaccttctcaggcaccagcaggtagcgctggtccagctgctccacggtgctcaccggggcctgtgcttcccagaagaagggctggttggtggccagaccctgcagctcccggagtgtgtcggtcagcgtggcgctgaacagcagtgtctgcctgcgggccggcacagccgccaggatggcctccaggtccacggtgaagtcagtgcagccctgttccagcagccggtctgcctcatccatcaccaggaagcggatcttctttatactaaaagtgttggagctgcgcaggtgatctgccaggcgccccggcgtggcgatgaccacgtgtggtttccgagagagctccagcgcctgggccaccatgtccatgccaccgacgatgatgcagtctttcagccctagaggcttccccaggacccggaactgctctgcgatctggtaggccagctccctggtgggtgtcaggacgaggcagaagatgccatagggatcctcagacagcttctgcaagatgggaaggacaaacgctgctgtcttcccactgcctgtcttagcacagcccaagcagtctcgaccctccaggatggcggggatgcagccgagctgcacgggcgtgggctgcttcaaacccagctgccgacattgttccacgagccacgatgacagcccgagctccgcgaagcctgccatccttgtggccgcttgtaggggccccttgtccaacttttttgtacaaagttggctttaaaagg

SEQ ID NO: 226671 - DNA, 647 bp, Homo Sapiens; identical to SEQ ID NO: 192855

SEQ ID NO: 226672 - DNA, 874 bp, Homo Sapiens; identical to SEQ ID NO: 192856

SEQ ID NO: 226673 - DNA, 1288 bp, Homo Sapiens
ttgggaagcctggatgggcggtacgcagacgcgcgcggtgagacccgctgtctgctcagcggactctgcccgcccccacctccccctgcgtcgggccgacatgaaggactcgctggtgctgctgggccgtgtcccggcgcacccggactcccgctgctggttcctggcctggaaccccgcggggaccctgctggcctcgtgcggcggcgaccggagaatccgcatctggggcacggagggtgacagctggatctgcaagtctgtcctttctgaaggccaccagcgcaccgtgcggaaggtagcctggtccccctgcggtaattacctggcctctgccagctttgatgctaccacttgcatttggaagaagaaccaggatgactttgagtgtgtaaccactctcgagggccatgaaaatgaggtcaagtcagtggcttgggccccatctggcaacctcctggccacttgcagccgagataagagcgtttgggtctgggaagttgatgaagaggatgagtatgaatgtgtcagtgttctcaactcccacacacaggatgtcaagcatgtggtttggcacccaagtcaggagctcttagcttctgccagctatgatgacacagtgaagctgtaccgggaggaagaggatgactgggtatgctgtgccacccttgagggccatgaatccactgtgtggagcttggcctttgacccgagtggccagcgcctggcgtcttgtagtgatgaccgtactgtgcgtatctggcgtcagtatctaccaggcaatgaacaaggggtggcatgcagcggctctgaccccagttggaaatgtatctgtactttgtccggcttccactcaaggaccatttatgacattgcttggtgtcagctgacaggggctctggccacagcttgtggggatgacgcgatccgcgtgtttcaggaggatcccaactcggatccacagcagcccaccttctccctgacagcccacttgcatcaggcccattcccaggatgtcaactgtgtggcctggaaccccaaggagccagggctactggcctcctgcagtgatgatggggaggtggccttctggaagtatcagcggcctgaaagcctctgagctacctcgactttggacagagtaatgaccccccagaaaacgtcatataagactttaccagcccctgagaggaccaggaggagcattccttgacttcatttaactttggctcacttctcttcagacttgggtagaagtgcagagccacagaattgctttccttccccc

SEQ ID NO: 226674 - DNA, 1178 bp, Homo Sapiens
acaaaaaagttggaagcaagatcgctggttgccaacattgacttgggtcctactattttggacattgctggctacgacctaaataagacacagatggatgggatgtccttattgcccattttgagaggtgccagtaacttgacctggcgatcagatgtcctggtggaataccaaggagaaggccgtaacgtcactgacccaacatgcccttccctgagtcctggcgtatctcaatgcttcccagactgtgtatgtgaagatgcttataacaatacctatgcctgtgtgaggacaatgtcagcattgtggaatttgcagtattgcgagtttgatgaccaggaggtgtttgtagaagtctataatctgactgcagacccagaccagatcactaacattgctaaaaccatagacccagagcttttaggaaagatgaactatcggttaatgatgttacagtcctgttctgggccaacctgtcgcactccaggggtttttgaccccggatacaggtttgacccccgtctcatgttcagcaatcgcggcagtgtcaggactcgaagattttccaaacatcttctgtagcgacctcacacagcctctgcagatggatccctgcacgcctctttctgatgaagtgattgtagtaggtgtctgtagctagtcttcaagaccacacctggaagagtttctgggctggctttaagtcctgtttgaaaaagcaacccagtcagctgacttcctcgtgcaatgtgttaaactgtgaactctgcccatgtgtcaggagtggctgtctctggtctcttcctttagctgacaaggacactcctgaggtctttgttctcactgtattctttttatcctggggccacagttcttgattattcctcttgtggttaaagactgaatttgtaaacccattcagataaatggcagtactttaggacacacacaaacacacagatacaccttttgatatgtaagcttgacctaaagtcaaaggacctgtgtagcatttcagattgagcacttcactatcaaaaatactaacatcacatggcttgaagagtaaccatcagagctgaatcatccaagtaagaacaagtaccattgttgattgataagtagagatacattttttatgatgttcatcacagtgtggtaagttgcaaattcaaaac

SEQ ID NO: 226675 - DNA, 1060 bp, Homo Sapiens
ttggcttcaaaatgggctcttctaatgaggtcactactgaacaaaattgttccctcttctgttaaatagaataggtttaaatgactagtcaaatgaattattttcttcttgttaaataaattaaatcttactttcttttaatgaccaaccttaggtaaaacaaaaatattgtaatcctagaaattatcctccagctttctcacctgaaaatctattgaagtgatccctggtcatcctaataatgggatgagggaagtttccagcagatttcaggctgttcttaaagtttttgttggtcattttctcaatagtacatgaaatcaagatgcttatgagcatggaaatgtatttaaagtttttgcttgtgtcctcctcagtcagaatagaaaagtaactgaaatactcttacctttctgtccttgataaaatagtaaagaaaaccaaacaaacccaggcctgatgggaaaaatgattcctttattctagcaacttactttctgttggtatgggaaatgttattaatttctattactaaagttcatatcacaaaatgatatttaataataaccttggggtaaatcatgaattttttttctacgtgtgagtataaaagacaaaagttgaacagcatggaatctcattgccaaattattagtgaatgtatagttcaggtattctttgagacacacagtatcattaatttccgaattgtatttcagtgttattttttgtttgtgaccactaagcttctgtcttaatacaaagctgttaccttctacagaatttaagtctgaagatgtaaagagagaacaggccttgtgtaacagaagatactcttttttatgctccttactgtgatcacagaaaaattaaaaatccaaagtgctctctagatttgttgataaactttttatgcttgcatttaaacttgaaatgtatgagcagaatgagacaatcagttaaatcagaaatgagaagtattataatgtaaaggctttgttttgctgtagcataaaatgaccagtgccatgacttgatttaataaatctattttaaagtt

SEQ ID NO: 226676 - DNA, 897 bp, Homo Sapiens
ttggctcttgttcctcctcctgcctctcttcgcttcgcctgcaaacgcggtgggggctgctcggcggtcaggagcagcaagagacagagcgacatgagagattggaccgcgggctgcactggagaatttactggtaggataattcatccctaaagagattgaagtgagcttcagaatggcaaaagaggagccccagagtatctcaagggacttgcaggaactgcagaagaagctgtctctgctgatagactccttccagaataactcaaaggtggtggcctttatgaagtctccagtgggtcagtacttggacagccatccgtttctggccttcaccttgctggtgttcattgtcatgtcggccgttcctgttggattcttcctgctcatcgtggtgcttaccaccctggctgctctgctgggggtcataatattggaaggattggtcatctctgtgggtggcttctcactgctctgcatcctctgtggtttgagcttcgtatcactcgccatgtcggggatgatgatagcatcttatgtagtggtctccagcctcatcagctgctggttttctcccaggccactgacacagcaaaacaccagttgtgactttctgccagccatgaagtctgcagaattcgaggggctttaccaggaatgagtgactgctcagaggccgggcttcttttcaagtactgctggatcatactcaccccttgggattatggcttagaagaagggggctgggtaggcaagcactccttggctgtgtcctctcgctttttcacttacttgtaggatcccgcagcagccaatttaaggattgtgttgttcttgtgttggttcccatgtaagaagcacagagaaatgcgatggttcaacagctcgccctgcccc

SEQ ID NO: 226677 - DNA, 1412 bp, Homo Sapiens
gacaattttgtgaagagctttttagtagctaaatatggcaccatgtgttccaagggcaatataaattacagtatgcaaaacatactgactggctgaggtaaaacgcactgctcctgcctcacgtcaccatgaggggaaacacacatatgcttttaaaaacatctggcttataaaaaaacatcccctagaaaggcctccagagaggggctgtgaggctcaccctctgccgcgctcaggaggacccgccggctcagccctggcccctccactgcagccatgggtggcgcctccccctactgcctgcccagggctctgtccaggttgctcttgatggtgtcgaggaagtccgtggtgttcaggaagtgctcgttcagcttcacattgctgaggccgtgaatgcagcccgccaggtccttggtcatggctccactctccaccgtctccacgcacaccttctccagcatctgggcaaacctgatgaggtcttggttcccatccagcttcccccggtgctccaggccacgtgtccaggcaaagatgctggcgatggggttggtgctggtgggccggcccttctggtgctcccgatagtggcgggtgacggtcccatgagcggcctcagcctcaatcgtcttcccatcagggcagaccaggacggacgtcatcaggccaagggagccaaagccctgggccaggatgtctgactgcacatctccgtcatagttcttgcaggcccacacaaagccacccgaagacttgaggacctgagccaccatgtcatcaatgagccggtgctcataccagatcttattcttgtcgaagtcggtcttatagtgcttgtcaaagatctcctggaagatgtccttgaaacgcccatcgtaggctttcagtatggtgttcttggtgctcatgtacagcggccatttcttctggatggcatactggaagcagctgtgcgcaaaacctgagatggactcgtcggtgttgtacatgcccatgcccacgccgcctgcggggaagttgtacacttcccactccttgacaccactgccatcttttggggtgaagaccattttgaaagtgccggcccggtctgccacaaagtctgtggccttgtactggtcgccatgggcgtgcctgccaatggtgatgggcttggtccagccagggactaggcgtgggatgtttttgcagatgatgggctcccggaagacagtcccccccaggatgttccggatagttccattgggacttttccacatcttcttcagcttgaactcttccacacgggcctcatcaggggtgatggtggcacacttgacagccacactgtacttctgggtggccagtgcagagtcaatggtgacctggtcatcagtgtggtcacggtttgccaacttttttgtacaaag

SEQ ID NO: 226678 - DNA, 845 bp, Homo Sapiens; identical to SEQ ID NO: 192866

SEQ ID NO: 226679 - DNA, 946 bp, Homo Sapiens
ctttgtacaaaaaagtgggggtctcaggtgtggactcggcaagaaccagcgcaagagggaagcggagttatagctaccccggccgcggagccggctcactgcactacccccgcccccttctttcctccagacgccgaagtcgcgggcgctcatggcgggcctggaggtactgttcgcatcggcagcgccggccatcacctgcaggcaggacgcgctcgtctgcttcttgcattgggaagtggtgacacacggttactgcggcttgggtgtcggtgaccagccgggtcccaatgataagaagtcagaactgctgccagctgggtggaacaacaataaagacctgtatgtcctccggtatgagtataaggatgggtccagaaagctccttgtgaaagccatcaccgtggagagcagcatgatcctcaatgtgctggaatatggctcacagcaagtggcagacttgaccctgaacttggatgattatatcgatgcagaacacctgggtgacttccacaggacctacaagaacagtgaggagcttcggtctcgtattgtgtctggaatcatcacacctatccatgagcagtgggaaaaggctaatgtaagcagtccccaccgggagttcccccctgctaccgccagagaggtggacccactccggattcctccacaccacccacacaccagtcggcagcctccctggtgtgatcccctgggcccgtttgttgtcgggggagaagacttaaacccttttgggcctcggagaggtggcatgattgtggatcccctgagatctggcttcccaagagcacttattgacccttcctcaggcctcccgaaccgacttcctccaggcgctgtgcccccaggagctcgctttgacccctttggacccattgggaccagcccacccggcccgaggcctgacagacgcgggcagtgatga

SEQ ID NO: 226680 - DNA, 520 bp, Homo Sapiens
  misc_feature (358)..(392): n is a, c, g, or t
ctttgtacaaaaaagttggcaccatcatccccaaaggatgatgtatttacaacatggtccgtgtgcaaagaaaagaactgcttgcatttctttatttctgtctcataattgtcaaaaaccagaattaggtcaagttcatagtttctgtaattggcttttgaatcaaagaatagggagacaatctaaaaaatatcttaggttggagatgacagaaatatgattgatttgaagtggaaaaagaaattctgttaatgttaattaaagtaaaattattccctgaattgtttgatattgtcacctagcagatatgtattacttttctgcaatgttattattggcttgcactttgtgagtattnnnnnnnnnnnnnnnnnnnnnnnnnnnnnnnnnnntgcataggacagacttaggacttttgtttagagcagttaacatctgaagtgtctaatgcattaacttttgtaaggtactgaatacttacctttttttaaacccttttgcgtggtccttaggcttacaa

SEQ ID NO: 226681 - DNA, 870 bp, Homo Sapiens; identical to SEQ ID NO: 192873
  misc_feature (587)..(617): n is a, c, g, or t

SEQ ID NO: 226682 - DNA, 583 bp, Homo Sapiens; identical to SEQ ID NO: 192875

SEQ ID NO: 226683 - DNA, 861 bp, Homo Sapiens; identical to SEQ ID NO: 192879

SEQ ID NO: 226684 - DNA, 1178 bp, Homo Sapiens
ttgggtctctttcgccatggctgccgggccgatctccgagcggaatcaggatgccactgtgtacgtggggggcctggatgagaaggttagtgaaccgctgctgtgggaactgtttctccaggctggaccagtagtcaacacccacatgccaaaggatagagtcactggccagcaccaaggctatggctttgtggaattcttgagtgaggaagatgctgactatgccattaagatcatgaacatgatcaaactctatgggaagccaatacgggtgaacaaagcatcagctcacaacaaaaacctggatgtaggggccaacattttcattgggaacctggaccctgagattgatgagaagttgctttatgatactttcagcgcctttggggtcatcttacaaacccccaaaattatgcgggaccctgacacaggcaactccaaaggttatgcctttattaattttgcttcatttgatgcttcggatgcagcaattgaagccatgaatgggcagtacctctgtaaccgtcctatcaccgtatcttatgccttcaagaaggactccaagggtgagcgccatggctcagcagccgaacgacttctggcagctcagaacccgctctcccaggctgatcgccctcatcagctgtttgcagatgcacctcctccaccctctgctcccaatcctgtggtatcatcattggggtctgggcttcctccaccaggcatgcctcctcctggctccttcccacccccagtgccacctcctggagccctcccacctgggatacccccagccatgcccccaccacctatgcctcctggggctgcaggacatggccccccatcggcaggaaccccaggggcaggacatcctggtcatggacactcacatcctcacccattcccaccgggtgggatgccccatccagggatgtctcagatgcagcttgcacaccatggccctcatggcttaggacatccccacgctggacccccaggctctgggggccagccaccgccccgaccaccacctggaatgcctcatcctggacctcctccaatgggcatgcccccccgagggcctccattcggatctcccatgggtcacccaggtcctatgcctccgcatggtatgcgtggacctcctccactgatgcccccccatggatacactggcc

SEQ ID NO: 226685 - DNA, 1283 bp, Homo Sapiens
ttggggctccgctgcggaaggcggacgactagagtcgttgggcccggcgcgacccgcaggagcgtagagagcgcgggactagagtgcagagctccgggacgtggatcggagccggcgcgatgggcggagagcaggaggaggagcggttcgacggcatgttgctggccatggctcagcagcacgagggcggcgtgcaggagcttgtgaacaccttcttcagcttccttcgacgcaaaacagactttttcattggaggagaagaagggatggcagagaagcttatcacacagactttcagccaccacaatcagctggcacagaagacccggcgggagaagagagcccggcaggaggccgagcggcgggagaaggcggagcgggcggccagactggccaaggaagccaagtcagagacctcagggccccagatcaaggagctaactgatgaagaggcagagaggctgcagctagagattgaccagaaaaaggatgcagagaatcatgaggcccagctcaagaacggcagccttgactccccagggaagcaggatactgaggaagatgaggaggaagatgagaaggacaaaggaaaactgaagcccaacctaggcaacggggcagacctgcccaattaccgctggacccagaccctgtcggagctggacctggcggtccctttctgtgtgaacttccggctgaaagggaaggacatggtggtggacatccagcggcggcacctccgggtggggctcaaggggcagccagcgatcattgatggggagctctacaatgaagtgaaggtggaggagagctcgtggctcattgaggacggcaaggtggtgactgtgcatctggagaagatcaataagatggagtggtggagccgcttggtgtccagtgaccctgagatcaacaccaagaagattaaccctgagaattccaagctgtcagacctggacagtgagactcgcagcatggtggaaaagatgatgtatgaccagcgacagaagtccatggggctgccaacttcagacgaacagaagaaacaggagattctgaagaagttcatggatcaacatccggagatggatttttccaaaggctaaattcaactagcccctgtttttcctccctgaactcttggggctgagctgcaaccacccaactttctttcccactcttctctgggacttgtgggcctcaaggcttggggcagcatgggactggcccaggcacacaggtcctgggcatcaggagaagctgggtctgggacctgtcctccc

SEQ ID NO: 226686 - DNA, 1427 bp, Homo Sapiens
  misc_feature (1164)..(1197): n is a, c, g, or t
acaaaaaagatggcggcaggaggcagtggcgttggtgggaagcgcagctcgaaaagcgatgccgattctggtttcctggggctgcggcccacttcggtggacccagcgctgaggcggcggcggcgaggcccaagaaataagaagcggggctggcggcggcttgctcaggagccgctggggctggaggttgaccagttcctggaagacgtgcggctacaggagcgcacgagcggtggcttgttgtcagaggccccaaatgaaaaactcttcttcgtggacactggctccaaggaaaaagggctgacaaagaagagaaccaaagtccagaagaagtcactgcttctcaagaaaccccttcgggttgacctcatcctcgagaacacatccaaagtccctgcccccaaagacgtcctcgcccaccaggtccccaacgccaagaagctcaggcggaaggagcagctatgggagaagctggccaagcagggcgagctgccccgggaggtgcgcagggcccaggcccggctcctcaacccttctgcaacaagggccaagcccgggccccaggacaccgtagagcggcccttctacgacctctgggcctcagacaaccccctggacaggccgttggttggccaggatgagtttttcctggagcagaccaagaagaaaggagtgaagcggccagcacgcctgcacaccaagccgtcccaggcgcccgccgtggaggtggcgcctgccggagcttcctacaatccatcctttgaagaccaccagaccctgctctcagcggcccacgaggtggagttgcagcggcagaaggaggcggagaagctggagcggcagctggccctgcccgccacggagcaggccgccacccaggagtccacattccaggagctgtgcgaggggctgctggaggagtcggatggtgagggggagccaggccagggcgaggggccggaggctggggatgccgaggtctgtcccacgcccgcccgcctggccaccacagagaagaagacggagcagcagcggcggcgggagaaggctgtgcacaggctgcgggtacagcaggccgcgttgcgggccgcccggctccggcaccaggagctgttccggctgcgcgggatcaaggcccaggtggccctgaggctggcggagctnnnnnnnnnnnnnnnnnnnnnnnnnnnnnnnnnngaggctgaggctgacaagccccgaaggctgggacggctcaagtaccaggcacttgacatcgacgtgcagctgagctcggagctgacagactcgctcaggaccctgaagcccgagggcaacatccttcgagaccggttcaagagcttccagaggaggaatatgatcgagcttcgagagagagccaagttcaaacgcaagtacaaggtgaagctggtggagaagcgggcgtt

SEQ ID NO: 226687 - DNA, 1017 bp, Homo Sapiens
actttgtacaaaaaagttggcaatgcttcattatgaccttctacatcacccttatgaaccatctggaaataaaaaaaggcaaaactgtagggtttggtaccaataattcagagcacattacctatctggaacataatccttatgaaaagttctccaaagaagagctgaaaaaggcccaggatgttttggtgcaggagatggaagtggttaaacaaggaatgagccatggagagctctcaagtgaagcttataaccaggtgtgggaagaatgctacagtcaagttttatatcttcctgggcagagccgctacacacgggccaatctggctagtaaaaaggacagaattgaatcacttgaaaagaggctcgagataaacaggggtcacatgacgacagaagccaagagggctgcaaagatggaaaagaagatgaaaattttgcttgggggttaccagtctcgtgctatggggctcatgaaacagttgaatgacttatgggaccaaattgaacaggctcacttggagttacgcacttttgaagaactcaagaaacatgaagattctgctattccccggaggctagagtgtctaaaagaagacgttcagcgacaacaagaaagagaaaaggaacttcaacatagatatgctgatttgctgctggagaaagagactttaaagtcaaaattctgaagtacagtttatattctgtcacaggattaattaattgccggttttcatactctagaaggctgaaactgatgtttatcttcattgacaaatttacccaccatctgtggtttttcagttgtttattttaaatgatatcgatcttacacattctgtgtataaagaccttaactccacaggacggacattttagagtttaaattattaaggctatcattcttttagtaatgtcatatttgcaaacttttttagttttggcctttaatttaaaaagcctaattttaaagtgctgcctgtgagtaactcttgaataaaacaaaatataaaaaat

SEQ ID NO: 226688 - DNA, 1205 bp, Homo Sapiens
  misc_feature (146)..(173): n is a, c, g, or t
ttggcccaaacagaggaaacccagccttcagaaacaaaagaagtggagccagagccaactgaggacaaggatttggaagctgatgaagaggacactaggaaaaaagatgcttctgatgatctagatgacttgaacttctttaatcnnnnnnnnnnnnnnnnnnnnnnnnnnnngatatttgatattgatgaagctgaagaaggtgtaaaggatcttaagattgaaagtgatgttcaagaaccaactgaaccagaggatgaccttgacattatgcttggcaataaaaagaagaaaaagaagaatgttaagttcccagatgaggatgaaatactagagaaagatgaagctctagaagatgaagacaacaaaaaagatgatggtatctcattcagtaatcagacaggccctgcttgggcaggctcagaaagagactacacatacgaggagctgctgaatcgagtgttcaacatcatgagggaaaagaatccagatatggttgctggggagaaaaggaaatttgtcatgaaacctccacaagtcgtccgagtaggaaccaagaaaacttcttttgtcaactttacagatatctgtaaactattacatcgtcagcccaaacatctccttgcatttttgttggctgaattgggtacaagtggttctatagatggtaataaccaacttgtaatcaaaggaagattccaacagaaacagatagaaaatgtcttgagaagatatatcaaggaatatgtcacttgtcacacatgccgatcaccggacacaatcctgcagaaggacacacgactctatttcctacagtgcgaaacttgtcattctagatgttctgttgccagtatcaaaaccggcttccaggctgtcacgggcaagcgagcacagctccgtgccaaagctaactaatttgctaatcactgattttgcaaagcttgttgtggagatgtggctggacaggtttgccatcagagtggatataccgttgtattaaaaacaagataaaaaagctgccaagatttttggcgagtggttggtctgaagtccttgcaagacgctgatgctcaagctgttgacatactcattgcctactttaacacctgtcagagaaacgtgatatggggtaaggaggtgcttttttaaatcgttcatagacttctgtaaaatgcaagataaattaaaagttattataacagttt

SEQ ID NO: 226689 - DNA, 1017 bp, Homo Sapiens
ttggattggcagctaggtagtggagcgccgctgcttacctgggtgcaggagacagccggagtcgctgggggagctccgcgccgccggacgcccgtgaccatgtggaggctgctggctcgcgctagtgcgccgctcctgcgggtgcccttgtcagattcctgggcactcctccccgccagtgctggcgtaaagacactgctcccagtaccaagttttgaagatgtttccattcctgaaaaacccaagcttagatttattgaaagggcaccacttgtgccaaaagtaagaagagaacctaaaaatttaagtgacatacggggaccttccactgaagctacggagtttacagaaggcaattttgcaatcttggcattgggtggtggctacctgcattggggccactttgaaatgatgcgcctgacaatcaaccgctctatggaccccaagaacatgtttgccatatggcgagtaccagcccctttcaagcccatcactcgcaaaagtgttgggcatcgcatggggggaggcaaaggtgctattgaccactacgtgacacctgtgaaggctggccgccttgttgtagagatgggtgggcgttgtgaatttgaagaagtgcaaggtttccttgaccaggttgcccacaagttgcccttcgcagcaaaggctgtgagccgcgggactctagagaagatgcgaaaagatcaagaggaaagagaacgtaacaaccagaacccctggacatttgagcgaatagccactgccaacatgctgggcatacggaaagtactgagcccatatgacttgacccacaaggggaaatactggggcaagttctacatgcccaaacgtgtgtagtgagtgtaggagaaactgtatataggctactgaaagaaggattctgcatttctattcccctcagcctacccactgaagtctttgggtagctcttaagcataactaaggagcagccttttgagtagatttctgaaaaacaatgttatttggtgattaaaagaa

SEQ ID NO: 226690 - DNA, 929 bp, Homo Sapiens
ttggcccacctagatgcaaagcaggattcaaaagaacatctttgcgttttctaccggctccccatcatcgtactagggaggaagaagcgggtgagaaacaaaacttctttccattgtcctgcccgtttctgcggacttgttctgaggccgaggagcctgtgttggaagagatggtgatgggcctgggcgttttgttgttggtcttcgtgctgggtctgggtctgaccccaccgaccctggctcaggataactccaggcacactctaagatactgatggctctgcagaggacccattcattgcttctgcttttgctgctgaccctgctggggctggggctggtccagccctcctatggccaggatggcatgtaccagcgattcctgcggcaacacgtgcaccctgaggagacaggtggcagtgatcgctactgcaacttgatgatgcaaagacggaagatgactttgtatcactgcaagcgcttcaacaccttcatccatgaagatatctggaacattcgtagtatctgcagcaccaccaatatccaatgcaagaacggcaagatgaactgccatgagggtgtagtgaaggtcacagattgcagggacacaggaagttccagggcacccaactgcagatatcgggccatagcgagcactagacgtgttgtcattgcctgtgagggtaacccacaggtgcctgtgcactttgacggttagatgccaccatgtagggattatcgcgagtggttgaccttacacttactccttaaatagcagtgagtaatgcatttgagctgtcccaggctctgtctcctcagctcatttcctactctttttctctatataactcattctattaaatacattgcaccaaagagatatggagacataaacctgtaatgaatgacgctgggcttttctgtaataa

SEQ ID NO: 226691 - DNA, 979 bp, Homo Sapiens; identical to SEQ ID NO: 192882

SEQ ID NO: 226692 - DNA, 755 bp, Homo Sapiens
ggcgctcctgacatcatgaggaacaggacgacgggaatgatgtacatccagtatttggcgaagaaggacttctgctcctgggggttcttggccttctgggcctgttccatctccaggcgctcaatgaaggccgccgtctcagggcctggggctgtggtgggcggctgcagctgcaccgaggtgttgaacagctccaggtccacgtcctccacctcatggccccggcagcccccggggtgcgtcaccaccgacacgcccaccacgttgccggccacatccacgtgcagggtcagctggtccgacaggtgcgactccaccagggagcacgcagggacaaaggaggagacatagccaccagcttccaggccatccagggccccgggtcgccttgggatccggacccggtacaggccattcagggctgccacatcccggagtcggccccgctcctcctcgctgagctgccgctgtgacagggacaaggtaccatcctgctggttccagagcagtgagccccgcttccggaagttggcactgtcatcgatctcaaatgagtgctccagcagcagccccaccgtgccacaggcctcgccctctcgaccttccgccccagcccctcgcgcaccagtcccggcccggcagccgctgccccgggctcgactgggcgctgctaccgccatcagcaagagcaggagcagccgggttgccccagcgctggctgccgccatctcggcttcttcccccagcgaagccaa

SEQ ID NO: 226693 - DNA, 1042 bp, Homo Sapiens
ttggcaaagaggttacctggaaatccaacaccgcccaacacccctcccgctccccagtccggggacttcgataggattggagaaggtttgtgttcccgacgccttggtagttggcataggctaaagaaaagggatctcacccccgaggaagggtcaccctcctagagatagctactaccccgtctcaggagaccctggtatttctagagcacgctttgctttcaccaaacccaaggaggtgacaggaggagcccccgcacaggacctaagaatgctgtgaccagaagatgggatcgcggaacagcagcagtgcaggatccgggtccggagacccctccgagggcttgccccgaagaggggctggcctgcgtcggagtgaggaagaggaagaagaggatgaagatgtggatctggcccaggtactggcctatctcctccgcagaggccaagtgaggttggtgcagggaggaggtgcagcaaatttacaattcattcaggccctcttggactcagaggaagagaatgacagagcttgggatggtcgtcttggggatcgatacaacccacctgtggatgctacccctgacacccgggagctggaattcaatgagatcaagacacaagtggaactggccacagggcagctggggcttaggcgggccgcccagaagcacagctttcctcgaatgttgcaccagagagaacggggcctctgccatcggggaagcttctcccttggagaacagtctcgagtgatatctcacttcttgcccaatgatctgggcttcactgatagctactctcagaaggctttctgtggcatctacagcaaagatggtcaaatattcatgtctgcttgccaagaccagacaatccgactctatgactgccgatatggccgtttccgtaaattcaagagcatcaaggcccgcgacgtacgctggagcgtcttggatgtggccttcacccctgatgggaaccacttcctctactctagctggtctgattacattcatatctgcaatatctatggtgagggaga

SEQ ID NO: 226694 - DNA, 923 bp, Homo Sapiens
  misc_feature (91)..(128): n is a, c, g, or t
ttttcccctggcctcctgtcgcaactgcgtggtccatgttcagcccaggagcccagccattccatgaccaactccatggagtctctattcnnnnnnnnnnnnnnnnnnnnnnnnnnnnnnnnnnnnnntcagagcccagggggcctaccccaaccccactacaagctactccaagttggctactgggggaagcgaggggggaaattaggccagaggctcaacccccatctctggcagtgtccagaggcttcttctttctgtcttcagtgttgcagcacatgccttttaccctacccctcccctgccaccctgggcaggggaaggggctgcactctcagtacttattgattccaaaaatccggactccgtggagctggggcagcttggggataagcacgctcatcagggacacggtgttgagcacaaaatggatctggtcgtacttagtgtagaagctggtgaggaagtacagcacgatgggtgtgatggtcaagaacttccgagaggccgtgaactggaccccataatccatctgctcccagtgggttagcagcctcgccttgccctggtccggggtctcaaagggtgtccccttcaccgtgtgcaggaagatatacatgcccatgttgtgaatgaggttggtgagggtccagacgacagggacactcacaaacgggatgctcagcagcacgatgtggaggagaccgatggccagcacgtaggagagccagatgccacggctgttcatcacccgcgtgttggggttcacctcgctgtgcgctgtgcccacattcatcctgctgcccctctctgcgtgtggggccgaagatcaacggcccgggaacggttcccgggagcgggggccgctgctgctccagcagctgtaacaacccgcggctgcagcctccccgctggcagcccaa

SEQ ID NO: 226695 - DNA, 1275 bp, Homo Sapiens
taaaagattagtttagtgaaattttaattacataaattcttcaaagcataaacttggaattttttcttggaaatgttataaatttttaatagcaaaacataggaataaaaacatattaacaaaatgtattcaatcatttacattacaaacaaggaatctgcagttcattgttgtagcctgacaaaagaaatcatatctaccattaagaatctatgcacaatgtgattgcaaatatgtacagtactttaaaaaaagcctacaaggaggactttacagaaggaaagtcagctaggctctttgttaaaccaaccagacaatcaaaatagtaaaactctgttggctagtaataaatttacacttaaaaaaacccctagtttctttttgtttaagaatattccagttatatttatatggttacagttgatgaagctgtacacgagagttccagtaaattacccttcagttcatttgtccgggaaagatcagcatgttaacaaaaaataataaaggaattttcaccacactagctttccagttacactatcacagcttcacaaatggattgaacccatgtatccagtggcagaaagagagctgcatgtgaaataccgagaacattggtggcaacagggcaagtcctgcatgaatgtcagaaatgatggataaggttgagaaacagatgcgaggctactttatacagcactagaaaattgtccctacattcagctctcattcccattcctgcaaggtaatgaagctgggaatcacgactgttcagtttaacgtgttgtgtgaattagcagaaccacctctagatacaaaagactgagatttcatcagctctttgattagaacaccctaaaggttgggcacttcttcatggttatcaagcctttacagctacccagttaaagcatgtgcaaaacagaggactcttctgttcacagtaaatgaggtaagatcaagttgttgtcttcaggaattaggaagttcgtgagatatgaactgttttagtctttctaggtattgtgcataaagctctatgtcattatgcccagccccttcaacccaaaggggctccacggctcggggacagcgctcgtacatcgctaggccatgggagaaatcgatgacctcatcctctgtaccatgaatgaccaacacaggagaggtgactttagatatcttgtcaatgctgcaaaacagaaaggggggaggcagaaagaggactccattagttatggtcacagataatccaacttttttgtacaaagt

SEQ ID NO: 226696 - DNA, 1045 bp, Homo Sapiens
cataaaagacaactttgtacaaaaaagttggcctagcgccgctgggcctgcaggtctctgtcgagcagcggacgccggtctctgttccgcaggatggggtttgttaaagttgttaagaataaggcctactttaagagataccaagtgaaatttagaagacgacgagagggtaaaactgattattatgctcggaaacgcttggtgatacaagataaaaataaatacaacacacccaaatacaggatgatagttcgtgtgacaaacagagatatcatttgtcagattgcttatgcccgtatagagggggatatgatagtctgcgcagcgtatgcacacgaactgccaaaatatggtgtgaaggttggcctgacaaattatgctgcagcatattgtactggcctgctgctggcccgcaggcttctcaataggtttggcatggacaagatctatgaaggccaagtggaggtgactggtgatgaatacaatgtggaaagcattgatggtcagccaggtgccttcacctgctatttggatgcaggccttgccagaactaccactggcaataaagtttttggtgccctgaagggagctgtggatggaggcttgtctatccctcacagtaccaaacgattccctggttatgattctgaaagcaaggaatttaatgcagaagtacatcggaagcacatcatgggccagaatgttgcagattacatgcgctacttaatggaagaagatgaagatgcttacaagaaacagttctctcaatacataaagaacagcgtaactccagacatgatggaggagatgtataagaaagctcatgctgctatacgagagaatccagtctatgaaaagaagcccaagaaagaagttaaaaagaagaggtggaaccgtcccaaaatgtcccttgctcagaagaaggatcgggtagctcaaaagaaggcaagcttcctcagagctcaggagcgggctgctgagagctaaacccagcaattttctatgattttttcagatatagataataaacttatgaacagcaact

SEQ ID NO: 226697 - DNA, 1212 bp, Homo Sapiens; identical to SEQ ID NO: 192889
  misc_feature (903)..(938): n is a, c, g, or t

SEQ ID NO: 226698 - DNA, 963 bp, Homo Sapiens; identical to SEQ ID NO: 192890

SEQ ID NO: 226699 - DNA, 839 bp, Homo Sapiens
  misc_feature (190)..(240): n is a, c, g, or t
agggggattcgagttggtgctggattcatttcctgcaagcagggcttgcaaggtgacctgtctctctaagatgggagagctggagaactgggcctgtaactgcaaacttaaactcccttggctctggggaatgtaaaagggtgtgggaagggtgcacctgtggccaggtgaacctgggagtgagtccatnnnnnnnnnnnnnnnnnnnnnnnnnnnnnnnnnnnnnnnnnnnnnnnnnnnactaatgactaacaacctaagaagggaaaaatgaatggggaatgggccacagggggctctggcctcagtccatgaggtgtgtccgtccgctatgccgaggatccagtgcacagagggtcagaacatgagttaggagggccggtccactccgaatcggagggtgaactcttcggcattctttctgaacagctccggattctgtgtcagcaggtcagcgaggtccatccgcaggggctccctgatattcggtctattcaccagcacattgagggcctccaggacttggcaagtcttggtgcaaggcttccagttctcactgctgatgatgggcaggcaaatctgtccgttctcgtccacgttggggtggtagatcttggttgtgaatttgatcatgggaggcttgaacggatactccggcgggaagctgatgcgcaggttgaaggctttcaggtggtagggaggttggtcgggtaggaggagagcgtgccacaccaggacattggcatcatcgctggacaggttccgcaggtatgggggaggcttcttctgaagatcctccagctccttcaccactcgcatgctcgccatcatgtcgccaa

SEQ ID NO: 226700 - DNA, 925 bp, Homo Sapiens; identical to SEQ ID NO: 192895
  misc_feature (653)..(698): n is a, c, g, or t

SEQ ID NO: 226701 - DNA, 1513 bp, Homo Sapiens; identical to SEQ ID NO: 192896

SEQ ID NO: 226702 - DNA, 990 bp, Homo Sapiens
  misc_feature (834)..(842): n is a, c, g, or t
ttggcgtgttgccctttctgtgtaagctgtgagcgtaggcggccctgagggggtgtgttgcaggggtttccaagcccagcaccagcacccttgcccttttccatcaggggttcagcctagggtccccgctggtgggcggctcccgagtcttggagaagagcacgagaacctagaccgcccccgaagtgcggagaccccctgggcaggctgaaagatggcggcggcgtctgtctctgcggcttctggttctcacttgtcgaacagctttgctgagccatcaaggtctaatggaagcatggttcggcattcttcatctccatatgtagtatatccttcggataagcctttccttaatagtgatctacgacgctccccaagtaagcctacacttgcctatccagaaagcaacagcagagccatattttctgctcttaagaatcttcaagataagattcgacgcttggaacttgagaggattcaggcagaagaaagtgtgaaaaccttgtctagagaaacaattgaatataagaaagtactggatgaacagatacaagaaagggagaattcaaagaatgaggaatcaaagcacaatcaagaactgacatctcagttgttagctgcagaaaataaatgcaatctattagaaaaacaattggaatacatgcgaaatatgataaagcatgccgaaatggagaggacatctgtcttagagaaacaagtttccctagaaagagaacgacaacatgatcaaacacatgttcagagccaacttgaaaaattggatcttcttgaacaggagtataacaaacttaccacaatgcaggcccttgcagnnnnnnnnntgcaagagttggaagcaaaactccatgaagaagaacaggaaaggaaacgcatgcaagctaaggcagctgagttgcagactggtctagaaacaaatagacttatctttgaagataagcaactccgtgtgttcccaatgcaagaagaatt

SEQ ID NO: 226703 - DNA, 1181 bp, Homo Sapiens
  misc_feature (956)..(975): n is a, c, g, or t
ttggcacagctcaacggttgataaatgattctgtcattctgttacaggtcattcttttactaggcttagcttccaaattatgctttatagctgtataaacatcgtgattatattcatctacttagaaattgttttatttttaaattaatttgcttagctgtttgttttggcttagattatgttctgttaatgggaatttaacatatttaagaaaccaatatttaaaatgttggtctaggtttttttccttaacatatattaccaggctttactgtatttcactcagccttaaatgttataatatttttggataacggttattaattctttgagaccttcgtatagcctataaaatgtatgggagatgttggtattttatgtgtataaaagcaacaatatcagcaacttcgtgtttatactgcaccttggttgttgatgtcaagtaaaaaaaagattgttttgtaacacataaaaaaatggaagaaactgataccacacctaaggaccaaagataagaaagactttttgcccaagacagtgaaagtaattataaaaacaagctttgaccacttaccaagtatctgaagagatgagttcatactatgatttagaaagtggttcaattcccctgttggcatatgattatttttactaaaattaatacagctctgtgggtcttccttagtgttttctttgaagccaatctgttttttttaggacaccagcctttggtttttcatctgttcgagatgcctcttctctgtctccttatcagatagaaatggagtcatgtgctgctgcttcatctagcagaggttggcctctggctctgacactttttgtcagttgtctttaggtggtcctgaatcttgggcccttttgattgtgaatactgtgtagcaggatcttgagagtccttgttcttacataggcattgctctagtttgtctttggcnnnnnnnnnnnnnnnnnnnngtaaatatccagggaaccctgcccagactaatactgttggtggcataagagaatcaagccattctcaagagataacttcataaccagaattgtctgttggctagcagctgtcacagataggcagggcacttgggatatgacctttctgtccaggtgattcacagactagacctttcttatcctcctcctagagttttgacttggga

SEQ ID NO: 226704 - DNA, 916 bp, Homo Sapiens; identical to SEQ ID NO: 192900
  misc_feature (850)..(859): n is a, c, g, or t

SEQ ID NO: 226705 - DNA, 912 bp, Homo Sapiens
  misc_feature (270)..(280): n is a, c, g, or t
ttggctatgattcaactcttttaatgattgccagtaatgcaagaaacactccttgagagggaggggaaaagactttcttaaatatttcatttatgacctgcaaattcaagaataaagacactgaagtaagtttgaagccctacagttgtttccagtcttttcagatggatgcctactgtggagattaactttggcatattccagtgtcagctttctttagctggaattgccaaatcatttgttgctcctgctgctctcatggtgccacgnnnnnnnnnnncaatgtttagtaatagtataatccatgttgtttgatatcaaaagtagaattgcttttaatgtagtttttcttcattattgtcattgcgtgttcttaagttttacccctattagatggtaagaacaattaatgcagttttgcacaaatatttttacattctgatcattcagttctgtcattgtaatctttgttgttagaaacaaatgatgaaaacataggggttctgtaaacttttgtaatgctatgaattctgtttaaattttgggctgtctattttctgctgaaaccatgcaaaattgagctttggtggggctgggagggggttatgtattcatgggacctttaatttgtacagaacacagaacttatttctgtcagttatttaatacattgaaaatttagtgaaatgttcaaagagaatagatgtttcccaaaacaacaatctttatgttaaaaatagtcattaaaagatctgttgtaatatatggtggatatttttctttaatttcaaacattacctctgaaatgtgtatcttttcttttttatcttaccattaattttaaaatctagtggattggttttcaacatcgtgcctgccgatatgcctacagaatcatctgtaagtgtcaaa

SEQ ID NO: 226706 - DNA, 1491 bp, Homo Sapiens; identical to SEQ ID NO: 192903

SEQ ID NO: 226707 - DNA, 1227 bp, Homo Sapiens
ttggcaagagtgcaattataacaggcttcagcatgcagtgccggctgatgatggcaccacaagatccccatcaatagacagcattcagaaggaccccagggagtttgcctggcgtgatcctgagttgcctgaggtcattcacatgcttcagcaccagttcccatctgttcaggcaaatgcagcggcctacctgcagcacctgtgctttggtgacaacaaagtgaagatggaggtgtgtaggttagggggaatcaagcatctggttgaccttctggaccacagagttttggaagttcagaagaatgcttgtggtgcccttcgaaacctcgtttttggcaagtctacagatgaaaataaaatagcaatgaagaatgttggtgggatacctgccttgttgcgactgttgagaaaatctattgatgcagaagtaagggagcttgttacaggagttctttggaatttatcctcatgtgatgctgtaaaaatgacaatcattcgagatgctctctcaaccttaacaaacactgtgattgttccacattctggatggaataactcttcttttgatgatgatcataaaattaaatttcagacttcactagttctgcgtaacacgacaggttgcctaaggaacctcagctccgcgggggaagaagctcggaagcaaatgcggtcctgcgaggggctggtagactcactgttgtatgtgatccacacgtgtgtgaacacatccgattacgacagcaagacggtggagaactgcgtgtgcaccctgaggaacctgtcctatcggctggagctggaggtgccccaggcccggttactgggactgaacgaattggatgacttactaggaaaagagtctcccagcaaagactctgagccaagttgctgggggaagaagaagaaaaagaaaaagaggactccgcaagaagatcaatgggatggagttggtcctatcccaggactgtcgaagtcccccaaaggggttgagatgctgtggcacccatcggtggtaaaaccatatctgactcttctagcagaaagttccaacccagccaccttggaaggctctgcagggtctctccagaacctctctgctggcaactggaagtttgcagcatatatccgggcggccgtccgaaaagaaaaggggctccccatccttgtggagcttctgagaatggataacgatagagttgtttcttccgtggcaacagccttgag

SEQ ID NO: 226708 - DNA, 1006 bp, Homo Sapiens; identical to SEQ ID NO: 192906

SEQ ID NO: 226709 - DNA, 1436 bp, Homo Sapiens
ttggcttgctaccctcccggcgcagagaaccccggctgctcagcgcgctccgcggtcatggagatccccgggagcttgtgcaagaaagtcaagctgagcaataacgcgcagaactggggaatgcagagagcaaccaatgtcacctaccaagcccatcatgtcagcaggaacaagagaggtcaggtggtggggaccagaggtggctttcgtggttgcacagtttggctaacaggcttgtctggagcgggaaagactactgtgagcatggccttggaggagtacctggtttgtcatggtattccatgctacactctggatggtgacaatattcgtcaaggtctcaataaaaatcttggctttagtcctgaagacagagaagagaatgttcgacgcatcgcagaagttgctaaactgtttgcagatgctggcttagtgtgcatcacaagtttcatatcaccttacactcaggatcgcaacaatgcaaggcaaattcatgaaggtgcaagtttaccgttttttgaagtatttgttgatgctcctctgcatgtttgtgaacagagggatgtcaaaggactctacaaaaaagcccgggcaggagaaattaaaggtttcactgggatcgattctgaatatgaaaagccagaggcccctgagttggtgctgaaaacagactcctgtgatgtaaatgactgtgtccagcaagttgtggaacttctacaggaacgggatattgtacctgtggatgcatcttatgaagtaaaagaactatatgtgccagaaaataaacttcatttggcaaaaacagatgcggaaacattaccagcactgaaaattaataaagtggatatgcagtgggtgcaggttttggcagaaggttgggcaaccccattgaatggctttatgagagagagggagtacttgcagtgccttcattttgattgtcttctggatggaggtgtcattaacttgtcagtacctatagttctgactgcgactcatgaagataaagagaggctggacggctgtacagcatttgctctgatgtatgagggccgccgtgtggccattcttcgcaatccagagttttttgagcacaggaaagaggagcgctgtgtcagacagtggggaacgacatgcaagaaccacccctatattaagatggtgatggaacaaggagattggctgattggaggagatcttcaagtcttggatcgagtttattggaatgatggtcttgatcagtatcgtcttactcctactgagctaaagcagaaatttaaagatatgaatgctgatgctgtctttgcatttcaactacgcaacccagtgcacaatggacatgccctgttaatgcaggatacccataagcaactttctagagagggggctacccggcgccctgtcctcctcctcaccctctgggtggctgggacaaa

SEQ ID NO: 226710 - DNA, 1036 bp, Homo Sapiens; identical to SEQ ID NO: 192912

SEQ ID NO: 226711 - DNA, 1189 bp, Homo Sapiens; identical to SEQ ID NO: 192913
  misc_feature (172)..(181): n is a, c, g, or t
  misc_feature (870)..(885): n is a, c, g, or t

SEQ ID NO: 226712 - DNA, 833 bp, Homo Sapiens; identical to SEQ ID NO: 192914
  misc_feature (117)..(126): n is a, c, g, or t

SEQ ID NO: 226713 - DNA, 1078 bp, Homo Sapiens
gaaagaacgggaacctcaaacacctactccccacatacaaatacacaccccatggctcacaccagcaaatgaaagtgaaagagaaacaggtccacccctccctctgaagggcccaccaggtctaaaaacacccaccaccttgccggtggtggcactgaccagcttggcctggcagtccacagagccagttaggatcaagctgccatcctggttggcagcaacacaggtgagtgggccctggtgaccctcagtccctttcagtacatggatagggcttccctgcttcaggtcccaaatcctgatggtcccatcttcatagcctaccacagctctcttcccatcagggaggactcggccacaggtggctgggcagttgggaccctggaaggtcttgcagtcaccattcgggactttccacatccaggtgttgccgtcagctgtgcccgccaacaggacaggtgcccgaggatgccactccatccactccaggtctcccgcttcaaaggaccagacctcctccttagtgtccacctgccacactttcaagaggccactcatgtcccctgtggccactagagtggagtcatggctgaaaccagcacaagtcacagagtctttatggcctgcacactcaaagagcagctccccatcgctgagccgccatacgaaggctttgtcatcttcacccccggtcactgccaaggtattggtcttggggtccaggctcacacaaaacacagatgctgagtgcaatgcaaaggtgacctcgctatcgtcggggccctccatgctgccgaccaccccttcctggggttctagaacccagccctcttcgttgccctcttcctcctcttcttcctcaaagtccacatcttccatctcctgggccaggtcatctgggtccggcggaccgggatcaagttctaccacctcgataatctcttcatcaccatggaagcttagggtctccagtgggggggtgtcagcagcagccccgctttccgattcggactccatgcggcgcaagcggcggatccacttctctgggcccaaacgcctcccagccaacttttttgta

SEQ ID NO: 226714 - DNA, 923 bp, Homo Sapiens
ttgggtggccggtgcggcgtgttcggtggcggctctggccgctcaggcgcctgcggctgggtgagcgcacgcgaggcggcgaggcggcagcgtgtttctaggtcgtggcgtcgggcttccggagctttggcggcagctaggggaggatggcggagtcttcggataagctctatcgagtcgagtacgccaagagcgggcgcgcctcttgcaagaaatgcagcgagagcatccccaaggactcgctccggatggccatcatggtgcagtcgcccatgtttgatggaaaagtcccacactggtaccacttctcctgcttctggaaggtgggccactccatccggcaccctgacgttgaggtggatgggttctctgagcttcggtgggatgaccagcagaaagtcaagaagacagcggaagctggaggagtgacaggcaaaggccaggatggaattggtagcaaggcagagaagactctgggtgactttgcagcagagtatgccaagtccaacagaagtacgtgcaaggggtgtatggagaagatagaaaagggccaggtgcgcctgtccaagaagatggtggacccggagaagccacagctaggcatgattgaccgctggtaccatccaggctgctttgtcaagaacagggaggagctgggtttccggcccgagtacagtgcgagtcagctcaagggcttcagcctccttgctacagaggataaagaagccctgaagaagcagctcccaggagtcaagagtgaaggaaagagaaaaggcgatgaggtggatggagtggatgaagtggcgaagaagaaatctaaaaaaaaaaagacaaggatagtaagcttgaaaagccctaaaggctcagaacgacctgatctggaacatcaaggacgagctaaggaaagtgtgttcaactaatga

SEQ ID NO: 226715 - DNA, 721 bp, Homo Sapiens; identical to SEQ ID NO: 192916
  misc_feature (438)..(492): n is a, c, g, or t

SEQ ID NO: 226716 - DNA, 1303 bp, Homo Sapiens
  misc_feature (106)..(151): n is a, c, g, or t
tatcgtactttccaaatgttctgttcagtcttgtttgcttgaaatgattattcctacaagtgaaacactagactatttggagtgtatatggcttgtgttttgggannnnnnnnnnnnnnnnnnnnnnnnnnnnnnnnnnnnnnnnnnnnnncatttggtagttcatctgccttttaacccattcaccaaaatttaccttgttaacaagcatcaccaatgaacatttcagaacaatctgcatatttaacagacctaaaataaatcctattaagcaagtcagttgaaaatgctcgtgctgctaatggaattagagtgcgttcattttacaggctagtattttaaaagtagaaatcaaaatctggcaccgaagcatgctaattgtttactgtaccttgtgaggttttcactcataaatttaaaccagtgtatttttttaaaactggtttgggtatatatatagtgattatggatactaattcaatgtaatttataattttctatgtcaatacaaaaatacatcacagccttctcaaacagctcaagcaatatattgtatattgccatatcgtctggtgaaagggttaaattacttcacctcttgcacttttagatgcaaatcagtttttcatttctgtaatagaaaattattcacgtatttttacatcatttgtttttcctgaccagtatttaaaaccaaaaggatattctgaaaaatggccaacaatttttttagaagtagcatcccaagcagcgtgcctaaacattacattgcatatggaaataaaagaatcaaacgtctaatgccttattatttctgatttcctttttcattttaagtggtgtggagattccagcactcccaggacagtggagtcagcagtaaccctgggacaggtggcaagggtgggtcccttgacctttgcacgcctcctcaggaaccccctttcccgggtgagcccctctctgaagagactgtccttgggcctcctctggaagcagcacccccagaggacagggctcctcctgcttgcctcagggctgcctgacttgaatggcgttggacctcggggattactggtagataatatgctctggtctcgcctggtggtgagttttgccagccatggccagggtttggctccagtggtggcacacgtggcctccgtggtatggacctggtggcttctccatcccactgtggcctctgtggtatggacctggtggcttctccatcctacccaaggtaacagtgtcttgcttcatcccactgactgctgggagagaacctctgggacttttcttt

SEQ ID NO: 226717 - DNA, 969 bp, Homo Sapiens
caactttgtacaaaaaagttggatcaaagaagcatatatgcgatctcttaacaatttccgggctgaacagcctcaccagcatgccatgtactacctccgcttgctgatgactgaagtggcctggactaaagatgagttaaaagaagctctggatgatgtaacccttcctcgccttaaggccttcatacctcagctcctgtcacggctgcacattgaagcccttctccatggaaacataacaaagcaggctgcattaggaattatgcagatggttgaagacaccctcattgaacatgctcataccaaacctctccttccaagtcagctggttcggtatagagaagttcagctccctgacagaggatggtttgtttatcagcagagaaatgaagttcacaataactgtggcatcgagatatactaccaaacagacatgcaaagcacctcagagaatatgtttctggagctcttctgtcagattatctcggaaccttgcttcaacaccctgcgcaccaaggagcagttgggctatatcgtcttcagcgggccacgtcgagctaatggcatacagggcttgagattcatcatccagtcagaaaagccacctcactacctagaaagcagagtggaagctttcttaattaccatggaaaagtccatagaggacatgacagaagaggccttccaaaaacacattcaggcattagcaattcgtcgactagacaaaccaaagaagctatctgctgagtgtgctaaatactggggagaaatcatctcccagcaatataattttgacagagataacactgagttgcatatttaaagacacttaccaaggaagatatcatcaaattctacaaggaaatgttggcagtagatgctccaaggagacataaggtatctgtccatgttcttgccagggaaatggattcttgtcctgttgttggagagttcccatgtcaaaatgac

SEQ ID NO: 226718 - DNA, 974 bp, Homo Sapiens; identical to SEQ ID NO: 192923

SEQ ID NO: 226719 - DNA, 1347 bp, Homo Sapiens; identical to SEQ ID NO: 192924
  misc_feature (321)..(345): n is a, c, g, or t

SEQ ID NO: 226720 - DNA, 1561 bp, Homo Sapiens; identical to SEQ ID NO: 192925

SEQ ID NO: 226721 - DNA, 1197 bp, Homo Sapiens
ttgggggcgggcgcagccggcgctgagcttgcagggccgctcccctcacccgcccccttcgagtccccgggcttcgccccacccggcccgtgggggagtatctgtcctgccgccttcgcccacgccctgcactccgggaccgtccctgcgcgctctgggcgcaccatggcccgcggggctgcgctggcgctgctgctcttcggcctgctgggtgttctggtcgccgccccggatggtggtttcgatttatccgatgcccttcctgacaatgaaaacaagaaacccactgcaatccccaagaaacccagtgctggggatgactttgacttaggagatgctgttgttgatggagaaaatgacgacccacgaccaccgaacccacccaaaccgatgccaaatccaaaccccaaccaccctagttcctccggtagcttttcagatgctgaccttgcggatggcgtttcaggtggagaaggaaaaggaggcagtgatggtggaggcagccacaggaaagaaggggaagaggccgacgccccaggcgtgatccccgggattgtgggggctgtcgtggtcgccgtggctggagccatctctagcttcattgcttaccagaaaaagaagctatgcttcaaagaaaatgcagaacaaggggaggtggacatggagagccaccggaatgccaacgcagagccagctgttcagcgtactcttttagagaaatagaagattgtcggcagaaacagcccaggcgttggcagcagggttagaacagctgcctgaggctcctccctgaaggacacctgcctgagagcagagatggaggccttctgttcacggcggattctttgttttaatcttgcgatgtgctttgcttgttgctgggcggatgatgtttactaacgatgaattttacatccaaagggggataggcacttggacccccattctccaaggcccgggggggcggtttcccatgggatgtgaaaggctggccattattaagtccctgtaactcaaatgtcaaccccaccgaggcacccccccgtcccccagaatcttggctgtttacaaatcacgtgtccatcgagcacgtctgaaacccctgggtagccccgacttctttttaattaaaataaaggtaagcccttcaatttgtttcttcaatatttctttcatttgtaaggatatttgtttttc

SEQ ID NO: 226722 - DNA, 1048 bp, Homo Sapiens; identical to SEQ ID NO: 192930

SEQ ID NO: 226723 - DNA, 1184 bp, Homo Sapiens
ttggaagatggcggctgccgcacaatcccgggttgtccgggtcctgtcaatgtcacgttctgccattactgcaatagccacatctgtgtgtcacggcccaccctgtcgccagcttcatcatgccctcatgcctcatgggaaaggtggacgttcctcagtcagtgggattgtggccactgtgtttggagcaacaggattcctggggcgatatgttgtcaaccaccttggacgcatggggtcacaggtaatcataccctatcggtgtgataaatatgacatcatgcaccttcgtcccatgggtgacctgggccagcttctgtttctggaatgggacgcgagagataaagattctatccgacgagtagtacaacacagcaatgtggtcatcaatcttattggacgagactgggaaaccaaaaactttgattttgaggatgtttttgtgaagattccccaagcaattgctcaactgtccaaggaagctggagttgaaaaattcattcatgtttcacatctgaatgcgaatattaaaagctcttctagatatttgagaaataaggctgttggagagaaagtagtgagagatgcatttccggaagccattatcgtaaagccgtcggacatctttggaagagaggatagattccttaattcttttgcaagtatgcatcggtttggtcctataccccttggttccttgggctggaagacagttaaacaaccagtatatgtcgtagatgtatccaaaggaattgttaatgcagttaaggatcctgatgccaatgggaaatcctttgctttcgttggtcccagtcggtacctccttttccacctggtgaagtacatctttgctgtggctcacagattgttcctcccattccccttgccgctttttgcctatcgatgggtagcaagagtctttgaaataagcccatttgagccctggataacaagggataaagtggagcggatgcacatcacagacatgaaattgcctcacctgcctggcttagaagaccttggtattcaggcaacaccactggaactcaaggccattgaggtgctgcggcgtcatcgcacttaccgctggctgtctgctgaaattgaggatgtgaagccggccaagaccgtcaacatttaatgcctcctgagcaactcttggttttggcgtcttttgggtcggc

SEQ ID NO: 226724 - DNA, 1561 bp, Homo Sapiens; identical to SEQ ID NO: 192932

SEQ ID NO: 226725 - DNA, 975 bp, Homo Sapiens
tttgtacaaaaaagttgggcttctcatcatggcggaccctagagataaggcgcttcaggactaccgcaagaagttgcttgaacacaaggagatcgacggccgtcttaaggagttaagggaacaattaaaagaacttaccaagcagtatgaaaagtctgaaaatgatctgaaggccctacagagtgttgggcagatcgtgggtgaagtgcttaaacagttaactgaagaaaaattcattgttaaagctaccaatggaccaagatatgttgtgggttgtcgtcgacagcttgacaaaagtaagctgaagccaggaacaagagttgctttggatatgactacactaactatcatgagatatttgccgagagaggtggatccactggtttataacatgtctcatgaggaccctgggaatgtttcttattctgagattggagggctatcagaacagatccgggaattaagagaggtgatagaattacctcttacaaacccagagttatttcagcgtgtaggaataatacctccaaaaggctgtttgttatatggaccaccaggtacgggaaaaacactcttggcacgagccgttgctagccagctggactgcaatttcttaaaggttgtatctagttctattgtagacaagtacattggtgaaagtgctcgtttgatcagagaaatgtttaattatgctagagatcatcaaccatgcatcatttttatggatgaaatagatgctattggtggtcgtcggttttctgagggtacttcagctgacagagagattcagagaacgttaatggagttactgaatcaaatggatggatttgatactctgcatagagttaaaatgatcatggctacaaacagaccagatacactggatcctgctttgctgcgtccaggaagattagatagaaaaatacatattgatttgccaaatgaacaagcaagattagacatactgaaaatcca

SEQ ID NO: 226726 - DNA, 1319 bp, Homo Sapiens; identical to SEQ ID NO: 192934

SEQ ID NO: 226727 - DNA, 931 bp, Homo Sapiens; identical to SEQ ID NO: 192935

SEQ ID NO: 226728 - DNA, 1226 bp, Homo Sapiens; identical to SEQ ID NO: 192936

SEQ ID NO: 226729 - DNA, 962 bp, Homo Sapiens
  misc_feature (86)..(109): n is a, c, g, or t
tttgtacaaaaaagttggctttttgatcccaatgtgtgatctgccctgataaataacaagttatagtaccatctcccccgccaatnnnnnnnnnnnnnnnnnnnnnnnncccgtggcactatgtaaataaagtaagcatactttgttgttagtaaatagatgaggcatgcctgggaaatgctcccttggcataaatagcaatcaattataattagtaaacaggtgtaccaataaaaagaatttacatgataggttaacaaggaccaggaaagtgagtttcctgaaggagttctttgttcctgatcaaagaaattgatacctgttagcattcactgccaccatattttaaggagaaagaactctattggtgtcgtctgagcagccatttaaaaattggaatctaaaggatggttgctgatgtactgtgtggtctggtagaagtggggaaatatgagagatggaggaaaaacttgattatgtcttccatggcatatttactcttactttacttcgtgccaaatcaaatgaaacaagccgtcttacaagtcgttattgcctttaaaaatctgttccgtttttttcccaggtacttaaaatacaagtgccagtaagtggttcttatgtgttttggggggaaaattttatttcccttttcttctgatatttaaaaaattcatcgatctttcaagatgaaccaaggttttttaaaagaaatataggaaacacttcattctttataaaactttctataatgccttatttgaatgttaatcttatgtgctttctaaaaaatgttgtgaaataccaaacttatggattatcactaggttatcagcatatatttagtctttatcagaataaaatgaaatttcataactgtggctattactttgttctgggtccttcacagggcctgctccatcccaccttcctttctgctgcctgatgtctcaatggcttct

SEQ ID NO: 226730 - DNA, 1043 bp, Homo Sapiens
ttgggcctccggcaccggccgcgcagctggaggcggcggagcggaagccccaccatggctgcaatccgaaagaagctggtgatcgttggggatggtgcctgtgggaagacctgcctcctcatcgtcttcagcaaggatcagtttccggaggtctacgtccctactgtctttgagaactatattgcggacattgaggtggacggcaagcaggtggagctggctctgtgggacacagcagggcaggaagactatgatcgactgcggcctctctcctacccggacactgatgtcatcctcatgtgcttctccatcgacagccctgacagcctggaaaacattcctgagaagtggaccccagaggtgaagcacttctgccccaacgtgcccatcatcctggtggggaataagaaggacctgaggcaagacgagcacaccaggagagagctggccaagatgaagcaggagcccgttcggtctgaggaaggccgggacatggcgaaccggatcagtgcctttggctaccttgagtgctcagccaagaccaaggagggagtgcgggaggtgtttgagatggccactcgggctggcctccaggtccgcaagaacaagcgtcggaggggctgtcccattctctgagatccccaaggcctttcctacatgccccctcccttcacaggggtacagaaattatccccctacaaccccagcctcctgagggctccatgctgaaggctcccattttcagttccctcctgcccaggactgcattgttttctagccccgaggtggtggcacgggccctccctcccagcgctctgggagccacgcctatgccctgcccttcctcagggcccctggggatcttgccccctttgaccttccccaaaggatggtcacacaccagcactttatacacttctggctcacaggaaagtgtctgcagtaggggacccagagtcccaggcccctggagttgttttcggcaggggccttgtctctcactgcatttggtcaggggggcatgaataaaggctacaggctcc

SEQ ID NO: 226731 - DNA, 656 bp, Homo Sapiens; identical to SEQ ID NO: 192946

SEQ ID NO: 226732 - DNA, 628 bp, Homo Sapiens; identical to SEQ ID NO: 192947

SEQ ID NO: 226733 - DNA, 917 bp, Homo Sapiens
ttggcgccgaaccgcaactcccggcggcccccgcgctcccggggggcaagatggtggcgcgcaggaggaagtgcgccgcgcgggacccggaggaccgtatccccagcccactgggctacgcagctattccaatcaagttctctgaaaagcaacaggcttctcactacctctatgtgagagcacacggcgttcgacaaggcaccaagtccacctggcctcagaagaggactctttttgtcctcaatgtgcccccatactgcacagaggagagcctgtcccgcctcctgtccacctgtggcctcgtccagtctgtagagttgcaggagaagccggacctggctgagagcccaaaggagtcaaggtcgaagttttttcatcccaagccagttccgggtttccaggtagcctatgtggtgttccagaagccaagtggggtgtcagcggccttggccctgaagggccccctgctggtgtccacagagagccaccctgtgaagagtggcattcacaagtggatcagtgactacgcagactctgtgcccgaccctgaggccctgagggtggaagtggacacgttcatggaggcatatgaccagaagatcgctgaggaagaagctaaggccaaggaggaggagggggtccctgacgaggagggctgggtgaaggtgacccgccggggccggcggcctgtgctcccccggactgaggcagccagcttgcgggtgctggagagggagagacggaagcgcagccgaaaagagctgctcaacttctacgcctggcagcatcgagagagcaagatggagcatctagcgcagctgcgcaagaagttcgaggaggacaagcagaggatcgagctgctgcgggcccagcgcaaattccgaccgtactgagctgtgagagccgcagtgaatggc

SEQ ID NO: 226734 - DNA, 1239 bp, Homo Sapiens; identical to SEQ ID NO: 192948

SEQ ID NO: 226735 - DNA, 926 bp, Homo Sapiens; identical to SEQ ID NO: 192952

SEQ ID NO: 226736 - DNA, 673 bp, Homo Sapiens
tccaggtggacttgctcccggtgctcgccgccgcccaggagtccgccgcggctgctgcagcagatgccaaaactgcagccaccgtcgctgccgcgcccccggcccctgccgccgcctctacggtggacacagcggccctgaagcagcctccggcgccccctccgccacccccgccagtgtcggcgcccgcggccgaggccgcgccccccgcctccgccgccactatcgccgcggcggcggccaccgccgtcgtagccccaacctcgacggtcgccgtggccccggtcgcgtctgccttggagaagaagacaaagagcaaggggccctacatctgcgctctgtgcgccaaggagttcaagaacggctacaatctccggaggcacgaagccatccacacgggagccaaggccggccgggtcccctcgggtgctatgaagatgccgaccatggtgcccctgagcctcctgagcgtgccccagctgagcggagccggcgggggagggggagaggcgggtgccggcggcggcgctgccgcagtggccgccggtggcgtggtgaccacgaccgcctcggggaagcgcatcccggagaaccatgcctgcgagatgtgtggcaaggcccttccgcgacgtctaccacctgaaccgacacaagctgtcgcactcggacgaga

SEQ ID NO: 226737 - DNA, 1114 bp, Homo Sapiens
ttggcacccctgattggacagtctcatcaagaaggttggtcaagagctcaagtgtttctgagaatctgggtgatttataagaaacccttagctgaatgcagggtggggagaacgaaagacaaaagcatcttttttcagaagggaaactgaaagaaagaggggaagagtattaaagaccatttctggctgggcagggcactctcagcagctcaactgcccagcgtgaccagtggccacctctgcagtgtcttccacaacctggtcttgactcgtctgctgaacaaatcctctgacctcaggccggctgtgaacgtagttcctgagagatagcaaacatgcccaacagtgagcccgcatctctgctggagctgttcaacagcatcgccacacaaggggagctcgtaaggtccctcaaagcgggaaatgcgtcaaaggatgaaattgattctgcagtaaagatgttggtgtcattaaaaatgagctacaaagctgccgcgggggaggattacaaggctgactgtcctccagggaacccagcacctaccagtaatcatggcccagatgccacagaagctgaagaggattttgtggacccatggacagtacagacaagcagtgcaaaaggcatagactacgataagctcattgttcggtttggaagtagtaaaattgacaaagagctaataaaccgaatagagagagccaccggccaaagaccacaccacttcctgcgcagaggcatcttcttctcacacagagatatgaatcaggttcttgatgcctatgaaaataagaagccattttatctgtacacgggccggggcccctcttctgaagcaatgcatgtaggtcacctcattccatttattttcacaaagtggctccaggatgtatttaacgtgcccttggtcatccagatgacggatgacgagaagtatctgtggaaaggacctgaccctggaccaggcctatagctatgctgtggagaatgccaaggacatcatcgcctgtggctttgacatcaacaagactttcatattctctgacctggactacatggggatgagctcagtttctacaaaatgtggtgaagattcaaaagcatgttaccttc

SEQ ID NO: 226738 - DNA, 1390 bp, Homo Sapiens
ttggagctggctcatccccaggggctggggtctcctggatacaatggagcagatgagccgggaggacatgctggccatctcaacacccgtcttgaccagtctggatgtgccccctgagatgatgcccaccgtcatagatgaatacctaggaagcaactcggacgcacaagccaaatgccaggcgttccaggaattcatgggtgacgtattcatcaatgttcccaccgtcagtttttcaagataccttcgagattctggaagccctgtctttttctatgagttccagcatcgacccagttcttttgcgaagatcaaacctgcctgggtgaaggctgatcatggggccgagggtgcttttgtgttcggaggtcccttcctcatggacgagagctcccgcctggcctttccagaggccacagaggaggagaagcagctaagcctcaccatgatggcccagtggacccactttgcccggacaggggaccccaatagcaaggctctgcctccttggaattcaaccaggcggaacaatatctggagatcaacccagtgccacgggccggacagaagttcagggaggcctggatgcagttctggtcagagacgctccccagcaagatacaacagtggcaccagaagcagaagaacaggaaggcccaggaggacctctgaggccaggcctgaaccttcttggctggggcaaaccactcttcaagtggtggcagagtcccagcacggcagcccgcctctccccctgctgagactttaatctccaccagcccttaaagtgtcggccgctctgtgactggagttatgctcttttgaaatgtcacaaggccgcctcccacctctggggcattgtacaagttcttccctctccctgaagtgcctttcctgctttcttcgtggtaggttctagcacattcctctagcttcctggaggactcactcccccaggaagccttccctgccttctctgggctgtgcggccccgagtctgcgtccattagagcacagtccacccgaggctagcaccgtgtctgtgtctgtctcctcctcagaggagctctctcaaaatggggattagcctaaccccactctgtcacccacaccaggatcgggtgggacctggagctagggggtgtttgctgagtgagtgagtgaaacacagaatatgggaatggcagctgctgaacttgaacccagagccttctgtgccaaagccatactcaggcccccaccgacattgtccaccctgccagaagggtgcatgccaatggcagagacctgggatgggagaagtcctgggcgccagggatccagcctagagcagaccttagcccctgactaaggcctcagactagggcgggaggggtctcctcctctctgc

SEQ ID NO: 226739 - DNA, 1055 bp, Homo Sapiens; identical to SEQ ID NO: 192959
  misc_feature (65)..(85): n is a, c, g, or t

SEQ ID NO: 226740 - DNA, 1002 bp, Homo Sapiens; identical to SEQ ID NO: 192960

SEQ ID NO: 226741 - DNA, 1320 bp, Homo Sapiens
ttggcttttctgggggcatcgcggcgtcccctttttttgcctttaaagtaaaacgtcgccccgacgcaccccccgcgtatttcggggggcggaggcggcgggccacggcgcgaagaggggcggtgctgacgccggccggtcacgtgggcgtgttgtgggggggaggggcgccgccgcgcggtcggttccgggcggttgggagcgcgcgagctagcgagcgagaggcagccgcgcccgccgccgcccctgctctgtatgccgctctctcccggcgcggccgccgccgatcacagcagcaggagccaccgccgccgcggttgatgtggttgggccggggctgaggaggccgccaagatgccgcagtccaagtcccggaagatcgcgatcctgggctaccggtctgtggggaaatcctcattgacgattcaatttgttgaaggccaatttgtggactcctacgatccaaccatagaaaacacttttacaaagttgatcacagtaaatggacaagaatatcatcttcaacttgtagacacagccgggcaagatgaatattctatctttcctcagacatactccatagatattaatggctatattcttgtgtattctgttacatcaatcaaaagttttgaagtgattaaagttatccatggcaaattgttggatatggtggggaaagtacaaatacctattatgttggttgggaataagaaagacctgcatatggaaagggtgatcagttatgaagaagggaaagctttggcagaatcttggaatgcagcttttttggaatcttctgctaaagaaaatcagactgctgtggatgtttttcgaaggataattttggaggcagaaaaaatggacggggcagcttcacaaggcaagtcttcatgctcggtgatgtgattctgctgcaaagcctgaggacactgggaatatattctacctgaagaagcaaactgcccgttctccttgaagataaactatgcttcttttttcttctgttaacctgaaagatatcatttgggtcagagctcccctcccttcagattatgttaactctgagtctgtccaaatgagttcacttccattttcaaattttaagcaatcatattttcaatttatatattgtatttcttaatattatgaccaagaattttatcggcattaatttttcagtgtagtttgttgtttaaaataatgtaatcatcaaaatgatgcatattgttacactactattaactaggcttcagtatatcagtgtttatttcattgtgttaaatgtatacttgtaaataaaatagctgcaaacctccc

SEQ ID NO: 226742 - DNA, 986 bp, Homo Sapiens
tttgtacaaaaaagttggcaccaaaatacctgctcgagtcttaggttactgtcatcaaagacttgggatgactccattatatcctggggttgtgggtattagaactaaatatggaggtcctgagcatggggactggcgtcctcagtaggtgtttgggaatatgggaagggtctcctatttattcaatagagttttctcagttattttcctcctttgcccttgcaatctccagcaaaaggtgggatctaggaagaaagaatccagtgtagaagttgagaagaacttgaacgttttggttctggataaggtcactgtcctaggtgctaggtggaccgagcaaaagactcagtggatgaactggtgcagtgcctgacagaataaagaacagtattaatccctttgagaaagcatagtccagcaggacagtggccatttggacagaagcccacttagtttcttgggagcaacagcacgtatcagaagccagacttgctcttcggtcatgcactttgggatacagcgtataggtgcagccctgtcacaacaccaacagaagtagcagcctctgggtgcagtcacccacaccccaaagctggaaggatctggttcaacatagcacaaacccttaggaaaaatgaaattaacatcactgatgtgtaatccagtaaaatctccctttttcgggtgtgtatgtgggcatgtgcccatttctatgtgtgtgtctacgtgcagctcactaccaacagcctcatgtgcacttgacctgacagtgctcgctgagaactctcaccaggttggcgcctgaatgccttactctcagcagtcagaggcttgcttgctctgtgcagatttttaattttcttttttgggccctaggctggttggggacctctacagcttcattctttcaccattaaatagtggccctttttcagtattttccctcttcccctttataaatatgctaaagccacaaagcacatttt

SEQ ID NO: 226743 - DNA, 1400 bp, Homo Sapiens; identical to SEQ ID NO: 192963

SEQ ID NO: 226744 - DNA, 648 bp, Homo Sapiens
ctttgtacaaaaaagttggattacatctcccccatcggaattgatttcaagatccgcactgtggatatagaggggaagaagatcaaactacaagtctgggacacggctggccaagagcggttcaagacaataactactgcctactaccgtggagccatgggcattatcctagtatacgacatcacggatgagaaatctttcgagaatattcagaactggatgaaaagcatcaaggagaatgcctcggctggggtggagcgcctcttgctggggaacaaatgtgacatggaggccaagaggaaggtgcagaaggagcaggccgataatttggctcgagagcatggaatccgatttttcgaaactagtgctaaatccagtatgaatgtggatgaggcttttagttccctggcccgggacatcttgctcaagtcaggaggccggagatcaggaaacggcaacaagcctcccagtactgacctgaaaacttgtgacaagaagaacaccaacaagtgctccctgggctgaggaccctttcttgcctccccaccccggaagctgaacctgagggagacaacggcagagggagtgagcaggggagaaatagcagaggggcttggagggtcacataggtagatggtaaaagagaat

SEQ ID NO: 226745 - DNA, 834 bp, Homo Sapiens; identical to SEQ ID NO: 192964

SEQ ID NO: 226746 - DNA, 984 bp, Homo Sapiens
ttggcgccccggggccgcgcggctgcctgggaggctccgggccagccgcggtccagagcgcgcgaggttcggggagctccgccaggctgctggtacctgcgtccgcccggcgagcaggacaggctgctttggtttgtgacctccaggcaggacggccatcctctccagaatgaagatcttcttgccagtgctgctggctgcccttctgggtgtggagcgagccagctcgctgatgtgcttctcctgcttgaaccagaagagcaatctgtactgcctgaagccgaccatctgctccgaccaggacaactactgcgtgactgtgtctgctagtgccggcattgggaatctcgtgacatttggccacagcctgagcaagacctgttccccggcctgccccatcccagaaggcgtcaatgttggtgtggcttccatgggcatcagctgctgccagagctttctgtgcaatttcagtgcggccgatggcgggctgcgggcaagcgtcaccctgctgggtgccgggctgctgctgagcctgctgccggccctgctgcggtttggcccctgaccgcccagaccctgtcccccgatcccccagctcaggaaggaaagcccagccctttctggatcccacagtgtatgggagcccctgactcctcacgtgcctgatctgtgcccttggtcccaggtcaggcccaccccctgcacctccacctgccccagcccctgcctctgccccaagtggggccagctgccctcacttctggggtggatgatgtgaccttccttgggggactgcggaagggacgagggttccctggagtcttacggtccaacatcaggaccaagtcccatggacatgctgacagggtccccagggagaccgtgtcagtagggatgtgtgcctggctgtgtacgtgggtgtgcagggcacgtgagagcacgtggcggcttctgggggccatgtttggggaagggaggtgtgcc

SEQ ID NO: 226747 - DNA, 666 bp, Homo Sapiens
ctttgtacaaaaaagttggcatgtttgaagaagtgccgattgtaattaaaaattcacatctgatcaatgtcctaatgtgggaacttgaaaagaagtcagctgttgcagataaacatgaattgctcagccttgccagcagcaatcatttggggaagaatctacagttgctgatggacagagtggatgaaatgagccaagatatagttaaatacaacacatacatgaggaatactagtaaacaacagcagcagaaacatcagtatcagcagcgtcgccagcaggagaatatgcagcgccagagccgaggagaacccccgctccctgaggaggacctgtccaaactcttcaaaccaccacagccgcctgccaggatggactcgctgctcattgcaggccagataaacacttactgccagaacatcaaggagttcactgcccaaaacttaggcaagctcttcatggcccaggctcttcaagaatacaacaactaagaaaaggaagtttccagaaaagaagttaacatgaactcttgaagtcacaccagggcaactcttggaagaaatatatttgcatattgaaaagcacagaggatttctttagtgtcattgccgattttggctataacagtgtctttctagccataataaaataaaacaaaatcttgaa

SEQ ID NO: 226748 - DNA, 1282 bp, Homo Sapiens; identical to SEQ ID NO: 192967

SEQ ID NO: 226749 - DNA, 778 bp, Homo Sapiens; identical to SEQ ID NO: 192968

SEQ ID NO: 226750 - DNA, 945 bp, Homo Sapiens
gcttttcctataatgccaactttgtacaaaaaagttggccagctcctgtgcctgccagtcggtgcccctcccgctccagccatgctctccgccctcgcccggcctgtcagcgctgctctccgccgcagcttcagcacctcggcccagaacaatgctaaagtagctgtgctaggggcctctggaggcatcgggcagccactttcacttctcctgaagaacagccccttggtgagccgcctgaccctctatgatatcgcgcacacacccggagtggccgcagatctgagccacatcgagaccaaagccgctgtgaaaggctacctcggacctgaacagctgcctgactgcctgaaaggttgtgatgtggtagttattccggctggagtccccagaaagccaggcatgacccgggacgacctgttcaacaccaatgccacgattgtggccaccctgaccgctgcctgtgcccagcactgcccggaagccatgatctgcgtcattgccaatccggttaattccaccatccccatcacagcagaagttttcaagaagcatggagtgtacaaccccaacaaaatcttcggcgtgacgaccctggacatcgtcagagccaacacctttgttgcagagctgaagggtttggatccagctcgagtcaacgtccctgtcattggtggccatgctgggaagaccatcatccccctgatctctcagtgcacccccgaggtggactttccccaggaccagctgacagcactcactgggcggatccaggaggccggcacggaggtggtcaaggctaaagccggagcaggctctgccaccctctccatggcgtatgccggcgcccgctttgtcttctcccttgtggatgcaatgaatggaacggaacgtgttgtggaatgtttcttcgttaagtcccaggaaaacggaatgtacctactt

SEQ ID NO: 226751 - DNA, 1054 bp, Homo Sapiens; identical to SEQ ID NO: 192970

SEQ ID NO: 226752 - DNA, 893 bp, Homo Sapiens
ttgggctcggtaccaggcgcagatcatggcaggcagccggctggaaaccgtagggagcatcttctctcggactcgggacctggttcgggccggggtgctgaaggagaagcccctgtggtttgacgtatatgacgcctttcccccgctgagggagcccgtcttccaaaggcctcgagtgcgatatggcaaagccaaagctcccatccaagacatctggtaccacgaggatcggattagagcgaagttttattcagtgtatgggtctggtcaaagagcttttgatctattcaatccaaacttcaagtctacctgtcaacggtttgtggagaagtacactgagctacagaaacttggagaaacagatgaagagaagttatttgtggaaacagggaaggctttattggcagaaggtgtcattttaagacgagtaggcgaagcaaggactcaacacggaggtagtcacgtttcccggaaatccgaacacttgagtgtcagaccacagactgcgttggaagaaaacgagactcagaaagaagttccacaggaccagcatttggaggcacctgcagaccagtcgaaaggtctcttgcctccctgaaagacctgtatactgtgtatgctggcattcacactctactcactggctgaatgttgagctatttttaaacagttgaactgtgtaaatgtttcttgatctctaaggtattatgtttgccttctcttagttatttctgggttgtcacaaagctcagtatcatggtttgacagaaacagttatgtgaacttttatgttaggacattactaaataaagaattccctagctgcttataaagtaatttactttgaattgtaaataacatgaagaaacctttataaagattgttcaaatggg

SEQ ID NO: 226753 - DNA, 1065 bp, Homo Sapiens; identical to SEQ ID NO: 192971

SEQ ID NO: 226754 - DNA, 1242 bp, Homo Sapiens; identical to SEQ ID NO: 192972

SEQ ID NO: 226755 - DNA, 891 bp, Homo Sapiens
ttggggaaggagccggctacagggtggtgtttgagaagggcggagtgtacctgcacaccagcgctaagaagtatcaggaccgagactctctcatcgctggtgtcatccgtgtcgtggaaaaggacaatgacgtcctcctgcactgggctcctgtagaggaggctggagattccacccaaatcctcttctccaagaaggactccagtgggggtgactcatgtgcttctgaggaggaaccaacctttgaccccggctatgaacctgactgggctgtcatcagcactgtgcggccacagctctgccactcagagcccacgagaggtgcagagcccagctgcccccagggctcctgggccttctcagtgagtctgggggagctaaagtccatccgccgctccaagccaggcctcagctgggcctacctggttctggtgacccaggctggaggttccctgcccgcactgcacttccaccgcgggggcacccgcgccctgctccgcgtcctcagccgctacctgctgttggccagctccccgcaggactcccgcctctaccttgtcttcccccacgactcctctgctctctccaactccttccaccacctgcagctctttgaccaggacagctccaatgtggtgtcacgcttcctccaggatccctactccaccaccttcagcagcttctcccgagtgaccaacttcttccggggtgccctgcagccacagcctgagggagccgcctccgaccttcccccgccacccgacgatgagcccgagcctggattcgaggtcatttcctgtgtggagctggggcctcggccaaccgtggagcggggccctccagttacagaggaggagtgggcacgccacgtgggcccttgaaggtcgcctg

SEQ ID NO: 226756 - DNA, 735 bp, Homo Sapiens
ttggcctccgtgccacaaggacaggacctgcagtatatcttcatcccctcagacatccgcgactatgtgatgctgagatcggccattctgggcgtgcctgtccctgagggcctagataaaggggacaggccgcacgcctattttggaccagaagcctctgccagtaaattcaagctgctacatccggacttcatcagctacctgacagaaaggttcttgaaatcaaagttgattaacacacattttggagacctatatatgcctagtaccggggctctcatgctgctgacagctttgcatacctgtgaccaggtcagtgcctatggattcatcacaagcaactactggaaattttccgaccactatttcgaacgaaaaatgaagccattgatattttatgcaaaccacgatctgtccctggaagctgccctgtggagggacctgcacaaggccggcatccttcagctgtaccagcgctgaccccaatgcactgagccctttgcttcttcaagagttgcggccctgatcctctcaagtggccaaaagcttttttaacttttcaatcttcaccttcccttgccaacagagggcactggggtgaattcaagattttcatcgaggtctgttcaatataagacaccccagcttgtccttggctcatccaagaactcttctgtatctaaaacaatacatctcaaacttggccaagggaaaatggactgctttgctggattg

SEQ ID NO: 226757 - DNA, 1166 bp, Homo Sapiens
ctttgtacaaaaaagttgggtcggtaacagcccgaattatcggtgacccatcactacatggagatgtttggtcgtggctggaattcttcctcacgtcaattttcagtgctctttgggtgctccccttgtttgtgcttagcaaagtggtgaatgccatttggtttcaggatatagctgacctggcatttgaggtatcagggaggaagcctcacccattccctagtgtcagcaaaataattgctgacatgctcttcaaccttttgctgcaggctcttttcctcattcagggaatgtttgtgagtctctttcccatccatcttgtcggtcagctggttagtctcctgcatatgtcccttctctactcactgtactgctttgaatatcgttggttcaataaaggaattgaaatgcaccagcggttgtctaacatagaaaggaattggccttactactttgggtttggtttgcccttggcttttctcacagcaatgcagtcctcatatattatcagtggctgccttttctctatcctctttcctttattcattatcagcgccaatgaagcaaagacccctggcaaagcatatctcttccagttgcgcctcttctccttggtggtcttcttaagcaacagactcttccacaagacagtctacctgcagtcggccctgagcagctctacttctgcagagaagttcccttcaccgcatccgtcgcctgccaaactgaaggctactgcaggtcactgagttgcctgccatccaaaggggatgggcgggattggaagaagctgtggcagctcttttccctgttcacctcccgcctgccagggaaggcaggacccgctctgccaagggccctctgcgtattcccttctctctgaggaattgaaatttttgtctctggtgcacgtaaggcagaatgttccctgacaccagtgtgtggatttttaacatcaccgtgagtctgaaaggaccacaggtttttctgcagctattttctagcatttgccagtccctgtgcctggactgattgggaacactttgtttttctccctgtgccatttacccttccacctttccatcctgccttctaccaacccttggatgaatggattttgtatttctagctgttgtattttgtgaatttgttaattttgttgtttt

SEQ ID NO: 226758 - DNA, 1156 bp, Homo Sapiens; identical to SEQ ID NO: 192974
  misc_feature (922)..(957): n is a, c, g, or t

SEQ ID NO: 226759 - DNA, 1233 bp, Homo Sapiens; identical to SEQ ID NO: 192975

SEQ ID NO: 226760 - DNA, 1023 bp, Homo Sapiens
gcccagaagatatgcagcagctgtagaactcccatcatggaattgaagaagtaatagccaaagaaggcaggatagagctccagtgggtacaccagggtgcaatgcaggatccagaagggcaggatgaccagtcgggtgatgataaaaacaatggcgaagacgatgaagatgttgttgcaggtgttcttccatcccgcgtagttaaacatcttggctgactccagcaggtaatcggaagagtcatgcagagccatgattagagtcccagctcggatgtaattggcaaaccaggaaaagctgatgagaatgatggtggccacatggtggatgatctgttccttgaaatcctttcgcttgacatcagaggcaatgctgaagagcagggaccagtagaaggaaagttcaatcatgtagtaccaatactgggaagggatagtgctctgtatgggatatccctcccaaactttcttcatgtcatagaaccagggtttatccacaatgacggccatgccggcaatgaaggcaatcaggtaaaatgtgaatctccagctggcttctcggaacttcttgaggagactgggccggtcctggttgcggcggcgacggaaccaacgctctacctggcggccagagagcccgctctgccgggacaaaagctctacttccacctgcttgggctgcttgccactggtcaggtagaaatgttccaaggtggcgttgggaggtgcccgcagccgagttttctcctttatgttcaagagggcagccagtggtgtagccacgtacagctcaaagaagtatcgaacgatgaggaagagcaaggccaggggcagcgtgatatagagatctgaggctttggcgtagacacgtccatctcggtcttctagatcggcccaggtcaagttcacaggcagccacagacgttcccaccagaagtaatcatacaaggtctggagcatcccggcggcagcgttggcggggccggggccgctgctccgtgtactccgtgtgctcgggtgccaa

SEQ ID NO: 226761 - DNA, 1209 bp, Homo Sapiens; identical to SEQ ID NO: 192976
  misc_feature (1092)..(1136): n is a, c, g, or t

SEQ ID NO: 226762 - DNA, 1390 bp, Homo Sapiens; identical to SEQ ID NO: 192977

SEQ ID NO: 226763 - DNA, 1148 bp, Homo Sapiens
ttgggaggcagaaatggaggaacgggcgttcgtcaaccccttcccggactacgaggccgccgccggggcgctgctcgcctccggagcggccgaagagacaggctgtgttcgtcccccggcgaccacggatgagcccggcctcccttttcatcaggacgggaagatcattcataatttcataagacggatccagaccaaaattaaagatcttctgcagcaaatggaagaagggctgaagacggctgatccccatgactgctctgcttatactggctggacaggcatagcccttttgtacctgcagttgtaccgggtcacatgtgaccaaacctacctgctccgatccctggattacgtaaaaagaacacttcggaatctgaatggccgcagggtcaccttcctctgtggggatgctggccccctggctgttggagctgtgatttatcacaaactcagaagtgactgtgagtcccaggaatgtgtcacaaaacttttgcagctccagagatcggttgtctgccaagaatcagaccttcctgatgagctgctttatggacgggcaggttatctgtatgccttactgtacctgaacacagagataggtccaggcaccgtgtgtgagtcagctattaaagaggtagtcaatgctattattgaatcgggtaagactttgtcaagggaagaaagaaaaacggagcgctgcccgctgttgtaccagtggcaccggaagcagtacgttggagcagcccatggcatggctggaatttactatatgttaatgcagccggcagcaaaagtggaccaagaaaccttgacagaaatggtgaaacccagtattgattatgtgcgccacaaaaaattccgatctgggaattacccatcatcattaagcaatgaaacagaccggctggtgcactggtgccacggcgccccgggggtcatccacatgctcatgcaggcgtacaaggtctttaaggaggagaagtacttgaaaagaggccatggagtgtagcgatgtgatttggcagcgaggtttgctgcggaagggctacgggatatgccatgggactgctggcaacggctaatcctttcctgtccctttaccgtctcacgcaggataaaaatacctctaccgagcttgcaagttt

SEQ ID NO: 226764 - DNA, 1436 bp, Homo Sapiens; identical to SEQ ID NO: 192980
  misc_feature (198)..(229): n is a, c, g, or t
  misc_feature (231)..(254): n is a, c, g, or t
  misc_feature (294)..(343): n is a, c, g, or t

SEQ ID NO: 226765 - DNA, 940 bp, Homo Sapiens; identical to SEQ ID NO: 192986

SEQ ID NO: 226766 - DNA, 1340 bp, Homo Sapiens
  misc_feature (767)..(775): n is a, c, g, or t
ttggcttaaaggcattgaacagtcgtcgtattattcccagaccatttgtagctcaaaaacttgcatcaagtgatgactttatatctcaaaatgttatacctcttgaagcataccgtaatggcctaaagactgaagctctgtcagtgtctgcatcagaagaagaagggctgaatttcttaaatgaatatgatgaaacaaaaccagaactgcccagtgggaaaaagaatcagtctcttacactcatagaacttcttaaaaataaaaggatgggagaagaaaggaattctgctatttctcctcaaaagatccataatcagacagcaagaaagagattcgttcagaaatgcgttcttccattaaatgaggatagtccgttgatgtatcagccacaaaaaatggacttgactatgcactcagccttagattgtaagcaaaagaaatcaaggtcaagatctggaagcaagaagaaaatgctaacattacctcatggtgctgacgaggtttacattctccgatgcaggttttgtggcctagtctttcgaggacccttgtctgttcaggaagactggattaagcacttacaacgacatattgtaaacgctaatcttccacggactggagctggcatggtggaagtcacgtcactacttaaaaagcctgcctccattacagaaacttcattttctctactaatggccgaagcagcttcatagaaccaggaaaccttttaaatagccagtttgaattggatgtaaatttgaaattcnnnnnnnnnaagccacattaaattatctgtttataaatactaaagcaggaaaatggggggaaagtgaattacagtgacatcagagcaaattgaatacttaaaacagtaagtagtctatatattttatatagggtggaagatgtgtttttaaggtttatgaagttttgttggttaactgtgttcactcagtaaaagagcagtacatgtaagcagccattaataaactgttgcacatggatacttatagacagacttattggacaattatgttttttgcagtgttaccagaatcaaggctctgtttattccccacaagacttgcatagaaaaataagatattatattttgtatgtatgtatttagtgttttgtataataccaagaaccgctgactaaatttactcaaattaagcattaaatatcatgtacttcatagtttgagactgttcactcaaatagggcagagtactattctatctagatgtgtaagtgttttttgtaggatcacatggaacggttttgtttatactaaaagtggagggagatttgtttaaaacaagtaattctaaaagaaa

SEQ ID NO: 226767 - DNA, 1106 bp, Homo Sapiens; identical to SEQ ID NO: 192990

SEQ ID NO: 226768 - DNA, 963 bp, Homo Sapiens
ttggcgcagcggcgcagaggaggtcagctgcgggagcgtttccggggacggtgccgccatgagattgaccccgcgcgcgctgtgcagcgccgcccaggccgcctggcgggagaacttccccctgtgcggtcgcgacgtggcgcgctggttcccgggccacatggccaaggggctgaagaagatgcagagcagcctgaagctggtggactgtatcatcgaggtccacgatgcccggatcccactttcaggccgcaaccctctgtttcaggaaacccttgggcttaagcctcacttgctggtcctcaacaagatggacttggcggatcttacagagcagcagaaaattatgcaacacttagaaggagaaggcctaaaaaatgtcatttttaccaactgtgtaaaggatgaaaatgtcaagcagatcatcccgatggtcactgaactgattgggagaagccaccgctaccaccgaaaagagaacctggagtactgtatcatggtcattggggtccccaacgtgggcaagtcctccctcatcaactccctccggaggcagcacctcaggaaagggaaagccaccagggtgggtggcgagcctgggatcaccagagctgtgatgtccaaaattcaggtggagtcctcaggggccaggcccagcactctgtcaagagctctgcaggcgtctggcacctgccgacctctgtgtggcttccggctgctgaccacgcttccctcccctccactcagtgtccccgctgagcacccccggggcaggcactgcccctgcccttattccacagtcgtcatagtctttgcgccaaacctttggggaaggcacgctgttttccccatttcagatgaggaggccactgtccagggccatgcagtggtcaggacagacctgaatgtggcgccccccgccccaccctccactcccttccttgtgttctcttgggagcagaa

SEQ ID NO: 226769 - DNA, 663 bp, Homo Sapiens
  misc_feature (482)..(506): n is a, c, g, or t
tacagcagcacgcacaggttggctgtatgcgaagcgtggtagacaaactagtagaggccggtgactttgcaggtgaacttgccagtgctcgtgtcataatctccctgcgggttggtgaggaccgcgttgaatctgatcaggctgttgggtgcagggggctggtgggtctgccgagtgaccgtgaacactgactggaatttctgcttgtatctgccctcctcacctggctctccagggatgcccatggggccgggcacccctggcatcccagggggtcccatggggccatttttcccaggatggccgggtaagccgggttctcccttctgccctctgggtcctcggatcccgggaatggctgggattcctggctcccccttgggccccggcagtccgttgtacccatccttccctggtgccccaggcaggccgggcatccctgggatcccgtagcagcctgtgttggcttggcccctgagggnnnnnnnnnnnnnnnnnnnnnnnnnttcagcccaaggtggggcagggagctgggccccacgtccatcccggagaaggaactgcaggtgggcggtttctggcctggcacagagatgtcctcagatctgcttcccctctcccaggcaagaggacacggtgtctgagtggtcagagcaaggccaa

SEQ ID NO: 226770 - DNA, 586 bp, Homo Sapiens; identical to SEQ ID NO: 192992

SEQ ID NO: 226771 - DNA, 643 bp, Homo Sapiens; identical to SEQ ID NO: 192993
  misc_feature (129)..(154): n is a, c, g, or t

SEQ ID NO: 226772 - DNA, 970 bp, Homo Sapiens; identical to SEQ ID NO: 192994

SEQ ID NO: 226773 - DNA, 1265 bp, Homo Sapiens
ttggcacataccgctccaagggctttgacgtcacagtgaagtacacacaaggaagctggacgggcttcgttggggaagacctcgtcaccatccccaaaggcttcaatacttcttttcttgtcaacattgccactatttttgaatcagagaatttctttttgcctgggattaaatggaatggaatacttggcctagcttatgccacacttgccaagccatcaagttctctggagaccttcttcgactccctggtgacacaagcaaacatccccaacgttttctccatgcagatgtgtggagccggcttgcccgttgctggatctgggaccaacggaggtagtcttgtcttgggtggaattgaaccaagtttgtataaaggagacatctggtatacccctattaaggaagagtggtactaccagatagaaattctgaaattggaaattggaggccaaagccttaatctggactgcagagagtataacgcagacaaggccatcgtggacagtggcaccacgctgctgcgcctgccccagaaggtgtttgatgcggtggtggaagctgtggcccgcgcatctctgattccagaattctctgatggtttctggactgggtcccagctggcgtgctggacgaattcggaaacaccttggtcttacttccctaaaatctccatctacctgagagacgagaactccagcaggtcattccgtatcacaatcctgcctcagctttacattcagcccatgatgggggccggcctgaattatgaatgttaccgattcggcatttccccatccacaaatgcgctggtgatcggtgccacggtgatggagggcttctacgtcatcttcgacagagcccagaagagggtgggcttcgcagcgagcccctgtgcagaaattgcaggtgctgcagtgtctgaaatttccgggcctttctcaacagaggatgtagccagcaactgtgtccccgctcagtctttgagcgagcccattttgtggattgtgtcctatgcgctcatgagcgtctgtggagccatcctccttgtcttaatcgtcctgctgctgctgccgttccggtgtcagcgtcgcccccgtgaccctgaggtcgtcaatgatgagtcctctctgggcagacatcgctggaaatgaatagccaggcctgacctcaagcaaccatgaactcagctattaagaaaatcacatttccagggcagcagccgggatcgatggtggcgctttctccctgtgcccacccgtctt

SEQ ID NO: 226774 - DNA, 1146 bp, Homo Sapiens
ctttgtacaaaaaagttggggcttcgggggccagccgccgccatgatcctgctggaggtgaacaaccgcatcatcgaggagacgctcgcgctcaagttcgagaacgcggccgccggaaacaaaccggaagcagtagaagtaacatttgcagatttcgatggggtcctctatcatatttcaaatcctaatggagacaaaacaaaagtgatggtcagtatttctttgaaattctacaaggaacttcaggcacatggtgctgatgagttattaaagagggtgtacgggagtttcttggtaaatccagaatcaggatacaatgtctctttgctatatgaccttgaaaatcttccggcatccaaggattccattgtgcatcaagctggcatgttgaagcgaaattgttttgcctctgtctttgaaaaatacttccaattccaagaagagggcaaggaaggagagaacagggcagttatccattatagggatgatgagaccatgtatgttgagtctaaaaaggacagagtcacagtagtcttcagcacagtgtttaaggatgacgacgatgtggtcattggaaaggtgttcatgcaggagttcaaagaaggacgcagagccagccacacagccccacaggtcctctttagccacagggaacctcctctggagctgaaagacacagacgccgctgtgggtgacaacattggctacattacctttgtgctgttccctcgtcacaccaatgccagtgctcgagacaacaccatcaacctgatccacacgttccgggactacctgcactaccacatcaagtgctctaaggcctatattcacacacgtatgcgggcgaaaacgtctgacttcctcaaggtgctgaaccgcgcacgcccagatgccgagaaaaaagaaatgaaaacaatcacggggaagacgttttcatcccgctaatcttgggaataagaggaggaagcggctggcaactgaaggctggaacacttgctactggataatcgtagcttttaatgttgcgcctcttcaggttcttaagggattctccgttttggttccattttgtacacgtttggaaaataatctgcagaaacgagctgtgcttgcaaagacttcatagttcccaagaattaaaaaaaa

SEQ ID NO: 226775 - DNA, 1291 bp, Homo Sapiens
ttgggatattcatgattctattcaaccaaggtctgtggataacagaccacaagcaccactggtttctgcgtctgctgttaatgaagaagtcagcaaaattaaatctacagcaaaatttccagaacaaaaattgtttgctgccctgttgattaaatgtgttgtgcagctggaactcatccagactatcgacaacattgtcttcttcccagccacaagtaagaaagaagatgcagaaaacttagctgcagcacagagagatgcggtggactttgatgttcgcgttgatactcaagaccaaggaatgtaccgctttttaacatcacaacaactttttaagctactggactgcttattagagtcacatagatttgcaaaagcgtttaattccaacaacgaacagaggactgccctgtggaaagcaggattcaaaggcaaatccaagcccaaccttctgaagcaggagaccagcagcctggcctgtgggctgcgcattctcttccggatgtacatggatgagagccgcgttagtgcctgggaggaggtccagcagaggcttttgaatgtctgcagtgaagcactaagttacttcctcactctaacatcagaaagtcatcgagaagcctggactaacttactgcttttgtttctaactaaagttctaaagataagtgataataggtttaaagctcatgcatcattctactaccctctcttatgtgaaattatgcaatttgacttgattcctgaacttcgtgctgttcttagaagattttttctgcgaatcggagtagtttttcagatatcacaaccacctgaacaggaacttggaataaacaagcaatgatgggaacttaatatttttgttggcatttacatccctctgctctttaaaaggacgctggagctgaggtttcctacctgaaaaatgatttctctggattgcagtgtctgagttactggtaaagatgcttagaagtcttactcaaacttgcaacactccagtcccttttagtgctggtggattttgtgtgttatattggcctcatgttgagcagaaagcctgtttaaacagtgtcagctcatgctcacgggtccttccctgtcttccacggcaggaaaagccccacgtttttggcaggtgtggaagtgaaacttacccaaagaactatagatgtaaagattgaacttctacaagaagtacaactcagagagctgtattttgaagataaaatgtttataattggggagtggggagagaagaagaaattattgttcatggtaaagatattta

SEQ ID NO: 226776 - DNA, 1402 bp, Homo Sapiens
acaaaaaagttgggtctcttccttctcccgctctggcggaggctttgtcgctgcgggctgggccccagggtgtcccccatggcggggccgcgggtggaggtcgatggcagcatcatggaagggggcggccagatcctgagagtctctacggccttgagctgtctcctaggcctccccttgcgggtgcagaagatccgagccggccggagcacgccaggcctgaaggcctcaacatttatctggactggaaatgattcgagatttgtgtgatgggcaactggagggggcagaaattggctcaacagaaataacctttacaccagagaagatcaaaggtggaatccacacagcagataccaagacagcagggagtgtgtgcctcttgatgcaggtctcaatgccgtgtgttctctttgctgcttctccatcagaacttcatttgaaaggtggaactaatgctgaaatggcaccacagatcgattatacagtgatggtcttcaagccaattgttgaaaaatttggtttcatatttaattgtgacattaaaacaaggggatattacccaaaagggggtggtgaagtgattgttcgaatgtcaccagttaaacaattgaaccctataaatttaactgagcgtggctgtgtgactaagatatatggaagagctttcgttgctggtgttttgccatttaaagtagcaaaagatatggcagcggcagcagttagatgcatcagaaaggagatccgggatttgtatgttaacatccagcctgttcaagaacctaaagaccaagcatttggcaatggaaatggaataataattattgctgagacctccactggctgtttgtttgctggatcatcgcttggtaaacgaggtgtaaatgcagacaaagttggaattgaagctgccgaaatgctattagcaaatcttagacatggtggtactgtggatgagtatctgcaagaccagctgattgttttcatggcattagccaatggagtttccagaataaaaacaggaccagttacactccatacgcaaaccgcgatacattttgctgaacaaatagcaaagggtaaatttattgtgaagaaatcagaagatgaagaagacgccgctaaagatacttatattattgaatgccaaggaattgggatgacaaattcaaatctatagagtatttgcctcttaaatgatacctccttgatatattgcactatttcataaatactataaaataatggcttggaagtaacttattaaagggtatgacttaaatttgaagatgaagtaccgtgttttaggtttgctgagaagggttccttaaaataatttccctttgaatatttcctgagagatgggcaatgaaatatcagttggtgggtatgtgtgataggt

SEQ ID NO: 226777 - DNA, 1281 bp, Homo Sapiens
  misc_feature (700)..(712): n is a, c, g, or t
  misc_feature (1120)..(1128): n is a, c, g, or t
ctttgtacaaaaaagttgggttacagaaaccccttgcgaggagcacgaactcaggaacgtgtattgattgagattttgtgcacaagaacaaatcaggaaatccgagaaattgtcagatgttatcagtcagaatttggacgagaccttgaaaaggacattaggtcagatacatcaggacattttgaacgtttacttgtgtccatgtgccagggaaatcgtgatgagaaccagagtataaaccaccaaatggctcaggaagatgctcagcgtctctatcaagctggtgaggggagactagggaccgatgaatcttgctttaacatgatccttgccacaagaagctttcctcagctgagagctaccatggaggcttattctaggatggctaatcgagacttgttaagcagtgtgagccgtgagttttccggatatgtagaaagtggtttgaagaccatcttgcagtgtgccctgaaccgccctgccttctttgctgagaggctctactatgctatgaaaggtgctggcacagatgactccaccctggtccggattgtggtcactcgaagtgagattgaccttgtacaaataaaacagatgttcgctcagatgtatcagaagactctgggcacaatgattgcaggtgacacgagtggagattaccgaagacttcttctggctattgtgggccagtaggagggannnnnnnnnnnnnaatgaaaaaaaatttctattcatagcttatccttcagagcaatgacctgcatgcagcaatatcaaacatcagctaaccgaaagagctttctgtcaaggaccgtatcagggtaatgtgcttggtttgcacatgttgttattgccttaattctaattttattttgttctctacatacaatcaatgtaaagccatatcacaatgatacagtaatattgcaatgtttgtaaaccttcattcttactagtttcattctaatcaagatgtcaaattgaataaaaatcacagcaatctctgattctgtgtaataatattgaataattttttagaaggttactgaaagctctgccttccggaatccctctaagtctgcttgatagagtggatagtatgttaaaactgtgtactttnnnnnnnnnttcaacctttacatctagaataatttgcatctcattttgcctaaattggttctgtattcataaacactttccacatagaaaatagattagtattacctgtggcaccttttaagaaagggtcaaatgtttatatgcttaagatacatagcctac

SEQ ID NO: 226778 - DNA, 951 bp, Homo Sapiens; identical to SEQ ID NO: 192999

SEQ ID NO: 226779 - DNA, 812 bp, Homo Sapiens; identical to SEQ ID NO: 193000
  misc_feature (301)..(313): n is a, c, g, or t

SEQ ID NO: 226780 - DNA, 398 bp, Homo Sapiens; identical to SEQ ID NO: 193001

SEQ ID NO: 226781 - DNA, 1009 bp, Homo Sapiens
tgtacaaataagatggcggggaagaagaatgttctgtcgtctctcgcagtttacgcggaagattcagagcccgagtctgatggcgaggctggaatcgaggcggtgggcagcgcggctggaagatgacgattcagagactgaaaaacctgaggctgatgacccaaaggataatacagaagcagaaaagcgagacccccaggaactcgtggcctccttttctgaaagagttcggaacatgtcgcctgatgaaatcaagatcccgccagaaccccctggcagatgttcaaatcacttgcaagacaagatccagaagctttatgaacgaaagataaaggagggaatggatatgaactacattatccaaaggaagaaagaatttcggaaccctagcatctacgagaagctgatccagttctgtgccattgacgagcttggcaccaactacccaaaggatatgtttgatccccatggctggtctgaggactcctactatgaggcattagccaaggcccagaaaattgagatggacaaattggaaaaggccaaaaaggagcgaacaaaagcttgttgcagggacgtgtctgcagcgcctggggaccggagctgtccttcccctgtgcgggcgggcaccgcctcctcctgggtgtgaggaggaggggcctggccaaacggttctgggcatgtgaggtggggcggtgggcggggggtgccgggcatgtgcagagacctggtgatgccgggagggatacagtactgtttggaaagttcttttaagagtgaaaagcccctttgggttcttcttagacatctcgccctaccccagatgggcagagcagagttcatttccaatgcctcttttgtgtagtgccaagctcctgtcccccaggagctgacggatggcaaaaagctgtggacacccagctttgcctggtcttattctcttccctctccctctccagattgagtttgtgacgggcaccaaaaaaggcaccacgaaccaacgccacgt

SEQ ID NO: 226782 - DNA, 1146 bp, Homo Sapiens
ttggcttggatatcattggccatgtttcaatcgaatggagccactgggccccaacactggctttgagatttagagtcaaagggtagagtgaacaggaaagggtcacgtggtcccatgttgcaacagccccaacatcacgcatgtcattcactgccttgccactccatctccctccgtgctccagccacccctgagctgaggctcccattgtctccatcagagcctgcatgtgtatgccgtcctcccctggtccggtgtttgtgttccccacccctcacagactgcctgagctcttctgtaagctggggtagggtgatggcagtgctccgggaactgggcctgcagccttcctcttctgggactgctgtgaggcagaggaatgatggagaatctagtgtagcagcctccaggcaggattcagcacaacactggggagtcacccttccctcgggcctctgcctaccaacaactgggcttatcactgggaaaacacaaaaaattacacaacccagcaacaacaaaagaactagtcctcttagaatttcttgcgctttgatttttttagggcttgtgccctgtttcacttatagggtctagaatgcttgtgttgagtaaaaaggagatgcccaatattcaaagctgctaaatgttctctttgccataaagactccgtgtaactgtgtgaacacttgggatttttctcctctgtcccgaggtcgtcgtctgctttcttttttgggtttctttctagaagattgagaagtgcatatgacaggctgagagcacctccccaaacacacaagctctcagccacaggcagcttctccacagccccagcttcgcacaggctcctggagggctgcctgggggaggcagacatgggagtgccaaggtggccagatggttccaggactacaatgtctttatttttaactgtttgccactgctgccctcacccctgcccggctctggagtaccgtctgccccagacaagtgggagtgaaatgggggtggggggaagcactgattcccagttagggggtgcctaactgagcagtagggatagaaggtgtgaacctgggagtgcttttataaattattttccttgtagattttatttttaatttatctctgtgacctgccagg

SEQ ID NO: 226783 - DNA, 951 bp, Homo Sapiens; identical to SEQ ID NO: 193013
  misc_feature (153)..(161): n is a, c, g, or t

SEQ ID NO: 226784 - DNA, 504 bp, Homo Sapiens
  misc_feature (203)..(217): n is a, c, g, or t
ttggctttaacctgctggcagtcccaaatgaaattatgcaactttgatatcatattccttgatttaaattggcttttgtgattgagtgaaactttataaagcatatggtcagttatttaattaaaaaggcaaaacctgaaccaccttctgcacttaaagaagtctaacagtacaaatacactatctatcttagatagatatannnnnnnnnnnnnnnaaatattgtactatttatggtggtggggctttcttactaatacacaaataaatttaatcatttcaaaggcattctatttggtttagaagttgattcccaggagtgccatatttcagctactgtatttcctttttcttgtaatgtaagcagctcagataccatgtgctatcatttttgtatcaagttttttgcacaggatgtgaccactgtcagatcactgttcttttctttctttttgtgattgaaaagcctatactacaatttgaagtaaatttttgtttttctta

SEQ ID NO: 226785 - DNA, 799 bp, Homo Sapiens; identical to SEQ ID NO: 193022

SEQ ID NO: 226786 - DNA, 938 bp, Homo Sapiens
ttggccgagagttcctgcgcgtggggagttggagagtttgcgtggcgggaacgcggcggcagtgagagcgagcggcgccggcccttgcgtccggtgcggcgatgctgaccccggcgttcgacctcagccaggatccggacttcctgactatcgccatccgcgtgccctacgcccgggtctccgagttcgacgtctacttcgaggggtctgacttcaagttctacgccaagccatactttctcagattaacccttcctggaagaattgtagaaaatggaagtgagcaagggtcctatgatgcagataaaggaatttttaccattcgcctgcccaaagaaacccctggccagcattttgaggggctgaacatgttaactgctcttctggcaccaagaaaatccaggacagcaaaaccacttgtggaagaaataggtgcttctgagattcctgaggaagtagttgacgatgaagagtttgattgggaaattgagcagacaccctgtgaagaggtatcagaaagtgctttgaatccgcagtgccactatggatttggaaacttacgatcaggagtgttgcaacggttacaggatgaactgagtgatgttattgatattaaggatccagatttcacccctgcagctgaacgaagacagaagcgcctggccgctgagctggccaagtttgatcctgatcattatctagctgacttttttgaagatgaggcgattgaacagattttgaagtataatccttggtggactgacaaatattcaaaaatgatggcctttttggaaaagagtcaggaacaagaaaatcatgctacattagtgtctttttctgaagaagagaagtatcagctacgaaaatttgtcaataaatcttatctgctggaaagagagcctgtcgtcaagtgtgctacagtttgattgatatccttc

SEQ ID NO: 226787 - DNA, 1242 bp, Homo Sapiens
ttggcatcgatcggccgaccccgagaggcccggttcctttaggccgcctgcccgcctccagctctcggggtcggctctaggaggcgccctcaggagaggggcgggcgctctattccagagaccgagtggcagggcggccactgtggcggggctctttccccgtttcgcctcagctacccctcagctccggtagtcgccagtccggggtcgtcgccgtttggggcgggagctgctcggccccgccgccgtccccgtcgccgcttccgggtccaggcccctcgggccgcctgccgccgtcatgaggctgcgggtgcggcttctgaagcggacctggccgctggaggtgcccgagacggagccgacgctggggcatttgcgctcgcacctgaggcagtccctgctgtgcacctgggggtacagttctaatacccgatttacaattacattgaactacaaggatcccctcactggagatgaagagaccttggcttcatatgggattgtttctggggacttgatatgtttgattcttcaagatgacattccagcgcctaatataccttcatccacagattcagagcattcttcactccagaataatgagcaaccctctttggccaccagctccaatcagactagcatacaggatgaacaaccaagtgattcattccaaggacaggcagcccagtctggtgtttggaatgacgacagtatgttagggcctagtcaaaattttgaagctgagtcaattcaagataatgcgcatatggcagagggcacaggtttctatccctcagaacccatgctctgtagtgaatcggtggaagggcaagtgccacattcattagagaccttgtatcaatcagctgactgttctgatgccaatgatgccttgatagtgttgatacatcttctcatgttggagtcaggttacatacctcagggcaccgaagccaaagcactgtccatgccggagaagtggaagttgagcggggtgtataagctgcagtacatgcatcctctctgcgagggcagctccgctactctcacctgtgtgcctttgggaaacctgattgttgtaaatgctacactaaaaatcaacaatgagattagaagtgtgaaaagattgcagctgctaccagaatcttttatttgcaaagagaaactaggggaaaatgtagccaacatatacaaagatcttcagaaactctctcgcctctttaaagaccagctggtgtatcc

SEQ ID NO: 226788 - DNA, 769 bp, Homo Sapiens; identical to SEQ ID NO: 193032

SEQ ID NO: 226789 - DNA, 1216 bp, Homo Sapiens; identical to SEQ ID NO: 193033

SEQ ID NO: 226790 - DNA, 1161 bp, Homo Sapiens
ttgggggttctctgctggatcatgtgagacaacaccggggggcactggggccacagctgctgctcaactggggagtacaaattgccaagggaatgtactaccttgaggaacatggtatggtgcatagaaacctggctgcccgaaacgtgctactcaagtcacccagtcaggttcaggtggcagattttggtgtggctgacctgctgcctcctgatgataagcagctgctatacagtgaggccaagactccaattaagtggatggcccttgagagtatccactttgggaaatacacacaccagagtgatgtctggagctatggtgtgacagtttgggagttgatgaccttcggggcagagccctatgcagggctacgattggctgaagtaccagacctgctagagaagggggagcggttggcacagccccagatctgcacaattgatgtctacatggtgatggtcaagtgttggatgattgatgagaacattcgcccaacctttaaagaactagccaatgagttcaccaggatggcccgagacccaccacggtatctggtcataaagagagagagtgggcctggaatagcccctgggccagagccccatggtctgacaaacaagaagctagaggaagtagagctggagccagaactagacctagacctagacttggaagcagaggaggacaacctggcaaccaccacactgggctccgccctcagcctaccagttggaacacttaatcggccacgtgggagccagagccttttaagtccatcatctggatacatgcccatgaaccagggtaatcttggggagtcttgccaggagtctgcagtttctgggagcagtgaacggtgcccccgtccagtctctctacacccaatgccacggggatgcctggcatcagagtcatcagaggggcatgtaacaggctctgaggctgagctccaggagaaagtgtcaatgtgtagaagccggagcaggagccggagcccacggccacgcggagatagcgcctaccattcccagcgccacagtctgctgactcctgttaccccactctccccacccgggttagaggaagaggatgtcaacggttatgtcatgccagatacacacctcaaggtactccctcctcccgggaaggcaccctttc

SEQ ID NO: 226791 - DNA, 1194 bp, Homo Sapiens
caatgctttttcattatagccaactttgtacaaaaaagttggcctaactccactggctgcggcatctgtgggaaaagtgtggctgggtcttcaaggagccgcaccaatggcttccgtgctgtcctacgaaagcctggtccacgccgtggccggagccgtgggaagcgtgacagcattgacagtgttttttcccctggatactgctagacttctacttcaggttgatgagaaaagaaaatccaaaactacacacatggtgctcctggagatcattaaaaaagaaggactcctggcaccatatcgagggtggtttccagtgatttccagtctctgctgctccaattttgtctatttctacacttttaatagcctcaaagcactctgggtcaaaggtcaacattctaccactggaaaagatctggtagttgggtttgttgcaggagtggttaatgtgttgctaacaactccactctgggtggtaaacaccagactgaagcttcaaggagcaaaatttaggaatgaagacattgtaccaacaaactacaaaggtatcattgatgcttttcatcagatcattcgcgatgaaggaatctcggctttatggaatggcacatttccctcattgctgttggtcttcaatcctgccatccagttcatgttttatgaaggtttaaaacggcagcttttaaagaaacggatgaagctttcttccttggatgtgttcatcattggtgcagtagccaaagcgattgccaccacggtgacctatcccctgcagacggtacagtcaattctgaggtttgggcgtcatagactaaacccagaaaacagaacattgggaagtcttcggaatattctctatcttcttcaccaacgagtaagacgttttggaataatgggactctacaaaggccttgaagccaaactgctgcagacagtcctcactgctgctctcatgttccttgtttatgagaaactgacagctgccaccttcacagttatggggctgaagcgtgcacaccaacactgagacgccttcccatgaaaaattccgaagatgctcaagagggaggtttcctcctgagtgaagagaagtgattctcccttgactctggctcctgccaccacaaatgttaccctcattggcttgaaaagcatccaaaggtgcacatggagtatgggcaactggacctg

SEQ ID NO: 226792 - DNA, 966 bp, Homo Sapiens
ttggctcgggatcctttgtagcggctgcagagggtgccgccgccctaggcgaagtagggccgtcctgagcgaaagaaccgcccccagcaggagcaccaccacggtttagcaaagaatcccagaccccgcccgggaaggcagccgcaccatggagtcttccagttcatctaactcttatttctccgttggcccaaccagtcccagcgctgtcgtgctcctctactcgaaggagctcaaaaagtgggatgagtttgaagatattttagaagagaggaggcatgtcagtgacttgaaatttgcaatgaaatgctacacacctcttgtctataagggaattactccatgtaaaccaattgatattaaatgtagtgttctcaattctgaggagattcattatgtcattaaacagctttccaaggaatcccttcaatctgtggatgtcctccgagaggaagtgagtgagatcttagatgaaatgagtcacaaactgcgtcttggagccattcggttttgtgccttcaccctgagcaaagtatttaaacaaattttctcgaaggtgtgtgtaaatgaagaaggtattcagaaactacaaagagccatccaggagcatcctgttgttctgctgcctagtcatcgaagttacattgacttcctcatgttgtcttttcttctatacaattatgatttgcctgtgccagttatagcagcaggaatggacttcctgggaatgaaaatggttggtgagctgctacgaatgtcgggtgcctttttcatgcggcgtacctttggtggcaataaactctactgggctgtattctctgaatatgtaaaaactatgttacggaatggttatgctcctgttgaatttttcctcgaagggacaagaagccgctctgccaagacattgactcctaaatttggtcttctgaatattgtgatggagccattttttaaagagaagttttt

SEQ ID NO: 226793 - DNA, 1092 bp, Homo Sapiens; identical to SEQ ID NO: 193036

SEQ ID NO: 226794 - DNA, 1035 bp, Homo Sapiens
ttggcaggtctcccggccctgatatcccagaaaatcttagcacagagttgtatataatcttccctaccgtactgcatctgagcatatatttaaagatactacttttttccatctttaagcctttcctgcccaaaccactttcctctgcttttattctgtcttgagtattatagaacctaatttcatggtctcctttccagcctatatataaagcagatctgataccgtatcaggacagtcctgaaggtccagaccattcttctgcttcatctggggtccccaaccctcccaaggctcgaacttacactgaaactgtcaaccatcactacttgctctttcaagacacagatttgggttcattccatgatctgctccgtagagaaccaatgctgcgcatgcaggagggagaggggcattctcaactctgcctggacaggctgcagctggaggctattcataaggtacgtttcagcccaaacctggactcctatggatggctggtatctggggggcagtcagggctggttcgaatccattttgtccgtggactcgcctccccactgggccaccgtatgcagcttgaaagccgagcccacttcaatgctatgttccaaccatcctcccccactagacggcctggcttctctccaaccagccatcgccttctgcccactccctagccttggcccacaccagatccttggagtgaagtcggtcaagaacaaatggcccctatgcacagagccataggaactgggggccttccctggacagtgatcatgccaggcctggacctttaggcctgcctccccaggactccttagatcccactctttctacagacttctgtgatcacagccccctgcgggcaggggggctctccctccaccaactctcaaggctcctcagcctaagactatggctcatgagaaacactcagcctgacctagcttgggagtcaaactgctcatattgagcatattgttaagtgggtaaagccagtaaaggtactgggtgttttgtgaccacttgtga

SEQ ID NO: 226795 - DNA, 940 bp, Homo Sapiens; identical to SEQ ID NO: 193043

SEQ ID NO: 226796 - DNA, 925 bp, Homo Sapiens; identical to SEQ ID NO: 193044

SEQ ID NO: 226797 - DNA, 1024 bp, Homo Sapiens
  misc_feature (450)..(476): n is a, c, g, or t
aaaaacacctttccccacacatggaaggacagaagggagggaaggacaagaggaaaaacccgggaactctcaagtcactatcagcaggggtaaatacgagctcaaattaaggcattttgtggcttgtcctctggaatggcattctaccctcccagcttgagcaccccaaacctcaaagcatgatgctctgactgccaagtgagttccttgttaccctcagcatctctttgaaaaccctgtgatagatggaatgtgagatctcagaaatggaagggagaaggtataaggagctaatatcctgcttcacttttcccgtcccatcctaaccttaaaagtaccggttgacgaaattccactccctggctactgtaacaagaggtagtttggggacttgtacccccagccatcctaaccaagtttcatgagctaaaatatttagcactatctacnnnnnnnnnnnnnnnnnnnnnnnnnnnaaagagggagaaaaaaatgcacacaaagcagtgaatagtaggctagactcattggggggtaattaccctagactcctaactttccaggctagttgaggaaactaaggaatgcctcccaatattccaaccctcaaagctcacactgcccccagaaaaacaaaacactcacccccaatccaatgaatcatctgcatagaaaaccagagccagcaggcctagggaaggagcggatgtttgtgccctcctctagcacatactagttcagtggtatgttctgccaggcagtgtggaggccctcagaggcctcactagggaataaaatcactgaggttctccttccacatctcgtttaattttcacaaatttgtgtgtggcaaaagtctcaaactttaccatcagcaccattcttagctcagaaaagcagaaataaggtcacttataatgccttaaggtttgtcccctgtggctattcccccccttctgcccatcattattttttggttcctattaacttaggatgctctcctttaaaacaataataacaccaa

SEQ ID NO: 226798 - DNA, 1492 bp, Homo Sapiens; identical to SEQ ID NO: 193046
  misc_feature (739)..(748): n is a, c, g, or t
  misc_feature (1078)..(1089): n is a, c, g, or t

SEQ ID NO: 226799 - DNA, 929 bp, Homo Sapiens
ttggtgcatttccggtagcggcggcgggaaatcggctgtgggagagaggctaggcctctgaggaggcgaatccggcgggtatcagagccatcagaaccgccaccatgacggtgggcaagagcagcaagatgctgcagcatattgattacaggatgaggtgcatcctgcaggacggccggatcttcattggcaccttcaaggcttttgacaagcacatgaatttgatcctctgtgactgtgatgagttcagaaagatcaagccaaagaactccaaacaagcagaaagggaagagaagcgagtcctcggtctggtgctgctgcgaggggagaatctggtctcaatgacagtagagggacctcctcccaaagatactggtattgctcgagttccacttgctggagctgccgggggcccagggatcggcagggctgctggcagaggaatcccagctggggttcccatgccccaggctcctgcaggacttgctgggccagtccgtggggttggcgggccatcccaacaggtgatgaccccacaaggaagaggtactgttgcagccgctgcagctgctgccacagccagtattgccggggctccaacccagtacccacctggccgtgggggtcctcccccacctatgggccgaggagcaccccctccaggcatgatgggcccacctcctggtatgagacctcctatgggtcccccaatggggatcccccctggaagagggactccaatgggcatgccccctccgggaatgcggcctcctccccctgggatgcgaggccttctttgacccttggccacagagtatggaagtagctccgcagaggcgtgggctcgattcctcagggccacgttaccacagacctgtttgtttcttatgctgttgttcgtggaagtctcatggattgtctggtttccc

SEQ ID NO: 226800 - DNA, 755 bp, Homo Sapiens; identical to SEQ ID NO: 193050

SEQ ID NO: 226801 - DNA, 1410 bp, Homo Sapiens
ttggctcatctgaccgtgggccccgcatgtgccgtttcatcagggaacgagaccgtgctgtcaacgactaccccagcctctactaccctgagatgtatatcctgaaaggcggctacaaggagttcttccctcagcacccgaacttctgtgaaccccaggactaccggcccatgaaccacgaggccttcaaggatgagctaaagaccttccgcctcaagactcgcagctgggctggggagcggagccggcgggagctctgtagccggctgcaggaccagtgaggggcctgcgccagtcctgctacctcccttgcctttcgaggcctgaagccagctgccctatgggcctgccgggctgagggcctgctggaggcctcaggtgctgtccatgggaaagatggtgtgggtgtcctgcctgtctgccccagcccagattcccctgtgtcatcccatcattttccatatcctggtgccccccacccctggaagagcccagtctgttgagttagttaagttgggttaataccagcttaaaggcagtattttgtgtcctccaggagcttcttgtttccttgttagggttaacccttcatcttcctgtgtcctgaaacgctcctttgtgtgtgtgtcagctgaggctgggggagagccgtggtccctgaggatgggtcagagctaaactccttcctggcctgagagtcagctctctgccctgtgtacttcccgggccagggctgcccctaatctctgtaggaaccgtggtatgtctgccatgttgcccctttctcttttcccctttcctgtcccaccatacgagcacctccagcctgaacagaagctcttactctttcctatttcagtgttacctgtgtgcttggtctgtttgactttacgcccatctcaggacacttccgtagactgtttaggttcccctgtcaaatatcagttacccactcggtcccagttttgttgccccagaaagggatgttattatccttgggggctcccagggcaagggttaaggcctgaatcatgagcctgctggaagcccagcccctactgctgtgaaccctggggcctgactgctcagaacttgctgctgtcttgttgcggatggatggaaggttggatggatgggtggatggccgtggatggccgtggatgcgcagtgccttgcatacccaaaccaggtgggagcgttttgttgagcatgacagcctgcagcaggaatatatgtgtgcctatttgtgtggacaaaaatatttacacttagggtttggagctattcaagaggaaatgtcacagaagcagctaaaccaaggactgagcaccctctggattctgaatctcaatatgggggcagggctgtgcttgaaggccctgctgagtcatctgttagggccttggttca

SEQ ID NO: 226802 - DNA, 1200 bp, Homo Sapiens
caagaaggaaggaaaaatcaatcaacaactgtgcggacaatgtcagtgcaacgcagactccggccatcagagggcgccggggcggctgggctggtgcgcaggcgcgctgagagggctggcgccgcggcggtagcggtggcggtcgcggctgtggccgggggaagtgaatggttttacccagagggccctgcgccgcctttctccgctggcaacggcgccgctccccgctcctcctccccagccatggcgttcacgttcgcggccttctgctacatgctggcgctgctgctcactgccgcgctcatcttcttcgccatttggcacattatagcatttgatgagctgaagactgattacaagaatcctatagaccagtgtaataccctgaatccccttgtactcccagagtacctcatccacgctttcttctgtgtcatgtttctttgtgcagcagagtggcttacactgggtctcaatatgcccctcttggcatatcatatttggaggtatatgagtagaccagtgatgagtggcccaggactctatgaccctacaaccatcatgaatgcagatattctagcatattgtcagaaggaaggatggtgcaaattagctttttatcttctagcatttttttactacctatatggcatgatctatgttttggtgagctcttagaacaacacacagaagaattggtccagttaagtgcatgcaaaaagccaccaaatgaagggattctatccagcaagatcctgtccaagagtagcctgtggaatctgatcagttactttaaaaaatgactccttattttttaaatgtttccacatttttgcttgtggaaagactgttttcatatgttatactcagataaagattttaaatggtattacgtataaattaatataaaatgattacctctggtgttgacaggtttgaacttgcacttcttaaggaacagccataatcctctgaatgatgcattaattactgactgtcctagtacattggaagcttttgtttataggaacttgtagggctcattttgggtttcattgaaacagtatctaattataaattagctgtagatatcagtgcttctgatgaagtgaaaatgtatatctgactagtgggaaacttcatgggtttcctcatctgtcatgtcgatgattatatatggatacattttacaaaaataaa

SEQ ID NO: 226803 - DNA, 926 bp, Homo Sapiens; identical to SEQ ID NO: 193053

SEQ ID NO: 226804 - DNA, 1418 bp, Homo Sapiens; identical to SEQ ID NO: 193056

SEQ ID NO: 226805 - DNA, 927 bp, Homo Sapiens
caggttaatccaggtttggagtccatagcatcccaagtggtcactgagctcattccctggctggacttggccatgcgagaggaagaggggcaggggaagaggcgggcgacccttagacatctgtggagtgcgagccaaattgtccaggcaggttacggtgaggcacttttcaggggtggaggtgggcgggggggagggaggccggccctcggtgtccgtgtggcccctggcgtccgtgagggctgtgacggaggcgggggcaggttcactctcccgcaggatggagtcaatgagggcggtcggggacaagagggtgtccacggaagatgggcgcccgggactcgcctcctctacccgggggctctgaggcgggctggggggctcctccttgacacgcaccagggggctgctggataggggcctctcgtctatgctcccgccgggggaggccatggggctggcaggagccagctcggtgatgtcggagatgatgggtccagagctggccacagcatcaggggcgtagaggctggagctgctgtaggctggggagggggccgagtaggggcccgagccgtggacgtgctccagggagaactgccggctatacttgggcatggaatgtgctgagccactgtcgttcagcatcagggggatctttctcttcacccccaggatccggtttgactgcaccagtgagatcaggaactgaatgagcttgttgacgactttctgttgctgggcatgcttctgccgaaggctggccacctcccgccacagagcctcattctcatgcttcatggccaggagcttggagtccatgcactcctgcttccccttcatcagctgcacgtccgtcagcagcttggtgacgctgtcctggcggatctttatgtcttcactcttcagggtggacacactggccaa

SEQ ID NO: 226806 - DNA, 959 bp, Homo Sapiens
actttgtacaaaaaagttggctctacaaaggacttcctagtgggtgtgaaaggcagcggtggccacagaggcggcggagagatggccttcagcagttcccaggctccctacctgagtccagctgtccccttttctgggactattcaaggaggtctccaggacggacttcagatcactgtcaatgggaccgttctcagctccagtggaaccaggtttgctgtgaactttcagactggcttcagtggaaatgacattgccttccacttcaaccctcggtttgaagatggagggtacgtggtgtgcaacacgaggcagaacggaagctgggggcccgaggagaggaagacacacatgcctttccagaaggggatgccctttgacctctgcttcctggtgcagagctcagatttcaaggtgatggtgaacgggatcctcttcgtgcagtacttccaccgcgtgcccttccaccgtgtggacaccatctccgtcaatggctctgtgcagctgtcctacatcagcttccagaacccccgcacagtccctgttcagcctgccttctccacggtgccgttctcccagcctgtctgtttcccacccaggcccagggagcgcagacaaaaacctcccggcgtgtggcctgccaacccggctcccattacccagacagtcatccacacagtgcagagcgcccctggacagatgttctctactcccgccatcccacctatgatgtacccccaccccgcctatccgatgcctttcatcaccaccattctgggagggctgtacccatccaagtccatcctcctgtcaggcactgtcctgcccagtgctcagaggttccacatcaacctgtgctctggggaaccacatcgccttccacctgaacccccgttttgatgagaatgctgtggtccgcaacacccagatcgacaactcctgggggtctgaggagcgaa

SEQ ID NO: 226807 - DNA, 784 bp, Homo Sapiens; identical to SEQ ID NO: 193057

SEQ ID NO: 226808 - DNA, 879 bp, Homo Sapiens
ttgggctcaacattgaaatgcataagcaggcggagattgtgaagcgtctgagcggtatctgcgctcagattatccccttcctgacccaggagcatcagcagcaggtgctccaggccgtagaacgcgccaagcaggtcaccgtgggggagctgaacagcctcatcgggcagctccagccgctgtcccaccacgcaccccctgtgcccctcaccccccgcccagccgggctggtgggcggcagtgctacggggctgcttgctctgtctggagccctggctgcccaggctcagctggcggcggctgtcaaggaggaccgtgcgggcgtggaggccgaggggtccagagtggagagagccccgagcaggagtgcatctccctcgccccctgagagtctcgtggaggaggagcgaccgagtggccctggtggtggcgggaagcagagagcagatgagaaggagccatcaggaccttatgaaagcgacgaagacaagagtgattacaatctggtggtggacgaggaccaaccctcagagccccccagcccggctaccaccccctgcggaaaggtacccatctgcattcctgcccgtcgggacctggtggacagtccagcctccttggcctctagccttggctcaccgctgcctagagccaaggagctcatcctgaatgaccttcccgccagcactcctgcctccaaatcctgtgactcctccccgccccaggacgcttccacccccgggcccagctcggccagtcacctctgccagcttgctgccaagccagcaccttccacggacagcgtcgccctgaggagccccctgactctgtccagtcccttcaccacgtccttcagcctgggctcccacagcactctca

SEQ ID NO: 226809 - DNA, 506 bp, Homo Sapiens
gtacaaaaaagtttgggtaacggaggcacctttaaaggagccgctgccgtcgccatgacccgcggtaaccagcgtgagctcgcccgccagaagaatatgaaaaagcagagcgactcggttaagggaaagcgccgagatgacgggctttctgctgccgcccgcaagcagagggactcggagatcatgcagcagaagcagaaaaaggcaaacgagaagaaggaggaacccaagtagctttgtggcttcgtgtccaaccctcttgcccttcgcctgtgtgcctggagccagtcccaccacgctcgcgtttcctcctgtagtgctcacaggtcccagcaccgatggcattccctttgccctgagtctgcagcgggtcccttttgtgcttccttcccctcaggtagcctctctccccctgggccactcccgggggtgagggggttaccccttcccagtgttttttattcctgtggggctcaccccaaagtattaaaagtagctttgtaatt

SEQ ID NO: 226810 - DNA, 340 bp, Homo Sapiens; identical to SEQ ID NO: 193060

SEQ ID NO: 226811 - DNA, 931 bp, Homo Sapiens
ttggtggagctttgcctctctaggccggcagcgcctctcctccatggtcctgtctgtcagcgctgttttgggagcccgccggtgaggccgggccacgctcagacacttcgatcgtcgagtctgtcactgggcatggcgggtcagttccgcagctacgtgtgggacccgctgctgatcctgtcgcagatcgtcctcatgcagaccgtgtattacggctcgctgggcctgtggctggcgctggtggacgggctagtgcgaagcagcccctcgctggaccagatgttcgacgccgagatcctgggcttttccacccctccaggccggctctccatgatgtccttcatcctcaacgccctcacctgtgccctgggcttgctgtacttcatccggcgaggaaagcagtgtctggatttcactgtcactgtccatttctttcacctcctgggctgctggttctacagctcccgtttcccctcggcgctgacctggtggctggtccaagccgtgtgcattgcactcatggctgtcatcggggagtacctgtgcatgcggacggagctcaaggagatacccctcaactcagcccctaaatccaatgtctagaatcaggccctttggacatcctgctgacacttgggccccttaacaccttgggctgctcagaccctccagatgaggtccagcccagatctgagaggaaccctggaaatgtgaagtctctgttggtttgggagagatagtgagggcctgtcaaagaaggcaggtagcagtcagcatgacagctgcaagaatgacctctgtctgttgaagccttggtatctgaaaaggtcaggaaggggacctctttgaagggtaataacataattggaaccatgccactcttgagccacaatacctgtcaccaccctgttgttttagagagaaaaaaatc

SEQ ID NO: 226812 - DNA, 1202 bp, Homo Sapiens
  misc_feature (778)..(799): n is a, c, g, or t
ctttgtacaaaaaagttggcccagcccatggagattgacctggatggggcaggccacctggctctcacctctaggtccccatactcctatgatctgagtcagagccatgtcttctccctggaatgagttgaggccactgtgttccttccgcttggagctattttccaggcttctgctggggcctgggacaactgctcccacctcctgacacccttctcccactctcctaggcattctggacctctgggttgggatcaggggtaggaatggaaaggatggagcatcaacagcagggtgggcttgtggggcctgggaggggcaatcctcaaatgcggggtgggggcagcacaggagggcggcctccttctgagctcctgtcccctgctacacctattatcccagctgcctagattcagggaaagtgggacagcttgtaggggaggggctcctttccataaatccttgatgattgacaacacccatttttccttttgccgaccccaagagttttgggagttgtagttaatcatcaagagaatttggggcttccaagttgttcgggccaaggacctgagacctgaagggttgactttacccatttgggtgggagtgttgagcatctgtccccctttagatctctgaagccacaaataggatgcttgggaagactcctagctgtcctttttcctctccacacagtgctcaaggccagcttatagtcatatatatcacccagacataaaggaaaagacacattttttaggaaatgtttttaatnnnnnnnnnnnnnnnnnnnnnnttttaaagacccctaaccctttgtgtgctctccattctgctccttccccatcgttgcccccatttctgaggtgcactgggaggctccccttctatttggggcttgatgactttctttttgtagctggggctttgatgttccttccagtgtcatttctcatccacataccctgacctggcccccctcagtgttgtcaccagatctggatttgtaacccactgagaggacagagagaaataagtgccctctcccaccctcttcctactggtctctctatgcctctctacagtctcgtctcttttaccctggcccctctcccttgggctctgatgaaaaaattgctgactgtagctttgggagtttagcctctgagaaacgtaaaggattccacttctagggaaaa

SEQ ID NO: 226813 - DNA, 1464 bp, Homo Sapiens; identical to SEQ ID NO: 193063

SEQ ID NO: 226814 - DNA, 686 bp, Homo Sapiens; identical to SEQ ID NO: 193064

SEQ ID NO: 226815 - DNA, 1339 bp, Homo Sapiens; identical to SEQ ID NO: 193065

SEQ ID NO: 226816 - DNA, 702 bp, Homo Sapiens; identical to SEQ ID NO: 193068

SEQ ID NO: 226817 - DNA, 293 bp, Homo Sapiens; identical to SEQ ID NO: 193069

SEQ ID NO: 226818 - DNA, 1445 bp, Homo Sapiens
  misc_feature (252)..(274): n is a, c, g, or t
  misc_feature (676)..(704): n is a, c, g, or t
  misc_feature (780)..(796): n is a, c, g, or t
  misc_feature (963)..(985): n is a, c, g, or t
ttggcctggttttcctctgcagtattatccgtactatggcaaactcctgcagcccaaatacctgcagcccctgctggccgtacagttcaccaatcttaccatggacactgaaattcgcatagagtgtaaggcgtacggtgagaacattgggtacagtgagaaagaccgttttcagggacgttttgatgtaaaaattgaagttaagagctgatcacaagcacaaatctttcccactagccatttaataagttnnnnnnnnnnnnnnnnnnnnnnncctactagtcttgaacaaactgtcatacgtatgggacctacacttaatctatatgctttacactagctttctgcatttaataggttagaatgtaaattaaagtgtagcaatagcaacaaaatatttattctactgtaaatgacaaaagaaaaagaaaaattgagccttgggacgtgcccatttttactgtaaattatgattccgtaactgacttgtagtaagcagtgtttctggcccctaagtattgctgccttgtgtattttatttagtgtacagtactacaggtgcatactctggtcatttttcaagccatgttttattgtatctgttttctactttatgtgagcaaggtttgctgtccaaggtgtaaatattcaacgggaataaaactggcatggtaannnnnnnnnnnnnnnnnnnnnnnnnnnnnggctctttcaaaggtaatggcccatcgatgagcatttttaacatactccatagtcttttcctgtggtgttaggtcnnnnnnnnnnnnnnnnncctgggggctggggtgggggtttgtcatttacagtagaataaatattttgttgctattgctacactttaatttacattctaacctattaaatgcagaaagctagtgtaaagcatatagattaagtgtaggtcccatacgtatgacagtttgttcaagactagtaggnnnnnnnnnnnnnnnnnnnnnnnaacttattaaatggctagtgggaaagatttgtgcttgtgatcagctcttaacttcaatttttacatcaaaacgtccctgaaaacggtctttctcactgtacccaatgttctcaccgtacgccttacactctatgcgaatttcagtgtccatggtaagattggtgaactgtacggccagcaggggctgcaggtatttgggctgcaggagtttgccatagtacggataatactgcagaggaaaaccaggggagttgcccagtccaaaatactccacatttccaactttatccttatcttcatctcgcttgccagtgcactgaacgggaaggacatttgggttatacttcatcactgggtaagtctccaaggactcattcttgggaggcttaggtttgaagcctagaactcggttgagctttataataatgcacggtttgccctctttgtagccataagccaa

SEQ ID NO: 226819 - DNA, 948 bp, Homo Sapiens
tacaaaaaagttggcctgaagggggctggatgggcaaggcggccgcgatggctcgagctcgggcggtggcggcggtggccggaggcggcggtgcctcctcctcctcgccccggcgccggcggtgatccgagcgagcggccgcggcccccgatgagactgctggcgggctggctgtgcctgagcctggcgtccgtgtggctggcgcggaggatgtggacgctgcggagcccgctcacccgctccctgtacgtgaacatgactagcggcccgggtgggccggcggcggccgcgggcggcaggaaggagaaccaccagtggtatgtgtgcaacagagagaaattatgcgaatcactccaggctgtctttgttcagagttaccttgatcaaggaacacagatcttcttaaacaacagcattgagaaatcgggctggctatttatccaattatatcattcttttgtgtcatctgtttttagcctgtttatgtctagaacatctatcaatgggttgctaggaagaggctcaatgtttgtgttttcaccagatcagtttcagagactgcttaaaattaatccagactggaaaacccacagacttcttgatttaggtgctggagatggagaagtcacaaaaatcatgagccctcattttgaagaaatctatgccactgagctttctgaaactatgatatggcagcttcagaaaaagaaatacagagtccttggtataaatgaatggcagaatacggggttccagtatgatgtcatcagctgcctgaacttgctggaccgctgtgatcagcccctgactttgttaaaagatatcagaagtgtcttggaagccaactagaggcagggtcatccttgcccttgtcctcccctttcatccctatgtggaaaacgttggcagtgggaaaaccatcagaaatttggaaatcaaaggacagaa

SEQ ID NO: 226820 - DNA, 1044 bp, Homo Sapiens; identical to SEQ ID NO: 193074

SEQ ID NO: 226821 - DNA, 1439 bp, Homo Sapiens
  misc_feature (455)..(478): n is a, c, g, or t
  misc_feature (1370)..(1378): n is a, c, g, or t
ttggcgctgcttgggcccgtggcggattgtaagctgctggttttgcggctgggaagagcggcgagagggttcggcatttttcgtcgggatccccgcaaggatgagtgctgccagagagtctcacccgcatggggtgaagcgttcagcctccccagacgacgatctgggatctagcaattgggaggcagcagacttgggtaatgaagagagaaaacaaaagttcttgagacttatgggtgcaggaaagaaagaacatactggtcgtcttgttataggagatcacaaatcaacatctcacttccgaaccggggaagaagacaagaaaattaatgaagaactggagtctcaatatcagcaaagtatggacagtaaattatcaggaagatatcggcgacattgtggacttggcttcagtgaggtagaagaccatgatggagaaggtgatgtggctggannnnnnnnnnnnnnnnnnnnnnnntcacctgatcctgaaagtccagatgattctgaaagcgattcagagtcagagaaagaagaatctgctgaagaactccaagctgctgagcaccctgatgaagtggaggatcccaaaaacaaaaaagatgcaaaaagcaattataaaatgatgtttgttaaatccagtggttcataactcccaaacgcttagtctttgtattaaaagtaagccttattgttacaatgcacagtggaggactgcttatagagcacagacctttgtattataatttttaaaaaggcccttttaaataattacaaagagtgtttgctttcaaatgccatgggttacacttttatgggcatgactataaccatttttgtaaagagtaagagttgtataaaataagaaataaatacagtactcaacttcctttcatattagcatcatcaaccctctaattcaccttatgggggaaatgcttctttttgtttgtgatagctattttatcatttccttcatatttttctcttataaaaatgtatttgatactgtgatatgttcacgaaaagtattctttaattattctttgttatagtagagctgttcattatggatatttctgctgccagtcacaatctaaattaattttggcaaaagattgggtacttagtttcctgttactgagttagctctactcttttggaccaaagcaacatgagagcaagtacttttcacacttgttaagatggagttataactgtcatacatttggaatattatgatcccaagtagtctttttataatttggattgtatcgtatgttagatttttgataaaatttggccaatttttacagaagaaattctctgatcatttagttctatctatttagaaatatgtaaaactggannnnnnnnnaagtaatatgtgaccaaagttaattttgtcccaaaggtctaaataaagagcagtttcccat

SEQ ID NO: 226822 - DNA, 1438 bp, Homo Sapiens; identical to SEQ ID NO: 193075
  misc_feature (457)..(480): n is a, c, g, or t
  misc_feature (1372)..(1380): n is a, c, g, or t

SEQ ID NO: 226823 - DNA, 1337 bp, Homo Sapiens; identical to SEQ ID NO: 193077

SEQ ID NO: 226824 - DNA, 911 bp, Homo Sapiens; identical to SEQ ID NO: 193078

SEQ ID NO: 226825 - DNA, 1069 bp, Homo Sapiens; identical to SEQ ID NO: 193081

SEQ ID NO: 226826 - DNA, 1571 bp, Homo Sapiens
tcagtttttgataatcctggaacggctttagttccactggatgcagctctgctcgccccaagctagcggggaagggcttggcaggtgaaggcagcacccgagtagcaggagcaggtgggggccgcacagccaggctggggggctgcagagcagggcccacaggtaacagagaaaggggaggtggggcaggaggtggtgctggcggcagggagccaaagttcaccacaggcagctgtgagtctaccatgggtagaagcatctgctgggcaggagcccctgaagggagaaagccactttggccaccaggctgcagaggagtagaataaaaatccgaaggggatggcagatcctggcgtacctgaagcaacgatgtgtcaggcaaaggactggggcagaaagccggagagtagaggaaggaaggtggagggtagagaactcctccagccggcaacttccccagctctgtagcttgcattgtggagaaatccagaaactggcccttgagagctaccccagagagcagtgctgagggaggggctgggccggggggtaggtataggggctgtgatctgtaagggtgcagtgagggtgtcccagggcggaagcctccactgtttggatgtaattgagagtccatggctcccccagagatctgagaactggaaggcccagcactgccatagaaaacctcaggatacaggcgctggcctgaggagctgggctccgggacacagtgcccagaatccaggttcttggattgtggctcagcagaggcagcagcactgggaagcagctcccagtctcgtgatacaggaatggcctcagtgactgatgctgttagctccttctctgctttcaagctgtctcctaccactaggcgtaagtctgagtccttgtcactagtgccaaactggactgggggaccaggtcgatgggatggccgaatggggccaggctctgtgcctcggtctgtacgctgtgatcgttctgtgccaatggggccagggggcagaggctgctcccggggcagctcctttctgtccccatcgtggggggcaggtggtggtctcctaggaggttcagagccaggtggaccctcacaaggaacagcattcaggggtgaggagcctccaggcctcttggggggtccctctgctgcccccttgagtcctccatcaggggaacttcgctggctgcagggacctgatgacacctgagaatccccactcaggtccaccccactgtcagactgactcatttctgtgccagccacatcctcaaaaggactcaggggctccatccaaggctccatggagctgggccggtaactctttcggctagtggcagtatgtaaacggttccagatgtgaggggtcagggcctctgtgcctgtatctctggactctgcctgagggcctgggccctcaggcttagagcccaagaatccagagctatgaggaggtggcaaagattcctacagatgagaagggccagaagcaaaacatgaattgggtgggaattgggaattataggaagccaggacagagtggggtgacacagggtgtggccaa

SEQ ID NO: 226827 - DNA, 1030 bp, Homo Sapiens
  misc_feature (883)..(901): n is a, c, g, or t
ttggagcattcaggggcgttgctttcctggcagtggcccgccccagttcgagccggtgccttactgcgtctcgcgagaacttatgcattttggaggcggaaccccgtcaggaaaagcgcacaaaactgctcttaagtcattgcagagctaccgcttcggttagccagccacgaagttctcgcgagagtcgtctcctcgataccaagcgcctgtgtctggcagagctggtgtgagacgagacaatcctgccccgccgccgggataatcaagagttttggccggacctttgagcatacaccgagagagtgaggagccagacgacaagcacacactatggcgctgaaacggattaataaggaacttagtgatttggcccgtgaccctccagcacaatgttctgcaggtccagttggggatgatatgtttcattggcaagccacaattatgggacctaatgacagcccatatcaaggcggtgtattctttttgacaattcattttcctacagactaccccttcaaaccacctaaggttgcatttacaacaagaatttatcatccaaatattaacagtaatggcagcatttgtctcgatattctaagatcacagtggtcgcctgctttaacaatttctaaagttcttttatccatttgttcactgctatgtgatccaaacccagatgaccccctagtgccagagattgcacggatctataaaacagacagagataagtacaacagaatatctcgggaatggactcagaagtatgccatgtgatgctaccttaaagtcagaataacctgcattatagctggaataaactttaaattactgttccttttttgattttcttatccggctgctcccctatcagacctcatcnnnnnnnnnnnnnnnnnnngtttacctccctccattcattcacatgctcatctgagaagacttaagttcttccagctttgggacaataactgcttttagaaactgtaaagtagttaccagagaacagttgcccaagactcagattttt

SEQ ID NO: 226828 - DNA, 1161 bp, Homo Sapiens; identical to SEQ ID NO: 193082
  misc_feature (130)..(148): n is a, c, g, or t

SEQ ID NO: 226829 - DNA, 955 bp, Homo Sapiens; identical to SEQ ID NO: 193084
  misc_feature (130)..(148): n is a, c, g, or t

SEQ ID NO: 226830 - DNA, 1515 bp, Homo Sapiens; identical to SEQ ID NO: 193087
  misc_feature (182)..(200): n is a, c, g, or t
  misc_feature (330)..(340): n is a, c, g, or t

SEQ ID NO: 226831 - DNA, 1070 bp, Homo Sapiens; identical to SEQ ID NO: 193088
  misc_feature (127)..(137): n is a, c, g, or t
  misc_feature (267)..(285): n is a, c, g, or t

SEQ ID NO: 226832 - DNA, 912 bp, Homo Sapiens; identical to SEQ ID NO: 193089
  misc_feature (500)..(518): n is a, c, g, or t
  misc_feature (648)..(658): n is a, c, g, or t

SEQ ID NO: 226833 - DNA, 1117 bp, Homo Sapiens; identical to SEQ ID NO: 193090
  misc_feature (866)..(884): n is a, c, g, or t
  misc_feature (1014)..(1025): n is a, c, g, or t

SEQ ID NO: 226834 - DNA, 1017 bp, Homo Sapiens
ttggcatcccttctgtggcagttaggagactgaatcaaggtccagagaaggtggaggaatcctgatactgagcgaaatcttcccaaggctgcagacaccgacggatttgctttgggagccagagtagctgccgccaccagagtccggagccatgagcgggtttaattttggaggcactggggcccctacaggcgggttcacgtttggcactgcaaagacggcaacaaccacacctgctacagggttttctttctccacctctggcactggagggtttaattttggggctcccttccaaccagccacaagtaccccttccaccggcctgttctcacttgccacccagactccggccacacagacgacaggcttcacttttggaacagcgactcttgcttcggggggaactggattttctttggggatcggtgcttcaaagctcaacttgagcaacacagctgccaccccagccatggcaaaccccagcggctttgggctgggcagcagcaacctcactaatgccatatcgagcaccgtcacctccagccagggcacagcacccaccggctttgtgtttggcccctccaccacctctgtggctccagctaccacatctggaggcttctcattcactggtggaagcacggcccaaccctccggtttcaacattggctcagcagggaattcagcccagcccacggcacctgccacgttgcccttcactccggccacgccagcagccaccacagcaggtgccacacagccagctgctcccacacccacagccaccatcaccagtactgggcccagcctctttgcgtcaatagcaactgctccaacctcatctgccaccactggactctccctctgtacccctgtgaccacagcgggcgcccccactgctgggacacagggcttcagcttaaaggcacctggagcagcttccggcacctccacaacaacatccaccgctgccaccgccaccgccaccaccaccagcagcagcagcaccaccgg

SEQ ID NO: 226835 - DNA, 1619 bp, Homo Sapiens
ttggcacggatccgttgcggctgcagctctgcagtcgggccgttccttcgccgccgccaggggtagcggtgtagctgcgcagcgtcgcgcgcgctaccgcacccaggttcggcccgtaggcgtctggcagcccggcgccatcttcatcgagcgccatggccgcagcctgcgggccgggagcggccgggtactgcttgctcctcggcttgcatttgtttctgctgaccgcgggccctgccctgggctggaacgaccctgacagaatgttgctgcgggatgtaaaagctcttaccctccactatgaccgctataccacctcccgcaggctggatcccatcccacagttgaaatgtgttggaggcacagctggttgtgattcttataccccaaaagtcatacagtgtcagaacaaaggctgggatgggtatgatgtacagtgggaatgtaagacggacttagatattgcatacaaatttggaaaaactgtggtgagctgtgaaggctatgagtcctctgaagaccagtatgtactaagaggttcttgtggcttggagtataatttagattatacagaacttggcctgcagaaactgaaggagtctggaaagcagcacggctttgcctctttctctgattattattataagtggtcctcggcggattcctgtaacatgagtggattgattaccatcgtggtactccttgggatcgcctttgtagtctataagctgttcctgagtgacgggcagtattctcctccaccgtactctgagtatcctccattttcccaccgttaccagagattcaccaactcagcaggacctcctcccccaggctttaagtctgagttcacaggaccacagaatactggccatggtgcaacttctggttttggcagtgcttttacaggacaacaaggatatgaaaattcaggaccagggttctggacaggcttgggaactggtggaatactaggatatttgtttggcagcaatagagcggcaacacccttctcagactcgtggtactacccgtcctatcctccctcctaccctggcacgtggaatagggcttactcaccccttcatggaggctcgggcagctattcggtatgttcaaactcagacacgaaaaccagaactgcatcaggatatggtggtaccaggagacgataaagtagaaagttggagtcaaacactggatgcagaaattttggatttttcatcactttctctttagaaaaaaagtactacctgttaacaattgggaaaaggggatattcaaaagttctgtggtgttatgtccagtgtagctttttgtattctattatttgaggctaaaagttgatgtgtgacaaaatacttatgtgttgtatgtcagtgtaacatgcagatgtatattgcagtttttgaaagtgatcattactgtggaatgctaaaaatacattaatttctaaaacctgtgatgccctaagaaacattaagaatgaaaggtgttgtactatagaaactaagtacagaaaatttcagttttacgtggttgtagctgatgaagttattacctcatagagactataatattctatttggtaatatattatttgatgtttgctgttcttc

SEQ ID NO: 226836 - DNA, 929 bp, Homo Sapiens; identical to SEQ ID NO: 193091

SEQ ID NO: 226837 - DNA, 608 bp, Homo Sapiens; identical to SEQ ID NO: 193092

SEQ ID NO: 226838 - DNA, 850 bp, Homo Sapiens; identical to SEQ ID NO: 193093

SEQ ID NO: 226839 - DNA, 1160 bp, Homo Sapiens
ttgggtttttggtccatgtgagagaagctggctgctgaaatgactgcgaaccggcttgcagagagccttctggctttgagccaacaggaagaactagcggatttgccaaaagactacctcttgagtgagagtgaagatgagggggacaatgatggagagagaaagcatcaaaagcttctggaagcaatcagttcccttgatggaaagaataggcggaaattggctgagaggtctgaggctagtctgaaggtgtcagagttcaatgtcagttctgaaggatcaggagaaaagctggtccttgcagatctgcttgagcctgttaaaacttcatcttctttggccactgtgaaaaagcaactgagtagagtcaaatcaaagaagacagtggagttacctctgaacaaagaagagattgaacggatccacagagaagtagcattcaataaaaccgcacaagtcctctccaaatgggaccctgtcgtcctgaagaaccggcaggcagagcagctggtttttcccctggagaaagaggagccagccattgctcccattgaacatgtgctcagtggctggaaggcaagaactcccctggagcaggaaattttcaacctcctccataagaacaagcagccagtgacagaccctttactgacccctgtggaaaaggcctctctccgagccatgagcctagaagaggcaaagatgcgacgagcagagcttcagagggctcgggctctgcagtcctactatgaggccaaggctcgaagagagaagaaaatcaaaagtaaaaagtatcacaaagtcgtgaagaaaggaaaggccaaaaagccctaaaagagtttgagcagctgcggaaggttaatccagctgcagcactagaagaactggaaaaaattgaaaaggccagatgatggaaagaatgagccttaagcaccaaaacagtgggaaatgggccaagtcaaaggcaaattatggccaaatatgacctgtaatgctcgccaagctatgctggaacagttgtctaagaacaaagaactgacacataaactccaggtagcctctgagagtgaggaagaggagggaggcacagaagatgtggtaaaaactcccttgtccctgatgtaatgaatgaagtgctattgaatgcaaatgggccgaat

SEQ ID NO: 226840 - DNA, 1513 bp, Homo Sapiens; identical to SEQ ID NO: 193101

SEQ ID NO: 226841 - DNA, 683 bp, Homo Sapiens; identical to SEQ ID NO: 193105
  misc_feature (615)..(627): n is a, c, g, or t

SEQ ID NO: 226842 - DNA, 1207 bp, Homo Sapiens
ttggggtgcggagagcaggtggtgctggaagcgcgtgaggccgggagctcgagagagctaacagactagccggctggacatctggaccgctggatccggaggtggcgaccccggcctgacccggaccctaaatccgtccccgccccagagggcggaggcgcgcgctcgattccccccacgcggcggcgccgcctgtttacgtctgcagatctccaggggagcccaccagcctagtcaacatggcctcggaagacattgccaagctggcagagacacttgccaagactcaggtggccgggggacagctgagtttcaaaggcaagagcctcaaactcaacactgcagaagatgctaaagatgtgattaaagagattgaagactttgacagcttggaggctctgcgtctggaaggcaacacagtgggcgtggaagcagccagggtcatcgccaaggccttagagaagaagtcggagttgaagcgctgccactggagtgacatgttcacgggaaggctgcggaccgagatcccaccagccctgatctcactaggggaaggactcatcacagctggggctcagctggtggagctggacttaagcgacaacgcattcgggcccgacggtgtgcaaggcttcgaggccctgctcaagagctcagcctgcttcaccctgcaggaactcaagctcaacaactgtggcatgggcattggcggcggcaagatcctggctgcagctctgaccgaatgtcaccggaaatccagtgcccaaggcaagcctctggccctgaaggtctttgtggctggcagaaaccgtctggagaatgatggcgccactgccttggcagaagcttttagggtcatcgggaccctggaggaggtccacatgccacagaatgggatcaaccaccctggcatcactgccctggcccaggctttcgctgtcaaccccctgctgcgggtcatcaacctgaatgacaacaccttcactgagaagggcgccgtggccatggccgagaccttgaagaccttgcggcaggtggaggtgattaattttggggactgcctggtgcgctccaagggtgcagttgccattgcagatgccatccgcggcggcctgcccaagctaaaggagctgaacttgtcattctgtgaaatcaagagggatgctgccctggctgttgctgaggccatggcagacaaagctgagct

SEQ ID NO: 226843 - DNA, 982 bp, Homo Sapiens
ttgggatcccgcctggggccggctgagtggcacttaagcgggccatgccatgcaaccttgggcgctgccaaccgtgggcgagctctgggtgtgcgggcggcctggcgcggcgctccgctgtgtcagcgtgttatgatgccgtcccgtaccaacctggctactggaatccccagtagtaaagtgaaatattcaaggctctccagcacagacgatggctacattgaccttcagtttaagaaaacccctcctaagatcccttataaggccatcgcacttgccactgtgctgtttttgattggcgcctttctcattattataggctccctcctgctgtcaggctacatcagcaaagggggggcagaccgggccgttccagtgctgatcattggcattctggtgttcctacccggattttaccacctgcgcatcgcttactatgcatccaaaggctaccgtggttactcctatgatgacattccagactttgatgactagcacccaccccatagctgaggaggagtcacagtggaactgtcccagctttaagatatctagcagaaactatagctgaggactaaggaattctgcagcttgcagatgtttaagaaaataatggccagattttttgggtccttcccaaagatgttaagtgaacctacagttagctaattaggacaagctctatttttcatccctgggccctgacaagtttttccacaggaatatgtatcatggaagaatagaggttattctgtaatggaaaagtgttgcctgccaccaccctctgtagagctgagcatttcttttaaatagtcttcattgccaatttgttcttgtagcaaatggaacaatgtggtatggctaatttcttattattaagtagtttattttaaaaatatctgagtatattatcctgtacacttatccctaccttcatgttccagtggagaccttagtaaaatcaaagatcagtgagttcatc

SEQ ID NO: 226844 - DNA, 1361 bp, Homo Sapiens; identical to SEQ ID NO: 193111

SEQ ID NO: 226845 - DNA, 1012 bp, Homo Sapiens; identical to SEQ ID NO: 193112

SEQ ID NO: 226846 - DNA, 1192 bp, Homo Sapiens
  misc_feature (1028)..(1044): n is a, c, g, or t
ttggggagcaagatggctgtggagctgggcgtgctgctcgtccggccccggcccggaaccgggctgggtagagtgatgcggaccctcctgctggtgctgtggctggcgacgcgcggaagcgcgctctactttcacatcggagagacggagaagaagtgctttattgaggagatcccggacgagaccatggtcataggaaactaccggacgcagctgtatgacaagcagcgggaggagtaccagccggccaccccggggcttggcatgtttgtggaggtgaaggacccagaggacaaggtcatcctggcccggcagtatggctccgagggcaggttcactttcacttcccatacccctggtgagcaccagatctgtcttcactccaattccaccaagttctccctctttgctggaggcatgctgagagttcacctggacatccaggtaggtgaacatgccaatgactatgcagaaattgctgctaaagacaagttgagtgagttgcagctacgagtgcgacagctggtggaacaagtggagcagatccagaaagagcagaactaccagcggtggcgagaggagcgcttccggcagaccagtgagagcaccaaccagcgggtgctgtggtggtccattctgcagaccctcatcctcgtggccatcggtgtctggcagatgcggcacctcaagagcttctttgaagccaagaagcttgtgtagctgtcccaggcgtcacaacccatcctcccaggctgggggagaaaggacctcctggaactgacttcttctgtcaggaggactggtttccagccatacctgttctggaagggagaggggctggaggcacccacaggcacaagctgaaggcagcagcttggctaatactgagcaggtagtggggcaaattcctgccctctctctctggcctctgggccgtttggtagtaatcacccaggggctggtaaagcccctcctcttggcacctcagaatcacagtgttactgatcagggatgtgaggctgctgttnnnnnnnnnnnnnnnnnaatgggcaggcaagccagtcttctgtcttcctttgctaacttagggttttgagcaggttggggtatggtgcctgtcatacccacctgccaccctgggaacctcactgttctctctttcagcctagacctgctgatccagggtgtgtgt

SEQ ID NO: 226847 - DNA, 848 bp, Homo Sapiens
ttggctcggaggtggcggtggatcttactccttccagccagtgaggatccagcaacctgctccgtgcctcccgcgcctgttggttggaagtgacgaccttgaagatcggccggttggaagtgacgaccttgaagatcggcgggcgcagcggggccgagggggcgggtctggcgctaggtccagcccctgcgtgccgggaaccccagaggaggtcgcagttcagcccagctgaggcctgtctgcagaatcgacaccaaccagcatcatgtccatgacactggggtactgggacatccgcgggctggcccacgccatccgcctgctcctggaatacacagactcaagctacgaggaaaagaagtatacgatgggggacgctcctgactatgacagaagccagtggctgaatgaaaaattcaagctgggcctggactttcccaatctgccctacttgattgatggggctcacaagatcacccagagcaacgccatcctgtgctacattgcccgcaagcacaacctgtgtggggagacagaagaggagaagattcgtgtggacattttggagaaccaggctatggacgtctccaatcagctggccagagtctgctacagccctgactttgagaaactgaagccagaatacttggaggaacttcctacaatgatgcagcacttctcacagttcctggggaagaggccatggtttgttggagacaagatcacctttgtagatttcctcgcctatgatgtccttgacctccaccgtatatttgagcccaactgcttggacgcctttccaaatctgaaggacttcatctcccgctttgaggtttcctgtggcataa

SEQ ID NO: 226848 - DNA, 933 bp, Homo Sapiens; identical to SEQ ID NO: 193114

SEQ ID NO: 226849 - DNA, 652 bp, Homo Sapiens; identical to SEQ ID NO: 193116

SEQ ID NO: 226850 - DNA, 1174 bp, Homo Sapiens
ctttgtacaaaaaagttggcccttaaatagtacccctgcaacaactacagaacccccaaagcctacattccctgcttatacacagtctacagcttcaacaactagtacaacaaatagtactgcagctaaaccagcggcttcaataacaagtaagcctgctacacttacaacaactagtgcaaccagtaagttgatccatccagatgaggatatatccctggaagagagaagggcacagttacctaagtatcaacgtaatcttcctcggccaggacaggcccccatcggtaatccaccagttggaccaattggaggtatgatgccaccacagccaggcatcccacagcaacaaggaatgagacccccaatgccacctcatggtcagtatggtggtcatcatcaaggcatgccaggataccttcctggtgctatgcccccgtatgggcagggaccgccaatggtgcccccttaccagggtgggcctcctcgacctccgatgggaatgagacctcctgtaatgtcgcaaggtggccgttactgatcttacttcatccagtctaataggtttggagattaaaccttttctcaacttgtgctgtttatatagccaagcttccgtcaataaggcttcattgtgactttaacaaacattatcttcccacataccaggaactattggacatttattttacatgggaaaaattatttggaataataaagcaggaacttttcctgaagttgcaatttatactgtatggcttctttttcatgtttcatctaggtttttagaagtgaagtatagtaaatttggttcgttaaattgtgaaggcgctggaattacatgaacataccaccctagtaaaggcaagttctgtaagcttacattgctatttgtaaagtttgccttcacagcatttcagatgctgttggacttcatgtccccaacctagcttggtgagggctgtaactgtttccaagtacttgtacattggaagtctgaatgtgtaacaatatttaatgtatttagagttcctcatgttgcagggtttaagaaatctgacccaccaaggtcatgtgacttttctgtactgttaaacttcattgtaataaaatgacagaaaaatttatgcctttttattcataacccagctgtggaccactgcctgaaaggttt

SEQ ID NO: 226851 - DNA, 1389 bp, Homo Sapiens
ttgtacaaaaaagttggctcagggttcacctttgaggaatccagcaagctagaagacctgttgcggaaggttcgcgccaaggagaccaggaagcgagcactcagcaggttaaagctgaagctcaacaaagatatagtgatctctgtgggcatttataatctggtccagaaggctctcaagcctcctccaataaagctctatcgggaaacaaatgaaccagtgaaaaccaagacccggacctttaatacaagtacaggcggtttgcttctgcctagcgataccaagaggtctcagatctatgggagtcgtcagattatactggagaaagaggaaacagaagagctaaaacggtttgatgatccaggtttgatgctcatgggtttcaagccgttggtactgctgaagaaacaccattacctgaggccctccctgttcgtgtacccagaggagtcgctggtgattgggagctcaaccctgttcagtgctctgctcatcaagtgtctggagaaggaggttgcagcattgtgcagatacacaccccgcaggaacatccctccttattttgtggctttggtgccacaggaagaagagttggatgaccagaaaattcaggtgactcctccaggcttccagctggtctttttaccctttgctgatgataaaaggaagatgccctttactgaaaaaatcatggcaactccagagcaggtgggcaagatgaaggctatcgttgagaagcttcgcttcacatacagaagtgacagctttgagaaccccgtgctgcagcagcacttcaggaacctggaggccttggccttggatttgatggagccggaacaagcagtggacctgacattgcccaaggttgaagcaatgaataaaagactgggctccttggtggatgagtttaaggagcttgtttacccaccagattacaatcctgaagggaaagttaccaagagaaaacacgataatgaaggttctggaagcaaaaggcccaaggtggagtattcagaagaggagctgaagacccacatcagcaagggtacgctgggcaagttcactgtgcccatgctgaaagaggcctgccgggcttacgggctgaagagtgggctgaagaagcaggagctgctggaagccctcaccaagcacttccaggactgaccagaggccgcgcgtccagctgcccttccgcagtgtggccaggctgcctggccttgtcctcagccagttaaaatgtgtttctcctgagctaggaagagtctacccgacataagtcgagggactttatgtttttgaggctttctgttgccatggtgatggtgtagccctcccactttgctgttccttactttactgcctgaataaagagccctaagtttgtactat

SEQ ID NO: 226852 - DNA, 973 bp, Homo Sapiens; identical to SEQ ID NO: 193123

SEQ ID NO: 226853 - DNA, 1267 bp, Homo Sapiens; identical to SEQ ID NO: 193124

SEQ ID NO: 226854 - DNA, 978 bp, Homo Sapiens
ttggctcggtcggctgtgtggggctcggcagtcacccctggacattttgtcacccggaggctgcaacttggtcgctctggcctggcttggggggcccctcggtcttcaaagcttcacctttctccaaaggcagatgtgaagaacttgatgtcttatgtggtaaccaagacaaaagcgattaatgggaaataccatcgtttcttgggtcgtcatttcccccgcttctatgtcctgtacacaatcttcatgaaagaaagccttgagccgggccatgcttctcacatcttacctgcctcctcccttgttgagacatcgtttgaagactcatacaactgtgattcaccaactggacaaggctttggcaaagctggggattggccagctgactgctcaggaagtaaaatcggcttgttatctccgtggcctgaattctacgcatattggtgaagataggtgtcgaacttggctgggagaatggctgcagatttcctgcagcctgaaagaagctgagctgtctctcttgctgcacaacgtggtcctgctctccaccaactaccttgggacaaggcgctgaatgaaccatggagcggatggcattgtcctgcagtcgtatagtatagcagtgcaggaacaaacagcacttgccagcaaagtctgtgtgtactgttaagtgtgtgggaggcagagagaggagcaggggccatgggcttcacagcatggcacacctgtgggaactgcagacattcctctcacagctagaactgaaacaaaccctcttgctaggggtggtccgtgtgaggtgtcatcctgtccccctcataattactaatagctggaactggcagcagcctctactgggcttttactgtgatgtgttcagttcatgtcctaggaagtcagcttttgcccaagtggaatccttatttggcttagactgatccacttccatgttacttacatctgtggttttgttgttgc

SEQ ID NO: 226855 - DNA, 1015 bp, Homo Sapiens
ttgtacaaaaaagttggctctttcatggtagacagatttcacgactcagagatagaaatctcttgctatcatcaggtcacgggcagctcctgtggagtcctgcccaacttatgtggcttccataaaatggcaacagtccaggctccttgcctaattttagagcattaactccctaattgccagtaagcaaggaggtggatctctgcaaacctacactgtctatgacagctctagttgtacttggtgtgactaaatacctcaaaggcaacctgcttctgcaggttttgaagtgtcagcttcataagacactgaggtttagaattgtttgattctagaccataactgaagggcataaatggaaacaggatatgaagggaaacaagtagcatcatggagctgaaaagtggtgcatcacccaatggctagcacaaacaaggatcacactgtccattctcttgtctgctaaattaagcattttcttgcctcctttgcttcatcttttcacaacagctggatagagggatcagaaatgactgtgtcatggtgctcattcactgcaaactcccagttgcaagctccttggctcccccggagggagcaagaatctcatagttcagagacacagagggccttttagccctaatgaccttttggatgggactgcaactcatgactatcctgatattggaagaaaggactttgttaatcttctcccccatagctctgctgcgtaggtctacatcttactcagaatcactacacattcctttagtcttcctccaagctccagagccattggtacaaatgctttattgaaactaaatacataatacacacaatgagatgaagacaatatagaagtccgcatagtcatcataatcccgttccttggccggttgaggcagctcagtggctgagcccagtcaagccaacccgcagcttcactcacgacttcaagatttgatgctaattcttttggatttctacagttattaaataagtgtctgagtggaaa

SEQ ID NO: 226856 - DNA, 919 bp, Homo Sapiens
ttgggtggtgtttcccctaactgtgaactgtgtcctaatcaggatggaattttcaaggagacagatgctggaagatgggttcatattgtttgtgccctgtatgttcctggagtagcctttggagatattgacaaattacgaccagtaacactaacggaaatgaactattccaaatatggtgccaaggagtgtagcttttgtgaagaccctcgctttgctagaactggggtttgcattagctgtgatgcagggatgtgcagagcctatttccatgtgacctgtgctcaaaaggaaggtctgctttcagaggcagcggcggaagaggatatagcagatccattctttgcttattgtaagcaacatgcagataggttagacagaaagtggaagagaaaaaactacttggctctacagtcctattgtaaaatgtctttgcaagagagagagaagcaactatcaccagaagcacaggcaaggatcaatgcccggcttcagcagtatcgtgccaaagcagaactagctcgatctaccagaccccaggcctgggttccaagggaaaaattgcccagaccactcaccagcagtgcttcagctattcgtaaacttatgcggaaagcagaactcatggggatcagtacagatatctttccagtggacaattcagatactagttctagtgtggatggaaggagaaaacataagcaaccagctctcactgcagattttgtgaattattattttgagagaaatatgcgcatgattcaaattcaggaaaatatggctgacaaaagaatataaaagataaattagagaatgaacaagaaaagcttcatgtagaatataataagctatgtgaatctttagaagaactacaaaacctgaatggaaaacttcgaagtgaacgacaaggaatatgggc

SEQ ID NO: 226857 - DNA, 1076 bp, Homo Sapiens
ttggggtagctgtgagttgctggcgctggagcgattcggtggcacgtggagccacggcgtgggagtagggggctgaaggcaggcagcagcggccagggccgccctctgctagccgcttgggtctcgggataccccgtttcttcctgtaggtgtgggacgtgcgtgcggcgagatggacactcccccgctctcggattcggagtcggaatccgatgaatcccttgtcacagacagagagttgcaggatgcgttttcccgagggcttctgaagccaggcctcaatgtcgtgctagaggggccgaagaaggccgtgaacgacgtgaatggcctgaagcaatgtttggcagaattcaagcgggatctggaatgggttgaaaggctcgatgtgacactgggtccggtaccggagatcggtggatctgaggcgccagcacctcagaacaaggaccagaaagctgttgatccagaagacgacttccagcgagagatgagtttctatcgccaagcccaggccgcagtgcttgcagtcttaccccgcctccatcagctcaaagtccctacgaagcgacccactgattattttgcggaaatggccaaatctgatctgcagatgcagaagattcgacagaagctgcagactaaacaggctgccatggagaggtctgaaaaagctaagcaactgcgagcacttaggaaatacgggaagaaggtgcaaacggaggttcttcagaagaggcagcaggagaaagcccatatgatgaatgctattaagaaatatcagaaaggcttctctgataaactggatttccttgagggagatcagaaacctctggcacagcgcaagaaggcaggagccaaaggccagcagatgagaaagggcccagtgctaaacgacggtataaaaaccagaagtttggttttggtggaaagaagaaggctcaaagtggaacactcggggagagctatgatgatgtatctagcttccgggccaagacagctcatggcagaggcctcaagaggcctggcaagaaagggtcaaataagagacctgggaaactaacaagagagaaagatga

SEQ ID NO: 226858 - DNA, 555 bp, Homo Sapiens
taagattctgaaaaccctgtcacctgctttatttctggagaagggtaaagggagaagggaaaatattcacttgaatttgaggggcagctaaactggaagcaacaatttcaggcctctaaggttcctctgatccataagggaatgctgaaacttccttgtttggagattcaaagagtttaatttttccctacagcaagatcaacaattttcactgggataaaagaataaagaacaaactcaatagcaccaaatggggttttaacacagaaaacagggccactccttttaaatgcaaatttttacattaaaatatgtttataaatcatagtagttgttttccctcttgattcaacatttctccctcccctaacaggagccctagaacctgaagagcatgtacattactaacgagatatacaatccagccaccctgtccaaactggaatctgattactaatggactacactcgaggctgcccccaagggatgggaagcagtaactacgctctcagggagaatgggtactgaggatgccccaacttttttgtacaaagt

SEQ ID NO: 226859 - DNA, 1277 bp, Homo Sapiens; identical to SEQ ID NO: 193131

SEQ ID NO: 226860 - DNA, 566 bp, Homo Sapiens; identical to SEQ ID NO: 193137

SEQ ID NO: 226861 - DNA, 874 bp, Homo Sapiens; identical to SEQ ID NO: 193142

SEQ ID NO: 226862 - DNA, 894 bp, Homo Sapiens; identical to SEQ ID NO: 193150

SEQ ID NO: 226863 - DNA, 981 bp, Homo Sapiens; identical to SEQ ID NO: 193153

SEQ ID NO: 226864 - DNA, 294 bp, Homo Sapiens
ttgggagccccagccgagcctagccctgcccggccccggaggacttgcaacactccgaggccaggaacgctccgtctggaacggcgcaggtcccagcagctggggttccccctcagcccgtgagcagccatgtccaaccccagcgccccaccaccatatgaagaccgcaaccccctgtacccaggccctctgccccctgggggctatgggcagccatctgtcctgccaggagggtatcctgcctaccctggctacccgcagcctggctacggtcaccctgctggctacccacag

SEQ ID NO: 226865 - DNA, 1404 bp, Homo Sapiens; identical to SEQ ID NO: 193156
  misc_feature (900)..(991): n is a, c, g, or t
  misc_feature (1130)..(1152): n is a, c, g, or t

SEQ ID NO: 226866 - DNA, 1397 bp, Homo Sapiens; identical to SEQ ID NO: 193157

SEQ ID NO: 226867 - DNA, 975 bp, Homo Sapiens
tttgtacaaaaaagttggctgcttccttacagcacccccacctgccagagctgatcctccctaggccctgcctaaccttgagttggcccccaatccctctggctgcagaagtccccttacccccaatgagaggaggggcaggaccagatcttttgagagctgagggttgagggcattgagccaacacacagatttgtcgcctctgtccccgaagacacctgcaccctccatgcggagccaagatggggaatggaactgaggaagattataactttgtcttcaaggtggtgctgatcggcgaatcaggtgtggggaagaccaatctactctcccgattcacgcgcaatgagttcagccacgacagccgcaccaccatcggggttgagttctccacccgcactgtgatgttgggcaccgctgctgtcaaggctcagatctgggacacagctggcctggagcggtaccgagccatcacctcggcgtactatcgtggtgcagtgggggccctcctggtgtttgacctaaccaagcaccagacctatgctgtggtggagcgatggctgaaggagctctatgaccatgctgaagccacgatcgtcgtcatgctcgtgggtaacaaaagtgacctcagccaggcccgggaagtgcccactgaggaggcccgaatgttcgctgaaaacaatggactgctcttcctggagacctcagccctggactctaccaatgttgagctagcctttgagactgtcctgaaagaaatctttgcgaaggtgtccaagcagagacagaacagcatccggaccaatgccatcactctgggcagtgcccaggctggacaggagcctggccctggggagaagagggcctgttgcatcagcctctgaccttggccagcaccacctgcccccactggctttttggtgccccttgtccccacttcagccccaggacctttccttgccctttggttccaga

SEQ ID NO: 226868 - DNA, 812 bp, Homo Sapiens; identical to SEQ ID NO: 193159

SEQ ID NO: 226869 - DNA, 977 bp, Homo Sapiens
taagaatccaggagccgcagggttttccttggagtgctgcgagggctgtgggtgagggtggtgggcacagggagtgggtggggaccttacgtgtgctgttcttctcctaatccagttctcctggttttcccccgtccccgtctctcgtatttgtggtctccttgtctcctctctcccctttttcccctcccccttctctgtctcttgcttggtgttggttttctgtgtgtctctgtgtgtccccgcgccaccccctgtgctgtgtcccaaaactctgcctggctggtgcctgtcttctctcttgagggcatctgtcacctcttctgcttggtcatctgtgttcctctttatttcttcctggccccatcttgctctctccccacaccgcctgtgtctaccctcctctccccgatcccccacttctccctctctcccctgggccccaatgtcttggactctcctaccagtggcgcttgaggctacaagtccaagtatcttcagctcaagaagaagttagaagatgagttccccggccgcctggacatctgcggcgagggaactccccaggccaccgggttctttgaagtgatggtagccgggaagttgattcactctaagaagaaaggcgatggctacgtggacacagaaagcaagtttctgaagttggtggccgccatcaaagccgccttggctcagggctaatgcgccctgaaggcagagtccagggaccttgacccagcccctctcagcagacgcttcatgataggaaggactgaaaagtcttgtggacacctggtctttccctgatgttctcgtggctgctgttgggggcagagattgacgcccccggtctttgcctctgagcgggagagtctgtgtgtatgtgtcttccccggaatccacaccaccccaccctcctcctgtcccgtggtttcatcatatctcttttgcataccccatgtcttcccaattgtccc

SEQ ID NO: 226870 - DNA, 745 bp, Homo Sapiens; identical to SEQ ID NO: 193160

SEQ ID NO: 226871 - DNA, 755 bp, Homo Sapiens
ctttgtacaaaaaagttggcagcaatctccaaatcatctctagtcttgctttcacttgtgagcagttgtcttctatgatcccaaagaagttttctaagtgaaaggaaatactagtgaatcacccacaaggaaaagccactgccacagaggaggcgggtccccttgtgcggcttagggccctgtcaggaaacacacggggacctctctctctagctccagcaggtggcacctcggtacccagcgggtagggcgataatttatatattttccacagtcagggaaggactctcacttatttgtttcaaattgcagtttttataaaacatttttaaaacacaaatggcatgtatgctaatgagatttacccgtgtgctatctgtatttcccttgtacagaacttttacatttttgaatattcctattacttttgattgtgtctgatgggaactgagttgttggcctttgtgaaatgaaatttttggctcttgagaaagaattcttatgaattgttatgcgaattttatatatttaaagagggagatctggggctgttatttttaaacactttttttcataatacatattccgagtagatatttataaaatatatgtttctttcattatgtgtttgtaaaattagagtttaaataaatatgctttgatgcatagttttgaactaatgtaacatgatttttcttttttaaaacagcctgaaaatgtactagtgtttaaaaataaagatttccattttctcc

SEQ ID NO: 226872 - DNA, 936 bp, Homo Sapiens; identical to SEQ ID NO: 193161

SEQ ID NO: 226873 - DNA, 938 bp, Homo Sapiens; identical to SEQ ID NO: 193163
  misc_feature (770)..(825): n is a, c, g, or t

SEQ ID NO: 226874 - DNA, 1024 bp, Homo Sapiens
ttagtataagtgtgtcagtcacaaaagcaaagtcaccaatttctggagggtacatttttcatatttgcttgcaataaacatggcagtgacaccaaccagctgcagcatcttcttgggcacacaattattctgcatgaaccgatcaataatggagacagtcatgtacatggtctcctgcaacaacctgaatttcatttgaacctgtactagccagtcaattaggatggctctcatgtttccagtgacttcccgacccagtaggtattttggtctgactgcttgctcttcctcaagttgtctcagataagcataaatatctttcacatattcactacaaaggtttggatcagctccatcttctgcatccacatcatttactgcaagaattacatcagagaaagcctgacacaggtcttcttctgcaggggcacatccagatgtttccattgggcttggagaggcagtatcaaccaaaataggctcaggcgaaagtttttcttctttaacaggctcaggttctggctcaggttctggctctggcactggctcagacactggcactggcaccagcataggtaccttttcaagaggttttggtagttttttatcaatgacttttccagtagctgaaggttttgcttccttcttcataggcattttggcctgcagttgttcactgactttgttaccaatgtccccaagagctgttcttggcctcagtccgggcttggaggttgcagcaggggccgtaggaacgcgctttgcgcctgccatgttgatcttcgccttattttcagcattaattttcgagttcctggtgactcggagcgccatggcttcctcttcaccaggcagcagctcagcggggagaagcagaacaccggaggcccgaccagccaaggacctacaaccagcagaaaccaacagccgttccgccgcagcacgccgagaagagccagcctagcctcagatttaaaccccgcactgctccctccttattggcctgttcgtggcactcacccaa

SEQ ID NO: 226875 - DNA, 963 bp, Homo Sapiens; identical to SEQ ID NO: 193164

SEQ ID NO: 226876 - DNA, 1018 bp, Homo Sapiens; identical to SEQ ID NO: 193165

SEQ ID NO: 226877 - DNA, 1503 bp, Homo Sapiens; identical to SEQ ID NO: 193166

SEQ ID NO: 226878 - DNA, 1609 bp, Homo Sapiens; identical to SEQ ID NO: 193167

SEQ ID NO: 226879 - DNA, 409 bp, Homo Sapiens; identical to SEQ ID NO: 193168

SEQ ID NO: 226880 - DNA, 982 bp, Homo Sapiens
  misc_feature (585)..(594): n is a, c, g, or t
ttggctccagaatcctgatggtatcaatggatttatcccccgcaaagacatcaaacctgagtatcagtacatgcctagacctgggctccggccagcgcccaacagcgtggatgtcgatgacttcatcaacacgagaatacaggaggcagacaatgaccccacggctcctccttatgactccattcaaatctacggttatgaaggcaggggctcagtggccgggtccctgagctccctagagtcggccaccacagattcagacttggactatgattatctacagaactggggacctcgttttaagaaactagcagatttgtatggttccaaagacacttttgatgacgattcttaacaataacgatacaaatttggccttaagaactgtgtctggcgttctcaagaatctagaagatgtgtaaacaggtatttttttaaatcaaggaaaggctcatttaaaacaggcaaagttttacagagaggatacatttaataaaactgcgaggacatcaaagtggtaaatactgtgaaataccttttctcacaaaaaggcaaatattgaagttgtttatcaacttcgctagnnnnnnnnnncacttggcatacaaaatatttaagtgaaggagaagtctaacgctgaactgacaatgaagggaaattgtttatgtgttatgaacatccaagtctttcttcttttttagttgtcaaagaagcttccacaaaattagaaaggacaacagttctgagctgtaatttcgccttaaactctgggacactctatatgtagtgcatttttaaacttgaaatatataatattcagccagcttaaacccatacaatgtatgtataatacaatgtacaattatgtctcttgaacatcaatcttgttactgcagattcttgtaaatctttttgcttctactttcatcttaagcttatacgtgccagaaataactgtcttgattcaatgagagacgcccta

SEQ ID NO: 226881 - DNA, 957 bp, Homo Sapiens
actttgtacaaaaaagttgggtttttagcggctctctgggtagcagggtggtgtgatagcggcagcgaggggctcggagaggtgctcggattctcgtagctgtgccgggacttaaccaccaccatgtcgagcaaaagaacaaagaccaagaccaagaagcgccctcagcgtgcaacatccaatgtgtttgctatgtttgaccagtcacagattcaggagttcaaagaggccttcaacatgattgatcagaacagagatggtttcatcgacaaggaagatttgcatgatatgcttgcttcattggggaagaatccaactgatgagtatctagatgccatgatgaatgaggctccaggccccatcaatttcaccatgttcctcaccatgtttggtgagaagttaaatggcacagatcctgaagatgtcatcagaaatgcctttgcttgctttgatgaagaagcaactggcaccatacaggaagattacttgagagagctgctgacaaccatgggggatcggtttacagatgaggaagtggatgagctgtacagagaagcacctattgataaaaaggggaatttcaattacatcgagttcacacgcatcctgaaacatggagccaaagacaaagatgactgaaataacttcaaattccagccaaacgttccttgttgccactttgggtattctgagattttctcttgcatgcccttagctttacagcttttgcatttcctgttgtatttattctcagccattttgggcatatgtatctttataatcagactggaaacgggactttctattaatatcattttcagaataaaaaataggataatttaacctaccagcccttctcccccaataactgtggtctatacagagtcaatatattttttcagagaaagttattcgctcgattttttctgaatcataattaaaactttatgataaaat

SEQ ID NO: 226882 - DNA, 672 bp, Homo Sapiens; identical to SEQ ID NO: 193170

SEQ ID NO: 226883 - DNA, 927 bp, Homo Sapiens; identical to SEQ ID NO: 193171

SEQ ID NO: 226884 - DNA, 972 bp, Homo Sapiens; identical to SEQ ID NO: 193172

SEQ ID NO: 226885 - DNA, 913 bp, Homo Sapiens; identical to SEQ ID NO: 193173

SEQ ID NO: 226886 - DNA, 963 bp, Homo Sapiens
tttgtacaaaaaagttggttactcggtggtcggcaagagtctacggaagccgttttcgcttcacttttcctggctgtagagcgctttccccctggcgggtgagagtgcagagacgaaggtgcgagatgagcactatgttcgcggacactctcctcatcgtttttatctctgtgtgcacggctctgctcgcagagggcataacctgggtcctggtttacaggacagacaagtacaagagactgaaggcagaagtggaaaaacagagtaaaaaattggaaaagaagaaggaaacaataacagagtcagctggtcgacaacagaaaaagaaaatagagagacaagaagagaaactgaagaataacaacagagatctatcaatggttcgaatgaaatccatgtttgctattggcttttgttttactgccctaatgggaatgttcaattccatatttgatggtagagtggtggcaaagcttccttttacccctctttcttacatccaaggactgtctcatcgaaatctgctgggagatgacaccacagactgttccttcattttcctgtatattctctgtactatgtcgattcgacagaacattcagaagattctcggccttgccccttcacgagccgccaccaagcaggcaggtggatttcttggcccaccacctccttctgggaagttctcttgaactcaagaactctttattttctatcattctttctagacacacacacatcagactggcaactgttttgtagcaagagcccatagtagccttactacttgggcctctttctagttttgaattatttctaagccttttgggtatgattaaagtgaaaatggcagccagcaaacttgatagtgcttttggtcctagatgatttttatcaaataattggattgattatttaagttcaggtaatgtttatgtaatggaaaaacaaatagcatccttc

SEQ ID NO: 226887 - DNA, 1279 bp, Homo Sapiens; identical to SEQ ID NO: 193174
  misc_feature (1098)..(1123): n is a, c, g, or t

SEQ ID NO: 226888 - DNA, 853 bp, Homo Sapiens
ttggcctcagggagcagctgcagcaggcccgcctggccagcacccctgtgtttaccctgtttacccagctgttccagatcgatactgccggctgcttggaggtcgtccgagagaggaaggccctgccacccaggctgccccaggctggtgctcgggacccaccagtgcatcttctgcaggcatcctcaagtgcccagagcaccccaggccacctcttcccaaacgtgccggctcaagaagcctcaaagagtgccagccacaaagggagccgaagactggcgtccagccgggtggagcgcaccctaccccaggcgtccctgctggcttcaaccggcccccggcccaagcccaagactgtgtcggagctgcttcaggagaagcggcttcaggaggcccgtgccagggaggccacccggggcccggtggtgctcccgtcccagctgctggtctcctcgtctgtgatcctccagccccctctaccacacaccccacacggccgcccagccccgggtcccaccgtcttaaatgtaccgctctctgggcctggggcccccgcagcagccaaacctggcacttctggctcctggcaggaggctgggacttcagccaaggacaagagactctccaccatgcaagccctgcccctcgctcctgtcttctcagaggccgagggcacagcccctgctgcttcccaagcccctgccctgggccccggccagatctctgtgagctgcccccgagagtggtctcggacagtctcaggcccccgctgcatcccggaagcaaggcctgcctgaggcgccaccctttctccccgcagcccccaagcccaaccccactgcccgtccagccc

SEQ ID NO: 226889 - DNA, 1034 bp, Homo Sapiens
actttgtacaaaaaagttgggtaaggaagggcctgtgggtttattataaggcggagctcggcgggagaggtgcgggccgaatccgagccgagcggagaggaatccggcagtagagagcggactccagccggcggaccctgcagccctcgcctgggacagcggcgcgctgggcaggcgcccaagagagcatcgagcagcggaacccgcgaagccggcccgcagccgcgacccgcgcagcctgccgctctcccgccgccggtccgggcagcatgaggcgcgcggcgctctggctctggctgtgcgcgctggcgctgagcctgcagccggccctgccgcaaattgtggctactaatttgccccctgaagatcaagatggctctggggatgactctgacaacttctccggctcaggtgcaggtgctttgcaagatatcaccttgtcacagcagaccccctccacttggaaggacacgcagctcctgacggctattcccacgtctccagaacccaccggcctggaagctacagctgcctccacctccaccctgccggctggagaggggcccaaggagggagaggctgtagtcctgccagaagtggagcctggcctcaccgcccgggagcaggaggccaccccccgacccagggagaccacacagctcccgaccactcatcaggcctcaacgaccacagccaccacggcccaggagcccgccacctcccacccccacagggacatgcagcctggccaccatgagacctcaacccctgcaggacccagccaagctgaccttcacactccccacacagaggatggaggtccttctgccaccgagagggctgctgaggatggagcctccagtcagctcccagcagcagagggctctggggagcaggacttcacctttgaaacctcgggggagaatacggctgtagtggccgtggagcctgaccgccggaaccagtccccagtggatcaggggccacggggcctcacagggcctcctggacaggaaagagtgctgggaggggtc

SEQ ID NO: 226890 - DNA, 1030 bp, Homo Sapiens
caagagaattccctctctagaaagaaagcgttccaccggacaaagttcatggccctgggagcccagcatgcctgcattcacatggcataaagccctacagcaactgtcgccaccagaaagctgagtgtaaggacccatcggagaagcggagcctgggagcgggtgttgagtgggggcttccctctgggagtctccacgggggcagaatcttgcactttgttgctggcccgctggcgaagccctggtgcccgtgaggggctctggtccttggtgtcatgggtcagcagctcctgcaactcctcaaagagctggatgttgagcaggaacgcagtcttggcctcttctatcaccctctgcctgactgcgggagtcatctccagggagttcatgcgggagcggtagagctgcttgaacttggtggcactggcaatgttggggaaggtgaagaaggccaggccctcgccagagctgggcaggtccagggctttctgggcaatctttttgagcacctggcccccagacaggtcacccaggtagcgggtgtaggcgtgggccaccagcagctcgggctctgtgcgccccacctcgtggagccgcttcacatagcgctgcatggctggtgtgtaggggatgacctcctgccagcggggcccgtaccagaaggccaggtcctgctccagggcagccttgcggtgcagctcttctgggaagtagacaggggcgaagactgggctctccttgttgcgctcaatctcctcctccagggccacatagatgtggtacagggaggccatcaccagcttgaagccgtctcgggtcacctggcccttctgaaagttcctcatgaactcagcattctctgcctgggtgtgcacctccttggtggcctccttcagggcctctgacaaatcctggggcatgctgtcgggttgcggacgctccatccggccggtgctgggctcgttcgtgctggctccgcgggcggcggctgcgctgaggacgctcgagagccaacttttttgtacaaagt

SEQ ID NO: 226891 - DNA, 1304 bp, Homo Sapiens
ttggggcctctccccagaagaatcagtcaacgtgttgtcagccttccaggagcctcacctgcagatgccccccagcctgggccagatgagcctgccctttgaccagcctcacccccagggcctgctgccgtgccagcctcaggagcatgctgtgtccagccctgaccccctgctctgctcagatgtgaccatggtggaagacagctgcctgagccagccagtgacagcgtttcctcagggcacttggattggtgaagacatattccctcctctgctgcctcccactgaacaggacctcactaagcttctcctggaggggcaaggggagtcggggggagggtccttgggggcacagcccctcctgcagccctcccactatgggcaatctgggatctcaatgtcccacatggacctaagggccaaccccagttggtgatcccagctggagggagaacccaaagagacagctcttctactacccccacagacctgctctggacacttgctcatgccctgccaagcagcagatggggagggtgccctcctatccccacctactcctgggtcaggaggaaaagactaacaggagaatgcacagtgggtggagccaatccactccttcctttctatcattcccctgcccacctccttccagcactgactggaagggaagttcaggctctgagacacgccccaacatgcctgcacctgcagcgcgcacacgcacgcacacacacatacagagctctctgagggtgatggggctgagcaggaggggggctgggtaagagcacaggttagggcatggaaggcttctccgcccattctgacccagggcctaggacggataggcaggaacatacagacacatttacactagaggccagggatagaggatattgggtctcagccctaggggaatgggaagcagctcaagggaccctgggtgggagcataggaggagtctggacatgtggttactagtacaggttttgccctgattaaaaaatctcccaaagccccaaattcctgttagccaggtggaggcttctgatacgtgtatgagactatgcaaaagtacaagggctgagattcttcgtgtatagctgtgtgaacgtgtatgtacctaggatatgttaaatatatagctggcaccttagttgcatgaccacatagaacatgtgtctatctgcttttgcctacgtgacaacacaaatttgggagggtgagaacactgcacagaagacagcagcaagtgtgctggcctctctgacatatgctaacccccaaatactctgaatttg

SEQ ID NO: 226892 - DNA, 936 bp, Homo Sapiens
ctttgtacaaaaaagttgggaaaatggcggtgtctacagtgttctcgacttcgtcgctgatgcttgctctgtcaaggcacagcctattgtctcctttgctcagtgtgacatcattcagacgcttctacagaggtgacagcccaacagattcccaaaaggacatgattgaaatccctttgcctccatggcaggagagaactgatgaatccatagaaaccaaaagagcccgcctgctctatgagagcagaaagaggggaatgttggaaaactgcattcttcttagtctttttgctaaagaacatctgcagcacatgacagaaaagcagctgaacctctatgaccgcctgattaacgagcctagtaatgactgggatatttactactgggccacagaagctaaaccagccccagaaatatttgaaaatgaagtcatggccctgctgagagactttgctaaaaacaaaaacaaagagcagagactgcgtgccccagatcttgagtacctctttgaaaagccacgttgagctgtgctccacggcctggcatgggggttcagtctgtggatggtaactacttatgatggacgttagccttgcttccggcttcttagatgcccagctgccctaccccagaccactggtcctgcctcaagtgatggacataaccctctcctaggacatacatgtaaatgcacaatgtgactcattctcatacttttttgttcagctctgagcctcaaaagtgatttgtcagcagcgctggcatgcaggctttgcctggctgctatctctagaggcaagtctgccacgagagggcactgcaggcgaagcagttgtgcttgctcattgcctcagcccaagtgtactcaaaaaaaaaaggcagccagctgtgcgtgctgtatggaaagcctcccgccctccctgcagctccccgccc

SEQ ID NO: 226893 - DNA, 867 bp, Homo Sapiens; identical to SEQ ID NO: 193179
  misc_feature (483)..(501): n is a, c, g, or t

SEQ ID NO: 226894 - DNA, 1202 bp, Homo Sapiens; identical to SEQ ID NO: 193180

SEQ ID NO: 226895 - DNA, 1193 bp, Homo Sapiens
ccagcagcagcctcctgggcaccaccagaaagcgatgtacttaagggcctcaggcggtcgagaggcaacgtggcttccacatgtgtgggaatgagactaaaaagctggctcaaagcaaaatatgaacttataggaaaggagggccctggactgggcaggaagagagagactcgtggcaattctagagatggcagtgcccagccatcaagttctaaagagacccatttgggagtgactctgcctttagccaggttgagctcacagacacacaggcccagaggccgaattcgcggccagcttccaggtgtgccggggcctctcgttgcttttaacagtccagccagagagggttcagttagtgagagtatcttcccatgatcaaacacagatgcccgagtttctcttcactatttcttccgcttcagtttcatatcttttttgttctttgtctctctgttcttcaacttcttgctctgtttgggttcttgtttggcctctaacttccttttcttgtcacttttcaggctgatgatcgaggcgttcggcccagctttgttcaaaacttcattccactcttcatcgtccccacggattatgtattcagagaggtccatgctcttcagcttccctacttccttcttgtgtttctcctgaaattcctttgctgcttcatctaggtcgtcactgagggtcttcatcgtgggctccatgaccacatccttcgctgccaccatctgctcctcaatggccttttcctgaacttcattaaatagcttcacaactttgcggatgatccggttgaaaagtcccatcaactggcccgagggcagctcaatctccttttccagctggtccacagacttatgctgcaggccaatccccaagagaagagccgactgagccgcagacagggccaggtcccccagctggttcaggaaatagatgcgagagatggccgggatcatgtccatgatgaggtgatagtccaccatattccgtgaatacatctccagccgcttcaggtcataggggaggaagagtgcttccagctcctcccggctcagggcaggctgggctggcttccccatgttcctgttctgaatgatgttcagagccagggaaggagagaaggtaggggaactggtagccaacttttttgtacaaagttgcgcctttatagaaaagcattgctc

SEQ ID NO: 226896 - DNA, 1065 bp, Homo Sapiens; identical to SEQ ID NO: 193188
  misc_feature (100)..(147): n is a, c, g, or t
  misc_feature (194)..(232): n is a, c, g, or t

SEQ ID NO: 226897 - DNA, 905 bp, Homo Sapiens
ttggcctctccctcttcctctgctcccgcggggtctgtgctgagaataatggcccggttggcccgggacgagtggaatgattaatgatgttttgcagcagttttctacgtctgaaattttttatgtctctggaacccagaatttgctaagagatggaggaacctcagaaaagctatgtgaacacaatggaccttgagagagatgaacctctcaaaagcaccggccctcagatttctgttagtgaattttcttgccactgctgctacgacatcctggttaaccccaccaccttgaactgtgggcacagcttctgccgtcactgccttgctttatggtgggcatcttcaaagaaaacagaatgtccagaatgcagagaaaaatgggaaggtttccccaaagtcagtattctcctcagggatgccattgaaaagttatttcctgatgccattagactgagatttgaagacattcagcagaataatgacatagtccaaagtcttgcagcctttcagaaatatgggaatgatcagattcctttagctcctaacacaggccgagcgaatcagcagatgggagggggattcttttccggtgtgctcacagctttaactggagtggcagtggtcctgctcgtctatcactggagcagcagggaatctgaacacgacctcctggtccacaaggctgtggccaaatggacggcggaagaagttgtcctctggctggagcagctgggcccttgggcatctctttacagggaaaggtttttatctgaacgagtaaatggaaggttgcttttaactttgacagaggaagaattttccaagacgccctataccataggaaaacagcagccacagggagagccatccttcatggagctagaacgtgtcaaagcattaggc

SEQ ID NO: 226898 - DNA, 898 bp, Homo Sapiens
ttggcaagcagatccgcaagcagaagcctgtgttacagaagtacgctgagctgctggtgtcgcagggtgtggtcaaccagcctgagtatgaggaggaaatttccaagtatgataagatctgtgaggaagcttttgccagatctaaagatgagaagatcttgcacattaagcactggctggactctccctggcctggcttcttcaccctggacgggcagcccaggagcatgtcctgcccctccacgggtctgacggaggatattctgacacacatcgggaatgtggctagttctgtgcctgtggaaaactttactattcatggagggctgagccggatcttgaagactcgtggggaaatggtgaagaaccggactgtggactgggctctagcggagtacatggcgtttggctcgctcctgaaggagggcatccacattcggctgagcggccaggacgtggagcggggcacattcagccaccgccaccatgtgctccatgaccagaatgtggacaagagaacctgcatccccatgaaccatctctggcccaatcaggccccctatactgtgtgcaacagctcactgtctgagtacggcgtgctgggctttgagctgggcttcgccatggccagtcctaatgccctggtcctctgggaagcccaatttggtgacttccacaacacggcccagtgtatcatcgaccagttcatctgcccgggacaagccaagtgggtgcggcagaatggcatcgtgttgctgctgccccatggcatggagggcatgggtccagaacattcctccgcccgcccagagcggttcttgcagatgtgcaacgatgacccagatgtcctgccagaccttaaagaagccaacttcgacatcaatcagctatatgactg

SEQ ID NO: 226899 - DNA, 781 bp, Homo Sapiens
agcaatgctttttccctaaaaagaaaactttgtacaaaaaagttggagtaactactgtccggtgtcgcatatgctgccaagaatgccgtcacccagttcgtttccagcatgagtgcttctgctgatgtgttggccctggcgaaaatcgaaatcaagttatccgatattccagaaggcaagaacatggctttcaaatggagaggcaaacccctgtttgtgcgtcatagaacccagaaggaaattgagcaggaagctgcagttgaattatcacagttgagggacccacagcatgatctagatcgagtaaagaaacctgaatgggttatcctgataggtgtttgcactcatcttggctgtgtacccattgcaaatgcaggagattttggtggttattactgcccttgccatgggtcacactatgatgcatctggcaggatcagattgggtcctgctcctctcaaccttgaagtccccacgtatgagttcaccagtgacgatatggtgattgttggttaagagacttggactcaagtcataggcttctttcagtctttatgtcacctcaggagacttatttgagaggaagccttctgtacttgaagttgatttgaaatatgtaagaattgatgatgtatttgcaaacattaatgtgaaataaattgaatttaatgttgaatactttcaggcattcacttaataaagacactgttaagcactgttatgctcagtcatacacgcgaaaggtacaatgtcttttagctaattctaattaaaaattaca

SEQ ID NO: 226900 - DNA, 1518 bp, Homo Sapiens; identical to SEQ ID NO: 193191
  misc_feature (1014)..(1025): n is a, c, g, or t
  misc_feature (1057)..(1092): n is a, c, g, or t
  misc_feature (1233)..(1250): n is a, c, g, or t

SEQ ID NO: 226901 - DNA, 1466 bp, Homo Sapiens; identical to SEQ ID NO: 193192
  misc_feature (93)..(146): n is a, c, g, or t

SEQ ID NO: 226902 - DNA, 1289 bp, Homo Sapiens; identical to SEQ ID NO: 193193
  misc_feature (790)..(802): n is a, c, g, or t
  misc_feature (834)..(869): n is a, c, g, or t
  misc_feature (1010)..(1027): n is a, c, g, or t

SEQ ID NO: 226903 - DNA, 1281 bp, Homo Sapiens; identical to SEQ ID NO: 193194

SEQ ID NO: 226904 - DNA, 910 bp, Homo Sapiens; identical to SEQ ID NO: 193195
  misc_feature (69)..(116): n is a, c, g, or t
  misc_feature (208)..(254): n is a, c, g, or t

SEQ ID NO: 226905 - DNA, 1047 bp, Homo Sapiens; identical to SEQ ID NO: 193197

SEQ ID NO: 226906 - DNA, 722 bp, Homo Sapiens; identical to SEQ ID NO: 193198
  misc_feature (294)..(312): n is a, c, g, or t

SEQ ID NO: 226907 - DNA, 1425 bp, Homo Sapiens; identical to SEQ ID NO: 193200
  misc_feature (199)..(234): n is a, c, g, or t

SEQ ID NO: 226908 - DNA, 1347 bp, Homo Sapiens
  misc_feature (1114)..(1123): n is a, c, g, or t
ttggcataattaactgtttgacaggtaatattctcatatctcgaacctcaatcccaaatgctgcctctgaagaaggagacgaagatgattgggcatccaacaaagttatgtttaaaataggtgatcttgggcatgtaacaaggatctccagtccacaagttgaagagggcgatagtcgttttcttgcaaatgaagttttacaggagaattatacccatctaccaaaagcagatatttttgcgcttgccctcacagtggtatgtgctgctggtgctgaacctcttccgagaaatggagatcaatggcatgaaatcagacagggtagattacctcggataccacaagtgctttcccaagaatttacagagttgctaaaagttatgattcatccagatccagagagaagaccttcagcaatggcactggtaaagcattcagtattgctgtccgcttctagaaagagtgcagaacaattacgaatagaattgaatgccgaaaagttcaaaaattcacttttacaaaaagaactcaagaaagcacagatggcaaaagctgcagctgaggaaagagcactcttcactgaccggatggccactaggtccaccacccagagtaatagaacatctcgacttattggaaagaaaatgaaccgctctgtcagccttactatatactgagctactcctttcccacctccccctgaacactgtgacaagaggaagctaggttgaaatcactgatagaatccagtttgcaattactttctcgattggtgtcagtagttttactgattaggacttttattgtgaattacagttgaaagctgtattttgatgattgctatgtcaggctttcatctaatcttaccagtctgtcttctgtaggatgtgtcactgttggatgttacaccagcctttccagggttaaccactgtggtggtgtgctgcttatagtttgctgttgcattgtaataaaaggtgtctttccctgtagtgacctgtaaaaagtactcaagggctttattacagacataccctccctttgaaaagggacatgctaaaagactcattactactcagccttcaatgtacctgtgtgtccatcttatatttcnnnnnnnnnnaattgtgaattagacttgtatatcccactgggagcactttgtaggcattgcatgaaccatgggatgatgattctgtggaggtattgccttgtgaatttgctgctattttagttttgtctttgctgtaaacttgtagcattaaacaatcattgttgttaatagtcttctttttgaaacaattatgtgaaatgtatagctgcttttgatgaaaagcagctattgcc

SEQ ID NO: 226909 - DNA, 348 bp, Homo Sapiens; identical to SEQ ID NO: 193201
  misc_feature (46)..(57): n is a, c, g, or t

SEQ ID NO: 226910 - DNA, 804 bp, Homo Sapiens; identical to SEQ ID NO: 193203

SEQ ID NO: 226911 - DNA, 900 bp, Homo Sapiens
ctttgtacaaaaaagttggccaaaacttgtcccatctcatgattccctacatctgacataaggaaagtaagtgctcagaaaaatgtgcaggtcaataagttgcaaaagttggggctgcaattaatgctaacataagagctaaatgcttgattagaaatgatctcaaaaccttttagaatttccaaaatcttcatattactgaaactgtcggaatatatgggtcttgaaattcagaagatgatagtcactcttcccatatttataggctattaaggcaagggatatcttaaacatcatattactttatttagatttctactactccaattattaatgttatgtatttctcattgttttacttcttcatggtattatgaagactatatagatgattcaaccaagcctgcaaatctccctcttgtggaattccactggacccaatctgttttccatttccattgcaatactactaaagccatacaatatcaagcaccctccctctaggtccagggactatcacagaagaagcaggcatgtaagattttaaggactggtttcgaggggtcgagtgtaggaaaacagcctgttgcattgtaagagtgatgtcatcttgaagagcagctggcatgatgactgctgtttgactcctgcataccaagatattctgcagcaatgtctttaaacagtgccggtagtacagataacccctcataaagatgcttatctaacctccccagtgttcaggtgtttcacaagaaagtctgagatatgactagctacacgttttgccaaaaatgcttgttatataaagggtacttttgggagggtgagtgccgccatttagtggctgctagaaacattgcttctgtttgtaagttcctattaaatgtttctttctga

SEQ ID NO: 226912 - DNA, 489 bp, Homo Sapiens; identical to SEQ ID NO: 193212

SEQ ID NO: 226913 - DNA, 900 bp, Homo Sapiens
ggtgaaaggctcgatgcaggaagagcgcctctgggaggaagcgccagttcactgtccagtgaacagaaactggcggccaaggtcaaaggagcgggacaggtagccgctggggttctccagcaggaagggcagccccagcaccacgtgaaggccagcacagattcccagcttggggagggccccacggaagccaaactgtgtgaggagaagaaacagtaacccaggggcgaagagcagcacattcatcttcacagagactgccaggctgaaaaagcagcaaccccagccccagcgctgggccagcaggaggttgatactgaggaagagcagcaccatggccactgggtcattgaagagccgcagcacaaagatggagtggacacggtaagaggcgcagcacatgaagaaaaagacgaagggaggtaccttgcaggtctggtgatagatcaagaagacaagcagcaaggtagccaggtagagcacagcaaagatgttctgggccatgcggatgtcagtgcctcggctggtggcatagtacaaccccataaagatgtacacgaaaccagctgggtacacaagtggtccggtgtcaccctgcagttgggtatagtcataggtaccattgatgacgccttctacctcggccatgtaggccttccagtcaatctctgtgtatgccaccctgtgaatgacccagaaggtgatgcccacctccgccaggcagaggcaggcggccaccagcagcgtgtagcgcggctcccgcagcagcaggcgccgctcttgccaggcgcgctgcagccattgcttgcagagtccctctgcctgggccgcggaaccggaccggccgcgtttccgcagcccagccgccatcttaacgccaacttttttgtacaaagttgg

SEQ ID NO: 226914 - DNA, 1726 bp, Homo Sapiens
ttggcttctgcagctccagaaaaagcagagaaccctgctggccatggctccaaggaggtgaaaggcaaaactcacacttactatcaggtgctgattgatgctcgtgactgcccacatatatctcagagatctcagacagaagctgtgaccttcttggctaaccatgatgacagtcgggccctctatgccatcccaggcttggactatgtcagccatgaagacatcctcccctacacctccactgatcaggttcccatccaacatgaactctttgaaagatttcttctgtatgaccagacaaaagcacctccttttgtggctcgggagacgctaagggcctggcaagagaagaatcacccctggctggagctctccgatgttcatcgggaaacaactgagaacatacgtgtcactgtcatccccttctacatgggcatgagggaagcccagaattcccacgtgtactggtggcgctactgtatccgtttggagaaccttgacagtgatgtggtacagctccgggagcggcactggaggatattcagtctctctggcaccttggagacagtgcgaggccgaggggtagtgggcagggaaccagtgttatccaaggagcagcctgcgttccagtatagcagccacgtctcactgcaggcttccagtgggcacatgtggggcacgttccgctttgaaagacctgatggctcccactttgatgttcggattcctcccttctccctggaaagcaataaagatgagaagacaccaccctcaggccttcactggtaggccagctgaggccccaagtgcccaggcttggtcaccgggaagaacaactctcatcccacaattgctgcagaactcttctctccccatcatgggccacagtgggtctcttaatttgattgtggggttctttttgtggggaggggtggtataacttttcttcagaagacccatgtgggacacctccaaggctggcctcctcataagccctgcctacaccatgttccagtaaacctctccaccaaggaactgtgttcagctgccacaggcctggaggagtttcctggcctgtcacgtgaggtttgatcagtaaaccagtgcacgcttggccacccttgccatttcttctcccagagtctcaggctccccttctgacccagtgtgcgcccttgactgctttctttgctgcccttccagggagctgcccccctggtagggcatgtgcctgtttccctctcagcctggaggctggctggacatctcctagggtcactgtgcctctcagctagttggcgggggtgctggactggactcttgttcactttaccttctgccaaatgcagagagggaggccagtgtcagggtcggagtggcctggctcttagcactgaccgaccattgccatttctggcctcgctaggcccaggagaggagggaggcaagccagtcgggtttcctggagcaatgggtgtgccagccctcagcatgactctgccaagcatccagaccacaaatgcaggaatttggctgaggagcagctttaggtatggattgatgactaagtcaagctacttcctgagcttctctcagatttccaagagccagagatgaattgtgctgcatcttgccccaattcttaggatttcttttcctccgccactgcagtgattgttagaggtagttttcttgaattaatattaaatcacagttccagccctta

SEQ ID NO: 226915 - DNA, 1090 bp, Homo Sapiens
ttggggaacgccaagaggagtctctgtccgcgcggccggccctggagaccgaggggctgcgcttcctgcacaccacggtgggctccctgctggccacctatggctggtacatcgtcttcagctgcatccttctctacgtggtctttcagaagctttccgcccggctaagagccttgaggcagaggcagctggaccgagctgcggctgctgtggaacctgatgttgttgttaaacgacaagaagctttagcagctgctcgactgaaaatgcaagaagaactaaatgcgcaagttgaaaagcataaggaaaaactgaaacaacttgaagaagaaaaaaggagacagaagattgaaatgtgggacagcatgcaagaaggaaaaagttacaaaggaaatgcaaagaagccccaggaggaagacagtcctgggccttccacttcatctgtcctgaaacggaaatcggacagaaagcctttgcggggaggaggttataacccgttgtctggtgaaggaggcggagcttgctcctggagacctggacgcagaggcccgtcatctggcggatgaggctaagaatcttgttagtgtcacttttgacattagcaagatgaacccttaaccctcgattcaattgccttacgcacgcttttcacagtgactagccaaggggaggtggggttgatttctgttcctaactacacctgcatatgtcagggctccagtcagcaaaaggtatagatgttgcctctaggcatgaggtcattggtcacattctacttggagacagtgattgcattcattgatttcatggttaattgctagttggtaggtaaaggcctctagatgattagcaatcttgataaaagaggcctagtaatgttcttttggggttagaaatccttgctgctaggacagtctctgtgacaggttgcgttgaatgatgtcttccttatcaatggtgagcccaccagtgaggattactgatgtggacagttgatggggtttgtttctgtatatttatttttatgtacagaactttgtaaaaacaaactatttaaaaaccagaataaccatttttagcatctttattc

SEQ ID NO: 226916 - DNA, 1117 bp, Homo Sapiens
  misc_feature (177)..(185): n is a, c, g, or t
  misc_feature (577)..(585): n is a, c, g, or t
  misc_feature (949)..(965): n is a, c, g, or t
gtacaaaaaagttggcaaaggtgtaattctctatggtttgaaatggatcatacgaggcatgtaataccaagaattgttactttacaatgttcccttaagcaaaattgaatttgctttgaacttttagttatgcacagactgataataaacctctaaacctgcccagcggaagtgtgnnnnnnnnnaaatttaaatacagaaacaactggcaaaaattgaactaagatttacttttttttccatagctgggatataggctgcagctatagttgaacaagcagtctttaaaaactgctgtgaaacacaggccatcagggaaaacgaaatgctgcactattaaattagaggtttttgaaaaatccaactctcatcctgggcagaggttgcctagttggtatagaatgttaagtttcaagaaagtttacctttgctttaggtcataagttccttatttgattgctgtatatggatacatggctgttcgtgacattctttatgtgcaaatttgtgatttcaaaaatgtcctgccagtttaagggtacattgtagagccgaactttgagttactgtgcaagannnnnnnnncatgctgtcatttgtaatatgttttgtgagaatccttgggattaaagttttggttacaaattgttctttaacttgaaagcctgtttttccttgcaaactcaaatctgtgagcttggtaccaagtccaggtataacattcctattggaagccatacttatattttcttgtaaagtgcttttgaattaataaaatattagcataattgtgtatagtcagttgaacccactgttaccattgttcttatcccatgggaagcagttggttacacgattcttattttataagaaacagctgagaggcactatggattagtcttctgaagtgaaggaaatatagatgtcacctaagtgatagttaacccannnnnnnnnnnnnnnnnaggcatagaagcccagttcagggtccataatatttagtgaccaacattttaaagtatagcagcaaccctggtttctaaaacacaaagtaagttgcccattaaccaatggcttttatctttagcatgaaaactttccacaggtctaaaaattg

SEQ ID NO: 226917 - DNA, 960 bp, Homo Sapiens; identical to SEQ ID NO: 193218

SEQ ID NO: 226918 - DNA, 1172 bp, Homo Sapiens; identical to SEQ ID NO: 193219
  misc_feature (840)..(848): n is a, c, g, or t

SEQ ID NO: 226919 - DNA, 1351 bp, Homo Sapiens; identical to SEQ ID NO: 193220
  misc_feature (952)..(961): n is a, c, g, or t

SEQ ID NO: 226920 - DNA, 643 bp, Homo Sapiens; identical to SEQ ID NO: 193221
  misc_feature (166)..(174): n is a, c, g, or t
  misc_feature (566)..(574): n is a, c, g, or t

SEQ ID NO: 226921 - DNA, 875 bp, Homo Sapiens; identical to SEQ ID NO: 193222
  misc_feature (70)..(78): n is a, c, g, or t

SEQ ID NO: 226922 - DNA, 974 bp, Homo Sapiens; identical to SEQ ID NO: 193223
  misc_feature (916)..(924): n is a, c, g, or t

SEQ ID NO: 226923 - DNA, 1179 bp, Homo Sapiens; identical to SEQ ID NO: 193224
  misc_feature (182)..(190): n is a, c, g, or t
  misc_feature (954)..(967): n is a, c, g, or t

SEQ ID NO: 226924 - DNA, 894 bp, Homo Sapiens; identical to SEQ ID NO: 193225
  misc_feature (492)..(501): n is a, c, g, or t

SEQ ID NO: 226925 - DNA, 1243 bp, Homo Sapiens
  misc_feature (1007)..(1065): n is a, c, g, or t
ttggcacactgcagcagaagctgaatgagcagcagagtgtgcttcagcgtattgccgcccccaacatgaaggccatggaaaagctggaaagtgtccgagacaagttccaggagacctcagatgagtttgaagcagcccgaaagcgagcaaagaaggccaagcaggcattcgaacagatcaagaaggagcgctttgaccgcttcaatgcttgttttgaatctgtggctaccaacattgatgagatctataaggccctgtcccgcaatagcagtgcccaggcattcctgggccctgagaaccctgaagagccctacttggatggcatcaactacaactgtgtggctcctgggaaacgcttccggcctatggacaacttgtcaggcggggagaagacagtggcagctctggccctgctctttgccatccacagctacaagccagcccccttcttcgtcctggatgagattgatgctgccttggataacaccaacattggcaaggtggcaaattacatcaaggagcagtcgacttgcaacttccaggccatcgtcatctctctcaaggaggagttctacaccaaggccgagagcctcattggagtctatcctgagcaaggggactgtgtgatcagcaaagtcctgaccttcgacctcaccaagtacccagatgccaaccccaaccccaatgagcagtagcagtatttttgccctcccgccctgtctggatccctaagctgtccctctcccaatctctggatatttgactcccaaccttccccctacctcctggccctttttggtgtagtcatgggatttaggcactgctaatcaagcatgaagaggaacagaggtgatgttaggtctggagcaaaaattcctgaacgacagggagtattctggcctctgaaaggaggtgctgagctgaacagggccatctgttcatcacacacacccccttcctccccctcatcacccataatcgtgggccccttgggcctcttgcccacnnnnnnnnnnnnnnnnnnnnnnnnnnnnnnnnnnnnnnnnnnnnnnnnnnnnnnnnnnnttgcaaaataataaaggatattggagacctgttttagaagagcctaggctgaatttgattccaagagagcttagatgacagcacccctgagctgggcaaaggtactcacgacctcatagagtcttaacagttacctgaaactgcccttcattcactcatttgtgtattcattcattta

SEQ ID NO: 226926 - DNA, 934 bp, Homo Sapiens
ctttgtacaaaaaagttggctctgtcgcccgcgcctggcctaccgcggcactcccggctgcacgctctgcttggcctcgccatgccggtggacctcagcaagtggtccgggcccttgagcctgcaagaagtggacgagcagccgcagcacccgctgcatgtcacctacgccggggcggcggtggacgagctgggcaaagtgctgacgcccacccaggttaagaatagacccaccagcatttcgtgggatggtcttgattcagggaagctctacaccttggtcctgacagacccggatgctcccagcaggaaggatcccaaatacagagattggcatcatttcctggtggtcaacatgaagggcaatgacatcagcagtggcacagtcctctccgattatgtgggctcggggcctcccaagggcacaggcctccaccgctatgtctggctggtttacgagcaggacaggccgctaaagtgtgacgagcccatcctcagcaaccgatctggagaccaccgtggcaaattcaaggtggcgtccttccgtaaaaagtatgagcttgagggccccggtggctggcacgtgttaccaggccgagtgggatgactatgtgcccaaactgtacgagcagctgtctgggaagtagggggttagcttggggacctgaactgtcctggaggccccaagccatgttccccagttcagtgttgcatgtataatagatttctcctcttcctgccccccttggcatgggtgagacctgaccagtcagatggtagttgagggtgacttttcctgctgcctggcctttataattttactcactcactctgatttatgtttgatcaaatttgaacttcattttggggggtattttggtactgtgatggggtcatcaaattattaatctgaaatagcatccagaatgtaaaaa

SEQ ID NO: 226927 - DNA, 959 bp, Homo Sapiens; identical to SEQ ID NO: 193234

SEQ ID NO: 226928 - DNA, 696 bp, Homo Sapiens; identical to SEQ ID NO: 193235
  misc_feature (618)..(643): n is a, c, g, or t

SEQ ID NO: 226929 - DNA, 912 bp, Homo Sapiens; identical to SEQ ID NO: 193236

SEQ ID NO: 226930 - DNA, 1238 bp, Homo Sapiens
ttggctccgacccgccccgcggcgcattgtgggatgctgtcggcttgtcaggtggtggaggaaaaggcgctccgtcatggggatccagacgagccccgtcctgctggcctccctgggggtggggctggtcactctgctcggcctggctgtgggctcctacttggttcggaggtcccgccggcctcaggtcactctcctggaccccaatgaaaagtacctgctacgactgctagacaagacgactgtgagccacaacaccaagaggttccgctttgccctgcccaccgcccaccacactctggggctgcctgtgggcaaacatatctacctctccacccgaattgatggcagcctggtcatcaggccatacactcctgtcaccagtgatgaggatcaaggctatgtggatcttgtcatcaaggtctacctgaagggtgtgcaccccaaatttcctgagggagggaagatgtctcagtacctggatagcctgaaggttggggatgtggtggagtttcgggggccaagcgggttgctcacttacactggaaaagggcattttaacattcagcccaacaagaaatctccaccagaaccccgagtggcgaagaaactgggaatgattgccggcgggacaggaatcaccccaatgctacagctgatccgggccatcctgaaagtccctgaagatccaacccagtgctttctgctttttgccaaccagacagaaaaggatatcatcttgcgggaggacttagaggaactgcaggcccgctatcccaatcgctttaagctctggttcactctggatcatcccccaaaagattgggcctacagcaagggctttgtgactgccgacatgatccgggaacacctgcccgctccaggggatgatgtgctggtactgctttgtgggccacccccaatggtgcagctggcctgccatcccaacttggacaaactgggctactcacaaaagatgcgattcacctactgagcatcctccagcttccctggtgctgttcgctgcagttgttccccatcagtactcaagcactataagccttagattcctttcctcagagtttcaggttttttcagttacatctagagctgaaatctggatagtacctgcaggaacatattcctgtagccatgggaagagggcccaaggctcagtcactccttggatggcctccctaattctccccgtggcaacaggtccaggaaaggcccatgga

SEQ ID NO: 226931 - DNA, 1041 bp, Homo Sapiens; identical to SEQ ID NO: 193242

SEQ ID NO: 226932 - DNA, 855 bp, Homo Sapiens; identical to SEQ ID NO: 193244

SEQ ID NO: 226933 - DNA, 965 bp, Homo Sapiens; identical to SEQ ID NO: 193245

SEQ ID NO: 226934 - DNA, 1081 bp, Homo Sapiens
ttggcgccgtcccccagctgcgcaaccctaggaactctcgggaacttggctgtgttgtcctgcctcagagacaaattcatctattgtaggcctagcccctgcctttgaaaacaaggaaaggttggtagaacatcaacacagcatggaatttccagggaggtctcatttcaaaacttcataaagaacaagaaccacctggacttctgtgagggcgatgattaaactggcctgagtttgaatgaaaggataatgtatgctcaacctgtgactaacaccaaggaggtcaagtggcagaaggtcttgtatgagcgacagccctttcctgataactatgtggaccggcgattcctggaagagctccggaaaaacatccatgctcggaaataccaatattgggctgtggtatttgagtccagtgtggtgatccagcagctgtgcagtgtttgtgtttttgtggttatctggtggtatatggatgagggtcttctggccccccattggcttttagggactggcctggcttcttcactgattgggtatgttttgtttgatctcattgatggaggtgaagggcggaagaagagtgggcagacccggtgggctgacctgaagagtgccctagtcttcattactttcacttatgggttttcaccagtgctgaagacccttacagagtctgtcagcactgacaccatctatgccatgtcagtcttcatgctgttaggccatctcatcttttttgactatggtgccaatgctgccattgtatccagcacactatccttgaacatggccatctttgcttctgtatgcttggcatcacgtcttccccggtccctgcatgccttcatcatggtgacatttgccattcagatttttgccctgtggcccatgttgcagaagaaactaaaggcatgtactccccggagctatgtgggggtcacactgctttttgcattttcagccgtgggaggcctactgtccattattgctgtgggagcggtactctttgcccttctgctgatgtctatctcatgtctgtgttcattctacctcattcgcttgcagcttttaaagaaaa

SEQ ID NO: 226935 - DNA, 1025 bp, Homo Sapiens
tttgtacaaaaaagttggggtggagctgccgcgctgtccgcgttatctcctcccggtgagaacgaaccgcagtgtccaccggcgaggagccagccctgtcccggtcagagaaagacgacgaggatacctgggagcgggcggcggccgggctgggccgcgccggtgcgggctggcgactctgctcctccgcttgctgctgtctctgggaactgggtgccagcgctgaggggcttccagcggacagggacccccttccccggctcccctgcccaccctgccggggagggcggaagatgccggtgaagaagaagagaaaatcccctggggtggcagcagcagtagcggaagacggaggcctcaaaaagtgtaaaatctccagctattgcagatcccaaccccctgctagactaataagtggagaggaacatttttcaagcaagaagtgcctggcttggttttatgaatatgcaggtcctgatgaagttgtagggccagaaggaatggaaaaattttgtgaagacattggtgttgaacctgaaaatattattatgttagttttagcgtggaaattggaggctgaaagcatgggattttttaccaaggaagaatggttaaagggaatgacttcattacagtgtgactgcacagaaaagttacaaaacaaatttgactttttgcgctcacagttgaatgatatttcgtcatttaagaatatctacagatatgcctttgattttgcaagggataaagatcagagaagccttgatattgatactgctaaatctatgttagctcttctgcttgggaggacatggccactgttttcagtattttaccagtacctggagcaatcaaagtatcgtgttatgaacaaagatcaatggtacaatgtattagaattcagcagacagtccatgctgatcttagtaactatgatgaagatggtgcttggcctgttcttcttgatgaatttgttgagtggcaaaagtccgtcagacatcatagcaagaactatgtgaagaaaa

SEQ ID NO: 226936 - DNA, 1126 bp, Homo Sapiens
actttgtacaaaaaagttggcgcccagcgaccccagctccggtcccagccccggccgtcccggcgtcgcttcggagcgcggcggcagctgactgcgccttcacgatccgctgggacccgcgagccccgccgccgttatgaacatccgcaatgcgaggccagaggacctaatgaacatgcagcactgcaacctcctctgcctgcccgagaactaccagatgaaatactacttctaccatggcctttcctggccccagctctcttacattgctgaggacgagaatgggaagattgtggggtatgtcctggccaaaatggaagaggacccagatgatgtgccccatggcatatcacctcattggctgtgaagcgttcccaccggcgcctcggtctggctcagaaactgatggaccaggcctctcgagccatgatagagaacttcaatgccaaatatgtctccctgcatgtcaggaagagtaaccgggccgccctgcacctctattccaacaccctcaactttcagatcagtgaagtggagcccaaatactatgcagatggggaggacgcctatgccatgaagcgggacctcactcagatggccgacgagctgaggcggcacctggagctgaaagagaagggcaggcacgtggtgctgggtgccatcgagaacaaggtggagagcaaaggcaattcacctccgagctcaggagaggcctgtcgcgaggagaagggcctggctgccgaggatagtggtggggacagcaaggacctcagcgaggtcagcgagaccacagagagcacagatgtcaaggacagctcagaggcctccgactcagcctcctagagcctgccccatcccctcctcaccccacgagctttcacaataaatttgctccgtggcactggggaactttgtgtgtgagcgcgcgcacatttagagggtgtgtttctccaggtcctctggtggggatgtgagccttggccttttgacccagagcatcctgccaggcccgagtacaaggaaagagctttggaggtgggactccctagtctcatgaccttcagagctgtggccccggggaaggaggccctggacttatgggagagaccctgccttggaggtctgc

SEQ ID NO: 226937 - DNA, 941 bp, Homo Sapiens
aaagcccactttgtacaaaaaagttggaaattaattgccgaaggtactggttttaagtgtagttgccgacgcaatggcagcctttgcagtggaacctcaggggcccgcgttaggatctgaaccaatgatgctgggttcacccacatctccaaagccaggagttaatgcccagttcttacctggatttttaatgggggatttgccagctccggtgactccacaacctcgatcaattagtggcccttcagtaggagtaatggaaatgagatcacctttacttgcaggtgggtcaccaccacaaccagttgtaccagctcataaagataaaagtggcgctccaccagttagaagtatatatgatgacatttctagcccaggacttggatcaacacctttaacttcaagaagacagccaaacatttcagtaatgcagagtcctcttgttggagttacatctactcctggaacagggcaaagtatgtttagtccagcaagtatcggtcagccacgaaagacgacattatctcctgcccagttggatcctttttatactcaaggagattctttgacttcagaagatcacctcgatgactcttgggtgactgtatttgggtttcctcaagcatctgcttcctacatattactacaatttgcacagtatgggaatatcttaaaacatgtgatgtctaatacaggaaattggatgcatattcgttatcaatctaaactgcaggctcggaaagccttaagcaaagatgggaggatttttggagaatccatcatgattggtgtaaaaccatgtattgacaaaagtgttatggaaagcagtgacagatgtgctttatcatctccatctttagcctttacaccaccaatcaaaactctaggtacaccaacacaacctggaagtactcctaggatttctaccatgagacctcttg

SEQ ID NO: 226938 - DNA, 528 bp, Homo Sapiens; identical to SEQ ID NO: 193255

SEQ ID NO: 226939 - DNA, 969 bp, Homo Sapiens; identical to SEQ ID NO: 193256

SEQ ID NO: 226940 - DNA, 1095 bp, Homo Sapiens
attacaggtgtgagccactgtacccagccaatgattagcattctcactaataatagcatctgagctggctcctagagtacaagaaaaaggagttcacagtactttaaaatagataaaattcagttgagttagtaacctaactcattgttagtactagttgctgctccttgtagaccaatatgaaattacttttagctcgataaaaccaaaagtgtcactttatgcttcagactgaaatgcggggatctagatgtgctaatgcttgtcagtaacaactaacaagtttttctgtatgtaacttctaggtgaaagacccctgacaaaagacaatcatcttctgggtacatttgatctgactggaattcctcctgctcctcgtggggtcccacagattgaagtcacctttgagatagatgtgaatggtattcttcgagtgacagctgaagacaagggtacagggaacaaaaataagatcacaatcaccaatgaccagaatcgcctgacacctgaagaaatcgaaaggatggttaatgatgctgagaagtttgctgaggaagacaaaaagctcaaggagcgcattgatactagaaatgagttggaaagctatgcctattctctaaagaatcagattggagataaagaaaagctgggaggtaaactttcctctgaagataaggagaccatggaaaaagctgtagaagaaaagattgaatggctggaaagccaccaagatgctgacattgaagacttcaaagctaagaagaaggaactggaagaaattgttcaaccaattatcagcaaactctatggaagtgcaggccctcccccaactggtgaagaggatacagcagaaaaagatgagttgtagacactgatctgctagtgctgtaatattgtaaatactggactcaggaacttttgttaggaaaaaattgaaagaacttaagtctcgaatgtaattggaatcttcacctcagagtggagttgaaactgctatagcctaagcggctgtttactgcttttcattagcagttgctcacatgtctttgggtgggggggagaggaggattgggccatcttaaaagcgggtaaaaa

SEQ ID NO: 226941 - DNA, 1344 bp, Homo Sapiens; identical to SEQ ID NO: 193260

SEQ ID NO: 226942 - DNA, 1219 bp, Homo Sapiens
aaggaacagcagattatggacactgcagagactgaaagctgccctttctgtgcccagttcaggccaaggctctctcctgccagctgccccgggtcatccctcagttcacgccacggctggggcccaccctagaaacctctgccagccatggctagatccgactccaggctcctctacagattctaaggctcaggctcaagatgaagctatcctagtctcaaatacaggagcctgtgccttgctgggtgacagcggaagccagcacacaaggcccagttcctatcctagtgggtgagactggtggggaggattgtggccagagctgacccctccccaaggacatccctcgggggctacctttcctcctcctgctccccccggcctcctggaaaactgctcagaagtcagcagagcctgggcagcgtgtggcctgtggggcagccaagcactggagggggacgacagcctaactcctatgagagcagagggaggggtggtggcacagcgaggagggcggtggtgtgggcagcgctgaggcactattctttagttgagaagcaaggggcagtcatgggtgtggagagggcagtggcccaagcaaccctaggcagcatctacgagaagttcttgaagacgtccaggtcgaaggccgtgtccaggaggcgctgcagctccgtcaggtgggtcttcttgttgccggtggctggagcagccgctgggtcccggccggcataccagacgggcttggcgcggctgatggtggtccgaagtcttggcttcacgtagtcatagtagccttggttcttgtgctcctcctggcaccaggccagctcagcattggggtacttctgcacctccttcagcaggaggtcaaaggggaatggcgacagctgctcaatccttgtgatggccacctgccccaccatgtcgcgtgctttgcgctcccgggtgaggtcataatacactttgccggtgcagaagagaagccttttgacattttctgggttctgagctgcagggccatcttctgggatcacccgctggaagtgggttcctggaagcatctcatcaaagctggatctggcctcggggtggcgcaacagggatttgggggtgaagataattaacggcttccggaatggcagcaggatctggcgtcgtagcacgtggaagaagttgccaggagtggagcagttgacaacaacccaattgcagccaa

SEQ ID NO: 226943 - DNA, 959 bp, Homo Sapiens; identical to SEQ ID NO: 193263

SEQ ID NO: 226944 - DNA, 1015 bp, Homo Sapiens; identical to SEQ ID NO: 193268
  misc_feature (552)..(562): n is a, c, g, or t

SEQ ID NO: 226945 - DNA, 935 bp, Homo Sapiens; identical to SEQ ID NO: 193269

SEQ ID NO: 226946 - DNA, 1020 bp, Homo Sapiens
ttggcaacaatccctgggtctgcgactgccacatggcagacatggtgacctggctcaaggaaacagaggtggtgcagggcaaagaccggctcacctgtgcatatccggaaaaaatgaggaatcgggtcctcttggaactcaacagtgctgacctggactgtgacccgattcttcccccatccctgcaaacctcttatgtcttcctgggtattgttttagccctgataggcgctattttcctcctggttttgtatttgaaccgcaaggggataaaaaagtggatgcataacatcagagatgcctgcagggatcacatggaagggtatcattacagatatgaaatcaatgcggaccccagattaacaaacctcagttctaactcggatgtctgagaaatattagaggacagaccaaggacaactctgcatgagatgtagacttaagctttatccctactaggcttgctccactttcatcctccactatagatacaacggactttgactaaaagcagtgaaggggatttgcttccttgttatgtaaagtttctcggtgtgttctgttaatgtaagacgatgaacagttgtgtatagtgttttaccctcttctttttcttggaactcctcaacacgtatggagggatttttcaggtttcagcatgaacatgggcttcttgctgtctgtctctctctcagtacagttcaaggtgtagcaagtgtacccacacagatagcattcaacaaaagctgcctcaactttttcgagaaaaatactttattcataaatatcagttttattctcatgtacctaagttgtggagaaaataattgcatcctataaactgcctgcagacgttagcaggctcttcaaaataactccatggtgcacaggagcacctgcatccaagagcatgcttacattttactgttctgcatattacaaaaaataacttgcaacttcataacttctttgacaaagtaaattacttttttgattgcagtttatatgaaaatgtactga

SEQ ID NO: 226947 - DNA, 877 bp, Homo Sapiens
ttggagaagagagggccaagatggagacggcggcggctgtagcggcgtgacaggagccccatggcacctgcccagccccacctcagcccatcttgacaaaatctaaggctccatggagccaccacggggcccccctgccaatggggccgagccatcccgggcagtgggcaccgtcaaagtatacctgcccaacaagcaacgcacggtggtgactgtccgggatggcatgagtgtctacgactctctagacaaggccctgaaggtgcggggtctaaatcaggactgctgtgtggtctaccgactcatcaagggacgaaagacggtcactgcctgggacacagccattgctcccctggatggcgaggagctcattgtcgaggtccttgaagatgtcccgctgaccatgcacaattttgtacggaagaccttcttcagcctggcgttctgtgacttctgccttaagtttctgttccatggcttccgttgccaaacctgtggctacaagttccaccagcattgttcctccaaggtccccacagtctgtgttgacatgagtaccaaccgccaacagttctaccacagtgtccaggatttgtccggaggctccagacagcatgaggctccctcgaaccgccccctgaatgagttgctaaccccccagggtcccagcccccgcacccagcactgtgacccggagcacttccccttccctgccccagccaatgcccccctacagcgcatccgctccacgtccactcccaacgtccatatggtcagcaccacggcccccatggactccaacctcatccagctcactgggccagagtttcagcactgatgctgccggtagtagaggaggtagtgatgggaccccccc

SEQ ID NO: 226948 - DNA, 1133 bp, Homo Sapiens
gcgcccaccggccacaccagccctccggactgtcacgactctgggccacttggggcgacctctttctctgaacacctggagaattctgtcaaatgaccctggagaaaaaccttttatactacatgtttttccataaaatggcagctaagtcccctcaaataaaacctttaagtatttcattctcattcttaccagtgaaatcaagtgggacaggaataagctatttaactgacattagcgacaggataaacccctctaaaaaaccgcagggggagtgggaactgattcagatttggcaaagctgcaaatctttccccttcatgggctggaacgaagctggtgggtgaagacaaatctaagtgtgccaatggcaagaactgcaggctatgaaatgacaggtcagacacaggactgtataaatcgtggcactataaagatgagaaggcaggtccatgatacagctgggagcaagcctttggagcatcgcttccagaaattctatctgtcctgtagtaagtagtagcatccagataaaatcagtggttctcctttctcctcttccaaacacattctgagagtttcttgtttaaataactatgtacacacccagcaagcctggtctctcttttacatgagggtccttcacttgagggtcctacaatggctttagagtcggttccaattgcctttttggagatttactgcttgggaccaaacctccctctgataaggacagtttctcaagttcagcttcaagttcagcatctgagatcctagggttaggcacgctgttggtaaaatgcctattgcgggggttgtcaggcagatccaaaggttctttggtggtatcctgaaggaggatgtccaattccttctccagttcttcactgtcaaaatctaagccatttgttaccccaccagccagagtctgagaaacttcatcctgggtgtcacagagctcttggatctgatccacgaggctctctgccttctccactgtgacatccttcatggagagtttgagtgctcctaccccagcctggtaggcgttaaaaaccatctgatctgtctgggaggcatagatccggtccaggatgccttgaacagtgtccagcttggcatgcaaggcccaa

SEQ ID NO: 226949 - DNA, 1463 bp, Homo Sapiens; identical to SEQ ID NO: 193278
  misc_feature (1095)..(1113): n is a, c, g, or t

SEQ ID NO: 226950 - DNA, 932 bp, Homo Sapiens
gggccaggtagtacaggtactgcaggacgggggccttgcgcagaaggagcccgtgggaaatgttctcagccagcatgaaggctgacaccaggtggtggatgggcccagcctccccacagtgtggctcagcacaaacgtgtggaagcccctctgcctgcgcaggtggttcaacatggccatgttggcaaaggtgtagtacaggtagtaggcatagggtgggttgtcctcctccacccacgcctcaggcagggggctctccaggttgaagacatggttttcaggcttggactcatcatccacgctgtcaaaaccatccacgtgctctaagaagagatgcagttccgggtggctggcagggtgcacagtggcctcgaacagtggcaggaagatgttctccagcatctcctggaagttggccagctggcccttggtacggtacacatcaaagaggcggggcacctgcaccagccagcgcacgttgggggagtgcacgcggtgcatgacggcccagcgcgccagcttgtcccactcatccctcgagcgcccgtaaatggagagccgcagctctgcattctggtatttgctctcctccaggtctgacatcacctccttgatgatgtgagcaaagtacttcccagataccctgttgtccgtcttgatgaagatctctcggaggacggactccccaatagggttgtatttggcattaaacttgtcaaagcgatggaaagtgttcctgtccgcgtgcacatccagcgtgtccacactcaggtcgtaggccgtgagattcatgctctcaaagacctcccgcagcgtctgttcacggccctgctccacgtgcacgatctcctccaggtgccgcttcattgcccgcttgatgaagccagcagatgcttctggttcatgcaggacgaggcatggatgtgggccaa

SEQ ID NO: 226951 - DNA, 1033 bp, Homo Sapiens
gccttgttgtttacgttccgatgtcctcttatactcttcaagttctccttcctgtgagatgactaaatgggttaggaggagctggtgggccatgatcatcatcttcaaattgcatagtagaaggtggcttatccacaacaattccagcaagcaactgagattgtggtcctgctgttttcaagtcatatcgattttgttcccgaatcttatttctcttttctagtacctcattcgggtttgtgtttaaaggaacaaactgatttggatcttcaattttgataggtgttccaccactaactttagatgagtcttctgctttcatccacgtgattttggttcggggactggtttctccgttccgagactcctcaggcacattcactttcatgtaagtatttggtgagttcagccatcttgttttttcacgctgttgcctctgtgccatgtatttgagaggagagagtggcactgtatcgtcttcaaaggaaaaagcagtcacagttgctgggatttccacatcactcttgtgcctaggcttctctcgaatgagaggatgcctgtaagcatagcctgttctatacccctaagggagggaaaagccacatttgaagcatcaaacctgtatcaataacagcatttggatcctaattccttttgtatacaaatgatttaaaagactcctttgctaaaaaacaaagaaaaaggcatccttccaaacaccacataactttcatgtaacactggagctgaaattatgcaaatttcaagacctagttagagctgataacagctgatattgcaatttccactcacacaactgttcccgacaaacgaacagttctaagttgctgaccagaagtgcttttctatctataaaactgttctggggaagcaaatctcagtgctcatttaagtctctgttcctgggtctgaaggcagtcagccttctgagccttcacagaagagggtaaaatctaaaataacatttgccaaaccatacatcttttaaggggttactatccaaaatatccaa

SEQ ID NO: 226952 - DNA, 951 bp, Homo Sapiens; identical to SEQ ID NO: 193280

SEQ ID NO: 226953 - DNA, 935 bp, Homo Sapiens
attatctttggcacctcagtgtcactatccgcttttgaatcagatgcaatcgcattcttgcgtttcattcgtaaaacttcatcttcactatcactgcctctgcagattctgatttatgatcctgttcctcttcatcatctgaatgcctgtgttcttcatctgaggcctgtggcctttcatcatcagaatttgcattttctcttcatcagacagctgtggttgttcttcatcatcagaattctgtttctcatcatcattatcagaagctaccggccgttcatcatcagaattagccttttcctcctcagatagctgttgtctctcatcatcggaaagctgaggcctctcctcatcatctgtgttctgcattttctcatcatcgtcagaattctgcagcttatcttcatcagatccttgtgccctctcctcatcatcagaattttgtatcttttcatcatctgactggtcacttttatcttctctgccccatttttcatcatctgaatgtgctttttcagaaccttctgcttctgaatgatggctccctccatccgatctatgaccttcgtcttcatcatcattaggggcttctgatccactgtgctgatctacatctgaggggtcattgtcctcatggtcagaacgctcagaagcttctgatctattgtctgatctttcagagtgattatcactaccactatgatgtgaagctccctcgtcctcactgtcatctccaaacagttccttattacttggttgtcctgaatcacctctttcatcctgatcactttcacttccagaggcattactgccagaggcagcattctcttgatcagaatctgagtcagatccagaatcagaatctttacgctcagcttcgctgtcggcgtcgctcccgaagagatcctccatatccgccattatcgccacgccaa

SEQ ID NO: 226954 - DNA, 787 bp, Homo Sapiens
ttggataagggagaaaaaagaactaatgtctatgtcttctgtagtcagcaaaagtctggatccattttctattttgtgttccattggcacactttgtgttcaaatttcagtgcagtcctttcaaaatactcgctaagggttgcctaagtgtctgccttactttctgattgtccttttctgagagcatggttaagaacatcttaaccatatagctgttgaaaaaatctgtttattaaataacaagttcacttctgtttatgttttgagtttagaaaatttgacttgaaaatttagattattaataaatttatttttaaatattaaagtcaaatttcaaatcacccagtgttgaagaatttgcagatgtatacaatactttttctaattatgtcttttctatctccatgcctggctttttctaattatatcctagagaaaaagactaatggtatttcaaagctgtgtatttgtgacgagataaagaagagtcttaaacatcttgtttgggagaatgcacaggccagtcaggagacccacctcctcctgtgccctgagctgctgagacccgacagatcatgaaggctagtaaagggcagagaaggccctgagccatcagtttacactcgaattgttgactcccctttgtggtgtttttgaaggctgcttataccaacagctaatgtggattagtgcttatgatcttgaaaaagtcttgaccaagaatcctaaactccaccactcctcccattccagcttaacactatcagaataatatccaaattccaga

SEQ ID NO: 226955 - DNA, 954 bp, Homo Sapiens
ggcctagagagcaagatacctgcacacacctgctgcatcctgggtaacacatcactaagtaactggcactgagggagatacccctggaacctctctttcacagttcaatcttggatggggttactaatattgatccatctgctatcaacaaaagtggccaggaaacctggccccatggagtggggcttgggacagccctactgggaaggggtccctcagccatgctgtggggggccctgggccctgaccttagcaggttatgggcagctgtctcggagctcagggcgcagccagcacacacaggagcccacaggacagccacgtcttcacagaaactacagaagtcaggacccaggcgaggacctcaggaacaagtgccccctgcagacagagagacgcagtagcaacagcttctgaacaactacataataatgcggggagaatcctgaagaccactgcatcccacaagcactgacaaccacttcaggattttatttcctccactctaacccccagatccatttatgagaagtgagtgaggatggcaggggcatggagggtgaagggacagcaaggatggtctgagggcctggaaacaatagaaaatcttcgccctttagcatatcctggactagaaaacaagagttggagaagaggggggttgatactaaggtcagctatgtcaccccacttcccagctcctcattagaatacccagtcagccctggtcaggccagtaggagtactagggtgagaaaattctgaccaaggacagatgacccatccaacccctaagatcagaagggtggtggggcactggaaggcaggaatgggattggcccatgcctcaccttctcctaataacaaaagagaatgaagatggaaaacctcaggccttcgcctcccttcccccaatgccctgggtccctaacacacaccatggacttgccccaa

SEQ ID NO: 226956 - DNA, 1154 bp, Homo Sapiens
  misc_feature (322)..(330): n is a, c, g, or t
  misc_feature (835)..(843): n is a, c, g, or t
ctttgtacaaaaaagttggatttttccctcccataaaattttcacctttactttcaaagtgttttgttgtagttggctattgcagagagtgcattgtcctatcattcctaaacctggtctgctttctacattcatggtatggaaaccatgtgattctttgtacagtttatcctgatgttgcttgtaatgcagtagaggctatttcgccttcgcttttctttctcgacctttttgtaaaccctataattatgaagcgattgcttgagaaaataacatataaacatagaatagaatagactgaccaagatggttcacagtttcnnnnnnnnnctaggttatttataatgtatttctgaaccacttggcacacaaattcacaacacttaatgttcatattttgagtaaaggaagctaaaaccatgtttgctttctggtactacatgcattagcgaaaggttaagtaagttttgttctccactgaagtaatacttaacatctcagaaaaaattttgcatgttctgtagttttgtattaaatcagtcatttcatatgcactatatcaagtacaaacaggtagtttacctgtttatagtagtgtactaacaaagtctcccttgcagcttcagactgttatctataggcttatcgttcaaatacagcacttgaatatcccaagtagttcttctacgcatagctcacctttctaaacccagttaagcatggaagagaggtagtaggtaggtgcagtgtgtggaagctgcaaacaagtaggccttttattcattgatatcttttcccaagtactggattttaaatctgtatgtatctgtttgannnnnnnnnctaatatttcagttgagctgctgttttcttccatgcaatattgtatactcaattgtgtatagaagaagctggtgagagtgccctcctacataaataagcaattgcagtgttttgcatgcaaaatataaaaaatttaaattgtcctgattctattttgtaagtggagaaacaatcatatctttctaagcggtaatggaggaagactagtgctttgtgcattttgatatatttgagttcattttttccacaatgtcatactttttgacgcaattgggtttctcataagtatcctagttcatgtacatcccgaa

SEQ ID NO: 226957 - DNA, 1473 bp, Homo Sapiens; identical to SEQ ID NO: 193288
  misc_feature (135)..(177): n is a, c, g, or t
  misc_feature (1325)..(1334): n is a, c, g, or t

SEQ ID NO: 226958 - DNA, 812 bp, Homo Sapiens; identical to SEQ ID NO: 193289
  misc_feature (127)..(169): n is a, c, g, or t

SEQ ID NO: 226959 - DNA, 1752 bp, Homo Sapiens
cccatccccaggggcccagcctccgatgacgtcctcagagacacggctttagtgctggggggctgctgtgtgcctgccacccccaggagagggtgctggccagcataccatagtgaggttgcatctggtgccaccaggttgaactgaggcccagggccccagagagatgacagatagctggtgacagacagcccagggcggctggctgacagagtgaggggacacatgggcaggacctgcccggccccccaatgccacattgcgcatagctgcagaagtccttaacatttccctacgtgaatcggattgttctgagggctgaggccacacccggagaacaaactggatgaaataaattaaaacccgcaggatagttttcttccctaccccgctgcgggggagggtgctgcccacagcacaaaaacgtctttccatctgggctcgagaggacagcgtggcttctctcaaatgcacccgagaaataaaaaccattaaatacagatcatggcacgaggccgcctctccatccctccaagctatcgtccagcgcagtccaccgccgcctcaggccgtgccgctggccgagtaggagaactgggggaagtggggcctgcgctcgctgtccacacactccatgctgtcatcttggtcaggtggtgtgatggtgatcatctgggccgtgaactcctcatcaaaatacctggtgtcagtctccgacgtgacctggggcttgaagggtgggctgagcttcttctcgtacacgtgctgccacacgataccggcaaagaagcgatgctgcatgatctccttggcgtcctcggagcccccgccaagcctctgcttggggtccttcttgagcagccctgaaagcaaggacttggcctcgggaccaagcgtgcgcgggaagcggatctcctccatgaggatgagctcaaaaagcttctcatggtcctggttgtagaagggcaggcgaccgcacatcatctcgtacatgaccacgcccagcccccaccagtccactgcacggccgtagtcattgtcctccagcacctcgggggccaggtactcaggtgtgccgcaaaaggtcttcatggtggcaccgtccttgatcccctccttgcacagcccgaagtctgtgatcttaatgtgcccgtccttgtccagcatgaggttctccagcttgaggtcccggtacaccacgttcttctccgagtgcaggtagtccagggctgacacaatctcagcgccatagaagcgggcccggtcctcggagaacacacgctcccgggacaggtggaagaacagctcgcccccgttggcgtactccatgacaaagcagaggcggtcgtgggtctggaaagagtacttcagggctgtgaggaaggggtgcctggagttctgcaggacgcggttctcggtgagtgtgtgggccacctcgtccttggccacgatgacttccttcttgaggatcttcatggcgtagtagcggcctgtggccttctccttcaccaggatcaccttgccgaaagtgcccttgcccagcagcttcaggtactcaaactcgttcatggtcacgcggtgcttgggcttggccagggacacctccatctcttcagcccctgagttgtcactgggtgagcccgaccggaagtccatctcctcctcctcctgcttcttgaggccgtcagccacagtctggatggcggttgtccactcctcccgctcctcaggagtctccacatggaaggccaa

SEQ ID NO: 226960 - DNA, 1356 bp, Homo Sapiens
  misc_feature (860)..(869): n is a, c, g, or t
gagcaatgctttttccataatgccaactttgtacaaaaaagttggctgagcaactaaaacctttaacagtgaatttggatttccaaagaaacaacaaaactgtcttcaaggcttcaagctttgctggctatgtgggcatgttaacaggattcaaaccaggactgttcagtcttacactgaatgaacgtttcagtataaatggtggttatctgggtattctagaatggattctgggaaagaaagatgccatgtggatagggttcctcactagaacagttctggaaaatagcacaagttatgaagaagccaagaatttattgaccaagaccaagatattggccccagcctactttatcctgggaggcaaccagtctggggaaggttgtgtgattacacgagacagaaaggaatcattggatgtatatgaactcgatgctaagcagggtagatggtatgtggtacaaacaaattatgaccgttggaaacatcccttcttccttgatgatcgcagaacgcctgcaaagatgtgtctgaaccgcaccagccaagagaatatctcatttgaaaccatgtatgatgtcctgtcaacaaaacctgtcctcaacaagctgaccgtatacacaaccttgatagatgttaccaaaggtcaattcgaaacttacctgcgggactgccctgacccttgtataggttggtgagcacacgtctggcctacagaatgcggcctctgagacatgaagacaccatctccatgtgaccgaacactgcagctgtctgaccttccaaagactaagactcgcggcaggttctctttgagtcaatagcttgtcttcgtccatctgttgacaaatgacagatcnnnnnnnnnnccccctatcagttgatttttcttatttacagataacttctttaggggaagtaaaacagtcatctagaattcactgagttttgtttcactttgacatttggggatctggtgggcagtcgaaccatggtgaactccacctccgtggaataaatggagattcagcgtgggtgttgaatccagcacgtctgtgtgagtaacgggacagtaaacactccacattcttcagtttttcacttctacctacatatttgtatgtttttctgtataacagccttttccttctggttctaactgctgttaaaattaatatatcattatctttgctgttattgacagcgatataaattttattacatatgattagagggatgagacagacattcacctgtatatttcttttaatgggcacaaaatgggcccttgcctctaaatagcactttttggggttcaagaagtaatcagtatgcaaagcaatcttttatacaata

SEQ ID NO: 226961 - DNA, 900 bp, Homo Sapiens; identical to SEQ ID NO: 193291

SEQ ID NO: 226962 - DNA, 921 bp, Homo Sapiens; identical to SEQ ID NO: 193293
  misc_feature (153)..(162): n is a, c, g, or t

SEQ ID NO: 226963 - DNA, 944 bp, Homo Sapiens; identical to SEQ ID NO: 193297

SEQ ID NO: 226964 - DNA, 837 bp, Homo Sapiens; identical to SEQ ID NO: 193300

SEQ ID NO: 226965 - DNA, 926 bp, Homo Sapiens; identical to SEQ ID NO: 193301

SEQ ID NO: 226966 - DNA, 1187 bp, Homo Sapiens; identical to SEQ ID NO: 193302

SEQ ID NO: 226967 - DNA, 1102 bp, Homo Sapiens
tgtacaaactatagagcctgtcagcaccaaagctgacagaagttataccttactcctttcctttcccctgaacaaacctgctaatcccactaattcaggaatttgagtagagatggggaacaagaacccagatgctgtcccctcaccccctctcctgtatttctcaggtccagttcaaatctaaaattctacttttagagttgaaacagagtaataacttatctaaccctcttttcctacaaaggagaaagataaaaggcacaaaggttaccgccaaggcccgtcagctgtgtagtggcaaagccgagaccgagtctcctaagtccccgtcagtgtggttttcaccacaggactgtctcttgtcgttttcccctaatgccttctcctgccttttctgtgcctagtttttggctcttcacatattccatattgattttgacgctctgtatattggcatcaggtggcagctgaatatcttttgaattactcgaaggtaaagccagatgccagaatgaaggtgtagccagtgtttcccatatgcccctggagccccacttattgaggccagcagaataggtgcagagatgaagtgagcttagagatgttgcaaatgctctttatcccttcagctctctgatctgctctttcttcatgatacttagtctgcagggcatattaagatcatcccagaggttcaggcagttcctgtcatctctgaaaagactgggggatatgaaatcttccccctaccccacttaatgcgttggatatgatttttcaaagaatgcttcatgcccaaaataccagcctgtttagcagtgttacactgtttgatctgcgggcacttgttgcattgcctggcacccaatattcagggtccatgactaagactggtcttctcagatgccctgcttaaatcaggggcacttcaggctccacaggcgtcatgttggactgagacctaactcactggactcagaggaggaatcgtggaaaacaagagcaaaactaccccacacccctatttcatgtctgaaataaccctgtttcataccagttgcaaagcttgtggggagcggtcccacaaagcactttcttaaac

SEQ ID NO: 226968 - DNA, 1206 bp, Homo Sapiens
ttggctctccggttctgggtgaacatcctgaagaacccccagtttgtctttgacatcgacaagacagaccacatcgacgcctgcctttcagtcatcgcgcaggccttcatcgacgcctgctccatctctgacctgcagctgggcaaggattcgccaaccaacaagctcctctacgccaaggagattcctgagtaccggaagatcgtgcagcgctactacaagcagatccaggacatgacgccgctcagcgagcaagagatgaatgcccatctggccgaggagtcgaggaaataccagaatgagttcaacaccaatgtggccatggcagagatttataagtacgccaagaggtatcggccgcagatcatggccgcgctggaggccaaccccacggcccggaggacacaactgcagcacaagtttgagcaggtggtggctttgatggaggacaacatctacgagtgctacagtgaggcctgagacacatggagagttggtcaggctgctgctgggagaaatggacgcccactgggcctcaacttgatcttctaccccgtgcctgtgactcagactgggaaatactgagcagagacggctggggcgggggcaggaggaggggctgctctctgagacaggggcgcccccgccttgacccctgggcacctccatcccctcccacctgtccccagatcagtctctgggatggaggccagagagctggtcaggctcccccatctgcccagcacggcctgcactgtgcccacccacttgctccacaacgtccagttggtcctgctgccaagagccccgtgcatccaggcggccaagcacaaactgggggagaggaggccgccagcccggaggctgcagcccagaaactctacctcatccacactggtgcagggagccctccttgaactgacctttgattggtttctgcttcaactaccaaaatgttatctccacttccccctcacccgtagaggatcctggccacagacagtttcaagtagtgtcagatttttgttgcttgggcggctgttggtagagtgggcagtgcccgcgctgtggggtgctctgtgggcttctccaggagcagggagggtggaggggagggatggggggcacaggagctgggagccccgtctccaggaaaggagaggggttaagatgcaccgaggctgtagctgggctacttgatcttgc

SEQ ID NO: 226969 - DNA, 620 bp, Homo Sapiens
aaaaaagttggaaaaggggggcaaagaaagaaagagaaaaaggagggcgagtggcgagcaggggcctcggccgccacccacacgccccgaagcgtgctcgtcccccgcgcggggctcccggccgccgccctcggccatcggctgctccccggtggcccaggcctcggactccgcggccggcccggcgcggcccagcgccctcagggatcatggcccaggtagcagtgtccaccctgcctgttgaagaagagtcctcctcagagaccaggatggtggtgacattcctcgtgtctgccctcgaatccatgtgtaaagaactggccaattccaaggcagaagtggcctgcatcgcagtgtacgaaacagacgtgtttgtcgtcggaaccgagagaggatgcgcttttgttaatgccaggacggattttcagaaagattttgcaaaatactgtaggtgttttaattttatcctttgtattcccaatctcaaaaggatcgcaggcaagacttccacagtattttcttctaagctatcataagcattctcctagaaacgatcctaacacatcttcttggattcagcttaccaaatatacactgcttaacactgcagagtccaagac

SEQ ID NO: 226970 - DNA, 1230 bp, Homo Sapiens; identical to SEQ ID NO: 193310

SEQ ID NO: 226971 - DNA, 1060 bp, Homo Sapiens; identical to SEQ ID NO: 193311

SEQ ID NO: 226972 - DNA, 1117 bp, Homo Sapiens; identical to SEQ ID NO: 193312

SEQ ID NO: 226973 - DNA, 675 bp, Homo Sapiens
ttggcaggactcgctaagtgttcgctacgcggggctaccggatcggtcggaaatggcagaggtggaggagacactgaagcgactgcagagccagaagggagtgcagggaatcatcgtcgtgaacacagaaggcattcccatcaagagcaccatggacaaccccaccaccacccagtatgccagcctcatgcacagcttcatcctgaaggcacggagcaccgtgcgtgacatcgacccccagaacgatctcaccttccttcgaattcgctccaagaaaaatgaaattatggttgcaccagataaagactatttcctgattgtgattcagaatccaaccgaataagccactctcttggctccctgtgtcattccttaatttaatgccccccaagaatgttaatgtcaatcatgtcagtggactagcacatggcagtcgcttggaacccactcacaccaatccagtgaccgtgtgtgggctggcggctcttctcccccaccaacggaacccctgtgtgcaccaaccttccccagagctccggagcgccctctcctcacttccaggttttggagcaagagcttgcaggaagcccgcacccagcttccttctgaccttcagttcactttgtcgcccttggagaaagctgtttttctttaactaaaaataaccaaaatgct

SEQ ID NO: 226974 - DNA, 953 bp, Homo Sapiens
ccttaaaaagccaactttgtacaaaaaagttggcacctttgcccctgctgcgatgaccctgtcgccacttctgctgttcctgccaccgctgctgctgctgctggacgtccccacggcggcggtgcaggcgtcccctctgcaagcgttagacttctttgggaatgggccaccagttaactacaagacaggcaatctatacctgcgggggcccctgaagaagtccaatgcaccgcttgtcaatgtgaccctctactatgaagcactgtgcggtggctgccgagccttcctgatccgggagctcttcccaacatggctgttggtcatggagatcctcaatgtcacgctggtgccctacggaaacgcacaggaacaaaatgtcagtggcaggtgggagttcaagtgccagcatggagaagaggagtgcaaattcaacaaggtggaggcctgcgtgttggatgaacttgacatggagctagccttcctgaccattgtctgcatggaagagtttgaggacatggagagaagtctgccactatgcctgcagctctacgccccagggctgtcgccagacactatcatggagtgtgcaatgggggaccgcggcatgcagctcatgcacgccaacgcccagcggacagatgctctccagccaccgcacgagtatgtgccctgggtcaccgtcaatgggaaacccttggaagatcagacccagctccttacccttgtctgccagttgtaccagggcaagaagccggatgtctgcccttcctcaaccagctccctcaggagtgtttgcttcaagtgatggccggtgagctgcggagagctcatggaaggcgagtgggaacccggctgcctgcctttttttctgatccagaccctcggcacctgctacttaccaactggaaaattttatgcatcccatgaagcccagatacacaaaattccacccc

SEQ ID NO: 226975 - DNA, 830 bp, Homo Sapiens; identical to SEQ ID NO: 193314

SEQ ID NO: 226976 - DNA, 1756 bp, Homo Sapiens
ttgggagaaagggaagtgcattctcgcttccgtagcggtctccgccggttgggggaaagtaattccggctgttgcaccatggcgtccatggggaccctcgccttcgatgaatatgggcgccctttcctcatcatcaaggatcaggaccgcaagtcccgtcttatgggacttgaggccctcaagtctcatataatggcagcaaaggctgtagcaaatacaatgagaacatcacttggaccaaatgggcttgataagatgatggtggataaggatggggatgtgactgtaactaatgatggggccaccatcttaagcatgatggatgttgatcatcagattgccaagctgatggtggaactgtccaagtctcaggatgatgaaattggagatggaaccacaggagtggttgtcctggctggtgccttgttagaagaagcggagcaattgctagaccgaggcattcacccaatcagaatagccgatggctatgagcaggctgctcgcgttgctattgaacacctggacaagatcagcgatagcgtccttgttgacataaaggacaccgaacccctgattcagacagcaaaaaccacgctgggctccaaagtggtcaacagttgtcaccgacagatggctgagattgctgtgaatgccgtcctcactgtagcagatatggagcggagagacgttgactttgagcttatcaaagtagaaggcaaagtgggcggcaggctggaggacactaaactgattaagggcgtgattgtggacaaggatttcagtcacccacagatgccaaaaaaagtggaagatgcgaagattgcaattctcacatgtccatttgaaccacccaaaccaaaaacaaagcataagctggatgtgacctctgtcgaagattataaagcccttcagaaatacgaaaaggagaaatttgaagagatgattcaacaaattaaagagactggtgctaacctagcaatttgtcagtggggctttgatgatgaagcaaatcacttacttcttcagaacaacttgcctgcggttcgctgggtaggaggacctgaaattgagctgattgccatcgcaacaggagggcggatcgtccccaggttctcagagctcacagccgagaagctgggctttgctggtcttgtacaggagatctcatttgggacaactaaggataaaatgctggtcatcgagcagtgtaagaactccagagctgtaaccatttttattagaggaggaaataagatgatcattgaggaggcgaaacgatcccttcacgatgctttgtgtgtcatccggaacctcatccgcgataatcgtgtggtgtatggaggaggggctgctgagatatcctgtgccctggcagttagccaagaggcggataagtgccccaccttagaacagtatgccatgagagcgtttgccgacgcactggaggtcatccccatggccctctctgaaaacagtggcatgaatcccatccagactatgaccgaagtccgagccagacaggtgaaggagatgaaccctgctcttggcatcgactgtttgcacaaggggacaaatgtgtccttgtatttttcagatatgaagcaacagcatgtcatagaaaccttgattggcaaaaagcaacagatatctcttgcaacacaaatggttagaatgattttgaagattgatgacattcgtaagcctggagaatctgacaatgaagacattgagaaaactatgtagcaagatccacttc

SEQ ID NO: 226977 - DNA, 1551 bp, Homo Sapiens; identical to SEQ ID NO: 193316

SEQ ID NO: 226978 - DNA, 958 bp, Homo Sapiens; identical to SEQ ID NO: 193317

SEQ ID NO: 226979 - DNA, 1219 bp, Homo Sapiens
acaaaaaagttggatttcttctgacaatagtatgttaactgcctttgtcatgatttagcttctggcagaaatgaagatgaaaaaggatttatttcctgttgggagagaaattgctggaattgtattagatgttggaagcaaggtatcattctttcaaccagatgatgaagtagttggaattttgcccctggactctgaagaccctggactttgtgaagttgttagagtacatgagcattacttggttcataaaccagaaaaggtcacatggacggaagcagcaggaagcattcgggatggagtgcgtgcctatacagctctgcattatctttctcatctctctcctggaaaatcagtgctgataatggatggagcaagtgcatttggtacaatagctattcagttagcacatcatagaggagccaaagtgatttcaacagcatgcagccttgaagataagcagtgccttgaaagattcagacctcccatagcccgagtgattgatgtatctaatgggaaagttcatgttgctgaaagctgtttggaagaaacaggtggcctgggagtagatattgtcctagatgctggagtgagattatatagtaaagatgatgaaccagctgtaaaactacaactactaccacataaacatgatatcatcacacttcttggtgttggaggccactgggtaacaacagaagaaaaccttcagttggatcctccagatagccactgccttttcctcaagggagcaacgttagctttcctgaatgatgaagtttggaatttgtcaaatgtacaacagggaaaatatctttgtatcttaaaggatgtgatggagaagttatcaactggtgttttcagacctcagttggatgaactcattccactgtatgaggcaaaagtttccatggaagctgttcagaaaatcaggaagaaaaaagcaagttgttcattttaattttcttctttctcagacctcagtcggatgaacatattccagtatttgaagccagaattttctttggaaattgttgagaaaaaccaaggaagataaaacaagttgcatttttaagcacgtttctctgctaagacaagatgctcagttgacacatttgaaaagtgtttgaaaaattcttgtgcaatgatcaagataattctataattaacatcttaaaggaatttttctaaaaaccttttcattgtttctatatatttt

SEQ ID NO: 226980 - DNA, 1036 bp, Homo Sapiens
ttggccttttctctgcacggagccggcgcttttgcagttgcttctgcggaaaggtggtagttaagaatttgtaaaggccagagaactacctacgattctctcagcggtctctcttctcctcaagtttgaaatgctttatctcatcgggttgggcctgggagatgccaaggacatcacagtcaagggcctggaagttgttagacgctgcagtcgagtgtatctggaagcctacacctcagtcctaactgtagggaaggaagccttggaagagttttatggaagaaaattggttgttgctgatagagaagaagtggaacaagaagcagataatattttaaaggatgctgatatcagtgatgttgcattccttgtggttggtgatccatttggggccacaacacacagtgatcttgttctaagagcaacaaagctgggaattccttatagagttattcacaatgcctccataatgaatgctgtaggctgctgtggtttacagttatataagtttggagagacagtttctattgttttttggacagacacttggagaccagaaagcttctttgacaaagtgaagaagaacagacaaaatggcatgcacacattatgtttactagacatcaaagtaaaggagcagtctttggaaaatctaatcaagggaaggaagatctatgaacctccacggtatatgagtgtaaaccaagcagcccagcagcttctggagattgttcaaaatcaaagaatacgaggagaagaaccagcagttaccgaggagacactttgtgttggcttagccagggttggagccgacgaccagaaaattgcagcaggcactttaaggcaaatgtgcactgtggacttgggagaaccattgcattccttgatcatcacaggaggcagcatacatccaatggagatggagatgctaagtctgttttccataccagaaaatagctcagaatctcaaagcatcaatggactttgaacatagatatttaccattgtctgatgtaaatttcagccatatatggat

SEQ ID NO: 226981 - DNA, 1335 bp, Homo Sapiens
ttgggtctccttcacttcgccctccagctgctggagctgcagcccgaccgcgagcgtgccaagcggcttcagcagctagcggagcggtggcggcggcccccctcaggacaccaccagattcccctcttcccgcggcctcgccatggcgacccacggacagacttgcgcgcgtccaatgtgtattcctccatcatatgctgaccttggcaaagctgccagagatattttcaacaaaggatttggttttgggttggtgaaactggatgtgaaaacaaagtcttgcagtggcgtggaattttcaacgtccggttcatctaatacagacactggtaaagttactgggaccttggagaccaaatacaagtggtgtgagtatggtctgactttcacagaaaagtggaacactgataacactctgggaacagaaatcgcaattgaagaccagatttgtcaaggtttgaaactgacatttgatactaccttctcaccaaacacaggaaagaaaagtggtaaaatcaagtcttcttacaagagggagtgtataaaccttggttgtgatgttgactttgattttgctggacctgcaatccatggttcagctgtctttggttatgagggctggcttgctggctaccagatgacctttgacagtgccaaatcaaagctgacaaggaataactttgcagtgggctacaggactggggacttccagctacacactaatgtcaatgatgggacagaatttggaggatcaatttatcagaaagtttgtgaagatcttgacacttcagtaaaccttgcttggacatcaggtaccaactgcactcgttttggcattgcagctaaatatcagttggatcccactgcttccatttctgcaaaagtcaacaactctagcttaattggagtaggctatactcagactctgaggcctggtgtgaagcttacactctctgctctggtagatgggaagagcattaatgctggaggccacaaggttgggctcgccctggagttggaggcttaatccagctgaaagaaacctttgggaatggatatcagaagatttggccttaatatatttccattgtgaccagcagcaggcttttttcccccaagaagatgatcaaaacaaaggatgatctcaacaagagctgtattttaagtatttagacagttctttgttagctggtttctagttggttatctagttaccaatgctgcagtcctgcagtcacctatacattatttaaatgtatttaactgttaaatgcgctacccaccaataatgaaatagacctttatgaaaactgtgcaattgtgtgcatgtttgtt

SEQ ID NO: 226982 - DNA, 1245 bp, Homo Sapiens
ggcctcgtcctttggcaggtggcggggacttcttgggggaagctgaagtgctggggttggggacccccgcccccgactgggcatctatgctggcgtgctccctccggacaaggtcctccagctccttcttccatccaaggagctcagcaagggccaggcagccctggtcgcattcacccagccaggccacgtccctgtaggccttcttggagtcaaagtccatgcctcctccgaggcccataatcatccccaggaaagggtccgactggccagctttctccttgttgatgagcaggcgaggggtggagaggggtgccttgctgatgagggaggcaaagggctgcacctgcaaggaggtacccatgaccaggaggaggtccaccttcaggaagtctgactgcatacaggagaagaaacgcgctgggaggctctcaccaaaaaagacgatatcaggcttcaccaggctctgacagtcttcacacttgggcgtcacctcagagaagatcttttttcatccagcttagcgggtattcgtgccggcagctggcgctgacgcagtgtgatgtgtagaaggtgccgtgcgcctccaccaagtcctcctgttccagcccggctattcgctccagggtatctatgttctgcgtgtagcagcgcaggagtagccccttgtccttcagcaggcgcatgaagtagtgacagatggttggcttgaactgcccaggatagagttccttggcgagggcgaagaagggttccggatgtttcttgaaatagctgatctcaaagatggcctctgggtagggaagatggtacttctctaggttgtcatagaggccggtggatggagagcgaaagtcggggatgcctgcggatgtggagattccagctcccaccaaacagatgactctgcgacagcgttcgctctgcatgtaccgggccaccccttccaaggtcagctcgtccagcagacgctccttctggctgcccaggctgagcgtctgggagaataagttccgcaggaagtccatgtctgcttctccaccagcggctcctccctcagagtctgaatctgagtcggtctggctctgccatgggcgcggtgctgaagcccttgaggctgtcaccgaccgctctgtcccgtcaccaaccactgtgtcccgtcaccgactgctctgtcctgtcaccgactgctctgtcccgtgacggcaccagaaatgggccaacttttttgtacaaagtgggctt

SEQ ID NO: 226983 - DNA, 910 bp, Homo Sapiens
ttggctcaggccttggctccttgaacttttggccgccatgtgcttcccgaaggtcctctctgatgacatgaagaagctgaaggcccgaatggtaatgctcctccctacttctgctcaggggttgggggcctgggtctcagcgtgtgacactgaggacactgtgggacacctgggaccctggagggacaaggatccggccctttggtgccaactctgcctctcttcacagcaccaggccatagaaagattttatgataaaatgcaaaatgcagaatcaggacgtggacaggtgatgtcgagcctggcagagctggaggacgacttcaaagagggctacctggagacagtggcggcttattatgaggagcagcacccagagctcactcctctacttgaaaaagaaagagatggattacggtgccgaggcaacagatcccctgtcccggatgttgaggatcccgcaaccgaggagcctggggagagcttttgtgacaaggtcatgagatggttccaggccatgctgcagcggctgcagacctggtggcacggggttctggcctgggtgaaggagaaggtggtggccctggtccatgcagtgcaggccctctggaaacagttccagagtttctgctgctctctgtcagagctcttcatgtcctctttccagtcctacggagccccacggggggacaaggaggagctgacaccccagaagtgctctgaaccccaatcctcaaaatgaagaaactgacaccacctttgccctccccgtcaccgcgcacccaccctgacccctccctcagctgtcctgtgccccgccctctcccgcacactcagtccccctgcctggcgttcctgccgcagctctgacctggtgctgtcgccctggcatcttaataaaacctgctta

SEQ ID NO: 226984 - DNA, 914 bp, Homo Sapiens
ttgggagtcggcattgtcaggcggcggcaccgcgcgggacggagcttggctgttggtcggtgggttcccgtgcggcggcggccaaggaggaggagacacagttggagcagctccgtgggctgactggggcgaggcctcagcagcgcgagcttgagtgcggccgagcctgcggcgccttcccctgcgggtggggacgagcgggccccgcggcgtcatcggcggcgaggagccgccgcgcctcggcctagcatgtcggaagcgggcgaggagcagcccatggagacgacgggcgccaccgagaacggacatgaggccgtccccgaaggcgagtcgccggccggggctggcacgggcgccgcggcgggggctggaggcgcgaccgcggcgcccccgagcgggaatcagaacggcgccgagggcgaccagatcaacgccagcaagaacgaggaggacgcgggaaaaatgttcgttggtggcctgagctgggatactagcaaaaaagatttaaaagactattttactaaatttggagaggtcgttgactgtacaataaaaatggatcccaacactggacggtcaagagggtttgggtttatcctgttcaaagatgcagccagtgtggagaaggtcctagaccagaaggagcacaggctggatggccgtgtcattgaccctaaaaaggccatggctatgaagaaggacccggtgaagaaaatcttcgttgggggtctgaatcctgaagccactgaggaaaagatcagggagtactttggcgagtttggggagattgaggccattgaattgccaatggatccaagttgaacaaaagacgaggttttgtgtttatcacctttaaagaagaagaacccgtgaagaaggttctggaaaaaagttccatacttgtcagtggaagc

SEQ ID NO: 226985 - DNA, 1016 bp, Homo Sapiens; identical to SEQ ID NO: 193330

SEQ ID NO: 226986 - DNA, 919 bp, Homo Sapiens; identical to SEQ ID NO: 193332

SEQ ID NO: 226987 - DNA, 1261 bp, Homo Sapiens
  misc_feature (120)..(205): n is a, c, g, or t
  misc_feature (860)..(895): n is a, c, g, or t
ttgggcggccatttcctgtttctctgcagttttcctcagctttgggtggtggccgctgccgggcatcggcttccagtccgcggagggcgaggcggcgtggacagcggccccggcacccannnnnnnnnnnnnnnnnnnnnnnnnnnnnnnnnnnnnnnnnnnnnnnnnnnnnnnnnnnnnnnnnnnnnnnnnnnnnnnnnnnnnnggcccagcgagcggccctgatgcaggccatcaagtgtgtggtggtgggagacggagctgtaggtaaaacttgcctactgatcagttacacaaccaatgcatttcctggagaatatatccctactgtctttgacaattattctgccaatgttatggtagatggaaaaccggtgaatctgggcttatgggatacagctggacaagaagattatgacagattacgccccctatcctatccgcaaacagatgtgttcttaatttgcttttcccttgtgagtcctgcatcatttgaaaatgtccgtgcaaagtggtatcctgaggtgcggcaccactgtcccaacactcccatcatcctagtgggaactaaacttgatcttagggatgataaagacacgatcgagaaactgaaggagaagaagctgactcccatcacctatccgcagggtctagccatggctaaggagattggtgctgtaaaatacctggagtgctcggcgctcacacagcgaggcctcaagacagtgtttgacgaagcgatccgagcagtcctctgcccgcctcccgtgaagaagaggaagagaaaatgcctgctgttgtaaatgtctcagcccctcgttcttggtcctgtcccttggaacctttgtacgctttgctcnnnnnnnnnnnnnnnnnnnnnnnnnnnnnnnnnnnncaacggtggagccttcgcactcaatgccaactttttgttacagattaatttttccataaaaccattttttgaaccaatcagtaattttaaggttttgtttgttctaaatgtaagagttcagactcacattctattaaaatttagccctaaaatgacaagccttcttaaagccttatttttcaaaagcgccccccccattcttgttcagattaagagttgccaaaataccttctgaactacactgcattgttgtgccgagaacaccgagcactgaactttgcaaagaccttcgtctttgagaagacggtagcttctgcagttaggagtgcagacacttgctctcctatgtagttctcagatgcgtaa

SEQ ID NO: 226988 - DNA, 895 bp, Homo Sapiens; identical to SEQ ID NO: 193336
  misc_feature (698)..(733): n is a, c, g, or t

SEQ ID NO: 226989 - DNA, 927 bp, Homo Sapiens
ttggctttgctggctgacccagctccagctgctgacccaggtcctgaggacatcggccctcccattccggaagccgatgagttgctgaataagtttgtgtgtaagaacaacggggtcctgttcgagaaccagctgctgcagatcggagtcaagtcagagttccgacagaacctgggccgcatgtatctcttctatggcaacaagacctcggtgcagttccagaatttctcacccactgtggttcacccgggagacctccagactcagctggctgtgcagaccaagcgcgtggcggcgcaggtggacggcggcgcgcaggtgcagcaggtgctcaatatcgagtgcctgcgggacttcctgacgcccccgctgctgtccgtgcgcttccggtacggtggcgccccccaggccctcaccctgaagctcccagtgaccatcaacaagttcttccagcccaccgagatggcggcccaggatttcttccagcgctggaagcagctgagcctccctcaacaggaggcgcagaaaatcttcaaagccaaccaccccatggacgcagaagttactaaggccaagcttctggggtttggctctgctctcctggacaatgtggaccccaaccctgagaacttcgtgggggcggggatcatccagactaaagccctgcaggtgggctgtctgcttcggctggagcccaatgcccaggcccagatgtaccggctgaccctgcgcaccaccaaggagcccgtctcccgtcacctgtgtgagctgctggcacagcagttctgagccctggactctgccccgggggatgtgggccggcactggggcagccccttggactgaggcagttttgggtggattgggggaccttcccactgttgaacgagaagaccaccaaggtttgggggaatgccctgggaactt

SEQ ID NO: 226990 - DNA, 639 bp, Homo Sapiens; identical to SEQ ID NO: 193340

SEQ ID NO: 226991 - DNA, 1184 bp, Homo Sapiens; identical to SEQ ID NO: 193343

SEQ ID NO: 226992 - DNA, 471 bp, Homo Sapiens
  misc_feature (348)..(356): n is a, c, g, or t
ttggggagaggccccgggccaggaaagcagagacagacaaagcgttaggagaagaagagaggcagggaagacaagccaggcacgatggccaccttcccaccagcaaccagcgccccccagcagccccctggtccggaggacgaggactccagcctggatgaatctgacctctatagcctggcccattcctacctcggaggtggaggccggaaaggtcgcaccaagagagaagctgctgccaacagcaaccgcccctgccctggtgggcacgagaggaaactggtgaccaagttgcataattcagagaggaagaatcgaggggcacggcgctgagacagagttggtgannnnnnnnngactatggatactacacctagctatatatattggactgcggaggaaggatttttctggattggatctttgtcgtcttgcttctccccccacccctaggacttattccctctgact

SEQ ID NO: 226993 - DNA, 643 bp, Homo Sapiens; identical to SEQ ID NO: 193344

SEQ ID NO: 226994 - DNA, 983 bp, Homo Sapiens
ctttgtacaaaaaagttgggagtaatagtccacttctggcagactttctttcccctaatggtggggaaacacaatttcttgataagatactaccagatgtaaatcttgggaaaattataaaatctgttcctggaaaactaatgaaagagaaaggtcagcatttggaaccttttatcatgaatttcattaattcttgtgagtctccaaagcctaaaccaagtagaccagaactgaccattctcagccctacttcagaaaacaacaagaagcttttcaatgatctgtttaaaaataatgcaaaccgtgctgaaaatacagagagaaagcaaaatcagaattattttatggaggtgatgactgtagaaggagtctatgattacctgatgtatgtaggacgggtagttttccaggttcctgactggcttcatcatctcttaatgggaactcgaatcctctttaaaaacaccctggaaatgtatactgattactatcttcagtgtaaactagaacagctatttcaggagcaccgtttggtctcactcataacacttctcagagatgctatattctgtgaaaacactgaacctcgctctctccaagataagcaaaaaggagcaaaacagacttttgaagaaatgatgaattacattccagatctgttagtcaagtgtattggtgaagaaaccaagtatgaaagcatcagacttctgtttgatggcttacagcaaccagtactcaacaagcagctgacttatgttttattggacattgtgatacaggaactgtttccagagctcaataaggtacaaaaggaagttacctctgtgacatcttggatgtaaacacttggatttggtatagaataacccattgaaatttctgctgtgcgagggtggtagaaatttacttttttggggatattcttatatatattatgtacatcgctgtctgaaattttagttatttttggtttttaataaaga

SEQ ID NO: 226995 - DNA, 594 bp, Homo Sapiens
ttgtacaaaaaagttggtgcctttagagggtaccagtcttctccctattccctctctctcccaggtcccagccccttttccccagtcccagacaattccattcaatctttggaggcttttaaacattttgacacaaaattcttatggtatgtagccagctgtgcactttcttctctttcccaaccccaggaaaggttttccttattttgtgtgctttcccagtcccattcctcagcttcttcacaggcactcctggagatatgaaggattactctccatatcccttcctctcaggctcttgactacttggaactaggctcttatgtgtgcctttgtttcccatcagactgtcaagaagaggaaagggaggaaacctagcagaggaaagtgtaattttggtttatgactcttaaccccctagaaagacagaagcttaaaatctgtgaagaaagaggttaggagtagatattgattactatcataattcagcacttaactatgagccaggcatcatactaaacttcacctacattatctcacttagtcctttatcatccttaaaacaattctgtgacatacatattatctcatttt

SEQ ID NO: 226996 - DNA, 706 bp, Homo Sapiens
  misc_feature (237)..(250): n is a, c, g, or t
catctgttgcctccggaaatccagcttgtagtcattatagcgcttgacggccctccgtctcatccaccgagtcatccagggagaggagaaactccttgaaggtcttcatcacgggcggcggcacacccaggtcaatctctgcaatgctgcccagcctggcctggataggcaggacatggtgctgcatgatgtggacgtcagggtggccccagggctgaggggggccataagttgggnnnnnnnnnnnnnnagcatagggcatctcatagccactgtggtatgggtcagagctgtgctcatcccagtctctcctcatgcgcttctgtggcgggctgagttcgtggcgaggtggcgagaagcgctctcgccgattccggtcatagtcccgatattcaccccgactacggcgctcacggccacggtcccactctctgtcattccaatcgtcccctcgacgtctttcatctctctcgcgggaacggtcgtagtcgctgcgctctcttctgaacttgtccctgcgccttcgatcgtactcgtcatcactgtcacccatggcacggtctgagggggccttggtgcggccgcggccgttggactcgcgctcggacgggctagatttcagggcgacctgggtcgcgggcgcgcgacgaggacttcgaggagggcgagacggagacggagctcttgagtagaggaccgaagccaa

SEQ ID NO: 226997 - DNA, 1241 bp, Homo Sapiens
ttggcattcccgggccagcttctgtactgccaggtccgggtcggcggctgcactgcggatgagaccggtgcgactcatgaaggtgttcgtcacccgcaggatacccgccgagggtagggtcgcgctcgcccgggcggcagactgtgaggtggagcagtgggactcggatgagcccatccctgccaaggagctagagcgaggtgtggcgggggcccacggcctgctctgcctcctctccgaccacgtggacaagaggatcctggatgctgcaggggccaatctcaaagtcatcagcaccatgtctgtgggcatcgaccacttggctttggatgaaatcaagaagcgtgggatccgagttggctacaccccagatgtcctgacagataccaccgccgaactcgcagtctccctgctacttaccacctgccgccggttgccggaggccatcgaggaagtgaagaatggtggctggacctcgtggaagcccctctggctgtgtggctatggactcacgcagagcactgtcggcatcatcgggctggggcgcataggccaggccattgctcggcgtctgaaaccattcggtgtccagagatttctgtacacagggcgccagcccaggcctgaggaagcagcggaattccaggcagagtttgtgtctacccctgagctggctgcccaatctgatttcatcgtcgtggcctgctccttaacacctgcaaccgagggactctgcaacaaggacttcttccagaagatgaaggaaacagctgtgttcatcaacatcagcaggggcgacgtcgtaaaccaggacgacctgtaccaggccttggccagtggtaagattgcagctgctggactggatgtgacgagcccagaaccactgcctacaaaccaccctctcctgaccctgaagaactgtgtgattctgccccacattggcagtgccacccacagaacccgcaacaccatgtccttgttggcagctaacaacttgctggctggcctgagaggggagccgatgcctagtgaactcaagctgtagccaaacagtagagatggagggccgggaagcaaaccgtgccctggtattgtcagacacacccaggcttgatttggatcccaggcagagccaagggaaggtgtgattctctgaggaaagagtgattctgatatatgtacttgtcacattggtgttggacacatttgcgccaaaagtatggtaattctattattaaata

SEQ ID NO: 226998 - DNA, 699 bp, Homo Sapiens
ttggctagagctgaagaaggccttcacagagcttcaagccaaagttattgacactcaacagaaggtgaagctcgcagacatacagattgaacagctaaacagaacgaaaaagcatgcacatcttacagatacagagatcatgactttggtagatgagactaacatgtatgaaggtgtaggaagaatgtttattcttcagtccaaggaagcaattcacagtcagctgttagagaagcagaaaatagcagaagaaaaaattaaagaactagaacagaaaaagtcctacctggagcgaagcgttaaggaagctgaggacaacatccgggagatgctgatggcacgaagggcccagtagggagcctctctgggaagctcttcctcctgcccctcccattcctggtgggggcagaggagtgtctgcagggaagccgcttctcctctgccctgatggatgctttatctggatggcctggtcacatcacattttctgcgttaccccgatccccatttgcctcccagccctggagtttttacccgggtttgcctgccagctctgcccaggagactcttcactctcgggatgtgtgatgagctcccacgagagggaggataggagcctcggcagcaaagcaatctccgcctgagctttccactagggacgctagccagacccatacaaagcctccgtcccactctgct

SEQ ID NO: 226999 - DNA, 1509 bp, Homo Sapiens; identical to SEQ ID NO: 193348
  misc_feature (1304)..(1321): n is a, c, g, or t

SEQ ID NO: 227000 - DNA, 759 bp, Homo Sapiens; identical to SEQ ID NO: 193351

SEQ ID NO: 227001 - DNA, 896 bp, Homo Sapiens; identical to SEQ ID NO: 193356

SEQ ID NO: 227002 - DNA, 1006 bp, Homo Sapiens
aactttgtacaaaaaagttgggaaaatgtgtattttattacatctttcacattggctatttaaagacaaagacaaattctgtttcttgagaagagaatattagctttactgtttgttatggcttaatgacactagctaatatcaatagaaggatgtacatttccaaattcacaagttgtgtttgatatccaaagctgaatacattctgctttcatcttggtcacatacaattatttttacagttctcccaagggagttaggctattcacaaccactcattcaaaagttgaaattaaccatagatgtagataaactcagaaatttaattcatgtttcttaaatgggctactttgtcctttttgttattagggtggtatttagtctattagccacaaaattgggaaaggagtagaaaaagcagtaactgacaacttgaataatacaccagagataatatgagaatcagatcatttcaaaactcatttcctatgtaactgcattgagaactgcatatgtttcgctgatatatgtgtttttcacatttgcgaatggttccattctctctcctgtactttttccagacacttttttgagtggatgatgtttcgtgaagtatactgtatttttacctttttccttccttatcactgacacaaaaagtagattaagagatgggtttgacaaggttcttcccttttacatactgctgtctatgtggctgtatcttgtttttccactactgctaccacaactatattatcatgcaaatgctgtattcttctttggtggagataaagatttcttgagttttgttttaaaattaaagctaaagtatctgtattgcattaaatataatatgcacacagtgctttccgtggcactgcatacaatctgaggcctcctctctcagtttttatatagatggcgagaacctaagttttcagttgattttacaattgaaatgactaaaaaacaaagaagacaacattaaaacaatattgtttct

SEQ ID NO: 227003 - DNA, 1206 bp, Homo Sapiens
ttggcactttggcagagagccagctgctgccatctcaaggcccagggcagatctccctgctgaggagccggcgcccagcactcctccatgtctggtgcaggcagaagaggaggctgtgtatgaggaacctccagagcaggagaccttctacgagcagcccccactggtgcagcagcaaggtgctggctctgagcacattgaccaccacattcagggccaggggctcagtgggcaagggctctgtgcccgtgccctgtacgactaccaggcagccgacgacacagagatctcctttgaccccgagaacctcatcacgggcatcgaggtgatcgacgaaggctggtggcgtggctatgggccggatggccattttggcatgttccctgccaactacgtggagctcattgagtgaggctgagggcacatcttgcccttcccctctcagacatggcttccttattgctggaagaggaggcctgggagttgacattcagcactcttccaggaataggacccccagtgaggatgaggcctcagggctccctccggcttggcagactcagcctgtcaccccaaatgcagcaatggcctggtgattcccacacatccttcctgcatcccccgaccctcccagacagcttggctcttgcccctgacaggatactgagccaagccctgcctgtggccaagccctgagtggccactgccaagctgcggggaagggtcctgagcaggggcatctgggaggctctggctgccttctgcatttatttgccttttttctttttctcttgcttctaaggggtggtggccaccactgtttagaatgacccttgggaacagtgaacgtagagaattgtttttagcagagtttgtgaccaaagtcagagtggatcatggtggtttggcagcagggaatttgtcttgttggagcctgctctgtgctccccactccatttctctgtccctctgcctgggctatgggaagtggggatgcagatggccaagctcccaccctgggtattcaaaaacggcagacacaacatgttcctccacgcggctcactcgatgcctgcaggccccagtgtgtgcctcaactgattctgacttcaggaaaagtaacacagagtggccttggcctgttgtcttcccctattttctgtcccagctcatccgtgtctctgaagaacaaatatgcttttggac

SEQ ID NO: 227004 - DNA, 804 bp, Homo Sapiens; identical to SEQ ID NO: 193358
  misc_feature (658)..(666): n is a, c, g, or t

SEQ ID NO: 227005 - DNA, 1135 bp, Homo Sapiens; identical to SEQ ID NO: 193360

SEQ ID NO: 227006 - DNA, 975 bp, Homo Sapiens; identical to SEQ ID NO: 193361

SEQ ID NO: 227007 - DNA, 1146 bp, Homo Sapiens; identical to SEQ ID NO: 193363
  misc_feature (785)..(793): n is a, c, g, or t

SEQ ID NO: 227008 - DNA, 528 bp, Homo Sapiens
ttggctggttttcttatttttgtatcctttttcaagatgtaatttttatctttgctccgatcctcatttgctggtgtgggtgagggatccggcggcatgggctggtttcacccccttcacgaggggccgcagagtcacacgctggtgccgggggtgctttggggggagctgcgccgatcaccagattaagcacatgtcctatcccaggcggtggagcggagcccccgtggctctggactgcgcggacgttggcgtcaggatgaccacacggcggcctttcccaaatggggacagaacccgctctgagccgtgggtctggctcctgtatgggactggctctcttggtgcaccacgggagggggacataccccagtgaaccccaccttggcgcctgaagcaacacagggtgggcactgacccacccccaggggcggctgcaaaggcggtgcccgcagacaatggccacttatctctcacctgcgcccggcagtgcccaaggatgggtcctgggcctcggagccaatgatc

SEQ ID NO: 227009 - DNA, 543 bp, Homo Sapiens
gcctctctggttctttcaatcggggatgtctgagggaccttccgcggcatctatgcgggcatggttactgcctctggtgccccccgcagccgcgcgcaggtaccgtgcgacatcgcgatggcccagctcctcagccaggtccacgggcagacggccccaggcatcgcgcacgtccagccgcgccccggcccggtgcagcaccaccagcatatccaggaagccctcccgggcagcgtcgtgcacgggtcgggtgagagtggcggggtcggcgcagttgggctccgcgccgtggagcagcagcagctccgccactcgggcgctgcccatcatcatgacctggtcttctaggaagcggctgctgccctagacgctggctcctcagtagcatcagcacgagggccacagcggcgggcgcccctggcgctgcccactcccccgtgagccgcgggatgtgaaccacgaaaaccctcactcgcggcgggccgcacgcgcgccgaatccggagggtcaccaagaacctgcgccaacttttttgtacaaagt

SEQ ID NO: 227010 - DNA, 1099 bp, Homo Sapiens; identical to SEQ ID NO: 193366

SEQ ID NO: 227011 - DNA, 878 bp, Homo Sapiens
ttaaaccacaagcagcaccacccccttctcccccaccagggctgtagtgtgaggggagaagaggagggcagcttcaccaagggccacagcttcgctcgctcctggccaagggagctaggtgaagggcaggggctccccgacagattgagggggtggggaaaaccaaaataaaacgtcaaataaattgtgtaggaggagtccagcttaggaccgggccagagccaggccaggctcggggagggggcctctgcaggttcagaggatcactgctgccaccaccgccaccctgggagccagttattttgccatggccttgattgcaacagctgcctcctctgtcatggcagacagcaccgtgatcaggatctcttctccacagtcgtacttctgctcaatctccttgccaaggtctccctcagggagacgaaggtcctctcgtacctccccgctgtcctggagcagtgataggtacccatcctggatgccaatcagctggaagtcattccttttgatgttggggacatccatattatgagttgacgggcagatatcttcatatttcttcccagtaaagatgtcaataccaaccagatggaccttggcgtggccgtgcttgccagtcttcgaagtagacatctcgacgatcttacatggccggcctttgagcaccacaaagccattcttacgtaatgctgagcactgcattgggaaggtggctgaggcccctgcatctcctgtctcgaagtccaagtcatctgccattttaagaggcttcgattccaactcgcgcgaacgcactgactcgaccccgtccgctcgccgcgagcccaaccgctgcctccgagcccgctgccgccgccgccgccgcctctacccaa

SEQ ID NO: 227012 - DNA, 967 bp, Homo Sapiens
actttgtacaaaaaagttggtgttccattttccgtatctgcttcgggcttccacctcatttttttcgctttgcccattctgtttcagccagtcgccaagaatcatgaaagtcgccagtggcagcaccgccaccgccgccgcgggccccagctgcgcgctgaaggccggcaagacagcgagcggtgcgggcgaggtggtgcgctgtctgtctgagcagagcgtggccatctcgcgctgcgccgggggcgccggggcgcgcctgcctgccctgctggacgagcagcaggtaaacgtgctgctctacgacatgaacggctgttactcacgcctcaaggagctggtgcccaccctgccccagaaccgcaaggtgagcaaggtggagattctccagcacgtcatcgactacatcagggaccttcagttggagctgaactcggaatccgaagttggaacccccgggggccgagggctgccggtccgggctccgctcagcaccctcaacggcgagatcagcgccctgacggccgaggcggcatgcgttcctgcggacgatcgcatcttgtgtcgctgaagcgcctcccccagggaccggcggaccccagccatccagggggcaagaggaattacgtgctctgtgggtctcccccaacgcgcctcgccggatctgagggagaacaagaccgatcggcggccactgcgcccttaactgcatccagcctggggctgaggctgaggcactggcgaggagagggcgctcctctctgcacacctactagtcaccagagactttagggggtgggattccactcgtgtgtttctattttttgaaaagcagacattttaaaaaatggtcacgtttggtgcttctcagatttctgaggaaattgctttgtattgtatattacaatgatcaccgactgaaaatattgttttacaatagttctgtggggctgtttttttgttatta

SEQ ID NO: 227013 - DNA, 900 bp, Homo Sapiens
ttggggtggcaaatggggcccttgtcagcatctgtaacaagtatggagagatgcctgtggacaaagccaaggcacccctgagagagcttctccgaggtccatctccccatcccctagcttgtgtcctctcgtcccttcccacctgtcttctccctctgtaccacagcttaggttgtttttcttccctagagcgggcagagaagatgggccagaatctcaaccgtattccatacaaggacacattctggaaggggaccacccgcactcggccccgtgagtcaccactgtgggaagaagggttgtaaaaggaaataatcctggcctcttggggctgggttagggtgaagctgggtacctgacctgcccacactcttaggaaatggaaccctgaacaaacactctggcattgacttcaaacagcttaacttcctgacgaagctcaacgagaatcactctggagaggtgacccctgcccttcttgcccttccctcactaaacccccataaattacttgctttgtacctgttttaagtttttcctccagttagtgggcaaggaagtggcagcaacatttcaagcctcctaacccctacctgtcctgcagctatggaagggccgctggcagggcaatgacattgtcgtgaaggtgctgaaggttcgagactggagtacaaggaagagcagggacttcaatgaagagtgtccccggctcaggattttctcgcatccaaatgtgctcccagtgctaggtgcctgccagtctccacctgctcctcatcctactctcatcacacactggatgccgtatggatccctctacaatgtactacatgaagcaccaatttcgtcgtggaccagagccaggctgtgaagtttgctttggacatggcaaggggcatg

SEQ ID NO: 227014 - DNA, 762 bp, Homo Sapiens; identical to SEQ ID NO: 193371

SEQ ID NO: 227015 - DNA, 1005 bp, Homo Sapiens
tttgtacaaaaaagttggaatgtgcccaacatcatcattgcgggccctccaggaaccggcaagaccacaagcattctgtgcttggcccgggccctgctgggcccagcactcaaagatgccatgttggaactcaatgcttcaaatgacaggggcattgacgttgtgaggaataaaattaaaatgtttgctcaacaaaaagtcactcttcccaaaggccgacataagatcatcattctggatgaagcagacagcatgaccgacggagcccagcaagccttgaggagaaccatggaaatctactctaaaaccactcgcttcgcccttgcttgtaatgcttcggataagatcatcgagcccattcagtcccgctgtgcagtcctccggtacacaaagctgaccgacgcccagatcctcaccaggctgatgaatgttatcgagaaggagagggtaccctacactgatgacggcctagaagccatcatcttcacggcccagggagacatgaggcaggcgctgaacaacctgcagtccaccttctcaggatttggcttcattaacagtgagaacgtgttcaaggtctgtgacgagccccacccactgctggtaaaggagatgatccagcactgtgtgaatgccaacattgacgaagcctacaagattcttgctcacttgtggcatctgggctactcaccagaagatatcattggcaacatctttcgagtgtgtaaaactttccaaatggcagaatacctgaaactggagtttatcaaggaaattggatacactcacatgaaaatagcggaaggagtgaactctctttgcagatggcaggcctcctggcaaggctgtgtcagaagacaatggccccggtggccagttagagcagagacttcactgactgacttacaggtgccctattctgaggtacaggagccgcggctttctgatgggggaaaatgccgccttagctggagccaacatgactgtcctttaaactccagtggc

SEQ ID NO: 227016 - DNA, 949 bp, Homo Sapiens
atgctttttctataatagccaactttgtacaaaaaagttggctccaactttgcccggaatggggcgctcagtacccacaattggacttactggcagtgtggtcagtaccttggcgttgggcctggggcccatggacgatttatgccccagggggctggaggccacacccgggaggctcggatccagacactggagcctgacaactggatgaaggaggtgatgctgtttggccatggcacccggaagcgtgtccccctgggcaggctggagctgctggaggaagttttggccctggggctacgcaccgatgtggggatcactcaccagcactggcagcagtttgagccccagctgaccctgtgggatgtgtttggagcgaacaaggaggtgcaggagctgctggagcggggcctactgcagctggatcacaggggtcttcggtgttcctgggagggtctggctgtgctggactctctcttgctgaccctcctgcctcagctccaagaagcctggcagcagagaaccccctcccctgtgccaggaggatgacaaaaatgttcctgtgttccagggtaatgccaggtgggttttgagagctgggtcggtactgcagacatctcttctccgttgtcgggtgccgtctctgctccttgtggttattgctcagccctggcatccccaggggaatggcagcagtgaggtagatgggaggacatttctggtcagggaactggcatcccattcagcatctcagactcacaggccaacatgtgttccatggctgggaattgcctaccacccacatcagcttctgtttacctttttggcatcaaataatgaacagtgtttggaaatctttctacaggcaattacctccccaagagaagccttccttattttggagtaaggtcctaagatagctggatgaatcacgaaaacccatgttccc

SEQ ID NO: 227017 - DNA, 1314 bp, Homo Sapiens
ttggctagctcattgcgcctctcctgcagtctgattggcaccggctcccattccggctccagcctccaatccgacccccatttcggctgcagcctcggacctagctccggccctcggtctatccggttgcatcctccctccctgttccggatcttatcttgcgccagcgcctactccaggatcccgtagccagacctcaagccatggctggtcccttctcccgtctgctgtccgcccgcccgggactcaggctcctggctttggccggagcggggtctctagccgctgggtttctgctccgaccggaacctgtacgagctgccagtgaacgacggaggctgtatcccccgagcgctgagtacccagacctccgaaagcacaacaactgcatggccagtcacctgaccccagcagtctatgcacggctctgcgacaagaccacacccactggttggacgctagatcagtgtatccagactggcgtggacaaccctggccaccccttcatcaagactgtgggcatggtggctggagatgaggagacctatgaggtatttgctgacctgtttgaccctgtgatccaagagcgacacaatggatatgacccccggacaatgaagcacaccacggatctagatgccagtaaaatccgttctggctactttgatgagaggtatgtattgtcctctagagtcagaactggccgaagcatccgaggactcagtctgcctccagcttgcactcgagcagagcgacgagaggtggaacgtgttgtggtggatgcactgagtggcctgaagggtgacctggctggacgttactataggctcagtgagatgacagaggctgaacagcagcagcttattgatgaccactttctgtttgataagcctgtgtccccgttgctgactgcagcaggaatggctcgagactggccagatgctcgtggaatttggcacaacaatgagaagagcttcctgatctgggtgaatgaggaggatcatacacgggtgatctccatggagaagggtggtaacatgaagagagtgtttgaaagattctgccgaggcctcaaagaggtggagagacttatccaagaacgtggctgggagttcatgtggaatgagcgtttgggatacatcttgacctgtccatctaacctgggcactggacttcgggcaggagtgcacatcaaactgcccctgctaagcaaagatagccgcttcccaaagatcctggagaacctaagactccaaaaacgtggtactggaggagtggacactgctgctacaggcggtgtctttgatattttct

SEQ ID NO: 227018 - DNA, 1342 bp, Homo Sapiens; identical to SEQ ID NO: 193376

SEQ ID NO: 227019 - DNA, 1081 bp, Homo Sapiens
  misc_feature (149)..(162): n is a, c, g, or t
aaaagcagcaagcaagcagacataccaggtcaacaggagtgatctatcattggcaacgaggcctcaaacaaactgcaaatgctctggcttcagcaccttatccccaaatgccacaaaccagacatggaagccatgcaagagtgactatnnnnnnnnnnnnnnggcacagacagagtaccaccaagcaaaaagggggctaatactgcagagatggccccaaagtgcagcttgaggaacacagcaagtcatcccaagaccctcacttagctgccaaagaaacagcaaacactatcagctttgcttcagtcttctgaaatgaaaatattaataaggaagactcactaatacttgtggcaaacactattagcagggatgcagggtgtctcctgggctgcaggactccatctgcttcagctgaactcttggaaactacagatgagagatatatgcatacgcacacacatatatgcgtatctgtatgcacacagatgtatttaaatgaaggtgcatacactgtgctaaaatacaaacaacagaaatcaaaggtcatatataaaaacgctaaatatgacatataacacaggcctagaaccagctcttggttgggagctggggaaaggggtggtatcatctgaagactatgtacacaatttgtggtgggcagggaaggcatcagtgtaaacaactcagactcacttcacaatactggcccacaggtaagtgtgatgtatctcatgtacaaaaatagactcccaccttgcttttgtacaaaccaagcttggtaggcacccaggaggaccgtgggtttgtcttgatgacagggcactgcaccaggctgctgctaaaccttccagccctaggaactcacctgctaccctcccgctaccctcccctttccctccctttcaggcccttgggtctttttcccacccaacacctacagcccgaggcctgcccaaccacctagcctcacacgactaactgcagaaactaactgcatggcttcctgcaagcaaggtccttctgtatctgtccctttctctgaccccaagatatatgaaaatgtttctgtaaatgccaa

SEQ ID NO: 227020 - DNA, 1237 bp, Homo Sapiens
ggggttcacttacagttcccccaccttgcagcagcagtgaggctcagagtcacccacactccatacatccctctgccataccctgcctgtagtgtggctcccgtctactacaaagccccacaaagtggacaacgctgggatgacaaaacctttcctcttagatattatatactttgcaaggcttggaaataagctactgcattggtcttaagctagtccggcatgtgaagaaacaagaatttgcccagaagaggactgtggagaaacctctgaggcctccttccagagtaaggcccgctcacttgaccagattcctcatgatgttcagggaggatcctctgtaccccgatccaaaatgattccagtggttcaagtagtgaaagagctgatacaactgaaggcgcttctcgaatcctggggccttggggattttgccgtggtaggcggagtaaaaggagctgctaaagcccccaaacatgccagctattgccagctcatattccgagtggccgtagaaagaagctgggtcaaaaatcaccggcccagaggaatcctctgctacgtttccaccccagaggtccccgtggagtaaggctgggatgatctccaggtcacggaacaggtcagggatctttaactgcagagcagaccaaagctggagggcctccctgtccccagactccttctccaccatgtccatctggggctgaatgcgctgccgggcatagaacacgacccagtcctcctgccagtcattcacctgggggaggtatccacagcacgtcaccacgtcaaatccaaaccgggccacaaagggccgttcctcctgcccacctcctctccccactgtgcccgcctccttcaggcgcatctctccaagcttcttgttatcaaggtgtaaatcggccagctgggctccaagctttgcagcatgactgctcagatgcctcatgtccatgtgctccatcaccagcacgctcccgccgcctggggcatccagaaccttgatgggcttgggcactttcaccgtgtttgttttcaggatggcagttaaacttgccatctcaccttcaaacattcttctggcctccgccttggggttcactttcacgaacactcgtccttgatccgtgtcgtagctccggccctggctgatgcacccgccccccgagtggcccgtggccctgacagagctgcagcccagctcgcgcctcagcagctcctccatgttccccaa

SEQ ID NO: 227021 - DNA, 919 bp, Homo Sapiens
ttgggcagaggaggcccagctgctgagaggagttgcctgagagtgacctttgcatctgcctgtccagccagcatggaaccaaagcggatcagagagggctaccttgtgaagaaggggagcgtgttcaatacgtggaaacccatgtgggttgtattgttagaagatggaattgaattctataagaagaaaagtgacaacagccccaaaggaatgatcccgctgaaagggagcactctgactagcccttgtcaagactttggcaaaaggatgtttgtgtttaagatcactacgaccaaacagcaggaccacttcttccaggcagccttcctggaggagagagatgcctgggttcgggatatcaagaaggccattaaatgcattgaaggaggccagaaatttgccaggaaatctaccaggaggtccattcgactgccagaaaccattgacttaggtgccttatatttgtccatgaaagacactgaaaaaggaataaaagaactgaatctagagaaggacaagaagatttttaatcactgcttcacaggtaactgcgtcattgattggctggtatccaaccagtctgttaggaatcgccaggaaggcctcatgattgcttcatcgctgctcaatgaggggtatctgcagcctgctggagacatgtccaagagtgcagtggatggaactgctgaaaaccctttcctggacaaccctgatgccttctactactttccagacagtgggttcttctgtgaagagaattccagtgatgatgatgtgattctgaaagaagaattcagaggggtcattatcaagcagggatgtttactgaagcaggggcatagaaaggaaaaactggaaagtgaggaagttcatcttgagagaagaccctgcctacctgcactactatgaccctgctggg

SEQ ID NO: 227022 - DNA, 907 bp, Homo Sapiens
ttggggaacggctgaggaagggcccgtcccgccttccccggcgcgccatggagccccgggcggttgcagaagccgtggagacgggtgaggaggatgtgattatggaagctctgcggtcatacaaccaggagcactcccagagcttcacgtttgatgatgcccaacaggaggaccggaagagactggcggagctgctggtctccgtcctggaacagggcttgccaccctcccaccgtgtcatctggctgcagagtgtccgaatcctgtcccgggaccgcaactgcctggacccgttcaccagccgccagagcctgcaggcactagcctgctatgctgacatctctgtctctgaggggtccgtcccagagtccgcagacatggatgttgtactggagtccctcaagtgcctgtgcaacctcgtgctcagcagccctgtggcacagatgctggcagcagaggcccgcctagtggtgaagctcacagagcgtgtggggctgtaccgtgagaggagcttcccccacgatgtccagttctttgacttgcggctcctcttcctgctaacggcactccgcaccgatgtgcgccagcagctgtttcaggagctgaaaggagtgcgcctgctaactgacacactggagctgacgctgggggtgactcctgaagggaacccacccacgctccttccttcccaagagactgagcgggccatggagatcctcaaagtgctcttcaacatcaccctggactccatcaagggggaggtggacgaggaagacgctgccctttaccgacacctggggacccttctccggcactgtgtgatgatcgctactgctggagaccgcacagaggagttccacggccacgcagtgaacctcctggggaacttgcccctcaagtgtctgga

SEQ ID NO: 227023 - DNA, 1271 bp, Homo Sapiens
  misc_feature (1195)..(1211): n is a, c, g, or t
ttggttgggctgcatcgcgggaggcgcatggcggggatggcgctggcgcgggcctggaagcagatgtcctggttctactaccagtacctgctggtcacggcgctctacatgctggagccctgggagcggacggtgttcaattccatgctggtttccattgtggggatggcactatacacaggatacgtcttcatgccccagcacatcatggcgatattgcactactttgaaatcgtacaatgaccaagatgcgaccaggatcagaggttccttggggaagacccaccctacgaagttggaatgagaccatcagatgtgataagaaactcttctagatgtcaacataaccaaccttataaagactaaaattcatgagtagaacaggaaaatcatcctgactcatgtgttgtgttctttatttttaattttcaaagaggctcttgtatagcagtttttgtctattttaacattgtagtcatttgtactttgatatcagtattttcttaacctttgtgactgtttcaatattacccccgtgaaagcttttcttaatgtaactttgagtacattttaattgccttctatttttaaaactcaaaatcattagttgggctttactgttcttgctattgtatggcatatacatctgcctggatatatttctactcttgaccaaagttttgtaaagaacaatataagatttcgggtaggggtatggggagggaagatattttattgagaactacttaacaaaagatttatctgtaagcttgaactcaggagtacagttttagctatctagactctaacagcttttgctttaaaattattaaagtgtttcttaatgaaaaagaaaagatcttgctaaagttaaaataaggaacatttcaccttttaaatatttaattcttatgtggacttatttccagaaaactttggtgataattcttgagacaaaaggtggttaagtagcattattatgtaatgcttatataccatagagtttttaatagaagagaaatccatttcctccgagggtcactattaacaatgtacttccttaaatttagtttaatgattgtaatgggtgctgcatttgcacattgcattaagttatgatgagacgaattgttgttaaaaattatagcaaaaagaaatgtaaacttggttaaaatcctttcactctttgtattgnnnnnnnnnnnnnnnnnattccttaaatgtaaaatgactacctaattttttgatgtaaatacattaaattcaaagag

SEQ ID NO: 227024 - DNA, 1407 bp, Homo Sapiens
  misc_feature (184)..(260): n is a, c, g, or t
  misc_feature (1184)..(1226): n is a, c, g, or t
ttggtgcccctcgccgcccgccgcctgcctgggccgggccgaggatgcggcgcagcgcctcggcggccaggcttgctcccctccggcacgcctgctaacttcccccgctacgtccccgttcgcccgccgggccgccccgtctccccgcgccctccgggtcgggtcctccaggagcgccaggcgnnnnnnnnnnnnnnnnnnnnnnnnnnnnnnnnnnnnnnnnnnnnnnnnnnnnnnnnnnnnnnnnnnnnnnnnnnnnnagtcctcgggcggtcatgctgcccctctgcctcgtggccgccctgctgctggccgccgggcccgggccgagcctgggcgacgaagccatccactgcccgccctgctccgaggagaagctggcgcgctgccgcccccccgtgggctgcgaggagctggtgcgagagccgggctgcggctgttgcgccacttgcgccctgggcttggggatgccctgcggggtgtacaccccccgttgcggctcgggcctgcgctgctacccgccccgaggggtggagaagcccctgcacacactgatgcacgggcaaggcgtgtgcatggagctggcggagatcgaggccatccaggaaagcctgcagccctctgacaaggacgagggtgaccaccccaacaacagcttcagcccctgtagcgcccatgaccgcaggtgcctgcagaagcacttcgccaaaattcgagaccggagcaccagtgggggcaagatgaaggtcaatggggcgccccgggaggatgcccggcctgtgccccagggctcctgccagagcgagctgcaccgggcgctggagcggctggccgcttcacagagccgcacccacgaggacctctacatcatccccatccccaactgcgaccgcaacggcaacttccaccccaagcagtgtcacccagctctggatgggcagcgtggcaagtgctggtgtgtggaccggaagacgggggtgaagcttccggggggcctggagccaaagggggagctggactgccaccagctggctgacagctttcgagagtgaggcctgccagcaggccagggactcagcgtcccctgctactcctgtgctctggaggctgcagagctgacccagagtggagtctgagtctgagtcctgtctctgcctgcggcccagaagtttccctcaaatgcnnnnnnnnnnnnnnnnnnnnnnnnnnnnnnnnnnnnnnnnnnnagcatgggtgtgcccttggggtaagccagagactggggtgttctctttggtgttacacagcccaagaggactgagactggcacttagctcaagaggtctgagctctggtgtgtttccagatcgatcctggattcactcactcactcattccttccctcatccagccacctaaaaacattta

SEQ ID NO: 227025 - DNA, 783 bp, Homo Sapiens; identical to SEQ ID NO: 193389
  misc_feature (587)..(632): n is a, c, g, or t

SEQ ID NO: 227026 - DNA, 1431 bp, Homo Sapiens; identical to SEQ ID NO: 193398

SEQ ID NO: 227027 - DNA, 848 bp, Homo Sapiens; identical to SEQ ID NO: 193400

SEQ ID NO: 227028 - DNA, 1172 bp, Homo Sapiens; identical to SEQ ID NO: 193401

SEQ ID NO: 227029 - DNA, 652 bp, Homo Sapiens; identical to SEQ ID NO: 193402

SEQ ID NO: 227030 - DNA, 1277 bp, Homo Sapiens
tttgtacaaaaaagttggctctccttgtcgtcggcgccgcgtgcgggctggtggctctgtggcagcggcggcggcaggactccggcactatgagcggcttcagcaccgaggagcgcgccgcgcccttctccctggagtaccgagtcttcctcaaaaatgagaaaggacaatatatatctccatttcatgatattccaatttatgcagataaggatgtgtttcacatggtagttgaagtaccacgctggtctaatgcaaaaatggagattgctacaaaggaccctttaaaccctattaaacaagatgtgaaaaaaggaaaacttcgctatgttgcgaatttgttcccgtataaaggatatatctggaactatggtgccatccctcagacttgggaagacccagggcacaatgataaacatactggctgttgtggtgacaatgacccaattgatgtgtgtgaaattggaagcaaggtatgtgcaagaggtgaaataattggcgtgaaagttctaggcatattggctatgattgacgaaggggaaaccgactggaaagtcattgccattaatgtggatgatcctgatgcagccaattataatgatatcaatgatgtcaaacggctgaaacctggctacttagaagctactgtggactggtttagaaggtataaggttcctgatggaaaaccagaaaatgagtttgcgtttaatgcagaatttaaagataaggactttgccattgatattattaaaagcactcatgaccattggaaagcattagtgactaagaaaacgaatggaaaaggaatcagttgcatgaatacaactttgtctgagagccccttcaagtgtgatcctgatgctgccagagccattgtggatgctttaccaccaccctgtgaatctgcctgcacagtaccaacagacgtggataagtggttccatcaccagaaaaactaatgagatttctctggaatacaagctgatattgctacatcgtgttcatctggatgtattagaagtaaaagtagtagcttttcaaagctttaaatttgtataactcatctaactaaagtaaattctgctgtgactaatccaatatactcagaatgttatccatctaaagcatttttcatatctcaactaagataacttttagcacatgcttaaatatcaaagcagttgtcatttggaagtcacttgtgaatagatgtgcaaggggagcacatattggatgtatatgttaccatatgttaggaaataaaattattttgctga

SEQ ID NO: 227031 - DNA, 1150 bp, Homo Sapiens
ttggggctggaactgcagcgcttagagagctcggtggaagctgctaaaggcggaggcggggctctggcgagttctccttccaccttcccccacccttctctgccaaccgctgtttcagcccctagctggattccagccattgctgcagctgctccacagcccttttcaggacccaaacaaccgcagccgctgttcccaggatggtgatccgtgtatatattgcatcttcctctggctctacagcgattaagaagaaacaacaagatgtgcttggtttcctagaagccaacaaaataggatttgaagaaaaagatattgcagccaatgaagagaatcggaagtggatgagagaaaatgtacctgaaaatagtcgaccagccacaggttaccccctgccacctcagattttcaatgaaagccagtatcgcggggactatgatgccttctttgaagccagagaaaataatgcagtgtatgccttcttaggcttgacagccccacctggttcaaaggaagcagaagtgcaagcaaagcagcaagcatgaaccttaagcactgtgctttaagcatcctgaaaaatgagtctccattgcttttataaaatagcagaattagctttgcttcaaaagaaataggcttaatgttgaaataatagattagttgggttttcacatgcaaacattcaaaatgaatacaaaattaaaatttgaacattatggtgattatggtgaggagaatgggatattaacataaaattatattaataagtagatatcgtagaaatagtgttgttacctgccaagccatcctgtatacaccaatgattttacaaagaaaacacccttccctccttctgccattactatggcaacttaagtgtatctgcagctctacattaaaaaggagaaagagaaataacctgtctctcattcctaagttgcctcattaattttcatgaacaagaatatgtacctttttgatgctatattactgcgattaaaaagttcttgcaggtaatgtttatgatatgttaaacgttgtaatttcctatcgtaattataacattcccattcttttgtagatgaaacttctacatattgaaccacagattttctgagcttctaaatgtagcctttcattgcacatttca

SEQ ID NO: 227032 - DNA, 988 bp, Homo Sapiens; identical to SEQ ID NO: 193404

SEQ ID NO: 227033 - DNA, 1230 bp, Homo Sapiens
ttggcgccggagtgaattgatccgggagttgaagagggctgcaaggtgggaagtgaagtcagtgcctcagttgctgatcagtgtgttttttgtgtccaattcttttatcaccaaaaaagagaagaaatattgcagtgaatgaagattcctctgcattttagcactgctttttcaactgtagttggcttttgaatgaggatgacaatggaagagatgaagaatgaagctgagaccacatccatggtttctatgcccctctatgcagtcatgtatcctgtgtttaatgagctagaacgagtaaatctgtctgcagcccagacactgagagccgctttcatcaaggctgaaaaagaaaatccaggtctcacacaagacatcattatgaaaattttagagaaaaaaagcgtggaagttaacttcacggagtcccttcttcgtatggcagctgatgatgtagaagagtatatgattgaacgaccagagccagaattccaagacctaaacgaaaaggcacgagcacttaaacaaattctcagtaagatcccagatgagatcaatgacagagtgaggtttctgcagacaatcaaggatatagctagtgcaataaaagaacttcttgatacagtgaataatgtcttcaagaaatatcaataccagaaccgcagggcacttgaacaccaaaagaaagaatttgtaaagtactccaaaagtttcagtgatactctgaaaacgtattttaaagatggcaaggcaataaatgtgttcgtaagtgccaaccgactaattcatcaaaccaacttaatacttcagaccttcaaaactgtggcctgaaagttgtatatgttaagagatgtacttctcagtggcagtattgaactgcctttatctgtaaattttaaagtttgactgtataaattatcagtccctcctgaagggatctaatccaggatgttgaatgggattattgccatcttacaccatatttttgtaaaatgtagcttaatcataatctcacactgaagattttgcatcacttttgctattatcattcttttaagaattataagccaaaagaatttacgccttaatgtgtcattatataacattccttaaaagaattgtaaatattggtgtttgtttctgacattttaacttgaaagcgatatgctgcaagataatgtatttaacaatatttggtggcaaatattcaataaatagtttacatctgtt

SEQ ID NO: 227034 - DNA, 900 bp, Homo Sapiens
ttgggacaccagcacagcaaacccgccgggatcaaagtgtaccagtcggcagcatggctacgaaatgtgggaattgtggacccggctactccacccctctggaggccatgaaaggacccagggaagagatcgtctacctgccctgcatttaccgaaacacaggcactgaggccccagattatctggccactgtggatgttgaccccaagtctccccagtattgccaggttaggcggggcttgggcgccagctactttgagaccatagctgccctcatccctggccctgggcccccccttcccagctccatccttcttggccctccctggggatgcttgtgcacgctcaacctgggacaaggggagtgctgaaatccagcctgtgccgtgcttccaaaccaaaatgagtccacaggggcgcctcttccaaaagtggacagaggtgtggcctgggggagcaccacctctccccgcatcctaggtcatccaccggctgcccatgcccaacctgaaggacgagctgcatcactcaggatggaacacctgcagcagctgcttcggtgatagcaccaagtcgcgcaccaagctggtgctgcccagtctcatctcctctcgcatctatgtggtggacgtgggctctgagccccgggccccaaagctgcacaaggtcattgagcccaaggacatccatgccaagtgcgaactggcctttctccacaccagccactgcctggccagcggggaagtgatgatcagctccctgggagacgtcaagggcaatggcaaagggggttttgtgctgctggatggggagacgttcgaggtgaaggggacatgggagagacctgggggtgctgcaccgttgggctatgacttctggtaccagcctcgacacaatgtc

SEQ ID NO: 227035 - DNA, 994 bp, Homo Sapiens; identical to SEQ ID NO: 193406

SEQ ID NO: 227036 - DNA, 1325 bp, Homo Sapiens; identical to SEQ ID NO: 193411

SEQ ID NO: 227037 - DNA, 685 bp, Homo Sapiens
actttgtacaaaaaagttggggaccaggccctcctctcggaggaggaccgcgtggtcgtcatccgcttcggccacgactgggatcctacgtgcatgaagatggacgaggtcctgtacagcatcgccgagaaggttaaaaattttgcagttatttatcttgtggatattacagaagtgcctgacttcaacaaaatgtatgagttatacgatccatgtactgtcatgtttttcttcaggaacaagcacatcatgattgacttggggactggcaacaacaacaagattaactgggccatggaggacaagcaggagatggtggacatcatcgagacggtgtaccgcggggcccgcaaaggccgcggcctggtggtgtcccccaaggactactccaccaagtaccgctactgaggcgccctcagtctgcgcggataaatgtcgtggagccctttttgtatggaaacgttttaagctatttaaagcctttggaaaatacaggaagctccagggctggagcacctctgagatggaattgataacatggtcttaactcaccgaaataaacaagcacgtggtgagaggagcaggcctacttgtttgttctcaggaaacttaatgaatagattactgattttcctagtcaaagttaattcttacccttggagtaaaacgaaggtgtttatcctga

SEQ ID NO: 227038 - DNA, 1441 bp, Homo Sapiens; identical to SEQ ID NO: 193412
  misc_feature (1194)..(1202): n is a, c, g, or t

SEQ ID NO: 227039 - DNA, 1052 bp, Homo Sapiens
ttggagagtcttcaaaaacgcactgcaagaagctgaagctcgttttcgtgaaattaagcttcagagggaagcccgagaaacacaggagagcgagcgcaagcccccaccatacaagcacatcaaggtgaataagccttacgggaaagtccagatctacacagcggatatttcagaaatccctaagtgcaactgcaagcccacagatgagaatccttgtggcttggattcggagtgtctgaacaggatgctgatgtttgagtgccacccgcaggtgtgtcccgcgggcgagttctgccagaaccagtgcttcaccaagcgccagtacccagagaccaagatcatcaagacagatggcaaagggtggggcctggtcgccaagagggacatcagaaagggagaatttgttaacgagtacgttggggagctgatcgacgaggaggagtgcatggcgagaatcaagcacgcacacgagaacgacatcacccacttctacatgctcactatagacaaggaccgtataatagacgctggccccaaaggaaactactctcgatttatgaatcacagctgccagcccaactgtgagaccctcaagtggacagtgaatggggacactcgtgtgggcctgtttgccgtctgtgacattcctgcagggacggagctgacttttaactacaacctcgattgtctgggcaatgaaaaaacggtctgccggtgtggagcctccaattgcagtggattcctcggggatagaccaaagacctcgacgaccctttcatcagaggaaaagggcaaaaagaccaagaagaaaacgaggcggcgcagagcaaaaggggaagggaagaggcagtcagaggacgagtgcttccgctgcggtgatggcgggcagctggtgctgtgtgaccgcaagttctgcaccaaggcctaccacctgtcctgcctgggccttggcaagcggctcttcgggaagtgggaatgtccttggcatcattgtgacgtgtgtggcaaaccttcgacttcattttgccacctctgctccaattcgttctgta

SEQ ID NO: 227040 - DNA, 991 bp, Homo Sapiens
ctttgtacaaaaaagttggtgtctctggcggctctagactccctgtcgctcttcactagcctcggcctgagcgagcagaaggcccgcgagacgctcaagaactcggctctgagcgcgcagctgcgcgaggccgctactcaggctcagcagaccctgggttccaccattgacaaagctaccgggatcctgttatatggcttggcctcccgactcagggatacccggcgtctctccttccttgtaagctacatagccagtaagaagatccacactgagccccagctaagcgctgcccttgagtatgtgcggagtcaccccttggaccccatcgacactgtggacttcgagcgggaatgtggcgtgggtgtcattgtgaccccagagcagattgaggaggctgtggaggctgctattaacaggcaccggccccagctcctggtggaacgttaccatttcaacatggggctgctgatgggagaggctcgggctgtgctgaagtgggcagatggcaaaatgatcaagaatgaagtggacatgcaggtcctccaccttctgggccccaagttggaggctgatctggagaagaagttcaaggtggcaaaagctcggctagaagaaacagaccggaggacggcaaaggatgtggtggagaatggcgagactgctgaccagaccctgtctctgatggagcagctccggggggaggcccttaagttccacaagcctggtgagaactacaagaccccaggctatgtggtcactccacacaccatgaatctactaaagcagcacctggagattactggtgggcaggtacgtacccggttcccgccagaacccaatggaatcctgcatattggacatgccaaagccatcaatttcaactttggctatgccaaggccaacaatggcatctgttttctgcgttttgatgacaccaaaccctgagaaggaggaagcaaagttcttcacggccatctgtgacatggta

SEQ ID NO: 227041 - DNA, 1187 bp, Homo Sapiens; identical to SEQ ID NO: 193419

SEQ ID NO: 227042 - DNA, 1666 bp, Homo Sapiens
ttgggtaaagattactaccagacgttgggcctggcccgcggcgcgtcggacgaggagatcaagcgggcctaccgccgccaggcgctgcgctaccacccggacaagaacaaggagcccggcgccgaggagaagttcaaggagatcgctgaggcctacgacgtgctcagcgacccgcgcaagcgcgagatcttcgaccgctacggggaggaaggcctaaaggggagtggccccagtggcggtagcggcggtggtgccaatggtacctctttcagctacacattccatggagaccctcatgccatgtttgctgagttcttcggtggcagaaatccctttgacaccttttttgggcagcggaacggggaggaaggcatggacattgatgacccattctctggcttccctatgggcatgggtggcttcaccaacgtgaactttggccgctcccgctctgcccaagagcccgcccgaaagaagcaagatcccccagtcacccacgaccttcgagtctcccttgaagagatctacagcggctgtaccaagaagatgaaaatctcccacaagcggctaaaccccgacggaaagagcattcgaaacgaagacaaaatattgaccatcgaagtgaagaaggggtggaaagaaggaaccaaaatcactttccccaaggaaggagaccagacctccaacaacattccagctgatatcgtctttgttttaaaggacaagccccacaatatctttaagagagatggctctgatgtcatttatcctgccaggatcagcctccgggaggctctgtgtggctgcacagtgaacgtccccactctggacggcaggacgatacccgtcgtattcaaagatgttatcaggcctggcatgcggcgaaaagttcctggagaaggcctccccctccccaaaacacccgagaaacgtggggacctcattattgagtttgaagtgatcttccccgaaaggattccccagacatcaagaaccgtacttgagcaggttcttccaatatagctatctgagctccccaaggactgaccagggacctttccagagctcaaggatttctggacctttctaccagttgtggaccatgagagggtgggagggcccagggagggctttcgtactgctgaatgttttccagagcatatattacaatctttcaaagtcgcacactagacttcagtggtttttcgagctatagggcatcaggtggtgggaacagcaggaaaaggcattccagtctgccccactgggtctggcagccctcccgggatgggcccacatccacctccagtccctggccaggggtgagaggcagaccagcagatggacttgatccctctgtgtctttttgcttctggctggtagataatgtcaacctgcagtcttgattcccagaccctgtacactcctccttttctgttgtgtgatcagtttgtgctttattctgtatttgtctcccatgtcttgctcttctcctggagaattctgtcttctctttggccatctcaaattgagaacctaaactattcctgcagaactgcctggttggcgtccacaagcaatacctctcgttccagcagaccaagggagccagcctccagtgagtgactccagcaagtgcagccacctctcccttgatggtctggga

SEQ ID NO: 227043 - DNA, 1159 bp, Homo Sapiens; identical to SEQ ID NO: 193420

SEQ ID NO: 227044 - DNA, 973 bp, Homo Sapiens
ttggcgccggcctcgctatgtctgccattttcaattttcagagtctattgactgtaatcttgctgcttatatgtacctgtgcttatattcgatccttggcacccagcctcctggacagaaataaaactggattgttgggtatattttggaagtgtgccagaattggtgaacggaagagtccttatgttgcagtatgctgtatagtaatggccttcagcatcctcttcatacagtagctggggaaaatgccagaatgtagttgccatcagatttgattgtgaacaaggactgactgcagaaaataatggaaaggatgtttaactcttttatctccgaacattgaatgagataaatttccagatgctgttctctattttaatgttattggaccaatgttctgtataaacaattaagatgtaaccatttaatagtctgtaacaatcaacctcagtactgtcactacaatattacattctgcaaatgttattctgttgtatcagatacaaaattttagtgaggtatctctaaggcacatagtagaaaacaaaattggttaattactcaagttcctttcactgtgatttggaaatgatttaatctttatagaatgagaaccttttttggactagcttttttattaaaatggctcaatttgtgttgataaggattgcattaatatttaatagtgcttgcttttcctctgggcacaccattttgatcattaaccagagtacctctactcttagcaaactctagtttatgacaagtatttaaaatatttaaaacaagcttatgcagttcttaaggacgaaggtaaatgagatgtaacttaaaaatagtattggggaaaatgttgatagttaacattagtggatttagactagccaaatgacatagtggctctgaaacatcttgtcaagtatatgtattttgtgcatgaatttttgctggaaagctgtctttctctgaaaaa

SEQ ID NO: 227045 - DNA, 1118 bp, Homo Sapiens; identical to SEQ ID NO: 193425

SEQ ID NO: 227046 - DNA, 448 bp, Homo Sapiens; identical to SEQ ID NO: 193431
  misc_feature (228)..(250): n is a, c, g, or t
  misc_feature (326)..(340): n is a, c, g, or t

SEQ ID NO: 227047 - DNA, 804 bp, Homo Sapiens
ttggcgcgcgggtggctgagcagcggtctggtgcgctcgcttagcgggcgacggaatcagacggacgtggacgcccccggagtggaagccgaagcaggagttgttgttgctgaggggctgccgcagccgccgcgagcctccggacagacgccagagcgaggagggcgctacgcgacttggcaagatgacccagttcctgccgcccaaccttcggaccctctttgccccccgtgaccctattccatacctgccacccctggagaaactgccacatgaaaaacaccacaatcaaccttattgtggcattgcgccgtacattcgagagtttgaggaccctcgagatgcccctcctccaactcgtgctgaaacccgagaggagcgcatggagaggaaaagacgggaaaagattgagcggcgacagcaagaagtggagacagagcttaaaatgtgggaccctcacaatgatcccaatgctcagggggatgccttcaagactctcttcgtggcgagagtgaattatgacacaacagaatccaagctccggagagagtttgaggtgtacggacctatcaaaagaatacacatggtctacagtaagcggtcaggaaagccccgtggctatgccttcatcgagtacgaacacgagcgagacatgcactgtgagtacctcccgccgagccctgccctctgacctgctctcacttctctgctgccccagcccctcccagtctgtcccctcccccaccctgccacacctgacattagcgatgtctcttctcctcctccctctgtttctgatgtatc

SEQ ID NO: 227048 - DNA, 1190 bp, Homo Sapiens; identical to SEQ ID NO: 193437

SEQ ID NO: 227049 - DNA, 903 bp, Homo Sapiens
actttgtacaaaaaagttggatcggtcgcctgagaggtatcacctcttctgggctcaagatggacaacaagaagcgcctggcctacgccatcatccagttcctgcatgaccagctccggcacgggggcctctcgtccgatgctcaggagagcttggaagtcgccatccagtgcctggagactgcgtttggggtgacggtagaagacagtgaccttgcgctccctcagactctgccggagatatttgaagcggctgccacgggcaaggagatgccgcaggacctgaggagccccgcgcgaaccccgccttccgaggaggactcagcagaggcagagcgcctcaaaaccgaaggaaacgagcagatgaaagtggaaaactttgaagctgccgtgcatttctacggaaaagccatcgagctcaacccagccaacgccgtctatttctgcaacagagccgcagcctacagcaaactcggcaactacgcaggcgcggtgcaggactgtgagcgggccatctgcattgacccggcctacagcaaggcctacggcaggatgggcctggcgctctccagcctcaacaagcacgtggaggccgtggcttactacaagaaggctctggagctggaccccgacaacgagacatacaagtccaacctcaagatagcggagctgaagctgcgggaggcccccagccccacgggaggcgtgggcagcttcgacatcgccggcctgctgaacaaccctggcttcatgagcatggcttcgaacctaatgaacaatccccagattcagcagctcatgtccggcatgatttcgggtggcaacaaccccttgggaactcccggcaccagcccctcgcagaacgacctggccagcctcatccaggcgggccagcagtttgccc

SEQ ID NO: 227050 - DNA, 818 bp, Homo Sapiens; identical to SEQ ID NO: 193438

SEQ ID NO: 227051 - DNA, 1092 bp, Homo Sapiens; identical to SEQ ID NO: 193442
  misc_feature (970)..(1000): n is a, c, g, or t

SEQ ID NO: 227052 - DNA, 954 bp, Homo Sapiens; identical to SEQ ID NO: 193443

SEQ ID NO: 227053 - DNA, 1113 bp, Homo Sapiens
ttggcgaaccggaagaagaggaactgggcctgaaagggtaccggtgaccgctactgctgccggtgtttgcgtgtggcagggagccaggcctggcgagcggggtgtgtcgcgatgccggagctggcagtgcagaaggtggtggtccaccccctggtgctgctcagtgtggtggatcatttcaaccgaatcggcaaggttggaaaccagaagcgtgttgttggtgtgcttttggggtcatggcaaaagaaagtacttgatgtatcgaacagttttgcagttccttttgatgaagatgacaaagacgattctgtatggtttttagaccatgattatttggaaaacatgtatggaatgtttaagaaagtcaatgccagggaaagaatagttggctggtaccacacaggccctaaactacacaagaatgacattgccatcaacgaactcatgaaaagatactgtcctaattccgtattggtcatcattgatgtgaagccgaaggacctagggctgcctacagaagcgtacatttcagtggaagaagtccatgatgatggaactccaacctcgaaaacatttgaacacgtgaccagtgaaattggagcagaggaagctgaggaagttggagttgaacacttgttacgagatatcaaagacacgacggtgggcactctgtcccagcggatcacaaaccaggtccatggtttgaagggactgaactccaagcttctggatatcaggagctacctggaaaaagtcgccacaggcaagctgcccatcaaccaccagatcatctaccagctgcaggacgtcttcaacctgctgccagatgtcagcctgcaggagttcgtcaaggccttttacctgaagaccaatgaccagatggtggtagtgtacttggcctcgctgatccgttccgtggtcgccctgcacaacctcatcaacaacaagattgccaaccgggatgcagagaagaaagaatgggcaggagaaagaagagagcaaaaaggataggaaagaggacaaggagaaagataaagataacgaaaagagtgatgtaagaaagaggagaaaaacgaggaaagtaaaacatgtattaaataagcttttttaatt

SEQ ID NO: 227054 - DNA, 446 bp, Homo Sapiens; identical to SEQ ID NO: 193446

SEQ ID NO: 227055 - DNA, 1519 bp, Homo Sapiens
caaaggacaaaagggtttcatacaacacagtatcaaaaagtaaaaggaacacactaaatgcacaagctggtggcaagtaagtccacagcctatttgtgataggtccatccagcatcaatcagatttcttctcatctgttatctcaaggttatttacagatgtgttgactaacaacagtctctcatgggaggatgggcaggcttcaatcattggtttcgggatctgtctgcgccatgtaggcatccaactcagcatccaggtgtccttttgttttcgacatatatgcatccaattggttgtccagctgctccttggtcaatacagggcgagcaagggcacctctccctcgtccacggcctcggcctcggcctccaaagccccttcttccccgacctatcataccccgacctctaccaccgattccgccacgacccatagctccacgccctaggccccctctcccaggacctccacgacctcgaacaccacctcttcttaagcccattcggggagctacggctcgtccacctcggagcaggttttgacctcggagtgacatcccgcccctaagtagggttctggtggcacgtcccccacgtagtcctcctctgggcaagcctctctggattatgggtaggcctcgtcctccgattgctcccctggccagggcccctatgggtcggcctaaccgtgcctggatgttactcttacccaggcgctgctttaagctcttctgcttaagttttaatgctgcctggacagagggtctattctccatctgctgggccagtcttctgtttctggcactggctagctgctgttgttgctgcatcgaagcccgaatattcactggcgtcggctgtttgttcttcagcatattagtaaagcttcaaggtcgaacaaaatggatgtttaaataaaagctttattacaaacatttattggcattttcatggcttgctagaccaggagctccagatcccacgaacttttaagtaaagtggtacacttagatcaaggctgatgtgggttaaagactcctctgtttccacaaacttgcaagaatcagaaacttagaaatgcagctaagtgcagcacattcaaccaaaagtgataacgagggctcaggtaacggcttttagagaggtggaaggtatgaaaaacacgcaataagcagatatgacaagagacagaagatatagtttcaaagacaaatgaagaaagcctaaaccttgggggatccgaggtgcattctaaggccaaatatgaggaaggattagagcaccttcaaagctcacagcaatgaacatactctcataaattacaggagtgtatcacattttaaaatatatgtcactaacatgcaaacataaatattatgcaaacataaataattagcttatcatagccaaagagataaggagagaagcacatatgcctcagaagaggcaaaaatagacattaagtaaatttcagtggtcgaaagtcaacttaatgaaatcactgatcaaaggcattc

SEQ ID NO: 227056 - DNA, 723 bp, Homo Sapiens; identical to SEQ ID NO: 193447

SEQ ID NO: 227057 - DNA, 806 bp, Homo Sapiens; identical to SEQ ID NO: 193448

SEQ ID NO: 227058 - DNA, 1261 bp, Homo Sapiens
ccaaacgtgggaagccacaaagagggctctgggcccctcactcaccccctcccctaggggatgtgcttaaagtgctaacgctgtaggaaaatgatgcatagctacaagccgtccctgggtgctactagactcatcgcttgcctcttcctccctaacttgtgctaatactgggcgatggcacaggccaatagaaaagtctagtgcccagtgaagtagtagagaaggtccaacgtgtaacctagaattcccaagaggaggtggggacagaagagaagaagtgaagggcagagacgtgtgcagcaaaaaggacgtttgtgcttggccggtaccgctgggtcaggggttggtttctgtgcaaagggcaattgggttctgcacagctagcagggtcctaaattttacctgagggaacaaggctacatagcataggaaggaggaaaatccatgcagggccctccctgtcccccacacaggcacgcccccatgcctactgtacaaggtgctgtggagtactggggtggggtatacagcaggccatgccacacttggatgctggatgacatctgaacacccctggccaaagagctccctctggaagggcccagtcatcacatgcagggcccaccctgagtcagcatgaggggcttacgtccaactggtagccttgccaaagatacctgtgcccctgcgggttacagcccagtgaaatgcatcacgtgcatgacatggagggcaccccagccaggagggcaagcaaaagtggcagtggcataacttcttcacgttggtgacctagctaggtagaggatgccttggaggaacgggagggtgtccagaggccaagagaatactcctgtctcgccctcggctcagagccagatctcatcactgctcacgctggacactcgatagatatagcccagcactgggaggcggatgaaaccttggctggtgaggaggccgccgggctccgggtccagaagctctggccggctgttgttctgagccatctgccggtctgctggtttcactgctctggaatctggagtgaggtcattgagctgaaggttggacgggagggacatgttctcccgtggcaggcgcacgttgttgagttttaggttgttggagtcacttgatatcagagatgggtgccgggaggggcctttggttttcttctcttttctgcagaccaggcaggccaccaaggtgctgaaccccacgagggtgcccagtgcaagccaacttttttgtacaaagt

SEQ ID NO: 227059 - DNA, 1311 bp, Homo Sapiens
  misc_feature (804)..(804): n is a, c, g, or t
agccaactttgtacaaaaaagttggtgaatgggacctgatccaggagtcaggtgtgccactcaagcccctgtttgggcctggctacacaggcatccggaacctgggtaacagctgctacctcaactctgtggtccaggtgctcttcagcatccctgacttccagaggaagtatgtggataagctggagaagatcttccagaatgccccgacggaccctacccaggatttcagcacccaggtggccaagctgggccatggccttctctccggggagtattccaagccagtaccggagtcgggcgatggggagcgggtgccagaacagaaggaagttcaagatggcattgcccctcggatgttcaaggccctcatcggcaagggccaccctgaattctccaccaaccggcagcaggatgcccaggagttcttccttcaccttatcaacatggtggagaggaattgccggagctctgaaaatcctaatgaagtgttccgcttcttggtggaggaaaagatcaagtgcctggccacagagaaggtgaagtacacccagcgagttgactacatcatgcagctgcctgtgcccatggatgcagcccttaacaaagaggagcttctggagtacgaggagaagaagcggcaagccgaagaggagaagatggcactgccagaactggttcgggcccaggtgcccttcagctcttgcctggaggcctacggggcccctgagcaggtcgatgacttctggagcacggccctgcaggccaagtcagtagctgtcaagaccacacgatttgcctcanttccctgactacctggtcatccagatcaagaagttcaccttcggcttacactgggtgcccaagaaactggatgtgtccatcgagatgccagaggagctcgacatctcccagttgaggggcacagggctgcagcccggagaggaggagctgccagacattgccccacccctggtcactccggatgagcccaaagcgcccatgctggatgaatcagtcatcatccagctggtggagatgggattccctatggacgcctgccgcaaagctgtctactacacgggcaacagcggggctgaggccgccatgaactgggtcatgtcacacatggatgatccagattttgcaaaccccctcatcaagcctggctctagtggccggggctccacaagcgcagcagccgaccccccttcctgaggactgtgtgaccaccattgtctccatgggcttctcccgggaccaaggccttgaaagccctgcggtccacaaacaaaagtttaaaagggctgg

SEQ ID NO: 227060 - DNA, 1233 bp, Homo Sapiens; identical to SEQ ID NO: 193451

SEQ ID NO: 227061 - DNA, 1123 bp, Homo Sapiens; identical to SEQ ID NO: 193452

SEQ ID NO: 227062 - DNA, 1091 bp, Homo Sapiens
tcatccacaaaggccaagcacctctgactggaacgagtggtatgggcctgttgggcagcaccatctgtggccagcattctccgttccttcaactgctatgcagtaaggcttccactccatagcgctggcggtatcgtcgcagacattttaatcgctttaagttctctcgttctttggccaaaagtccctctgggccagtcaggagactactgcctagagcttcatgttccactttgcgattatgtaagtatcggcgcttcttctccttgagcagatgctgaagtcgtttaaactgatcaatatacaacgactgcaaacgaattagcttttcacgcataatcagggccacttcttctgctgtgtagacaccagcatgttttaggggatcttcttgatcactgtctatgctatcagcttcactgtcagggtcacctctccatgtctgatccacagtaatgggttcctgctccccatcactccagctgtcttcatctagtattcggctggcttcactgcgactactttctggagtctgagaccccagctctgtcttagcatatgagctcagctggcacaggagtgtttcacccacaggccctgggttggtcttcttcatttgagcatgaagtgccagggcattcctacggacatgttcagcacagaaggacaccccatctttcttctctggctttggggcagcattgggacatctttttccattcttcgtcgatatataactacactgcttgaagggtgcattcttgtcttcaaggatatgcttaatgcaaaactcctgcccctccagacgagggtgagagcatggacgatgagtgaatgcacaagacagaggttcctgagacctgggcactggagtgatcctcccccgattggttggcaagacgtgaatccgaatcctgttcataaccaaaacctgcggggtcaaacgaaagaccaaaaagcccttacccttcccgaaaattcctgctccacacagatcgcgcggacagtttccaaaggacatgcagaagtcgtccccgtaaggtacgctccgtaagtccccgccgccctccccaagtctccacaggcaccaa

SEQ ID NO: 227063 - DNA, 897 bp, Homo Sapiens
tccttgccagaagatggaggagaggcggcccaatcttctgagatgctccgtgggagccgtgtgctgatgggctggttaccaggccggggccgtgttggcaagacgcctcatccgcctcgtgttcctgtcctggtcgcggatcttcttctccatctcagcgtctgtcagagtctccagcagtgggcaccactggtccgcatcgcccgtgttccggatggcaatctccactgtgggcagagggttctcgctgaaggcgtaggtcttctgatgccagctcagctgtccccggatgctgtatgcgatggtggtgacaaactccccgcccaaccccagctccgagcacagcttcagggcaaacttctctggtgagttctccttctctgacatgtcccactcaaactggtccaccagggaaatgtttcccacatggatgttcagcttgatgatgacgcgctggtctgactggtcctccaggatgctgtccgtggggtaggactcgatctgctgtctgatggcagaggcgatggctggcacaaacgtcagcgggttcaaatccagatcgtcacagaggatttctgaaaacatctcaggcgtcatcaacttctcagatgggagctcacagggaccatctgtggccagccagacctcagcaaggtcctctcagtcaacattctctccctgctccacccagaccgtactgacaagacgccttgcaggaataagcattcatgttccaggtgaaggcgtctcgcagcttctgcccatcgatctccatgtccagccggatggggaccagcacctcgggctgagatgcgttctcatggatcacagctgggtcatggtcatcaaagcaaagggggaaggttctcttcttgtctcggcccatgcggttcctgt

SEQ ID NO: 227064 - DNA, 987 bp, Homo Sapiens
ctttgtacaaaaaagttgggatcaacttccgcgacaagcgcagcgcgctgcagtccatcaacgagtgggccgcgcagaccaccgacggcaagctgcccgaggtcaccaaggacgtggagcgcacggacggcgccctgttagtcaacgccatgttcttcaagccacactgggatgagaaattccaccacaagatggtggacaaccgtggcttcatggtgactcggtcctataccgtgggtgtcatgatgatgcaccggacaggcctctacaactactacgacgacgagaaggaaaagctgcaaatcgtggagatgcccctggcccacaagctctccagcctcatcatcctcatgccccatcacgtggagcctctcgagcgccttgaaaagctgctaaccaaagagcagctgaagatctggatggggaagatgcagaagaaggctgttgccatctccttgcccaagggtgtggtggaggtgacccatgacctgcagaaacacctggctgggctgggcctgactgaggccattgacaagaacaaggccgacttgtcacgcatgtcaggcaagaaggacctgtacctggccagcgtgttccacgccaccgcctttgagttggacacagatggcaacccctttgaccaggacatctacgggcgcgaggagctgcgcagccccaagctgttctacgccgaccaccccttcatcttcctagtgcgggacacccaaagcggctccctgctattcattgggcgcctggtccggcctaagggtgacaagatgcgagacgagttatagggcctcagggtgcacacaggatggcaggaggcatccaaaggctcctgagacacatgggtgctattggggttgggggggaggtgaggtaccagccttggatactccatggggtgggggtggaaaaacagaccggggttcccgtgtgcctgaacggaacttcccagctagaattcactccacttggacatgg

SEQ ID NO: 227065 - DNA, 722 bp, Homo Sapiens; identical to SEQ ID NO: 193453

SEQ ID NO: 227066 - DNA, 1320 bp, Homo Sapiens; identical to SEQ ID NO: 193454

SEQ ID NO: 227067 - DNA, 989 bp, Homo Sapiens; identical to SEQ ID NO: 193455

SEQ ID NO: 227068 - DNA, 1390 bp, Homo Sapiens
ctttgtacaaaaaagttgggaagaggaagaggaagaggaggagccattggatgaaagctcagtgaagaaaatgatcctcacatttgaaaagagatcatataaaaaccaagaattgcggattaagtttccagacaatccagagaagttcatggaatccgagctggacctaaatgacatcattcaggagatgcacgtggtggccaccatgccagacctgtaccaccttctggtggagctgaatgctgtacagtcgcttctcggcttgctcggacacgataatacagatgtgtccatagctgtggtcgatttgcttcaggaattaacagatatagacaccctccatgagagtgaagagggagcagaagtgctcatcgatgctctggtggatgggcaggtggtagcactgctggtacagaatctggagcgcctggatgagtctgtgaaagaggaggcagatggcgtccacaacactctggctattgtggaaaacatggctgagttccggcctgagatgtgtacagagggtgcccagcagggtcttctacagtggctgttgaagaggctgaaggcaaagatgccttttgatgccaacaaactgtattgcagtgaagtgctggccatattgctccaggacaatgatgaaaacagggaattgcttggggagctggatggaatcgatgtgcttcttcagcagttatccgtgtttaaaagacacaatcccagcacggctgaggagcaggagatgatggagaatctgtttgattccctctgctcctgtctaatgcttagttccaatcgtgagcgcttcctgaagggcgagggtcttcagctgatgaatctcatgctcagggaaaagaagatctcccggagcagtgccctgaaagtgctggaccatgccatgattggccccgaaggcacagacaactgccataagtttgttgacattcttggcttacgaaccatctttcccctctttatgaaatctcccaggaagatcaagaaagtgggaaccactgagaaggaacatgaagagcatgtctgttcgatcctggcttccctcctgcggaacctgagagggcagcagcggacccggcttctgaataaattcactgaaaatgacagtgagaaggttgacagactaatggagttgcattttaaatatctgggtgcaatgcaggtggcggacaagaagattgaaggggaaaaacacgacatggtccggcgaggagagatcatcgacaatgacaccgaggaggagttctacctccggcgcctggatgcggggctctttgttctccagcacatctgctacatcatggccgagatctgcaatgccaatgtcccccagattcgccagagggttcaccagatcctaaacatgcgaggaagc

SEQ ID NO: 227069 - DNA, 706 bp, Homo Sapiens; identical to SEQ ID NO: 193457

SEQ ID NO: 227070 - DNA, 990 bp, Homo Sapiens
ttggatcaaagggcgtcgcccaaagcgggacaggtccagcggttgttctgtgtgaagtcgcgcggcttccacccacgcagtgttctaagtgaaggccagaaactcgctcgccatgtcggctgcagaggcggggggtgttttccacagagccaggggcaggaccctggacgcgtttcccgcagaaaaggaaagcgaatggaaaggcccattctacttcatcctgggcgcagacccacagtttgggctgatcaaggcctggtccactggggactgtgacaatggcggtgacgaatgggaacaggagatccgtctaactgagcaagccgtccaggccatcaacaagctgaaccccaaacccaaattcttcgttctgtgcggcgacctcatccacgccatgccagggaagccgtggcggacggagcagacggaggacctgaagcgagtgcttagggcagtggacagggccatcccactggtccttgtcagcggcaaccatgacattggcaacacccccacggccgagaccgtcgaggagttctgccggacttggggagatgactacttcagcttctgggtcgggggcgtcctgttcctggtcctcaactcccagttctacgagaacccctccaaatgccccagcctgaagcaggctcaggaccagtggctggacgagcagctgagcatcgcgaggcagcggcactgccagcatgccatcgtcttccagcacatcccgctgttcctggagagcatcgacgaggacgacgactactacttcaacctcagcaagtccactcggaagaagttggcagacaagttcatccacgcaggtgtcagagtcgtgttctcaggccactaccacaggaatgccgggggtacctaccagaacctcgacatggtggtgtcatctgccattggatgccagctgggcagagacccccacgggctccgagtcgtgtggtcaccgccgagaaaattgttcaccgatactac

SEQ ID NO: 227071 - DNA, 1299 bp, Homo Sapiens
ttggcaagctccctcagcaccatgtaccgagcacttcggctcctcgcgcgctcgcgtcccctcgtgcgggctccagccgcagccttagcttcggctcccggcttgggtggcgcggccgtgccctcgttttggcctccgaacgcggctcgaatggcaagccaaaattccttccggatagaatatgatacctttggtgaactaaaggtgccaaatgataagtattatggcgcccagaccgtgagatctacgatgaactttaagattggaggtgtgacagaacgcatgccaaccccagttattaaagcttttggcatcttgaagcgagcggccgctgaagtaaaccaggattatggtcttgatccaaagattgctaatgcaataatgaaggcagcagatgaggtagctgaaggtaaattaaatgatcattttcctctcgtggtatggcagactggatcaggaactcagacaaatatgaatgtaaatgaagtcattagcaatagagcaattgaaatgttaggaggtgaacttggcagcaagatacctgtgcatcccaacgatcatgttaataaaagccagagctcaaatgatacttttcccacagcaatgcacattgctgctgcaatagaagttcatgaagtactgttaccaggactacagaagttacatgatgctcttgatgcaaaatccaaagagtttgcacagatcatcaagattggacgtactcatactcaggatgctgttccacttactcttgggcaggaatttagtggttatgttcaacaagtaaaatatgcaatgacaagaataaaagctgccatgccaagaatctatgagctcgcagctggaggcactgctgttggtacaggtttaaatactagaattggctttgcagaaaaggttgctgcaaaagtggctgcacttacaggcttgccttttgtcactgctccgaataaatttgaagctctggctgctcatgacgctctggttgagctcagtggagccatgaacactactgcctgcagtctgatgaagatagcaaatgatattcgatttttgggttctggtcctcggtcatgtctgggagaattgatcttgcctgaaaatgaaccaggaagcagtatcatgccaggcaaggtgaaccctactcagtgtgaagcaatgaccatggttgcagcccaagtcatggggaaccatgttgctgtcactgtcggaggcagcattggacattttgagttgaatgtttcagccaatgatgattaaaaatgtgttacactcagccaggctgctggggatgcttcc

SEQ ID NO: 227072 - DNA, 511 bp, Homo Sapiens
caactttgtacaaaaaagttggctcttggcttcgagatggcttcgccacaccaagagcccaaacctggagacctgattgagattttccgccttggctatgagcactgggccctgtatataggagatggctacgtgatccatctggctcctccaagtgagtaccccggggctggctcctccagtgtcttctcagtcctgagcaacagtgcagaggtgaaacgggagcgcctggaagatgtggtgggaggctgttgctatcgggtcaacaacagcttggaccatgagtaccaaccacggcccgtggaggtgatcatcagttctgcgaaggagatggttggtcagaagatgaagtacagtattgtgagcaggaactgtgagcactttgtcacccagctgagatatggcaagtcccgctgtaaacaggtggaaaaggccaaggttgaagtcggtgtggccacggcgcttggaatcctggttgttgctggatgctcttttgcgattaggagatacc

SEQ ID NO: 227073 - DNA, 957 bp, Homo Sapiens
  misc_feature (440)..(453): n is a, c, g, or t
ttgtacaaaaaagttggagaaaatcaaccttcttgggccaagtcagcaggtgccaagtctagtggtggcagggaagacttggagtcatctggactgcagagaaggaactcctctgaagcaagctccggagacttcttagatctgaagggagaaggtgatattcatgaaaatgtggacacagacttgccaggcagcctggggcagagtgaagagaagcccgtgcctgctgcgcctgtgcccagcccggtggccccggccccagtgccatccagaagaaatccccctggcggcaagtccagcctcgtcttgggttagctctgactgtcctgaacgctgtcgttctgtctgtttcctccatgcttgtgaactgcacaacttgagcctgactgtacatctcttggatttgtttcattaaaaagaagcactttatgtactgctgnnnnnnnnnnnnnncttttgaagaacaggtttctctctgtccttgactcttgggtctgtgggccatggcatgagtgttttctagtagtagattggagggaaagctttgtgacacttagtactgtgtttttaagaagaaataatttggttccagatgtgttaaaggatcttttgtactgaggtttttaacactttacttgggtttaccaagcctcaactggacagaccataaacagtccacaggcaccgttcctgccaggccccaacccacagggagtctctccgcagagccttcttggtgttgccctaacttgccagtggcctttgctcagagcctcctcctgtgacatgtgaaacaatgaagaggcctgcgcctcctgccttgccgcctgcaaagcaaagaaactgccttttattttttaaccttaaaaagtaaccagatagtaccaagactggctggctgatgagcaaagcctttgctctcacgcagaggagggcttggatgtacaatgaaaactg

SEQ ID NO: 227074 - DNA, 896 bp, Homo Sapiens; identical to SEQ ID NO: 193465
  misc_feature (709)..(719): n is a, c, g, or t
  misc_feature (722)..(722): n is a, c, g, or t

SEQ ID NO: 227075 - DNA, 901 bp, Homo Sapiens; identical to SEQ ID NO: 193466
  misc_feature (626)..(642): n is a, c, g, or t

SEQ ID NO: 227076 - DNA, 1271 bp, Homo Sapiens
ttggcctcttccaaccaccctctttccctggagtcggcggaccacagctcagccaattggcttggagatgtggcgggttgccacttccctgtgggtctctgcggcactcttctgcctggtgactgacaccttggaaatgaagtttatgacgtcatcgttgcggctggccaatagaaaaagctcccgcggagaggtgttccttccccttcgactcagcttcttcacccgcgtgagcgagcgcgcgcgcgcggagggggtggggaaaatctcaagcagggtggcgcgcatgagcggcgaagctcctcctccccgcctatatataaagggctggcgcggggctcggcggcgccatttcgtgctggagtggagcagcctctagaacgagctggaggattctgcctaccgatacagagccttcgagtcgtccggggccgccattacaatccacctccatccgcttggaaatggccttcgtcccggcctatgactggtcccagcgggcagtacagaccccctagaagcccctggagctcccctttttcgggccccgcccaatcctcggagtctgtccaccccctctactccgccctcaagaggatttcaaagatggaggcggcggctccctaaaccacttttcgtgttcatccgcctccatccgagatcgaaacgggacctcgtcggccccgtaggggcccgacaagaagagggaatccctgcagaccaacagcgggctatattgacgacggtgtctgagatcggggaccgtcttttgaagagtcagtccctccttagttgcccgcctcagctgaggccgccgccattttcttgctgtccgccgtctgcagagcgcgccaagctgcccggagctctccgagaggccccaaagagactgctttcgtgccggccaggcagggggtttgtcgcctggaggcccaagaggaacggcctccccccaacttagcgggttatgctggaccgggcggtgaggggaaccgaggccacccggactttccgcggctgagggcagcgccggttccttgcggtcaagatgctgcaaaacgtgactccccacaataagctccctggggaagggaatgcagggttgctggggctgggcccagaagcagcagcaccagggaaaaggattcgaaaaccctctctcttgtatgagggctttgagagccccacaatggcttcggtgcctgctttgcaacttacccctgccaacccaccacccccggaggtgtccaatcccaaaaagccagggacga

SEQ ID NO: 227077 - DNA, 913 bp, Homo Sapiens
ttggtaacgctagaaacagtggtgcgcggagaggagaggcctcgggatgtctctggcagatgagctcttagctgatctcgaagaggcagcagaagaggaggaaggaggaagctatggggaggaagaagaggagccagcgatcgaggatgtgcaggaggagacacagctggatctttccggggattcagtcaagaccatcgccaagctatgggatagtaagatgtttgctgagattatgatgaagattgaggagtatatcagcaagcaagccaaagcttcagaagtgatgggaccagtggaggccgcgcctgaataccgcgtcatcgtggatgccaacaacctgaccgtggagatcgaaaacgagctgaacatcatccataagttcatccgggataagtactcaaagagattccctgaactggagtccttggtccccaatgcactggattacatccgcacggtcaaggagctgggcaacagcctggacaagtgcaagaacaatgagaacctgcagcagatcctcaccaatgccaccatcatggtcgtcagcgtcaccgcctccaccacccaggggcagcagctgtcggaggaggagctggagcggctggaggaggcctgcgacatggcgctggagctgaacgcctccaagcaccgcatctacgagtatgtggagtcccggatgtccttcatcgcacccaacctgtccatcattatcggggcatccacggccgccaagatcatgggtgtggccggcggcctgaccaacctctccaagatgcccgcctgcaacatcatgctgctcggggcccagcgcaagacgctgtcgggcttctcgtctacctcagtgctgccccacaccggctacatctaccacagtgacatcgtgcagtccctgccacctggatctgcggcg

SEQ ID NO: 227078 - DNA, 1345 bp, Homo Sapiens; identical to SEQ ID NO: 193469

SEQ ID NO: 227079 - DNA, 1032 bp, Homo Sapiens
ttggagcaggccggcttctctgtccaatgcccacccggagctgggaggaggagtctgcgtaatgtgcgtgtgaagagactgggggagctggccggggctcacggtgtttgacccgtcggtcgtgcgtgagaggaaagggaaggaggaggtcccgaatagcggtcgccgaaatgttccggtgtggaggcctggcggcgggtgctttgaagcagaagctggtgcccttggtgcggaccgtgtgcgtccgaagcccgaggcagaggaaccggctcccaggcaacttgttccagcgatggcatgttcctctagaactccagatgacaagacaaatggctagctctggtgcatcagggggcaaaatcgataattctgtgttagtccttattgtgggcttatcaacagtaggagctggtgcctatgcctacaagactatgaaagaggatgaaaaaagatacaatgaaagaatttcagggttagggctgacaccagaacagaaacagaaaaaggccgcgttatctgcttcagaaggagaggaagttcctcaagacaaggcgccaagtcatgttcctttcctgctaattggtggaggcacagctgcttttgctgcagccagatccatccgggctcgggatcctggggccagggtactgattgtatctgaagatcctgagctgccgtacatgcgacctcctctttcaaaagaactgtggttttcagatgacccaaatgtcacaaagacactgcgattcaaacagtggaatggaaaagagagaagcatatatttccagccaccttctttctatgtctctgctcaagacctgcctcatattgagaatggtggtgtggctgtcctcactgggaagaaggtagtacagctggatgtgagagacaacatagtgaaactttaatgatggctctccaataacctatgaaagtgcttgattgcaacagggaggtacttccagaagtctggtctgccattgatagggctggagcagaggtgaagagtagaacaacgctttcagaagattg

SEQ ID NO: 227080 - DNA, 1013 bp, Homo Sapiens; identical to SEQ ID NO: 193477

SEQ ID NO: 227081 - DNA, 959 bp, Homo Sapiens
ctttgtacaaaaaagtggagttttcggtggctcagctgggtaaccggggatcaccatggcggcctcattggtggggaagaagatcgtgtttgtaacggggaacgccaagaagctggaggaggtcgttcagattctaggagataagtttccatgcactttggtggcacagaaaattgacctgccggagtaccaaggggagccggatgagatttccatacagaaatgtcaggaggcagttcgccaggtacaggggcccgtgctggttgaggacacttgtctgtgcttcaatgcccttggagggctccccggcccctacataaagtggtttctggagaagttaaagcctgaaggtctccaccagctcctggccgggttcgaggacaagtcagcctatgcgctctgcacgtttgcactcagcaccggggacccaagccagcccgtgcgcctgttcaggggccggacctcgggccggatcgtggcacccagaggctgccaggactttggctgggacccctgctttcagcctgatggatatgagcagacgtacgcagagatgcctaaggcggagaagaacgctgtctcccatcgcttccgggccctgctggagctgcaggaatactttggcagtttggcagcttgacttctgcagctggaggaggcccctcaggccggggatctggggagggctagcccaaaacctcccgcatcgggcaggcaccccctgaagtacttccttcagggtttcccctttgtgagggtgtcgagtagcctcaccggcctgtctggaggagcagctggctctgctctgagaaactctggcaagtggacgccattctcttgcccttaggattcactgctctctcctacagccgccaggcctggggtcctgaaaggaccttgggtggtaaagctgtacttggtgggagtgagggcgtggggaggaaccatgcaatcgcctt

SEQ ID NO: 227082 - DNA, 771 bp, Homo Sapiens
tttgtacaaaaaagttggcaccagtggagcacatgcagcctcagtggagatgcttggtgtggggatctgggtgaagggggttgagtagcgactgcctgggagatggctgttagtaggtctgcgcctggtgtctgcctcgccatcctggggtaaggggcagagagaaggacttgtcttatgtagggtgtggtcagccttggggccttacctacccagttccatgatatttcttgccctgttccccctggaatgtgcagtgggccagctgagagtacgccttgaggaggggggatgaggccttaatctgggaggcctatccccctatcccaggcatcccagacgaggactggctgaggctaggcgctctcatgatccacctgccccgggagggcagcggggaagacagagaaaagcaaacacattcctcctcagctccacccacctggagacgaatgtagccagagaggaggaaggagggaaactgaaaacaccgtggcccctcggccttctctctgctagagttgccgctcagaggcttcagcctgacttccagcggtcccaagaacacctactaattcctctccactccttcatggctgggacagttactggttcatatgcaagtaaagatgacaatttactcaacaaatatttatcgagcaccttttatgtaccaggcactgttgtaggtgcttaggatatttctcatgtttctgagggattacagcctgcggaggattccaccgatcttcacttccagctaggtttttt

SEQ ID NO: 227083 - DNA, 719 bp, Homo Sapiens
cccactttgtacaaaaaagttggctgcgagaatgaagactattctcagcaatcagactgtcgacattccagaaaatgtcgacattactctgaagggacgcacagttatcgtgaagggccccagaggaaccctgcggagggacttcaatcacatcaatgtagaactcagccttcttggaaagaaaaaaaagaggctccgggttgacaaatggtggggtaacagaaaggaactggctaccgttcggactatttgtagtcatgtacagaacatgatcaagggtgttacactgggcttccgttacaagatgaggtctgtgtatgctcacttccccatcaacgttgttatccaggagaatgggtctcttgttgaaatccgaaatttcttgggtgaaaaatacatccgcagggttcggatgagaccaggtgttgcttgttcagtatctcaagcccagaaagatgaattaatccttgaaggaaatgacattgagcttgtttcaaattcagcggctttgattcagcaagccacaacagttaaaaacaaggatatcaggaaatttttggatggtatctatgtctctgaaaaaggaactgttcagcaggctgatgaataagatctaagagttacctggctacagaaagaagatgccagatgacacttaagacctacttgtgatatttaaatgatgcaataaaagacctattgatttggaccttcttctt

SEQ ID NO: 227084 - DNA, 804 bp, Homo Sapiens
ctttgtacaaaaaagttggattcttcatacttactcttctctcaatcatgtctacaaatgccagaacaaagaacagttcgtggaagttatggctagtgctctgactggttatcttcacactatttcttctgaaaacttattggatgcagtatattcattttgcttgatgaattactttcccctggctccttttaatcagcttctgcaaaaagacatcatcagtgagctgctgacatcagatgacatgaagaatgcttacaagctgcatactttggatacttgtctaaaacttgatgatactgtctatctgagggacatagccttgtcactcccacagctgccgcgggagctgccatcgtcacatacaaatgcaaaggtggcagaggtgctgagcagccttctgggaggtgaaggacacttctcaaaggatgtgcacttgccacacaattatcatattgattttgaaatcagaatggacactaacaggaatcaagtgctaccactttctgatgtggatacaacttctgctacagatattcaaagagtagctgtgctatgtgtttccagatctgcttattgtttgggttcaagccaccccagaggattccttgctatgaaaatgcggcatttgaatgcaatgggttttcatgtgatcttggtcaataactgggagatggacaaactagagatggaagatgcagtcacatttttgaagactaaaatctattcagtagaagctcttcctgttgctgctgtaaatgtgcaaagcacacaataaagtgaaaatcaacctttttaaaaaaa

SEQ ID NO: 227085 - DNA, 1021 bp, Homo Sapiens; identical to SEQ ID NO: 193488

SEQ ID NO: 227086 - DNA, 854 bp, Homo Sapiens
ttggggatctacagcagccaaaggcttgtccctgactttatatggctgcgcctggcgagcgactgagtcgtccgtgaggaaaaagaggcgaggcttttccgagatcgtctcagcgatggcgcttcggtcgcagttttgggggttctcggtttgcaggaaccctgggtgcaggttcgcagccctgtcaaccagctccgagccggcagcgaaacctgaagtggaccctgtggaaaatgaagctgtcgccccagaattcaccaaccggaacccccggaacctggagcttttatctgtagccaggaaagagcggggctggcggacggtgtttccctcccgtgagttctggcacaggttgcgagttataaggactcagcatcatgtagaagcacttgtggagcatcagaatggcaaggttgtggtttcggcctccactcgtgagtgggctattaaaaagcacctttatagtaccagaaatgtggtggcttgtgagagtataggacgagtgctggcacagagatgcttagaggcgggaatcaacttcatggtctaccaaccaaccccgtgggaggcagcctcagactcgatgaaacgactacaaagtgccatgacagaaggtggtgtggttctacgggaacctcagagaatctatgaataaatggaagcattaattgttttgaacatgtaaatataaatctgtcagccactacagccatcaaaagagagcatctggaagaacagccagcttggaagttttacagcaataatgttgcagtggaatattatttgtagttaaggtcatcctcctcccctttctgtttttttaaatcagaactacattctgcccctctcttggg

SEQ ID NO: 227087 - DNA, 847 bp, Homo Sapiens; identical to SEQ ID NO: 193489

SEQ ID NO: 227088 - DNA, 773 bp, Homo Sapiens
ttgggtcgtgctgccctgcaaacgcgccaatcttcgctctgaggtgctgtctcaccggtgagacctggaagcgggcgagtctcgtgctgtgtcggacctgcagcccctggccttccgccaccatggagtacctcatcggtatccaaggccccgactatgttcttgtcgcctccgaccgggtggccgccagcaatattgtccagatgaaggacgatcatgacaagatgtttaagatgagtgaaaagatattactcctgtgtgttggagaggctggagacactgtacagtttgcagaatatattcagaaaaacgtgcaactttataagatgcgaaatggatatgaattgtctcccacggcagcagctaacttcacacgccgaaacctggctgactgtcttcggagtcggaccccatatcatgtgaacctcctcctggctggctatgatgagcatgaagggccagcgctgtattacatggactacctggcagccttggccaaggccccttttgcagcccacggctatggtgccttcctgactctcagtatcctcgaccgatactacacaccgactatctcacgtgagagggcagtggaactccttaggaaatgtctggaggagctccagaaacgcttcatcctgaatctgccaaccttcagtgttcgaatcattgacaaaaatggcatccatgacctggataacatttccttccccaaacagggctcctaacatcatgtcctccctcccacttgccagggaacttttttttgatgg

SEQ ID NO: 227089 - DNA, 740 bp, Homo Sapiens
  misc_feature (56)..(64): n is a, c, g, or t
  misc_feature (146)..(154): n is a, c, g, or t
ttggctcccttcccctcttctttctttgttctctttcattaaaccccttccccagnnnnnnnnnatactttaaaccccgctcctcatggccttggccctttctgaagctgcttcctcttataaaatagcttttgccgaaacatagnnnnnnnnnagcagatcccaaaatataatgaaggggatggtgggatatttgtgtctgtgttcttataatatattattattcttccttggttctagaaaaatagataaatatatttttttcaggaaatagtgtggtgtttccagtttgatgttgctgggtggttgagtgagtgaattttcatgtggctgggtgggtttttgcctttttctcttgccctgttcctggtgccttctgatggggctggaatagttgaggtggatggttctaccctttctgccttctgtttgggacccagctggtgttctttggtttgctttcttcaggctctagggctgtgctatccaatacagtaaccacatgcggctgtttaaagttaagccaattaaaatcacataagattaaaaattccttcctcagttgcactaaccacgtttctagaggcgtcactgtatgtagttcatggctactgtactgacagcgagagcatgtccatctgttggacagcactattctagagaactaaactggcttaacgagtcacagcctcagctgtgctgggacgacccttgtctccctgggtaggaggggggggaat

SEQ ID NO: 227090 - DNA, 978 bp, Homo Sapiens
ttggtgaagatggcggcttctcaggcggtggaggaaatgcggagccgcgtggttctgggggagtttggggttcgcaatgtccatactactgactttcccggtaactattccggttatgatgatgcctgggaccaggaccgcttcgagaagaatttccgtgtggatgtagtacacatggatgaaaactcactggagtttgacatggtgggaattgacgcagccattgccaatgcttttcgacgaattctgctagctgaggtgccaactatggctgtggagaaggtcctggtgtacaataatacatccattgttcaggatgagattcttgctcaccgtctggggctcattcccattcatgctgatccccgtctttttgagtatcggaaccaaggagatgaagaaggcacagagatagatactctacagtttcgtctccaggtcagatgcactcggaacccccatgctgctaaagattcctctgaccccaacgaactgtacgtgaaccacaaagtgtataccaggcatatgacatggatccccctggggaaccaggctgatctctttccagagggcactatccgaccagtgcatgatgatatcctcatcgctcagctgcggcctggccaagaaattgacctgctcatgcactgtgtcaagggcattggcaaagatcatgccaagttttcaccagtggcaacagccagttacaggctcctgccagacatcaccctgcttgagcccgtggaaggggaggcagctgaggagttgagcaggtgcttctcacctggtgttattgaggtgcagaagtccaaggtaaaaaggtggccagagttgccacccccggctggataccttcagcagaagaaatcttccggaatgagaagctaaagaaacgttgtgaggcttgcccgggttcgaagatcattatatcttcttctgttgagtcaacgggggtgttggccacctagatgtgctggg

SEQ ID NO: 227091 - DNA, 993 bp, Homo Sapiens
tactcagctttaatctcagagtttcatctggtcctttatgcgcagatgttactcgaagttcacatggaatgccaaaatttccacaggccttcttgattttttcacagtgaccaagatcagaagtagagcccatcaacactacaaccctgcactgactttctgatttcaaaagcaactctactctctctgcaacccactcaaagtttttctttaccatttggagcccttcaggagttacttctttgaggtcccgataagactgtttgtctttctgttggcttcgatctcctgatggccagagtctccaggaatcattgtcaataacatcagcaagaacaatttctttggtggttacatcaacaccaaattcaatcttcatatcaaccagtgtacaattctggggcaaccaggatttctccagtatttcaaatatagcctgtgtagcatgactcatgatatccacttcagtctggcctataagaagtccagcaaagcaaaattttgcagcaatcagctgttcctcagaccactgtgggtcattattggcatcatccttgaaaaacaactccactttaggtgggtaaaacttatatccttccttgacaccaggatttcttttgagaaaagaaccagttgctattcttctgcaaacccattcaattggaatcatttcacactgcggtgcaatgaaagctgtctccccacattttctggtgaaggcagttttaatacctgcttcctgtaataactgaaaaatacaactggtgattttatttgagattgcagcttttccttccaggtggttttttctagctgcatttcctgctgtaatctggtccttggactgcaggaggacttttcctggactgtctaacaattcgtagacttcttttgttttaccctcatataattttttaccaatgttcagtacctcagctgtcccattatcctaagtgggctgagggctgcgaccgcgccgggaagcgaggccaa

SEQ ID NO: 227092 - DNA, 1328 bp, Homo Sapiens
ttggaaatagttctgcaggttgaagccatgtctacatgaaagtcctcagtaagtgttagagggaacagggcggagatatccttatgccacccccgctggaggatgtgggcagcttagggccctggaggcggtgcggcagggaagaggggtgcagaggctgtggctggtgagccggtcaggcacacaaggggcccttggagcgtggactggttggttttgccattttgttgtgtgtatgctgcttttcttttctaaccaagaggctggttttggcatctctgtcccattccctgggatctggtggtcagccctaggataaaaagccagggctggagaacaagaaagggccaggagatggaattccttcaggccggcacccacaccctaggacatgtaagccctcatgtccaagggagcctcatgcagatagtaggaaatcaggtctggaaatttaaaaataaaaggcatgagactaaggctatctgcttcccttatgccctgactggagaggggagggaggagaggcaaggcccacagagggcatcccagctaggccttgggatggctgcagtgaggagaaatcccgggaactgtattgacacaaagattcttattgcacttgtattttttgtattaaagtttgcatggtttctaataaaggattcaaacataagtttgtagtgaaatggcctgggagattccaagggcttctctggagggggattggctgcagtgtagatttgcctctgaggaggctgccccagacttggcctcctcatgccccctcctgacctctgcccttctctggtcctggcatccctggagaaggtaggggtcttgacctaagtttagatttgatctccatgtgcagggaggctgtcctgggcctgacaggtcctccccctttctgaggtagcagtgccttgtggaggtttgacaccatgtccctagctccccaagcacacaccaggaaactgcaggggctcacggaggaagtgctgcctgggccagggggaccagctttcctccgtagagaccatgtgcagaacacttctgctgtgccaagaacatgagggagccagtgttttgtcagcaggaagaaagggcctgctgggatgaaagtgggaaggaaacagggttgggtagtcaggagacacctcaggggcaacagcacaggcccagagtacctgctgcctccactgcgtctgtcctggggtcatgaggatgctgaggttgacgacaggttccaggtcctttcactcctttggccaaaggttgggggtaggtggcccatgtggcgtgctttctaggtatacaacaggagtggt

SEQ ID NO: 227093 - DNA, 1587 bp, Homo Sapiens
ttgggaaagatggcggcagccgtgcgacaggatttggcccagctcatgaattcgagcggctctcataaagatctggctggcaagtatcgtcagatcctggaaaaagccattcagttatctggagcagaacaactagaagctttgaaagcttttgtggaagcaatggtaaatgagaatgtcagtctcgtgatctcgcggcagttgctgactgatttttgcacacatcttcctaacttgcctgatagcacagccaaagaaatctatcacttcaccttggaaaagatccagcctagagtcatttcatttgaggagcaggttgcttccataagacagcatcttgcatctatatatgagaaagaagaagattggagaaatgcagcccaagtgttggtgggaattcctttggaaacaggacaaaaacagtacaatgtagattataaactggagacttacttgaagattgctaggctatatctggaggatgatgatccagtccaggcagaggcttacataaatcgagcatcgttgcttcagaatgaatcaaccaatgaacaattacagatacattataaggtatgctatgcacgtgttcttgattatagaagaaaattcattgaagctgcacaaaggtacaatgagctctcttacaagacaatagtccacgaaagtgaaagactagaggccttaaaacatgctttgcactgtacgatcttagcatcagcagggcagcagcgttctcggatgctagctactctttttaaggatgaaaggtgccagcaacttgctgcctatgggatcctagagaaaatgtatctagataggatcatcagaggaaatcaacttcaagaatttgctgccatgctgatgcctcaccaaaaagcaactacagctgatggttccagcatcttggacagagctgttattgaacacaatttgttgtctgcaagcaaattatataataatattaccttcgaagaacttggagctcttttagagatccctgcagctaaggcggaaaagatagcatctcaaatgataaccgaaggacgtatgaatggatttattgaccagattgatggaatagttcattttgaaacacgagaagccctgccaacgtgggataagcagatccaatcactttgtttccaagtgaataaccttttggagaaaattagtcaaacagcaccagaatggacagcacaagccatggaagcccagatggctcagtgaatccttgcagaacttctgtgcacatgacatctttttccatgttgtgcagatcagtttcactatctccaaagcatttgcatcatgaccttatacatttcaatcccttttatgctggattccgtttaaagaagacattattagagcaggaagtacaagcatttaaaatatgtagttcccatatatttcagggtctctgtgtattaagctaactcagatgttttgaaagctttttctttaaacagaggtgaaatatctgtggctaaaaagtttgagatttgtgataactttgtagtcatgtaaaaacttaagtgcttcatgcctctccaaatgtggttattctaataaatggagaaatga

SEQ ID NO: 227094 - DNA, 937 bp, Homo Sapiens; identical to SEQ ID NO: 193495

SEQ ID NO: 227095 - DNA, 946 bp, Homo Sapiens; identical to SEQ ID NO: 193501

SEQ ID NO: 227096 - DNA, 559 bp, Homo Sapiens; identical to SEQ ID NO: 193504
  misc_feature (258)..(272): n is a, c, g, or t

SEQ ID NO: 227097 - DNA, 993 bp, Homo Sapiens
tttcattttcagtccatactgtttagaggggtctcgtttgtaaatagtggttctctgtccagcatcctgggccttgccctctctgagctgacgagaacatccacagcatatactttcatgtacctcaaattcagctttttcatggtccttctttctgctggtctgtgggattctggataatggttttttctccatcgatgacatgctgcttcaactggtgtgacagcataccttctattggcgtgcagttaaatgagtgggcaactttgttccaggcttctgtcacttgtgtgttctgatttccaggtttgaccaggcgtagggcagcttcagcacaaaggtgagctgccttaataacatctgctttcctccctgttacttgggtcccctgagctacatcaaccacaaaagtgtgagctacattagcgatgaagccatccacatggaccccaaggtcaatttttaccaagtcaccttccttgagaatataatcctggtcgctcttcaaaggggagaagtgacatacacagttatttaccgaaatgctggtgggaaaagcaatacctttcttcatttccttttctttcttgaagattttccctgtttcttccataatcatggcatcacctttctcacacaggctcagtaccgacacacctgagctagatgcttccaccaaggaccgaagtaccctgttggcgatgtcgccccccatcttatacttggtcacgaccaggtcctcagcgatagtttgctcctgttgctcgtcctcgcccgacatcttcctactaccaccactgcagcctcgtttcccctgagccgccgccgcctctgtctcccttcccagccacaggctgtggtcagagtcccctcgatcctcgaggagagggcgagcgaaagcgcgagcaagcaagggagcgggcaggcaggcgagagccaacttttttgtacaaagttggccattataagtaagcattgctcatcaatttgttg

SEQ ID NO: 227098 - DNA, 1240 bp, Homo Sapiens; identical to SEQ ID NO: 193506

SEQ ID NO: 227099 - DNA, 809 bp, Homo Sapiens
ttggggagcgaggtggttgttcctggggtccgaggcgcgcctctcacgccctgcccaacagaagccgcagtcccgtggggtctggagacgcagtttcctgttaatgacaataaatccctgctccccctgcctcagacatctacgcagcgaaatcgagcctggccttgagggtccacaccgcgagggaagatgcgtgcgcccattccagagcctaagcctggagacctgattgagatttttcgccctttctacagacactgggccatctatgttggcgatggatatgtggttcatctggcccctccaagtgaggtcgcaggagctggtgcagccagtgtcatgtccgccctgactgacaaggccatcgtgaagaaggaattgctgtatgatgtggccgggagtgacaagtaccaggtcaacaacaaacatgatgacaagtactcgccgctgccctgcagcaaaatcatccagcgggcggaggagctggtggggcaggaggtgctctacaagctgaccagtgagaactgcgagcactttgtgaatgagctgcgctatggagtcgcccgcagtgaccaggtcagagatgtcatcatcgctgcaagcgttgcaggaatgggcttggcagccatgagccttattggagtcatgttctcaagaaacaagcgacaaaagcaataactgaaaaagactgtcctgtcagcgatgactttatacatcaagggggtcttgttttgctagagagtttggggtttggtttgtggatttcattgtgatttataataaggcttattttcacagaataaaataaa

SEQ ID NO: 227100 - DNA, 812 bp, Homo Sapiens; identical to SEQ ID NO: 193507
  misc_feature (118)..(129): n is a, c, g, or t

SEQ ID NO: 227101 - DNA, 925 bp, Homo Sapiens; identical to SEQ ID NO: 193508

SEQ ID NO: 227102 - DNA, 987 bp, Homo Sapiens
ttggcggaggacttccgatatcctttctaaatatctgcctgtgaagattgagcaggtcgtttgttgtaggctgacaccccttcagactgagttatacaagaggtttctgagacaagccaaaccggcagaagaattgcttgagggcaagatgagtgtgtcttccctttcttccatcacctcgctaaagaagctttgtaatcatccagctctaatctatgataagtgtgtggaagaggaggatggctttgtgggtgccttggacctcttccctcctggttacagctctaaggccctggagccccagctgtcaggtattatgctggtcctggattatattctggcggtgacccgaagccgtagcagtgacaaagtagtgctggtgtcgaattacacccagactttggatctctttgagaagctgtgccgtgcccgaaggtacttatacgtccgcctggatggcacgatgtccattaagaagcgagccaaggttgtagaacgcttcaatagtccatcgagccctgactttgtcttcatgctgagcagcaaagctgggggctgtggcctcaatctcattggggctaaccggctggtcatgtttgaccctgactggaacccagccaatgatgaacaagccatggcccgggtctggcgagatggtcaaaagaagacttgctatatctaccgcctgctgtctgcagggaccattgaggagaagatcttccagcgtcagagccacaagaaggcactgagcagctgtgtggtggatgaggagcaggatgtagagcgccacttctctctgggcgagttgaaggagctgtttatcctggatgaagctagcctcagtgacacacatgacaggttgcactgccgacgttttgttatcagccgtcagatccggccaccccctgatggttctgactgcacttcagacctggcagggtggaaccactgcactgataagtgggggctccgggatgaggtactcca

SEQ ID NO: 227103 - DNA, 976 bp, Homo Sapiens; identical to SEQ ID NO: 193512
  misc_feature (803)..(814): n is a, c, g, or t

SEQ ID NO: 227104 - DNA, 1547 bp, Homo Sapiens; identical to SEQ ID NO: 193513

SEQ ID NO: 227105 - DNA, 1558 bp, Homo Sapiens; identical to SEQ ID NO: 193514
  misc_feature (1499)..(1512): n is a, c, g, or t

SEQ ID NO: 227106 - DNA, 995 bp, Homo Sapiens
ccctataaaagccaactttgtacaaaaaagttggccttgctttcctttaatccggcagtgaccgtgtgtcagaacaatcttgaatcatgaagctactaaccagagccggctctttctcgagattttattccctcaaagttgcccccaaagttaaagccacagctgcgcctgcaggagcaccgccacaacctcaggaccttgagtttaccaagttaccaaatggcttggtgattgcttctttggaaaactattctcctgtatcaagaattggtttgttcattaaagcaggcagtagatatgaggacttcagcaatttaggaaccacccatttgctgcgtcttacatccagtctgacgacaaaaggagcttcatctttcaagataacccgtggaattgaagcagttggtggcaaattaagtgtgaccgcaacaagggaaaacatggcttatactgtggaatgcctgcggggtgatgttgatattctaatggagttcctgctcaatgtcaccacagcaccagaatttcgtcgttgggaagtagctgaccttcagcctcagctaaagattgacaaagctgtggcctttcagaatccgcagactcatgtcattgaaaatttgcatgcagcagcttaccggaatgccttggctaatcccttgtattgtcctgactataggattggaaaagtgacatcagaggagttacattacttcgttcagaaccatttcacaagtgcaagaatggctttgattggacttggtgtgagtcatcctgttctaaagcaagttgctgaacagtttctcaacatgaggggtgggcttggtttatctggtgcaaaggccaactaccgtggaggtgaaatccgagaacagaatggagacagtcttgtccatgctgcttttgtagcagaaagtgctgtcgcgggaagtgcagaggcaaatgcatttagtgttcttcagcatgtcctcgtgctgggccacatgtcaagaggggcagca

SEQ ID NO: 227107 - DNA, 1337 bp, Homo Sapiens; identical to SEQ ID NO: 193517

SEQ ID NO: 227108 - DNA, 973 bp, Homo Sapiens; identical to SEQ ID NO: 193518

SEQ ID NO: 227109 - DNA, 905 bp, Homo Sapiens
ttggctccggttcggggagtgaagaagggattccgcgccgccttccgcttccagaaggagttagagcggcagcgccttctgcggtgcccgccgccgcccgtgcgccgttcagagaagccgaactgggattaccatgcagaaatacaagcttttggacatcggttacaggaaaacttttccttagatcttctcaaaactgcatttgttaatagctgctatattaaaagtgaggaggccaaacgccaacaacttgggatagagaaagaagctgttcttctgaatcttaaaagtaatcaagaactatccgaacaagggacatctttttcacagacttgccttacacagtttcttgaagacgagtacccagacatgcccactgaaggcataaaaaatcttgttgactttctcactggtgaggaagtcgtgtcacgtggctagaaacttggctgtggagcagttaacactgagtgaagaattcccagtgcccccagctgtgttacagcagactttctttgcagttattggagccctgttacagagcagtggacctgagaggactgcacttttcatcagggacttcttaattactcaaatgactggaaaagagctctttgagatgtggaagataataaatcccatggggctattggtagaagaactgaagaaaaggaatgtttcagctcctgaatcaagacttactaggcagtctggtggcaccacagctttgcctttgtattttgttggcttatactgtgataaaaagttgattgcagaaagacctggggaaacagtattggttgcagaagaagaggctgctcgagtggcccttagaaaactttatggattcacaaaaatagacggccgtggactattccaagcccaaagaaaccttgagagcagaaaga

SEQ ID NO: 227110 - DNA, 603 bp, Homo Sapiens; identical to SEQ ID NO: 193525
  misc_feature (73)..(83): n is a, c, g, or t
  misc_feature (172)..(181): n is a, c, g, or t

SEQ ID NO: 227111 - DNA, 1538 bp, Homo Sapiens
  misc_feature (47)..(61): n is a, c, g, or t
  misc_feature (1039)..(1085): n is a, c, g, or t
ttggttctctctctagctttttaattcatgaatattttcgtgtctgnnnnnnnnnnnnnnngtgtttcctccagcccttgtctcggagacggtgttttcctcccttgccccattatcttttcacctcccaggtctaccatttcatggtggtcgttgggtccgcctaaaggatttgagcgtttgccattgcaagcatagtgctgtgtcatcctggtccatgtaggactggtgctaaccacctgccatcatgaggatgtgtgctagagtgtgggaccctggccaagtgcaggaatgggccatgccgtctcacccacagtatcacacgtggaaccgcagacagggcccagaagctttagaggtatgaggctgcagaaccggagagattttcctctgtgcagtgctctctggctaaagtcacggtcaaacctaaacaccgagcctcattaacccaagtgaaccaaccaaagtcaccagttcagaagtgctaagctaataggagtctgacccgagggcctgctgcttcctggttaagtatcttttgagattctagaacacatgggagctttttattttcggggaaaaaccgtatttttttcttgtccaattatttctaaagacacactacatagaaagaggccctataaactcaaaaagtcattgggaaacttaaagtctattctactttgcaagaggagaaatgtgttttatgaacgatagatcacatcagaactcctgtggggaggaaaccttataaattaaacacatggcccccttagagaccacaggcgatgtctgtctccatccttccctctccttttctgtcacctttccccctagctggctcctttggacctacccctgtccttgctgacttgtgttgcattgtattccaaacgtgtttacaggttctcttaagcaatgttgtatttgcaggcttttctgaataccaaatctgctttttgtaaagcgtaaaaacatcacaaagtaggtcattccatcaccacccttgtctctctacacattttgcctttggggatcnnnnnnnnnnnnnnnnnnnnnnnnnnnnnnnnnnnnnnnnnnnnnnnaaaggtaaattgcacttttaaaaaaataattggttgacttaatatatttgctttttttctcacctgcacttagaggaaatttgaacaagttggaaaaaaacaatttttgtttcaattctaagaaacacttgcagctctagtattcacttgagtcttcctgtttttcctgtaccgggtcatggtaatttttggttgttttggttgttttcttaaaaaacaagttaaaacctgacaatttctgcaggctgtgtaagcatgtttacctgttggcttgctttgtgtgtctgttaaatgaatgtcatatgtaaatgctaaaataaatcgacagtgtctcaaaactgaataactgcagtgacttgatgctctaaaacagtgtaggatttaagaatagatggtatttaatcctgaaaattgtgattgtgacccatgagtggaggaactttcaattcctaa

SEQ ID NO: 227112 - DNA, 1327 bp, Homo Sapiens; identical to SEQ ID NO: 193527

SEQ ID NO: 227113 - DNA, 1237 bp, Homo Sapiens; identical to SEQ ID NO: 193530
  misc_feature (295)..(354): n is a, c, g, or t
  misc_feature (456)..(499): n is a, c, g, or t

SEQ ID NO: 227114 - DNA, 579 bp, Homo Sapiens
ttggccccacgcaacccagcgaaactccgcggagcgcgcgcggcacgatggacggtcgggtgcagctgatgaaggccctcctggccgggcccctccggcccgcggcgcgtcgctggaggaacccgattccctttcccgagacgtttgacggagataccgaccgactcccggagttcatcgtgcagacgtgctcctacatgttcgtggacgagaacacgttctccaacgacgccctgaaggtgacgttcctcatcacccgcctcacggggccagccctgcagtgggtgatcccctacatcaggaaggagagccccctgctcaatgattaccggggcttcctggccgagatgaagcgggtctttggatgggaggaggacgaggacttctaggccgggagacccttgggcctgggggcgggtgctctgggaagagttcgctgtgccagtggccaccgctagggtctccacaggcgccctccctccgcgcctccctccccctcgagccgccgcgatgtcccctgccactcctgtcccctccccgcgtaaggctttgcctttgttccaggaatagcgctccagg

SEQ ID NO: 227115 - DNA, 892 bp, Homo Sapiens; identical to SEQ ID NO: 193534

SEQ ID NO: 227116 - DNA, 1323 bp, Homo Sapiens; identical to SEQ ID NO: 193536
  misc_feature (127)..(137): n is a, c, g, or t
  misc_feature (423)..(432): n is a, c, g, or t
  misc_feature (898)..(921): n is a, c, g, or t

SEQ ID NO: 227117 - DNA, 1203 bp, Homo Sapiens; identical to SEQ ID NO: 193538
  misc_feature (363)..(372): n is a, c, g, or t
  misc_feature (658)..(668): n is a, c, g, or t
  misc_feature (927)..(984): n is a, c, g, or t

SEQ ID NO: 227118 - DNA, 895 bp, Homo Sapiens; identical to SEQ ID NO: 193539
  misc_feature (229)..(252): n is a, c, g, or t

SEQ ID NO: 227119 - DNA, 879 bp, Homo Sapiens
ttgggtgcggttgggaacgcggagcggacggattcgattcaacggggttccggaccgcgctgcgctatggagcaggtcaatgagctgaaggagaaaggcaacaaggccctgagcgtgggtaacatcgatgatgccttacagtgctactccgaagctattaagctggatccccacaaccacgtgctgtacagcaaccgttctgctgcctatgccaagaaaggagactaccagaaggcttatgaggatggctgcaagactgtcgacctaaagcctgactggggcaagggctattcacgaaaagcagcagctctagagttcttaaaccgctttgaagaagccaagcgaacctatgaggagggcttaaaacacgaggcaaataaccctcaactgaaagagggtttacagaatatggaggccaggttggcagagagaaaattcatgaaccctttcaacatgcctaatctgtatcagaagttggagagtgatcccaggacaaggacactactcagtgatcctacctaccgggagctgatagagcagctacgaaacaagccttctgacctgggcacgaaactacaagatccccggatcatgaccactctcagcgtcctccttggggtcgatctgggcagtatggatgaggaggaagagattgcaacacctccaccaccaccccctcccaaaaaggagaccaagccagagccaatggaagaagatcttccagagaataagaagcaggcactgaaagaaaaagagctggggaacgatgcctacaagaagaaagactttgacacagccttgaagcattacgacaaagccaggagctggaccccactaacatgacttacattaccaatcaagcagcggtatactttgaaa

SEQ ID NO: 227120 - DNA, 920 bp, Homo Sapiens
ttggcagagagattcgacagtcagccttgtgtcctgggatgggagagcttcgcctcagggaaacattactgggaggtggaggtggaaaacgtgatggtgtggactgtgggggtctgcagacacagtgttgagaggaaaggggaggtcctgctgattcctcagaatggcttctggaccctggagatgtttggaaaccaataccgggccctgtcctcccctgagaggattctccctttgaaggagtccctttgccgggtgggcgtcttcctggactatgaagctggagatgtctccttctacaacatgagggacagatcgcacatctacacatgtccccgttcagcctttactgtgcctgtgaggcccttcttcaggttagggtctgatgacagccccatcttcatctgccctgcactcacaggagccagtggggtcatggtgcctgaagagggcctgaaacttcacagagtggggacccaccagagcctatagaatcaattccttggactcacagccatgcagataagccctggccatctcagcagccaccgcacaacccccctaatgaaagacacgccctcctcccctctggtcacgtaagagaacatcttccagctgcctttttcacacccactccagccctctgccccagttttctcctcctcactagtctgtggctttagtagttcctttgcttgtaattatgggatgggatccaggcatagggaactagttgtttcatagctcccagtcaaaaagaaagtgagagaagctgttgggcagcgaacctactgtttaaaatcaggataaccacattaagcccaatatgccagttggcaccagatgctgtggacttggaatgaggccaacagggttcaccaggatgagagaggagagaggaatccacaggaccaccagaa
